United States Patent Application Publication US 2018/0305689 A1 - sequence listing, part 137

SEQ ID NO: 1888299 - DNA, 4001 bp, Homo sapiens
ttctactaccgaaggaggcagcaccgatgtttctgcaattggaggaggcggtataggccaattttaatcctccctctcctgttttttattttcaattggtgctatgtgtgggacaacagattcagatttttatgaacagcaacagaatagggtgctctacacaaagttggacaggtcatggaatgccattagacgacttgtcacaaaaggaaatctatcaaacaacgcatccccttaaaaggattatacagactgctatgcctcatctaaccttagatttttgcctaaatcagcaaacaacaaactctgcatgcaagtcagaaaaaaaaaaaaaaagctgctccaatcctataagcttcctgtgcctatagttttatgctaaattgattctgacatttcaggcaattaaaagtaactccaattaattcaccataattttggctgattgctaatctaaatgtccacaattgataggctagccctatacgtcaatgaggtaagcacagaaaggagtcatggttttgaggaatgcctatgggtttattctccaccatagcaatgagatgtcaactgtgattgtgctccataaaatatagaaactgtaggtagtctaacgctgcagaagaaactcctattaatataaagataaaccaattaatctaacctactgaacatcagtggtctgttaaggagttccaccagcgaggtgagagactggcaatttttttctctaaagagctaaataatgaatattttaggatttccagccacgtggtctcgcttacaattactcaactctgtctgcttctgtatggcaacagcagccacagacgatacagaaatgaatgtgtgcgctgtgttctaatgcaactatgggcactaaaatttcttgattttcatgtgtaacaaaacactgttattttgattttttaaatccatttacaaatgtaaaaatcacccttagccaggcgcggtggctcacgcctgtaatcccagctctttgggaggccaagacgggtggatcacgaagtcaggagttcgagaaccagcctggccaacatggtgaaactccgtctctactaaaaatacaaaaattagccggggggtggtggcatgcgcctgtaatcccagctactcaggaggctgaagccggagaattgcttgaacccgggaggcggaggttgcagtgagccaagatcgtgccactacacgccagactgggtgacagagcaagactccatctcgaaaataaaaataaaaataaattaaaaaataaaaaaaaccacttagctcactggctaaacaaaatcaggtaattggcctgtacctgacagtcaatttctggtcactaatgatgaccacatatccaaattacagtaaaggtacccaagagagacaaagattagagattagtgttacgatccccgttctgccagcactaggagacaagagttgctacagcccttccgcgggtttaaaaggcggtcgacgtccctcaacctcttgctatgcctgaaaacaaccgagtaaaaggcatccaaagacctgagaacgcaaggtttcaggaaaacaatcaggaagggcaaaacatggggcagccactacacagcccctccgtcttagggcacaggtactaaacgggttgtaagagacccaagtcacatccttcagaaacgtgctggcgcgggcccaggcagacagggattccaccccggcgaaggccgcaaatggcgcgaggcgggaaggcgcaggctccaccttcccccgtccccagatcacctacagtgacctgcgcgtacaggcaggctaggaccgcgggcgctcaaggcagacatcaggcccgccgacgtctccgcgccgcccgcccggccacccggagagcctgctgcccagcgcctggcagcgcggacaacctctctcggggaggtgatgacggtccctcgcgccggagggcccagggaggaaagagataagcagaaagacaccagggaagaacaccacgcttcggaccaacgccagccacagccactgagaagtcgccgcatccggcggcgccgacacacgtttccagggctcttgagagaccataccctgggagtctcgcgggatctcacttttctcggcggcgcagggaatgagacagatcgcgggaattccacccgcgccgggagatggtctggtgacttcgcggctcctcccacgtctctctgggcagtccgccttgcgcatgcgcaggcggcggtggcaaggctacggttcgcgccagcggccggcgctatggggctgagccgcgtgcgggcggttttctttgacttggacaacactctcatcgacacggccggggcgagcaggagaggcatgttggaggtaacgtccccacccatggcgctcctctgggcggggtcagtgcgccccgccccgtcctgcacgctcacctccccttgaccccacttccaccccggcgccgcgggccgctcttgctggttgaaacctgtggagcgtgcgggtgcggaggtggctggaggcgcgcgggccctgcgggtctgctttccctggcctggcggccgcttgtcacccaatctcgagccctggagcggctgctcgcaggtgccttggcgctcgggacgcggaagggctccgtgacggctgccacggtggcggaggtgcccgtgggcgcgggaggcgacagcaaagccgcgagaccaggcgctggtcccgcccccggtcagactgtcggtgtggagctcgacagagggtcgtgtcccccatgcgactttcggggttgctgggaggagacatggtagagttagccccagtgttgacccaagaagggacacggctgtcagtaccgagcctggacttaagccctgctttagagaattgtcgccgcagaacttcttctggcctccctggcggggtggtggtcaccgtggctttctgacacgtgacacagcaaaagcccgtgctgcgagggcatgcccttcctgaggcgctcctccgcggcactgcccctctacacgcgcggaggcgctttcagaccttcccgtgttccagccccagtccaccccggcttccctttctctaccttcagcttcaaggggaaagggaaggatttatcagatgtggaaaactcactttcaaaagctaattcatccaaacctgagcgccccgtcctcttcatgcttcatcagttagtttttgtgtccctggatcttccactacctcatccgttttctttttagctgcattccactcctgccgcatattcatgtttgccctatagttttaaaaaagctgtaaaaaggatgcctccctttgggctattcttcctgctgtagatgttgcctgtctctcttgacagccatgttttcccggagaaatctatacccgttatctccttgtctctacctcctatttattactaaatccatcgtaatgtcgctttatcttcaccgctagactgaaatagacttgctggatcactaggcattcccaaaatgccggaatcagtagacatttttaaagtctgtcttcatgactttactgaggcattccacacttttaacttgttggcctccacctcaggggtgccaccctgtgccatattgcctccagtatctctcgctgcagatgttacatatttacctgtgtgttattagtaagctgagtcctgtgcatttcaattaaattattgctttaggccaattcttgctgtaggcccagagtttgggctttaaaatcagacatttgaatatgaatcacagctctcccaaaacctagctgaaagtgcctcaaggaattaaccactcggagccttatatcttcataaaatgtgaattatattagtcctcaataaccctgtaatacttgggaagcccatggttgcagtgtccactcagcgaactatagcaccttccaccctcgtacgctgtctgtccaccactgcacatgccccgtgcatgtctcagttacagctgaactcatctctcacctagactgtt

SEQ ID NO: 1888300 - DNA, 4001 bp, Homo sapiens; identical to SEQ ID NO: 1562259

SEQ ID NO: 1888301 - DNA, 4001 bp, Homo sapiens
taacttttttttttttttttgacacggagcctcgctctgttgcccaggctggagtgcagtggtgccatctcggctcactgccagctctgcctcccgggttcacgccattctcctgcctcagcctcctgagtagctgggactacaggcgcgtgccaccatgcctggctaatttttttgtatttttagtagagatggagtttcaccgtgttagccaggatgatcttgatctcctgacctcgtgatccgcccgcctcggcctcccaaagtcctgggattacaggcatgagccaccgcgcccggccttttttttttttttttttttgacacggagtctctctctgtcgcccaggctggagtgcagtggcgcaatctcggctcactgcaagctctgcctcctgggttcacgccattctcctgcctcagcctccagagtagctgggactacaggcacccgccgccaccatgccaggctaattttttgtatttttagtagagacggggtttcaccttgttagccaggatggtctcgatctcctgacctcgtgatccgcccgccttggcctcccaaagtgctgggattacaggcgtgagccaccgcgcccggctccagtaattttttttttctttttgagacagaattttgctcttttcgcccaggctggagtgcaatagcacgatttcagtttactgcaacctctgcctctcaggttcaagtgattctcctgcctcagcctcccaagtagctgggattacaggcgtgcgccaccacgcccagctaatttttttatttttattttttatttttagtagagatggggtttcaccacgttggccaggctggtctcaaactcctgacctcaggtgatccatccgcctaggcctgccagagtgctgagattacaggtgtgagccactgtgcccagcccatccagtaatttttatattttgcagtctaaacctattcctaagtcagtgcaaccatccattactttcagtaagtggcttggtgccactggttttaggagattccttgctgaagcctttatacaggctcaatgctttctggggggtaacaggttgctgtcagttggaacacattttttgttcgtgtcttccacgtataagcttaatgctttttcttttcttttgtaaaaaaatttattttctttttttcccctgtaagtaaggatacaacttaatgccttttctatcttaactaagcacttatcacacactgtggctgtaacttttgcagtttgaggtacgacagcaaaaccagcatgaatttctttttcctctttcacaattctagggctagaagattcgttcttactgcagacctcagtaagctcagcatacgattttttttcttaagctcagaacttccacatttacatttaaaggaagcactttacagcttcattttggcatatccaaactgccagcattactactcttgcactttggggccattatatagtaaaatgagggttactcgaaccaaagcactgcaacaccgtggcagtccatctgataactcctaagctggtaagtaactaacagatggtagaggtatgttggacaaagggatgattcacattgcaggtaggatggaacaggatagcacgagatttcattaggccaatggaaattaaaaacttatgaactgtttatttctggaattttctatttaatactgtcagaccttagctggccaagtgaaactactcaaagtaaaatctcagataagggggacactaccgtacttaactggagaagatactgctttgcttctgtgaccacagaattgacaggttgaaattggaaacaactgttgccttcacgcttttaagacaacttcacatgaatatacatgtgaagttcaagcatggcagtatcccatactagcaataaatttttgagcagtgttgcacacttactgtcatttctcttactgttctgccactcctacagagcgcaggccaaggagactacatttcccagaatgccacacgccctttgaccccagctacagcaaaagacgcgccggggagcgcctgaagccggaagactatagcttcccggcatgcagcacgcttccccctattagatttgaggcgcggccggcgcgttgcccactgggagttgtagtcagtggcgcgttgccctgacgcctgccgggccgggcgtgggggcctgtgggaggtggcgcggccgggcccagctgcggggcggaggcggaggcggaggagaggcctgcggcggcagggagcggcgggactgggagcgggcgccggagccgacccgagccgagccgagccgagccgagccggagcgggcggcgaaggccggcgcggcgagcagcaaccatgtcggtgttcgggaagctgttcggggctggagggggtaaggccggcaagggcggcccgaccccccaggaggccatccagcggctgcgggacacggaagagatgttaagcaagaaacaggagttcctggagaagaaaatcgagcaggagctgacggccgccaagaagcacggcaccaaaaacaagcgcggtgaggctgcccggccccttcagacttgccacgggctccccccaggctccccgggcccggacttcaccttcatcagactcgcctcggggtctggtctgaccctggaactctccgggtcagacttcttgccgggtctgggaccccctccccgactcccttcaatgtctccccgatccctggacttttccatcgtcagacttattctgccctctcccctcagcctctctccaccccgccaggtcccttcagaccccaatctcacagcactttcctccgccctcactctgtccctttctcttccgccttttccttctcgcctcacccacctgcctagctactgcccctgcctcctcctcggctcatttctgcccccatcctagcatttctgtgcttcctggtcctacctgtgccctctcccgactcctcggtggaatctgtgagctgccccttggcctctcccctgtcctcttgtctcagaattctcgttgaaaagcctccttgctggagagaaaaggggactgggggagatgagacccccgattcctgctctattcacttgctgagtgaacttgagcaagttgctttccctttgaggcctcagtttccccatccgtcagccagagttcggcctctgttgaggcctaaggtgttttccagcgttgtgattcactttttgttgcctcgtagcttgaccttaccaaagtttcccgtggcgcaagccttcaccccatgactcaccgcttccccatccgtctgaaccagaaatagagactcccgactgctccccagtccccactactaggattcagggccccagtattgaatcttgaggcactgcttactttacttcctgttgtcgtatggctttctgggcattccaagtgctttgtgtttttcttaagtgagatgaatgtgaaaatgctttaaaactgtaaagcagtttagaaatgtttgctttttcttgttatggccatgtgagagtgaatcacagaacgacatcccttccccttgagaggggtttaggattgaggtaattcactcagaagtctgctagtgactagcagtgcgaccttgagctcatttacctttctgaaaggaaaatcatggatttacagtgctcagcacatagtaggggctaaatcgatgttttctccattctaataggagaacaaaatagcctatctggaggatgcttctctgctgatagtcaacagatattctggaaattctttttagtgcctgctgcatgcgctgtattcataggggtgaacaaaacacggcctcaaccctaatgggagagaagacagaaacaggaaaataaatgaagaaaatattgtccgggggtgataagtactaaacacacaaaaagatggtctgatagggagtggtggagtgggagggatgccactttggatagaatggtcagggaaggcgtctttgaa

SEQ ID NO: 1888302 - DNA, 4001 bp, Homo sapiens
caagtcattttctaatcttttctttaattactctgctattacatctgaaagatgacttctacctaaacattttatgcacaagaacattttgcattcatataccttaaaattaatttttcctccacagctctgaatacttgctgaaagctttcacatgttcaaagcattcatgtggtttcactcctatgttaattttctaattcctattcgttataacctacaaacaaatactttcctacatgtattaataccttagtgtttctgccctatgattttgctgatgtttgacaaatttgccttgaagatgcaggtttctgcacatggagggtgttgataatagttttcttcttgtgtgttttcctttgatgtttggtgagggctgacctctggctgaaggtttttctacattcattacattcatagggtttttcccctgtgtgaattcgctcatgttttgtgagggctgacttttcatagaaggttttcccacactcaggacatctgtaggatttttctcctgagttctctgatgcacgacaaggttggatttcacatagaaagatctccagcactcattacatttatagggtttctcaccgtgtgtgagtccttcaatgttgagtaaggtttgatttcacacagaaggttttctcacattcattgcatttatatagtttctctcccatgtgagttctccgatgtactgtgagggctgatttctggcagaaggactttccacgttcattacattcatatggtttttctcctgtgtgagttctctgatgttcagcgtagttggacttcacaaagaaggatttttcacattcattacattcatagggttttcttccgtgtgtgtgtgctctgatgctatctgagatctgttttcttacagaagctttctccacatttattgcagtcataggttttctctttttttgtgagctctctggctttgtgtaagttgtgacttcctacttgaggcaccccactttcattacgcccattattttttttccccaagtgccttctctgatgttgagtgtgtttcaacttctcaaagaaaggtttctcacatttattacctttacagtttttctctcttgttttaatcttgttttaattctctgattgggagtgaggcaagattccttcaagactctttcactatcattacacttgctgggttttcctgttgtgtgggttctctgatgttgagtaaggcatgctttttcatgaaagaatttcccacatttcttacaatcatagactttctctcctgcatgagttctctcattttgagtatggtataacttcttcaaggctttctcattttctttacactcatcaggtttttctcctgtgtacattctttgatgttgggtaaagtttgatttcttgctaaattttccaaattcattacattcatagtgtttctctccttcatagtgttgcccgggcaacactgcgagactccgtctcaaaaaaaaaatactgacaatacttgtatagtagttactatataacaggacttgttctaagtactttgtatgtcttccttcatttaacctttaaaataaagccaagcatagctactattatgacttccatttcatagaataggaaagcgaggggaagactgagcaatgtggtggagctgggctttgaacccgggcaatccggccccagatccattcacttgagcactgtgttaatatttttcacttttaaaatgaggcacaattacataaccgctgaaaagcttccccgtactcctataaagtcaagagtaggtagtgggtagcatgtccctaaattccagatgtggagatgggtggggtttgagggctctgcagaaatctaggaagaggggttgaagaattaggggcatgggaggagtttccgagaggagtggtgatagtatcttccccgtcatgcgcaccaggtactcacctgggagttcctcctcccccgcagccggcctcctgcccaccatcctcagtccagctcgccatcctcagcccagctcacctctgtcctgtgacagctggcccacaccttcgttgaccgacggttcttggcaacctccgacatgatgagttattcagggcggaagaatcgggaattgcttcaagagcaagcgcttacagacttgcctgttttcccagacgtccttggtgcagctgtgtgcgttttatcagagggtgggaacctcccaggcgagattcctgcttctggcgtcccctcctcacaggagcagggtgaccctggctggggagagagggaataaattcagataactgggaccttcagccggttccaactctctcttggagttcactatctcctacaacagaggctttcagtgtggaccctggactggcagcatcagcatcacctgggaactaaatagaaaggcaaatccttggggctctccccagacctactgaatcagaaacgctgggtgtggggcccagtcgtggggtggggtttaacaggcccttcaggtgatacggatgcatgcgagtttgaaaaccactgcctgcaaatctcccttgggaacctgagaactgtggagggcacaaacagatggaccttgagtttcccagaggcctcagttacacagtacccccagggttctgcagagataccaagaaatctccaagatccttaagggaaggctcagtccttacacactccggttggcccatagagacatgccactctgctaagtgctgtgaagcatgcgatttggaaataaaactgaggcttgcatcccagatccttcacttgctagccatgtgacttcacctccagagtcttggttttcttctcagttaaaatagggtgggtaacaccgactttacagggggtctttgagaatcaaatgacacaccgagtgaaaagaacagtgggaaaggcaggccgcatttccagagtgcttagaaaatgtcaggacctgtgcggagtgctttagaggtgctctcttattcaacactcagaacgaccctgaagcaggttttagaaataacttcattttacagatggggaaattgagtcttagagtttaggttcatcactgtgttcatggagagccagtgacagacctaggatgtgaactcgtcttactttcaaactcaggctctgcatctgcaataaggcttgctaaggtaggaatgatagtacagcataaagtaaactttgtaagaattgttctcatccccgctggagtagtgggtttgaccagctgatgaatggttgcccagggcacctgcgagttagaggagcttctggaaacagctcttttaacatgtgaatgccttttcccggagccctttattctgatcaggaaacctgttccctccgcccttatcttcttcgtggcacctgcagatccgcagcggacctcctcctccgtcacttgctttctagacggacagatgcagggcagactcgggaacaagtgccagagggtctcaacccgcgtgggatttgcgcaagtttttgcttccacaggctgtgaacacaaacctaccccaagccccgcaaagcaaccctccaagctaggctctcacctgcggagcgcatcgttagtgcagcacctggtcgctgagttacgcgtagacgcggaggctccacgctgatcagagacaggagtaaggaacaaggaggaagtctgcacatgcgcagacggggctgccaaagaccggttcccggggccctgccggggcgatccatcaacttccagactccgtttcccacaagtctccgcgcccccttccttaaggaacgtctgaagagtttctggcttacttggcaagttgggggatttgtggtccaaagtcatctttacttttatttggagccctagttcctcataacccaccaggtaggagatttgcatgcactccacttacaatcagtgtcacttcagaggcaaagctaccgtgagaaggaaaggagtttgtcaactgcacatctgaaaacaaaattaatgaaag

SEQ ID NO: 1888303 - DNA, 4001 bp, Homo sapiens; identical to SEQ ID NO: 1562266

SEQ ID NO: 1888304 - DNA, 4001 bp, Homo sapiens
gggccagctcataataaacatgtttcggatgactgactgaatgaatggatggatgctaatcactaccaacaaaaaatatttagaagaatctattcacagtcaccatgttagccataaaaattcaattaaaaaggtatgttcttagcttatagttacatagggatttttacctgagatctgttgtattaaaaatatgaagtcaatatgtaagtaaacagaggtttttttatacattttgaagccatcaatttttttttgagatagtgtctcactgtgttgctcaggcttcagtgaagtggagcgaacatggctcactgcagcctcaatctctcaagctcaagtaatccttccacctcagccccccaccaagtagctgggactgcatgagcacgcctccatgcctggcctcccagagtgctgggattacaggcgtgagccactgtgcctggctaccaccaactttttttaaaaattgccatcatagaaataacaaatagagaatgaaattaaaatgaatattttcaaccttgtttaagtggattcctgatctatgaaggctatcaaagttgaataataatcaaggaaacaaacggtgtttgaatactaaaggaagagtcgactaaaatttggggtgacaaaattgagttttataatttttcaactacaagtttataatttactgcctttgatcaccttggctgttacactaatgatattaaaccagtttgcgcaattgagcctgccatctctacggtacagtaaaaagaggcatgctatagtgatggagctttttcacattttcaaggaacttattcagcccttctatcttatagatttttataaaagtactttacatataacttaattttaaataaatttatagtttgattttgtatgtgatcaaaatagatgtcacatatatttgacactcagagttactaaaaaagccaggattagaacaagtcccctgaatcggaattatatattttttctttgttaggacaacagggctgtttctaagtccatgtcttgtatagtgatgataagtgaaacaaatggaacttttgttaggggaattgttgctaatacacaacaactgtagggctcatttctctgactaccgccttagcacgtgactcccattgtagaagcatgagttatagtgcgccagaggagagcacaattaagtgtctgaagtttctggatttgccccagacctgggtcccaaaatccacactgagtgttattaatccccaatgctctgcggttttaatgggatcactcaatggtagtagaattctgctccaacctgtgttccttcagcgatgacaggcccatccacgctttctgcttatgggggagttacttatctcttcaaacaaagatgcctcttcctctcctccagccctaccaagactgagctcctctggttcaagttgcacctaccctgatctctgatctctgctctgaggattgagtgtgtacgccggtctgtctgtcccgtgtgtgttggctactgaaacaagggctcgtccgtccacgttcagggttcgaggactcacctctccccacttccactcctgcacccacagtggtccccacgacccgcctctcctctcccctaaggaccagagaactttacctgtgtatcaagcgccccgcggacccgctgataggagccgcccgcgttctgcgtactggagagcatggtccgcggggcgcctggccgctggctgagagcccggctgcggctgtcacttcccttggcagcggacagtcagttcagcgccagcacggtgggaggacacgcactccgccccggcagagtcagctgtcaccttagtccctgcctttcagtcctacccagtgcgcctggggcggtgcgggcagtcagctttcaccttagtccttgccttccagtcctagccagtgcgcctggggcggggtgctggtggaatggggttgggcctggaggaggcaaggtgtggagggagacgggaagggacggttctacagagtcagctgctctctgcctggctgggagtttgcacttgactcagtagttctcccttttccatttcctgttagaaacctgtgtctcttttatgacagaagcacaaagctagtttctcgctgggatggtatttatacgtttgtaaacaatgttacagctgtctcttaaaaaaattaagaataagtgtcagtagaattttaaggagcaaatttcttgcaatggcctaaactttaaaaacaaatgaaacgctccccgtggtattagaaaaccttaacagtatactgcatctcatctacgttttactcttcaaagtaactacgaagcaagtaagtaaatgaaaaacttcatggtaactaagatgaacaaagaattaaaggtgacacatgatgtacaaaggggaacataaaaattaaagaattgcattctgatttctagtaaatattaagaaactgcgagcgtgtatatagaagtaaagagtatgcaacaagttgctttgaggcagatacttgacacatgatgtatgtcattggtttgatgaagcattttgttttatttggcacctgaagcaacaaaagagggagaaatattagaaattcctaaatgtaaggataaagataaggccatgtagtatattacaaggatgggtattatacttcaggacaaggaacactccgtgtatttcctgggatttatttgactgctagatggagagaatgaaggatttaggacaggagaagtcctgctttctggaagaaggggcataaatcctacctggggaagtctgggctggccatagaatgggtgaaactgaggaaccagacaacttctacataagaattcgaccagatgataccttatggaactgaagtcctgggaaatgtttagaacactattcgtcttcctctcttaataccatgcttgtttggccctatgcaaggaggaagttgtaggtttaactttaaaaatcaacatgtgtgtgaagaattaagggtgcagctcaggacttagaaactttgtctcatttccacaaatgtgtgcaccaatttgggaacacctcgctctcactcagcagccacagcctgaagagccctcctcctatccgcactttcaaactactcactctgtggattctccacggaaaatacaaggtcttctagtagaatgggccttgctttttcagatacagttatgaggaaagaaacaactttgaacctgtgcagggaggaggaagccaggaagaaaaagaagcctaaaaacaacgcaggcaccaaacccagcatttgtctttgacctctaggaatcagtcccctcaggtaatgctggtgctagaaactggaagcagaaagatttctacagttactcagctcggtagagatacctggctccttgattggtgggagaagggaggaatgcctcccaaaattgtctagaagtaggggagggtgatagatgtgtgtgggaactatagtaaagaagtccctacctaaggagattggggaaaaattctctgggaatccctcaaaatgtaataaaaattacgttttaatgtcaagtttctccattttataggaggtgcaagataagactgtgcaaatgagcaggaagacatgaaggtttgtaagaaaaaaactgagttttcaatgcctagttaaggaaaactgggtgaaatactcagatttgcctaggaaatagaaaagtacaaaataagaggatcagatattcgcaaaaccttacaacaaagctagaattctgactcgctgatttatcgtgctagctgggctatgaaagaaatacttttgttttccaggaaaaagaaaatcatgagacggtggaataaaaggatatctagattgagtaatgggtggggcatattctgtgccacaatactcaatgtttcggcttgttggaaagattcattctgttgatgctgtataagttttgcaggtatggcacgtcatcctttctggctggtggaggagagcctcat

SEQ ID NO: 1888305 - DNA, 4001 bp, Homo sapiens; identical to SEQ ID NO: 1562274

SEQ ID NO: 1888306 - DNA, 4001 bp, Homo sapiens
accccagctacttgggaggctgagcgaggagaattgcttgaacccgggaggcagcggttgcagtgagccaagattgtgccattggacaccagcctgggcaaagaagtgagactctgactcaaaaaaaaaaaaaaaaaaaaaagaagaaaaagaatataatgaattccctctaaaatgaaaacacacttttcatctgaatatatatatataatatagttaatatttttcaagtaagctctcttttgttattttttttctgaaacacaggcagttttaatttttagtttgctaaatcaaccttcagaatgcctgcttatgaggtcattcttaggaaggcttttgtcaacataaagtgtacctgtaaaataagcgtttgtgttttcttccggtactttactcattttcatatgtaaaaatttcaatctgtattccatcaggaactcatgtttgtgacataaaatttcattagttttcttcaaacagcagacattttttcgttaataattcatcctttcgtactcattaatccttacgtatatcttacataatttcagtgtttctgggttgcctattctgttctatgcgtttgtcttttcagctgttagtaaacaattaattgtagaaattaatagcacattttgatatctagaggagcaagtgttttttcactccattatgaaattttttaaaatgtcatcacaatagcgaaagacaggaggtgtaatacaaaaatcttaaaaccttgatattttcattcggtctatgtaaaactgattaacacagaaagagctcacattttgaggaaaatgtgccttcccattcaagaacacagaagccacctcccacttccaagtttctctctaagaaccttcagtaaagaacctacctacacagggggatacggatgtaaaacggacagttttatctgagaacttttcgcctactgaaaataactcacggtatttttgacaggggaatgagttctctcattaggcacctcctataatgtatataaaccatgttttaaacgtgtacgttaaaattaacaacactatatgcttaactttgtgagttaaatcactcaaattctccaccaactgctccagccagggaattatgagggatggaaaacagctgagggtccgtttggctccgccgctcagagggtgcccggcgacctccaaggcccccgtcccaggggctgccggaaagccggacctggggaccccctgccaccccgggctgagcccccgctacctgtgctgcttgtccagggcgtccaggtctccgctcctgcgcgccagacagcgctccatctccgcggcgtcgcccttgacagctgccttgtggatcttctgcagttccgagtaccggattcggtacccggaacccgtgtacaggtggtctatggtgcccaggaccgtctggcccctgtggctcctgaagccgaacaacttcatggtggtgacttctcagactcccaaccaactgctcttgagaggaggcagctccctgtcaccttttcacctccccgcccctgcccccgccgacccagccccaaatcccctatccaaccccaaatccgcaatccaacccccaatcggcgatcccaaatctattatctaatccaaaatccgcgatccagcccggtccaccacagccttcagcagcgacactcgcagcctccgacctctcagaccgagtgagcctcgcaaagcctttgggcgcgcgcctgcaccgcggtggccgcccggctcccggaagtcgctcggaggcggcacgcactggcaggtggggctgcagctgcgagagggggcgggcctgggaaccaccgcgggtgtgcgggccttgccattctcaagattcctgcggaaacgctgtgcgctggctgcgctccaggagcaggagcaggaggaggtcgccctctagagtctggagtctggggagaggaggaaggctccttctttgtaggccactggtgttgctgaaacctctgccgccacctgcagggcaccccctgatagcgcccctaacccgccgccagctattggacccgggatggcgcccctaacaccctcccctcgccgctgcagtgtagaaacccaatagcgtcccgaacccgtccccgcctcagacgttgcagcaccagataactcccccaacctgccccctgccgtgggccatgcagccacggattggacccccaaccaactccctcgccgctggcagtgacgccccagaaagcgctgcaacctgatccccgccgtgaatagtgcagccacggatccttaaggcccccaacccgctccccacgatgggcagtgccctcccagatagcggatagcactcccaaccatcccccagccgcggggtatgatgccctggatagcgcacccaacccgcaccccccgccccgtggacagcttagcccccgacagctcccctaacccgtatgccactaccgagaatatggtcccgatagcgcaccaaacctgactcccgccacaggcagtgcagcagctgatagctcccctaactcgctcccactgaccacagtacagccccctaatgatgcacacaacccaccacacctccccacctgccaccggtggggtatcgcccccaaactgccccttgccgctggcagtgtagcccccaatagcgcacccaacgcccccctctatcatgagtagtctggcccgcgatagggcctgaaaccaccccctccaatcacctccctgtacccccctttcccgccccccccccacctgcagtgtaccaccggatactgcccctaacctatcccctgcggggggcattgcagccccagatagcgcccccaacaagtcccccgccgcgggcggtgcagcccccaaaccacccccccaccccactatgggcaatgaagccagaccagtcagcaccccgaccagtccccccaccccggcgccgccggcagtgtaaccacagtagcggccctaacccgccccctgtcgcgggcagtgtagcacccaatagggcccccaaccagccctactgctgctggcagtacagcccaggatagtgcccccaacctgcccccccccccccccgctgctgcaggcagcgcagcccgggatagcacacctaaagtagtgacgcccggaataacacccctaccggcccccggccgcgggcaatgtagccccggatagcgcacctacccaatcgcctttctacgctctggccggctgcagtgtccgctgctgccacccacagcagcgaggcgagccagcgaggccagccgcagtcccacagactctagcctccagcctgtggtaggtgcctcctctttcccttcctgtatccaggcaaggagcagctctcgctgccagccgcctgtctccatcaccgccacacactatgcagaggcaagccctggtgccacaggatccagcctccagccccagcgtgtggcgggggactccgctttcgccttctttaaggtgcgaacggaggggttgggaacgctgaggcacaacagcctgcaatggcgcaactcccccttagcatgctttatatactgaggttatgcaagccaggttcctggacttcatgttctgattggatgagagaaaaccgctaggcctgctagttgggggcactatcccagactgtattgccggcagcagtgaggtgggttaagggtgctatccagggctgcactgctcgggggtgcgggtggggggggtttgggtttaggcactatggggtgctgcaatgcccacggtgcaggaagagggggaagtttgggtgtgttgggtgcgctatggggtgggggggctacactgctggtggcagggggcggggttggttggggaccatatcaggggctgcactgattgctttagctaggatttccaatactatgttaagtaacagtggtgacagtgggcatccttatcatgttccagatcttagaggaaaagctttccattttcccccattccatatgattctag

SEQ ID NO: 1888307 - DNA, 4001 bp, Homo sapiens
gcttaattatccttcagactgcttgcttctgagcttcttagaaaggtgttgtcaacataaaaatgtacctgtgtaaataggcatttatgttttcttctggtgcttttatcattttgtatattaaaaaaatttaatctatattccatcagaaatttactttgtggcataaaaatctagttttctccaaaaagcaggcatttcacttatgaaactaattctttccctactagtataaagtgtgagcattatcaaattctgaattcttagatatttgggtgtttctggttttctactgtgttgtattcatttacctgtcttttcagctgttatcaaataatttgtgatttatttatttatttttgagacagagtctcactgtcgcccaggctggagtgcagtgatggaatctcagctcactgcaacctccgcctcccagtttcaagcgattctccctcctcagcctcccgagtagatgggcttacaggctcccgacatcgtgcctggctaatttttgtatttttgtagagttggggtttcactatattggccaggctagtcttgaactcctgacctcaggtgatccacccacctcggccacctgaagtgctgggactacaggcatgagccaacacgtctggccctttttttttttttctttttcaaattttatttatttatttatttatttatttattattattttgagacggagtctcgctctgtcacccaggctggagtgcagtggtgcgatctcggctcactccaagctctgccttccaggttcacaccatttctcctgactcagcctcccaattagctggggactacaggcgcccaccaccacacccggctaattttttgtatttttagtagagaccgtgttagccaggatggtctcaatctcctgacctcgtgatccacccacctcggcctcccaaagtgctgggattacaggcatgatccaccgcgcctggccatggcccattttgtgcaaattaatagcacattttgaaatctagaagggcaagacttttctactccgttacaaaatttgttaaatgtcatcacaatagtaaaagacagcgtgtgtaattttaaaaatgttaaaacgttgataactttatttggtttatgtaaaactgataaagaacttgcatcttcagaaaaatgagtcttcttaaattcgaaaacataaaccatcttcccacctcaaagttaccttctaaggtccctcagcaaagaatatatttacatagacattcattgatattgaaatggttactggactttatccaaaaaatttttagccaagaagttaatatattatgggaattatttcattatgcaccatttcataatgtatctaacattatcttttaaaacctgtacattaaaagtaaaaccctgtatgtacttaattttgtaagttaaatcactttaaaattctctacacagtgctctgtgagaggaagtgggagtgaaggagaaagcagctaactaaagtttggggttgattttaaggtggcctgggccctctgccctgcagggctcccccatccaaggcctggggggccttcccgggaagaaaatcaagacctcggggccaggacggccgccccgctgcccaccactcctccacctgctcccctcgtccccaggacccccagcccccactctgaaggggcgatcctcccacagcctcctcctcctcctgcagccccggctcaggcagggcctggtacctcttcttcgcatctcttatgttcaggtccattgtcgtcttcttcatcatcctctccagcttccaggcttggcccgggaggcagctttgtggatcttcctgagatccccatggtgaatcacgtaagagtcgttgttggtgtagaccagctgactgaaggggcttgggcgctctgggcccgtctggcccttgacagcggcggcacagagcctctccatggctgcagccacctgctagagagagcccgtgcctcccgctgctcgcccttccccagtccccgccgctcgccctcgcccttcttcagtcccgcacccgccctgacacgactagcaatctcagtcggccaagcttttggacactccagcctctccagggagaaaatggctgcgcaaaaccgttaggcagctgagcagaaccgttaggcagctgagcagaaccgttaggcaacagcgcatgcgcaactcagcagacctgggaggcacgcgaggcaggaaaccgccctggctgcgcttcgcccagcacggcgtgcaggtggcacctgctactgaggcgctatcgggctggcagggctccttacagcggaacgtggggggctccctgccacatggcctgcttgacagagccgctcctggcccctcctcaacctgagatccaggagctgggccctggcgctgggcatcgtgcagcctccagggtggcgctgagcgtcggttcccggcctcctgcagccagggacccaacccctgacttaggctccctggaggcttctggcccaagtatccgcgcggctggtggcgctggcagggtcagggttgcagcctcttctgccacgtgccatgttcaggtggcagctgcagctgagcccatggtagaggctacagggctgggcccagaccgctgagcatcgccgagtacatcgcccttccacccggggctctgctcttcctcggctcgcgctggcagcgcaggcttgcgaccactgggccctgtacagctgcggcgacgaggctttgcagcaggttcccacgatcctgcaactgaggtcccactgcctgacttaggcgcagtggcggtgtccgaccctggggttcgcctgctggtggcgcggacaggttctggggttgccaccgctgctgccaccttcaaatgccagctgcagctgagcccacggtagaggctgcagggctgggcccgacggccttagggtagccgtgtggcacacgccctcccactctaggccctgctcttccttggctcgcgccctgagcgctggtttgcaggctctgggcactgtgcagtcgccaggatgcggctgagcagcaggttcagcgccgcctgggcccagaggggaagaggggagtttggggttgcttggccatatttgcctgtgtgccaagtgcaggtagcggcaccagttctgacaggcacggatggcgggtcccgtttagagggcttcaaggttcctgagagcgcccgctgccaggcctcaggatcccttcctcgttgaccagcatctggagtatggcagtggcgctgggtcatctgcagccatcctggatggggctgagctgcagttctcacccttggactgagagggaaactcggctgagtggatcagatggagaaacagttaaattgaacttatctataaagacttccaggctgggtgcaggacctcatgcctgtacttacagcactttgggagaccgagataggaggatcacttgatcccaggagtttgagaccagcttagacaacacagggaaactttatctctataaaaataaaaccaatcagccaggcatggtggtgcatgcctgtggccccagctacttgggagattgattgtggcatgatcacttgggcctgggagttcgtgggtacagtaaactgattgtgccacaaacaaggaatgagaggtcctgttgctccccatccttgacagcatttgaccttttcattcttctggattttggttattgtttgattgtttgtgccactgcactccaagcctgggcaacagagactctctctcaaaataaataaaagacttctagtcactatatcttatctatgtcgaattgtttacacatctagcttgaagagttaaaacccacagcgccctctgattatgtgatagggaccatgtgattaaagtgggtgaccatgttcttgcctccaggggtcccaagtcaagggatgggtccccagctgcaggagggtgggaatggatgctcagcaccatcccggaggctacaca

SEQ ID NO: 1888308 - DNA, 4001 bp, Homo sapiens
gtgagcaggtacgttcctggtgcagggtgtttgcctttgctgtgatctcatctgcctggaatgctccctcctcatttctgccctttcaccatggggggtctcagctggaacactgtccccatgcagaggcccttagccctccaattcgtttcccttatccttgtttttataccacttactagcctaattgaaaacaagctgctcaaatgaagaagtcattgtagtataattaaattactctggtcttggaaacaaaaaatggaggaccctcctcccaaggacaatttcagggaagaagcttccagctccaccaccagcacccaaagctgaaattctacctgaacgattccctgatttttatacttggagcgcaataagtgtattttaactgtttacatttaacatataaatgtaatttatatgtcggtattgacatgtatccaggcttggcttctgtggcccctgctgagactggccccctgcccctcagagcagagctctaagtctcagtctcccagggccctttctctgggtcctgcaccctcctcccccaccacctttattaaaaaaacacctgccccatgtcatagcccctcaggtgccggctcaattgaggtgtccgtagctggacagaggtctgatgtgcttcttggtgcaggacgtgctgggtgggaaaggaggaaagggtgggaagggagtggggggaacagcaaccggggactgggagggagagggcagggggcaccccggaaggcaggcaggctcacctcctgtcccctctgggctggtacccaccccacttgatgctgcctgaggcggcatcctgtctggccctgctcagctgtgagtgtgccaggcccgtatggttaccccaggaaacgggagctgcacaaagccacgtgcagaatcgcgtgggagtttaataatcccggctggtgattgctgccccacggctgcgttcctctccatcagacccctcataggcttccctccaacccgacgctcaagcttccgaggcctgtccgttctctgaagcgattctacaccttttaggctctggactccatgttcctaatttgtttttggagcggggggtctctcctcacttccctattagctcacgtcatctttgtgcaagaaggatcacatgtcagccgtggggaagaaagggctggcactgctctgaagctgctgaagttatgacattaaggaaaataagccagcttcattgggcttggggtaggcgcctgagcattgggacttttaagagtttcccaagagattttactgcagccagggttgaagatcactgaattgaatgatatgttctcaatcccttaaaaaatgtatatttgtctacataaatatatatctatttttcctgccagagaaaggtggggtcccactggcttcagctcctgcgacccctcccccacccccgcactatggctgtggtacatcagtattcatttacctgggggccgcctgtggctgtgtgacccaggacaggccctctgacttctctgtgccggagtcgtctcatccgtgaaatgggaatcgtcaaggcatctacttcactgggtcgtcactgcgcagtcccatagcgccccacgccttgcatgactttggctcattcctcataatcaggccttttgcttagcatctctttttaaaaacatctggttgtggtggtggtcgggggcggtgttctttccgggggcatctggggtttgagaagcgaaggaccccacagccttccctctcctgtgagtgttttcaaagttaactttgggacggttctcccggagggccagacagaaactcaaagaaccggcctcaggggatctgagcaaattccaccgtcgtcaattcctggtgctccgtgaaagatgctctttccctcggggcttcggagccggagcatttgtagacagttcctgcctcttcactcggctgccggcctgggggtcccgtcgcctcccggagccgcccgccgcgtcccccagcccgcgccgccctgcgcggcccgccggcctcctcacctatcagatttcctgtgcgcatcgccgcgcgctcctcccacctcctaaatgcggagcggagcggggagcaaaaccatcctcggcctggacccagcgcctccggggaccggccgcgcgccccctgcgtccgcgggccgggatgcggctctgagccagcggcggcttccagcccgactgggcctgccggggctgccccgcgcacggtaaggcccggggctggggcgcggggcgcggggagcgctggccgggagcggggggccgggtcctgcggcgcgcgggggcgtgggtgccgggcgcaggggaccgcggcgcggccgcgcactgcaggcgtgctcttctgttttctccttcgttccttttaaatgaagggaaagaaaattgttacagaccaaatgtcatcaaacttggtgtgaaaacatactcatttataaagtcttatcgctactcacgccacgccccgaggaagttgtgttcctgggtgggcacggtgcggacacaagacttagggaatcagcactggatggaaacatcgcacaattaaaaagaatggcctaatcttaagcaacaacaacaaaacaaactctgaagcaccctgcggcaggcagcttctgcatcgtgggggttgtggaaggggctgatgggcaggatcatgagaaagacagcttttcattaagagatgacaccaggggttttgactttgggaggaccagaagggagtctgtaggtcattgctaaatacagtgaggtaccttaagactcagtaatgaacattattttaaaaacaatatctgtaccgtgtgtgtgtgtgtgagtgcgtgtgtgtgtgcgcgcgtatgtgtgcgcatgtgcacgtgtgttctcacacacaccgcaccataattttccttcgtggttttgtttcgttttttgtttaggtttctgactcttgagggataaatacagcttccaaataatagcaactgaatctgcagtaatcagatgttggaaaattatttttcactggtcctttatgttagcatagcaaacttaagtctttgttatatgtggccacctattgtaaatattaacattacttctcatctccacatcttcctcatttactatttttgtctttttcaaagagatggagatggaggaggagtagaatttaatgaagatacagatctggggaagtgtcatgtttcgttgggtgcttggggtaggcagtggctgctgttgagagtattttacagatgtaggaagtcttcggaggggcatttctaggtaaatgcatgctgattctgcccatctttacatgtaccttttgtggtgtttcctctttaaaacaggtgcgtgtaatatgcaaatttggtttcaaagggagaattttatatcttttaaggaatgattgcatgtgtattaagtcttgtttcctatctcctttcattttttccttctcttttaaagtcagttcgtcttaagtagtttctttgttaggtaaatttaataataataaaaatctgacgtgttcaggaaggagctcagtgtgaggcccatggacgttacctcctggagatgcaaatcggaaagagatgtttcactatgctgtcacctcagaagattgacaaggacaaggttgtctttgcaaaggttcttccagacaagggcatcccttcttttgtaggatttctaagtaggtactttgaataaacaagggccacctttaatagttggttttatgagattctgcatacctcaccatggccaaacttctccacacggatggtaaccttcatccatgcagcagaggacacgaaggtgtagccctccctcctctgtccctggacagctacagattcaggccagttcagacgggtccaagaagagtttcagggtctccatcttgtccttcctgggcatggaactgagcccagtactggcatcccaggggatgccccccatgcatgcttgtccatttaa

SEQ ID NO: 1888309 - DNA, 4001 bp, Homo sapiens
aagggaagatgttcctgtttgtactcctgattcaagaatttgcattctaaagaatcctgacccatctagccaatgaactaacaattctatctgagccaggctggcctcagcactcagtgcaagccatagagaccacaggtgggtgtgcactatggactgagggacagagtagtcctcttagtatacacataatcagaaactacaagatataattatatgttctcctctccctgaaaggaataagacaatggcagggaacttttgaaatgtttaaagcattgaaaaaaaaaattatttcttctatatatatttattgacaaaattggcattttcaatttttaaataatttttaaataaaccattgatttgatttgattgtaaaagtgctacttgatcatagaaggaaatggcatataagaggaaaaaaagtcacctaaaattccaaatccaaaggcaagcacattttctttttctcctccgaagtttgtatctaagtgtagtggtggcagaactagtagacaaggatgtcactgttaactgcacaacaccattcaccccctcactttctaaccaaaccctgactgtgctcacgtatctactctcaacccgaggccatcaacttccaaggaagtagaccccagccacaacctaagatgaatcacgatccatttatgccaatcacagcggtactattccccttgaccttgactcatttaggcactggcttgtgtgcaatgctgacctatgaagagaggagagagggacaaggtagcatctgctatgaggctttagggaaaaatttttctcactgatagcaacaacctaggaaaaaaaaaaaaaaagtgtgtcttcttccaggaaacttaagtcatattttcttgtgacacttgaacttgtggcagccatcttgcaaccataagaggaacttgccaaggacaaaacaaggacgttgcctgcatcttcaacctttttccattgactggatttttaaatacacacacacacacacacacacacacacacacacacacacactcttcctgacccaacttctccctactaaaatctatttctctctcctcttattcacagctaagcttctcaaattgagttgatacaagttgtttcctccactaacctatgcattcatcactaaacatccctaaggctttcttgatttcccaaaacttaggcttttaatagtctgtggttccacagcacattttacatgttgctactatagcatgctatgggaatagtttgcctgtctattagactgtaacttctgaaaagttcattattgccaatatctggaaaagttcctggcttataaaagcctaaacatttgtttcataagttaaatgtaaaccaaatgcctaacatgtaggaatgccacaaatattgacatgaatttagcaaccctactgtccacatacactgaaagttaagtatgcgttcatgtgagttgggggagaacagcagcaggaacagggagaaaagagaacacagtgccttagccttgaaacttaaaaacacagtttttcctcactcttcagagattagagagctgttccaagctaattcaacaaaaaagaagaggctgtttccacactggcatctgagaagcagtggtaggatagctctctagaatctcagctcctctgctatttgtgaccactgttgccaacctgctcaaagaagaaaaggtggcccagcctttctggggtctggaaaaagacaaactagtccaaagacaggaggccctcagagacaaaatatactttttagaaatctaaaaaaaaatacctatagtttgaatagcacttgtgacagtcttttaccacaaagagacaacgaagtagggaaagttaatcgtaattacatgctcatccccaagcagcatttcctttgacttctctggatgacaactgaaactgaaggcatgccagcaaagaatccgagtgagctgggcaaaatgctctctacttcaacagtcttttgctaatgtgaaagaaaaaaaaaaaaacaagattacaaaagccaaaagcttttttttttcttacctcttttaacctgaattatgactcttacctaggggagtacccaaggccaggctgagatacacctcagaaaaacagttgataaagagacatcaggtacactggaaattgaagaggcctgggccaagatcagataaccactgtacattttttaaaataatatttaaatataaaatacacattaatgaaattacaacctaataaatttattcaatcttttatagccacatattttataacaaaactgtctgatggatgagcaactgcactaatttagctgacttctgaaagacgctggcacactttagaaaatgaataaggcaataagcatgtgaagatatcagtaaagaggaagttgggtggataggtcgccctatttcttcaataggaccctcaggagttcacctccttaggacaaaaacacctccctagggtcctggaggcagacaaatcaataaaaagaagagataactggaaaaaaggtgtgtagggggagggagggacatttcccttactatactatttactctacagccttagaggtaggctattactaatgtccaggctacaaaggaattgaaaaccttttttagtgtaattccactttaatgagggatggggaagtagagtgcaactgtccactgactgatctgatctaaaaaaatgataaatttaaaaagtgaaaaaaactttacctgaaagaaactgggaataattaggggccaggcacagtggctcacgcctgtaatctcagcactttgggaagccaaggcgggtggattgcttgaggtcaggagttcgagaccagcctggccaacatggtgaaacccatctctactaaaacacaaaaattagctgggcatggtggggggtgccccataattccagctactacggaggctgaggcagaagaattgcttgaacccaagaggcggaggttgcagtgacccgagatcgcgccactgcactccagcctgagcgacagagtgatactccatctcaaaaaaaaaaaaaagaaaaaaaaaactgggaataactagtttattacaaaaatattagtttgaacgatgactttcctaaggcactgcaaaaagtgtttacatttatttttcaaataacatgatctgcacaaaatttcagctgcattaatgtaacattttctaaattgtgcccgtactgagaaggaaccagctgccagccaatttcactgcatgcccactgtgtttctacactggtcattaacaaccaagattctggctaccactatttcttcttcctcacgtttgcttcagggcagttttttattatcctatgaatatttgaatattttctaacctgtccctgatcctaaataaaacaaagaacctgttctagaggagtgatattcaaagtattagacatataagacatttaacatctagaaaaccaaattatattttgctcaattcaattctaatccaattatgggtaaaaataagtcacaagacaagttttatgtctatcttaggagatgaactagaattacttaattccagctgccttctcaataatcacaccaatgataaaaacagaaagtagaaagctaaataatcaaaagaatttcaactcagtgcacacttacaaggtaccacacacgatgttctctccttcaatctgttaaacattcccaagtttcaaaatcacagaactagaatgaacgcatatcataccacccagttcagcaaccaacagtttattaaagaaacacagccaaggcacattcagagtgccataggagataaaacagaaagacacagattctcaccatcaggaaacttacaatctggctgaaagaatggtcaaaataacacaacctttctgaattactaacaggtacaaaaagctatacgataaatatgtccattgtattcatatccatttcatggataatttttctgtatt

SEQ ID NO: 1888310 - DNA, 4001 bp, Homo sapiens
tttctagaccttaatagtctctaatcagcagtgtaaacaactctcattagagggagagaacccttaagaggaaggggaaaccttgggtttcacaggcatgaacagcagtgtttcttctctctgagatatgcctcccatacccacagccccttttttttcatcatactgggatcctatattcctgattgcctactttccaggtgagttatctcctctggagttcccacctctctactggatctcttatgtaaccacctgatatggtttggctgtgtccccacccaaatctcatcttgaattgtagctcccataattcccatgtgttgtgggagggacccggtgaaagaaaattgaatcggtttcccccatactgttctcaaggtagtgaataagtctcacaagatctgacagtttcgtaaggggtttccccctttccttggctctcattctctcttgcctgctgccatgtaagatgtgcctttcaccttctgccatgattgtgaagcctccccagcctcatggaactgtgagtccattaaacctcttctttctttataaattacccactctcaggtatgtttttatcagcagtttgaaaacagactaatacactatcctcaatgcctttctaattctacccattgtacatggattggactcctcaatgccaactccattcatgaaatactttccaagccctttcatacccagcatgtacaaattgtccccagcaccttcttaacaagtatgtctgaataacagaaaactacaataataatgcatgtcagaattatatgatgtaaagatgtgtctgtcactgctaccagctctatctatacctctttctctgtaatccttataaccatctgacacattaggtcacatagctatttagcggtggacttgagcttcgaatccaggtgttcttgggaaacttgcagatcatagagaagcatgaacacaaagaataagtgtggccttccagtggtgggggcagggtgtcatgagacacagagcagtggtaggtcttatgcagagcctctttagggttttacaccactggtagaagaatctgtctctagaccgaagagttcaaaccgagagacttcttgctttctcacaaagacaggcttctggccatttagctgctgggcttttcatcagccttgaggaatgagagacctttgtggagctcttgtttctaggcgtgagagcaggggagaggctgaaaagcatctgacattcctggcgtcccattctctagacaagaggggacactcataagggcctaaatacctgtccaaaggcttcagtcacaatccctactctgtaaggaaaatcttggcatcatttcatcccatacaactaagaagaaagatatatatcatgatagcatatggatgtgttaaccatcttcccccattttcacgttttaagaattttagggccgtgcatggtggctcacgcctgtaatcccagcactttgggaggctaaggctggcagatcacaaggtcaggagatcgaaaccatcctggccaacatggtgaaacccccgtctctactaaaatacaaaaaatgagccaggcgaggtggtgtgcgcttgtagtcccagctactcgggaggctgagacaagggaattgcttgaacccaggaggcaaaggttgcagtgagccaagatcatgccactgcactccagcctggcgacagagcaagactctgtctccaaaaaaaaaaaaaaaaattttaggtctggggtgagttggagtattgctgaggagaacctttctcaagggcagggctctcggagatcatgttctcatgggtccccgggaccggtcctcaggctcgctagtttaaggtgagtggagtggtctctaggagcagagcatgataacaacgctaggtcactcatttacaacggactgtaataaactacctttttccttccaccagggggcaccattcacatagacttcaacagcagtggcatcaacaggcctacaaagtggtggtggtaaaaaacacacttgagaccatcatatgtatctgaaatcagatacgatacctgaaaaacataaatcaaattaatgctcatatggttgcttgctgtccaaggaattcaaagcaaaggtggaaactgacccttacatcacttcttccttctagatgaatagcatcagctacattttctttcccattatgtaatgtttctattctgaccacccacctgtgatggacatagtctttttagatgtgttagttttaatattagtcaagacttagtctcaaccgttctctattaagtgactttgcagatatctgatgtcatctccattaatgcagattttcatgtcagattcagctctgagttcaccttaatgcggtggtggttcccatagtgtagtgcccaggcccccgcatcaacatcacttgggaacttgttagaaaggcaagttcctggttcccaactcagacctacctaccaagtcagaaatctaagtgtggggcctgcaatctgtgtttttacaagcctaacaggggatactaatgcatgctaaagtttgagaaccactgacttaatatacagtttccaacccggatgacactagaaacaactacgggactttacaaaaatatgggtgtcctggcttcccccagagccactagggtagtggaaacaaatgtcactatcaaatggatctgggtttgaattctggttttgtcactcaccagctatgtgccttgtggaggctccatcttctcatctgtaaagtaaaagtcatcggacctgccttgtaggaaggtgtaggaggggaaggttcagcaaatgcctcatagagagattgactcatagtacatcttcttccttggcctccaccgcaactagaatcttattcacccggcctgtgagggtacagttctcaccttgccccagaatcaccaggtgagaatgatttgctagacccgctttctgaagtttcacaaatggacaaacattttcacagctgttactgggattttgccataaatcagcaggaacacacccgagatctgacaaagctatttcaaactctagatcaatgaggagggaagttgctatgaagccgggtttgccaactgagagcattgtaattgttcgagttgctcttgggatctagctcagattcctgctgacaccagagaagtgaagaatgaaaatagttgcctagaaaatcagaagcagctccccaagttacctgccacatacaggtttgtttttccttaattatctaggtaattgctttgcttcctctacctgcctttaccaagagatgcctggccagaagagcgaggaattaaagtacctgtggaggctgcccaccgagtgaagctgcaggctgcccatcccatcgcagtagctccttagttgtcagtaggttgtttctatgaatgccccctccatcagaaaccaatgaggtttttccaattaatctaaatccctgctcttgtggaactggtgcggagacagtggttaaatgctaaattgtcagcccaaagtcaaatccttttatttaaaaacataatatgcagaatggcttcctaaaacaaaaattgggaaaattgttaacatagagacttccaggttttgccaagggtacaactgttttcttaaacacagtttttaacaattacgtacaaatcaaaccaaagttcatccaacccactctctgaattagtctcagtacaatgcgcatagacagctatcactagagttagtgaatattatgggaaaaattagaggcaaaagttgagactggagccggtgagagttaacaaaaacactatttatatagagaaaaatacattttagagaagtataaacatactgcttggcatcaacataaaagcccaagtgcaagtcaaaggtaacccaaaaggctcataggtcctcagactacagaaacccccctactgatggcaacagaaggtctggccttccacatgctacttccttagtgt

SEQ ID NO: 1888311 - DNA, 4001 bp, Homo sapiens
ttacacacgtacttatcacgtgggcttccaaatgtcagctctctgatgcgctagctgtgcaatcctgtgtaagtctcctaattttcaggtcccatttcctcttttgtgaaacgtggccaagggagaatggactttgcagtgtttgtgtttcagtctaagataatactgtctacttgggattgcagtccagccaccacttaccagctatatgcccttgggccatacttcctctgcgcctcagcttgagcctatcaatgacatctaagagctgtttatccagtcaggagttgcttgccacggcataagatgttggttcccttgaaaatgcaaccctatagcttaatgtcacccactgttaagattttccaacacttgcttaccatgtagctttcttgtggtgaaactctaaagttatttccatttacccaaaagcaaacctcagtgtgtacatatggaatggctgggattgaattgtgtgaggaatacacagattcttgccttgtttggagaccacttctggtgggtacccactaaggagttgctcctggacagtgtatttctttttcctcctcctggcaggcaaatatgagtcacatctgagtctcttgacatatgggagtcgaatcgggaagatattctctctcttgttagaaatctttgttcctattcaaaatttagaaagaatatttgtcatgaatgtgatagtaagttgtaaaaggactcccaaggctcttgtaaaggaaaactcatgtcatcgtgtcttttttttgagacagggtcttgctctgctgcctaggctggagagcagtgctgtgatcatgggtcactgcagcgtcaatcccccccggctctagccattctcatgcctcagcctcttaagtagctggggctacaggtacacacctaccacccctggctattttttatttcttgtagagatggggtcttactatgttactcaggctggtctcgaactcctgggctcaagcagtcctctggccttggcctcccaaagcgctgggattacaggtgtgagccactgtgtctgggctcgtgtcatcatttctgatctcttgtaatggttatcatggtgccagtatcagaacgataattttggacaatgaccagagcttgggatataaattcttgtaatatctttagggggtttttaatcttacgcccttgttacaaaatgaaatgcacaactccttggtcaatcattgaaagtttaaattctcccctcttgatgtctttgtcatttggtaacactggtaatcttgcagcatcagatcactgtcccacagtcatctatgcactgtaacttcaaataatcaagttgttgcaagcagttactcatcttaacaatctagctaccagcctgtatgccctaccttatttgttggcacaaccttggaaagccccaaacgagatttttgtggtttttatttcaccccaacttcatcttgcagatttactgtcctacatacttctgatcttgtctcttctctatccttatgaccaacgccctcatgcatcatttcttttctatttcaggggtatgttaagtgcctcttggtcttaactttctcaaatccatcctaaaatagaaaatgattccttcctggcttagaatctttcaattgctcccaatttcaacttctgacatcatggtcccatcctctccaaagtcaccccaagtagtcatactaaacttctggttccttaaactagaaatcatattcatgtcttggccctctgttgtttgtatgtgcgaaatccctttccacacattgtagcctggataacccaaacttccctaacatttcccccacgcacaggcaagctgatcttctgatatatctctgccctaaatcgtgtcattatttgcttacatctgtttcccctaagagacgctgaagtctttgatggcaaagctgtggctcattccttttttttttttaatctccatcacttgttagtgcttgctgaattaacagatgtaaggagttaacttactgttgcactagctcaaacatatttagattgttacctcacaaatagctttttttttttggagacggagtctcgccttgtcgcccaggctggagtgcagtggcgcgatctcggttcactgcagcctccgcctccggggttcaagcgattctcctgcctcagcctctcaagtagctgggactagaggcgcgcactgccacacctggctaatttttttatttttagtagagacgggggtttcactatgttggccaggatggtcttgatttcctgacctcgtgatccgcctgcctcggcctcccaaagtgcttgggactacaggcgtgagccaccatacccgacagcctcacagatatctatgtccatttataaatatatataaaagcttttggccaggcgcagtggctcatgcatgtaatccccagcacttcgggaggccaaggcgggtggatcacctgaggccaggagttcgagaccagcctggccaacatggtgaaacccgtccctactaaaaatataaaaatataaaaattagccggacgtggtggcgcttgcctgcaattccagctactcgggaggctgaggcacaagaatcgctggaacccgggaggcagaggttgcagtgaggtgagatcgcgccactgcactccagcctgagagcaagaccctgtctcaaaataaataaaagcttttgctatttggtgtaaataaaagccaacttgtacacggtgcttactgtataccaggaacacaaattcattaaatcctcacaactttgagacaggcacaaatattatctgtttactagtgaggaattacctacggtttactagtaaggaacactgagacccacaggttgtgacttgctcaaggtcaagctggtggagccaagacaaggtgcaggcagtgagtcctgccctagagtctgacccgaaccacatttaacgtctatgtggtgtgtaggttattgccatgagtaagaatcagaattgttaacgcgcattccaggaaggcagggacaccactgagtgttactgctgtactttaggggccagagcagggcaggctggatgcgcggaggaaactcatagttaggtcagaagcctggcaagacaagggaattttctggtcgtcgtccacctctccaacctcacatcctactagtcttccaagaggattctaactgcacatgactccctagtttccggcttctcttcctaaggagggtctgcggcccgtctgcaccaccctctccccacagtcccgttttcctgtccatgcttggatggatccagccgagccgtcagccgcagctgcgcgctgctcccccgactcgcaccccctcggcgaagcgctgcattttatgtaattttctgccgggctgctggcttgtgggggatgtggctgggtctcggcagccttcagcgccgcagacgctccggcaacgccagcatacgaggcccccgccccaggagcgcgggtccgggcggcgttcccctctgcgggaggcgcggcgagccaatcctcactttaaaagctttcctgtcctcgaagcgaggggtcttccgtgcggggcaagacgcactggccccagacgaccggtccgtgaaatgacccttccgagcgacccggagcgggcgaccttgcccaacccgcgactcggggcccctgcggtcccgcgtagaggacccaggtcccacggggggcggcggtgaatcgccccctcttgtggccgcgcttccgcccccggcacccgcccgctgctgggccacccggcgtcgcgctgccgcctcacaaagcccgggcagccgcctcattgcgcgcagggattcggaccacgcgccctcccctcccccactcgctgctgcggcgcccaggtctttgcctccgcgtcactttctcctcatcgagtccccggaggcagagagctgagcgaggttcgcctccccgggcgggacacgagctccggtcctctcttggcgcaaacc

SEQ ID NO: 1888312 - DNA, 4001 bp, Homo sapiens
gataacccaaacttccctaacatttcccccacgcacaggcaagctgatcttctgatatatctctgccctaaatcgtgtcattatttgcttacatctgtttcccctaagagacgctgaagtctttgatggcaaagctgtggctcattccttttttttttttaatctccatcacttgttagtgcttgctgaattaacagatgtaaggagttaacttactgttgcactagctcaaacatatttagattgttacctcacaaatagctttttttttttggagacggagtctcgccttgtcgcccaggctggagtgcagtggcgcgatctcggttcactgcagcctccgcctccggggttcaagcgattctcctgcctcagcctctcaagtagctgggactagaggcgcgcactgccacacctggctaatttttttatttttagtagagacgggggtttcactatgttggccaggatggtcttgatttcctgacctcgtgatccgcctgcctcggcctcccaaagtgcttgggactacaggcgtgagccaccatacccgacagcctcacagatatctatgtccatttataaatatatataaaagcttttggccaggcgcagtggctcatgcatgtaatccccagcacttcgggaggccaaggcgggtggatcacctgaggccaggagttcgagaccagcctggccaacatggtgaaacccgtccctactaaaaatataaaaatataaaaattagccggacgtggtggcgcttgcctgcaattccagctactcgggaggctgaggcacaagaatcgctggaacccgggaggcagaggttgcagtgaggtgagatcgcgccactgcactccagcctgagagcaagaccctgtctcaaaataaataaaagcttttgctatttggtgtaaataaaagccaacttgtacacggtgcttactgtataccaggaacacaaattcattaaatcctcacaactttgagacaggcacaaatattatctgtttactagtgaggaattacctacggtttactagtaaggaacactgagacccacaggttgtgacttgctcaaggtcaagctggtggagccaagacaaggtgcaggcagtgagtcctgccctagagtctgacccgaaccacatttaacgtctatgtggtgtgtaggttattgccatgagtaagaatcagaattgttaacgcgcattccaggaaggcagggacaccactgagtgttactgctgtactttaggggccagagcagggcaggctggatgcgcggaggaaactcatagttaggtcagaagcctggcaagacaagggaattttctggtcgtcgtccacctctccaacctcacatcctactagtcttccaagaggattctaactgcacatgactccctagtttccggcttctcttcctaaggagggtctgcggcccgtctgcaccaccctctccccacagtcccgttttcctgtccatgcttggatggatccagccgagccgtcagccgcagctgcgcgctgctcccccgactcgcaccccctcggcgaagcgctgcattttatgtaattttctgccgggctgctggcttgtgggggatgtggctgggtctcggcagccttcagcgccgcagacgctccggcaacgccagcatacgaggcccccgccccaggagcgcgggtccgggcggcgttcccctctgcgggaggcgcggcgagccaatcctcactttaaaagctttcctgtcctcgaagcgaggggtcttccgtgcggggcaagacgcactggccccagacgaccggtccgtgaaatgacccttccgagcgacccggagcgggcgaccttgcccaacccgcgactcggggcccctgcggtcccgcgtagaggacccaggtcccacggggggcggcggtgaatcgccccctcttgtggccgcgcttccgcccccggcacccgcccgctgctgggccacccggcgtcgcgctgccgcctcacaaagcccgggcagccgcctcattgcgcgcagggattcggaccacgcgccctcccctcccccactcgctgctgcggcgcccaggtctttgcctccgcgtcactttctcctcatcgagtccccggaggcagagagctgagcgaggttcgcctccccgggcgggacacgagctccggtcctctcttggcgcaaacccccgccccccgcggagggactacttttcgtctcccgcggaggaactacttcctcccccgcggaggcgtcggtccaggcggcgcgcacggtatggcggcggcggcggcggcggcggcgcgcgcctgagaagaggggacgccagcccggtcaggcctcggcgcggcctacacgctccgctcgctcgctcgctcccgcctcccgccccgcgcccggccatggcggagccgtcgtccgcccgacgcccggtgcctctcatcgagtcgggtaagacgcgaggccgtgccacccccgccctggcgctcccggctgcttcggcttccccggctccccgggctcccccggctcccctggccccgtccccctcccctccccgccggggcttgacctgactccttgtcttcccgcagagctgtacttccttatcgcccggtacctatcggcgggcccgtgtcggagagcggcccaggtgagtgcgggcccgcgggcggctgcggacttggcgtccccagtgtccccgccgccgggggtcgcgggtggtgggcgggggtgaaacgggagcgccccgggcccgaccccacccctgaccgcgcgtctctcggccgcaggtgctggtgcaggagctggagcagtaccaggtctgtgcgcgcccgtccccgcgctccctcgggttcctcctgccgaccttgccctgagggatgctcgcccgcgccccccgcccgccgcccgccgcccgcccccggccccccgccccccgccccccccgcgccggaggggtggtcactcgtgtgcgtttcgtgtctttccagttgttgccgaagagattggactgggagggcaacgagcacaacaggagctacgaggagttggtgagcattgggcacgtttgctccccgggttttccgtgcaccgccccccgcccccgccccttcccctcgcggggaccccggcccgtggggtgcaaagtgtgacccgcactggggggcggcccggggatagctgcgttcccggctgaagattttgttttgtttttgaggcggccaggtttgttttggcaggaaacagtcattgggggcggcgcggggcggagcggtgggggcgactcgcggaggtcctgcggcaggggtggggctccaggtgcggccgcctctgcgggggtgtggcgtgcgcagccagccattcaactgggcggtttcattcgcttccccgctccaccgcgcttgtaactcgcgctctgattggcctcgctgctcttgccccgcccgggtctgtccccccacttgttccctaggaatagaatcattggtctctgaaggtggagaaatgttcttgtgttgagctttttattttttgttttgtcagcagcgtcataaaaatcttgcagctgtatgaatatgccactgtagtgcttgtgctcctttctactgtacaatatttgttgaacgcagtagttgattgatgagtttcacactgatcttgtagataacacaataaagtgctttaaataggcacttttcttttgagctcggttaatcttgcattacagtctcatttcttttgtgaacttggttaatgtttctatataacttgcttttatctatagttacagcagttgcagggattcgtttgtttttactggagacatttttcaggaatatatttttgccgtttcgttattaggataaaggaattcattaattgccaggccatattcagcatcttgtataaggaaaacaattgagaaagaaaagagcttctgagtgatcttttaccacagttggaagacctgtaacacttgagtgg

SEQ ID NO: 1888313 - DNA, 4001 bp, Homo sapiens
taacgttataggaaaagaagatgaattccttttctcctcaaatgctttaacttaaaaataacatttaatattgagtttgtgttggaacctcaattaagaaactacacataagtttcatgaaaagaaccatgaccctcaggaatttctccacggtgcaaaactcacatattcatataatgtaatcaatacatttcataataaatcacatattcatgcaatttaataaatcacataaatgaatatactatttattgcaaatagttacgtttgtatattctatatatacacgatagttatataaacagtaatatcctagaccacatcaggaagtatcatcccgtcaagttcaaaaactatgctgtctaatgcggcagctactcgctccacttggcgatttaaatttatttaaattaaaatgacccagacgcgatggatcacacttgtaatcctagcactttgggaggcggaggcaggcggatcacctgaggtcaggcgttcgagaccagcctggccaacatgatgaaaccccgtgtccactaaagatacaaatattagctgggcgtggtggtgggcgcctgtaatctcagatacttgggaggctgaggcaggagaatagcttgaacccgggaggcgaaggttgcagtgagcagagatcgcgccactgcactccagcctgggcaacagtaagaccctgtctctcacacacacacataccatatatatatatatatatataatttatttatatttatatatacatatatataatttatttatattcatatatactatatatatggtatttatttatatttatatatatttaattaattaaaatgcaaatgtaaaattcggttgcctggccgcactagccacattccaaatgctctacggccacaagtggccggcagctgcccaatggacagcacagatgggggcccttccaccgccggaaagttctgcggcaaagcgggtgccctggaacctgcgcggggtagggagacggcgccgcaacgcaacaggccgtttccagggcggggaaagatcaccaaggcttcctcaactgtaaggggccgtcccaaagccaggtggctcgctgctttacattgggcgactaaaaatagtaaattcagcttttaaaagcccacctagttctcatctcacccctcacacgtgattaattgcactaagtctgctgttcagcccggcctttcggctccctcctccctccccagcccatttccacttattcgcagcaccccaaatcctggctccgagaggcacctgggcccacctcccagcccggggtgtcagacaggccggatcttctccggttccttattcatctccggttaaccctagtgtcccgtttcaaccccggctgctgcaaatctcttcaataatcttcacaaacctgacccctcggcccaccctgcccctctttctccatcccacgccggtctctcgatctgtccgggatgggcccacccgcgagccgcacctgagcagaggcgctgcaccttgagccgcccattatagacccgggccacctgcaccgtgagctcctccagctcggtactcccaggcgcctgcagcaggaactggctctcgtcgccccgcttcacgtgcagcagaaccatggcggtcccgccgaggtactgaggcgttgagaaggccccggctgcgtggcccgcgggtcctgccggccgagggtcgccggatcgccagcagctgcgacgcactaacagccgctcacagtccggaatcccacgctccctagcccgcggtgagcgggggaaacggcactcgctcccggaagtggatgttgccaagagcaacagtgaagcagagttaaagagccgccagctcaagctcagaacccgagtgggggaggctggggtgcaccgaggcccagcaatccaagcccgtacggagctgcggccggggaaaccacccacacagtctgagaggacagctgattctgagcggaccgacggaaggagattcgcagagccccttcccggaagtgactgttgtcgcggcaactgccaaaacacagaccaagtcgctgaaggggagggcggacctcccaatcgactggtctggggcccgagatttccactcagggagatacgtgggctgagatgggagttactagatggggaacgggaaatacggcgggaaccacaatcgcgcagttccgcagctgccgccccacaaccgctccacattccagcgtcccttccgccgctttcagtctccacttccggcaacgtttccacgctgtttccggcctgggaaagttcggcggcagcgacccagaactgagtcttgctgttcgctgctgtttgcgcgggtcagcttttcaggacggaggggccagggcgagtgtccgcacttcttcgttcaggttgatttggatggcgttgctggggtagctccagcggcccctgccagagcgaccctcccagaaatatccagccatcctccagcggactcttgctgaaggcagtcggcgtcagtcgctgtttattccgggccccacagatccagagtcactgctctcatggagcttatattttagtgtgacaaaaagaaaacaaaaataaatggacaggccaggagcggtggctcacgcgtgtaatcccaacacttagggaggccgaggagggcggatcacctgaggtcaggagttcgaaagcagcctggccaacatggtgaaaccccttctctactaaaaatacaaaaattagccgaacgtagtggcgcgtgccagtaattccagctactagggagcctgaggtgggagaattgcttgaacccgggaggcggaggttgcagtgagcctagatcgcgccactaccctccagccttggcgacagagtgagactgtgtctcaaaaataataaataaacaaacggacaacacaaattcaaatacagatctaaagaaaactaaacaggttgatggacttcttatgtttgatggtcagggaatgtacaccttctgcgatattgggagtaatattatcgtctcccgccctgaatatttagaaaaatatcacagtggggtgtacacccctgcgatattgagagtaatgtcatcctctccacccaggaaattactaacaaggtcacggaggggtgtactccccctgtgatattgggagtaatgttttcctccccaaacctggatgttagcaacaagataacagagggggtgtacacaccctgcgatattggaagtaatatgatcctctcccccccggatactgggaaaaatatcacagcgcgggtatacatttccttcgctgttgggagtaatatcattcttttcctctctggatatcaggaacaatatcacaggggtggtgtacatttccttcgatatggggagtaatatcatcctctccccgttgggatactaggaacaatatcccaggggggtgtccaccctctgcgatattgggagtaatatcatcctctgtttccccggatattagacacaatatcacaaaaaagtgtacaccccctgcgatattgggagtaatatcatactctccttccctggatattagaaaacaatatcatcaggggtgagcaccccctgcgataatggaagtaatattttctctttttttcttttcttttttttttttttttttttttaacagagtttcactcttgctgcccaggctggagtgtaatggcatgatctcggctcactgcagcctctgcctcccgtattcaagcgattctcctgtttcagccttccaagtagctgggattacaggcatgcgctaccatgcccggcaattttttttttttttttttttttttgtatttttagtagagacagtgtttctccatattggtcaggctggtcttgaactcccgacctcaggtgatccgcctgattcagcctcccaaagtgctgagattacaggcgtgagcgatcgcgcccagccaccacttagcattttcattttacatttgttgaag

SEQ ID NO: 1888314 - DNA, 4001 bp, Homo sapiens
ttagccaggtgtggtgccaggtgcctgtaatcccagctactcgggaggctgaggcaagagaatcgtttgaacacaggaggcagaggttgcagtgagctgagatcgtgccattgtactccagcctgggcgagaagagcaagactccgtcttaaaaaacaaaacaaaacaaaacaaaaatacaaaaattagccgggtgtggtgccagatgcctgtaatcccagctacccgggaggctgagacatgacaatagcttgaacatgggagacagaagttgcagtgagctgagatcgtgccaccgcactccagtctgggccatagagcaagactccgtctcaaacaaataataaataaataaataaataaaataaaaagaaatgcttggagtgctcgggatcttccacttcaacctggaatttaaatcttactgaaatttctacaggatggtgtgggcaaacaggcatcctaatgtttgctgatataagtgcaaactgcataacttctataaaaagaaatttagaattagcaaaatcataaatgcatatattgagatctagcaatttcaattctatttcatcctacagatgtaacagtttttcaaagcttttcattacagcactgattaagactagaaataatctaaatatcaatgtttatggaactggttaaataaattacggtatatcccaacaatgaatcactacgcaggtgggttaaaaaaaaaaatagacggccgtgcgcggtggctcacgcctgtaatcccagcactttgggagactgaggcgggcggatcacgaagtcaagagattgagatcatcctggccaacagagtgaaatacaaaaatacaaaataaattagctgggcgtggtggcacgtgcctgtaatcccagctactagggaggctgaggcagaagaatcacttgaacctgggaggcggagattgcagtgagcggagatcgcgccattgcactctagcctgggcgacaagagcgaaatttagtctcaaaacaaacaaacaaaaaaccaaaaaaacacaacccttcatatacagatatgggccgatctccaatctacggtaggctaaaaatgcagcttacacaccatctgtgtaaaaaggggaacacattaaaatatgcatatttatttgcttttatgttcatggaacatctttagaggatcataagaaactgttaacattgccactgaggaagtgaacagccttccagacatgggtggatttttttcactctaccgaatacccttttaatttcgaaacatcaaaatgaattcgcatgcacaggtgcatgcccgaaggaaaaacttctagttcggtgatgagatagggaaagccggtgagttcaaccttaggcgcaatcaccctgtgaaggtgtggccagcgagggctttgtcacgcaagtctgagaactgtcacaaccttccccaccccctgctctattttccttccacttgtttctgaaactcactaagctttggaaagtatttagtcatagaattgcttgcaaacttggcattctttagaaaacacggaaacacttttgctttccttgttcctgaaagactggggaacgggggacatcaagccaggtaacattgtatcataactgaaattcaatgtctttgaagtaacattgtaccataaatgaaattcaatgtctttgaagtaacattgtatcataaataaaattcaatgtctttctaagagctctgtagctataaagctgtagaaatacaaagtattactcaagaataactagtaattaccaatagtcacacctcaggtcaaagtttggagaggactattccacctactagatcacactttccttcccgaaagccgcttctctctctggcctctcccctcctcctcctccctcatctgtttggcgggaggcttcctcacattaccgctccgcgtaagtgcgaagacgcactgcagcagcgccgtctgagggacaacagagcctactctttcttctcatctctatgatcctctttgtgacctgtcaaacaacaccagagttccatgctaatagtactccactccgacagagagcgatgcaaagagccgacgctctcgcgagaggtgtggggctctctctctctctctcgctctctctctctctctctctctcgctctctctctctctctctctctctctctctctctctctctctctctctctctctctctctctctctctctctctctctctctctctctcactctctctctttctccaagtattgagagcgcgtgggagcataggcgcatgcgcgctcgtggggtgcgcggtagcaacagaggactcgacccggctggagctccggagagcgcgcgtgcgccgtcacgagctcggcgctgccggggccgcggtgtggaagcgagtattcgaccgccgtgcgggccgcggggatgttccgaaaggcccggcgggtgaacgtgcgcaagcggaacgactccgaagaggaagagcgggaacgcgatgaggagcaggagccgccgccgttgttgccgccgccgggcacgggcgaagaggcgggccccggtggcggcgacagggcccctggcggggagtcgctgctgggcccggggccgtcgccgccttccgcgctgaccccgggcctcggggctgaggccgggggcggcttccccggcggcgcggagcccggcaacgggctgaagccgcgcaagaggcctcgcgagaacaaagaggtgccccgggccagcctgctcagcttccaggacgaggaggaaggtaaagtgcgcgcttcggacgcccttagacggccgcatccccgacgcaggcccccgtcccccgcccccgtattctctggacgcccagccccggagccctggaacggagtcccctgccgtccgaccggctgcgaatcttccccagcctccggccttctgctcgggcaagggacgcgttcccgcgctgcccccagccttttcttaaccacctcctctgccacggggccggagctcagatcaggcattcagagtgtttcaggggaaattcggtgttccctgtcctgcctcttttctgcctggcgtgtttcagggccaacttggtgtgggtcccctggctgctcttggcatgctttccgagccctctgcaggtcactgcgcccacacttcttggatgctctgtccaggcatcctcgaccatgaaggccgagtttgtaaaaaggaatactaggagagggaacagaagcctggagttgcagctctggttctgagtgaccttgggccagtcccttgcagtcgctgagcctcagtttacccataaaagtaattaggggtagcagatacccagccttcttcgcactgactttgggaacagtgaagcgagacggtgtaaaaatagtaaaagcaaggtagtttctccaattcctgtgggaggccaggctgcagtggttttagattgctgatcttaaatgagccttaaatcttttcttctgaccatttgaatgtgcataacccagttaattccatgttacgaaaaaagaaattaagttttgtaaatcttgcatttttattcgagaggtttccagtaaggtaggtagtttatctttggcatttctgttactctttatttggtttgagaggagtacagacagatttttgtttttgagatacatgagctatttttttttaagtatttagtacttttaaaatttcaaatcaaagaaaagtgatttgcccttaccttagctttaaaaccactatgtcagcttgtggtggatgtagttactcagaattgacagcacctttttattttagatattttgtttcggattcgttaataacttggtgatgtggtttttcagaaacattttgaatgattttttcccctctcaaatagatgatttaaggacgacaataataggaaaattttgtgaagttacatgtgctattcctttaaaaagtctcaaaaatctcattacttcacagtaatttaggaagttgacctctgtt

SEQ ID NO: 1888315 - DNA, 4001 bp, Homo sapiens
cattgaaaaaataatccttaaatgtatataaaaatgggcactttgtggtaaaatgaacatgtgttttgaaaaactaagaatgtgtctttgctccaccattgtgcatagtcaacgacacaacaaaacactattctgctgcctgaatcatctattactggagtctcaagtgcatgccttttaaaaaagactaatttagatattaatatgaggatcaaaggataagatgataatctcaaagtaaaacataattgatttttagcttcattataaggctgaactttaaagagaacaacctgtgtggtcaaaaacacttttctaatttttaaaactcaatttaacgtgtcaaattataaaactgaacgtgaaaaagatttgtcttatctcactccccttaatcatataagctctgaaaatttagtaatggatgactggcagtctgttttgccactttttaaacagtagtacatgagatatgcttcaaaacattctcaaaaattactaacaactgtagagaatagccaagtgtggaaaacaatatttgtgatatttcatgttctcttgttagaactcaactctgtacctgatacttatatttgcatacacagtaattgcatatttgattaagaaaactaacataggactaaattataagtttaccaaacatttggataaactgctgtgcaaaatacttcaacaaaaagttttttttactaggaactcatccaaataaagtagtgtgagtaccagcaccacaaagttttttttaagagcacctctcctttttagagcttaagtagaaatatctaaatggaataaatcagagtcccacttaagaccttagcacatgcacacgttcatccacttgttccgtactcattagcaaagctatgtatatttgtcagaaaactcctttctttggataacactgttgtattcaggactgcaacttatggctcatattctggaaatatgctactattgatatcaaatgcaacatatccccaacttttatgactgtccctaactcatctaaacacaaacccaaatgtgtgcaaacacactggctggtaacaatcttactgaattacgccaaaaaagagtaaagtcaaatttgaaaatgtgggaacaattaagcactaagatattaatcaggaaatgtatttacccagcttgtaagtttgaatattttgatattgcacacatttaatttaaagctcatcaaaactaaggcaatgcatccatactccctggattttaaattcattttgcatgacttaaagaattgagagaaatcgaaagcatctttcaaaaattccctccaaaaagtaatgttatacttcaaagaaaaacaaaatcaacagatatcaattaataccctcaggccaatttaacacgtcagcattacaaaaagttgttttcaattaaactgaagtgtttctttgcttaaatactttcttgtgttcaacaacaaaatctgacccaagccagggtaggctgccaaatttaaggcaaatgtcatttatatctttatgcatgaagctgccacgttactgggcttttcagcagatactttcaagcaaggatctacctcataagtacattctaaacatgagttaaaaacagaatttagagcccattttaattctgcattggttatagcctttactgtaatacattattaaaatttatctagctgtttggcacaatctgttagataaaaactctttggaagcatcataggcaacttacgagaacattctcttaatacataggtttatttttttttaattaggagttttgcttttcttctgtagaacaatcctatatttctctatagagtctaaagtttagaaaaatacctcacaatgctttctttgagcactaagttcaatgatggtgataatacaatttggacagtttaagtattcttgaaactttacccaaagtggcacacaaaataatcttacttttttttttcaaagacagaacaatttcacagcacactcaatttgaagatagacattatatttgaattggaagtgaggcttgacttactctgtccaaattctaatgcatcacagtcactggtgtgaagctaataatgaaagaagcaagaggaggctttcatttctatggagacaaattgacatagaagccagattagtcttttcttcctgaactaagaactgcttttgttagaaaacaaaataatgtattgtatttacctgaatactgctttaaaaagttattaattcttcttttacaagaggtattagaaattaaaacaactcagatttctaatccaaaatatatttatctttggaaagcaaggtaaccgttgtgaaaacattgtattaagagaataaaatgcagtgacctgaaatatgggtgaacatattcacacatgataatgtaaataaatatacagaaccactcaaatacacatttataaagagaatggcaaagtacctaaaatagcattttcacatataaaatttttatattaaaatattgctcataataaataagaggtgatatgaattccatttccctcttaaaaattatctctagtagtttacactaaggagttaatctgttgttttgacaggtgaattaaaatgtttaataaaatgacactgtaacagtatatttaagtagtcacatgtgataaaatttgtttagtaattctgggaaaaaagagtccccaaatgagccaaaatgattagccctagaagactagagtataatgatctgctttatttgacaaagatgttaaatactgccttatgtttggcaaatttaatgaccataaaaaaacggaccacaactttcttcaaacttcttcaaagtttgcatgtctgggagaccaataaagggcagggcatacgaagtaagtctgtttaggtcagttgtttatgggtaggtgcgacttcattcctgttcgccctacttgcagacatggtaacttagaacagttcttcagaagctgttcgatggcaacgtggcggacatggagctgtgaggccaaagaatctttttcttgcacttggtgagttaactcttcaaaaacttctgtaaaagatttaaaaactttcatttttagtatgcagaaagccggtgctatgatttatatttcaagaactctaactgaaatctatgcattgggcaaagtgtcacaatgaaactgatttgataccaaggaaacagttctgttctctacaaagcatatcagttctgatcatcctaggcatctgtatactttacatagccaaatggaatttggctcttctccatcaagtgactacagagatacacagcaaaaatggtggttgctactgtagctgagctacttttctcaattagaatctataaacagattcaattagtacataatgtgatttatggacaagaagtgcctgttagtattcaggtctggaaccccctctaagaggctttggaatcagactactaagagttttgaatccttgttcctactcttacgtgcctcaggcaagcaacttttggtttcaatttccttttctgtgtaacattaataatgatagtaagcacttcaccaggctactgtaaaaattaaatgagatcatatttgtaaagtactcataaatttctactacaactattattgtgattatttttattattctgagaggctgtgtggttaagctttggagtttaaatccttgatctgctactgattggatgcatgatctctgtaagcaacttaacatctctgaagtacaattttctcatctaaaaggaaataaattgaaaaggagacaactgcggaatctgaacattacttgttagtgttagcattatacttgatgacgttaaggaattattaactttaaatggtgtgataatgagactgtgactgttttttaaaaagttatctcttttagaggaaatcctaaactatttatggacaaaaaacagtgtgttagctaggatttgtttgaaaataatccatgctactggta

SEQ ID NO: 1888316 - DNA, 4001 bp, Homo sapiens
ttatgaaaggaccctgaccgtttctgcatgtcttaaactgatgaaagtagctaagtagacttttaagttgtgacaagacaacttgatccaagaaaacatatttcttgtcagaatatgcaattttttttttttttttgagatggagtctcactctgtcactcaggctggagtgcagtggtgtgatcaaggctcactgcaacctctgtctcccaggttcaagcaatcctcctgtctcagcctccccagtagctgggactacaggtgcacaccactacacccagctaatttttgtatttttagtagagacagggtttcactatattggtcgggctggtctcgaactcctgacctcaggtgatccacctgcctcggcctcccaaagtgctgggattacaggcgtgagccactgcgctcggccagaatactcaaatctcaatgttgtacatttactgtcaatcctgtcagtatcagtatattgtatacagtatacagtaattgacagtatactgtcaattataaattgagttttttaaattatgatttacaaatgaatttgtcaaaattaaattaaacccccccacacgcacacacacctggaatcctttacagataggtggtatatgaatacaaggcacagattgtatgtgcatggtggctttggcacaaacagactacttcttttttcaatgttaagtgtaaagcagttctttcatctctgttcagtgcagtgttgagtgtgactaggatttgaagaacctaaaaaaaaaaaaaactcacctgcttgccatcttcttgttttttttttgttgttttttggtttttgctggttttgtttgctgcttttgtaaaaccagtttatcatattctcattaggaaatcaattttcatgaaattaattttttttcctgctaactatggctcaatcttttcgtttctctctgcttctatcttaagaccattcctcaaattgaccatgagaggatttacatctggggcacttggtatatgccaaatggagacaaaatcagaatcagcagcctggctgggccacaggtccagcatcccaagctattaaaatattcttagtgtttccagggaagtgatagatccactttggaagctgataatatacccctcccctagaaacatgcatatacacaaagtgttctaaacaacttccaggtgctcatgacctcccccacctcccaagctcattgaccactgcctcgccttcacgaactccagacctggtctgaacatttctaaaggacgctcgggagttaaaaggagcgaggccactgcagaaatgacagccttcatccacaagtggcccacttcgggttggctggagccacagctgggtggggacagggcctgtgctcaggtgagcactgcctaccgcgcaccctccaggtgcgtcctaccctgaagcggtcggactggaccgtctaggtcccagcgctcgagaggatggcaggcaggggctggtgattgtctggagatatgaatgctttctaaggttgacgtcaaggtctccttcctgagccacagtccacgtgataagctctgtccaggtagaaatgatctcacctctcctgtcgcccagggtcggaaacctgaggcccgtgcgggctggggcaacttagcaggggtcccaagcccgccgcgccccctgcgccccaaacgtgtgtggagggcttggacgtggtccagagggaaaagatggggtgaaccaggtgccgcgcacccttcgaggagcccccgcttctccgtttctgtgagtgactccaaagcacctccgagggccgacacacgcgcggacgaccttgggcgggcactgaccaatgtccccttccactcggttgtgtcgggggtccccaggtgaggcgcgaacgccgccccgctcacctgtacgaggcctttcccggagcagcccggctacgaagcgacacccatggcggagaagctaaggaagactcccgctccctcacaccgcggctgaggcgactgaaccgccccagtacgccggggccctccccaagccctgctcccaagccgaagccccgcccccgcgtctaaggcccacctccaggccccgcccctgaccccgactccgtgagtcaagcctggcctttcagtccagcccagcccgtcgaggccccgcccctgttgttatggcccgcctccaggcaccgcccttgatcccaccttcatgagtcaggccccgccttccagcctagcccggccagccgaggccccgcccctgtagggacagcccacttccaggccccgcccttgatcccgcctccttcggtcaggccccgtcttctagttccgccccgcccgcggaaaccccgcccccgcgcgcctatggcccacctccaggtcccgcccctgagcccgcctccaggcgtccagccccgccttccagccccgccccaagcgccgaggcccggcttccaggctccgccccgacccgcgcggtggggaagagccgctgccgctggttctccggctcttcctcggcggttctggctcccggccgcgccgcagccctgcccagtctctctcccccagcccggagggctcctccgcgccgcacgtgagcgcgcccgccaacagggccactgccgcggtaagtcgtgcctgcgccctgtccggcgtccagtcctcagccgctgggcgaagccggaggagccgggcatctcctccccgccggcccgcgggtccttctccgggtccagagggcttgggcggcgccgtggggcggcccggggtgcaggtggcttaccggcgcgcggcccgggcctgcggcgcgctctgctgcagtgcgggggcggagagctcggggccggagaccgggagggcagcggggagactgggtggggtcccctagggttacccgaccctggcgcggaggatatgatgccggccacgccctcgccgagcggggcggcaggtgcaggtccaggggtgggtcgcggcccgcgcgccctcccggggccggcccacgaagagacgctcagcctttgtttgctggtgccctggctggggaggaggctggggacgcagacctgtgagaactaagggctttcctcgttggggaagaccccagtcttccagccagtccccaggagaagggatccgggccgcagtgcgcgctctgccagcctggcccctgcgccctgcagggttcccggctgctcgcggggactgttacccgcagtgttgccttacactcgcgactgcagccccacaattgggaagactttgctaggatttttttggtaaggcgagggaagaccgtccccccggccccacaagtctgctgccattaggtggcttaaattttttccagtacaatttaattgccactttgaaagaccacattcaaaacagtgtgtcccagagttgattaagcccattggtgatgagtgtttctgtgctgtggactaaggatcattatcaattttattactaatagtacatatctgttatctgttgctaaatgtttttgcttatgtggtagggtcactgtcctcattttcatcgaactgagaaatgttccttcatatagacatatttacagtgaacttttttgggatctggcagttggtttttctcttgaacttgtttttttctttttctaaattattattattattattattttgagacgaaggtctcattatgttgcccagtctggtctcaaactcctgggctcaagcaatccttccacctcggcctcttaaagtgctgggattacaggtatgagccacagtgcccaaccctgaatttgattttctatgaaattaaaaatgggtaaagagagagatttcttgctgacattttcgattttaaggtatctgagcagatacacttcttgtgtgattacttctttctgtgtctagttatttatagcctgtataactgtcggttttactgaactcttcaatctctcacaggagacatatccaggatagattgcaagatcattggca

SEQ ID NO: 1888317 - DNA, 4001 bp, Homo sapiens
ttttggacttgctgagttttgaaaagtttaaaattcctttaaaaaataatcgttgaactcttcagagttttttatatgctaatatatattgtgactctgtaagagagaaaaataatgttcagtatttcttcatcatatttgatcatggaaccccttagtcatgtatcagatacctgttgggaaatgctgttgaaagttattctttgttaatgacttttaatgtagacattacaagatcccttgcagggatattggcactttagtataggattaatgatggtcaacaaatgtttgaaattgaaagctatgaatttttagtaaagcatccttggtgccctggcaagtagatgaaatatatttgggcaggtggaactttctagaatcctcatgtcataccacgtatttataagaccagccctcacaatcttggtcatggcctaaaagtctttcttcatctataaaatcaagattgtattcttcagcttaatctttgaatatcaactgaataaaataatcaaaatactgttgagacatttgaaatgtaatcattttaaactaccacttaaaaagaatagagcataataataatctttgggcaaaatttataaagaatacgctagagaatggctttctttttttttttttgagacggagtctcgctctgtcgcccaggctggagtgcagtggcgtgatctcggctcactgcaacctccgcctcccgggttcaaaagcgattctcctgcctcagccttccgaatagctggaattacaggcacacggacgccaccacgcccggctaatttttttgtatttttagtagagacggggtttcactgtgttagccaggatggtctcaatctcctgaccttgtgatctgcctgcctcggcctcccaaagtgctgggattacaggcgtgagccaccgcgcctggccgataatggctttcaaaaatgcacgttactctcactatgacacaaaataatgtgaataaacattttaatagcaaaggcattttaaaacaaaacagttaattaggggcatcacgcatggtataattctttaaaggtagacattgcttaagaccttgagactggatagagtgaaaagatatctcatcttttacatcttagaaataaatatttgtaaccatctggagtctattttctggattaaagagaagagcaataatcacacaaatttatctttgaaatgtcacttctaacatttgctagttgaacaatactataccttcccccctccattacatggtcaaatatattctccctaaaaatataattttaacatcttgaaacaaaagcagtttctattctctaagctaaaacattagtcaccagagaatggaattctgtctgaagattaggtttctctatcatgctccagtgagactaaactgaacattcttaactcttctactcttctgtgcatttgcctgattattatgtttacctgcagggaattcttcccaacacatgatgaactcttattcatcctctaaaacccaacatgctttccttttccaagaacgcttatcttcctcccattttatccatttctcctgtatgctacctgctgcatatacctatttctattttttcatttatcatatggaaaaaattccataagaacattaaaatatgttcttagagtatgagttcaagggaggcatgaactacctctaatttgtttctgtcttttggggttaaagtatacactacaatacagatctgcacaaaatatgctgcctcttttatttgctatagttgattgcatctagctctgcataccccagttctgctgccggtggaagcatgaacgtggtagaaaacacttaccttgtctgtgagaggtaacagccttttctggtttaacaaacattttcttctgattggtttaacatttgtgattaattagcctttagatgggtggtagaataaaatattatttcaaagttcaaacttcctatcaagattgtctcctcacttctcacaagctctctcttctcctctttcccccaagatggcatgtttgttccaagagaagattggattgtttaattcagtgtgcaggagtcttctggtgtggggctgccttctcggcactgaggaatgattaacctgttcagtgcctggttcccttgggttggtgttcactaaggcatagataatcccaccaatctatctgggcttcttgctgggaccacctcttgatgtgatagtcctttcagtttgggttttctagggtcctgtgttttatggtctcattctcccagtaccagctccttcaaatttctcaacatcaagtctctcaagttcctcatcttgggtcatgagaactccaagatctcctacataccaaatgttgctcgtggggaatatgctgctcactactgtctgtttgtgtctaatctttcacacccacttcatgatggattcagtggagaaagggggaacaaccctggacattttgatcctctctcaaataatctagagtctctatcaaggtctctatctatctctgtcatttttgtttttctttattggaacttgagtttgggaaaccaagttccttctcaaagacccaggctatattctcatcctagtgaaattccttccagatatttctttcttttttactgaattagatgaatgtcatttacattgaatccttactctatcctagagcttttagtaaaactctatgattcaagtcaagtcatctaggtttggctcctgacatgagaatgaagcttttatagtttagagaccacctttctttatcacaataggctggcttgcaagactaatgcttcactgtggactcaagagtttctttgggtttttttggtagtcaaaagctgaatattagatatatccttctttttttgcattcctactttcatgtgtaaattcacacagctggcaagaggaaggttgatattttttatcaccagcaccttaatgttgacttgggtttttctcatttgtcaaacctactccttttctgcctctccacagactttgtggttctgctatatttggccctatgtgattatgctgtattgacccagttgcccctaatcatgctgtctgtgctcagtacctgcagaaaagataagatatttctttttcctcttttcttcagagctaaacaacagtttagagcttccttgcagataggtgggactctatgtctaagttctggccagggaatatgtgtggaaatgacacaccctacttccaaggctgccttctaacacttcttttgcagtcctccataaacttttttatagtttgtcagttggccagagggagaggattcactgaaggaagggccctgaggtcctaggggatgacaggtctacccaatcaactttccgggtctattattcactgacctctaattaaaatttaagatctcttttaattgtgaatatagtcttaatttgaagagtatttccagtatctcttactttgtcacttatagaattatagatatttttatattgctttacagatatctcaaaatattaattacactcatttctagtttgacattgaactagttattattagacttgccactgaatcttgttatttaatatactaaaaacaagtacataattagcttatttgaagtttaaaagatatatttagggctggccacaatggcttacacctgtaatcccagcattttgggaggctgagggaggaggattgcttgagaccaggagtttgagactagcctgggtaacatagtgagacacagtctttacaaaaaatttaaaacctagctgggcgtggtggcatgtgcctgtagtcttagctactcgggaggctgaggcaggaggatcacttgaacccaagagttagaggctgtggagagcaatgattatgctactgtgccacagaacaagaccttgtctcttaaaaaaagtatatataaaactgtatttaaatatacttgctttcattttcatctta

SEQ ID NO: 1888318 - DNA, 4001 bp, Homo sapiens
cgacctcaggtgatctgcccgcatctccttcccagagtgttgggattataggtgtgagccaccgcacccggccgaagtggttttaatgtccccacttttgaccacttctccttctccatagggcaaatcaagcttggaaatggtgtcctggagcttaagggagttggaaaccatggcttatgttccatggtgacatggttcttgagggttagctggtccagttcccgcgtgttggccggtctggtccctgagtgttggctggtccacttcctgagcgttggccagctgcccttgctgtgctggggtacattccccgagcttccacagtttccctttccttgctgctgtattcagtgatttgcagagagaaaggcgtggagctccacaagcacctcggacggcagcaggaccctcccaaagctgtgtccacacacagctgggcgcccgccccccgccccccgccccccggagggcccggctccaagggtcatatgagtggatctggaggtcggcctctcttgaatcccagcctcctcggggtcagcccaggttgtccccacccccacctgagttactgcggaaccaaggggctcatggccattgagtgactccagttaatgctgaattaggtacctcaggcttgagtcaaatattaacagaggaggccggccagagctccccagtgtttggaggatagcttggttttctccctgagtgcattgcccataccgggtggaggcagttccgtcctgcagactccgtggttctgagttggagcccttactggccagtttaagaccctcttggagcagggttctgcagtgtcctgggggcagaggcctgacgcactcagctgctcgcccagggccctcctgttgggcatttggatttggaatctgaggctgtaggagcagctgcctcccagtgaattctgatgcacagacaggggcctgtcctgccagcaggtcctgcagacggagccgggccagggtgctgggcagtgctgcggggccctggtggaaacagtccctgcagagggtcccgggcactggtgctggggggagggtagggcttaaggaggcctcatgtcgggaccctggcaggccaccccacctcccgcagtgcccggtccgccatccacagtgacacagggacaccttctcaggtggaggaggtggcagtcacggcaattcaggagcaaacccaggcttcctgtgcctctgtggtgggccctggtggtgttggcaggcccagggcacaggcaggctcagggctctgctggggagcagtgggaggccctctctgcagggcggagagccaggtgaggaggtgtgtggcgcaggtaaacacgcctggagcgcagctctgctgtgggttagccgtgggtctctgggcgagggttcccgggatacagacacctgccccaaggtgccccacagaggatgacccccagggcagccgtgcctgagcctgcgtggtcacctcccacagtgccaaggcgctcccccaaggcccctgcggcccacctgaccagtggagaactcgcgagcactcggccagtggtgcctccaatttgcagcctccaatccctggtcagaggtgtgacctgaccctggaccagagcgctgggccaggtcctggtggcttctgcccttcagcttggaagctcctgaaaaccggctcccttccggggcagcccttggcccccactgaccctccctcagtcctaggtgtgcagtggcgtggggaccctgggaggcccgtggcgcagccccttcccgcctcctgcccgtcggtttccattgctcaggcactgcctcgcccgcgcctctttctcccagacctgagccaccgctgccaggatccttccccagctggttttccttctctttgatgtgtttccactgagggtccaaaccggtccaggcgcgggttccagaactttcttcagatctctcgcacctgaaaatttcctctgtagccattcgcaggaggtttctcagatgccccgggctcgggggccagtcagtctcatgaggacggggtgggtctgacttgtggcatcgcggcctctccatcggtgctgctgggcctgtgagccaatgggtgggcagcaccacccaccgcctccttcctcacaccagtcttgggctgcgcagagccccagccatgtgtgtgctgagtgcagtgtgaccgcgtccgcccgtctccccggacacgcctgttggagccccggccgtgtgtgtgtgtgtgctgtgagtgcagtgtgaccgcgtccacctgtctccctggacacgcctgtcagagccccagactgggctcccctggaggaccctggtgctgacacagagtcagcgggtccctggggtccctgcaactgtcccccaagaggtgtgcatggaggtggaccccctgcctcaccctcgggtggcccaaggcctctgaaaaccgtcacggcaggggtcacaaccccactcacccacaccctcctgcatgaacactgcacagctacctcccgtgggctgccctgtgaggtgtggagctgggctgcagacttgcacaaggtggggtcctgtgtctggagtcagagggtccctctcgtcgtccagcctccccggctcctcagggggaggttcggggcctttggtctctggacttgggcagcagaaaggaaacatccctgggggcctgtggtgacccccatcctccccagggtggtctggcaggggacactgttttccaaagcaaagccagagcgccaagggctctcgggattcacgagatccacatttatcccaagttagaacagcacatctgtgcgtgcaaacttcattctgacttcggccggctgtccttcttgcccaaagcaccgtgaggcctcatccctgcatccctgttgcttctttcatgtgggatgagaacccaggaaggggctgagtgtgactcctctggtttttagagagcactgcccccgccccgccccctcctgcttccccaccttttcacagttgcctggctggggcgtaagtgaattgacagcatttagtttgagtgactttcgagttactttttttctttttttgagacagagtctcgctctgtcgcccagggtggactgcagtggtgtaatcttggctcactgcaacctctacctcccgggttcaagcgattctcacatctcagcctctggagtagctggaattacaggcgcccgccaccacacctggctaatttttgtgtttttagtagagatggggtttcaccatgttggccaggctggtctcgaactcctgacctcaggtgatccgcctgccttggcctcccaaagtgctgggattacaggtgtgagccaccgagcctggcctggagttattttgggagagggcagcccctggttcagcgtggcgaggctgcgcttgctctcccgggcgggcgtccacaccctcctcgccgagatggagaagcccaaacccctgcagcgctcccccatcacgtccggccctggaagcccccggaaaccctgccacgccctgagtgggagagcgcaggtccctttccggccctggaagcccccagaaacccttgggtgccaggcctggccgggacagcagcgacactgcatgctcagcccttgcgtgagaccacgggagtgtccgccctctgcacgtgctgctgattgcccacttcgtccagcaggtttgggagcttgtggctgcatcctcctgcagacacttgcccattctggggcctcctctctgtcttttctcctctgttgaggggtctgggagggaggccttggagggtacccatgctgctgggactgatgctccccgcggtggaaggagctgcctcttgaacagcagggggctgagcagaggggaggggatgcgggggtgccgtgcacacaggtgctctcaggacgcaggggcttctcagccctgctgtcccagggctgcactccagcagggcagactcctgaggtgcagacaccccagcttcac

SEQ ID NO: 1888319 - DNA, 4001 bp, Homo sapiens
cccagagtgttgggattataggtgtgagccaccgcacccggccgaagtggttttaatgtccccacttttgaccacttctccttctccatagggcaaatcaagcttggaaatggtgtcctggagcttaagggagttggaaaccatggcttatgttccatggtgacatggttcttgagggttagctggtccagttcccgcgtgttggccggtctggtccctgagtgttggctggtccacttcctgagcgttggccagctgcccttgctgtgctggggtacattccccgagcttccacagtttccctttccttgctgctgtattcagtgatttgcagagagaaaggcgtggagctccacaagcacctcggacggcagcaggaccctcccaaagctgtgtccacacacagctgggcgcccgccccccgccccccgccccccggagggcccggctccaagggtcatatgagtggatctggaggtcggcctctcttgaatcccagcctcctcggggtcagcccaggttgtccccacccccacctgagttactgcggaaccaaggggctcatggccattgagtgactccagttaatgctgaattaggtacctcaggcttgagtcaaatattaacagaggaggccggccagagctccccagtgtttggaggatagcttggttttctccctgagtgcattgcccataccgggtggaggcagttccgtcctgcagactccgtggttctgagttggagcccttactggccagtttaagaccctcttggagcagggttctgcagtgtcctgggggcagaggcctgacgcactcagctgctcgcccagggccctcctgttgggcatttggatttggaatctgaggctgtaggagcagctgcctcccagtgaattctgatgcacagacaggggcctgtcctgccagcaggtcctgcagacggagccgggccagggtgctgggcagtgctgcggggccctggtggaaacagtccctgcagagggtcccgggcactggtgctggggggagggtagggcttaaggaggcctcatgtcgggaccctggcaggccaccccacctcccgcagtgcccggtccgccatccacagtgacacagggacaccttctcaggtggaggaggtggcagtcacggcaattcaggagcaaacccaggcttcctgtgcctctgtggtgggccctggtggtgttggcaggcccagggcacaggcaggctcagggctctgctggggagcagtgggaggccctctctgcagggcggagagccaggtgaggaggtgtgtggcgcaggtaaacacgcctggagcgcagctctgctgtgggttagccgtgggtctctgggcgagggttcccgggatacagacacctgccccaaggtgccccacagaggatgacccccagggcagccgtgcctgagcctgcgtggtcacctcccacagtgccaaggcgctcccccaaggcccctgcggcccacctgaccagtggagaactcgcgagcactcggccagtggtgcctccaatttgcagcctccaatccctggtcagaggtgtgacctgaccctggaccagagcgctgggccaggtcctggtggcttctgcccttcagcttggaagctcctgaaaaccggctcccttccggggcagcccttggcccccactgaccctccctcagtcctaggtgtgcagtggcgtggggaccctgggaggcccgtggcgcagccccttcccgcctcctgcccgtcggtttccattgctcaggcactgcctcgcccgcgcctctttctcccagacctgagccaccgctgccaggatccttccccagctggttttccttctctttgatgtgtttccactgagggtccaaaccggtccaggcgcgggttccagaactttcttcagatctctcgcacctgaaaatttcctctgtagccattcgcaggaggtttctcagatgccccgggctcgggggccagtcagtctcatgaggacggggtgggtctgacttgtggcatcgcggcctctccatcggtgctgctgggcctgtgagccaatgggtgggcagcaccacccaccgcctccttcctcacaccagtcttgggctgcgcagagccccagccatgtgtgtgctgagtgcagtgtgaccgcgtccgcccgtctccccggacacgcctgttggagccccggccgtgtgtgtgtgtgtgctgtgagtgcagtgtgaccgcgtccacctgtctccctggacacgcctgtcagagccccagactgggctcccctggaggaccctggtgctgacacagagtcagcgggtccctggggtccctgcaactgtcccccaagaggtgtgcatggaggtggaccccctgcctcaccctcgggtggcccaaggcctctgaaaaccgtcacggcaggggtcacaaccccactcacccacaccctcctgcatgaacactgcacagctacctcccgtgggctgccctgtgaggtgtggagctgggctgcagacttgcacaaggtggggtcctgtgtctggagtcagagggtccctctcgtcgtccagcctccccggctcctcagggggaggttcggggcctttggtctctggacttgggcagcagaaaggaaacatccctgggggcctgtggtgacccccatcctccccagggtggtctggcaggggacactgttttccaaagcaaagccagagcgccaagggctctcgggattcacgagatccacatttatcccaagttagaacagcacatctgtgcgtgcaaacttcattctgacttcggccggctgtccttcttgcccaaagcaccgtgaggcctcatccctgcatccctgttgcttctttcatgtgggatgagaacccaggaaggggctgagtgtgactcctctggtttttagagagcactgcccccgccccgccccctcctgcttccccaccttttcacagttgcctggctggggcgtaagtgaattgacagcatttagtttgagtgactttcgagttactttttttctttttttgagacagagtctcgctctgtcgcccagggtggactgcagtggtgtaatcttggctcactgcaacctctacctcccgggttcaagcgattctcacatctcagcctctggagtagctggaattacaggcgcccgccaccacacctggctaatttttgtgtttttagtagagatggggtttcaccatgttggccaggctggtctcgaactcctgacctcaggtgatccgcctgccttggcctcccaaagtgctgggattacaggtgtgagccaccgagcctggcctggagttattttgggagagggcagcccctggttcagcgtggcgaggctgcgcttgctctcccgggcgggcgtccacaccctcctcgccgagatggagaagcccaaacccctgcagcgctcccccatcacgtccggccctggaagcccccggaaaccctgccacgccctgagtgggagagcgcaggtccctttccggccctggaagcccccagaaacccttgggtgccaggcctggccgggacagcagcgacactgcatgctcagcccttgcgtgagaccacgggagtgtccgccctctgcacgtgctgctgattgcccacttcgtccagcaggtttgggagcttgtggctgcatcctcctgcagacacttgcccattctggggcctcctctctgtcttttctcctctgttgaggggtctgggagggaggccttggagggtacccatgctgctgggactgatgctccccgcggtggaaggagctgcctcttgaacagcagggggctgagcagaggggaggggatgcgggggtgccgtgcacacaggtgctctcaggacgcaggggcttctcagccctgctgtcccagggctgcactccagcagggcagactcctgaggtgcagacaccccagcttcacgctcacacttctggaaggcgatgtctgtgc

SEQ ID NO: 1888320 - DNA, 4001 bp, Homo sapiens
agcaaaacttgtttttcagggcactcctgttttcctgtaaatgaaagcagagcaggggaagtcctctgtaggaaaacctagaaggagtgaactgccctgctccagagtgcaggcgccagacactgggggccagtccaggagagccccacttcacctgctgctgctccatttaaaagtgcaaggcacatgcatacacgggcatgcacaattgtgcacacaggtgcacattcccagtcacgcgaagtgcaggggcacaactgtgtacatgcacacacacacaaaagtgcacatgtgtgtgcacacacatgccccccgcaggcgtgtgattctcacagtcatgctgcatccacacaaagtcttcctccctcagagtgccttgttctgtcttcacctggattgttgaaaaggctgggggctgggttctttgggccccgggagtgccaggggatcctgtggtatgatcaacagcaccaccgccctgggagcagctcctgattgctgggaacagacagtaggggctgggctggggtagaagctgcagcctgcaggcagcccagagagaggggcccccacaacaccctccccagcccccgctgattgtgtgggggcagggagtatgcaggcagctcggagagaggggcccccacaacaccctcccacccccgctcactgtgttgggggaggggtgcctgcttctgctcaggaaggagacccggctgggtctggctgtggagcgtatgttggagacccgaggccaccctggaactctccaggtgaagcctagggatccaaagaacctcacagctgtgggggatggagtggggcaacacctgaaacctccagcaagtctcttcctctctcagccccaggcctgcagaggagggtgtgccagccaactgggcctttgtgccggcactggctccccaccagtgctcaggggtcaggtgcagaggctggcagggacaaagctggctgtggctgtgtctggaggggctggccatggccctcaccccacccccggcatggggcactggaccatgcagagaaggggccaccccagtgcctgccagggccagtcagagctgccaccctccaggctgtctgttagcgggtgcctgtcagagaacaagacgacaggcctggccaggcccaaccccacagcgagatttcagcggctggccagtggcagacggcgcagggtctgagacagatattccctcgtatggtgctgtgcagggcaggggcagaatcctgggaaactaaaatgcatgttgggcgcccttatacgatgatgatatttggtacattttgaaatactgtggcccatgaagatcctgaaagcagtttggggcactgtggggtgttctgtggcctctgggcttgggtgctcctcttatccaaggcctcccaggcctgggagtttggggtctaaggcccttttcaaggcccaggcacctgcccagaatgactgggcagctgagacccgcctgctgggagccttgccagggccagcactgggcggtcacaggccagagccctgcaccaggcggtcataggccaggacctgtccaaggcagcggagtgccaggcaagtgaagccctgccatctggtgcctgagcgcagaccctgctccacggccagtggctgtcaccagccttgctgcctcagtttcccctccttaaccccggggcgggagtggctgcttcctctaggggttctgtgagcggccgctggcaattgtgtaaaagccacataccacacactggatctttgtgccagatcccgtgtcacgtgaggagacagccagcccaggcagggagctgatctgtgttgtcccctggcgctgcccggggccacagagagtgagggagcggtgcttaccggccctggcggtaacgttttagatggcgagtttgggcctctgcagaagggctgtcaggaggagcttttgatcacggatgcgctgagtcagatgaaatgtggaggctgcaggggaagtgtctgtgccccgtgcctgcaggagcacgccttccccccgcagctcctccggcgcgggcaggccccggcacggcctttctggcttcttccacaggagccgtggaaaggggaattattctcaagcccctgcatctttctggcactttctggcatttcatggtggcagatggggtcacctcgccacctcggggctgatcccctgtgggcccctcgttcccacaggagccttgtgatgggcagggcaggcaccagcaccaggctgggtggcggtttggctctcaccacgccggcttccagaaggccagcaggcttgcgagtgggcacacgctggtgctggggccgggcactggtggggggtcaagggctgaccctgcggggacccctgcagacagacactgggccagagccacagggaggaaggccagtgggaacggcaggaggagggagcgtgattggttacggtggcggaactcgcacccacccccgcagccgtttgttcgtttgctcatttatttttggtctgaagtccatgcttttgtatttccccaccgttccgttgagcagcttcaacatttgccgcagttaggcctctctggaatctgtgcttagagattgtgagacagggtcaagtttcagcagctcggactcctctgtctgcagagaacctgccagcacagctgctcctgggggcaggagaggcactgtctgttttggggtgacgtgagctgatgggaaagccaggctggacatagctcctgggccggcagcccatcttggtggcggcttcacgccgtctggcatctccggtcctggagcatgagggctcaggaagagcctctgattcggctgctctggaggcctcgtctggacacacctgggcaggcccgagtccacacaccctatggcctcaggaaccgagagagaccttccttccatgtttcaacttagacaacaggagactttgttttgggaggaatcactcaattcaggtggacgctgcagctgggcgggacatctggcctctccctgtggcagggaggggcatgggagagacaggggtagtgtcccaggaactccgtgggcctgtggcgaagtcccagccctgcagctgccagtgcagggtgttatccaggggcaggacatcgtctgcagtggctctgccttccccgatgccaggtgaccccatggagccagtgtctgtgacctcttccatgctggggctaaagaggccagcaggattgggggctggcattagtggagaacctcagagcccagggctgtgggctgatgggtggcgaggcccccgccagctgcttggggatagcccagccactgttcttggtccacccggcctttgattcctttttcctgtgtgcatttttgagcaccttctgtgtgcgagaggccgtgcctgcccgagaagagaaggaaacaccacaatgagcctcggacacccacagtctgaagggcccggagtaagcctcagacgcccacagtctggagggcccggcgctgtgaacgagcagtcacagggaacagcgtgcccttatcgctgacacaggctctggagggcccggcgctgtgagtgagcagtcatagggaacagtgcacccttatcgctgacacaggcgagggcttcgtcttctcacagctcttatcttgggtgtcaccccagccagagtcagggctgatggcggggggtggggggggggcaggctgtggtcagggacctgcaggagaggggagggcctcgcttctgatgggcgacgttcatttacacacagctctgcggcccaaacggccaggctggatcctgtcttttaaaaaccttgctaatttggttgatggaaaatatcatctcagagttctgttttgtgagtccccattgccatgcgggcaaacattttcatccactaaggggccgtcgtgtttctctgggaacgtggcgttcaccgtgtgggtgaactttttcacgcactaaggggccgtcgtgcttctctgg

SEQ ID NO: 1888321 - DNA, 4001 bp, Homo sapiens
aaaatcaagggggaagaggagtgttctggacaccaaatgctggctgggtggcacctactctacacacactgtcactaattatccaagaagccttgtggggtagaagaaattcctcttaatttacagatgacagaaatgtagtccagaaaactgactttactaatgtctcagcaagctagtgggtgatagatatggactcccagatctttctgtccacagagcctataaattcttccttgttaggcaggctgcataccaggccctgcttctgggctctgctccttttcctgctaggcaatcgtggcagaattgacagaaatgttatcccccttcaccacctggagcagagccaatgagaggagctggggaacaggccatgaggccctgcacccaccattcaatgtcttcaggattgtggtccctcagaactcttgcaccacatgatggcatcactcctgggtgtcttctgaggttgcataggattcagtagaggccagtggctgtgctgtcatatcctaagaggcagccacgcaggcttgcgtctcttggctgcttcagcaccagaggttggacagcgcccatgcactgaggccctcgggagaatgggaggagggaaaggaagggcagaatggagtgatgtagtgtccatccaccatgtccctggatggagagacccacaccgggaccaccgctggtactcatgaagatgccagcctccatttatatgtcctcatctgacaactccttcccattttcatcctggagacaagacctctgaacacattagctctgagggcacctgagtgtaacctgagacagtccctgaagacttttcatccaagcaggatccctcccttgccatctccagacctgccccacaagctccctcccgggtctcctggctcttgttcactccttccaggcagccttctacagtcatctctaaaatatatctgactgtccctcctttatccagcaccttctatggctccccagagccctccagctcaagttcaagttctttgatcagacatttgatctcaagctgcattctacctcccaaattaagatactggagaagccaccttgcccagcacaagtgcatcactgaagtcccaagtcttgaacgtggccttggtcttgaggaagtcatgaacaccctggctagtgagggtgcagggctgctccaggatgatggtgtctaaagttgtgcacaaggtcacaggccctgcagaagcatcacccctcaggaatgggtagtacaggaagtccatgcacaggcagatctgctggtgccattacactatgagggcactgagctcaaatagggtggcaatatattcactgggattcctgcaaggtgaggctggggagaggaagcagctccataacacatatgaaaccctggaaacccttctcagccaaaatctcaggaccacattacacccagaaatgggtgccctctgagcacaattgtctctctgtctcccactctgagctccctcatggccccacatgccccagcctggcccagagcttgaagcccagtaactgttcagtccatggtgttgactgctccctgggacaggagagcgcttggtggctctgggactcctcctgtggaacccctgcatctgccttgggacctcccaattcccatgggaagcccccatggctctggattgccccacctgccctgggatcctccagccccataagacttacttgatgccttagacctcccagaacatgacatgtttctcagaatgtggctgatgtccagggccatctgtggatgtttctggggacttctagctgatttcctttatggtctgtagggcacggccaagaggagaaaccagcccaacctcagaatggacaaaaggctcactgccccaatggcaaccaccaaactgtcagcagtgcttctgaaaggaaaggtttcattctgcagaaagctccttgtttggcttctttctgacgccagggaggggtaccaatccctgcatacctgtggtgcctacgttaccatctctgcctaggatgtgcaatgggcccctgctctcactgcggggttgacgttacctccagctggagacctgggctcctgacaccgcctggcctctttgtccttctctggatgagggtggaaaggctgtacctggtatttccctaggtccttggtttccaccttctaaacatccagcaggagtgaccatgcccagcaccacacctgaagtgggactcccttgtggagcagccaagaaatctacagatggaagaatgctctggtgagataagccacaggggtccctggggaggatctggggccagaggattctggaggtttccagccttgggctctgtgggaactatgatctggagatatttttttcatttaggtcaccaagagacaacccctaacccctgagcaaggcatggtcaagctctggcatgagattctcttccagcaatgcaatgcttgcagagacaggtacaaaagctggtgaccaggcctgctgtcccccaggtaaggacagtgtgctacccaccctctgagaggtggtgccagtccacagcactgggtgcctgtacccctggctctgcagataccggtcatggaagtcccatggaggtcctcccctctccacattaccttcttgctgcttctagacttcttctagtcattaagcatgttgagccatttttctgtgcatccgatctgacatttttgctctcagatgaaacacgacaaagtaagctgagccaccaggattcctggagggaaccttggatgcttggtcttgggctccagggcactgatgggagggagccagggaagaacaaacactggggctgagcccctatgacccaatgggaacttgtggcctgtccttatggccccaagacaccctgtcctcaggccacaggcaccacgggctttggtcagatcccagcctcccagtagtgtcccggcactagtgggtgctgacccctgagccacaaccacagttctgggtttggggtatggtaaaaccaccccagggacagagttctggggccgggtttgggaggaaccaaggcacctcccagggatggtgtgtcactcctacttgccatgaaatgtgcacaaaggctgtcctcctgcccatcccatcctgctggacaggatggaggaagtgagggaacaggcagcgtggacagctagggtgcagggagaggcaggtgcatgctgggaggtcaggccctgtgagggctgtgggggcatcaggtggagtgggcttcaggtacaccctcagtgcaatgggcaggtctcaggccaggcttcctggaccccggctgggtgatgtggtcactccctgggggactactgtcagaccctggccacgcaccctgggcagcactgtcccatcccaggactggattttctgagtcctcagacaggaaaacactgcccaggcctgacagactgggaagacctcttaagtcctccatccctagaccagcctcccaacagcagggacagtctcctacctttaccttcagggcactgactgatccatctcactctaaggcaaccaaggcagagctgaggacctgtgccaggctggaagccagtcccctccctaaataggccttagggaagcctcatccctgtcccagtgcactgcaagtttcagcccaggagacacatagggaagggaggatggggcctccccactggctgaccctggaaaagcgggacctgggagaagagggagtgcagggctggcaggggattctccaggcccatggagagctcagtctgcaccatggggctgcccctcctgggctggaggctgtgccctctgcaggatctgaggaagtgcagtcctgagatgggacagtgctacccaggttgggtagccagagcctgacaatagtcccccagcaaatgaccacatcacccagccagggtccagggagcctgggccaagacctgcccagtgcactgacggtgc

SEQ ID NO: 1888322 - DNA, 4001 bp, Homo sapiens
ttaaatattctactattgacaatacatagaacaaggagacaaaaaatcaacacaaattggaggctcgaatgacacacaaaaaatcaaccaattctaaccaatatctatggaatgtactgtgcaacaacagcagaatacacattttttccattgtccataaaatattttcttggagagactatatgttcagatataaaataaacctcaaaatatttgaatggcttaaatcatacaaaatatattatcgacacgtaatagaataaaattaacaattaataacaaaagtacatttggaaaatttaacaaatagtgtggtgctctcctaaataaccaatttaaaaaagaaaaaaatcacaagggagattatcagatgaataaatacaaaatcacaatataccaaaagtgaaggcatgcagctataggagtaccaatggaaaaatatatagctgtaaataaccatattaaatgaaaaaagaaaagatctcaaatcaataacctgaattaccaccttaataaactagaaaaagcacaaaaaatgtaacccaaagtaggcagaagaagaaaataataaagcttacagtggaagtagattattaataaaggataggagaaattagcaattatcaaaagtttttttcctgaaaaagtcaaccaggatgacaagactttatctggactgatcagataaagagcatgatggagaaagtatgcaaaacatttaaataagcaataagaaaattataagaaaatactataaaaaactatatcccattaaagtagacaaattcctaagaaagcataagctatcaaaagtcatttaagaaggaatagaaaattcaaataaatatgcaataagtaaggatactgaattagtaatcaattttcaaccaatggaatcccatgcctagccagcttcaaagatgaattccatcgaacttttaaacataaataaacatcaattctccacaaacttaactgaatatagaagagaattgactactttgtaactcattttatgaggccaaaattactctgttgcctaaaccagacaggcttcacaagaaatgaaaattacacaacacatttatggatacacactcccaaattatcaagaaaaaactagcaaatcaaactcggcaatatatgaaaagaatcgtgccctgtgaccacaaattatactaagaatgcaatgttaatttaacatttaaaaatcaatgagtgtaataccttatgttaatagaataaaggagaaaaatcatatgatcatctctgtatttaaaaacaatattggacaaaaaccaacaatatttgcacagtatttattagaaatgacaaatgagttcaataaggctgtagccacatgatctatatacaaaaataaattgctttactatattctagcaattaacaatccaaaataaaattaagaatacaatttcatttctgtgaaaaatgtcattagaattttgaaaggaattgcattgactctgcagatcactgtgggtattttggacgttttacagttgaaaaaaaataaaacacttgggagtaaattttacaagtcttgtgggtgtaagacttgtaaactgagaaccacaaaatattactgaaaatattaaagcagacttaaatatatgaaaagtaatccgtgtttatgtatcagaaaaaaatttgttaaaatggcagtagttcccaaattaatatgccaaaattcttaccaaaattccagtatctttttttgttgttgttccataaatgtgtgtgtgtgtttgtattagtcagggttctctagagggacagaataggaaatatgtatatgtgaaagggattttattaaggagaattgactcacatgatcacaaggtgaagtcccactacaggctgtctgcaagttgaagagcaaggaagccagtagcggctcagtccaagtcccaaaacctcaaaagtaggaaaatggtcagtgcagccttcagtctgtggccaaaggcccaagagccccttgcaaaccgctggtgtaagttcaaagagtgcaaaggacaaagaacctggggtctgatgtttaaaggcaggaagcatccagcacaggagaaacacaaaagcaggaagaccccccactctgcttcttccaccttctgcctgctttttctagccagctggtggcctattggatggtgcccacccacattgtgaatgcgtctttctgagtgtgggttttcctctccgagtccactgactcaaatgttaatcccttctggcaacacccagaaacaatattttgcatccttcaatccaaacaagttaacacttaatattaattacacttaatgtgtaatgatataaaaccttccatttaaggtcagttaatttttaacaagggtatcaaagcattttggtagggaaaaaaagtatcttttcaaaaaattgtgctgtgaaaactgggtatcacatggaaaagaataaagttgtaatcctatctcaaatcatatataaatttaactctcaatatttcaaagaattaaatctaagggtgaaaacactaaatcttttacaagacatgtagcagtaagtgtttacatctttagttaggcaattgctacttagatgagacataaaaggtgtacgcagcaaaatatttattaaacataattcaatttctcttaaaatatgaacaaattacttcacgttccacatttaacttctgcaccattttgagaaggatttttttttttaatcccaggttagtatatcaagatacttaaaattttgcctatgaagaaacatggtaaacacttccacaatcaaaaacaatggaatcttcagcaaaagattagtctatttaacgtaaacaaaaactattttatgggtctaaataaaagagaaattgaaataaagaaaaatattcatcttgtaagtattattaatttttattttttatcagtttttattctactgaagaatatggattgtcttgttttaggaaacatcttaggacgactcctttaatcatttttattttttaatccttctctatcagtgagatacctgactttcaaatagttgttctgggattcctcctaactcccaagtaactccttagggaatatcctcaatgatcagatggtaaaaggggaggctatgaccaggaaatattctgggttttctacctacactcaaatgagaacatctgtcctttatcagcttcgaaaatatttgaaaacatgtagtagcataaagtactttcatatgaataatttaggatgggataaaatacagacggcaagtttttcagcttcgtgaatcaggaaaccataacatgagtatacatctttattttattgtcgaaacatagctaatgttgtctacttttgtttgtttgtaatttgattctttaccagactagatctttttcctctcagttataaggaggcttcatgtgcatacatctctggatctgcaagaacagaactttagtgtttgaattcattttagcaatcctaatctcagatccaactttcatgttgatgcctttagaaataaataaacttttcatttctcaagtacagaagagtccagttttcttcatacattgaatgtgatggacaatatgggctgaagagtttgccagaggaagaaacatgtttggtctcggaattaacatgtataatattacagaacactctacattatccattaaatcaaaatcattgtgatatcatcctgacccaaatggaatattgggaaggttctgtttcagaactaatttttctgaggagttttattgactaatcggatcatccattgctttgttcccttactggaatggataaaaagctataaagcatcatttttctaggaaattattggaaatgaattgatctattgcttctagacaagaaaatcatgttaatctaaaacaaaatgtgcttttcaatggagatgatccaaagagaaattaagatgattaattcaaggcaagaacaagtctgatggctgattagact

SEQ ID NO: 1888323 - DNA, 4001 bp, Homo sapiens
tagactaagatagagagcatttggggtggcctttgacagatgagtagaatctgaacatgagaacgtttttctttttttgagacgaagtttcgctcttgttgcccaggctggagtgcaatggtgcaatctcggctcactgcaacctctgcctcccaggttcaagtggttctcctgcctcagcctcccaagtagctgggattacaggcatacgccaccacgcccggctaattttttgtatttagtagagatggggtttcaccatgttggtcaggctggtctggaactcctaacctcaggtgatccacccgcctcagcctcccaaagtgctgggattacaggtgtgagccactgcgcctggctgaacatgagaacttttatataccacaaaatattcaagaagcacaacaaatgtttattaacacaaaggcaatgacaggctgtcattttgaaaattaagaattatgggccaggcgcgatggctcatgcctgtaatcccagcactttgggaggccgaggcaggtggatcacgaggtcaggagttcaagaccagcctggccaatatggtgaaatcctgtctctactaaagatacaaaaaactagccaggcgtgatggcgtgtgcctgtaatcccagctactcaggaggctaagacaggacaattgcttgaacccgggaggtggaggctgcagtgagccgagatcgcgccactgaactccagactgggcaacagagtgagactccgtctcaaaatatacacacacacacacacacacacacacacacacacacacaaatatatcccagattttagaaattaaagacagttaaagaggaaaaaagctttgtgagagaagtctcttcctgtatacccagagttttttcccccttttcattttattccatctagactagaagtcctgcattgttagaatataagaaatcaagaaaaagactaaagttaaagctatggaatagacctattaaccagaataaagtaattggaatgggataaaggtagcctattgtgtaggaatttcctctctaacccactgtagtctattaaaacaaagaacaaaataccactgtccatgtttttaaagcagttcagcagcaatagctccaagacacgtacagcactggtgtgccaaaatcagctgtgaggtgtgtccaaggtaatttgttacagcaacaggcaaagcacaaaggtttgggaattaattcttttttaaatatcaaggttatacctctaatgatctcacttccatcaatgaacatcctgataggttttcaggaaccacacatatgaattcttctgtatgtgttcatgattggggggcagggggtctaagaagagtggggttccatgtacttctactcttcatcttcatcttaatctgaagcagactcctaagtcaagagggcaaaacagccagaaaagttaaggagcaagaacacagctatgccttatttccctcttgggaatctataacagaaattcagcaaacttgccctatggaaataaatcatagcattctaccagaaccttccctcagggccaacgccaatcactatggttgatgatgagaatgcagtgaggatgctggagaataaggccaggtgtgaggtatgaagaaaggcagaggatactttcaacaggctgaggggaaggcatgcaggattttctagattattcaggtatcactcattaccagtttctgttgaagacagcatctttgtcactgttaagcttcttcttccaacctaccaagcacagtgacaactcttaagttttaggcaatttctcacttagataaatgtgaatgctataaaaaagttacactattttgacaatatataaaaattataacaatgaaacactaatgttggttgttttaggactataactcattactaatatctccctttaattatataaataaaacaccttaccagtttcgaagcattttcacacacactatgtgactgaatcttgacaataaacctggaatgtcaataaagctggtattcacccccttttacagctaactaaacccacgtttagagacattgtaatccacaggagattcacagacactttaccagatgcccaccactgtgtgaagaagccaaaaatctgcctaaaacaaagtccttaccagtaagcatctccaaatccaacagggagagcccacgtcaacaacaaccaccacataaactacataagccagcattaacctgtggaagcgccctggaagcaggtccacgtgtgactgtgcctaagtaatcactgacctattttggccaaaagaaaagtgtcaggccagtctaggagcagggaaagaagccaagaagccagagcttccacctccttggctgccactctactactctgttctctgctgtcttccctttaacacttttttttgagacaaggtcccactctgtctcccaggctggaatgcagtgacactataaaggctcacaacctcgtcaggtgatcctcccacctcggcccctcaagtagctgggactacaggcacacaccaccatgcccagccaatttttttttttttttggaagaggcagggtctccctatgttgcctaggctggtctcaaactcctgggctcaagtgatcctcctgcctgggcctcccaaaatgcaaacataacaggcctaagccaccatttctgggctcaatactttttttgtttaccccctttctcagcttaagctatttttcgaggttcctctccatgttacataatcttatacctttacttacctatacatcccctacatatctctaagatgacaatagcataaatggatccaacagataggaaacatttctttcatttaagtacttgtgttctgtcgcacaaattataaagttctttgaggaaaggattcaattgtcaatgcctagcaagcactcaaacacaactacaacacaaaaaattgagggaataatgaatacattggagcagaaattaggagcaatacgcaaaaatatgtttgaaatgcacagaatctaaactgcgtatatgtgattttccctaaagagccttaacaaatgcagtacagtagatcctgtcaaacccattcctaatttaagtttgtcagactgcctaggagcatctaatcaccaagaattctcaaatccatccatttctttccttttttttttttttttttttttggtgagaagagacaggttctcgctctgttgcccaggctggagtgctccagtgctcaggtgatcctcctgcctcagcctcccaagtagctgggactacaggtgcacaccaccatgcccagctaattttttttaatactgtagagacagagtcttgctatgttacccaagctgttctgaactcccgtctccaagccaacgtggcctcccaaagtgttgggattacaagcatgagccactgtgtactcagcctgtacttccatttttaaaaatgtgccacaagccaggcacggtggctcatgcctgtaatcccagcactttgggaggccgaggcaggcggaccacctgaggtcaggagtttgagaccagcctggtcaacatggtgataccttgcctctactaaaaatacgaaaattagctgggcgtggtggcaagcccctgtaatcccagctactcgggaggctgaggcagaagaatcatttctacctgggaggcagaggttgcagtgagccgagatcacgccattgcactccagcctgggcaacagagcaagactccgtctcaaaaaaaaaaaatgtgccacatgtcacaacattgttaaaaatctgaatgctgaattcaaaatagttgcaagtacatgttgtattatatgtaaaacaagatcacaacagcatctacctccctaaggttggcaaggattaaatgacttactgtatgctagtgcatattatttagatgttttgagaaataactaccccagacccagcaaaatcttatcaatctgaaacttaaattaaggataat

SEQ ID NO: 1888324 - DNA, 4001 bp, Homo sapiens; identical to SEQ ID NO: 1562344

SEQ ID NO: 1888325 - DNA, 4001 bp, Homo sapiens
aaaaagtcgaaactgggaatacacactaatatttctgataatagggttttttaggagaaaaatataggatggggagggaacaaagagaaaaataaagcattttctgtaaagttttatttatttcattaaaaataaataaagcaaattacaccaaatgttaacaatgatcaattttaagaaatgggtacatggatgagtatgtcatgcctatgtgggtgattggtactttttcagttaaataaataaatggcagttggaggagggacagagaaggacatggggagtgagaccaaacaaggatcatgatgagaccagaacttccctagaggagtggcccgttgtgagcctgagagatcccctgtagcgacactgagcagagctccctgtgcctctttccgtcctggcctcacgctgtctggttggctttcccgatccgtcgtccatctctgttgtcctgttgttgttgttgtggttttgagatggggtttcgctcttgttgcccaggctggagagcaatggtgcgatctcagctcaccgcaacctccacctcccaaattcaagcaattctcctgcctcagcctcccgagtagctgggattacaggcatgggccaccatgcctggctaactttgtatttttagtagagatggggtttcaccatgttggtcaggctagtctctaactcctgacctctgatgatccacccacctaggcctcccaaagtgctgggattacagctgtgagccaccacgccaggccttctgctgtccagttttagtaacagctttagcaactgccttgctctgctctcagcattctctgttttaaccatcccgatttcacctctgcctcccttatgtctaccttttgtctcacagtctgacaatgaaaatcatctgccactatcctagcaccaacctgtgggcctccctgaactcccacttacctgggccacgtcagccctgcagcccacggagctcctccagggggtgcctctcctgtgtttccttggctgtgatctccaagcagagggcaggccaactgcgtgtttcctagtccccctaagtagcttcatctttccctcctagcagtagacccctatccctttctctaagaaacactgtataacccacctcttccaggaagcatcgtgaacacagtacttctcaaatctttgtcattcatgaactatctttatgatatctgcaatcattgaatgccatctgtgctagtgtttttgtcctttgaataattcttgtttacttaaaacaatgtaattataaaaaaatgcattactacttttaaatggaaaatcagtttaactagccatacagataaatgcaatacaatgaaagaaaaacaataatattaaattctagtcagatacaattgccttccaaagactctaaaccagcggtttacttttcctttgtctaaaaaaaaagaaaagaaagaaaaaggagactaagaagtgttagagcaatagtgaagataacttacttctgcaaaaacgtgctgagaattctagtggaggcacctaagtcagtgagtggataactggtaccttctgtggctttccctttgaaagaatcacaagaattgagatttacagaggagaaaaagtctcaccatgtgtccggatatcatttctctatagcgtcttatcagctgcataccatcagtgggttccactccattttaattcatcatggatatatcattttcttttcttttcttttctttttttctttttttagagggagtcttgctgtgtcacccaggctggagtgcagtagtggcatgatctcagctcactgcagcctctgcctcccgggttccagcatttctcctgcctcagcctcctgggtagctgggattccaggcgcacaccaccacgcccggctaatttttgtatttttagtagagacgggttttgccacgttggccaggctggtgtcgaattcctggccttaggtgatctgcctgcctcagcctcccaaagtgctgggattacaggcatgagtgacctgcccagccagatatatcatttccaatctctctttacatcagcgcttacgtatatccaactgacactgtttgcctctgttttgcaattgtttgcacttttactttatggtatgtttcctttccttctcattaggaattagccttttaggtaacttggattccattactaggtctgcatatgatgggcagttgctacatgattttattaataccattttgttacaaaggttattgcaaggcaatggagtttgtgataagctagatctggggaagtcatttagggaattgagttactctcacagtgcaaggctctgtgacatgaaagacagtctcaaagattctcatggggtcagactatttgaaaccaaaaggcagtggagtgggagtgacacgagggaccgcatctgacatggtttctacccttgcgtgttcttgtaagtatacatatttgcatgtacatttgtatggatagctcagtaaactcattatagtttcctttgacatcatcacgtgtcattgggaaacaaatgtaatccaagaccttcaaatgatgttgcagttttaaaaaaataaactgctttctctgctattcccattataaatgcaaccaagcctatggccttatagacttgctggtctcaaagcatgtgtttgaggtgggaaaaaatgtgtcatgtccaaggaaatgatacaagatatactttgaaaatagaactgataggacatagaattggcctgaatgtcaggatgaggcaaaggagatgaggaccaaggcggctgctaggtcttggtgaggagccctgaacaggtgaagagtccccctaccaggaataagaactaggggacttgctaaagcaggaatctttaatttaaaatgcagaaatatttaaagagagaactttaagaatccaaggtataccagctgatgctaaaagacgattagccttgctttgaaacggaagcctagtcagaaaagtaacaattccatcactaagatgttgaaaaaggctcttcaaacattttttgctctgactcacagtaagagatacatagaataaagacattttatcttagaactcagtaatgcatacacataaatacacacataaatatacaaacacacacataactttatgtatgcacaggtgtactgaaacaagctgcagaatatttatcaccactatttgatacacactgatacattctatgctcttttatttcatttttttaaaaagtaaagctgcaatccatgaaactgatttcacaacctattagtaggtgaacccaaagtgtgaaaaaccattatcccataatattaagtggccacaacatagtgttagtttcattctttatggtggttcctatttttccagattctttcccataatcctatgccatctgtatcaggtagacaaactttacagttaattttcaatgtgttttgccaataagcccagtgtcttaaattccttttgggttgctaacacagaccaggtaagcatagtcactgtgggttgaagtgccgtgctctgaccttccttcacttattttttcctttttgtatgtgttgctttttaatcagcactgtattgtgcacccacaactggaacagacagtcaacctgaaatacacattcccttccagccccaaaatgcagaaatcttgtgggacagtaaataatgctgatgtacctcttctaaacatgagtccgcctgatacaacgagcacatccaatagcattctcttccttcccctttccatatctctataaagggctactttcaattccccaaagtccaaaataagtcagccatggacagccagtgccacaccccgtggttcttattcctggcaggaggactcttcacctgttcagggctcttcaccaagacctagcagccaccttggtcctcatcgcctttgcctcatcctggcattcaggcgagttctatgtcctatcagttctattttctt

SEQ ID NO: 1888326 - DNA, 4001 bp, Homo sapiens
taaaaagtcgaaactgggaatacacactaatatttctgataatagggttttttaggagaaaaatataggatggggagggaacaaagagaaaaataaagcattttctgtaaagttttatttatttcattaaaaataaataaagcaaattacaccaaatgttaacaatgatcaattttaagaaatgggtacatggatgagtatgtcatgcctatgtgggtgattggtactttttcagttaaataaataaatggcagttggaggagggacagagaaggacatggggagtgagaccaaacaaggatcatgatgagaccagaacttccctagaggagtggcccgttgtgagcctgagagatcccctgtagcgacactgagcagagctccctgtgcctctttccgtcctggcctcacgctgtctggttggctttcccgatccgtcgtccatctctgttgtcctgttgttgttgttgtggttttgagatggggtttcgctcttgttgcccaggctggagagcaatggtgcgatctcagctcaccgcaacctccacctcccaaattcaagcaattctcctgcctcagcctcccgagtagctgggattacaggcatgggccaccatgcctggctaactttgtatttttagtagagatggggtttcaccatgttggtcaggctagtctctaactcctgacctctgatgatccacccacctaggcctcccaaagtgctgggattacagctgtgagccaccacgccaggccttctgctgtccagttttagtaacagctttagcaactgccttgctctgctctcagcattctctgttttaaccatcccgatttcacctctgcctcccttatgtctaccttttgtctcacagtctgacaatgaaaatcatctgccactatcctagcaccaacctgtgggcctccctgaactcccacttacctgggccacgtcagccctgcagcccacggagctcctccagggggtgcctctcctgtgtttccttggctgtgatctccaagcagagggcaggccaactgcgtgtttcctagtccccctaagtagcttcatctttccctcctagcagtagacccctatccctttctctaagaaacactgtataacccacctcttccaggaagcatcgtgaacacagtacttctcaaatctttgtcattcatgaactatctttatgatatctgcaatcattgaatgccatctgtgctagtgtttttgtcctttgaataattcttgtttacttaaaacaatgtaattataaaaaaatgcattactacttttaaatggaaaatcagtttaactagccatacagataaatgcaatacaatgaaagaaaaacaataatattaaattctagtcagatacaattgccttccaaagactctaaaccagcggtttacttttcctttgtctaaaaaaaaagaaaagaaagaaaaaggagactaagaagtgttagagcaatagtgaagataacttacttctgcaaaaacgtgctgagaattctagtggaggcacctaagtcagtgagtggataactggtaccttctgtggctttccctttgaaagaatcacaagaattgagatttacagaggagaaaaagtctcaccatgtgtccggatatcatttctctatagcgtcttatcagctgcataccatcagtgggttccactccattttaattcatcatggatatatcattttcttttcttttcttttctttttttctttttttagagggagtcttgctgtgtcacccaggctggagtgcagtagtggcatgatctcagctcactgcagcctctgcctcccgggttccagcatttctcctgcctcagcctcctgggtagctgggattccaggcgcacaccaccacgcccggctaatttttgtatttttagtagagacgggttttgccacgttggccaggctggtgtcgaattcctggccttaggtgatctgcctgcctcagcctcccaaagtgctgggattacaggcatgagtgacctgcccagccagatatatcatttccaatctctctttacatcagcgcttacgtatatccaactgacactgtttgcctctgttttgcaattgtttgcacttttactttatggtatgtttcctttccttctcattaggaattagccttttaggtaacttggattccattactaggtctgcatatgatgggcagttgctacatgattttattaataccattttgttacaaaggttattgcaaggcaatggagtttgtgataagctagatctggggaagtcatttagggaattgagttactctcacagtgcaaggctctgtgacatgaaagacagtctcaaagattctcatggggtcagactatttgaaaccaaaaggcagtggagtgggagtgacacgagggaccgcatctgacatggtttctacccttgcgtgttcttgtaagtatacatatttgcatgtacatttgtatggatagctcagtaaactcattatagtttcctttgacatcatcacgtgtcattgggaaacaaatgtaatccaagaccttcaaatgatgttgcagttttaaaaaaataaactgctttctctgctattcccattataaatgcaaccaagcctatggccttatagacttgctggtctcaaagcatgtgtttgaggtgggaaaaaatgtgtcatgtccaaggaaatgatacaagatatactttgaaaatagaactgataggacatagaattggcctgaatgtcaggatgaggcaaaggagatgaggaccaaggcggctgctaggtcttggtgaggagccctgaacaggtgaagagtccccctaccaggaataagaactaggggacttgctaaagcaggaatctttaatttaaaatgcagaaatatttaaagagagaactttaagaatccaaggtataccagctgatgctaaaagacgattagccttgctttgaaacggaagcctagtcagaaaagtaacaattccatcactaagatgttgaaaaaggctcttcaaacattttttgctctgactcacagtaagagatacatagaataaagacattttatcttagaactcagtaatgcatacacataaatacacacataaatatacaaacacacacataactttatgtatgcacaggtgtactgaaacaagctgcagaatatttatcaccactatttgatacacactgatacattctatgctcttttatttcatttttttaaaaagtaaagctgcaatccatgaaactgatttcacaacctattagtaggtgaacccaaagtgtgaaaaaccattatcccataatattaagtggccacaacatagtgttagtttcattctttatggtggttcctatttttccagattctttcccataatcctatgccatctgtatcaggtagacaaactttacagttaattttcaatgtgttttgccaataagcccagtgtcttaaattccttttgggttgctaacacagaccaggtaagcatagtcactgtgggttgaagtgccgtgctctgaccttccttcacttattttttcctttttgtatgtgttgctttttaatcagcactgtattgtgcacccacaactggaacagacagtcaacctgaaatacacattcccttccagccccaaaatgcagaaatcttgtgggacagtaaataatgctgatgtacctcttctaaacatgagtccgcctgatacaacgagcacatccaatagcattctcttccttcccctttccatatctctataaagggctactttcaattccccaaagtccaaaataagtcagccatggacagccagtgccacaccccgtggttcttattcctggcaggaggactcttcacctgttcagggctcttcaccaagacctagcagccaccttggtcctcatcgcctttgcctcatcctggcattcaggcgagttctatgtcctatcagttctattttct

SEQ ID NO: 1888327 - DNA, 4001 bp, Homo sapiens
gacagggtcttgatctgtcacccaggctagagtgcagtggtgcgatctcagctcactgcaacctccgcctcctggggtcaagttatcctctcaactcagcctactgagtagctgcaactacaggcatgcaccaccatgtagctaatttttgtaatttttttggagagatggggtttgacatgttgcccaggttggtatcaaactcctggcctcaagcaatctgccggcctcggcctccctggccactgcacccagccctatatatctatctttttgtgtgtgtatgtgtgtgtagtatgtgtgtgtgtggtgtgtgtgtgtgtgtgtgtgtgtgtgtgtgtgtgtgtgtgtgatattacttactctatggcaagcacttaggatgtttactctacttcttgtcctataaaataatttagtctctactcttatgcagaggcccagagattgagagtcatgggtcaaaccatttgggattggacaagattatccttatacatttcttcgaaccctttaattctagaaaattcaaaaccaaattcaaacagaagtaatcaaatttactttggaagggttttgagtctcataaaaatgtgcaattgtgcatttgtatgtatagcctgtatatccagttaaacgatacccaaactcctcaggggaagattacatatctatcaaccattgaagccagaactggccgtgtcacttgtttttgccaatgaaacaagaggagaagtgaggaaggagttttaagagctagtttgagacttactgtgttctctttttctcagtgctcctgatatccaaaattccccagatgcagcatgctccctcagtgtggaaggtccatgagtaaggaccatgaaagtcacagctgagccaccagggcaaatggagtaagcaagaaattaatcagcctttgttgttcgaaggtgctgaaggttgttagcctaccacaacatagcctattctgattgatacagtgattgttcaatgtctgccctttgtccagagtataaaacttccatgagaaaaggagacaaatcatatttaatattaataatcatattcatatttactattggagacctggcatctactatagaacctgacatatacatacagattaataaaagaagttatctggtagcatgtgaatagttaatagaagaggtaaatgacaatatagacaacatagagatgttacaattactattaagtgctataaacaaagagggtgccctttatgacctagattccctgggaggcaaggagtaaatgctgatggatgtctaccatggagcccaacaggaagaggtgtggtggccaggaaagcagaagtgaaaaggaaagagaagggctgtataaacaattaattaagcaggaaagcacaaagtatgtctaatattagggaacggacacatttgacagaagcagaggcagagagttcatacagaggtgaggtgagaataaaatctacaggaaatgcatgcattgttggataaaacccgaatttgcaaacatttttgttgctttaaatggtgtatagtcaacacttaaaaatggctcaaattgtggattttatgttatgtatattttaccacaacaaaaatctctgtctccagggttcaagagattctcgtgcctcagccttctgagtagctgggattacaggtgcacgtgaccatgcccagctagtttttgtatttttagtaaagacagggtttcaccatgttggccaggctggtcttgaactcctgacctcaagtgattctccctcctcggcctcccagtgtgctgggattacaggcgtgagccactgcgcccagccaaagtaatatattctaaaaaaataaataaataaaagttcagtgttgatccatcacccacctggatttagggcagagagttactgttcactgagcattcggccttcactgtacttgtcagtgggggatataggaaaagtgcatgtagaccccatcagctttcctggaagcctggacacaaacaaaaacgctggagagagtctcagatgaacacggtagagtgtcacccaaaggtggacagatcattacaatgtaatttgatttttgagggagttgggggaagaaagaatgggctcagaggctatgaaacgaagtccccgcttgaagaattcaggtcaaggggccaaggagagaaagactctgggggttggagcatctgtcatcaatctggataataaaagtattatcattttataaattagataacatccactttctccctgtgcttttcagcagttatggccattaaggacaccatgttatgtagcagaaattgtgtatgccagcaatgaaccttctgtgcttacacattttggccaagtcacttcgtattatcttatacgtggcctctctgcatggctcagtggctcccctcctctgctccaccagcctgcagatcagctctgccacagtgcagctctatctgccccatgtcatttgtcttcttgttccttatttgactcttgccagcaaatctcaccgcttgataattgagccagctactgaactgctctagcagctcagattcctttccctagctgtcaccatcaggtccagtctttcactcccacatcttgcctcattcaaccacttttgttatttctttaaaataaaatgtgtctgaattctgggcatggttttgggtgggattctgggcttgcatgggtgattcaccgttttcctccagctgactcagagcacccctgcaacccaataagacttcccagtattgggtctactcttttgtcctgtccctcaggccccacagtcatggaattggtgagaaggaattaagacactgaaatcagtcatggaaacaatcactctgttcactccagcacatttaggtggtgttccatgtttactggaatgaatctggatgatagaatctcaggactgggagggccaaagaagtcatccattttatctctgtcccaaagtaggaagttatacagcaacacatctgatctctgtggggaacctcactccccatgaggcttcccagtcatatcaggagacatgggcttgtggtgcagaaggaaaaataaagggtgatggcaacagaggccatggctttgacactatcctcgccaccatgggcaagttcttcagactgtctgcatgttggtgctttcctagtaaaatgtgggtacaattctgacaaagtctgcctccctgcgctactgcacaggttctgtgagaaggtgcatttgaacagcacgcgtccacgcagttgaagagggcatccttttacagctctgagtttgcaagggtagtgccctgggcatggggcctccaaagagctatgctggcttccaaggctgctgaccaggtctatgctgaccccagtgctcaggggttcatgagcctgtcagaaataggagggcaaaataataaataaaactacccccaagacaaatccagctattgtagccaactgatagaatctgcctatacctggctttatgaatacttgtcattctgtaaataaaaaaatgaagaggtagagaaagtcgtttacaagaataaaaggaaattgggtggggggagggtgagaggacagttgttttatatatacatatgcatacacaaatgtattaaaagacacactactatcacacatatattggggagttgttctgctcacataataaagagctgttttacacacacactcagtaacgaggtaaaacatataaaggacacgacagttcctgggacacagtatgtgctccatagtaaatgctggttattatcattgttttcagtatatccaacactgagcccaaaataaaataacgtgttttgcttattggaataacaagatcacacgacagcactgaaattgcttagtcggaaaatgcaagaggtctcactcactcttcatccctaggccggtggctttcattccacgttgattgacaagcacctgtgcggtgcttttagaaagac

SEQ ID NO: 1888328 - DNA, 4001 bp, Homo sapiens
ttgggtccatgtgagctgtctgctaaaaaggtatgaattgcatacacagtacttgtattaacaaaatcaaaaatatttaaagtacatataagaaaagacaacatggaagaagagagagcagagtacaggacagagggaaggaggtggagaggaggggaggaaagaagaggagagaggagtggaggaggagagaggaggggagggcagaggggaggggagaggagaggggaagagaggaggggaggaggggagaggggagagtagagaggaggggaggaggggaggagggaagaagaggggaggaggggagaggaggggagaggagggaagaggagaggggggagaggggatggggagaggaggggaggagtggagggaagaagaggggaggagggaagaggagaggaggggaggaagggagagaaggggagagaaggaggaggaggggaaaggaggggagaggaggggagagaaggggagacgaggggaaaggaggcaaaaagggaaggagggaggaggagaggaaggtaggagtggggaggggagggaggaagggaggagaggagaaaagaggaggggagaggagagaagaggggaggcgagaagggaagggaggagatgagaagagagagaagggaagaagagaggagagaggaggaaagaggagagaagtggagaggagaagccaggagaggggagtagaggggagaggaagggagaggagaagggagaagggaggagaagggagatgcgagaagctcagggagcagctcctctttgcttcttcaaattctgctttcaaaggagggagtgagtacgtgtcctttgagatttttgtggattcctctctacatgtgtgcttttgcatcttcctatttcactcagcaaaatatcctggatcttcctcgggtccctggttgtaactctgtttcactcattttagtgccaggttggtgttctaggcattactgtcgtttcttcaacacattttgatccttttaaaagaccaaccagttgcccttgcagagttggggtcctgcggccctgcaagggatctgacttctcctgggagggccacttccactgcccctctatgtcctgtgagggtctggaaccccaacacccttaggaccccagactggccccagctgccagttcgctcgcttctctctcagatcgagattctgagactaattgctcccggcagagtccagggctgcacgaggaggctctgagcctgactctgccggggaagaggtttagtggaatccaggctgagaaggacctgcccctctgcagatgcatgcagacttctgaagatgactcagtggattggagactgtccccagggccaccttgggaggcatgtaccaaagatagcagggccacacaagggaaagagccagggtcaacctgacaccctcgaagcagagtcccgctcactcaggacacttggatggaacagggacaaacctgctttacagaatagccgtgacattttagaccccgtcagttccacttatttctcctgggttcttacattgcaaatccaggtctctcagcttgtacctttggggagacctttcagtcctctccccatctccctctccgttgactaaacccaaaggagagagggggcctcagaggaggatccctgggaccttggtgggcaggacccagcttccctgtgcggaaggaaacttgaaatcaggaaactgagcctcacccagggatgggccccaccactgtcccctgagaggcccttgtggacaggaagggacagggcatggacccacttggaccctctggtttgctgtggggccagctgggcctggtgtggccgagctccaccgtgtcatcagccatttccaggtccctcatggcctgggcggagactatcacctctctctgcacagttagcagaacaaagtcagggatgctgtttctacaacctggctggctcccctcccccagcacaactgatcttctatcctggttgccaggcacttgtgagcattagagacagaacactccgcagggttccgagtaggcagctgtggcccacaggccactggcaagcaaaggcagagccacagaggggctgctggtccccaaatgtctctccagctgctctggagctgctggggctacagagctggtgaaggctgagatcatgagataaaccccagggctccctgggagatcctggtttgtactgctgtgtggtcttaattattaagaaacaaggcactttatgaagaggaaaagagctgaacaaaaggtgttctcttcaggaggtccatgtagaaggcaggcagaacactgggctaaagacacagacccaggaagccctcaagttgccacagaccttaaatattacaatccccctgcttgtcaatcattaatacaaatctgagcaggtcttccctgcaggacacaggcggctttctggaaaaagcatggaaaagtgagtctcctaaatgttctcaagtgactgattcaggacacatcttaaaaggatcaaagaaggatggagaaaaacttcagaaggaaataacagtttgaatgaaaacactcatttagcagaaagtccagaagtgctcgaccaagaaattgcaagatggaagcagacagtacaggaaaggaaggagagaaagaaaagctggaaacctttgaatgcacaaataaaacaggtcatgaaagataccatgagccaattaaaatctatggctgaaaacctgctggacaccatgcagttgggagatttctctagggaccacagtgacgaggactcgaaagtacagctaaagaggaaagcagaaaatgaagactgcctgccccagcccctcccgcccaactatcagtcagaaggccatctgaagagcgtcctgggtgatggtgacttaaatgtgttctgtgaaagtcaagaaaaatcaagaaatagcttgacaattgtgggaaaaaaaatcaatgaatgaagagctcacaggacaaatcaaacatctccaaactgagaaagcgtctttgcagtttgaaaattcccaacttgcaggtgggatccagaacctgcagctgaagcttcaaatcctacctgaatcacatcaagaacacatagcgcaacttcagagaagatcacctgcggtggaaacacacaggttagaaatgaagaagaaacttctgagcgtgtgtagaaatgtgaatacacacagcagattcacagcctctacaaggagatggctgaaaatatcagcaaagaattggaaagaatcacttccttctatcagaaggagattcttgcctgtgtggaaagagctcaggaaagctggagggcagttctgtccactgagagaaagctccgggagctaagaaaagaagatgattgcagtaggcagatcctggctgacatggagttcaagttcctgccttttactaggggttctttgctcctgctgcttcaggtacagccaacagaggcccacaaggaccaggggtcccctgagtcatcaggttcccagcaaggagaagtgaggtgctgtgaggcttagggattcagggccagcaggtttcactcagctctcccagcagcagggccctcaacacccacagtcacagtgagacacagcagcctgggctatctctttaaagttatcttgatttatctctttttagtttagctactgttatttagctgctcttattcaaatagatatagcattataatttctgtttctgtttttcaaggaaaattttatttcattcaattcttatgacttttatttccatgtctttggaccccccctagaattatatagtataaatattgtgttttaatttaaaggaaagattcactattactgaagccataattgaagtttaacacagagatatctgaagcaataaaggccattttctgtatgctatgaactgttattagaaatttgcataagtaacttaatatttacctgaagaaatttcgactggttttatacaacaataaaaaa

SEQ ID NO: 1888329 - DNA, 4001 bp, Homo sapiens
cttatatgtggtttcatctagtgctcttaaaccagactcactaacctactgtgttttaaaatacagcttgccaaagtctgtgttaatattatttaactttgatgtgtatctgtgatggttagttttgtgtgtcaacttgactgagccatgggatactcctaacaggttgaatgttatttctgggtgtatctgtgaaggtgtttctggaagagatcaggatctgagttggtggactgattaaagcagatggctctcctcaatgtggctgggcctcatccagtccatccagggtcagaatagaagaaaaacggagaggaagggaggactttttctctttgcctgattgagctggaatattgatcttctgccctctgtgcttctggttctcaggcctttagacctgggctgcaatctataccatcggccctccagctcttaggcctttgactttcatcagctttcctgggtctccagcttgcagagagcagatcatggggcttctcagcctccacaatcacatgaaccagtacctgataataaattggttctggtttttccagagaaccctgattaatatactatctgtgcattcacttaggagaaacaaagtcattaaatgtgaaaaaaaaaaaagaactgagtcactcagaagaatcatactatagttgcccatcatatattataaagaacaaagtattctaaattatttacgaataagaattctataaagaaaatgactgattatctgcgcttacacaaaatatttcatggaaattttattaccgtgctcttttttttttttaatttaaccatcattatgttgtgcattcatcatctggagtttttagttgtttagaattccctgttggcagccaaattcctgtctgggaaaatgtatgagccagccttcattttccacgatgactttccaaggaaccattacaattaagagaatgtaagttactcatctccaataactgtacatgaagcaatattccgaggatttgttaactgtctttgacaggagatcatctactcacagtaggtgcttaacaaatgccatcttgaatgaatgaagaccctttctcacagtaacaaagttgggtccaggctccttcatttttgctcagcaagatgaagctaaggaaacaggaaataagtcatcaaccaaatcatagtaacaaatcgttctattccattctccataattcacccttcagtccaggggaacactaacaattgcccctccagatacaaagaaattgcctcctctgaagacagctgcctcacctaaggccacatttccttccaggttgccccacttccaatgagtcactgattggcaatccataaaggtcagctctcttgcctcaactcagcatacctctgacagatcgtcccatcttcccgtctcccttgaggtttgactggggttgctgctgacccagtgatataggagttaagaagaaagtacttaggcagatagtgaaggtatgggagtcctcagtaaggtcttccttttaatgaaaagcagcccccaaatcattttcttttctaacaaaaagcaacctggaaaatcgagctgcagacacagacaagcaagctgaaagcttgcacaggcaaataccggcagttgtgccaataaaaatatactacctggggccggcgctgtggctcacgcctgtaatcccagctactcaggaggctgaggcaggagaatcgcctgaacttaggaggcggaggctgtggtgagccaagatggcgccattgcactccagcctgggcaacaagagcgaaactccgactcaaaaagcgacaacagcagcaacaacaacaacaaaaaacactacctgggattaggcatgttctaaatggcagctccatcttctctttttgccacccatgtttacagaaacgagtggacaagacggcccctgccaagtgggaagcctatttgcataacaagattagggtggggtgaccagccttccctgcgcgctacgtaaacgtcacccctggtcgaaccaatctctgggctccacgtaaatcagacaccgcctcctcaagcctgcccgtaaaacctgctgccgtcagtcacgggccagcctttcccttaaggatgtctgagagctggtctcctcactcttttcttccgcctattaaactttccgcttcttaactcacccatgtgtgtccatgtcgttaatcatcttgacgagagatgatgaaccccggatatttaccccagacagtgatgccgcttcaccagcattgcactctacttccccgcttcctgatcctgcctcagcttctcctctccacaggtattgatcccaagaacaacccgtaagaaatgtcctgcacgctaatctccatctcagagtcagcttcccagggaatccagcaattacgaagcattcagcttaattttgttgattgctttatgattttgtgtgtgtgtgtgtgttttaatgttgaaatgtaacatatattcaaaagtgtggataaagtctccatgacgattagtttcctgtgtcatcatgggggccaggctttagtgcctttttttttttttttttttttttttttttgtggtgagacagagttttgctcttgtcacccagactggaatgcagtggcgcgatctcggttcactacaacctcctgggttcaagtgattctcctgcttcagcctcccaagtagctgggattacaggtgcccgccaccaagccaggctaatttttgtatttttagtacggatggggtttcaccatgttggccaggctggtcttgaactcctgacctcaagtgatcttcctgcctcggcctcccaaagtgctgggattacaggcgtgagccactgcacccggcctttactgcccatttatttaatcaaacactaatctaggtagtgctgcaaaggtattttgtagatgtagttaacatctacaatcagttggctttacataaatcttacttttcatactgtgaatgggccttatacaatcagaagccttaagagcaaaaactgaattttcctagagaagaaaaaattctgcctaaagtctgcaacatcgtttcctgcctgagtttcagcctgccagcttctcctacggattctggacttgccagccccacaatcatgtaagccaatatgctaaaataaatttcttaatataattcttaatgtatatatccttttgattctgtttttctggagaaatctggcttatacaggctcttaacatgattgtttatctgtcaatttttattttatggctatgttattaggtataaacaaatttacgattatttcatattaaacctgaaacgttgattattctgaaacgagccagtctttgctttggttttgtaacttttgctttgcatagtagttttaccatcccttacttactttcaacctgtcgatatctttatatttaaagtaagcagcttgtttagctttgcttgatattattaccttctctgatgagctttatatttcaatttcaatatttagtctgtttatatttactgtaattcaaggttaaatctaccatcttaccattgattcctattttctctgttctatgattttttttgtccttccttaaagtttttgggcttatttaaatttttctaattacatttcttcttctattagcttgttatttatatgtttttttaaaaaattggtgttttctctaattggtgcaacatgcattcttgacttactaaagtgctatcggtgtgtgttttaaaggcgctactgtaaatgtgtatacaagtaatttttatctagatttaccacatagacattcttatgactgctctttgttacttcctgaatttccatgctttgctctactacatgttatttaccataataaatgcataacatttattacctatagctctaaaggcaaacaggcagtgcggttccagttttatagataaggaaaccaaagctcagggaaatatagtgagaaagagtatagct

SEQ ID NO: 1888330 - DNA, 4001 bp, Homo sapiens
gcaaccgtccataagacacattcactcgtgtgccatgtcagtttaccattgccttggcaacacccggacattacttccccttcccatggcaaggactcaacaacccagaagttaccacccttttcctagaaactcctgcataatctgccctttaatttacatataattaaaagtggctataaataggactgcagcactgcctctgagctgttactctggacgcactgcctatggggtagccctgctctgcagggagcagcacctgtgctgccgctatgcatggccgcttcaataaaaattgctgtcttaacaccaccagcttgcccttgaattctttccagggtgaagccaagaaccctcccgggctaagccccgattttgggtctcacctgccctgcatcagcctcatgagcaaacgtgaaggggaaagccactgcagccgtggtgtgagggtgagcagtagtaaacaggggttccaaggcttttgccacctgcatgcctaagaaggtttggttttggcatgggaacctgagctgaaccttgggggacaagtgggttttgtattaagaggaagaagcagaatggctagaggagagagttggcttagcaagtgcaaatcctgacattttccagttacatgaccttggggaaatcacttaaccttttaggtttatttccttgtctgtaaaatgcaggcaagagtaatctcttcttcatagggtacttggggaaattaaatgctgcaatgtttgtggacaggtaacacagtacctgaaatgaccattagtaaatatcatgttgggagatggtgaagagcagggctggagtgaggggcttaaggaaggtcacatggaggtgggaattcagattcagaggccaccacagccagcttgtggggtgtggctcttgttctggagcctgggttgagtttttttgtgtttactgagcagctagtatgtgcaaggcacattcatttaaccccagcgctccaagagactaacttctgaggcccctgctgcagggagcagggctgtggcaggggtagatgggagcttgggaaggggttgagggggctggcccaggcttcagtgaaaccaggtgtgaggaggtaaagtgagaatgaggctgatggcttggggtgggtagcagtgagggcaggtgcttgggccaggactgggatccatgggtgctcccatgggcctgcagggtagacccactggcaggactgactaggtcaattttaagccacaggagaaagccggtgggggtgttggaggaagcaagggctccgtaaggccctgacggatagagtaacacaggtgacatcacatcagaaatgccccctacctggccccagaccaagtccccagagtctaaggccacgtgcaaaactagtatttcatgaggttgaccaacaagctgcaccgcctgccgcatgaatccctgagctgccaggctcaggccactgccccccagcccccacccccatccaccccctgggaatccccacttctgtacaatcctccaggcaaagagcggctctggcctcctcgggctctggaaacaccctagcgggcatcgctccactggcttctctgcctgactgcccgcccctgcccctacctcctcccccgtccctcaggctgcactcagatgacgccgttcctggcttctgtctaaacctgggtcaagtttagacaaagagactccctcatccccttcccagcttcgttttcctcgggatcacctgtgacctcccatgtattgtgtgattgtagatgacatccgtctcccctcctgcagtactgaggccttccatcatctcttctgtcccctttgtatggaagcacctagaacagggcagcacatgagaccagatgaatgaatggatgagccagtgaacaggtgaatgtgtggagttcagtggcccgtccagatgaccagggccgcatggctcaccccagagataaagccagatgcactggagcccccgggtagaagcgaaggtggagaggagccagctgaggacaccagacccctcccctaggagaggtccccagtgggggagggaggaggggaaggagggggagctggacagtcttctgaaggaaggggtgaggcactgtgcctcagctttcaaaggtctggcagtttcgaggtggtggcagtttggaaactggaagcaaaagcgatgtggcctccagtgagtccccagtcaaagccggagtcctgctggcgctggggcggcagccagcggcgggaggcacagtgtgatctgttcaatggcttcctcttttcagaggctgctggctcaccccgcgggaatgaggtggcacttcaggacatgaggcttggagctggtggcagatttcttggaactggcggtggggagatctaaattaagagctttctatcacaccaaataaatagaaactgaaatagaggactgaaggaattaggcagaatgcctttatacacaacttctgaaaaatacctagaatggtatttatgcactgaagtcccaaggtatttgctgaaaacaatgacaggtctgtttgacacaaaggcacatgttacagagagcaagcttgtctctttgaaagtgcctgccacaggagccctgtaaccataccagctgctcgttgtggaggctgtcctggcaaggccaagggaccggccccagtccttcctctgggaggtaagatgagtcacctctggcatggaggtgtcctcctggtggcttctttttgggcactcctgaaacagacctgctttgcattcacatgcaccctctcaggcagggcctggccagaggcaggaaggggacttccttggtgtttcgtagcacaggacctgttgtggcagggacagaggttctgctgggagtggcccccaaggaaccactaagaggctaatgcaatgacagactcggcctgtctctgggccagagacgctgcagagagcagtgtctcctttccaggatggcagagaaccaggcaaggccaggcggtggcaagggaagtgaggaccctagccaaagagcaatgggaaggagctctctcagcagaaatcatcccagcagggtttgctgagtgcctgaatcaccatttcaaatgtgaaatgagaaaggtatcaagcaccaccagaccagcaccaccagaccagcagaactccaggctttaccagcttttccagggaagcaaaacagcatttgccaatgactgtggtgttagtactccaacgatggttgatttcaagctaccagtgtcaccccactaaacacagagttgggaagagttgcattatacggtatttccaccatacagatactatagacctcaataatcccaacataataagttgaggtaatcaggagtacattggtttttgatataagtgtatacatgattcaatttttttttttgttttttgagacagggtctcactctgtcccccaggctggagtgcagtggtgtgattacagctcactgtagcctctcacaccccagaccttcacccatgccccagagaacagcaaaacaggtccttgctaagtacatggtcctacctgctagaaccaggaaacttcaagacaacttaaaataccctgtgtattggtccgttctcacgctgctataaagaactacctgagaccggctaatttatgaagaaaagaggtttaattgactcacagatccacaggcttaacaggaagcatggctgggagactcaggaaaatgtacaatcatggaggaaggtgaaggggaagcaagcatgacttacatgggggcaggagagagagagccaaaggggaatgccacacacttctaaactatcagatctcatgaggactcactatcatgagatcagcaagggggaaatccgcccccatgatccaatcacctcccaccaggcccttcctcctattcgacgtgagatttgggcagggacacgaatccaaaccctatcaccctgccagcaatgttctaatttatatttcc

SEQ ID NO: 1888331 - DNA, 4001 bp, Homo sapiens; identical to SEQ ID NO: 1562351

SEQ ID NO: 1888332 - DNA, 4001 bp, Homo sapiens; identical to SEQ ID NO: 1562357

SEQ ID NO: 1888333 - DNA, 4001 bp, Homo sapiens
ttaggtatgattgtacatattttaattgccgcaaaaagatgcttccctctcctcaattaattcttctaccctgattcctcattgtatatgaaatgccatcattaaaaaaatagtttgttggttcttgtccctacaactaatactactaatactcttctataacaactactactaatattcatgaaatatataaataaataaaaataaatagtaaaaataataaagacttcacaatttagattacgtacttttgatattaaatagaaatttacacttttcataaacagactgtctttttaacttcattgcaatatgcggactaggttttattatacagataagaaattgagactcagaggagttaaataatttaatgaaattcacacagataataaattttatagttgaaatatataagcagttcttctgactttaaaatatgatccttcccacccccatatatcaagttgcatgtttttgcttgctgccttttaaaaagtagaaataatcctcggtcaaatgctgcacatgaattcacattaaagtgtctgcactctcctgctgataaagacccaaatgtggcagaaatggtacagaagaggaggcagcttgggatttggcagtcttgtgaagattcagccatggctataaacaagggtatgtggaatccaatgggagccttcttaactaccacatcccaaagaagtaacagagagctcaagcccttcagcccatttcacagatggagatgctgaggccaaggctattagacacgtccactatgctacgttagatcggtgacaaagctgattctcctgacttccagtctagtgagctttctatcatccagtcctgtccctatgtgatcagctgcataaattctgagtaaaacaactgactatattgttcaatatccactgtaacatgcaacttgctcatcagaaagttaaggctaactttttccccaacaggaaagtcagaaacaaatcatttttagtaataatgaagctctgttagaagtaccactcaccttaaaaatatgtttaggaattattaatatactctcagcattctgattttcctggctttctgaagctaagatgttgcaggagagccttcgtggctttgatcacaggcaatcaaagaggactttgtgtagcttccagggacacgctgttgctggaaaagtcggagctctgctatgcaaaagaaactgctacagaaatccccttcattcttaactccagatcgaattaggatcagaaggctcttgttcgctgcccaggagtctgtggttttaattttcttatctgcatttttctttcctgcccgttccaggtagctgtcacaaaaaatatgaaaagggtgttaatttgttgatcgttctttgctgcttctcactttcatgtttacagcaaggagaagagcaattgtttctaccagtagctttagtattttgagttctcatgtgtgtaataactatcttggtaggcccagaacacacaatctcatccaattttgaaatttggattttatgccagatggattatttcagtacggattacaaatgcttatactattctgcctagcagagtttgggtcataaaaatcattaaatgtaaaacattgcacaaagttgcccaaattgtcatgtctctggccaaatttgtggaaataaaaggagccatgcatttgggttatttctacagtttggaaactttgactcttatcttctcttaagctactcaggaaatttccagactctaaaatctgagaggaattgttcagacagacaaaggtggtccagaatggagactttcctgatgccaaggatggcaggacccgtgagtgtccacttcacccctgtgatcctacctctcgtgaggctttactgatgaccttggcttcctctttgatgaaacttttggtggctgagcctcttgaaactgacttggacaagcttggacaaacaaccttcttttgaatcaacagagtgtaactgaaataccgttggaaaattcaaacaatactctgattaatgccagggagaaacaatatgtaaataaacccaagaacttaaatgaatacttaagaaacatacaccttgctttcacagtgttagctggaactcaggaaaggggtgttggaaaaagtggaggtggcatgtctcttttattttattgtttgagatgaaacgggattaagcatgtttaaattctaagggagaaaaaggttgctgtaaattgtgactttaaaaagactgacattaaatcacagaatatttcttcagtgggctactgaaatttatgtctgtaatcactactcatgctttctattcttttttctttgagatggagtcatgctctgtcgccaggctgaagtgcagtggtgcaatctctgctcactgccagctctgcctcccaggttcaagcgattctcctgcctcagcctcccgagtagctggaactacaggcacgtgccaccacgcccagctaatttttgtatttttagtagagacggggtttcaccatattggccaggatggtctcgatctcctgacctcgtgatccacctgcctcagcctaccaaagtgctgggattataggtgtgagccacccggcctggcccatgctttctattctttcttcaacaactgatactatctttcttcaaccaactgatactttctgccttcgcctcttctcagggtctgccttgtttaccttaacccctgcaggaagccagatcacaattggagatttccttcctgatcatgtaaagagaacacaacaaggatttgggagattaatctgatgtgtaagagctagacatatcctactcaaaaggatgctcttactccctagccaggaccatgcataaatggcatgcccatattgctctgagactttcttttcccttatcttcccatggctgtgcagacatcagttgagactatattctttcttagtactctaatacattcaggcaggttacaatcaagtcttgcagtcctgggagctcttttgtctatttaaggtaactgtgattctctacttttatttattatttgtttggctcatagtttagctctcagggaacaattttattttcattattcctaagttcttgggagacaccttatggtatccaacaaagactaacaacaccatgcagcagtgcaaattcactctaagtaaaccgatgaaaaatagacctttaatctgattgaggtgtagaaaatggctacctaaaagtgatactttttccttttgattattttgtatggcagtaccttgagtagggaaaaaatgttttctttttctctgtgtgtaaaaatcaccaaaagttactttgaacatcaaaagaacaccactttaaattgcatttctggttgttcccttcaattggcaattctctggtttatatttgtgtgtcatctcttttaatgtcctctctaaacctgttgctcaatgattcattaaaattgataacaccctacttcagatcagccaagtcctttcacttgaactttttctcatagtcactttacaattacaatcattgagtaaaatcttaactctcttgagtgaacatttatgattttctgaattagccggaatgatatcaatacatgtgttagtgtgcacatgtgtgtagacagagaaaatgagagagaaagaaacagggagaccactgaaggaaggttatcctctgtattttattcccacagttctttgttcaaattgtgattaaatcacttatcagatcatgcaatgatgtcactatctgtatttgtccttgcccttacactgttttacccagctttgtgtttcaagggcttggcacataggcagaaatttcaaagttgtttaacaaatgtttgataaagtaattaatttcaaatcagggcccaagtgtggtacccaatccatgttctagtgtagagagatgttaaaattaaccatgcaacctaacataacagtcagcacacagaagtgcaa

SEQ ID NO: 1888334 - DNA, 4001 bp, Homo sapiens
caacagaaaactctataatctgacattttttttcccactatagtgaataagacagtgtgcttaatgtaagagtggctttgggaacaatcgattgcttgattaattagattagttgggttgattttttaaaatgaggtaaggttttcatttccgttttcttgcttttgttaaccaggacacattttttttgcaggtgctaactacccctccccctcaaaaaaacattaatggaaacaaagatcatttaggctgaatgtattagaaggtgaccaccagtgtgaaatatttgaggaaaataatttgtttgcagttttgagagtacacattatacatgcaggttactcacttcaaaaatgtctctcccatcttctggcttcctcttcactctgatttgcccctctgttggtctgacatgccctgatagagcacagggcatccagccagtctccacgatggtgcatgggatgttggctggagggaacaaaagaaaaaaaatacttgttatgatctaaaagcctataatttttttaagaaaatgtctgcttctcgaagcatgagtctttccccaactctgttctcctcttatgtatagcactgaagggggaagaaaagctgttaaggaaacatctttttggctaggtgaatgatgaaatagatggagctattgttatgctttcacagctatctatacaccgtaatattatgcacattgcattggtgtttttccatcaaaggcaaaatcaaattagatgaaagtgttttgtgttggtttcttatctcttcattgtttgcaataacttttctttcttcaggtgtcttgggctcaattcctgagaaggctgattgggccttaaggcaatgagggaagccaacacatctctctcaggagccgagggaggaaatgcccaatctttttatgtcagcctctcttggagtcaatagggaaaattattagaaaaatcccattctcactttcactcaaatttctactgcccagaaacccataatcaaagaacaagtcatcaagcatacttcttctttatatgtgtgtgtctgtgtgtgtgtgtgtttgtgtgtgtgtgtgtgtattgattgatttgctggttggttggttaattgattgattttagttaccaatgccttaaaagggtcttcttaaggaacaatgaagacccttaatactgcagcatacctgtatacattgaaaagcactttaaggcatttcttggtgtgtgaaaggaaaagtaaaaattgagtcttaccaccaggtaacttctgtgagacccaagtcttgattcgtctctttgctgtacctattgtcaggctttatattgaattaagatgcaaattccaaacaatgggtgggaactgtaacactctaagcactcacacaccatgattccttctgggtttcacgctccattttaattaagtgctgtttttattttatttttctctctgaaaaccaaggctgctggcgaagtgtctaaacacttgtataaagtgtggaagaaggtttgtactctgacaacaactgcaggaaacctgggggtgggatggggaatgtcattggaaaggcctgtgcccttccaatgttaccagacctgtagctctccaattgcagtttagaagggaagttccatgtaaagagagaggagtgattgaatatgttatctctctcaacaacatcacctgtgaattgaaaacaggtttgcagtggattaaataattatggattaaatatttcccccaagattatttttgtttctcccaggcaggatcagtccttgttaggattgaaagcaggcaactgtaacagaaggagacactgacctatttatattccttctcaaatcactaaatattttccttaagggggataaaaatcacaatagatttgatccatgagactagtcagataggctacagcctcagaaggctaggacacctcctgtaatgtcaccaccacaaaatatgaaccattttcagaaatttccttttctcatgagctatcttttgttttgtgtgatatcttcatcagagtatactgtcttgcaatttgttttagagccacagttctaaagaggacacaaacgttagggaccttggaaaggaaatgagattatcttgtgaattataacacccactattttatagtttattatacagtgccatgttgccaatgaatgtgcatagatttatgtaagcaaatatgagacattaaaaacatttggatcagagaaatgtccccgtggtaagcaaacattttctttcatctcttctctctctttctcttcctcctctccttccttccctctctgtctctctctctctaaaactacttggtaaaaaaaatctatggactgatgaatggaccttaaattgcttcaggttgttcaacttgaacagttttgtcaggttcactttcatctttcaaattatcagctatgtcacagaaagtgtacacaagtttctccctgtagccaaaaaccttgtccccctcttagtagtactcagtgatgaattcaaaaattttttctttttaagttttcaaagcataggtttaaaagccttgttttaatcttcagtgaacaaggctactaagtgcatgtagaaggcgatctggtttcctcactaaaattttactggtaaatagatgaacctaaccggcacccagaaaaagaaaaaaaaaaaaaaaaacctattacactaatccatcttgagactctgggcactttgaattaatctaatacaaatgtcccagggaatggaatccaagctttgaaattatataaaggggaggggggatgtcctctatttgtcactaaactgcaagagccacacacactcccgagggttgtaactttctgatcttgatcctccatgccttcatgcctcttccctcctggtagcccatcatgttccacattgtaagttgtatatactgtggtgtgctgttttgtgttataactccgtcaaaaattcacggtaacctgagttctagcacaggcgacccactcagacccaacaaacacattgcactttttccagaagtctccaacttaaacaaaaattcaccttcatcatattgaaatcccaaaagctttcctcgtactctgacttattttagaatagtattattcacccaaaattctttccaaaagaggaaggtagcaatctttacaacatccctcactaaaatatttgttatataaggttcgtaatacaggaaacacatatacctttatctttgccctagatacctgattatttccctcagccactttagatgttgagtttacatgaatcactgtctaggtttagaagatagatactagtggctctctgaataccctttttattgcatcgctttttaaaaaaagtttgcttaatgtcatttgggcactcattttcaaatgcttttctcagttgtcctagataacacatggctgctcccttgtgccagcttacaaagtgaaagaaatcagggccaggtaatttagatattgagtgctcctccccacaagtaactgatccaccctccactacttctcactggtaaatgactactgtctgctttcactgtgaagcttgaaaactgaggttccgctccctggaggcactcctcctagttcgtagaacagtactgaaatgtcaaatgtccaggcatcttcttaactgtacctctgtctccagcacacatgaatcatgagatctgacttctttaaagggagacattcatttcctgagaacatattcatttacttcaagtaacagataaagccacatgactacttgggtttaaaagacacaggtacacacatgcgtgcacatacacacacacacacacacacatacacagttctgttttgctgattacaggtttggaaacagaagactgaggtcactcagcatatatatactgtacatttcccaggaatagcctgacctttactatattttgatactcttctagtctacatttaaaggaccttctgtag

SEQ ID NO: 1888335 - DNA, 4001 bp, Homo sapiens
agagccaggtgagcagtggagagaaggggggccctgcacaaggaaacagggaagagccatcgaagtttcagtcggtgagccttgggcacctcacccatgtcacatcctgtctcctgcaattggaattccaccttgtccagccctccccagttaaagtggggaagacagactttaggatcacgtgtgtgactaatacagaaaggaaacatggcgtcggggagagggataaaacctgaatgccatattttaagttaaaaaaaaaaaaagcaaacacaaagatgcttcaagatcttcaggagaagtatggtatacaagtttcagggaccctatttgacaattttcagagtgctctctatgctgattccgagtcgagtgtgtcagctgtgattacagtgcctgtggatctaggccgggttgggggggtgtgggcgggggaagggaagtctggcccggagcaattgctcctgccggtaaccccagcactttgggatgcctaaacaggcgtatcgcttgaggccagtaattcgagaccagcctgggcaacatggcaaatctgtctctacaaaacaaaattagaaaaattaactgggcgtagtggcatgtgcctgttgtcccagctacttgggaggctgaggtgggagaatggcttgagcccaggaagcggaggttgcagtgagccaagatcatgtcactgcacttcagcctgggtgacagaaccagaccctgtctttaaaaagggagttggtggggagaggttctagaatgtcatgtagcaaccagtttaaggactgggactcagggatccaactcccacagtttccctgtgtgaccctaggcatttgacttagcctttctgagcctcaggttttttgtttctgaagtaaaaggattggactaggtaatctccaagatcctaggaacccaggagaaagatgagaaaatgtacaagaatgaacactcaggtggaaatgctgcaatcctgagaagctcccaggatgaatgaaaggcacaggacctcttacccctcacccctgcccccctcaagagctggtttctcaaacctttctcttaggccccttcaaagggggaaaactaaaaattatacaagttatagttcaaggactttaaatagattatttatatgattgctcataaggatgaggctgtgaggagggaacaccttatttaatctaatgaaattccataggaaagaggccttttgtatattgaatcaatttatctgccttctcagtgcatctgtcatattctgaaagattctgggttgatcttttgcgataacctctatggctgtgagtgtgtgtgtgtgtttgtgtattttttaacattttgtataatgattggaggttggtaaaaagtaacacaacagtacttttttaatacaaacttggtgtggtcttgagttgtcttccattggagagcgtacgtgtgccacagattggtgcacctgccggcatctctaggattgcaccaactccctctagctcttcttggtggcctgcaggggcctagggcgcattcacttccctctgcttgactttacgtggtgttctagcgtcagacatcaggcgatgccgtgcattacccaagacactggacagctccggatcttcccgtctaaccactaatcaagttaaaaagaggaaattaacgctttcttagtagtctctgaaagaaactagttatttgcgtaaagatgacttggttttgtgttgtttatccctggggagaagggtaaagaagaccctcaaactggatttgctgctgaagtgcttttaactcacctgtgcggagagcggacttcaagagagggcgtgccggtgctccggacaaaacctggggaatactgaaagccaccaccaccaccgtcattccagcatgcagatctcagtcctgggttggtgttgtagggcatttatttatttgacttgacggcgcctttcaaagcttgcgaggatcccttcctcttcctcgtgtgcatctgccaagcctgtgccccgcgcctcgcgggtggacccgggctggtgggcggggcctgcagcggggtgggagcccggtcgcccggcccctccccaccccgccccgcccatctccgctggttcccggaagccgccgcggacaagctctcccgggcgcgggcgggggtcgtgtgcttggaggaagccgcggaacccccagcgtccgtccatggcgtggagccttgggagctggctgggtggctgcctgctggtgtcaggtgaggggtccgcggggagggggcgcgcttgggaaccgggaggccccgcgagatgccgcccctgatcccatccctgggcgccctgcaagtgacttaagagccttcggggcctcgggagagaagatgcaaacgccacggccggctgctgagacgcaactaggctgctgctgccgtcgattctgtaacaggagaaagccccatccgcgcccggattacagaccgtctgggccctaaactcagggggagactcccggcgtcttttgattccctgtcctcctgcagctctctgctggcgggcgtctaaataaagtagcttccccaaaagacccaagatcccaccgtggctgtcatctgacccttctggagactatcagttcaagtggaggcccccaccagtccccgagtgccctgacagccctccctgaccccaagtctgccccctcagtgccagccctccctacagatgtgcctcccatcacccgctgcacctcccctccttccggttcaggcccgagcaccctgaaatctggattctgtcccccagcgccccagctccatggcttctaaacctaaatccattgaaaccttttctgtcctctaaattgactgcctaggttccaataacaccatggtcacctccttcctttctcatgaactcttccctggccttccgggatacccctccggtttcccgccctgtcaggctgtctctgcttgggaccctcctgctctgtcaggtttctatgtagctaattgtgatgcccaaggccttttctctccttccctggcactgttcctttgggggatttcagccaaaccctggcattaaacacgggctataggcccatgactcgcacatttatatctctcttggtaccagttgggtgatgggtggtggtttattatagtcttctacttttctacttgcatgtaggtttcaaattttcttttctttctttcttcttccgtttttttttttgtttgtttgtttttttgtttttttgtttttttttgagacagggttttgctctgttgctgtggcccaggctggagtgcagtggcttgatcttgcctcactgccacctccgcctcccgggttcaagcgattttcctccctcagcctcccgagtagctggaattacaggtgtgtgccactacgcctggctaatttttgtatttttattggagatggggtttcgccatgttggccaggctggtctcgaactcctgacctcaggtgattcaccttcctcagcctcccaaagagctgggattacaggcgcgagccaccatgcctggccaggtttcgaattttctattaaaaggtttgaaaataatttctgtctctagcccacatctcttcttggtgtgacctctgggctcattcatctggctgtctccctgacattcctacttcagcctctctccagcatctccaacctaatgcagctcaaatgggactcgtgagttccccagctgagctccaatcggggcaccagctgcttaagcccaaaatggacattgacctcagcttttatgcatcaaatgtatcaggaagtctccagtttgtttttacgtctggaaatatatctgaaatccatgtgcccaccctaccccctcatagctttctgccaccagacaaatccaaggctcctttgtctgtccccattttactcctgcccctccagaaatttctcctcacggctgttcaaagaaaatctagactcctcagcacagccaacctgtc

SEQ ID NO: 1888336 - DNA, 4001 bp, Homo sapiens
gtgcataacgtctgctgcgtccgtgacgttcgcagcgagggtcattgcttactttaagtcatcagcgggtgtagtagaatggtattctctttctgtccttcttcattattttctaggctaagtctgtaatgagaagatacccttgacagagaacatttcattggaacttgttttgtctctttatttctaaaacccaacgcaagaccttgttgatttaaaacaagaaaatgtaacccattcacaggtgctgtgattcctgatgggtttgaaattattcccaatgttttattgtttggtttttatttacctttcttgtttgttctattttcccttacttttttcttttaaaggatttgcctttttttttttttttttttctcagttacccagactggagtgcagtggtgtaagcatggttcaccgtagcctcaacctcttgggctcaagcaattctcccacctcagcctcccaagtagcctggaccatatcgcgtgctaccatgcctggcgaattcttagaaaatttttttgtagagatgagggtctgggtctccaaatgttgcctaggctggtctcgaactcctgggctcaagtgatcctcccacctcggcctcccaaagtgctgggattacaagtttgagccaccatgcccaaaataaagatttgtcatattttttttcaggtatatacatgctatttttattcttaaggagactcttgaattgttagcatatatacttagatattttctatcaaaatgcccactgacaagcatctatattcctccccagataggatggaacggcaatgtgctccctggcccctcccaacccagtcctctaggcgttttgtttcacagcgttaatattcttaccactattttttaaatcaacaggttatgacatcataatttttacttatttctttgcccaactttgtatcatctgctcttgtatttctcatggatttcttcatgtctatttctgcaagacatctttaaaacagagtttaggagccgggagccatggctcacgccagtaatcccagcactttggaaggcagaggtggatggatcacttgaagccaggagttcaagaccagcctggtcaacatagtgaaaccctgtctctactaagaatacaaaaattacccaggcgtggtggtacatgtgcctgtaatcccagctacttgggaggctgaggcaggagaattgcttgaacccgggaggcagaggttgcagtgagctgagatcacgccactgcactccagcctgggtgacaaaagcaaaactctgtctcaaaaaaaactgaaaacataaaaataaataaataaataaaacagagtttagggtagtaatgtgtctgagtccttgctctgaagatgtctgatttgggttttttttctaggtataatctctttccctcctcttcctcctcctcctcctctcccttctctctctctctgagcctgtagtattttccctttcgtgttctgtggtatcctcctaatgtccctagttaacaggacctcatccatccatccctggggtgttcagtggcctcgcaatccacgtccccgcccagatccgcagccttcctcctgtgacctgagtgtctcctcctcgctgtccctgttctgtcccctcccgccctcacatgcaggtggatgtcaatgcgtgcacgcacccaggttttcttgcctgttcccacctctttatcctccttggctggttcctccgctccattctctggctcaggaatttgctccccagggtttttcattccgctctgtagcagaatgtgctactgttgctttccagcatcaaacttttcactcccatggcctctgtgttcttcttcctaatgggtgccctttctgcctggcgctcctggaggccgggcccctctcccaagtgtgaatctgatggaagcaggtccttctcgccgggacctcatgtgagaaatgacatgtcccacctgtctcaaggggccgctctctgacatcagagctgctgtagagcggagaggggcaggggtgaagggccacggtggtgcaacccaccacttcctccaaggaggagctgagaggaacaggaagtgtcaggactttacgacccgcgcctccagctgaggtttctagacgtgacccagggcagactggtagcaaagcccccacgcccagccaggagcaccgccgaggactccagcacaccgagggtgagtgtgcagaggccccgctatgtccacggtgatttttggagggaagcactctcctgccccagcctggagtgaccctggtggccctgcttatagccccggcccaggggtgtctggcaggaaggggtctccagaccgtctgctccagggtcccctttgagacccggcaaggggaagtgcctgccaccaagagcagagccacatggtgtgctgggagcgcttgcggctgaggatggggccggcatgggaggacaaggggctgtgaggccggcaaggccaggaagaggctgggcccacaagcccctagggggacggctggggggtcctggtgctccgggctgggcaggaggcaggttcccggggcctcctctgtgaacctgctgcgcctgcctgtgttaggccctcctgtctgcatgctgccccgcctggctacagcgattccatctccagatcgactcgcagtgtgtggtgtgtgatatggtgtggtgtggttcgtggtgtgtagtgtcgtgtgtgtagtgtggcatggtgtgcatgtatggtgcacgtgtgtggcatagcgtagtgtggtgtgtgtgtgtgcatgtatggtgtgcgagtgtgcgcatgtgatgtggggagtctgttgtatgtacatgtatggtgcacatgtgtaatgtagtgtggtgtggtgtggcacatgctccatgctcctctgggaccctcgagcttccctgcctcctccgtggggacccctgggtgacgtcttgctgtaggggagcgggcaccgctgtgcgattctggtcgagttggttcagctggtgaccctggcctccccacaacaggctcctggaggccattcccaaggtcctggtgggagggggattgaagccacgcccctgggtcccaggcccacctggcccccttcccccaacactgcactcttggggccagccctccccatgcatcctccacccctggcaccaccccttgcaccaccgtccccacacccaatcccccctcccctggatctgggagctgggattctgccctgctgtccctgtccatccggggcccctctcctctgtcagttcctgggtggggagaaggaggggtggcatggctgcaatggggaaggggggggatggccggagagctcagcctgggagcgagctgtgggggcataggggacactcgctgtcactcgccttccccgtgacggtggcgcaacgcctgcgggtttgggggctgaggccggattctggaggcttcacagaaatgagctgctagaagctctgggctgtctgccgtcaccccagcgtttcaccatgagtgaagcccagctcactgcagaatccatgcccagctcactgcagaatccccgggggccagcactttaccaagagtggcctccagactccacattttaggaaggaactccttccccatccagctcacagcagaatccccagggtccctgccagcctggcacccagcgtgcccctcagtattctggggatgagtgggggagtccctctgctgggaagaggtccctggctacgtccctgcagggcggcggctgagcccatgcctcggccccagggccagtccccgccgggtgccatcctgagcagggccacagaacagatgtcccacatggccaggacccctgtggccacctgaccccgggggggctgtggccctcggtgaagcaggtgaccgggcgggctgtggggtttgtcagctccgcagcgtcactgccgctcagcgtatgagtttccactcccagcactcaatgaacagctga

SEQ ID NO: 1888337 - DNA, 4001 bp, Homo sapiens; identical to SEQ ID NO: 1562384

SEQ ID NO: 1888338 - DNA, 4001 bp, Homo sapiens
catataatttgtttctcagtctattcacagtcataatatagacgagtgagacactgggaatgtccatatttcctcttatgcaaaagctatgctctatcccgagtactccacacagagcatacaaacagacagccaatactctgggcaaaataactttacttgtatatcaagacttttgtgatagttcattcctacttccacattctgctataaaaaataagaaattctagaaagacatgaaattttcaacatgattcattgtcattcatttatttattcaaaatatttattaggcggcaactattctagctgcagggctgtgatcctttatcaatgatagggtgtggaataatgtgtttttttattattcatcacttgagaatgtgtcagttaggcaagagactttgagaaaaatccactgtatcagataaaacactggaggaggatattttaaatcagttgttgatgtagtaaaatagggcttcttaaaatatgggaaaaaatacatttcccacatcatgccattaaaagttttaaaaataatgaatacttttctttgaactctctggagtgcttgcatcacgtgtattgatatttaagaatattgtgtgaatcatacataggatgttgagaaacattgctcctcactgacgttttatgaattggagattcctattccttattaggttggcttggagaagaaaactagaataattaaggccaggtgcggtggctcacgcctgtaatcccagcactttgggaggccaaggtaggtggatcacctgaggtcaggagttcgaaattagcctggccaacatggtgaaacccagtctctactaaaaatacaaaaaattagcagggcctggtggcatttgcctgtaattccagctacttgggaggctgaggcaggaggatcacttgaacccaggagatggagaatacagtgagctaagatcgcacaactgcactccagcctgggcaacaagagtgaaactctgtctcaaaaaaaaaaaaaagctagaataattcaaaaaagcagttttgttttctttaaattagaaattggatgaacaaggttaatatatcccaatgcaagtgaaaggtggacctgagatacgtgttgtcctcttttgctatagaactgagaggagcagcaagaagtgtggaaagcagaaaagacaatttctatccacctgaaggcacagatctgaatgagacaacctagctgtggggttttagaaagatagccctagcatatgttaacaggaaatgggactattattgtgtcaaatgacattttgcttccttatgtataggtaataatgctgcctgtaggtacatttgaaagtagcttttatacccatgttattataatggactgatgattttatgcttatcttttttgaaacagtgtcatctcagaatagcatgaaaggcagcgcccaaaagcagttcctcacagttctatacaaattaatgtagaataaagtagaaccatcctgaatatgagaaaacaatcaattaaaatagaacttaaatttttttcatatgaaagatactgattgaaaatataaaataaatttattggtagcacaatattaaagataaaacttacctataatttttgacgaatttttggctcttttcatgaattcagaagcatgacaggtctgaactttgtgttcttcaagttcaccaggatgagctatcagagtttgtatagcaaatataattactcacgtgaaaaattatagaaacagaatcaggaaatcaagctggaggagtgcagtagactgaactgctctaggtgttcctcagtggaatccatggtgtcattacctggcagagtaagatgagtggcagccatgtctgcacctgccatactcagccacagccacagtccttcccatagtcacagccacagccaagccgcagcccaggccaccagaaagatggctgtagtaggacatggtgttcagaagtggatgtttcagttgtggatcagggaattatttttctcagtttgaatgtcaccatctgcaaatgaaattttatacatcttcaatagtgtatgaggccgtttggtttcatatttcagagaaagctgcataataaaacttgacgaaatttatttcagtaagtacagatatccttataaaaatgtaactattttgtctgaaactcaataataatgttacatgcccttaattagaagatgcttcctgtgtcttggtgatcttctcactcttgtttgttattaaagtctagactcaggttccttaaaatgttaacaatatgcaagccctctgatccagatttttttctttacttctaatgatttctactggtgagtcaaatatgcaaacagaaactggaagtatatttatttgagtgaggaagtgatacaagtggaaagttatctgaagtaaaatatcttgtaaattacacaatttctttccttggggtaaataacttttcatcccaaataatattttatattgattattaacagtgaactgaccacatttacaataaaatgctaatataaagtcacatatgtttttttttatcttgagagtcttatttatttgttagcatgattttgcttctatgtcagatcactgtaaacatttatttagaaatcgaagtattggtgtgagatctcccacatctcacctctcgggttcccgtattttcacatttgttttgatgttctctttggacttctccaggaaagcgtttttgagacagtggaaaataaatatatgaaatagggtagtggatccatatagcagtcacctgggggaataaggagtatttgttgtaaacaagtaaggacacacatctgaggactaagataagtacttagtacatacatctaagtaaacacacatctaagtgctaagcttgacctagaggacttcctgttccaacttttagcttaaatatttacatttaataatttggtgctttttctgacaaacttaaaaccaatagatgttgttatttaaaaaaaataaaacatacagtggatctcttattgcctaaacaagatcacatactaatctgcagtaacaagcaagtggacatacataaatatatatgtacattttaaaaggtgcttatatattaaaaagaattttattatgatgttttgatataactgacctgagatgttcattatagtactatgctggttaccaatattgtttgccaaacttgatggactctagtggtaataaagatgaatagttgctttgttttcactattctccccttctttgaatataatagttctttttttatgctgggcatgatcaacttaggaaaaaaatcctctaaatttcccaagcttctttgaaacccactctagtcatgtgatgaagttctgaacaatgcataaaatttaaggtataatatgacggctttctggatccttccttaagattcaagttgcatggagtctatcatcttctttgtatatttcttggtcctcttccctaggacacaaatgccaccatctttgactatgaagatgaaggttacatcttatgaatgatgaagcaatgatttagaatgagtctgggtcactgaggactagaaaccagctagagatgacttaaatccagactttgattatgtgaaagagaaatacattcttaaaatgtacactatttctatcacttgcaataaattctactcctatctaatacaacaatatagaaaaaggaatgagaaaattctgctaggaaccaaattttagacagtgtttccacttaaaaattaaatatatccctgggaacgatggcagcaaatataagaaaagaaaagccatgggctatattattctcttttaaaagaatctcgtttatgctatacagattaattgcccctagaaagtgaattttaagtagggttagtcacttgagttcttatatttgagatattgaagactttgtcacttttcttttaaaattcttgttggaatatgtatctattat

SEQ ID NO: 1888339 - DNA, 4001 bp, Homo sapiens
cctcgttccagctcagggcgaggaggcggaagggaaaggagggaaacagagcggtgaggagtttcacttttgttctctcttttctgtgtgcttccttatgttttaaataacatttatgcgtcatttaccaggcggcgtgtgcattataattccctcaattttactgatgaggaaatcgaggcaggaggaagttgagtactacagagctgtcctgtggagccgggccgtctggcactggagacaggcttctatccactctgcctgcggttcgcaaagtggggtccccagccagcggcaccagcatcacctggaacttgtgacaaatgcacattccagggcccttctccagacccacggaatctagggcaaggctcagccatctgtgccttagggagctctcctggagattctcacactggtccagggggttcttcagttaactgacacctttgttgagcacctacttaccacataagccattgacgagattgtgctggaaacatgcaactatgctaaaaacaaagactgtcacctgccctttcagagctacgcagagcagcctgagactcacagcgaaacagcttttgtctctgggcagttgcagagcaggtttgtttgtttgtttgttttgttttaggctttttgccaaataccagaggccagaactatggagaggctgctgaatccagggccaggagggctccaaggagtttgcaaacctagatctccgggaggccctggttaaaggaggctaaatccgttgggacagacatgggtgtttcaggttgggatctcatggctgagtgtgcaagctgccaacacttccgtgtatgctttattcccgtggtttttgtttgttttgtttttttttttccagatttaaagactaataggagatgagcaatggcagctttggggaccttttgtctttgctttggcattttggccattggctgattttaaaaacaaaatagaactatctggtggccccaagccccaatgcataagctcaaggtggagtccccagggctgtttttcccgatggagagtttggtgcccattctgtgatcacaggggaagctgctgggccgttttcacctcctcctcccacatacacaggcatgcttgcggtagactcacaagaagttacagaacatcagctgcccgcaaaaagcatcttttgtgaaagacagggagcaaggatatattaaaaacaagcaagcagctgaggtgggtggatcatgaggtcaggagatcgagaccatcctggctaacacagtgaaaccccatctctactaaaaatacaaaaaattagctgggcatagttgcacgtacctgtagtcccagctacttgggaggctgaggcaggagaatcgcttgaacccaggaggcagaggttgcagtaagccaagatcacaccactgcactccagcctgggtgacagagtgagactccatctcaaaaaaacaaaaaaacaagcaggtgcaggtgctcatgcctgtagtcccagctacttgggaggctgaggtggagggatcgcttgaatccaggagttagaccagcctgggcaacatagcaagaccctgtcttaaaaaaaaaaaaaacccgaaattgaaaaacacaaaacaagcaaatagacctgaaacactccagctaccccttctgtaaggaaagccaacaagagttagtcccaacctcatcccactccccagaccccttcccaaaccccttcccagaccccactgcccactttccgtgggggggaaaggggaatcattagggcattccttacatcccggctgtctggcaaacttaaatgggttacacctggagccactggccccacttagtaacccgaggatactcgtggatgcaggctgctttcctgaccccgaattcggtgcccacgaaacagcctctcaatctgaggacaggattttcacattgtccctgtgcatctgagaagagcccgcttccccttcaggagacggagtgtatggacggcctctggccttagacagttctgcaggccaagccctctggcctctgccactcattagctgggcccgttacataacttccctgggctctgccatcggccttcccaccagcagaagctgcaaggctcggaagggcatgacgtcacttgcagggcattctattggccatcgtgagtcacaggcccgcccagattccagggtgtggaagagactccgcctctccgtgagagttgctgttaagtcacattgcaagggggtgtgaactcagggagtggaacaattgtggccatttttttgttgttgttgcaaacaatctaccacacagggacggctgcatttaatcctcacagcaaccccactggccagatagagaaactgaagcacaaagaggtgaagatcctcggccccatcaggaattgccagggcataaaccctggtctgcctgcctccagagtctgggctctcgttcctaccctcaggggctggcctgtgtgctgggaccccgaggcacatggcccagttcttgccccattgcccatcagtgctcagctcccagttaccgcagtcaccctaaggcacctggaaaacggagggaagcaggaacaggtttgcttctggtgcctccgcctgccctggagaagtccagtccttcctcttccctgcagaggaagcttacagttttatctgagtccttttcgctgtgtgctaagcttcagggttacagacaggctgctccctttggtggcctttgttggaatgccatcagtgtgtaccttaggttcataaataattcagactggcagctacccaggaaggaagcaaacgcccagagctcacagccgagacaggttacaacaagaatgcggtgagcaatgctgccgatggagaagcagggaggcaggaattcagggaacacttgccagctcccagatttccaggtgggctcgggaccacgcttgtcttgcagaagctgcgtgcctggcccccagcatgctcagggtggacatgggtggctaacccagcaccctccccaaccttcttctcccctgcctgcttccatccagaggatggagagctaaacactcaccatcccacagtcccctgcagacagaggtgactcagagatggccttgacaaaagatccaagaactgctgacatcctggctctgacaacgtgaacctcagaagcccccagcagagacatggctctagtcttcttgtgatgggagaaggacagtccctacgtgtttaagtcacggtggatgagtttattctgtgacttgcagtccagtgcctcctgatagtgacagaaatcgccaaagttctgacttgctttttccggcctgcttttattctgctcactctaacagagccaagcatttggccagtgttccagtctctcctgtggccctgaacaccacctcaacggtttcctgtttactttacctcttaggctgctagaattaaccacttgccattatgcccctgcgtctccctacggcccctccctcatggtcttgccaccacaccgagctaatttcttttgtattttttgtagagatggggtttcgcccttttgcccaggctggtattcttgggctcaagccatcctcctgcctcggcctcccaaagtgttgggattctagacgtgagccatggtacccggccagcaaagatttcttagagacaacatcaaaagtattcgatgtttaaaaacaaaaactaaaaccataaattggactttgtcaaagtgaagaggttcttctgcttttgaaagacattgataaatgaatgaaaagacaaaccacaggagaaaatacttgcaaatcacccatctgataaatgacttgtagccatatagataaagattgcttgaaactcaacagtaagaaaacaaagaacctaattttttaaaaaaagaagagaataggccaggcacagtggctcacacctgtaatcccagcactttgaggggctgaggtgggtggatcacctgaggtc

SEQ ID NO: 1888340 - DNA, 4001 bp, Homo sapiens
aacccgggaggcggaggttgcagtgagctgagattgtgttactatactccagcctgggtgacagagccagactccttctcaaaaaaaagaaaaaaaaagaagaagaatctcgagatgagctcatcttggattcagagtgagccctaaacccaatgaatggtgtcctcatgagattagccagacagaaggcaggagggacagacacaggggaggagagcgctgggaggatggaagtggagactacagagaggcttccatagtcacgggaggccaagcattggcacgaccgtcagaagctggaggcgggcacagaacagacgtgtccccagagcctccaggaggaacccaccctgcccacaccttccttcctgacttgtgggtttgtgatactttgttatggcatccacagggcacaaatcctcctgcagaattaaaggaaagatgctcctgcacgctgtaaatgctgattaaagctacgtttgcttatagctcttacagagttatgaaggcaaagcaaatttgtaaagttacagctccaacactgtaaaaccattcaaactaaaaacatgctgtatggggacaggttccactgggctgccttggcagcctgggctgaggggcccaatgctggtgactcacctgccctccctccccttttctctctgccaagcaggagccacctttcttcatggcggccctgcaggccccaggcttggtgttgcgggaagagcctttcatgaacaggtccatgtcgctcttttctctccagcccatgacagaagtggaacacggcctgcacgggtggcaccaaggcggcatcatcaggctcttcccaatgtgaaggaagctttgactccatggtgaaccctttattgggggctgactccaggcccggctatggttgtattttacagaacttgctggagacacctgtcttgctgggctgatggattcagaaccaatgatgggaacggggtcaggtcctccgtccagtgagtgaggagggattccagatgagcctctggaccctcttcctatgcgcagatggcttgtatcctgaagatggaaacagcctgcttcttcaccgtcgagaccctgatggaggaaggtgctccccagtgaggccgagggcccccttttcagacatacagtggcaccttgttcctctgggctgggtctttgcggtaggccagtgttgttgtcgtgggcacctaagttgtgggcactggagggatggaggcctttaggctgcaccaagttacctgcctcggcttctggttcctcaactataaaaccagatggtcagagtagggagcctcgagggtcccgtccaggtctacaggtggataacctgtgcgcagaggccacactgtgagagaagacctggtggaggatgtttcccgtgtcacagctgcaagtaggaagagtgtgaatccctgtgaatcggcagagaagagcaaggggagggttcaggtgtaggtgggggcgggagggaggattagggggaggtggtgtcagtttcccaaggctgctgtaatgaatatccacagacttggaggcttaaacaacacacactgtcttatggttctcaaaatcagaatgctgaaatgggtcttgcggggtaaaatctgtgaacagtcatttcttccctctccaggccctgatgggggaaggggctcctgggccagtgtcagcagggccgggttcttctggaggctcaggggagaagctgccttcctgtcttttcagcttccagaggccgcctgcacgcctcagggtccccgcagcagaccacatcactccaaccttcgcttcatccttgcatctcctcctccgcctcccttcctccctctcataaggaccctaggatgacactggaccccccgactgacccaggagaatctccgcaacatgtggggaggtggagtgattgtgcaaagcagagtgaggtggtgttgctggaagactcgaatcacatctgcaggatctctgcggaagctctggggataagatttggcatctttgcagtggccgttattctgcccaccgcaggggcccccatctgatgatagagaaaaggcacatagaagatgctcggaaacacgtgttgagtgaaagagtgagtggctgtgtggagccgagactaggttggtctgtgcaggaggtgtaacaagagctgcatcttgtatttctgcctgccttcctgcctctgccattgactggaggtcagcaggtctgacagttccagaaatagaacttctgctctgatctgatccacacgaaggtgaaggtcaggtgcaggatcctccgcccccaccttgtggtttctgggggtgctgagccagggccccacctctgccctgggggacaccccctgccaagtttgcttggaggctcctttgagctcaggcacgcccaagagccagaaggagaggacttgtaaagacagggactgtaaccccaggcaggcctgtgtcctggcccttagggaaggaataatgagtagactattgtgtaagaaagatgagaatcaggcagataaagggcccagtgaagctgcctgccccactccctacccccaggactgaaccttggaccccacctaacattccagctccactgcggtgccctggtctccatgacaaccgggaatcattttacaaatagaagattgtggatccctgggaacgcagaggtgaggaagtctcaggagtaaaggtttcatttacggcaccttggtgcgaaggtgtcaggccaggccttggagccaaattctatgcagaatgaccaagtgccgagagcagaaaacacgggctatgttcctgaccctttgcctgttagccgtgtggctctggttctggagtgaagggagcagcaggatgctctgggccttaagtgacagaattcctaactctctgagaccagagcaaggctttggaaaggctggagggaagccattaagtcggtgaggttttcctggcttgccccatggaggcaagatggctgcagggactccaggcatcacgtccattgaggacaacatccaatgcacaaaggagggcaggtggcaaaggggcttctcctctcacagctctttatcacaaactgctgcctcctccagcatccctcaaagaccgctttgtttcccatcagcaggaatgcgtggcaggaaggaatctcccagggattcacagttcacccctaaatcaatccgtggggcccgaggggcaaagtatctgagtgacccagccctcagtcttgtgtccgttcctgagaaggagctcagccttgcccctcaggagctgcatgtaccaaatgtgagtgtgtgtgtgcctgagtgtgcctcttcacctcagtgagtgtgtccatgtgtgaaagcagatgtttgtatgtgcacaggtgtgtgctgtgtgcatacaaagcgggggcagggcatgtggggatgttgtacctgagcgagttagaaaaacgccacactttgagatgaattaggagtcctctattagctggcaaccaagagacagctaacgctcaaaattctcttggccccgaggaaggggcttgattaacttttacatcttggtttaggaaggggaggggggtctagttagaacaattttacagaagttaagtagtcaaaaagttaaaaggacaaatggttacaggaaagtaaacagttccaggtgcaggggctttaagactattacaaggtgatagacgcggggcttcgggcgttatcattcggacaaattcctgggaactgcggatctagctcgccacagtatcttatcagttaactgcattcttggatgtgctgggagtcagcttgcacaagttaagtccttgaggaaggggctgccggtgaaagagccaagatggagtttgtgtgactctctcagctaagggagaagcaaggctaggtgaataaaggaaaaacaaggttgggcattacacggaggtggagtgattgtgtaaagcagagtgaggtggtgttgctggaa

SEQ ID NO: 1888341 - DNA, 4001 bp, Homo sapiens
catctttctctataatagctctatttctattgcttattttagagggttaaggtgttgtttaaagttagattagataaagttaaaagtttaagtaagttgtggaatgtttgtgaaaaattaatcatgtaaaagaaattgtgtgagtgaacatattagctaaaattaaaagggtattattcagcttatctgtaaattaaacattggaataaaaacacaacacaattttcttagagtattgttctgctctttaacagaaaattgtaaaggcttataaaatgttcatgagaatcttaccttatgatcaggctgattaaaattgaacagatttgcctattaaggttttattgagttgggtttgacatcaatagcacactaatgcaaaggtaacatttggatttcattggcctatatttttataaatgtgttattggtatgtgtgttccaaaattatgcaaaattcctatgactctgatataagttaatatatgctatcaggaataattataattattatgttaaattattgtgtaccaccaagttaacaaatttccttgtcaattgtatctttgactgtgcctgccctaagatgttttgtcatccacgaacattagttgtcttgttttgattatttttagaaggaggttttataaacagctgtaatactctaacaggtgttctaaaacacaggtttttgatcacttcaaagattgtgtcattagagatatggagagctaaaatgttcatgaatatcaagcagaacatggactaaactagtagaagactaaaataattcttttatgagtttttgcttaaaatgttgttaatccttcgtttttaaaagacaagaaaattttcttttgcattatttacagcttttaaagaattgagtaaataaattatactactatcaacataatttgaagcataatgttttttcttcctacctgatttctcctgaatttgaaaactatttgtgaatattcttaactcatggcaatacagttatttgcataaatgcaatatgaatctattttcttttgcaacaggacacaattagagacactggttattttatcaaggctttgactgaaataatgtgcatttctttaaggaaccaaatttgacttatagagacaataaaaccccttgggaaaactggcctcacaccttgtctacacagtccctgtacagggttcctgacataagtaaaaaatgtcactttctggaaaatgattattcttgctgtgattcatgcaaataatctggccaagtgtaataagactagaacttattttgcaagcacatcagtcctatcaggatttatttttcataaaaataagatctggagagagaaaaattatgtttgaagaactatggtacacctgtgattaagttctagcctcatcagttgtttttgagtttttgtctgcaatttagactcaccctacttactccagtgaaccaactagtagtgatctctggctgcagctcagaagaaacaaaagggatgggtaatgaaaaaatctgcttcagtattgcaattcttggcacatattggaattggctagcacccccacacgcccaattcttagcagttatgactatagccaccagctacctgggtgtgtcagctgtcatcacccccttacttcattttaacattctgctaaatctaataacctgatttgtcttctcttgccttcaggccatcaagctctagatgatcattattgagggataccatcctctcaatatttaagagtcaccctcctgcaggagacccctagactgcccatcagtgagacatgacagaagtaaaatcctgcctgtgtctcctttggacctggctggatactgctttcaccagctcacaaagcaaacccttccctggcaactagccaaaggccaagacccacagaaccaccattgcccctctgtgagaaggaagcagttacagaagactgaccttcatccatttttctccaaagaattgaggtcttggactcttgaaagggaagttgttacagtaggtagctagtcacacacaagaagggtaggagagcactcccactctaggaatgtcaggcatccatcaggtgatggtcaggtggttagtaaaccatctctctaaataacaaatggtcacagccagtgccagggaaaggcagtctcccaagaaacagaaacacctgaaactggtgataagcagctttctaataagatctcaggagttgagtgagtgggcttgggcatgtgcactaagaggtaaaatggaagagtttaactggtatattaccaccaagggacatttggctggtaaggggagaacacctcaattgagcatgtgtacaggtccagtaaacacactgtgcatgctcccctcccaagtgctggcagttcactgcacatgtgacagcccaccccaagggaagaatcaggagagaagggatgcgagatcctggaagtatgctaatgtataaaatcccaagtccaaaggtcaaaccgtgcactttatctctcatgtcacccacttgttcctcttccaagtgtactttacttccttccattcctgttccaaagacttctgataaactttcactcttgctctaaaatttgctctggtttctccttctgcctctttggtcaatttgtttttcctgaagaggaaaaaactaaggttgctgcagacccatatgaattcagtaacattattggtgccatacattttaaatctacttataaattttataattcaaccttatattttttgcattaaattgtcaattttcttttaaagaaattaaaagaaagctcttatttttagtggtctttatttcttcctgtgaatctctgtcactgtctatagtcatttcactttattctgaagtatttattttagcatttcttatagtacagaacttgagaaatatatcttctcagctttcgtttacctaaaatatatatttatttaaccaaataagttatttttgacttgatgcagcatgctgatttaaaatttttgtttttattttaaggaatttaaagataagattccttttcttcttattttcatttttttaatgtgacattagcaattatttatgtatttgttcctttgtaaattttgtgtattctctcatttactgtttccaatacttttatttttgtctttttttccccctaagagggaaaagatgtacaaatgagatctcatccttgccattctccttttcaagggccaaactccatccaggatttgctcatttgtgtctagtctccaatgtcttcaaactttttttaactctatttgttcaaagcttatttgttacttatttatttatcgacttatttatgtattggagacaggtttttactctgctgtcagtgctggaatttagtttatttattctctttctaatggatagtctgatacaagctactctaaaatttctgcaatcagaaccactactatatgtttgcttttgcaattatattcggaaataccttctagaaaatctgggatacatagtgaaaatgtgggcaaagtcttcattcatagaggttttcagtaactagattagtctgttttcatcactgtaaaggaatacctgagactgggtaattgataaagaaaagaggtttatttggctcatgattctgcagtctgtacatgaaacatagtgccaatatctgcttctggtgagggcctcaggaagcttacaattgatggaaggcaaatggggagcagatatatcacatgatgagagagaggaagagagaggagaagaaggtgccaggctcttttatacaaccagatctcacttgaactcaaattgagagcttacatattacttcaaggatggcaccaagccattcacgagggatttgtccccatgacccaaacaccttccacaggccccaccactaactttggagattacatttcaacatgagatttagagaggacaaaatatactagccatattattccatctctggga

SEQ ID NO: 1888342 - DNA, 4001 bp, Homo sapiens
tctacagctatctgtggcaatagcaatagtttaaagagatgaacacacagctcaaagtgggaaagtggagaatggttgctatctcattttaatgcctctctgggcctgataatttgaaagggctcacgttcctcacatgaaagttcttttctttcctctggattgagttcacacatggcacatggagtatgacctgtacattcattcactcaaaacaaaaaacaaaacaaaaaaatagctccaggcagtgactcatgcgtgtcatcccgtactttgggaggccaaggcaggaggatctcttcaggccaggagtcggagaccagcctggacaatatagtgagatctcatctctatttaaaaaaagtttttttttaattagccaggcgtggtagtgtgtgcctgtggtcccagctacctgggatgctgaggtgggaggatcaattgagtccaagaatttgaggctgcagtgagctgagattgtaccactgcactccagcctggatgaccaagcaagatcctgtcacaaaaacaaacaaacaaacaaacaaacaaaactatgcagcagcaactatgtgctgggccctgttctggaccctgggatacagctgcaaacaaaggtcctgctcttatggagctcacatcttgtgagggagaagcaggagatggagatgtaacgtgctcagggtgatgagagctgaggaaagaagtgagctggagaaacggattgggacacgggaaggcatcactgacgcggggtatatgagtgacagcttggatttgtgtccctgcccaaatctcatgtggaactggaagaggggcctggtgggaggagattggatcatgggggcagatttcccccggctgttcttgtgatagtgagtgagttctcatgagatctgatgctttaagagtgtgttgcgcttcccggccgggcgtggtggctcacacctataatcccagcactttgggaggccgaggcaggtggatcacgatgtcaggagatggagaccatcctggccaacatggtgaaaccccgtctctactaaaaatacaaatatagctgggtgtgttggcgtgcacctgtaatcccagctactcgggaggctgaagcaggagactcgcttgaaccggggaggcggagattgcagtgagctgagatcgcgccactgcgctccagcctcgcaacagagcgagactctgtcaaaaaaaaaaaaaagagtgcgtgtggcgcttctctcgttgctccctctctctcctgccaccgtgtgaagaaggcccttgcttccccttctccttccgccatggttgtaagtttcctgacgcctcccagtcatgcttcccgtacagcctgcagaactgcgagtcaatgaaatcccttttctccacaaattacccagtctcaggtagttccttacagcagcgtgggaacagactcaagagctgaagcaagcaaggccgttagcaaggagcgggctggggagagcactccaggcagagggaacagccagggccagggccttgagacagacgtgagccaggatatctgaggaacagcagagaagccagtgtggccgcagctaaatgaggaacaatgtgtgagttccctggggcggccaaaacaaacaccacggacgggggccttcaaccacagacaccgatttcctcacagctctggaggcgaaaagtccaagaaaactgcacggagtatctatgaggccctgatggagacctgacctggtccacacccatggcctggcaagctagatggggtgaattttcacctgccacagtcgcaagtcaaagccaccggcttctctcttctccctcccattgctcctgacagccagggttaatattttgcctcatgtaaacagggaggcatccacccgagaatctcccctcagcccacataagctctgcagagagggctgtgttgctccagttcccacctggacatgagcactttgaagggcagcttccctcccggggtctggctgagctcagggtaggcgtcagtctgcatggattggatggaggaaggctgtgcgtggcaggagatgacactgcccttgggctgtgtggtttctctctgttccgagccctgttcctccaccttagcggaatagcgcctctccatccagttctcatctttgagaacgattcttgggatgaaagccacgacgttggatatgaacaacctggttgccaagttgtttgcatttttgcctcctctcctttctgaagggaaaagctgtccttgtgtggggccacttcagaccccagtgagcaaaaggagtgatgtttaggggaaggcagggagagcagaaacttgcatattccacaccttctgcggctgggcactgggatgggcctttctcatggccggtgggatgggagaggagagaggtctccatccagcaccacttacatcacacacataagcgacctggggtattagtggctaggagtgcaggttccagatatctctcaggtatagtctccgcaggatcctgttcctcccttaccactcatgaagccacttttccccccaggagccttggtggcctcctatctaaagtggggatggcacacaaatccatgtccttgtgacggtcccatgagagaagcagacagaccctgtgcacacaagggcctgcagggagaagcgctctacacgtggcgacaccctttcctcccaggatggtctcctctgcattcctgctgtcatcccagcgtcccacctgattccccaggacacagctgactagaaatcagccctggactagaacccaccgcccgccaggggtgggtacgctttctcggaggcccccatggggaggcaaaatggaaaaccacacccaatactcaacctacagtgggccactaattcccaaggcaattctgctgtttgtatctgtgggagaaatgcatttcctttgttttcgaaaaagcagatggccaggtgtcattggcagaggggctgcagtgagggcagtgagggagagcagaggaaatgaatggacagtgcagaggacaggccaggtggcccacaaccaggcagacagctcacgttgccttttctggaaatagggactgcatgaccaatctgtgcctgtgcctctctggcacacaatggacaatttcggaaaacttcaaaagaaaaagccaagttgattttgctaaaaatgtgaagtttctctctctctctctctctatctctttaatgcaatgcatagtttatcattttcttgtctttaggattaattaaagacagggctaaatttgtttaaacaagctctaaaatattaaaaaagaagaagaaggcaaagtacatagtgtttccaagtccagggaacattctgttccctgggcttcagtttataactgaatgtgctttacgtttagaagacaagctatagcttgtaaaatgaatgtggaaataatctaaagtatgaggcctccattatttattatgtaattggagaaaattctggctgggagaaatctctagctgaaagccaagatgatccctactcaatcgttcttaaacaaaattaacatgtatccatttctttgataatatttcactggcaggcagttcctcttctaggctgctatgagcaaattgccaagttgggtgtcacccgtataatcattatcatgggaaaccgtcagagttccttgggcaagggaatcaaagatttcaagtgttgacattttgttaagtaggttttttataaagtcttacatttagaacttttcagaacatgtcatctccaaaatcagtaatcattaaacgacgtccaagaccatgtttttgagatccttctatactctaaaagcattttgataatattattccataaactgccccttttttattaaatgcatatcacaatcttttcaaactatgaatatggtcctggttcattcaagagaaagaagctctgcccagtgcagtggctcacgctataatccaatcactttcagaggcaggagga

SEQ ID NO: 1888343 - DNA, 4001 bp, Homo sapiens
gcttttaaacccaaagctaggtgatagtgagtgtttgtgtgctaacttccggtgagcactcacatgcctatctcgctggagtcctatgttcccaggcttgcatctgtctgcctgttccccctacgtctccacccacagaggtagccgcggctctgcagctctggagcctcagggctggaagcaggtgaggggaggcctttgttgatcctgctcaaccaatgcccccgctgccacatagaagaaacggtggacgtgtttagaaaatgataccaagtttacccctgaaacgcaattgcatatcctgtgcaggctgagtgaggcaaggtgaaactattgactggtatcacttgagatagagccaactgttcaaactgaaactgaaagacagcgtggtccctctgaggaaaaaagggcagaagtaaaagcacgaaattgtcacttgtgtagtggcaaacaaaaaagaaagagaaaataggtttcacttatttaaattataaaagtagttagtatgtgctgattcaaaaaacttaaaagatacagaagtgtataagatagaaacagaactgcgtctgcctccacctcctcccctgcccacaagccagccctccactttcagactccacagaagcaactgttttaatgcgtggtaaacatatttagaagaactttctctgctgtgcataaaagcatgctctaacatcatttggtttcacttcattttattttaaaaccacagtattcaatgacttgcttttctactcactagtatattatgggcaacttttcatagcaatgaatacagatttatctcagaacgtaatcttgaatcaatttcagaataactctgtgggatacatgggtgattataaattcacaacgtgccttgggggaatataccacctgtttctatggacgcaatttgcagtacattaattcggcacaccacaaaggctggacagttatcaatagattgggtcaagaagagaagtatacaaaacattcagctagctttaaagctaaggtttgtcaccacaaatctatgaagtgtctcttccgtgagttggagaaagtgattattagagaagcctcaataaaggtcaacagttacagatgatttgaaattttgccaacgtagaaaacagttggaaaaccattggaaattatattttttatcttgagtcaagtaggaaataaacttaatttacatagtgtaagaatggttgatatacaatgtaatcctaaatcttaaaattgctggagataaatcacaaagaaaaccaaaaagatccaaaaaaaaaaaaggagttaaaagagaagatttcatcttctttcagaggataaacaatctcaagattccataattctttgaatgtctcagaaaaacaaaattcgttcaagctacttcagatatttggaagaacaaaattaattttccccacccagatgaatcattctatcagaggttctcaactgggggcgattttgccccccacccccgggggacatttgacaatgtctggaaacatctttgattgtcaccactgggggcaaacggtgggaggatgtgctgctagtcttagtaggtggaggccagggatgctgctcaacatcctacaacgcacgggacgacccccgccacggagaatgatccggcctcaaatgccaacagtgctgaggccgagaaactctatgtgatactttcctaaagggactgctttctgtttcattctcttatttaatcaacttcacaaacacatcagaaacataggtcacatccttttcttgtgaatctaaaccagtctagcttaaaacaccctaaccttcctccaaaacaaaatagaagtgaacattttgtatgagagtgactcacatgtaaaactatgacgtgaggataaacagtaatgcccgaaacatacagcaggccttccaggcaggcaagagatgacttcagacattggagggtaggtcacgtctcacgcaacaaatccagaaaccatcctgcaactcacaagaaatctgcttgtagcttgaaaaggattctgagccaggagaacaaggttaaaattatttccaacataaaggaaaggaacaggaacttagcctcttacgtgcttaatcacctaataagacacacacacactcgcacacaaatcacacacacacatacacacacacacacttaaaatacttattttggattcttgtgaataaaatccagctcaagtctatgggaaaaaaaaatcatggccagaaaagtctttccattttcactgggtaccagccaataaatcttagcctctgatgctctactgaattcagcttctcactttcctaccctgctcccatcccacccccacaccgaatcagcgccagctctggattttacactcgtaagctcagctcaggccctggtagaggtggagcatctcattgccttattcatacctgctttgaaagatatccttgtcttactcagttggaagctctataagccccccattaaggccaaagaatgtgaaacatcacaaacagcacagcatcatgtacataaactgtttatttaagagcgggcagtcatagactgtgggtgatccgggagatgcatcagtagatttcctgtggcctcagaaaaatccacgcagtaaccgcaacagagagatgacaaagagtcggttgcaggaggcctctgcccagggagggtggccacctaccctgtgcagttcaggcagagcacaaaggctcctcccagggccctggggaaggctgaatccagcctgcccctggcttacctagcttggccccgggcagagcacttttcctccacccctcacagaggcgcaggttacttgtaccagcccgatgcaaatgctttggtgaatgggctaccctaaaacagaggatgatgaagaacgatggccattcccagagtataatgagggattccctttaagtgagctttgctctgccctctgcgttttcattagaaaccagaaaactgctgagcctaatttgtgtttaagccatcataaactaaataatcagttcctattaatgaccctaattattcagctcctatttttaaatgctggtctttcagcatgctctatgtgggtggttttaattaagcctaattgtagatacgtcacatccaaacagacaccctactcaaatgattaatagagcttggaatctagttcactaaataggggtttgcaatgggatgatggtgtctatcaagctgaaacgtatcatataaattatttctctgataactctaatggcagagagaattgtttattagagtcatttaggattagagccaccactggtctcagaagctacattctcagagcagttgtcaagtttgctgaaagattgttttcttaaattagctctaagttggaatgtactggtttttcttttgcatttatattcccagaggccttcttctttaaaagtgtcttctgacatggcaaaataactatcatttaagaagcactaatcttaactaaaaacaaacaaacaactcaccttcaatgtaaagaccgattgctcctctttagcccttccctagaaatcagcttttgatcactgaccaagcactctcaagcttccgattcccctaaatctcacctgattttccaacacctccgagagcttgacattgccactttttacacatgagaggtgaggatatcgaacctctgaaaggttatctgatcagcctgggatctcctggggcagagctgggcttaagaatcacctgcttgagatttcacctgcaattgcctgacccatggggctgtgacttcttggattaaagcatcatccatgcaccttgtcactctacatgggcagagcaagccaacctagaaaccaatcaggagccaccataacaaacacagccgtgactcagctctccacctgcacacctccacctgcccatcagtccacattggacacttaacacccacaaaggatttgaaattttcccaacggcc

SEQ ID NO: 1888344 - DNA, 4001 bp, Homo sapiens
gtttggccacccagcccagttgacttggatgaaatgtgtagagaggctagagccacagactttggttaaatttatctgataggattctgaattccttctgtgttatcttgaattgctttgagttttctcaacacagctattttgaattctctgtctcaaaggtcacatatctctttctccaggattggtcactgatgccttatttaattcatttagtgaggtcatgttttcctgggtagtgttgatcttgtagatattctttggtgtctgggccttgaagagttaggtatttattgtatcttcactgtctggagccacagactttggaatcagacacacctgattatacatctcagctcctccattattcactctgtgactccagacatgttacaccacctctctgagcttctaattccctgcatccataaaactagacagtcatacttaaattattgaatcattgtaaggtttaaattaattaatggagacaaaacatcttactcataataaacaccagtaggtgtcaaagggagagagtgtcttttttatctgagcatttgtactgaaatgagaacattatgatagcagtggatagcaaagtcaaagtaaccataatttttaaatatcccctaatgaactgaccatgtagagaaatagttgacactcaaacccccttcacatctaccatcagccttaatggtagtctattgggtcaatgtctatgccagtcttagtaacaaatgaaaattgaaaacactgcaaatacagtgcaaactgatgacaacatgaaactccaaatcttgcctatgatataaggttccctgaagttaaagaaagtgatggaggaactaccatgattgttcagtgtgcagtgaaagctgatgttactgtaataatctaaaattcattaataaaatcccaaattggctgggtgctatggctcattcctgtaatcccagcactttgggaggctgaggcaggcagatcacttgaggtcaggagttcgagaccagcctgggcaacatggagaagcctggtctctactaaaaatacaaaaattagcctggtgtggtggcacacacctgtattcccagctacttgggaggctaaggcaggagaatcgcttgaacccaggaagcagaggttgcagtgagccaagatcgtgccactgcactccagcctgggcaacacagtgagactctgtctcaaaataataattataatcccaaattacttcttttcttactttaagttttatttttcaagacaaagtttcagctgtcacactgcccttgttggttctgtgaaatcatgttccccattttaagtaaattcacttttcagtaaaaattactctttgaagacagaggtctatgtatatacaaacttacatgtgtcatttcacagaataaggaagaaatggtttcacaaattatattgcatcaatgtgaactctctttgggcacaaacacaggataaacatctgtcagataggattaaagtgcctgtgtgccactgaggaatgggatgaagagagaaggaagataataagaagagaaggcaagaagaagaagaagaatcaaacagacagaaatggaacttccctcaaaggtggtgcagacctgcctggggcccctgagagcaggaaggctttcctcctgaatccagcagagctcttctcaccacgtggccagagtctgccttctgcatgaatgtcattgcctaagtgacttcgagatgcagatggagcgtggtttcaccctcagtctctcctcctctggttcacgcccatgtctgattcctgggcatcgctttgcctcagaaagccacctccagtctttcccacccacttccaatttgcccttgccccttcctccaagccaaggcagtggttgtataaacatagctgtatgtacaacactcagcttttacactggtctccattgaatgagtaatcgcattaccaaccttctaagcaagtcggctccctcaggactgccgtcttccagccctcgtagtacgaaaatgattcattagtcccttcatcacaataacatgagtcacatgttatgaaaagctaggaggatgtattttgtgtacactgaaatctaaggtttgcaaatttctgcaatttaactttattgaggagggagtggggtagaaatgaattccacattttttctaagtacgaaaacccacatcaggcaacatctgcttaagtcagtctccaaggactcaatgtaaacggttgttgatataaatagatgtgtttttaagcaaagacagatgtcccagccccaaatgttaagaaaacaattaagttcaaagacatgttggttttcatttctttcccaataggtgaatcttcactgggctatgacaatgaggggtggaagagagaacactgtgtttccctgtggaaaggtgtgttgtgccgtgggtggcaggtgtgagctgcacacatgcaggatggcgtccgcttgcctccctagtgttgctcgagaggcctgggtcatgacgccttcccttactcatgcattctcacggcacttgctgatttatttgaagactcccctattcagaactcctcagaatattatttcagggaatactaagtgggaggcattaggaaataagtccccggaatttgggggtccatgggagaagaaactagaagccagcaggactctggagcaagagtgggctatgggacaatggtcctcagtaggaacgggcctgcatctcgttctcccagagcaaggatctgaaatccaaaagatgatcaacaaatctgcatttcggcaggaggaacattcccagtgagcttatcaggaaagctagcaccaggcagaaagggtcatttctacacagagaaattcacattgtttgtgtcaggcactttgccagaaagcattttgacaaattccctcgttgaatgtgagggatgcaatgaagaatttaaagtttcgcaggaattagtgacataaggcaagttcacattttgaccataccaccctttacatggtagaaaattctaccccatatgcccaaagcaggtcttcccttccttctgagaagccgaggcaaagaccttcctggcctttgggccaagctttcccaggaagggaaggaaactgtagctgctttggagggttcctcggactaaattgggggtgccaatgctagaagataacacaggctggcaggccactccccgccccaggccccagccagagcatcccaggctccatcccaggccccatcctaggctctgtggtacaggcagggggaggatggctagtacccttcaccccgagggcatggccgcctttctgacatcacctgggagggggcaccccggctggccgaggtttaaggtagaaaagcctagctcctttgttgtttgtcatgaagccaaatgatctggaacttggttctttctcaaatggtcagaaaaaaatgtcaaaacaaagcccccatcacaaatcacctcaggacacatgtcacactcttcccgggcctgagcactattagtgattagaaacgaccactcagttgtgagcacacaggctgggcaggctgtcagaagttgcaaaagccgtcactggttgtgtcaggcggataccagaatcagtcagcgatctcaaagtctggtgtccatgctgccagacatctgtgagtattaggataaaatgtcatattaatcagacattcacatgaggccacaagcaacgcttggcatttgtagatgtagtgtagatagataagccaccccatactctcttcctggacacacaggaggaccacctttccaagcctccttttcctcccattgggttctggtgagaggtgtgtgggcagaggtgatgggagtcctgtagacttggccataaagcactctgagtgatctttgacacaccttcttccccttctgtgacaaccctggaggctgtgtattgaccatggtggcttcacaagacgtaaggagactagatccc

SEQ ID NO: 1888345 - DNA, 4001 bp, Homo sapiens
tgttcctcctgtatagccattcgtttgatcaaacactcagtcgagacagaaaattagttattacctttgagggtgttttcttctttattcatctcctcttcacattcaattcaaccagtaaattcagtaaattctgttctaagtattcctcaaatcttctcttcctcttcatcctaatgatcactgtcttatttcaggagtcatcttttcttgcatggaccagtttttaacagaaaactctggtgtccctgcctccagtcttggtcacttccaaatctgatctgcacatggcctccaaagtgatatttctaaaattcagatttaatcatattactcgtattcataaaatcatcaacatcttcccattgatttatagaaaaattcaatctgttaagggtgctataaatgatgccatacaaggctcctaccctttactctcatcctcaatcactcccgtattttcactctaggtcccaactttacaaaaatgatgtgttgtttccagaatgtgcacactccctgcccaatgactgaaatatggctgccctccatcactgtgggttgcctgttactcccccaccacaattaccttctccagaatgccttgtctcatcctgtcaacccagcttatgtgccttctctatagcctcttagagtctatactttctttcattgtaacctgctcggtttattactaacaggtttaccagtatcattagaatctcagtcacttaaaggtaaataatggtatctggaagcagtagaatatattaattaagagaagcagatttggaacaaaataaacttggatttgactcccgaaacatccacttacttaataattgtttatgtgcagagggggccaggtaggttcatgtctctgaactctagcctctgtatctataaaatatacccgatcataccttcttctgagtgtttttttttttttaggattaaaatgaaatagtacatagtaagaccttgacatagtacttgaagcatgttaaaatgatattgtcttatcccattttgcccaacatgtagccacctagctactacatcgtaagtatttagaaagtacatacatttgttaccagtgccccatgatagcagtgcctgatgaagtcataatgcaatggagagcaaatagaacaagtggagtcttctgaatcctaatgcactttactgattctagaaagaataaatgagaggctatgcaaaatctcaagctcagctaaggaatatattttgttgaaggtttgtgcttccattttatggtgattggaaagggactgagctagaaagaaactgagctagaaaggagctcagttcctctccaatcatcacaaaaatttacattccatagtatgcaacatcttgtcaggaaaaacaaatataatccttcacatgcaatctttgctcacaattatgagatactgtctttatgggtctaaatcagaaatactgtcttcttacagactcttgatgtgatctgtgctcatccttaatccttggtaaagttccaaaatggctctggatcctactgacatctgttactaaggataatgcatgaaggagatgaagatatctgttctcaataaacagagaaaacattactaaagaaaatgtagatcaatttcagatctccttatccatagataaggaaatgcaagttattagagacctatgaaaaattgctgttcagacataaagatgcatctttttatttcagatctttaccacttaagtttagcctagtattttttaaggccaatgaaacagttggtgaaaaagaataaatgcatttgtgatctccagtgtgttctctccattctagcaaaaaaaaaaaaattccaaaaacacttgttcatacagctacaagtttgaggcttttcataggaaataagatttgaggtctagactaattgattttatagcttcacaactgaattttgtaatgtagccacaggtccatacacagcagaagcttagattaatcctttccaaaaataaaaggaaaaaatccatgtgaatcacttctaaatgcctctgtattgcaaatgaatgatgtttgggtgtgcatttatactacttgtctaagataagacctatttaacaagatatagtttatacctcattaaagcaacatctacttctcttgcttggttactggtctttcacagccagtccaattggccaatataaaatacacttccattctgaaacctaagttccacaagagaaagaacatttttctttttaagtagatgtatttcattatctttaagagtttatattatatacatgacattacccccatttaatttttgtgctggtcagggattattcagtgatgaaaaaagttttcccaaatgagggcaaataaaaacatttttgctggaagactataaaggacaacttcatagacattcaaaagtgaaaaataaaatacacccagacctcttataaatatattgggaactggaaaatcagaaactgagatcatctctcttaattcacatgatttctcatctccttctcactagtacactttacctcctgatttctggtccaatccattgaacccatttttttcactcaatgtgagtaaatgtcatataaaaggttgcaggaagatgctgcttcaggccattttctctaaaagagacttgtaagtacagaggtcattgaagtttcatgaacttctttatcctttttgatcaagtagcagattacctctaactagtccacagcttccacatggaagatggacaaacatatagaaatggggaagaaagaagaaccaacacacttgtcagcaaattcaacctaagtcagcctcttttcaatgggctcatgggaaatgaagcatttcctgggacacagaggagggagagaaaaatctcccattattggggattgaaccataagaaaatgttgtttcatggccccaaatggccaaataccaacatattatgtgatccaactaaatcacaatggtataatcaaacaagttattctgattattaccaatagagacactaaaattttggctgtgtattaaaccctcttgcttttcacatcttctcaatgtatttattttatagcacatctggaacaatccttttatttattaatgaagatcgtctcaattgccaaagtctatatttttcttccacttaatgaaaaatatccaaagttgctggttatgggcccatcagagattattttctcttaatcatatttcatttaaaaaaaactagtcagttcatttttctaaaaaaaaaatgcatgttcagaaaaaaatacaatcactgaaagcccaaatttccagtacaatttaataacaaaaaaggacggagtggagtaggatagtcacatggttcctgttatccacccccaagcttaagaaacagggaggtctaaaatgtagtgtggaagagtaaaaacagcatgacctgctttcagttccaagttcttccttctactgattgtgcagtcttgggcatgctgatgaatcaaatcaacctctctggctgcacatggaaattgaggaatgaaaatacttctgaggtagggttgatgtgagcattggttgagacaatgccttcatttgttgagtttctgttatgtgccagcactttactacaacagagatgcaatagtgaaggaaaagagaaacacaagccctttaagacttcttggcatttctgatctgacaggtggacacagacaataatcaaaggattatatgaataaatcccaattatggtaaattctctgaaagagaatagtgtcctgagaatgaggggtgggagggagaggggcaagtaaacagaacagattgtatggccagaaagcatatgattggaccaaggagaacacaaaagacctgtgtagctaaatgaggagaagctagatgtgaaatggggcgtagaaattagggtccagaaattaaaactttaccgtagattttctgggacaataatttttgaacttta

SEQ ID NO: 1888346 - DNA, 4001 bp, Homo sapiens
gtagagatggggtttcgccatgtggccaggctggtctcgaactcctggcctcaagtgatccacccgcctcggcctcccaaagtgctgggattacaggcttgagccaccacacccagccctgaagtctttctagaaggattctccatcttatttttgtcctagagatactcaatactcagtaatctcatcctgatccaatatggcctaccctgaggaatggaggaagagcttggttctggattggactcttctggcaaggcaggcatgacagcagaccttgctattcacgagtttacgaataatcttgaggaaccttgagctcacctgtggtcactccttcttcccaccccaaggagaagagaagcttgtcttcttggatgcagttgggagcctacagcctactcccacacccaggcctctgtggctgtccaaagtccacgtgtccccaagaccatcctcacttggggaggacgtcggcatattatgggttcagtcattctaggtataactatcttctgtatgaccaggtcaagctatatatagcttagaaattttcaggtgctcgattagtaatcacaaccaatgtgattcaagcatctatctgcttggattttttaaaaaagtgttttcagtcttcccagtcctggatattttaagcagaaggacccatccaagcatcataggataagcacccaaatcagaacaagctcctggtatctcagtaatgagaagctcctttctcattactgcccatcttccctgaccagactgagcctttatcccctgtaatgatcctgagattgccccttggatacaaggacagtttcattttggtctgatattctgccacagatttgatcctctgatctgccctgggaatagatctccctgatcaagaaggactcctgtgcagtaaataattcaccttgtccaaaagaggtttgacttttgccctcagcacatgagaggtaacttctaagcccttgaaatgtttctgaggcaggagaatgttgtgaacccaggagacggagcttgcagtgagctgagatcacgccactgcacttcagcctatacggtagagtgagactccgtctcaaaaaaaaaaaaaaaaaaagagaatgcctttgtttatatggggggcttgggatagcccaaagggtctatgttatcaatgtgatttatggtggggactttgaaccacacagtatcaacctgacctctggaagtgctggtgaccaaggtcagcccagcagatggtcaatcatgtctacgtgaacaagtcccaataaaaactgtgcacaccaagactctggtgagtttttcctggttaataatactctgtgcatgatgtcaaatgttgtgtctgagaggtgctctctgcacgactcatgtttaatgacttctaaaatctgacctatatgcctcttcccttggaggattttaatctgtatcctttcatggtaataaagcataaccatgaatataataacttttctgagttctgtgcatcttgctagcaaattattgaatctgagatggtcctggggatcttcaatttgttgttggtgtcagaagtgaggaggatcttgtagacacccgaactttgcaaccttcaaagtagaatcccagcatcaactcacctggccagaactcccatgaaaagcgattagcaatcttcatcctagaacctggggacattctgtttttccttcttttctggtcaatcggtctcttctcagccactgcactcttagaacagtctgacctcctagtttccctttggagcctttcctacctcatccccaaaccaggttaaaccctcccacctgctgtttatcctcttctagagatatctcccttttctgcatcattaccttctcttatcaggcacataccccaggttcatacctgcccaaatgaggtcctccttctgtcagtcaattcctgaattatcaaagctcaccacatcttctgagctggcatttccatatgatatcagtctgctgaaaataaattccaatatacagacacaaggagatccagttaaaagagcccaggaaattctctatttattacagaatgacaagtagaggtcttgacgtaaacgcagaaaagcaggaggccccggaatctcacagaaagaaataacatgagaactgggaaggacagttctgaagctttcataagacaaatccatcaaacacaagagagaaaattagatttcctattctgctttttcaatagtgatccaattaatacttgaatacttgaatacttctaagcccttgaaatgtttctgaggcaggagaatggtgtgaacccaggaggcggagcttgcagtgagctgagatcacgccactgcacttcagcctatacagtagagcgagactccgtctcaaaaaaaaaaaaaaaaaagaatgcctttgtttacatggggggcttgggatagcccaaagggtctatgttatcaatgtgatttatggtggggactttgaaccacacagtatcaacctgacctctggaagtgctggtgactggggcaataaaaacacagtaatttggatcaattggtaaagagctcaatatgagttaatgaaagttagaattgcagaatatagtggaagaaacacaataaaattacttccaaatatttacatagatttttaaaaaacaagcaaccaagtagaagtcttatgggtcgattatagtaagtagacaattttcatgtgccagttcacattattttaatccaatcagtgctactcaagtgctttaataatgtgaaaaatagtttccattcttaatcagatcaaatattttccttccaaggcatctgagattgtgtttagtaaatttgtataaatagtaattctcatctctcatgaaggcaaatttgagggaggaggtgggatgggaggaaggcctaagttaataaggaattacttgattagaatgagttggcatattacagatctataaaatcgagagggcttgtttttcatggataaaagtagattcatactaacaaatgtgtggtccaagaaagtactattaatacttcatttcgtttatttatgtattcattcacacattgatttgttcagcaaacatttctttaagacttatttcaggccccatatttggttttggtgatcaaagatatgcaaaacactatttctgccctcaaggtatttgcagtccactaggactcttcaaatgaccacaattccatgtggcaaatagctcctggtgggttctcagagagcacggagtgaaggacactccccttcttcctgagtgtagagttcaatatttcccagcctcctctgaggttacatgtggccacatgactcacttctcccagtggcatgtagacagaagtcatgtctacctctgctgggtctaggcttaggagatgggcatacctcctgcctcttttccccttgtaactggggcagaatatagtccaacattgaccatagatgaggacaatgccattgggtctagaggatgatgcagcaaagacttgacaacctggaagaaattgagtccctgcccacaagcctggcactcttgaatgggcagatggaacagaactgcccacgaacctggcccactcactttagaactgttacttgagggggaggagaaacagctataattttaaaaccactttatgatggggtctttttattcatttttattatgaaaatgttcacacatatagaaaagctaaaaaaaattgtacaatagacatttatatatccacagcttaaattataccattaaaattttactgcactttcctttttaaaattatagacctacctatttttccacccatctattcactcatcagtccttcttaatttttgaacaaaattcaaagtatattgcagacctctctacatttcaacctaaatactttggcatgcaaattattaactagactttttcttctgatgaaaaaacttacatacaatgaaatgcataaatcttaa

SEQ ID NO: 1888347 - DNA, 4001 bp, Homo sapiens
agattgtccaagaaaagcatctatcgagcatccaactccagcatattttattatgtttaaatttctgaaacataagcacttgtgatatatgtgacaaatatagttatcagcattttttcttaatcaggaaactttgttttcaaccatgctggataagagagaacttactgcagttacaactatgcattatttttgaaataatcccagctagcattgatttactgtggtcacaggccctctatgtctgcttcaaattcattctctgtgtcatgcccacaattatcctcctacgaaggaggcattattgttgtctccacttacaggtgagtaaactgaatcacagagaggacaaataatatcttcgaagccatgcagcaaataagcgatgaagactggatcatacatacacatgtgcacacacacacaccattcagaatcatggtggaagatggaatagtatgttggagaaagataaggatttcaagctaacgtctggtaattgacaggctgagcaagttggggaagccacttttaaatcctagaatattggttgcctaatcaataacacagaagcctttactcataggttaattttgaggaatgaatgagataatatgttgaaaagttttgttctataaactaacctccccaacagccatatccagaaatcgaatttttactgggaggtcatgaacataggctcaacctcggaattttctgctctgacttccttttcccaactcgaatgggttgattatgttcctaacccattagtgcttagttgatgatacgtaatcatctgtctgcccaggtaacctggtaactcaattaaccagcagtttgacatggaactttgtggagtgccaggcatggtgatgcagacttggacctgctcagggctctgacagatggacaccagcatccctgaaaataaagatgtcttgtctttgggtctgtgtgtttggttacctagttgcttctctgctctgtggaagtcacattttcctctgtctcttcaacagtccctgcacccggtgggtcagtgccccggggacataccatggcttcacatccttgttttttccagcatctggcatctcaggaagccactgactaattcccttggccccatcccacccctactgccgtgcactcattggcttctagcttttgatgaattcagggaaataggggttcccgtgagcccatgtttttcaagagctcatagtttatgcctggaatgcagatttgcactccagctttctgaaatgagcagaacttcggaaataccctttagtggatcctgtctgaactctaaatgtctccgagtttgctttagagacagaagggagaattcttgaattaacaatgaagctccagtgaaatcctcctatggaatttgaaatgtagccattatgacaaataggcttttaccttttattgtggtaaaatatacatgcataaaatttaccattattgacatttagtccatgcacaatgttgtgcaaccttcaccactgcctacttccacaacattttcatcacccctaaaggaaactctgtacccaataaacagtccctctccattcctccctcctcctggactctggcaaccactcatctgcattttgtctttagagatttgcctattctggatattttcatctaaggcagatcagtttgttcattgaaaattttcaacatgctagacattcacattgcttcaaaatctaaaagtctaaaagggtttcctttcttttacttctcccccatcggcctgggctcccttcccacagatgacttctttgtttgtggaggcatatgtattctagaatatgtgtatcccaatacaaacaaatatgacacacactcttatctcccccttttattacatgaaaggtaacatcctatacacaatattctgtaccttgtttttcagccaccttacaaaatgtcctggaacttctgtccccatcagtacacagagagcttcctcattcctttttaaagccgcatagtagttgtttgaatctagcatgctttatttaactaatcctttcttgatggacatctaggtttgtttccaagtatttgccatcaccagcaaagctgccatgaattatctcacacacatgtcatcttaaaagtgtctcggcagcacaaattcccagaagatgaatgactgggtcagagggcatgtggatttgtagttttgttaatgatcactctgtttctttctgcaggggttgtgccaattcacatgctcactggcggtacacaagagtcccacagcctccaccaaagagtgagttacccaactctgcatttttctcccaatctcagtgtaatcgaatttgaatatctattcctatgtttaagaaagaggatttaaagagttctggttttgtctcctaaaaggaaaaaaaaaatgcatctggaacctccatgttacttgtttacatttaaggataaatgaaaaatgcagtaatttcccgtaatgtccacaaaatcagtgacttgccgaagtccacacacctttccctatctggaaagaagcttctgtggaaggcctctgtttcccaggatacctcacttcccaccgtcccagggacaggctgtgagatcccactcctccacactccccactgttgactccccacagtcagctcccctctgagtgcccagcctgggctccagtagtttatttaaaagcatgacgagccctctaattatggagataaaagctgcctgtgatgcagagcagggcttgggttgaaaggtctcttttttggctctttcccatctcattagagttgcgggggtggctggtcaccccaaggtttaatccttggaggcagtgtgacagcaaatgtggcaagaatcacagctcattgattgttccattaaaaatttctacaggtacctgtaaaagtgcctttcaagttgcttcagtctgaagaatcttattgctcctaaattgaggtcaattaatcccctgaaaatgtgtggcattcacaatttgatgtcatggcctccatgtgaacatctctctctgcatggatggaggaagcgaacagctcttccttcttcctgcctttcccacttcccctaaatctaaagagcaattctctgcctttgcgagcataggctggtgagagcagggagagcaagaccacactgctcagcagccgtgtttaccatctgatcatcatggagggacaactgagtgcacagtgtccttccatccatcattgcaagaccagggaaggaaatttggccctcgggcaggctgtagcccaggaaaaaggctatcctcagaaggccagccgccttctctagtttgcaaacagcacagatttagagcttgcgttccttctcatcccaggaaccacatatgagcacctctccctgccatggttctcacgatgcctggatggtccttatttaagtattgaatcaggagagggcaagaggcttcacccaagacggctgtgaggtggggatgcttgagctgcccgcatctgctggtcaatgtgtcacctccatcctctaacccagagagcatttctcttcatttcctctgcttcttgctccctacattcaacactctgacctcactctgccatctctcaaaagctaaccccagactcctcttctcagtacagggctctggtgaccagggagactgggatgtgatgagcagggccttgggagccagttatagagagttaagtcctggcttggtcatttacaatccctgagtactttaacttttctgaaatgtagtttcttcatctgcaaaatgggctagtaataccaatgtgcaacagcaataggtgaggattgaaggagacatttaggaagtctctggccccatacagagtactcatggcagctgtgaaagtgtgcttcccgggtggaggatgagcccatctactggtcctttggatccactagtgggtttgcttggaggtcacacttaccacagctgctcccaggtg

SEQ ID NO: 1888348 - DNA, 4001 bp, Homo sapiens
gagtgcacaacagcaatagtaaaccctaatattaactatggactttggatgattgtgatgtgttgatataggtttatcaattgtagcaaaggtaccactctggtgggagatgttgataatgcaggagactatgcatgtggggcaggaagcatatgggaaatctctgcacctgactcttagtttttctgtgaacctaaaattgctctaaaaaaaataaagtatttagaaaattgctatagtgcctattagctaagattcctttgcctttgtggcccctctcttcactgaagggttgctgaaaggaatgggaaattgtcctacagcaggcagtagaaggcaggggactaacagatatcaccatctccatttgtaaatgaggacagctatacttaaagagaaagtattctgctcaaactctacagttagtaaaaggccagtatttaaatccagaagttactccaatcttgtgttcacaaccactggactatgctgcttcccaaaactcacttattagcatgacataatgacagtgtttggaaaaagcttttccactccggatgtgttttatgtaaaaaataatgcatgcttattgaaatgagtcaaataatactgagtcatataaggaaaactttaatgttatctgcttccactttcttgttataaactcactcccttgaagtaaccaatggcaacagtttgatacttatctttccatgtgtttatctgctccatacaaatagatccccccaaaaagcacagaggggtttttatccctgtcttctttaaaaattggatgatactctttatattgaccattccttcaggtattttaatagatatataattatgtgtataaatatatatggcttatatgtataactatatatgacatatatatatatatatagtatatgacaatctagtgcttttttaatgtgtaaaatagattcccagaaaagataatactgggtcagagaatacatttatttttaaaaattttataaaaactagcaacttacttttcaaattgttttaccaattcacacctccatcagcactgcttaagactggcaatttccccacactcttaccagtccagaattttatccggtatgtccatctgaatgcccacacacagacaattccatagctggttcattcagtagctccacaattttagttctctgtgttaaccgatttgtagtctatttggctcttccctcatatccacaagatggctgctgcatgtctacagttctcttcttcctgtgaagatgtaagcagcagagactatcctgggtgacttaatcataaaaaggctgttaaaggatgatcactagctcacagaatcactggggaggctgaagaaccagatttagggacaaatagaacaatagtcaagccattgcatagaagtgatcaaaaaatacctacctaagcctaaaatatttatctaatacagcatccattaggattccagtgctgctgtaacaaaatgccacaaactgggtggcttaaacaacagaaatgtattgcctcacagttctagaggctcaaagtccaagatgaaggtgccagcaggattgctttcttctgaaggctctgagggagaatgtttcatgcctctctaggcttctggtgattttctgtcaatctttggtgttccttggcttgtagacacatcactgtaatttctaccttcatcttcacatggtgttctccttatatgtggacctgtgtccacatttccccttttcacagacaccagtcacattggattagaaacccacctcactcaagtatgacctcatcttgactaatgacatcttcaacaaccctaactccaaacaatgtcacgttgtgaggcactatgggacaggatcccggcatatgacttcttgggagacaccattcagcccacaaccatgtgttaaaaagaatcaaagaaataatgtgcataagttgtttagcacaatgtaaactgtttggtagatgttattagcattttatacagtcagtcccaatgttttgtcacttgacatttagctgtttcgctcatttaatctgataaagaactgttcttttcttttactatgttgacttactcatttgatgatgtttagccacatcagacacacttcttcagggatcatgagaatctatattggaatgttgttttaagttgtggacctcagccaaacattatttcatcaaaagactcatgttggtggctataaagatggaaaaaatagatctgagaaatccaaaagtggggagggtggaaagggggacaagaattgaaaaactacctattggatactatgttcactatttgggtgatgggttctctagaagcctaaacccagcattatgcaatacacccatgtaacaagcctgcatatgtaccctatgaatttataatttgaaaataaataaataaaaaagatttcttttttacacacacacacacaaaagaggctgaagttgcgactgacatatcagcaagacatagtgtcttctcaatcctagccagccccagatgtagcattcaaacaaaaacaaaaacatgtctttgttcctgcattaattcacttaggattatggtattgagcatacatggacatacacatgggaacattaggcactgtggaccactagacaggggagggagcaagggagatgtgggttgaaaaactacccattgagtactatgctcaatacctgggtgcaatatacccatgtaacaaacctgcacatgtactccctgtgtctacaataaaagttgaaattaaaaaaaataataataacatgtctctaacttccccagttttaaaccttggaactgttagcagaatttgtcagaggatctcacaatttcgagaatagaaaaagagttcaggccgggcacggtggctcacgcctgtaatcccagcactttgggaggccaaggtgggtggatcacgaggtcaggagatcgagaccatcttggctaacacagtgaaaccctgtctctactaaaaatacaaaaaattagccgggcgtggtggcgggcgcctgtagtcccagctacttgggaggttgaggcaggagaatggcgtgaacccaggaggtggagcttgcagtgagccgagatcgcgccactgcactccagcctgggtaacacagcgagactcggtctcaaaaaaaaaaaaaaaagaaaaaattcaaatgacataggatttcatttcacgttcagagttcagcttgaagctaccactgtggaccactcttagaaactggagccctagggacatgagttccttgtgaatcaatgcatactcattgtattgatactcagccaacttaacacgtggtctttaaggatgaccttcctaagatgttctgttaaacataggtatttatcaaagtgatttatttcttcattggccttttttacatcacactggagaagaatatacaagtgactcagatgcattagtaaccacaatggaaataaaactttctcttaaaaattgcattttaaacattcatttagaagatgagcaatctaaaatggtatttctattggaagtggttttctgtgaaatcgtgactgctttctccaccattcgttttttccatttactatcagtatgtcaatattattttgaaactttagtcaattggactacactataaatccaagttttcattttccctcacattaacttttcttcatctcccttttcagctattagtcatcattgttgatgccaaagtccttagcacgtagagttcaattagcttgacaaagtgtattagttatgaaacaatttgcactttatttgctggctattgttttcaaaccagtttaactaagtaacttacataagtaaataggaaataacaactagcaaataattgaagctcagagtatagttcttttgaagtaggtgagtatattttggctgttggacattgagtcctcagcaactctagactcaccattcctaagcttttct

SEQ ID NO: 1888349 - DNA, 4001 bp, Homo sapiens
gggggaggggtgtatcacgtggggtgggacgaggctcatctctgggcctggggccccagtaccgtcctcttagggcagcgagctgcctcccagtccccacgacctctgcttgggatgtggggcctgacccgttcctgctaccaaaacccaactcaagagttttcccagatgcccccgggacccataaagcctcgaaggaagccaggttggtgccaggcccagctctgtctcccacctgctaggtgcctgcttgggctgccccctcatctggaaggggtgctaagtgccaggacagcgccccaggtccggggcactcatgagtgacagcatcctccaggtgtggactacagggtagtcgggcaactgggatcctgctcctggcccagcgcagcggaaaggacagagccagaccctccagccaccccttccaggctgtctccttgtcctcagagtgggcagaagatccctgccctccccacctgcctgctgtggggtcagctaagacaatgggtgtgggaccctccacaagaacagccccctgttaacaaaatgagacttgaaggagtgagagcacttcggggggccgggtttgtcaggcagagattgcaccaggcagggggccgagactttggagaggacctggctggagcactcgtctgcacacaaggaaaacaaaggctcaaagacagggcagagttcagaccctccgttcccaaagtggtgccccccacccctcccaggactgtgtccacacagtggtgcccgccagggtgggcaggaggtgtccatggacatgactacagcaaggccaggggccgagagggaagggtcagggaagactggccagctcgaggggatcacagaggctgccctggccttgttcctagcggacaaaataggactgacagctacagacaaagccaggcacagcccagcacaaagacagacagccgaggaactgtggtgccccagtagttaagggccagaaagaacatttttaaagatgtcagggttggctgccagaatcctcttgtacaacattccatgactgggagttgttggggacttgagttccaggctggctctgcccagccttgaaagcctggctgggcctcggttgcctccttggaaaatgaggggctagactgaggccctgggggtcctggctgtgcccagagcctgccgtgccaggcccacgaggagaggtcagggctgggggtgccgagccagcttccccaggctccgggtcaggttatccaggtgggagggaggcctagcacctcccccactccgaggtctggcttctagaatctcctgcagaaacacaaacccatctcactacactgtaaacacaacatccttggaattggaaatcaatggcagatgcaggcagattcagcctccaaagccacagaagggctgggagcggaccggagccaggagttgccacgggaggtgggtgcctgggagccccagcacagaggtggcccctctcaggccaggctgggccgcagcatctgtgggcccctccacgccccctcccatccgtgctggccccattggcctgggctcgcagctggactgcttcctgggtggaggcaccagggcccacagtggtacggcctggcattggtgcaggcttttaagcatagatggcatctttaacaaaaatgggctctcacagaatgtttttaaattaaaatgtaattcacatacctcggaatttacctcttgaaagtccaggcagttcagcggcatccggtccacccccactgcggtgcagtgccagggtgagccagccacccccggcgggagaaacaccatccccacagccggcgctcctgtgccccctcctcccagccccgggcaggcctcgcctctgtgcgtttcccatggatgaggtcatagagcgcgtggccttccgtgcctgcctcttccgggcagcagcatggtgggtgtttctgaggctcctccgtgtcgctccacccgtcagcacttcatgcctctcggggctgggccacatttcgttgcagggatgggccacgtttttaacctgtccatcagcggacggacgtttgggctgattttatcttttggctatgatgaataacgcggtgatcaacattgattcacaagttttgtgcggacccgttttcagttgtcctgagtatcagcccgggcctagacttcccgggttatatggtgatacagtttaaacgcatgtccttgccaagcctcgtgttgaactgtcatcccccgtgttggaggtggggcctgggggcaggtgtttaggtcacgggcgtgactccctcaggaatggcttgagccatccccgtggtgaagagtgagctctcactctgggttcctgtgagatctggtgtttaaacgtgtgtggcacctccccgaccccgctgctcccgctttcaccacgtgactcgcctgctcccccttcaccttccaccatgagtaagagtttcctgaggcctccccagaggaagaagcccttatgctcctgtacagcctgcagaactgtgagccacttaatcctcttctcttataaatgacctggtctcaggtatttatagctccataaaaacagcttaacacgtatggtaactctgtgtctaagcatacaagattaaaaaaatacattcacaccgtcttctgtattgacttccatggttacctttactaatgtttttatttcttcaagttggtgtgagtggctgtctagtgtccttacatttcagcctgtagacctccttgtagttatctggtctgctagtgatgaattatctcagattttgtttaaaaactgttaaaaatattgatatatagtatgtatacacacacacatatatattgtatttatatttagaatttttaatatatatagttttatatataatacatggtatttatataattttatttatattttatcattttattttgtttatttatttgtattaatttctccttcactcctgaaggatagctatactattatacaattctcggttggcagtctttttctttcagcactttgaatatgtcatcctactgctttctggcctcatgacttctaataagtcatctgttaatcttatttaggattccttgtatgagatgagtcccttctctcttgctatttttagaattctctccgcttttcacgtttcacagcttgattatgatgtgtctgggtgtgggtctctctgagtttattctacttggagtttgttgagcgtctaggatgtgtagattaatgttttcatcaaagttgagttggctgttattttttcaaatattctttcttcccttgcctctgtctcctctccttgtgggacttcatgatgtgtgtgtttgtgtggttgatggtgtcccggaggtctctgaaggtctctgttcatttttcatcattcatgttgttttcgctgctgttctgtttctcaagctggacaggctgacctgtcttctagtttgtccattcttctgcctgctcaaatttctggtgagcccctacaatgaaagcttcatttgagttattgtacttttcacctccagaatttttttaaagaaataatttacatctctttgttgtattttctacttggtgatacactgttctcatactttcttttagctctttatacatagtttcctttagttctttggacctatttaaagcaactgatttaaagtctttgtccgtaactctaatctctgggctttctcagggacagattctattgtttgcttttttccccatgtttgagacttcttaaaatttctttgtatatctctaaaactcttttttgaaaactggacatttaatataatagaatgttgtaattctagaaatcaaattctcttcccttccccgagtttgttgtttctacttgttattgttgttatttgtttagtgatttctggacaaattctgtcgaatctatattctttatcatgtgtgcccactgaagtctctgctcgcttagctt

SEQ ID NO: 1888350 - DNA, 4001 bp, Homo sapiens
aaaaaagggagagagcgcaagcagatggcgtccacagccgcgtctccaggccacagcgggcacctgcagggcagctgggaatgggaagggcagaggcggccagaagctcgtgccctcactgatgccggccctggcagttctttccaaaaatcttcccactcagctccctgagtcccacggatcaggcgcccttagcctgctgtgcagggggtgggggagactgaggcacagaaggccgggccccccaggcaccaagcacggcccatgacccagagccatggagtcacccaggccgcacagctggtgagagcagccctagatgaggcggagccactgggttcaaggccagagttcctgctgcacccccgacccctggtcccgccatggaaggtgccaggagtcatgttccctgggctcctcttcccccaaaagcccctcctcatgtatgcatgagtgtgtgtgtgtgtgtgagagtgtgtgtgtgcacgtttccctgcctgagcactgagcacacctccgcacaggcaactgctgccaccacctcatggtctcccagtagccactatgaggagggcagaggccaccgcctctagcccagcaggacgagggcctcgtgacccgtggggggagcagagcagggtctgtgtgcctcgtgacccctggggggtgggcagagcagggtctgtgtgcctcgtgacccctggggggtgggcagagcagggtctgtgtgcagggttccttgccaggcacgtggccagcactgcaggagctggcattgtggtggctcggacgccctgaccccgtgttgatgtttttggtgcagccctgcccgcgtggccttagggtgacccatgtgaccacagcccatggcgggcacagcacaagggaggccacttccaggcctagggggttagactgtggcttctggcacctggaggagacttggcagcctgggggtgccacatggtcaggggctgaggcctccccacagccccgtgagccccgtcctggacaaggggctgcccgtggctgccacctgagccacagccaccagccatgctgcccctgaaacgggggagctaacacgtggaggcatttttaagctgctacgttttggggtatttgctacacggctatagatgtctgatacgctgtggggtatgccctgaatgtggggtctggttggccctaggctagcatcaagctttgggcagccagggccccaaagcccccactcctgcccactgtggccacgcgcctgcaggaccagtcccgccgctgtgtgggcctcgcctctggacacaggccccaggacccccgaactgaggctggcctggctccacgtcctcccgcccactcccgttcagcgctgccaggcaccgtaccctctgctgcccaccaggacccggctcctggcaggcctgagcctcctccccatctcccttcaccctccctgagcaccccccgggcccatgggcccagcctgctgagggtgacttcttcacacccaggctcttggcccagcctcctcacccctgtccctgggacttcctcctggccacaccatccttccagcagtgctcccaacacacatggccatccctggggagtcttccaggcagccctacccaccatctccacccacctccttcccacctgctcaccacgaggtcctgttcccagcatacggccctgctgctggctggggaggagatctgacccctcctgggccactgtcagcatccccgggacacagtgctgccggcctccctttggagtccaaccctgtcctgtccccacctgccccgtcctcctacctgtgctggttctggtgagcctgtcaggtgacacaccctggctgtctcctccatggggcacccagtgaagccgagggaggaccctggggctgggactcagtttcccctcctaggggccacgaactggtctggatgccacaggctgctgagggaggacaggtcgagggcaccatcgagggtgagtcttggtcggctggcagagggctggcccagggagccccgtccctccctgagggccccgcctgctcagtactgtggcccgtggcccgggtttggcctgtccatcagatccagcccttcggcaccggtgtccccagggccctgggctgtgagggggtgtggaggggaaggaaggacatctgggggcggctgtcacacatgggagcatcgctgacggagaagttttcctataaatgcagctgtgttcatggatgttccaaatggaactgccagctggcttttggtttatgagactttattaaagattacatttctgtttagttatttattaggtgtttagccaatatttctaaatagaggacatgatgctgagactggggctacatggccatggttgtgtgagtgtgcgtgtgtgtgtgttgtgtgtgtgtgtgtgcacgtataagtgcatgtgtgagcatgtgtgcatgcgtgagcgtgtctgcatgaaacagagctttcttgttcttgaacttctggggcccgaggcgtccgaatgctcgaggaacgatgatctgcaaagcaggattccgcagcaagttggtgcccgcggaagctgagcatcaatttgctcttagggaattttccatgttcttccatctccccgtttaggtgccaggtcccggcctgcagggtggggctatcgggcctctgccacctgcttcgtggtgagactcctgggcgcccacagcctccgcctggcaggccagcccaacagagcctgtttcatcagatggtgtttccaggagccaaataacaaacacactttctggaaacagccaggaggagcagccgtctcccaagaggggaaggaaaacaagaggccgctgcggctccactccccatgaccgcctggacctgcagcaggctggtgcaaaggccctggagcagtggccactgctgtctgcacaccagggcccagcccatggccagacctggggccggtgggtgtggactggagcctggggctctgccagcccctcctctggtgccaggctggtctcccgaggcccagaggaggtaaaaacagagtctttaatgacaccaggagccattggccttcaaccactgcctccacagtctgggcaccccagccagcagcttgagggcctggcccaggcagaggctggggcaatgtgggatgctgtgagggctgcaggctctggtgggggcgaagctgccacctgctcagaggccatggcctccgcctcgggcacctgctcccagaaccgccggctgcaggggaacctgcctccatcacccctcaagcccgggccctgatgcagggtgaggggggaagcctcccagaggaagatgcaggcttgcaggcagctggaggtcgtggcctgagctctgctgagactcgcgtacgacattgtgtagaaaatctgctttttaaactcagcctgctgcagagatgaaaggaggctctgtgcctgcggcgctttgccgcccattggagttgggtgttggctttgcatgggaccagtgattctggcaagcttggcctgtcggccgggtctgcagcccttgccggctagggcaaggtgtggaacgggagccaaagacagggtcccagcccaccccctacaggggacccatgttgggaaagacagggtcccacccaccccccacaggggacccatgttgggaaagacacgcgggggctcgggacgggttctgcaaaacttgcgggggcggccacatggggttcccagtatgtgtgacctggggacgcagcggcaaggcagctggcaccatgggcaggtaggtgcagagccagtgaggtgcccagcagcagccccgcctgagcctccaggcccacctgcctcctttcccagcctcagtggggaaggaggagactttcaggcccctagagtctgaccaaggccccagctccagtgcaggacccgttggccaagatgcaggggagagaaagggcccccctctgaggtcctcgggagg

SEQ ID NO: 1888351 - DNA, 4001 bp, Homo sapiens
ggatctgtgagttacaaggagattgctggtagttggataactgacccaaatcattccaaattctcatgttgtatttcatggaccatgtacagaaaatagaatgacagttccatttttgtgtcaaattgtaattagttaacgccatgccctcaaaagaaaccttgatttttatattattatccaaaatgaatttcattcccaaactcttgaatgtgaatatctttgacctgtaggagatgaaaatatgcctgtttggcataaggattattttgaggtattttgagaaattgcagacacaggagaagctctgaaaacagagtaaaagttacccttttgtaagaaaaatgtatatctgtaaaggaaatctccatttgtaagtgtcttcctctctgtaccaggatgagaaggatgactaaatcattagagactcagtggagaaggcaccaacttagatctgcataacaaacttgacctttgcttactgtgttttcctgggcgtctcaccataactggccttcccctcacccttctgtctttgtttcagtggaagataggatttaagcctgaattcaaagccatgtctttgagatttgctcatttctctaagtttctcccaggtatacagaagatacacgttatgaaacgtccttttttccctcgttaatcagtcttttgttgcggcggtctgccccagctaaaagatatgcagagtagagagaaatgttttccccctacagtccccaatacttaattttattcactaatttctggatcttgatttattaatcattgaaaaggtgtcagatgcaccaaaatcaccctggtaaagaaagaatacgtagagaaaaaaggtgaaatgctttgtctagctcatccgtctgggttatctgtgcctttgtttgcctctgattgggctatttcacaactctttagacacagaagttaccttggagaaaattgattggaatgcaaataatctctgtccatgaaaatgcaaactgggtttgtgtggatattgaccagttttgccagttttgcatttgtttgtaaattcatttcacattccttatttaaccataaatgtgtggttctcttttgaactccttgcaacatctatttatcaccttattaattcctgagttaaatccgacacatttattttatattgtatgaaagttgtaattttatcctcatttaaaacgtattctttaatgaatataaacagcaaacttacgtgattcattgaggaacacatctgaaattcaaacatgttcctttccttgcaagttttctctccaaggccagaattgcatccttcctgtgtcatccagatagtcattgtcaaagaatcagtcaatcaaagatggctttgtaagcttgctgaataaataacagagtcctggacatttttgaatagcttcttctgttcaacaaaaaacaacttgcaaggctaggcgcgatggctcacgtctgtaatctcagcactttgggaggctgaggtgggcggattgcttcacctcaagagttcaagaccagctgggaacatggtgaaaccccaactctactaaaaatacaaaataaaaattaaaattagccgggtgtggtggtgcatgcctgtagtcccaggtactcgggaagccgaggtgggaggatcacttgagcccgggaggcagaggttgcggagagccgagattgcgccactgcactccagcctgggcaacaaacctgggcgacaaagtgagaccccgtctcaaaaaaacaaacaaacaaaaaaacaaaacaacctgcaaagcttctaaggcaacctgttgttcccagtggttactccaatgtacttgtggtgaatccacaggcgtctgcagcaacttcaattcttgcctcctcagatgaaagaattcgactgaggggcataaagcagaaaaaaagactaaggcaagtttcagcacaggagtggaagtttatttaaaaggctttaaaacaggaaagaaagttcacttgtaaaagacccaagagggtgcctgaaggtcaaaaagagagcgtttaaccttgatcctcgggctttacaggcttgcctctttcccataattcctcccttagggtgggcttcccgcatgcgcagtgccctccttacttctgggaattgagcacacagtgagtttaagaagttgtatacagccgcgtctgatccttccttcccttttttccgatggagtgtccccaaaaggtcatactccgccaacttgtcttttacggtacatgcccaggaggctgctttccctggcatctgcattcaattaacactttaatgttaacagctgtggatcatcaggagattgtctctccctggcacaggctgctgaattatcattgctagagaggcagtgtgataattgtcaaaccatccccggacattcctagtgggtgggggaagagcgctctcctgccccactcatgcctatctaactacctgtaacaatacgaataagttgccaacagatcataagtaagcattaccaaaaggaaagtaagatctgtttagggggcttcttggagagaagatttgcaaacaaaatttggtttaaaaggggatgataatattagttcatctcatcggagtgtatgcaaaacaaactcttcaatgtttttattaaaatttggctaatgtcttttgagaaagcaaaattttgaaaaattttgtttttagtttttatttttacaattgtattttaaaacttatagaaacacaactgtttagcagcttttctctagagagtatgttgctaaaattttaggcctttctttttactgaatttaattttatgtaactacagacttgagtattttatagctataataccattccagttatgtaagtaatattttatgtaattgaaataattatgtgggaggaatttagtcaactcaactgtataaccattcatgtagtttatagaattataaaaaagttttagacatatttctatgtgaatgtgtagtgtctttgcaaaaacagcaccaaactataatcatataagtagctgaaggttttaatgatttaatgaatatttaattatttaatttaaattaataaataatgaccatctaataaatatgactaatgatgtttgtggtagcaagtataagaatttgtgtttgttggccgggtgcggtggctcacgcctataatcccagcactttgagaggccgaggtgggcggatcacctgaggttgggagttcgagacaagtctgaccaacatggagaaaccccgtctctgctgaaaatacaaaattagccgggcatggtggtgcacacctataatcccagctactcgggaggctgaggcaggagaatcgcttgaacccaggaggtggaggttgcggtgagccaagatggtgccattgcactccagtctgggcaacaagagcaaaactccatctcaaaaaaaaaaaaaaaaaaaaagaatttgtgtttgtcatcaatgtgatcagtgtggaacatttaataaaaggttacagaaacctaatgagagcttattaggatgaaatacatgtgtttttaaaactattaatatttatcttacttgtgaatatgtttcatgcattgcctgttattaaacttattagaaaatgagatcattgtcatcaatcaccactcaagcatcatctccttccaaagccacccttgatgtcctcaagacagaattaaatgctccctcttgtctgttcccacagtgtatctgccataactgcaccataattattgtttatctgtgagtacctatctataggtgtggtaaatggaaacaatatagatgttgaagtcaaaccagatttgaatttcaaaataaccaattgctagttgagtgatcatagatgagcaaataaacattgtgaaattcagcaagatgcacattaaaatcatcataatatataccatagtattatagtattgttatgaagattaagagaaataacatatgttgccacctggaacacagta

SEQ ID NO: 1888352 - DNA, 4001 bp, Homo sapiens
gaaacgtctcagaaagcttccagcctctgcctgctgggcctcggcagcaatttggctttgtttcagcagttggatcacagttgagaggagggggttgcagggatactgacagggaagtccttctcaggacaaggaaggaggcctggtgaatggaaatacaaggcctacaattggagtccaaaaaaatagaatgttatcccacaggagaaggtaatagatgtcaggcactaaaagcagtaaatcatctagaggttaagaggggaatgagaagggagtcaaaatgtagcaaagatggatgaggaggtcactttagtgttcagggagaaaaaatgctgtgaccagtgaatcacagggaagacttgagacatatattatacacatattaatcacagagaatatatatatatatagtctccctaattctaattcaaggtacatatatatatatatatatatatatatagtctccctaattgtaattcaaggtacgtatgtgtatatatatatatatatatatatatatatatatatatatatatatatatagtctccctaattctaattcaaggtacatatatatatatatatatatatatatatatagtctccctaattctaattcaaggtacatatatatatatatatatatatatatatagtctccctaattctaattcaaggtacatatatatatatatatatatatatatagtctccctaattctaattcaaggtacatatatatatatatatatagtctccctaattctaattcaaggtatatatatatatatatatatatatatatatagtctccctaattctaattcaaggtacttaatgtcaatgagataatataagatatgtgtgtgtatttatatatgcatgttacttcattgagactctgtgttcttataatttaatatctaattcacagaatttttaaaggatcaatgaggtaaagaaagaaaaacaccaaaaacatgggtgggcatgcagttcagctacattcctcgctcttgtctcttcttgttagttgtaaatgccttgaaagcaaaaactgtcttgtccatcctggattctctagcacttacagtactgtagcttaataactgtttcacgatgcatgagactgccattttggatacagaattagcagaaggggggtcatggtgagagcaacaagtggtacagtatgaaaaagaagaaaatattattattctatttggtttgaaaagtagctagaataggcaagattgatatctaattcattatttgcccagtattgtgctaaggacttgatgtatatcaactcagtgaatcttgacagcaaccctagaactcaggcacaattttgactcccattttacagatgaggaccacgagacattaggaggttaagtaatttgcctaagaccacacaggaataagtgacacagctgggatttgaacacagctgccttccttcattcctgggctccaaatctctacaacatactatttctggatgaaatggtattatgcttatccaagacataaatgttttggcaaggttaaaacattttggaaaatgtaatgggtacttaactaatgttcctatatgagaggaaacaattatcaaaagctaatagcttaaggaatcatcacattttttattttttattttttaaatggaatcttctacacactaaggcatactgttatttttgagcagtcaacgagataagtatttagaagccctctagaacacaacattttcaaaacatctggaaattttgtgtgctgtaaataacattagtgattaaagtttggaccaatggattagaaaaataaatggaaaatattttaaatgcatatcctaaaacagttatctaaatcttactacgaaaaaaagatataagcatactaatgtttttgctttctgtattaatggtaaaattatgaaattacctcttttccttaattcagttgaagatccatttcccagggctatataattaatcataaaataacctgttggtaagattcacaatgaatacctgatgtggaaaaattattattttaatattttattctctatttttgcttattttattgatgtgcatattttacacacaactccaaggaattttaaggaggaatattatacaaagagaagtgatccactatttcttcactctagcattgggctagttactttatatacttctttcctgcagtaatcctaccttcattatatgaatgagaagagattgagtctgaggggctaatgaacttttctaaattcgctgcttgggggtgtgtatggaatgattctctcatttgactctttcaaaagttggtcctctttttactatatatattgcctttcattgttgcaacacatttaatgttccaaattcactaacacaatgaatattataccctattataatcccatcggaccttatggcctattattctatctgacaattggaaaataatagataattacagtgagatacattggattctaaaatttgcttcaagtcataaaaccaactagctacaatgtgaatacttaacatcacttcctgtgcctcccctgtcctttccatcacatgatttttttccatgcaaatacattataaaactttctattgcatgcaatttgccaccaattgaatcattttgtagttgtcaatgtatctctttcagaatattaaagaggcctgtgccatgttaattacgctaatttggggacattaactttataattgttattatactggttatacactgatgttaaactgtctgataaaatttaccttgaaaattgtaagataatttttccttcccgtcagttagcgtatgcgaaggcatttggactttccttataggcaatgggatgtccttaccgagcttatgggcaggccgtgatgggacttgacttgcgttttagaaacaactaagataaaagtatagatgacagctgttgggaaaagactctgcagacaatgacacaagtctagaagtcttttccaattatgtagataagagatgagcagatagtaaaggtggaaagttgtagaaagatttcagatactcgaagtgatgccataataaaaactagatgtgttattctgttttagagaaaagaggagagaaataataaattgagtttgggacatttaaagggctttctaggtaaaagaaaaaatagttgattagagactggtatttagaagatggggcctatggatttcttctccaaggtgctcagttatttttgctgtatttttccttttacgaatgttttgacctgaaaaagcaaaattgcctaggatgaatgagcacttgggtataagagaatcaccaatatggaaaaaaggaattgctgggggtggtggcacatgcctgtaatcccagctacacaggaggctgaggcaggagaatcgcttgaacccaggcagtggaggttgcagtgagccaagattgcaccactgcattctggcctgggtgacagagtgagactctgtctcaactaaaaaaatttacaaaaaaaaaagacaactaaaagttttcccaactcatggtagttaagtgtgtcattttaacatataaaaattcgtgtttaaactagacattgctgaaaaaataattcactttccttgagagaaagagtgttgagctatgagtccaggcagcctttttataaatctcctgattctattgagtaatcaatgaattgttctgagatagcctcatctttgaattgaactaataacattatcagtctcataaaagatttaataacaattcatataagcagtagaggtcctagcatgtaatacatgcccccagaacattagacaatattatttattatttctcagaagtagaaatatatatttagctacagaaaatttttcaaacctggctgttatatacataatatttataacatatagatttgcttgaatttatagtactatcttaaattataaatatattatctgcat

SEQ ID NO: 1888353 - DNA, 4001 bp, Homo sapiens
ttaagtgattacatgtgaattcatcaggttgaaatttcagtttttacaaccacttacttatattcaaagggcttccaatttgagtcaccattatcattaataatagtactatagggatgtggagataattaccatcagtctcccttatatggaaagttattgcttgtatctgagatggaacatataaacttccctctcaatttgtgcctttttcagaagcaggaaagaatcagtagtcaatgtgctttatagggtacaggaatattataagtcttggtttattcaaaaactcagccgcaaaaattcaattctagtaagataatcagatcatttatctccatatctggcacttactgtctataagataaaatcttattctcctttaaatgttagttaactagattttcataatttttatgtaaatctggaaattatgaagaaaatactaggagttgtagataatttttgaggaaggagagagagggttttcttgctgattattcccaaatctttttcaaacatgtacacatggcagtctcaactaaattcaggtaagtgttgggtaggaacattatttattattttattttcctttcaaaatgctaggctgtgcagagatactttcataaactgaggaattgtatgatgattcatctcagaagattaaaaattaataaacttgttctgaaagaatcagtatgaaggggcaaatcaggcttgtccaatattcctctagtgtagggatttgtaacccttttcacaccaaagactgggaaaatccagtgaagcttacaggcttgttctcagtatatgatttttactgaagtaaaacatacatatcatacaattttccacttttaagggtatagtttagcagtgttaagatctccaaaatgtttttatcatgcagaattgaaactctgtatggattaaacaacaaagttcctttccccctgttcccagcccctggtaacaactattatgctttctatatctacactgtaaatagtgttgctatgaacatgcatatgcaaagatctctttgagaacctcactttttggggggtaaatacccagaagtgtgatcgctgattatcgtatgatattggtatttgtaattttttgaaggaagtcagtattgttctccataaaggttgcaccattttacaatccaaccaacaatgcacaagggtttcaacttgtccatatccctgctaacacatttgttactttctggttttgtttgttttttatggtttctatcccaatggatgtgtggtgatatctcacagaaaaatgaatttctctgatgattagtgatactgagcatcttttcatgtttgctggactttgcatatcatctttggagaaatgtttattcaagtttttaacctacttttaattgggttacttgaacttttgttcttgaattgtaggagttctttatatatgctagatattaacctcttatcagctatgtgatttacaaatattttctcccatttcatgggctctctttttactctgttcgtgatatcctttgacaaatgaaaacttttaagtttgatgaggcctcattggcctatttttgcctttgtttcctgtgtgctcactgtaatttttatacatttataaaataaaatacttaggattacaaataaatttaattattttgaaacatattagtcaaactatagagattataaaattcagttatgtatgtgatcatactgacacatcaaatgatgaagtcttaaggctggactaataagtagcaaaatattgtggtagctttgattttaaatgtgaagcaggttcactctgcactggttcccaacttgcttttgtttgatgagatagaacacctatacataatgagttatatgaagtagatttattacttacaaatatacagaaagagacaatagaagcctagtattgcttgtaagccagactgccatggatcaggaaagctgcccagggtagacagagtcttatctgtgcataccttaattgcaccatggctaagaggccctggaaaccagcacataatgggttttataaccacagagttccatggatcactgggttaaagcattgaaggacattctgtttctagggaaggactgggaaagagaccaggctgttccagatagttctttcttatctcaggacattgcattcacaacacattctgcaatcattcttgagaactctaagtgagaaaatggggagaaacgggttggtctaaggtcacccagagaattattctccagtcaacatatttcagtatatctgcagcaaggtaatgtgatatgaaaatatacaaaattttaattggcaacaagataggccaggcactctaatactactttgtattgtttgcatatatctaagatgtactaaatttcagttagatatattagtgaacataaagatttaacttttttgttcccctacaaagttcataggttgaatcccattgtgggctgtggatacagaaccattgttgtagtgcttgggtgcatggttcaacaatggctattaagaaaagtgaaatactaattttcccccaccacatacccctattatactcttcgagggccttctatccaatattgtccaaaacaaattccacacgtaaggaccttaaaatcaatatggtgcagaagacaggctgcatagcagaagaaacaactctgtcaatgtgtttattaaaaagtcctttaggtgtcaagattattttactgacaacaattaattttactgacaacaattaatatgtaaattaaccttacaaatatacacatttaaaaaaatttttaaatcttttgcaatattcttttcttacggatttttataacaagaaacataaagatttaaggccattcaataaaacatgttttcacaataggcatatatgagtacttagcctagccaatccccatattggcaatgaaaaagtaattccttgcaagaaagaatatttgtaaaggagatataactcacacatatgtctcattccttggaaactgattcaatcagagagccaagaaaaatactgaataaaatataagttttcacactttatgaactagggaaaatggagtgcattaaacacaaaactccaggaactacttctattgaataaagcagtagggattcttgagttggtcagttgccctaatgaatagagtctataattaaatcaagaccctaacaaaatgacttttatgatgaaagaaaatggctgacaggaaataaaatgtgtgaatgtgtcttaaaagcttatcaaaacaaaagaacaatattttcaaaggaactttgtaaaaatataatttacagaaataatcaaattataagcagacatattaagaaagcaatttaattgtccttgacctactttagcaattgagtccttcttgatattccttctcttttagggatttcttttcattttataatttttttctgaattaaaatgtaaagtgacatcaggcataccttatgatttttatttgaaatttaaaagggtttataaggctagagttagcattttatatatatatatatatagtatataaatatatacacatctgtatgtacataaaacacacattatgcaaccacatatatagatatatagcatatctataataatgtttatattaattaaaatagttgtttttttggtaatgttaacttctctgaaattaacacagcttcacagtaaaaaataaaggggggtactgctaaagagtatttttaatgtccttaaataagcaacttacaatttccataaaatcagtgagtaataggcaaatttattttgggatttatagttaaaaccaacacaaagaaaacaaactttaaccagacatatgaaatcattcagaccagtgtttatgatgttacttgctggatgacatttatttcatttactctaatttgtagtatatttgcttcctataagtgctaattcctatgagtgctaatataat

SEQ ID NO: 1888354 - DNA, 4001 bp, Homo sapiens
atagactcccacccccttttggccaagaatttcctcatagaatgttgactcccttacacttccaggttgcacaagcctcaataccaggacactgtgtcagagaggcccagggcagaaatggagagacgcagtgcagctgaaacaaggcaccttctggttacacctgcgcaaagctggctgctccagcaatggctggtgtggaagatgggtcagaaggtgagagatacacacagaagatatctactatagtgtgtatgcaaaagtagaaactgatagtcaaaatattttctatttcgtcaacataaatttcatgttagctacaatctttaatatcaatatatttaaaattttaatcaaatgtgaagattaacaccaagtttcaagagtgtgtggctaaaacccataaaccttacaatgtacctacatgcctcatttctagaaacttctaccatttctgtgtccacaagagctaggaaacagtgactacacaataaattttatgataaccatttcagggccaccagatacaaggaggaagtcaataaaagagttattttgtgtcagctgttgggtgctcagattaaaataaaaattgaaattaaccaggaattggggcatcaaaaattgctttcatgacctcatgtctgaaattcttatattttgtgcttaaaatatcagctagctgctatttgtaatcacttctttacaaccatttgttctctataaatgaaaaccaaaattagacataactgtccctgtcttttctttctgtaacactgggtttctgaggtccaggggcagactttgacgagacaaaggccatcttcagataaagtgaagattatcatgaggcaatttactgaattattaacatgaatttcaacatctgtgttgctaatgtttctagcctttaacaaatgatccatttaggatatgggccaaagaacatatggctaagaataaaggccatttgaaaccgcacaggggttagcatcgttgggggctcagcacacagtgaaattgactgaggccaaatcacgagcatgctcagttgagcagcccctactgccacgcatgcgtacatgggacccactcaggggctctggaatcgttctgagatgaagcagggaggtatttaaatatttcgtaaaaaatgttttatcatttgaaattttcaaaaatgtgcaaaagtacagaaactagtataatgagccctcaaatatctcacccagctcaaacaagtatcatggctaatcttcaataattttttaaaaaatttaaacaggcatccgttttgctcccaaaggcaggaaaccagggaacattttcatgaccctctgagggtttgtgacctgctgtctctggttcactgaccttattcaatcctctctttatacaagggaatgctatgcttctcccattctctggctatttctcatgctcgcaccaaattaagtggactctgtctatgatttcagcaacggtgacatataatcccagtgttaaaggacggaattttccaatgcagaagcagcagaaagtgaacagaggaaacattgccatgagcaaaggctcctcaacacagtatctccgactgtgctacaaagccacccagcgtgtggatgaaaagtgaaaaaaaaaaatctgacaattgagtgattgttctctctctacaagcaatcctactatttctaacccctccatgggctgcacaggcagcatgcagacattgcctaggtcttcctacaggggccggcgagcccgttgttttccaacagaccaagatccgacaccaggattgcagtcatcagaacctttccctccccacccccacccccgccccacaccaaaacgaagagggagttgagcagggcagctactcaccttgtctcatttgttcacaaagaatccaaagccagcaacatcgatcagcttcttgctttttgtccaactacttgcctacaactctagaaaaacaacagaggtctgccaagaatctgcagtcccttcaatctcaaaataatgactagcctatccagtgtttccatccaaggaattgttggttgctacacaagaaaaccctttgggtggtaagagtcaggagtccaagaaaggcatgtggttatttttgcccctttctggaccccgtctgcactttggaaagaaagggaaatctatttttgacattggctattcagctttcaaataacattagccgttaaagcatatctaatttaaatgctgattcaaagttttgcttaacattaagacgactttttggtctcctgcttcctactgcctcaagcagaaacacggcttcccattcgcattctgttttcttggcaaatatgagctaaagttttggaataggttaaggaattaatgcctccattttcatatgacaacttgcatctttttaaaaataataatataccagagtgatgaagtggaaagtttcatttttttctttcagattacagcacttctaagactggccacctcattcaatacaatttgtcattaaagaaggaattatgtggtcacgagatatgagaggaaaatgaaacacagcggggtggggggagggagagcattaggataaatagctaatgcatgtggggcttaatacttaggtgatgggttgataggtgcaataaaccaccatgacacacatttacctatgtaacaaatctgcaagccctgtacttaaaattcagttaaattaaattttaaaaaaagaaaaagaaaatgaaacacaatggggtcgggggaaagaatggaaaggacatggtagttttggaatattacagtgggcacaggcattgttacacatcaaccttgagactaaaaaggcagggaacgaacatgaagttcactgggactttgcaaaaactagtaagtattgtagtgtcactgacaacaacacatctgcatccagcctccagagtggcttcccctcgccgctccttgcttgaagagaaagccaagaatttgcatttcattgttttaaagagaaaaaacaaacaaactatacttctaatagccatgaaagcatttgcaatccagagttcagcttgtcttttagttaaaaaaaaaaacagaaagccgcactactttaccaaaatgattcctaacatgaaaggatggagttgttttgcctttaactcatttcaaaggcaaagaaaattgctcttcttcaaagcctttggttggaattgttcatccaaaacaaaataaaattagaaaaacaaagcagctcgccctgccctcatccctgcttagcaaccacccaccttctcccagctggaggctttggtggacgcttggttgtgccactacctgatcttctagctgtcgatagacatttcttacccctgagagataccctgacctatcattgaggccccgaaggactttaagtaggtgtttaactggtggtgttgagtgactgcatttaagaattataagactttagttgtactatagaattaatctctttttatgaaaataagagagatgggagtgaaagataataaaagccacagtggatggttaagtatcaaacttcattagacatggaaatagtaataaaaatattaaactacaaggaaacttgagttagaatctccatagggggacgaactgtactagtatgcttgggtctgcccattataggagttcaaggctcatatcccgtgaaacccctcagttctgggcaaacctagggacaggtgatcgccctgcaggctgccagtgactcttagagacaaaaatccaagtgttgacttagttggaaatcagaaggctcatcacaaatgctcatgtacatcctgtacccgtcccactgtgaggctccatctcagcctcctgtttatttccttccttgcacttaaaataacatgaacattgttctgtttattcccttattgtctgttctccttactcagtgtgagctccatgtgggcaggggagtcagcctgtttcccactgaagccctagaa

SEQ ID NO: 1888355 - DNA, 4001 bp, Homo sapiens
gacctcaatgttacagttcacaacaatagcacatatgcatcataaccatcccaggacagaccacagtcgcgtatcaagagcggcaggacataagccaccaggagcaggaggaaggcagagaagccatggtgaagacatgaagagacagccaccttcacccctaaccctgtacctgtggggtcaagcatgacatctgagcctctgtccctggactagggtaaacaaggggatctctgggcccaggaaggctgggggcaggggctgtgaggagctgaggggcctgcaggccacgctgccctggcaccccatctggcacctctaggtgggttccctctcactcccggtcagggagcagcatctgacaaaacactctgctgcaggcctcggtctccccctctgctgaacgtcaggcgggtgctgtctggggcctccagatgctccaaggggaagacacggcgctggaaggctctgggcggtggagggctgtacaggaggggccatgggcctcctggaactcccctgggaatgctagaagggggcagagacagctcagatgaagccctgagagattccaatggcatcccaggcccctctcccatctctctccctcccccatcatcactgcctctgaggccagggtaccccaggctctccaaccccacatatggaggcgggcaggctcagcttctgtccagcaccagagcagttggagaatgaagtggaacccaaacgtggctccgtcccccagggagacaaacctgcagacaccctcctgagactgggacagggggacggggaagcctggcccagacagaagcacgaattggtggcgtgggcctggtgttgagaacagggtccaacatcacaaccccgctcgggaggccagcgtccggggcctctgccagctctgtcccagacggaatttgttctcactctggacacccccaggggacccctgtgctcacaggcagatccagggggcaggaggggggccttcccatgccaagtgcagttggatgatgaacgacacccccaaaagatttgtccaggtcctaacccgaggaactggagaatgggacctgatttagaaaaggggtctttgcagatagatgggattaagttaaggattttgagatgaaagcctcctggatgagggtggacttgagatccaaggacacgttctgagaagggggaaaggtgcagagacacagtcacgtgagacggaggcagagaactggagcgatgcggacacaagccaaggactgcctgggccaccggaagctaggagcggcaggaagggttttctcctggagccttcagcaggaggtggccctgccgacaccttgattttgaagtctggccccaggactcagagagtccacttctgctgcatgaggccccccgcatgcagtatcctgtcatggcagcccctgcctcatgcggcctggatctcatgaggggtccactcccctcgtctccccggtggggcgcggcatcttcatgctgccctctaaggacaagcgcatgagaggccagcctcccccaccagcaggacagaatgcacgaggcctttaccaggccacactggcgcctggcgtggctaggacagcagtgctgctgccccgctgtggggccgaaagaagccagggatgagggtgcgggcgcatctgtgggtcccggaggctccagacccccaggccaactgcacagcctgcaggcagcactgcctggccagccctgtcatccctctgtccgtacatctaaccactttctctctggggccgccccgcccagagtccctttcctgccggaggctggggctttcctggcagctactcaccactctcccggtgtttgttcatcgaggtttcccgctgctgacggttgttttgacttgctcagagttgtcatgcacctttgccctggctatgtaaggagaaggagcctttatgcaatccaggaagcccgcgtcaggcccaggaggtgcgccagctctctaggatgctggccaaggtcccccgcacttggccggatccaggcagggagtgacggacctgctggcatcctcctgaccccggtttccagctctcccctccccctgtcgacaacccagggtcagaggacaggcagccacctggccaaggggcaggcccccttgtgccctggatggtgatggcctctggggccagaaagaacaaggtggtgaggggaccatggaagacggcctggactttagtgagggtggatggcttgctgggcgggttcctcaggggcagaggctgggacaggattcagggttacatggcatgtgacccctggccaccccaggagaagagagggaaggagcaggggtcaggacaaaggggcaggtgccccctgggggactcagggggcaggcacccatggggtactggggaggctgcagagacacctgcagagttgcccccgccggcaggagacacttggctacttatcccccacctgccgtcagtcgctgtcaaggggctcccagggaccctgactgcccagcatgtctggcctggctggagggagtccccaggtagcgctgagccattgtacaggctggagggacgaggctgttactggcgcccaggcttggggccatgctgcagcagcctgggagaggcagagagagagagacaccgggccttccccatggcagagccggccactagctgagcctggctgagaggcggtaagggggctgggcctggccctggagcgagctctacgagggggtctggggctcacagacaggccagcaccatgcctccaagagtcagagaagtgaggcatcagacaggctgtggcccagtcccacagaagaggtgccgtcttgagcctccagtgtgctctgcacggcctggaggcccggacacgttttgggtggagggtgggggtctcagcctgggccaggctccccatctcacccctaagagtggcatcggcccagggtccggccaggccctactgatgtgttctcaggggccaggacatcagtgcaacagggcagccgcttgcgacaggacccggccgactgtccccgtccccagagcacttttggctgcatctgggagccgcatcccctgtttgttctctggaaccaggaagccagggctttccacttcctggctgctgcagaggccatgctctttttactctccaaataggaaagctcctgcaagcctcctgccaagtgagtgtggagagctgatctcagtgtggctgaggttaatggacaggaagtgccattacctaaatgggccaataagctgatgagaagcccgagaagaaagcctttccaggccttgacccagagagccggcaggaaagcggcaggcgtcgcggccccagcagggaagaccagctcctgagctcgagccccagctccatctgcagcctggcctcaccgcagtgccctcggacctctgctcacccttctctggcctcctctggcctcctcagggctcctgcacacacacctgtgggtctacaaggggcaaaaaagatcccggaacatcggagcaagagccccccacccgaccccgtgtgcaagcccccatttacgtgttgcactcccaggggcccctgaagccctccctctcggcctcaaaattcccattgcagacatggtccagcaaggccagctgtctggctttccggccgacgatcaaaacagcaagtcggaatgatgatgggctgatggacgcgggccaccgacaaccaggtgaccactgagagcaaggaagaagccacacagatgcaaggcccccaaagtgggaaaccccgtggcaggggccaggggcacctaaataacagacgtcccacggtgtcacctgggcccggtacaggatggcggctagcaaggccgtgtcaccaggaggctgagtcacggggaggctgcgccactgggaggctgcgcagactgttgaagggggcacaggaacgtggaattggtgttggaccaaatgaaactgcca

SEQ ID NO: 1888356 - DNA, 4001 bp, Homo sapiens
agacctcaatgttacagttcacaacaatagcacatatgcatcataaccatcccaggacagaccacagtcgcgtatcaagagcggcaggacataagccaccaggagcaggaggaaggcagagaagccatggtgaagacatgaagagacagccaccttcacccctaaccctgtacctgtggggtcaagcatgacatctgagcctctgtccctggactagggtaaacaaggggatctctgggcccaggaaggctgggggcaggggctgtgaggagctgaggggcctgcaggccacgctgccctggcaccccatctggcacctctaggtgggttccctctcactcccggtcagggagcagcatctgacaaaacactctgctgcaggcctcggtctccccctctgctgaacgtcaggcgggtgctgtctggggcctccagatgctccaaggggaagacacggcgctggaaggctctgggcggtggagggctgtacaggaggggccatgggcctcctggaactcccctgggaatgctagaagggggcagagacagctcagatgaagccctgagagattccaatggcatcccaggcccctctcccatctctctccctcccccatcatcactgcctctgaggccagggtaccccaggctctccaaccccacatatggaggcgggcaggctcagcttctgtccagcaccagagcagttggagaatgaagtggaacccaaacgtggctccgtcccccagggagacaaacctgcagacaccctcctgagactgggacagggggacggggaagcctggcccagacagaagcacgaattggtggcgtgggcctggtgttgagaacagggtccaacatcacaaccccgctcgggaggccagcgtccggggcctctgccagctctgtcccagacggaatttgttctcactctggacacccccaggggacccctgtgctcacaggcagatccagggggcaggaggggggccttcccatgccaagtgcagttggatgatgaacgacacccccaaaagatttgtccaggtcctaacccgaggaactggagaatgggacctgatttagaaaaggggtctttgcagatagatgggattaagttaaggattttgagatgaaagcctcctggatgagggtggacttgagatccaaggacacgttctgagaagggggaaaggtgcagagacacagtcacgtgagacggaggcagagaactggagcgatgcggacacaagccaaggactgcctgggccaccggaagctaggagcggcaggaagggttttctcctggagccttcagcaggaggtggccctgccgacaccttgattttgaagtctggccccaggactcagagagtccacttctgctgcatgaggccccccgcatgcagtatcctgtcatggcagcccctgcctcatgcggcctggatctcatgaggggtccactcccctcgtctccccggtggggcgcggcatcttcatgctgccctctaaggacaagcgcatgagaggccagcctcccccaccagcaggacagaatgcacgaggcctttaccaggccacactggcgcctggcgtggctaggacagcagtgctgctgccccgctgtggggccgaaagaagccagggatgagggtgcgggcgcatctgtgggtcccggaggctccagacccccaggccaactgcacagcctgcaggcagcactgcctggccagccctgtcatccctctgtccgtacatctaaccactttctctctggggccgccccgcccagagtccctttcctgccggaggctggggctttcctggcagctactcaccactctcccggtgtttgttcatcgaggtttcccgctgctgacggttgttttgacttgctcagagttgtcatgcacctttgccctggctatgtaaggagaaggagcctttatgcaatccaggaagcccgcgtcaggcccaggaggtgcgccagctctctaggatgctggccaaggtcccccgcacttggccggatccaggcagggagtgacggacctgctggcatcctcctgaccccggtttccagctctcccctccccctgtcgacaacccagggtcagaggacaggcagccacctggccaaggggcaggcccccttgtgccctggatggtgatggcctctggggccagaaagaacaaggtggtgaggggaccatggaagacggcctggactttagtgagggtggatggcttgctgggcgggttcctcaggggcagaggctgggacaggattcagggttacatggcatgtgacccctggccaccccaggagaagagagggaaggagcaggggtcaggacaaaggggcaggtgccccctgggggactcagggggcaggcacccatggggtactggggaggctgcagagacacctgcagagttgcccccgccggcaggagacacttggctacttatcccccacctgccgtcagtcgctgtcaaggggctcccagggaccctgactgcccagcatgtctggcctggctggagggagtccccaggtagcgctgagccattgtacaggctggagggacgaggctgttactggcgcccaggcttggggccatgctgcagcagcctgggagaggcagagagagagagacaccgggccttccccatggcagagccggccactagctgagcctggctgagaggcggtaagggggctgggcctggccctggagcgagctctacgagggggtctggggctcacagacaggccagcaccatgcctccaagagtcagagaagtgaggcatcagacaggctgtggcccagtcccacagaagaggtgccgtcttgagcctccagtgtgctctgcacggcctggaggcccggacacgttttgggtggagggtgggggtctcagcctgggccaggctccccatctcacccctaagagtggcatcggcccagggtccggccaggccctactgatgtgttctcaggggccaggacatcagtgcaacagggcagccgcttgcgacaggacccggccgactgtccccgtccccagagcacttttggctgcatctgggagccgcatcccctgtttgttctctggaaccaggaagccagggctttccacttcctggctgctgcagaggccatgctctttttactctccaaataggaaagctcctgcaagcctcctgccaagtgagtgtggagagctgatctcagtgtggctgaggttaatggacaggaagtgccattacctaaatgggccaataagctgatgagaagcccgagaagaaagcctttccaggccttgacccagagagccggcaggaaagcggcaggcgtcgcggccccagcagggaagaccagctcctgagctcgagccccagctccatctgcagcctggcctcaccgcagtgccctcggacctctgctcacccttctctggcctcctctggcctcctcagggctcctgcacacacacctgtgggtctacaaggggcaaaaaagatcccggaacatcggagcaagagccccccacccgaccccgtgtgcaagcccccatttacgtgttgcactcccaggggcccctgaagccctccctctcggcctcaaaattcccattgcagacatggtccagcaaggccagctgtctggctttccggccgacgatcaaaacagcaagtcggaatgatgatgggctgatggacgcgggccaccgacaaccaggtgaccactgagagcaaggaagaagccacacagatgcaaggcccccaaagtgggaaaccccgtggcaggggccaggggcacctaaataacagacgtcccacggtgtcacctgggcccggtacaggatggcggctagcaaggccgtgtcaccaggaggctgagtcacggggaggctgcgccactgggaggctgcgcagactgttgaagggggcacaggaacgtggaattggtgttggaccaaatgaaactgcc

SEQ ID NO: 1888357 - DNA, 4001 bp, Homo sapiens
ggcaaatttccactatgtgaaggattctgtgtgacactatgtgagatacaagcccaatatataacaagagacagctttcaagaaggtactatttttcagtaaggcaatataaattcacaaatacctataaaacacaatgaaatacagaaaattgcataatagacacacatggctgatttctaagtatggtatctaaggggatagataccaaggaatgaaaaagaaatgtcaatttccatgaatttttaaaatatgtgcagcatgtttattgagaggattctgtcaattgaagaatgatgaggttcataaatttggaaaggagagacttatttcttataaagggttgcagcctgcctggtggctattctttttcttttttccttttgacacagggtctcactttattgtgcaggctggagtgcagttgtaccatgatggcccactgcagcctcaatctcccaggcccaggaaattctcccacttcagcctcctgagtagctgggacagcaggaatgcaccaccatgcctggttaaatttttaaatttgtgtagagatggagtctcactatgttgcccaggctggtcttgaactcctgggctcaagcgatcctcctttatcagcctctcaaaaggctgggctggaattacaagaagatacattccttcttgtattagtaaggaaagagtattaagagcaaaatttccagagaataatttcattttaggtaataggaaaaaaataatgatgaatgtagagatatttttatttgtaggtaagatcttgaagagctgagagagttttttatagagaagctgtagtatatagactgtgaagtagaagaaattttacatagggcaatatcacaaagttgattattttttcataatttagttttgttttcttaaatagattacaatatgggtatatctcatactttaacagtctttcctgtatacaaagtataagatttgtagttttcttggtaaatatataagtgattgaataaagtgattgtatggactattaagagaggattcattcctaccttagtaataatttctacataagatacagaagtaaacactttttatttattttattgattcatattctgagaaagtttcctgtagaaagagttaaagtgaatctactatatcaaccttcaaatttataagatattttgcattttctaaattccttgtagatacttaaaaagataactttttcaaaatcaacctatttgtttataaattgataaaaacctagtcttatgtggttggtttttgccaggatattcataggccaaataatattttagtgaaaaaaattcaaatttattaatgctgaattcaatcaagataaaaattagatgtaaacatcctaagtgttatggattatgaaaatttgctgtaataaatgttcagtgaatgaacatctagtatcttttacccaagtatgattatattttggcctcagaataaataatacagtcttttccagcctctcaacagttgccaaagtataggaaaggataagattatggcatgaaataatttacatgaagcagttcattaggaaatacatactgagcttctataatatatgtacttccaataattgagaacaatacttacagcacgatagcattgtgtgggcttttagccttcatttaacttttctacttcatttaactggtattgctagaaaatacttttacaatctttggctaattaatagtctcaaaaatataatgatggattccactgatggattccactgggtattctaaataattttctgcttgttctctgcctatatcaagtctacagcaacgaaaacagccatgcaactccccctgcatattaaattaacattaattttaggaattgaatagatctagtaaatgattaatatgtgctaaccaacttaccattttagggcaatatttgcacatggctaaacaaatagatctttgcagaagataatgagatacatgtctgttctttgctttcttcattgatttggatcactgtacaatcattaagctgaagtctatcttaaagaggagagagggctgctggcaggaagccactttggcaggctcttctatgttgtggtctgtttggttcatccacagagacatggattaagatagaattgtaggaaatcctattgagtaaaggcctactggatgagaaaagggaaaattaatttaagcctctctactccttcaacataaccttttaaaatactaggttacagcatattcatttcacttgtgattctgatgtaagatactaatggaaatgacatttgaaaagggactgatgtgtgtataaactgtcactggcaggtcctaaaagtaccttttcatgtgggcattcagtatgatgacattttccaggttatgagcatagattagaagttatgaaattcagagcctataaaggcatgttcaatctgtatctcttagagggtaaagagttctgaaaacttgatttatggaataaaatattaacccaggacattgttaaggatatcataattttttgtttattgttttgatctgaggatggaggcttaaaaacgtttttgttttttcttggcctgtatgaaatccactgcgatgcaaccctgggatagtgaattggattcctttagctcgtgtacccagcatcttggtcagtcatagatgagggtccatctgacctaatagtaatactaatacaatgcatatgtgagagtgcagaatgttcaaagctcttccatctatatcaactattttctcctctcacacaattctataactggtctcattttgtagttaaatcaacaggggatgagagatttaagtgacttctacaacattatagagtcagaaatggagctaggagatgcattaaggcctttgaaatctgctcttacacatatgtttcctagtagtgtcagctgttgaccatcaaatgtatgtgtagcttatattgttctcagaaatttaaaaaaaagaaaaggaaaagagaaaagaaaaaggaggaaaaaaagagaagaatagaaaagaaagaaacaacttttggagttttggcagaaatatttctagtgccctaaaatgaagacaaggcctcagattccaagggcacagatgtgtggcatgcagtgaagtggccactagccagacagccaaatccccatccagggaatcctcggtgctggtgccaggggaatagagtgggggaggggcaataaatgaccagtgtgcccaataaaatgaaaaggccaaaatgttgcttgctcagcttagcttactattttaaccaaaagtttggaagccatagctaatgaaggtatccaaaaaacgtttgaatagttgctgtatgcaatagcctggaaaatgagaatgcaaagacaaacagaaggaatgatactgtgggtctatgtgtccttcgtgctgcaatgagaataactcagctcactggaaacttccagggaagatggcaactttccaggagcaattgttttgggattcttttcccaagtgtttttatattttaacaggtctaacaattttagtcatgaatgagaaatcaagcaacagaaatctagtgtagaaaaatcacaattaatatttttaaagacttaatatgtcctctattggcttagtagtagcttgtgtttaattaactcaaaatgactttagacttggccatgaaaaaaacttgtatcttttccacttactgctcactgctaattcatttctctttctcttttctttattgatgtatacggttggggaggttaagggtaggagaggaataaaagggcctgcaatgtaaacgttttagcctgtaacatgaaaggtacattttatgtgctttattcatgataaaaagaacaaacaaaaagaacaagttttcatttgtcatgaataaagcacataaatttatcatgaataaagcacatttcatttatcatgaataaaacacataaaatgtaaaaaatccat

SEQ ID NO: 1888358 - DNA, 4001 bp, Homo sapiens
cattttatgggttttgacaagtgtgtcatgacatggatccactagttgtggtcccttttatcaggttaaaaataaaacggggccttgcagagatttaaatgtggtagtaatcacctttgttatatttttccttctgaaaatattagccttggaaggaaatgttttaacaactagccactgttctgtgtctgggcacatgtccatagtgagcgtattctcttatctgcttcatgctgttgccaatttacagaccagtcgctcagaagctgtgatttttcttctgagcataagcttatcctcaatatggaaactttaattcaaaatacagtttggtctcataggagcattgtagtcttgctggctggaattcacgtggagaccgatgccagtgcctctttcctctgcatccatccatccatccatccatccatccatccatccacccacccacccatccatccatccatccatccatccatccatccatccatccatccatccatccacccacccgtccatccatccacccatccatccatccatccatccacccatccacccgtccatccatccatccacccactcgtccatccatccatccatccacccacccgtccatccatccacccacccatccatccatccatccacccatccatctatccatccatccatccatccatccatccatccatccatccatctatttatccatccatccatctatttatgcatccgtccatcatccatccatccctccgtttgctcatttccacccaggaatccatcatctctcaaactaaggtttcgacatcattccttcttttcagaaagtgcaaaccaaagctaagactggctcacacatgccacgcgggagttagagtgagagcatttttcagatccttgttctcttctggccccacctcccgcagtttctggaagtcccaggacagggaaaaggagagaaaggcagaaaagaaattatcgagtgtggctcttccctctcctcagaggaaattgttcacctgccaccctcggaaatttaattttcagtgttaaaacttgaaattttatagtagtatgtgtaccaaagttataaaatgggcaaacttgtctaaacgaggattcctacattgttatgacattttccccagagaatcacaagctctgagatacacttgtgaaccttacttatgcagacattctcttaaactgggattctttctctcagtttaccttaggctaacacagaaacatattttgacacagaaagaattttttctcttcattgctcaagtcacctggaggcagctcctgcctggggtggatgcctccgacccctgggaatgacccctgcagccaccactgagccccccacagaaggaggctcgtgcctggtccagctttcccacccggggtctctgtggctggctccccccagctcggggcagaagcctaattcagggttgttctgctcagttgatccagtcggacgctaggatttgcctgggggcccggcctgccagcagtacaggtgaggggacgcaggcttggtcacaagcacccctgctgaccttccctacagacctggcacatttaatcttcttctttggggaggagaagaggatgcattcagaaatgcctttgctgatgaggccctcaggagcttgtactggaatcactcaaaattcccaagtagcctgagtgtcctaattcatttctgtgtacatctgcctaattctcaatccacgtctaaggttagaatgaacatttgaattagccattctggacaacacacacacgcactataccatgcatttagatctctctgtaccttgctcgtgtcagcacaaacgcagcccctctcttttcaaaagcccggttcgttttccagcaggcgcgtgctttcattagactttccctcctgtgggttctggcagatttcccaacacaagcacggcaggaagtgcattgtgtttgtagaaaatccaaaataatctctaggtgagtgttaggatgaaaaatgaatttagtgttggtacaggtttttgcttgttgtactttttgtgggggagggtgataaaaatattccaaaattgattgcgatgatggttgtgcaattctgtgaatatactaacaagcactgaactctatactgcaaacaggtgaactgtatggtatgtgaattatattttaataaagctgttatttttaaaaagtaaatttagcaacaacactggatacaagctaaatatacaaaaattaattatctttatacagaccagcaactaataattagaaaatgagaatttttaaatgataccattttggtagtatcaaaacccatcaattacctagtaactgttcagtaaaatattccaaaaacagcaaaacattgactaaggtacattaaagaagatttaaatagcccaggcatgggggctcacgcctgtaatcccaacactttaggagtcctaggagagcagatcacctgaggtcaggagttcgcgaccagcctggccaacatggtgaaaccccatctctactaaaaatacaaaaattagccagatgtggaggtgtgcgcctgtaatcccaggtacttaggtggctgaggcaggagaatcgcctgaacctgggaggtggaggttgcagtgagcggagatctcaccacagcactccagcctgagtgacagaaaaaaaagaaaaaaaaaaaagatttaaataaaggaagggatatgatatatttatggattaaaagcaagttaaaaacaagttaacaaacacaacaattgatctataaattccatgtaatcaccattaaaatccaggccaaagtgtgtgagtgtgtgtgtgttgcgggtagggggttgccaagctaaagtttacgtgggaatggacggggcaagaacagcaagacgaccttgaggacgaccaaagcgagggactcggcccccaggtgccagtgcccaccacaaagctataggagtccagaccaggccacacagcggtcagtgaagtgggatggaaggtccagaccaggccacacagtggtcagtgaagtgggatggaaggtccagaccaggccacacagcgtcagtgaagtgggatggaaggtccagaccaggccacacagcggtcagtgaagtgggatggaaggtccagaccaggccacacagtggtcagtgaagtgggatggaaggtccagaaacacgcacacgggacacttgatccacaacagattcaggattgcagaccaggggcacggggaacctctttactcgtggtaccagctcagttgcagatgcatacggaacgcaggaagccggggccccacgttcccccatatgcagtctgcaaatgcaaacacggaggctgaaacaaacacgtctggaagaaatcacaggggagcatctcccctgctgtgcccaggatccacgggtgagcaagacagggtccctgtccggatggggtttcatttgggggtgcggagggggtgcagaaccaaaaaaaaaccaagcaagcgagtgaaacagggagctcggaagtgggcgctcgcataggccaaggtggggaaggctggcaggcacgtgtgtgtgcaaggacaccaaatgttgatctgcagagcaaagctgggcaacagcaaccacattaaccaatagacgtcggcttatccaggccatgggacgatgtgtagctgttaacataaaggtctatctggctgggtacggtgcctcacgcctgtaatcccagcactttgggaggctgaggcgggcagatcatgatatcagaagttggagaccagcctgacctggtttagtagaaaccctgtctctactaaaaatacaaaaattagctgggcatggtgggacgcacctttagtcacagctactcgggaggctgaggcaggagaatcgcttgaacccgggaggtggaggttgcggtgagccgagatcatgccactgcacaccagcctgggtgacagcgtgagactcactctcaaa

SEQ ID NO: 1888359 - DNA, 4001 bp, Homo sapiens
attcttcccgccaaaatgcatttttcaaattttgagatatctttttaagtacatattatgcattctattcttaagaaaattacttttaattatgtttttatatttgcacatctacttctcatgtactgaatacatataaatatatatgtgctttattactgctggggaaaattatactttattgctatgtattaaaaatcttgtaatgaattaaaatttgttctttttataaagtacttttatgtatttggagcagaaaactaacttattgcctaagtttttttctgccatattgaagcaaattttctttttaatatatagataaggaaaacaggtccagagaagctaacattcatagcagaaaaccgtaaaattatctaatattgctaaataattaagaattaaactagaatgctgtattgtacgggaggttacgttttttaaataattgtagtcaaacactctgactgtagttataatactggtaagcccaatgtttccaataataatttgataatgaaaagcatttctctcccatttcagcagaaaattatgaagaatgtctttgcaatattgaatcagatatcattttatgacagaaagtcttactcttcagaaaataaattattccttagtaaacacagaagataaaattatggcttggaatacaaaagaaatcactatcaacaaatttgtattttggaggaagtaaaatcattatttattctgttagcacattttcatttctcatttattttaacctttcagtgccttttttcaaggaaacttaacgtggtttgttaagttttttcatttaaacctctttaactgaaagtaactaaagaaattaatcaaggaaatgacattatggtgaatttgtgttttccaaagttttcagttcattgtataattttatgtaaacataaattaatgcatatttataaaatcctgcattaataaaatttatctttgaacccaaaagttagtaggttattaaagaaaagtaagatatcttgttagttctcctaaagctaacactagtttctctcaactaagtccatagagtatgaggtaatattaagaatggaaaaaaataccactgagaacgccggcatgagatttccttaatgtgccccccaaatgacattctttgatactacttttatgctattttgtttctgaaaacgtgcaattcttatagtattacatgaatttttaaaaattctgatctgtttaatatcagctaaaaacgatgtctcataatgaacacacacacacaaagaactgtgtctatcttagatttaaaaaaaaaacaactaaacaaaaacaacaataatgatgacaatcaatctccctctctattcctctaagaggtgaataacaaatggggaatgtatttgaaagccacactccctcacaaacagacaatatcctcataacttattctctgactttattcttcatgattctcatgtctacacgtggtctctcatcctattgcccagatattttaaaactttaccatttttagtgcagtcatttgaaataataaatgttgtcttaatctgcccctagatgccctaataaaataccacagactgccacactgtgtgctttaaacatcagattattttctcaaagtcccggagaatggaaagtctaagattaaagtgccaaacaacttgatttttgatgggggctttccttctggcttgcagattgtagtattcccctgtgtctttacatggagggaaaaagacaaacaaacaaacaaacaaaccaaaaaacaccaatctctgtgctgtttcatcttataaggacactaattccattgtctcaaaagcccacctgtattaggccgttctcatgctgctaataaagacatacccgagactgggtaatttatacagtgaagtggtttaatggactcacagttccacatggctagggaagcctcacaatcatggcggaagatgacagacgaataagggacatcttacatggcggcaggcaagagggcatttgcaggggagctccactttataaaaccactagatccggtgagacttattcactatcatgagaacagcatggcaaaaacccaggatcatgattcagttacctcccacaaggtccctccttaggcatgtgggaattattacaatgcaaggtgagatttgggtggagacacggagccaagccatatttaacaacttattttgaccgtatttaacatcaattactttcttactcaaaatgcagccacactgcattttaggactttcgcacatgaactttggggatggaggagggacacatacacacagtccctaaaaattataaattccagaaacaatataataatttaaagaatatatttacacaatagtatttttattacttaggtttccattaattttctctattgtttatattgccatcatttagaaaattggaacatagattatccttatattaaatttcccaacttcaagtttgtgtctaatttctacactctcattgttgtgatgaaattttaatataactctactaagggcattgatttcactaatcttttcccctttttaaatatacttatgtattaataatgttacaatctatttataggagacattattaaaacacagccaagagaactcaaaacctaatgatctgattgataaaacgtatgtataaagaacagtaatctaaccacctgtgttagtctgatagggctgccataacaaaataccatggactggatagcttaaaaacagaaattgttttctcacatttctttaggccagaagttgaagatcaaggtttcaacagggttgatgtctcatgaggactctcttcttggctttcagacatttaccttctcaccgtgtccccacatggcctttcctctgtgcacctagaaagagagagagagagagaactcatttattgctggtgagaatgcaaaataattgtcactttgggagacaatctgacagtttcttataaaactaagcatactgttaacatacaagccagcaatcatgctatttggtctgtacctagaggagctgaaagcttttgtctgcacaaaagcctacatgctgataattatagctttgttcataatccccactacttggttgaagcaaccaagatgtccttcagtaggcatatgaataaacaaactgtggtgcatcctaacaatggaatattcttcagcactaaaaggaaatgagctataaagccatgaaaagacatagagtaatcttaagagcacataacaaagttaaggaagataacctgaaaaggctccacactatatgattccaaccacgtgacatcctggaaaagtcaaaaacataaagacactaaaaggatcagtagtcactagggtttggactgggagagaggaaagagagatgaccaggcagagcacagaagatttttagggcactaaaaatcctctatctgatacataataatgggttcatgtcattatatctttgtccaaccctataaaatgtctaacaccaagaatgaacacaatgcaaattctgggtgacaatggtgtgtcaatgtaggttcatcagttgaaacaaatataccactctagtgggggatattgatcatggtagagattatgcatgtgctgagacaggggaaatataggaactccgtactttcctctcaattttgatgtgaacctaaaactgttccaaaaacaaaatcttttaaaaaatgtcagaagcactgagaatataatttgagaatcatattgtctctgagtgtacggttcctacttagaattttgcactgtatttgctttctccagagctgcatcactgatcatggctagcttgttatttactatgacacatagctgtgtttctgtcacacttgcacatattgtatttttgcattttaaaattattttcctctctagttatatttccttcatcttatctttaatgcatcttgtcctgtgtgtctttctattc

SEQ ID NO: 1888360 - DNA, 4001 bp, Homo sapiens
ggaaggggccggtgggtcagatggggggtagggtggaggcactggctgcgtggcttcagcaggcatcaccctggaatgtgctggaataacaagcagaggcggcgtggagcaggatggagggcagaagtgcagagataggagtgtgtgatcctgggtggaggcgctgacgcctggccggcggagacgacacttctggagcctcgctgaggctggatcccaggctcaaggggcgggcccaccacgggggaccccaggtcacaacaaggggcagctcagagcagggtgggggcccccaggccacccaggagtggaagtggctcgtgatgctgtgggtgctgcgctgtgaggggctcctggtcctgccggcctcccagctacacgtggcccactcgcctccacagccgccaagcctcccttggggctcctgctctcggggctgggctggaggggcctgggagtcccagcgggcgagaaagccgggcccaggggagagcagcatgctgggtcaggagaccggtcgggggctcggccgggcctggagtccagcgggcaggggctggcagggagtgggcagggtgcccgccaccccgagggccaccagggaagaccatctggattgggtttgcggtggaggctcgccagcagtgttttgactccaggcaggtttcagagtgtgaacggcccccgtgtcatctgctgggtccctctgccagagggtttctgaaagacagatggccacacgcggaagctgtcggcggcgtgtgggcccagcgatgacgggggtgcgaatcctgctcttcctccctcggcagccagcggtctctcagtcctctcccgtgttctcactgtaccctagaaagcaaagcccgagctcctcagcatgctgtgggggcgagtgggcagagccaggcgtcctgcgggcacacatggctgtccctgtgcctccatgagcggggaggggcgctggcgggagcccccacacaggcagcctccccacctgggaccccacacaggcggcctccccacctgggaccccacccaggcctcctgacctcatggggctgggcttggctacaggagggcgctttgcgtggaacctgaacctggcctggctttgcctccgtggttttcggcacagggggaggggccggctgaattcctccgcaggatccaaggggctgtgcagacacgggccgtgactgctgggtcctccgtggagaaaatcaataccaagttggagtgagtccccagggttcatgtatcactctgcacccggaaggaactttctggaaatgcaatacatccctgcaaagtgggactcagggctctttcctgtcactgtgcagaaggcaaggtctcaaagggagaagatcggaaggctgggagcccgggagcccgcctgggagcctgcctgggcctgggtctcccctcagggctgaggagccccgggcccagcgcccacggtcgctgtagccaagctcacaggccccacctcctgcctggccatgcttttgcccacgtgggctgcagccagggcctggtcgccaccctccccaatgtggccctgaggccagtcctgtgctggcctgtattgacacgccggctcactcaaatcgattcttgtcaaagccgtcgtggaaagaacagctttcaaaatagagcccaagaagacgtgggcttccactgtgagagcctgggtgctggcgggctgcccagggtgcctcctctctctccagccgggcgtggagctccacgagcagctcctggctgttgcagggctgtgagatgttctcgtttgttcagccggaaggtctagagaaaggggctgagggggacgtctgagcacccagccttgaggaggaggccaggactgaggcctgggttcattcctaatgtgtcccgaggacaagcacatggaacgggctgtgttctggctgcagaccggcctgggagcgccctcgctggcctgggaacgggcaggctgcggggcagagggcaatggaccttctgcctaggtgcgaggggctggtgtgcagctccgcgccccggggaccccatcccagcccctcagccagcccctctgcagtggcagttttctcttcctgccaagaccttggacggagtctgcacccatccctgcacgtggcagagacaaaacccacaatcagatacacaggaagggccggggtcctgccacctgcacgttagaccctgagggtgacgtttgctctttgatcctctggtcctttgcgctccgggggcctctgcctggcatggaaatgttgattcttccctgtctgcctaagacagtgtgattttcagactagcagaggaggaaatgtccggcggctgtcctgtgggggtccacccaccctcgagactgtcatgggccgcgtgtctcccccggaggctgtcctatcctatcgggctctacccaccctcaatactgttatgagccacgtgtctcccccctgggcggctgtcctatcctatgggggtccacccaccctcgatactgttaggggccacgtgtctccccactgggcggctgtcctatcctatgagggcccacccacccttgatactgttaggggccgtgtgtctcccccagatctgtatgctgcagccctaagccccaatgcctccgcaagggaccttacttggagatggggtcctcacagaggtggttaaggtaacatgaggctggtggggtggccctggcccaatctgcctggtgtccttatacggagaggagatgaggacacagacccacacagagggatggccttgtgaggacagtagcaggagacagagccaaggagagaggcctcaggagccagcggagccgcaccctgaccctggattccacctcctgaatggtgagagagccattcaggctctctctgttgaagcccccaggctgtgggacttgttacagtgacccgggaactcacacgatagtcacagcacattacagctgacaaagtgagctccttccgtggagacgctcctcccagcattccggtgaggtgggggctggcacgtcacccccactctggatgaagaggccgcatcaggcgggatgggcttggctacgctgcagtcacaaacagccccacagctcaccatgggctacagcacaagttcattgcctgcacttcggggtgggcacccacttgcccctgttccagccgctgtgcttggcgtggctccctcctcaccaggacctgtgactgtgacgcatcagaggaggaggtgctaggtggagacaacgtggagactgagggtgagactggaggaggggaagcccccgtttcttattgagagccctacggggtcaggccaaggagcgcaggtggctgtgcgggaaggagctgcactctgctaggtgtgggggcttcccacctgcgctcccaggtgagccgtggccatgccaccaggcccctcaaccctgtgcctgccatgcggccctctcgaaggacctctggatatgtctggggagtcctgctcagcctggccccagtggagtctctgcagcaaataagcacacagcagcagcagtcactgcacctgtggccctgagaggctgtgagcacacaacatcctggctggaaagaggggaggcctggggtccgggcagcttgcggggccagctgtgcacccagtgacatcctcatcaccacccacgccgagcacagcagagaccccgagccgagggcagaaggagcacacggtcacaggaaacctttccttccagttctctgtgcctgcacccagcacttcgtgtctagggatgaatttaatctgcacggtgacctctgaggtgggcactgccactgtcccagctctatagacacggagtgtggcgggcaacataggaaacagcaagcctttgagcggaggggggtctggctgtggcttcccctctttgttgaatggtgtccccacagaaagatctgtctgtgtcccagaacctgtaaagatgaccttatttgaaaaaa

SEQ ID NO: 1888361 - DNA, 4001 bp, Homo sapiens
gaaggggccggtgggtcagatggggggtagggtggaggcactggctgcgtggcttcagcaggcatcaccctggaatgtgctggaataacaagcagaggcggcgtggagcaggatggagggcagaagtgcagagataggagtgtgtgatcctgggtggaggcgctgacgcctggccggcggagacgacacttctggagcctcgctgaggctggatcccaggcgcaaggggcgggcccaccacgggggaccccaggtcacaacaaggggcagctcagagcagggtgggggcccccaggccacccaggagtggaagtggctcgtgatgctgtgggtgctgcgctgtgaggggctcctggtcctgccggcctcccagctacacgtggcccactcgcctccacagccgccaagcctcccttggggctcctgctctcggggctgggctggaggggcctgggagtcccagcgggcgaggaagccgggcccaggggagagcagcatgctgggtcaggagaccggtcgggggctcggccgggcctggagtccagcgggcaggggctggcagggagtgggcagggtgcccgccaccccgagggccaccagggaagaccatctggattgggtttgcggtggaggctcgccagcagtgttttgactccaggcaggtttcagagtgtgaacggcccccgtgtcatctgctgggtccctctgccagagggtttctgaaagacagatggccacacgcggaagctgtcggcggcgtgtgggcccagcgatgacgggggtgcgaatcctgctcttcctccctcggcagccagcggtctctcagtcctctcccgtgttctcactgtaccctagaaagcaaagcccgagctcctcagcatgctgtgggggcgagtgggcagagccaggcgtcctgcgggcacacatggctgtccctgtgcctccatgagcggggaggggcgctggcgggagcccccacacaggcagcctccccacctgggaccccacacaggcggcctccccacctgggaccccacccaggcctcctgacctcatggggctgggcttggctacaggagggcgctttgcgtggaacctgaacctggcctggctttgcctccgtggttttcggcacagggggaggggccggctgaattcctccgcaggatccaaggggctgtgcagacacgggccgtgactgctgggtcctccgtggagaaaatcaataccaagttggagtgagtccccagggttcatgtatcactctgcacccggaaggaactttctggaaatgcaatacatccctgcaaagtgggactcagggctctttcctgtcactgtgcagaaggcaaggtctcaaagggagaagatcggaaggctgggagcccgggagcccgcctgggagcctgcctgggcctgggtctcccctcagggctgaggagccccgggcccagcgcccacggtcgctgtagccaagctcacaggccccacctcctgcctggccatgcttttgcccacgtgggctgcagccagggcctggtcgccaccctccccaatgtggccctgaggccagtcctgtgctggcctgtattgacacgccggctcactcaaatcgattcttgtcaaagccgtcgtggaaagaacagctttcaaaatagagcccaagaagacgtgggcttccactgtgagagcctgggtgctggcgggctgcccagggtgcctcctctctctccagccgggcgtggagctccacgagcagctcctggctgttgcagggctgtgagatgttctcgtttgttcagccggaaggtctagagaaaggggctgagggggacgtctgagcacccagccttgaggaggaggccaggactgaggcctgggttcattcctaatgtgtcccgaggacaagcacatggaacgggctgtgttctggctgcagaccggcctgggagcgccctcgctggcctgggaacgggcaggctgcggggcagagggcaatggaccttctgcctaggtgcgaggggctggtgtgcagctccgcgccccggggaccccatcccagcccctcagccagcccctctgcagtggcagttttctcttcctgccaagaccttggacggagtctgcacccatccctgcacgtggcagagacaaaacccacaatcagatacacaggaagggccggggtcctgccacctgcacgttagaccctgagggtgacgtttgctctttgatcctctggtcctttgcgctccgggggcctctgcctggcatggaaatgttgattcttccctgtctgcctaagacagtgtgattttcagactagcagaggaggaaatgtccggcggctgtcctgtgggggtccacccaccctcgagactgtcatgggccgcgtgtctcccccggaggctgtcctatcctatcgggctctacccaccctcaatactgttatgagccacgtgtctcccccctgggcggctgtcctatcctatgggggtccacccaccctcgatactgttaggggccacgtgtctccccactgggcggctgtcctatcctatgagggcccacccacccttgatactgttaggggccgtgtgtctcccccagatctgtatgctgcagccctaagccccaatgcctccgcaagggaccttacttggagatggggtcctcacagaggtggttaaggtaacatgaggctggtggggtggccctggcccaatctgcctggtgtccttatacggagaggagatgaggacacagacccacacagagggatggccttgtgaggacagtagcaggagacagagccaaggagagaggcctcaggagccagcggagccgcaccctgaccctggattccacctcctgaatggtgagagagccattcaggctctctctgttgaagcccccaggctgtgggacttgttacagtgacccgggaactcacacgatagtcacagcacattacagctgacaaagtgagctccttccgtggagacgctcctcccagcattccggtgaggtgggggctggcacgtcacccccactctggatgaagaggccgcatcaggcgggatgggcttggctacgctgcagtcacaaacagccccacagctcaccatgggctacagcacaagttcattgcctgcacttcggggtgggcacccacttgcccctgttccagccgctgtgcttggcgtggctccctcctcaccaggacctgtgactgtgacgcatcagaggaggaggtgctaggtggagacaacgtggagactgagggtgagactggaggaggggaagcccccgtttcttattgagagccctacggggtcaggccaaggagcgcaggtggctgtgcgggaaggagctgcactctgctaggtgtgggggcttcccacctgcgctcccaggtgagccgtggccatgccaccaggcccctcaaccctgtgcctgccatgcggccctctcgaaggacctctggatatgtctggggagtcctgctcagcctggccccagtggagtctctgcagcaaataagcacacagcagcagcagtcactgcacctgtggccctgagaggctgtgagcacacaacatcctggctggaaagaggggaggcctggggtccgggcagcttgcggggccagctgtgcacccagtgacatcctcatcaccacccacgccgagcacagcagagaccccgagccgagggcagaaggagcacacggtcacaggaaacctttccttccagttctctgtgcctgcacccagcacttcgtgtctagggatgaatttaatctgcacggtgacctctgaggtgggcactgccactgtcccagctctatagacacggagtgtggcgggcaacataggaaacagcaagcctttgagcggaggggggtctggctgtggcttcccctctttgttgaatggtgtccccacagaaagatctgtctgtgtcccagaacctgtaaagatgaccttatttgaaaaaag

SEQ ID NO: 1888362 - DNA, 4001 bp, Homo sapiens
attaccctttgttcttctgaagaacttattttttctttttttttgcaactgtatctgaattacctttcagatgattgccatattgtctgtgatttcccttatatttaaacactttacaaatatgtgttttacgttatgaactcaatctccatgttttcaaaatctacatttttgcttttcaaatctgtattattatctttattaagtttgtcaacttgtgaatacagaactttttccccaaagggatccttaaagtcctggaagtgtgtgtattgtgtgctgcaaaggcgaatttacatcaatgtattaaagagaaactataaaattgatccattaagaattaaagttggagccgggcgtggtcgcggccacctgtagtcccagctacgcgggaggctgaggcaggagaatggtgtgaacccgggaggcagagcttgcagtgagccgagatcgcgccactgcactccagcctgggcaacagagctagactctgtctcaaaaaaaaaaaaaaaaaaaaagaagaagaattaaagttggaaagcccccagtttatggacggtagtaaattcccctaatttcttcttgtatacatatcttaaatgttgggaacagggaggtaggagggagaatcttgctaaaactataaaaagaaaaaagagaaaatttatggatttattgttaaattaatggtcttttaagagtatttaatattatagaagacagtagttgtatttaagctttaaaaagagcataaaatctgtgtatatttcccatttaataaaatttaatgtatattcacacatgaacactatgcatttggtaatgttctattactaaaatcctatggatagaaacaagttcattaactgatttggtttggctcaggagcccagttgcagggtaacagaaacacataaatgaacaattagctaaatcaatgacgtttaaacatctgttttaaaaactaggcttgggtaataaagccataagtaattcttattatttttaaataaaaatgcttactcagttgaatttctgcccttcctctagcacttctctaagatgggttttgggatatcattgagagccttgtacaaccgtcaacactgtgagccctacctcctctttgattttctgagcagttgtgtgctactaaatgattcaaaattgtctctctgaaaaacaggcaaacaaataaaaatctgacttgtcgcatttgccagtttccatggtgtaaatactcttatgatcacttctaaaacttccaatatgcaattgttgagaagagatgtgcaccgttggccccaggaagccagcgggaacctctgtcatacttcactgcttctcaggcacagtctgctccaagaatacctctcccatttctggcagtttttggaggtggtttaatgtatgacctgttctttctaggcttgctcaggactgctatattggaccttaccttgtgccctgtcaaagctctagaatagaggttagaaactttttcttaaaggtctagagagtaattaattttagacttgcaggcaaatggcttctgttgcaaaaaaaattaactccgcccttgaagctcaaaggcagctgcataaaatgatggatgtggctgcatcccggtaaatttcatttataaaaacaggccctgcagctcttaactgtcccttgctcacaaactcctgaatttctgctacagccttcgaccagctctgaaccgcaagctgttgacaccacggcttctgtgcaggactagcatgaaaagttatctcttccctgtattcgactgcactgtatagtcaaaaccactctgctttcttcctcagctcgaattatcaaacaccaaaccaagagcagaaataaaaattttggccacttaccttctgtctgttttcttgtattttcttttctcttgatccatgccagaaagaaaaggcagtattattcctgctatgtcatgttatccttctactaaagaacaaaaatcacacagtccagctggcataggcatcatgccagggtgcaattctctgctctgaatccttcaaacttgttcttcaggagcttgaaatatctttttgtctaaacccgaatttcaaaatcactgccttgctaaagggatcaaatactccacctgcttggagatggtatcctcatgattcagctttcaatgggagatgattgaaaagggaaattaaaattcatttaaatacttcctatgatatatgcatattaatattagaaaaacatcaaaataacaacagtgcttatatttttctggtgtaagtaacttttaaaaattacacaagtaatcacacaaataactgcaaattattttaaaatcagaataattaaaatcttaaaatagttgaaattgagaagactatgagaagcctatacaaaatattctacaagttattccacattattttcatgataattaagtggaaatttaggtagtagactaattagcaaattaaaaaaagaaaatatggttatagcaaaatgaaatagattctcatgccaaagcttgcctgagagttttagccacagacaagggggaatatctgtgtaatagggatgttgcagatggtccgatttccctgaacctaaactaatcactgctcctgctttggtctaagagaaaaaaagcatcccttcaaaagcatgagaatgtgtgttacataaaccactagttctttctaattcttttgctcagtcctatcatttaaagcctgaatagattagaaatactctatttaaatttttacatttaaacagtagtcaaatgtatttcactattgtatgaagcttgatatttacatgcgaattgagtttcatgagatatcaaagaataacgatgtagaagataatctgttacatactcttttgaagtatattttttatgaaaaaatctcttgcatttggctttgtttgtctgtgttttatttcagggtcattatattttatccacatggaacatattctagaacacattttcctttaactttataagagacagataagtattatatgcatcactgatatctgaacatgattaagaaaattaaattgcccgggcctaaataattctttaaaagtgtcccattagaaaaatcagaacatgtcacattgtaattattatcttttataaaacatcactatatttagaaaaataagtacattatggtgaaatagcaaggaaaaacctacactaataaaatatatgcataccgatgatatttctaactgaatatttttaaatcacatttattaaaggcaagttcggataagtactactaatatttttatttcaaagagtattcttcaactgatgatatttttaagtctagagatactgtggcatttttttgaaatatcagtatcaatgagtatatgtcacaacttactagcatcaaattaactgaaagaaaaaacctagataaatagaaatttaaaaattcaaagatttttaactcatctatgcacattttctcaatttataatttgggaaactcaggcacctatgttccctgaactcacaagtactagcaaaaatagatatagcacatgagtttagattctttacatgagggtattggggtatagaaaaaaaaggcctatgaaagaagaggtaaaattatagccagtagcattttattgtcattgttcaaagataaagagctaggggctgcaatgcagctctttattttcttggcatgcttgattttgagattttaatttatctaaactgaagagaaaccactggctcaggggaaaccaagtttgtcatttgattgcttgtgtgcttgcttgcttgttttcctaagactaatacctgggagaaatatctccagggagcacctaatgatgtagagatatttgtccccaagggtgttccttcaaaacactcaagtgggtgctgtttactattttatatcacttttcctcagtgaaagacaattttccaaatggccaatcacttctcagcattc

SEQ ID NO: 1888363 - DNA, 4001 bp, Homo sapiens
cctgggaagcagcacggggctttgtgggccaggcggggtccaagctcaaaggctgggtccacagtgcctgctggtgaccttcggcacgccagcttcctcccgaatcagggatgcccttgctctgggtctgcttctgctgtaggaaaccttctccaattcaggctgagacagatgtcacaaacaggactgtctccccgattcaagctgagacagatgtcacaaacaggactgtctccccgattcaggctgagatagatgttacaaataggactgtctccccaggacaggcggcctgtgctagtggctggaacctctgtcgtgtcatggcaacacagccaacggctgctgtgtgtccctcccaaccccaggtcccagtccttggacaactcatgggacagtgcggggagcacagaggtaaatctccctgccgcagatgccactgctgcctgtgggtggggtccctcggtgcgggttcctctgcacctgctgtcctgtgtgtcctgctgggccagtgtcacctgggcttccctcacacccactccccactgactaaggaggccacacagaccgaggcctgagccccagcccgctgcctgcaggttcagacacttgggcatgtttcttagccatttggagcctcggttttcccatctgggaaatggggacaatgatatctcagagacactgtagtgatcaccggagaggaccacagaccactctcagtgggggtgccaggcatcgtgtccatgtttggcgaggaaggattcagcctgacccttggcttcctccatcccagatgtcccttgaggcacgtggcctggggtgggggatccggagaagaagggagacaggccacgacgtacggtgaccccaggctaggcccacagacccgggtagatcgccaccactcccactggaattctcagggctgtacactcattgtttggaaataattatttttgtgcagtccttagtttccgtaattaattctttgataacagtcccttctataatagctcctcacaaagattctatagaaagcaccaggcggtttcagctgagccggcagcaacagccttttctctgagctcgaggtctaggcacagtcacagcggcagagaaatgctgggtaaagaggccctgggcgttgggaggggcgccagcagagcaaggggcttcccaccgccgcctccctccccacaggctggtcaggcggccaggctacaggggccctgctctgcagaaggcctttccttccagagccctgcagcctctgggagccagcaccggccccaccaagccaatcctcggagtgggtggagtggggcctgggggctcgaacccccagaccgacggccacagcttgtcgtctatggcgctctgtgatgggatggggggactgccacagagggaagaaagagaatcggcccctgccttcccaggggcctgatcctacggggaggtgggacactcacgctcaagggcccagatgctgtaaacacagctgtcccaggtggtccaggtcaggaagaggctcagatgggtcggagtcccacctccacggcggttttggagaacagcccaggggcaagtgagtctgtagatgtatctggccaccccggagactcccctcttccacctgttgggagccagaaagcctccatcttcctgccccgcctcggtctgccactcataaagcctagaccatcctacttcgatattgcaacattgcatggctggggtccttttggttgaagtgacagaatcccaacccaagctcatttcagaaaagaagggcgtttgcaggttgacttgcctagaaaatgtggggtagagtggcttcaggtgtagctgggtccaggagttcagaggcggtcactaggcaccatctaattcagactctaagctcaatcctgcctgtgttggcttcattctcagggaaagacggcccaggagctctaagttcagggggtcctcgaaactcccaacttggagggtcagggtgcttctgtcttcagcaaaatcccaggcagggctttgtgtgggctcgggccccatgcccacccctgtcctgctgtctgtggtggaggaatgaggtcctcttgctggctagccttggggtcacatgatcaccccgaggttggcagcagccctagaaacacagacaacaaaatacatgacactacgtaagagtcagcaggcgggttttcttaaacaaaacaaacagggttttgtgacgaagagaagaggaaactgtctgggaaggcgaagatcaccagggcccgacagcactgtagacacaatgacatcactcggagcagcgcgcttgctttctgggcctcacatgcccactcgagtatcttccatctctcatgcctgggaggccccgccccacatgctgtcccaggagcatagcaggcatcgtacactgtgcagtgtggggtacacacgtaggcacttcagacccaggaatcacggactcctgtctcctgccatatatgtgggaggtctgtctccactgtagacagagatatgaggtgtgtgtgtttgcatgtgtgtgcgtgtgtttgctttgtgtgcgtgtgtgcatgagtgtgtgcttgtgtgtgcatgtgtgcgtgtgtttccttgtgtgtgtttgtgtgcatgtgtgtttgtgtttgcgtgtgtttgcatgtgcatatgtgggagtgacagagagggagagtgtgcacacatactgggtctatgccccaagggccactcccacccctaccatggggatgcggtgcccttgggggtctgccctctgtgacccccaggcatgtgaattttctaaaactggcttctcccctcttggctcctgtccgtcccagatccagcatccacgtacatttgacgccaatggaaactctgccttgtgactcgtggaggggcctcctcaaggggcgtgtgactgtgagggggccaggctgggctcgcttgtgtggaggggaggggcacgctgcggggggtgggggggcgccacccccaccaggccagcctcagggcagccggggcagaacctgtggctctggggtaaatgccggggccagcttaaaggagtcagctctctgcagcctgcctcggctgggtgggaacgagtccaggcttccaggcatttggaacccgagcagctgcagggacaggctggagcctcagccttccctccccgaccccagaccctctctggcccctcttaacccagccagatgagctgtttgcgaaacctggcctgtcgcagactgcggagagatctgaggaggaaggaaaccgtttcttagcacctccagcagttcaagcccacttcgagccctccacgtccgggctttctcctcctttgcaaatctgctcctgtttctgcgcttccaggagcctggctggggctggaaatagaaatgcattccatgcattcattctctcaacaaatatttactaagcacctcctcagggcaggccggggctgggcacagcgtcatcctccgcctcctcgtcctcctcctcaccagtgagcaaaacagacaaagcctgcacctacgcggagtggatgccctagtgggggagcaaagggagggggaagaagtgcatctcgtagtatagggaagcctgagagctttgacagggcagccgggagccgggggtcacagttccacctggctgttggcggcatttgatcaggagacagtcgctggaggccgtgagcccagcagcgtggagctccctcgactgctgtgacttccgcgtggagcacagacggcggcgggggtggatgggaaactgtaggagtctcgtgcagtcatccaggccagcgaggcagggaagtgggcagattccggatgcattccgatgacagagctcatggggttcctggaaaccaggagaacgcgattcactctgagcaactggaaggatggctctgtcaccacccaagagggggatggccgtgtgcagggatgggaggcgggagcggctgtgcactcagg

SEQ ID NO: 1888364 - DNA, 4001 bp, Homo sapiens
ggtgaggtcacattctgccacctgccagacccactcagctctgtgcgcagtgccacgccaggcccactggagctgcccaagactgtggtcagcctctctgctcccatggaagcaactggagagaagagtgagaaatatgagtcaaaaagttgtgtggcgacgtggggtgggggatcctttcctgcaggacatgagaaaaatggatggtgaatggcagagtttgaggaggaccatatgtaggcacttgtctttctgtatctatgtcaaaaaagcataattttaagaaagaaattgagttctgtcattttaaaagtcggaaactttaatcaaactctacctctgctatctaccaggtatttgcaactctgaacaaattattttgcttatataagcctttatttcctcaacctgtaaacttgagataataagtcttgtttccctcacctcaaaaggttgctggatgagcctattatattgggaattaaatgtaggtttggttttttctggccaagtataaagcactgtaaaaatgcagggtatttactcttgccctatggtaaagagaaaattaaagtaattggtgctattatattctactcctagcttttgtgaaagatttagtgtagattatataaactcttaaaaagctttattgtatgttgatcaacaaaaacgtctgtttgaaagacgtgatgcctgaaaaagtaatatgtttattaaacctaataaatgcatctgtataaaagcatccagattctaccattttcaagggactgttgcaaagatccaagggcaccgtgaggctgcaaacctccttgaactctgaaaagcaattcacgtattagttgtggctgatattatgatgagtgcaagctgcaggcagcagcgtggccagccctgagtccaccagagggagacgaatcacaccactggaggctcaggggagacatcagctgtgagggggcagcaggatgattgccatgaaagggaggacaatggaagagaagggaggagatggacatggggttgggagagccacagggacagagagcatggagagccccaagcagagagtggcagaggggcactcagagacaccctcaccgcccctggtggataccgtttagctccctcaaaagacgaggagcgcttgagcagggaaggggagcccccagaagcatccagcccagcactggtcgggaactggaaccagccgctgaggctcccgttctaccccagggcactgacaagtcacgaggctgcaaatcctaggtatttacccacctcacttcctggtctttaagattgcagctgccaaaaccttgtcatcgtcctacgattgttttcaggggtttcagctcgactactttaatgcaatgacagtgtcacatttatatcctggaacccatccagatgctctggaggccagaacaccctgccaggagaggataatgaagcagatgacacctaagagggttgcaggcccagctgacaaccccctaccccagcctgagttggcaacctttggacatagtcctcagcttgggggcagaagaggctgctggggccccctgaggtgctgttgtcttctgaaagcttcctcattctggttgtgctgagcagggaggtcaaagcctcttactccaaaaagtcagcagatcattagtctaattagcataataaagctggcattttcgcttggctctgagcctggagttaagtagcttacagttgtgcagggtgtggactgcacaacccaacggttctcattcccatggacttgctagacatggcaccccccagaggctgttcagtgtccagcttgtttaaccctgagcagggtctggaagttagggacctacaggctatggtggtgtagggaggaaaatgggcttacctgctagtgaagactgcgggaggtcagtgtttagggaggaaagaaaatcaacaggaaatgtggaatacgcgtttcttccactctgttctccaggattttcattccttggccagttgcttccgggaatttattcccttgtctggaaataccatctctctgttgttccttgaaaacaaagaacagaaacataagagaaatcctttcattacctggtacagggctacccatggacacaatgaggggcctgtaggagcaaacaatgggggattcattgaccccactgaaagaaatacgcacaagcaggcgaaccaacccacatcttttttgttgttgttgtttatttgtttgttttgctttcacaatattctaaccgggaaaaaagcaagtttgattcacaggaggaaaaagcggttggagacttatgcaaactgttgtgatatttgcacccatattctaaaaaggaaccccgtgcatgccgacccctgcccacacaagcaagggggtctggagaaagtgagcatttgccatgaaagcggcaaggagggtttctaagatgcgacctgcttgcaaaccagcccaagcttcactgcaatgttcttttcaactgtttccaccattctgaaggtggatggcagatgagaccctggccagtctctgcagccgtggagacaaaaactacaggctcaagaacaaggactggtgctcagtgagaactgcccaactctccccagctcccccaaacccgctttgtccattaaacaatcgggaaacggagaaaaatatttgcagacacaatgtggtctgaggttgatacattcttatctagagtagattcatcttggataaacagacactgttcattttcctaagacacagggcatttcgtgcaggttcagtgacagagcggctggctgtttctgcaagtgggggtgcgtggagagggagatgcagaacagtcgcgtccccacttctgcaagctaactggttgtgcttctcgaaaaggctaccatccccgggagacactgcagcttcccctgtgaaaaggaacctcactatcccaaaatggcaccaaatgctcaaagacagtgtaggtgggtcagggcagccccaccctgccgctgctgcggagcggaacgagcttcctcttccttctaagattcaacaactactcattgagcatttaaccagtttctgccacttgccagttgtgcctcagtttcctcatctgtaaacaagggtgacaattgttagatctgccatgcatgatgttgcgaagattcaatgagctgatactgtagctgcttagaagaagccccggtcaacacagggctgtggtgaagattcaatgaactgatactgtagctgcttagaagaagccaggtcaacatggggctgtcacggagattcaatgagctgatactgtagctgcttagaggaagcccaggtcaacatggggctgtggtgaagattcaatgagctgatactgtaacggcttagaagaagccaggtcaacatggggctgtcatggagactcaataagctgatactgtagctgcttagaagaagtccagctcaacatggggcacatgcgctgtcagcctctatgaccacttgcggcatccaaaggccctgtgccacaaggtcagagcatgggatgtcatgggacagaattccaagcattaatctgtgagtctcctttgccctccatatgctttccttcatagcatcccaggggctcctcttaggaggaaatgagaagcaaaggctgcagatgctcacatcgagtgttcttggaaaggctgttgacctgagcgccagggagataattccagatgcgggcaccattggggttggttttctcctccctcctggtggggatggagggcacaggatgcaggtgaggtgaggaccgggaggacagggagttgtttgagaaaaacctgccagggttgatgagccctccctcagtcaagtagtcttggggaaactgagtcagtgtccaggggttctgcttgtggctggcttcatgggaccaccaaccaaaagcagccagccatagtctgtgtctcagaaaatgtccagcccctctggccattccacatgg

SEQ ID NO: 1888365 - DNA, 4001 bp, Homo sapiens
cacctccccatgtcgctggacgcaggcaaggccacccaacccccaagccagagtcacccggacagacggatactaggcaccttagcacttccatggccagaggcctcctgaggtgggaaccgggtcctagcccatcccaggccatcccctccaggaccttcctggaggagcggggagaccagacttagaggaaggctccatgtcccaggtccagacaggggtgagggggaagaggggtgagcacctgtgttaggcactttgaactctccaggtcaggtgactgcatccagctgagactcctggcctccctccagcgtggaatgagcagccggtcctgtcccgtccacccctccagtgctgcggaacagaacgggaatggcaagtccccatgtgctgtctccccgcccttctacagcaccggtggcacaaatgctggggacagtgccggccccactcacaggagagctgctgggctggctccaaggctcctccgtccatggctgctgggctggctcggaggctgcctccgtccatggtctctgcagtggacagtctgtgtcacgcctccatctgtggtctttgcagtggacagtctgtgtgacgcctcctccgtccatggtttttgcagtggacagtctgtgtcatgcctccatccatgtcttccagcaacaccacctcactctgctttacacaatcactccacctccgtgtaatgcccaaccttgtttttcctttattcacctagccttgcttctcccttagctgagagagtcacacaaactccatcttggctctttcaccggcagccccttcctcaaggacttaacttgtgcaagctgactcccagcacatccaagaatgcagttaactgataagatactgtggcgagctagatccgcagttcccaggaatttgtccgaatgataacgcccgaagccccgcgtctatcaccttgtaatagtcttaaagcccctgcacctggaactgtttactttcctgtaaccatttgtccttttaactttttgactacttaacttctgtaaaattgttctaactagacccccctccccttcctaaaccaagatgtaaaagttaatcaagccccttcctcggggccaagagaattttgagcgttagctgtctcttggttgccagctaatagaggactcctaattcatctcaaagtgtggcgtttttctaactcgctcaggtacaacatccccacatgccctgcccccgctttgtatgcacacagcacacacctgtgcacatacaaacatctgctttcacacatggacacactcactgaggtgaagaggcacactcaggcacacacacactcacatttggtacatgcagctcctgaggggcaaggctgagctccttctcaggaacggacacaagactgagggctgggtcactcagatactttgcccctcgggccccacggattgatttaggggtgaactgtgaatccctgggagattccttcctgccacgcattcctgctgatgggaaacaaagcggtctttgagggatgctggaggaggcagcagtttgtgataaagagctgtgagaggagaagcccctttgccacctgccctcctttgtgcattggatgttgtcctcaatggacgtgatgcctggagtccctgcagccatcttgcctccatggggcaagccaggaaaacctcaccgacttaatggcttccctccagcctttccaaagccttgctctggtctcagagagttaggaattctgtcacttaaggcccagagcatcctgctgctcccttcactccagaaccagagccacacggctaacaggcaaagggtcaggaacatagcccgtgttttctgctctcggcacttggtcattctgcatagaatttggctccaaggcctggcctgacaccttcgcaccaaggtgccgtaaatgaaacctttactcctgagacttcctcacctctgcgttcccagggatccacaatcttctatttgtaaaatgattcccggttgtcatggagaccagggcaccgcagtggagctggaatgttaggtggggtccaaggttcagtcctgggggtagggagtggggcaggcagcttcactgggccctttatctgcctgattctcatctttcttacacaatagtctactcattattccttccctaagggccaggacacaggcctgcctggggttacagtccctgtctttacaagtcctctccttctggctcttgggcgtgcctgagctcaaaggagcctccaagcaaacttggcagggggtgtcccccagggcagaggtggggccctggctcagcacccccagaaaccacaaggtgggggcggaggatcctgcacctgaccttcaccttcgtgtggatcagatcagagcagaagttctatttctggaactgtcagacctgctgacctccagtcaatggcagaggcaggaaggcaggcagaaatacaagatgcagctcttgttacacctcctgcacagaccaacctagtctcggctccacacagccactcactctttcactcaacacgtgtttccgagcatcttctatgtgccttttctctatcatcagatgggggcccctgcggtgggcagaataacggccactgcaaagatgccaaatcttatccccagagcttccgcagagatcctgcagatgtgattcgagtcttccagcaacaccacctcactctgctttgcacaatcactccacctccccacatgttgcggagattctcctgggtcagtcggggggtccagtgtcatcctagggtccttatgagagggaggaagggaggcggaggaggagatgcaaggatgaagcgaaggttggagtgatgtggtctgctgcggggaccctgaggcgtgcaggcggcctctggaagctgaaaagacaggaaggcagcttctcccctgagcctccagaagaacccggccctgctgacactggcccaggagccccttcccccatcagggcctggagagggaagaaatgactgttcacagattttaccccgcaagacccatttcagcattctgattttgagaaccataagacagtgtgtgttgtttaagcctccaagtctgtggatattcattacagcagccttgggaaactgacaccacctccccctaatcctccctcccgcccccacctacacctgaaccctccccttgctcttctctgccgattcacagggattcacactcttcctacttgcagctgtgacacgggaaacatcctccaccaggtcttctctcacagtgtggcctctgcgcacaggttatccacctgtagacctggacgggaccctcgaggctccctactctgaccatctggttttatagttgaggaaccagaagccgaggcaggtaacttggtgcagcctaaaggcctccatccctccagtgcccacaacttaggtgcccacgacaacaacactggcctaccgcaaagacccagcccagaggaacaaggtgccactgtatgtctgaaaagggggccctcggcctcactggggagcaccttcctccatcagggtctcgacggtgaagaagcaggctgtttccatcttcaggatacaagccatctgcgcataggaagagggtccagaggctcatctggaatccctcctcactcactggacggaggacctgaccccgttcccatcattggttctgaatccatcagcccagcaagacaggtgtctccagcaagttctgtaaaatacaaccatagccgggcctggagtcagcccccaataaagggttcaccatggagtcaaagcttccttcacattgggaagagcctgatgatgccgccttggtgccacccgtgcaggccgtgttccacttctgtcatgggctggagagaaaagagcgacatggacctgttcatgaaaggctcttcccgcaacaccaagcctggggcctgcagggccgccatgaagaaaggtggctcctgcttggcagag

SEQ ID NO: 1888366 - DNA, 4001 bp, Homo sapiens
tcataaacataaatcatagaggaaaagatgaactgtctaccttaaaattaaagacgatataaacaaaattaaaaggtaagccagacaaaagaaatatttgtagtgacaacggtttaactttctttctttctttttttttttttgagacggaatctcactctgtcacccaggctggagtacactggtgcaatctcagctcactgcaacctccacctcccaggttcaagcgattcttgtgcctcagcctcccaagtagctgggatgacaggtacgcaccaccacacccagctaattttttgtatttttagcagagacggggtttcaccatgttggccaggctggtctcgaattcctgacctcaggtgatccatctgcctcagcctcccaaagtgctgggattacaggagtgagccactgcacctggcccacaagggtttcactttctaaaaatataaagaactggccaggtgcaatggctcacacttgtaatcctagcactttgggagggcaaggagagcagatcgctagaggccagaagctggagaacagcctggccaacatggtgaaaccccatctctactttaaaaatataaaaattagttgggtgtggtggcacttgcctataatcccagctacttggctactcaggaggccgaggcaggggaatcgcttgaatccagtaggcagaggctacagtgagccaagatcatgccactgcactacagcttgggcaacagagtgagacttggtctcaaaaaaaaaaaaaattatatatatatatcttatatatatacactattatatatatacacacacacacacacacacacacacacacacacacacacaattaatatgagatgcccaaaaatccaattgtaaaaaggggcaaaggttgtaaactggtaattcataaaaacaaatgaagagatgcttattggtactatatgctcagtattaagcaaattaaatgagataggatcgtgcatattcaaccaacaaaatatctgaatgtctgaaaataataaatgttaatgagggagtggagaaaatgggaatgctcatactgctgatagagagtaaactggtacaactattgtggcagccaattaatatttagtaaagctgaagatgcatggtccactgtggtacaggccctggagatattatcaaatgtgtacacaaagaaacacgcacaaggatattttctgcgatactgtaatactcaaaagccaatgacatcctcagtggtcatcaataagaaaatgaattaatgatgggattaatcatataatgaaatactatatagcagttgaaatgaatgtactctttacatgtatcaacatgctatacataaaaaacaatgatgagcaataaaagcaaattgcaaaaggatatatattatgaaaccaattatgtttagttttaaaacacagagaatactatggattgtagtaaaaaaaaatataaaatcatgaagagtaaggacaggtacaaacaggatagtggttcttcttgagaggaaggaaatgacataacaagaccttcaatggatgtgcagcttttcctttatttaaacacaaaaggatctgaaggaaataaggaaaaaggttgacagtggttacaattaaatagtggctgtatgtcaacactcttggttacaaacaacaggatctacactagctagtttaaacaaacagaataaaatggctcacaagtcacaggcgtggaggtcaggactacggagcccccaaaaatgcccatttttataccttggagcagctgcgggggaaaaactgctaagcaaagcctccacaccttgcaccattacatgggacctctgccactgctgccttgaaaaccacatcactgctccgttcaacaaaatgtatctcatactactcttgtctgcaaagtacttgcttccagatttcacacagttatgtctaattggtgagcccatgctacctgtctgagccacagctgcaaggaagggcaggagattaaatttcattcttctactgggtaaggcgagatccacagagtgggaagttgccaaaaagcaggtgttcaaacagtgctagctgcccaaaaagcacgaaaagtgcccactcaaacaagagttggtgaaaatattctctctacttttctgtatgctcaaatatttcacaatttttttaaagaaaaaatgtcgaagtatgtaaattcacaaacaacaaagggaatggaaaaaaaatcaataaacaagagacgtcaaccaaattctaaaagacaaaaagctaagtgactaataaaacactagagaatgtcaccacctagaaaacatgtggaggaagttccatcagaggcagccaaccggcccagctgggccttagctcagaggcagcaaaagttcatagatgatagaagacagtagagggattagttaaatctaaactaattaaaaagaaaggaattaattaaaggtctgtatacaaactggttgaacactaccccatcttcaaatatagaagggcctaaatccaggaagtgccccatgcaaaatattgaagggatctttattataaagtaagtgaaagaacagtctgggtaaaactaggatagtcaatttagaaatcggtagccaagacaagacctcttcattctagcattttaaaaaccctcatcctaccagccagatttacctacttatccttagtgatgcttatgagaagccaaaccttcctcaaaccacagagctgccactcaacctccctacatccacatcttcaactacaaactgacagccaacaaacgtaagacatttgaaaaaagcctgaaacatgtagatgaaagactaagaaaaaaatctgtcactggagaaaagagatgattcagggactagaaagtgaatgaagaaatgaataaaaattatattgatatcttcagagagcttcatgaaaatacttcacatccagaaaacatgaaaaggattctatgaaacagaagcaaaagagagctttcagaaattaaaatatgcttgacataatgtgagtaaaatataaatgcaggaaaaataatagagaaagggaaaaaaatacagaggaccaatacagacgatgcaaatacagctgaaaggtattagagaaacaaagaacctccagagaaaagaaagaacaaataaagtaaaaaaacataaaagagagatgtcaaaaattgaaaggatcgcctacgtaccaagcagaataactgactgaagacctagatacaggtacaggattgtcgaattttacaacaccaagaataataagatcctaagtgtccagagtgtgttgagagaaggggatgcagagaacaggttatataaaaaaggaacaagaatcagactggcatcagacctttcattagcaaaatcagatgccagaaaataactgagctgctttcaaagttctaagagaaaactacttttcaatctagaattctgtatctagctgaatagttcatcaaatgtaagcgcataacccactttagacatgcaatggctcacctcttagacattttttcctagaaaggagcttagagacaaatgctagcaaaatgagaaagttaatcaagaaacaggaagatatggactctaagaaaaagttgacctcacccagaaaaaaaaaaaaaaaaatacggccttcagaggaagcctgtgcacaagatgcagaaaacttgctgacaaagaagcagaaactttttggcaaaatatttttgtaagactgataaccaaggcttactcaaggtgtggggaaacaggcactcttagacagttattgggagtaacacttggcaaaacctttgggaagccagcatctggtagcacctgacagtaattccactgccagaaatctatttctacagaattatttatacgtgaggcaacatagagtagaacataagagcatgtgagtgaaactacctccgttcaaattcccactttaccactttcaagctctatgctgtttcctcatttaaaa

SEQ ID NO: 1888367 - DNA, 4001 bp, Homo sapiens
gtataacaaagaaaaggtgatttttaaaagttaaaattggttcaggccaagcatgatggcttacatttataatcccagcactttgggaggctgaggcaggtaaatcgcttgagctcacgagttcaagaccagccttgccaatatgatgaaacctcatctctacaaaaaatacaaaaagtagccgagtgtgatgatgtgcgcctgtggtcccagctacttgagaggctcaggtgggaggatggcttgagcccaggtggcagaggttgcagtgagccgagattgcatcactgcactccatcctgggtgaaagccttgtcccaaaaaaaagaaaaaagttaaaattgattcaaagggagttggtgacagctccttatagggtcagtcttggttgcttctctattccctacaatttctatcatgatctcaaataggccactcatatttgtttaaagagttcatgcctgcaatgaatgaatgaataaagatggctttctatcccatttcaagccatacaatatagatgatctgaattactctgctgtcctgcagatttggccttggttcccaaagaccaccccactaatagccccctgattgcttaaaaactcaaaatagccagtgcttttatccagccctacaattctatccacagaaccataagcccgtagaaatatgctaccagcccagcctcccccaaggaggtgtcctgcaaaatgaaaagtatggcattctttaccactttcgggtcaaggggccatctccaaggtcacactaattcatctgctacagacactgtggctgcctttaaaccttgagctagaaaaagcctcctttattctccagtcacctcatctacgcttttcccagcctctccgtggggtcagcagtgaccacttccttgtaccaaactgcactgccccaacagaacaccagcctgatttaccaggatcctcaaagcaagtgttcctttctgtgtgttctttatgcataaaaagaaacaaaatgattcctctgtcaccaaactttgccaatggtttttggggtggtgcatcccactgtggggtccaggaagatcatattctctctggagcatttcaaaatcggactccgccactcgctgtcccacgttctgggagcacttccccacatctgaatgtgtttccttgccccaacttttactttcacttttgctccagctaaataattatataaagaaaaaaatgtagaatttatctttcttttttttcttttttttttttttaccatgtaatttcctttttcgtggtgaactcctacaaagcctcggccgttctcacatttttgtttgaaccaaacataaacgctcttttttataaaataaatcttgctctgtgcttgcttgccaatgtgccctgattgctgattgttctaaaatcactagtctgtcttcccttgtaaaccccctgatgaagacacccagttgtgactcacctagctgtggtcccctgcaaccaggtgcctccaaaatggggctggcgttgacaataaccatttcccagcttttagaaagaggtgacagagctctgttgtagtgtctgagccacaactcaagaaggtaatgagaataaggagccaagatggccgaataggaacagctctggtctacagctcccagcgtgagcgacgcagaagacggtgatttctgcatttccatctgaggtaccgggttcatctctctagggagtgccagacagtgggcgcaggtcagtgggtgcgcgcaccgtgcgcgagccgaagcagggcgaggcattgcctcacttgggaagcgcaaggggtcagggagttccctttccgagtcaaagaaaggggtgacggacgcacctggaaaatcgggtcactcccacccgaatactgcgcttttccgacgggcttaaaaaacggcgcaccacgagactatatcccacacctggctcggagggtcctacgcccacggagtctcgctgattgctagcacagcagtctgagatcaaactgcaaggcagcagcgaggctgggggaggggagcccgccattgcccaggcttgattaggtaaacaaagcagccgggaagctggaactgggtggagcccaccacagctcaaggaggcctgcctgcctctgtaggctccacctctgggggcagggcacagacaaacaaaaagacagcagtaacctctgcagacttaaatgtccctgtctgacagctttgaagagagcagtggttctcccagcacgcagctgcagatctgagaacgggcagactgcctcctcaagtgggtccctgacccctgacccccgagcagcctaactgggaggcaccccccagcaggggcacactgacacctcacacggcagggtattccaacagacctgcagctgagggtcctgtctgttagaaggaaaactaataaacagaaaggacatccacaccaaaatcccatctgtacatcaccatcatcaaagaccaaaagtagataaaaccacaaagatggggaaaaaacagaacagaaaaactggaagctctaaaatgcagagcgcctctcctcctccaaaggaacgcagttcctcaccagcaacggaacaaagctggatggagaatgactttgacgagctgagagaagaaggcttcagacgatcaaattactctgagctacgggaggacattcaaaccaaaggtaaagaagttgaaaactttgaaaaaaatttagaagaatatataactagaataaccaatgcagagaagtgcttaaaggagctgatggagctgaaaaccaaggctcgagaactacgtgaagaatgcagaagcctcaggagccgatgggatcaactggaagaaagggtatcagtgatggaagatgaaatgaatgaaatgaagcgagaagggaagtttagagaaaaaagaataaaaagaaatgagcaaagcctccaagaaatttgggactatgtgaaaagaccaaatctacgtctgattggtgtacctgaaagtgatggggagaatggaaccaagttggaaaatactctgcaggatattatccaggagaacttccccaatctagcaaggcaggccaacgttcagattcaggaaatacagagaacgccacaaagatactcctcgagaagagcaactccaagacacataattgtcagattcaccaaagttgaaatgaaggaaaaaatgttaagggcagccagagagaaaggtcgggttaccctcaaagggaagcccatcagactaacagcggatctcttggcagaaaccctacaagccagaagagagtgggggccgatattcaacattcttaaagaaaagaattttcaacccagaatttcatatccagccaaactaagcttcataagcgaaggagaaataaaatactttacagacaagcaaatgctgagcgattttgtcaccaccaggcctgccctaaaagagctcctgaaggaagcgctaaacatggaaaggaacaaccggtaccagccgctgcaaaatcatgccaaaatgtaaagaccatcgcgactaggaagaaactgcatcaactaacaagcaaaataatcagctaacatcataatgacaggatcaaattcacacataacaatattaactttaaatgtaaatggactaaatgctccaattaaaagacacagactggcaaattggataaagagtcaagacccatcagtgtgctatattcaggaaacccatctcacatacagagacacacataggctcaaaataaaaggatggaggaagatctaccaagcaaatggaaaacaaaaaaaggcaggggttgcaatcctagtctctgataaaacagactttaaaccaacaaagatcaaaagagacaaagaaggccattacataatggtaaagggatcaattcaacaagaagagctaactatcctacatatatatgcacccaatacaggagcacccagattcataaagcaagtcctgagtgacctacaaagagacttagactccc

SEQ ID NO: 1888368 - DNA, 4001 bp, Homo sapiens
cagtttctagaaggattgagacactggtgcattgccttcctctggtctgtcaatcagtcagaatgtgttttcagaaatgttgcaacctgagattgcccaacaggagttgggcaggggcagagctagctcagcaaaagaggctgctttgaagtccaggtttgtgggtgcatgctctgcagcagaggtctgtggtcacctctaaccagctgtgatagagatgttccctgcagaggaatagccccacacttattttttgtaaaccaccttcacatctgttatctcattttagccttacagaactcctatggggctgggcagacaactgttcgttttgcagatgaggaagctgaggccagcccagtaacacttgatgcagagccctggctaaacagacaggaaagaattgttctctgagtctctcatactgtgcctcttgcctcagtgctcgtacatgttaacatgtgtgcaggattggacacccgcagttctttgatcagaaaagccttcccaggaagtttgcagaatgatgatctcttgatcaccagaattttcttgccaggttgggatgcggtccagcctcatggtgctagaatattctagaatctccccagggtgggcttggccttccgtcaactccccgctgatgggagggaaagcggtgcagctgtggcaactggcactgcttcccacattgcatggagactaaggtcagagtcaatttcatgctccttcctcccctattatgaccttcattatcctggcgcatggcagctgcttgtctccaaatgaggagacaggaagtattatatcactattaataacatttaagaagagcaataacaccattattaactcctgtgattcttcccaatttgagtggtggatgcttttaagttctgtagagtgtttagggcaagttttctttgctttaccagatcagggactcgcctgcattgttggactcttgccaacagagcagaattcatgtgccctttatcaaagggaagaactgaggtggctgtcactcttcaggtctaaaattctgcgctgctgagagtatcagaagtcagtattagcctggatcaaaaccgcgtctctgccaaggacaggagattcctggtgcctcctgccctgggctgggttccagctggctgggtcacccatcactggctgcttcttggtttcatctgtttcaggccctgcctgctctgagctggtggaacccaatggggcacagggggattgctgctgctggagaggctcgctgggatgctctcgggatacaacttttttctgtcactccccagccccgcctttatgccgcctctcagcccatctgcagtagtgtaggttcaggatcccttcatgggcctctggaggtttgcactgtaaacaatacactcaacagacaactccaactccccattcacgtctttctccagcatccactacccatgttaagttttgctctctttccacccttttacctttccaatctctctggctcctccctgcattattacacatattaattcagcacaatcctggccccagcccccagctccatccccctgcccacccgctaacagaactcaccctcttccgaagatgcatttttaacttaccatacttttgcaactcatcattcttttccagtcaaaagcactgctttttctaagaggacttctggtgaatgacttctctatgtcttattaatcgtagatgccgactgcagcccagagaaagggaggcatcgtgagctggcgacagcccatattgtgcccactctgcaggctctttggatgttcacacccagcctccttccctggcctcccccagcactgtactgcagatgggttctccaccctggccaagaactcctgggcaggcctctgagcccacccatttcccacactgctccctgttcttaccctccctgctctcttgttctggaagccatatggatgttgcaaatatccctgatgctgaggccacaccgtggctgcatgtctgtgggagactgtgtgctgagtggggaatgcactgatcatcctgattacagactgacagtggatgcctggtgcctcctgttctctgtggtcatggttggaattagagctgcccctggatgctccgactcagccacctgccctgggcctggactgcagaggctccactcgggccccgactggctgtgcccctttccatgggtgaggagtactcagggccatggggaccagtccacccagagcttgcccccatcctgtgcacgtgcacgaggcccgcagcacaagacggagctggggatgcggagaggagagggacgggatacaggccatggggccttatttctcttctttctcctaggtctcacaatattcggagtagcctcatttgacccttcagtttttactttcttctggataaatgaccagtgtccaagcttccgctaatatgcataggaggagaccaccctggcttcaactccaaacaaaatgtaaaccaggcaggttgtctgttctctcttgaaagcctttgtagctttctaacatactgaggattaaatccaagggcccaaaagattctacccaacctgacccctgagcttttgggtttttggaagcagtggccatattagaagttggacggtcttgcttggggctacactgagagagagagagagagagaggccctgagactgcacaggggtggagtggggggagggtctgtctgcctctcagactccctgtcctgccccttctccatccccgctcccagccccagccctgcagttaccttgctccaactgcacaggccccatggacctttctgcaataccccagcctcgttcctgcctctgtaccattgctcttgcagttttctgtccttggagcacctgtcctgtggagcctcagggtatacacacttctccaggtttctcctccaaagtcatcttatctgagctgccttccctgccccaatatccatgtagtaaccatccttttccctataagctttgctttttttccagcctaaaattatattgtaaatatttttgtccccagggcctaggactctgcctgggacatataaagtccaggataagtacttgttgaatgaatgaaaatccagccatggattttgtttggctgcataaagagaaaatctctgccacacatctttattttttattttccatagagatgagggtctcactatgttgcccaggctagtctcaaactcctggcctcaagcaatcctccggccccggcctcggcctcccaaagtgctaggattataggcatgagcctccatgcttggccaaccacacatcttttatagaggcatcttgaccttggggaaacaaaacgtccacagcggacataacagactccaataccccaccccacacttcctgtttatcttttcccatttgaggggaatcctgtccaccactgtccttttggggttactgcacagcctcagacagacagtgttcatgtgcagccagcctccatttatcaccagatgcaaatcccgagggagctcaactccagcctgctgcacaaaggctgtcagatcctccgttctcctctgctagatgtgcacaaatgcccactaagagtccgtggagaccaggcaccctctgctttctcatgttggacttccccctgaggctgttatcagccttgagcaattgcttacatactgcaaactgcttttgttcacatttgcgcagggagaattttccatccttggctagatggtgccatccatgttcatccattgccagtactctcatgtggctgagaattaagtccccggggggaatggcagacccagcctctcctgtgctgtcctgaggggagcaccactcaaagatggagactgatctgttcagcccttgcaggggcagaaggtggaaagggtgagctcctaaggtagctggcttccaaagatagcccccactgcaacacacctccagtacccaagtctatgtg

SEQ ID NO: 1888369 - DNA, 4001 bp, Homo sapiens
tgagctgacttgagcttgtttctacttgtgggaaactaaaatcaatctctggtctggttgaaataatcttcagactgtctgaacaccatagttggtggcacagatttacagacatctcagcagattggagtgcagaagagcagagagtaagtgggttatgagccagcttaaagcttcactcaatggaaactggagccccgtctttccagagaggcaaaaaatgaataataataattgtgatgacgatgatgatgatgagacattaaataaacctccttggagctttttgctgacttcttctgctggtgcctgcactttctgcctccctagaggttccaacaaaccttctgactctaaaaggaaacccttctgagaccaaaaggatagccaattatctcaagttttacagcataaataatctaattggatactaagaggagtccagatatttgcacaaaaattaaaccgtcacacagaagggtgttatacccctgcctggcctccttcttcctaaaagcctggagagtgaacagacttgagtgttgaacgacccccatttcctcctgctctaccatgagtgggcaccatggcctcaggcatgggaccaacctctccatatcctctcagtttgaggagggaggtgctatccactgtgcctcccttgataggagaaatcaagcatgcattgaagcccttgacaaagaaaaaattgctgaacagaagcaaggtctgcaggacatgggtcctattgctgctgggcattttgcaaggataaatattacatagtcactcagtttggtaggaagtttgctcacaagaattggaactggaggggctggaaaataaaaactccaatggaaaaggctaaattccttttatcttcattctttattgttaactacttaagccacataatcccctcagtgtcaggtatcccaggccaagaatcctatatacccaggcacatcgccacccctgcaccaccaggccacataatactagaaattcattcagaaaaactctttccagattgattaattggtgattgaataagtgagggaaggaataggggaaagggcagaatcagaaaatgagaagcgaacgcaggaagacaaaattagcgtggcaggtacaatggcacctgcccagatcccctctctatggacagatggccgcagctgccaggagggccattatacccttcagaagtggctgcagttgcagagagatgcctgactagggcatcccacaactgacagatccaggcaggtgtataaaggtaccactgggtcattttaacccaatgctgaacaatgctgctaagccattttagctcctgagcttccctggcatccgctgaggctgtctcctctgcatcactgctcagctcccacctctgtccactcaaacttttcttgtcctcacttccactggtgtcgatctcaagggcaccaaatatcctatcccttaaaatccattaacaaatatcctatcccttaaaatgcatctcagaatctgcctccagagaacacgactgtgaccactaggaaatgtagccaatggaaattctcaaagactaagaggagaatgaagaaggcaggggacacactcatcttctttgtgctgtcattgccattccttgtctgggtgtctgcttcagcaaggcactggagcacagtgacaaagaaacatgtgttaggttcctgggacctctttctcaccttagttttgtcactcacgagctgtgtggtcatggataagtcaatgtctcagggcctctttttgcaagttaagaaacaaggacaataatgatcctacctgacatttgagtcatcatgaggatctcctacgaccgtggatgccagtgtgcacgggagatggtaacaccccatctgctagtgacatttcccccttctccagccaaagcttggaaagacagcaggaccttgaaaatggcagccagaaaggcagccatttccaccctgagcttcaatccccaggctgaggaagtccttgcagggaggagttagctgctagaagtcatgggagaggggagggtactatctcattaaactctcacccatagatcatattgaacacctgctacctatgtgttaaactccaggccagtccacacacatagggagatggaaattaactaaacctgcaaacaaataaaaacctcccacagggaataagccaagtaacaggagttacagaaggcctccctgaggaagtcacacttgaaatgagaactgaatgacgagaaggaggtatgtcgacaaaggaggaagggaaggtgattgcaatctgagatgaatatgagtcccaagaagtcctcatggtcaggggagcagagagcagaaggcctggaacacgagggtgaagctgggagaagttgggaggcaagagctgaaaacgggctggggagaggatgagggccaagttgagcaagtcctggcaggtcaaagactattagctttatcctgaatacaacggggagttgtggaagggccttaagcagcaggcagatggttataccagctgcagagggaaggatggatggcagggaggtcagagtgggtagcattaacaaccatgagcattggttgatttactacgtgcttgacacagttctaagtgtttaaatgaagcacaggcacccaataaaataggtactattggccgggtgcagtggctcacgcttgtaatcccagcactttgggaggccaaggtgggtggattgcctgaggtcaggagttcaagaccagcctggccaatatggtgaaaccctgtctctactaaaatacaaaaattagccaggcatggtggctggcgcctgtaatcccagctactcaggaggcgtaggaaggagaatcacttgaacctgggaggcagaggttgcagtgagtcgagatagtgccattgaactccagcctgggtgacagagtgggagtctgtctcaaaaaaaaaaaggtactattaagatccccattttaaagatgaagacatgaaaatacacagagaacaaacaaacatgatgccaaccaagctgtctggctgcaaagccatacaggtaactacacaatactacatggtgggtagaccagatggacagctattttagtaatccaaatttgagtgacagcagtggaattggaaagaagtggatggattttcaagcgtgtaggagatcaaaagaaaagtcagaactcagttacactttggccacagggatgtggggagatggtttttgggagagtgatggggtggcagtgagagacactgagatataggggtccagaagaaaaccagggttgcagtatcaggacggacaggaggtcggggacagcatgagtccactgggacttgcagagatttgagatgtcccggtgacatatttcgtagtgttgtattcttttaaggatacctggttttatcctcctacaatattctggctctttctgtttgactacgatccatctggaatagtcacctgtttaatataatctggctcctgtgcacacaggaaaggagccactgtctcccttaaagtccccttccagaagcaagagtgtcctcacccctcctcagcccagcacatcctcatgcgaaatcatcacgggaagcaggacagtccctgctatgcaaggagagggcagttgagcatgagggctggttaagagaagagatttctgagcccgactccaagccctacgatttatgagttgtgagattatgtctttgcccaatttattaatctgtctaaacctcagtttttctatctgtaaaatatggttcttgagaggctgcaatgagatgatatacctaagagaaagcccagagcctggcaggcaatagccaagcgatggtagcagttattatccctagtggaaatcgcagcacatgaacactcttggattgttgtttgtttcacagctcgagtctctggaactggaggaatcccttccagttacctcctgttcttgcttttcggatgc

SEQ ID NO: 1888370 - DNA, 4001 bp, Homo sapiens
tcccagggaacttgagttgtcatcttagccatgctgcaggagtgcccagctggaaacgcgtgatgttcatgggaaaaccccaccgtataacatgggttaagctgtgaggtcctttttatatttcagaactttagttgctaaagatagaaagcattaattttattctgtacagttggcctccccagggtgtgctgccctgcagtatcacacactggctgctcagagtccctgggactccactaccacttgatccaagttgagagttccacgagttagccagttaaaacataggatgcccagctaagcttgaattccacataaggtactgaacgacgtccctgaaatgttgcagagagcctggttctctgaagataaggtgttgtaacagtcctgttgaggggagagactgccatcttgtttcagcaactcatatttcaagtgacttttgtcacttgaagctgaagctaatcctgatagaagctgtaaaccacatttctgaaaaataataattggaaaacatacagtgttctgcagtaagatgtctgaaaaagatggataaaattatgaaaacatcaagcatatgttgcagtgaacatcacggcattgacagtaatgctttattgcccacatctcccataactggaaaaggggagctgctctcctttaggagcactggacagactgccttggggtgtggggtgctgtctgattagagagagagcagctcttgaatgggggaggaaacacctccactgtgactttttgcacattgcatttgcacaaattactctctgaaacagtctcaaaggaccatgtcattttataaagcactgtggtcatttgaaaagatggaggtagactgaaattttgaattttggggaattttcctacactatgcatacttgtgaagtttgtattgttaaatttcatttgatttgacaaatccgtgttaagagtatacgatgtccaggtacagaggctgccccagaaacaagacagaagtaggcagggacccatggctctcatggaacacgcttttggttagaggcaacagataagggtaatacatttatagcatgccagtaagttctatagtacggtgtgttgagtaggtgttgcagagaaaaaggtatgcggtgaaggccgggtggtgacggcctaggccacactgaagaggcaacatttgagcaaagactgaaagagcaggtgggaagagtcggggacaagagccgccagaaagtgtttccggggagggaagagtcagggactctgaaccaggccagggcagctggagtggagtgagagggagggagggtctgggagtatggcggggtgaccggaggcagagcaaagcactgcaggacttcagctttactgagtgaaatgggcggagcagagtgtgaatgtgatcagacttcttttcaagggatcatctgcaatgctggaaaggaaaagacaaatgatagattattgcaacaaacagccaggcaagagatgcaaactttttttgcaaaggtgtgtgtgtatatacatccttgcaccggacagccacgaagcacctactgtgctgtgaagtcagtaaggatgtgggttaaaatcgctcacctcacagcgggtcaatcgggaaagcacacccactcactacagccattatgggaaaaagggctcgccccttacaggatcctcaactgtggagaggccgggagcccacgcggggcgctggggagtctctcagcaccccaggggttcgggcagggacctgagccgcgccctctctcccgggggtgccctggggtcgaggctgctcggcagagccggcggtcagttcgagccgcgggcccgaacagggctctccccgcggctctctccctcggagtagaaggtgctggacccgaactccagcggagccgcacaacacgtggaggaaaagcgccaggacagctaaccttcccaccttttcaaacctgaaacccggccggctggggacggttggaatgttcagtgcgtacccgcacctcaggccccttgtctccagccccagaccgccccgcgaccatcctccccaccccccgacctcttatctcgtccccgccctgtctccccaacctccatcctcccctccacaacccccgtcctcccgcccttcggccacgcgcggctggcacagaacaggcagttagcgcacacacactggaacaggcgccaccgttcaggaagtctctacaagaccaggaccctgaggcctctggaagtgccgggaccgaaccaaccccgcagagcgactaaggcgagggcaggagccaagagaatcgtagccgcggtcgcgggttgagctcccaccacccggacagcgcgcctcggcgatcgcgcacgcgccacgccccggaagagttcctgggcccgcgacggtggcccggaagcagtccccggtgtcggggcaggaggcacgcgcgcggctgaggcgaggtcgctcggcgcagctgttgcggggccatggcggggaccgcgctcaagaggctgatggccgagtacaaacgtgagtctggggacccgggccgtcagcagcgtcccgcgttcctgctcccgggcccgcgtcgtccggcggggctggggcagggagcctggcgggggagccgggcccggggcctccaccgtgagcccccctgtgggtcccgcggagtgccgcgccctgcgcccgctgcccactctcacgcgtgaagtcgtgaagagaagccttcccagcatcagtaaaggcagcgccggcgccgtgttagttgagagcacacacagttgagtctttgcgggcttgtttttttctcttctattttttcttttcttggcagccttgagaacgtgcagtgagagcttgaggaagaaggcctgacttgctgctgcggaattaggagggaaaagtgtatgcgttaaaaggggaaaggctcgttggtggagctttgaaaggtcagattttggctttccctctaatgaaggaaaagggtttttgaacagtgccacctgtcactcctcctaggtagtgttgaggaaacctcttgagtgctttcctacccggtaaattagatatttctaatgtctgaggagagcgaagggagaaatgagaacctaggaacactcggcattccatcgttttacaccgaatgcccgcttggaagaactgctgcgagaagtcttggaataccattgtgttgaaagcgccaggagcctgagtcgccgatggagacgagatagtagccggctaagagcagggcctgagttcagacccggcctctctgcttgttagctctttgaccttgttcctctctctgtctctgcagtttccttgtcttaaaaggttaaacttgatactgcaggtgaagtgcttagcaaaatacctgatgtgtaacccttaataaagttagctgctgcttttgtaattagattgaggataattttggaagaaagttaagctaaaagaatgaatgtgagaaaaaaaataagtggtgaatatacatgtagcttgatttcgtaaaactattggtgacaccgcccagtaagagttgatgtttggcttaagcagaccaaaacgttgcaaatacaggctcactcacgtatggtcattcttcccttggtatctggaggggattggttccaggccccgctgcagataccagaatcctcggatgctcaagtccctactataaggtggcgtggtatttgcatttaatgtatgcatagcctctcataacttttaaatcatctcaaggttacttatagtacctaatgcaatgtaagtgctgcacaaatagttacactgattttttttacttgtatttttaaatcgtcattttttattgttatttttttcaaatattttgtattcctggttggtcgaatccatggatatgcagccgcagatacacagggcctcctgtaaacgttcaaataacgctcgccacctagtgtctgctaaagcagaacataaaggcacacctcagtttcccgcgcgc

SEQ ID NO: 1888371 - DNA, 4001 bp, Homo sapiens
tcaaatgtgtactctcgcacttttccaaatctatgccccaactacattcccaaacttattttccactattcctaggcataaaaatcattatctcctccaaggctgacctctaaatattccttttatattcctaccttgtcacctcttttctgaagttctcaaatggaatgccccccccaccccgtatcctttccctcacccttactttatgacttttactcctaatcccaagcgttatcagttcccactctttttgcaagctttctctagccagcccagtccacagtgtcccgtagctcacctttatgtgaattgtatctatgatcagcccatgtattcagcatatgccatgaagaattcagtacttttagttaacattttctggaggacagcagtccccgtcttattataagtgagataggccaacacaggatttggccaagaggaaacacaaatcatgattaagagcatgggtaatggtcaggcgcggtggctcactcctgtaatcccagcactctgagaggctgaggcgggcgggtcacgaggtcaaaagatcgagaccatcctggctaacacggtgaaaccccgtctctactaaaaaatacaaaaaaattagccaggcgcggtggcgggcgtctgtagtcccagttacttgggaggctgagacaggagaatggcaggaacccgggaggcggagtttgcagtaagcagagagcgcgccattgcactctagcctgggagacagggcgagactctatctcacaaaaaaaaaaaaaaaaaaaagagtttgaaaagtgagtagataatgacccagtgaaagcaagatatgtctacatttcaaaatgttttcagagaaagaaaagaaacagataaatttaaggatctaaagaagaaaactttcaggataagacaaactagaacatatttagaggcaggaatacaggaagtaatacagaaatttaaattaatgaatttctattaatttaatagaaatttaagcacagaggtagaggagaagatgctgaatggattgtcttccctgagacatatgtgatgagagcagagatccccatcttgatatgagagatcaggagtgaactaggataaggaaaggtttattaggaaatacagggtagggatctaaaacattttaagctcaaggacttcagcgaggtaggagataaattcatctttttaaaataaggaatggaggtgtattagtccatttcacactgctgataaagacatacctgagactgggaagtaaaagggtttttttgtctgtttgtttgtttgtttgtttttgagaccagagtctcactctgttgcccagactggagtgcagtggcaagatcttggctcattgcaacctccgcctccagcgattctcctgcctcaggctcccaggtagctgggattacaggcacgcaccaacacacccagctaatatttgtatttgtattttatttttatttatttatttatttatttacttattttgagatggattcttgctcttgtcacccaggctggagtgcaatggcatgatctcggctcactgcaacctctgcctcctgggttcaagcatttctcctccctcagcctcccgagtagctgggattacagacacacgcctccacgcccagctaatttttgtatttttagtagagacggggtttcgccatgttggccaggctggtctcgactcctgaccttgtgatccgcccacctcggcctcctaaagtgctgggaatacaggtgtgagccaccatacccggcccatatttgtattttaagtagagatgggttttcgccatgttggccaggcttgtcttgaaactgctgacctcaactcatctgcccacctcggcctcccaaagtgctgggattacagacatgagccactgcacccggccaggaaaagagttttaattggacttacagttccacatgtctggggaggcctcagaatcatggcaggatatgaaaggcacttcttacatggtggtggcaagagaaaatgaggaagaagtaaaagtggaaaccactgataaacccattagatctcgtgagacttattcactatcacgagaatagcacagggaagaccagcccccatgattcaattacttaccctgggtccctcccacaacacatggtaattctgggagacacaattcaatttgagatttcagtagggacacagccaaaccatattgttccacccaggcccctccaaatctcatgttctcacatttgaaaaccaatcatgccatcccaacagtcccgcaaagtcttaactcattttagcataaacccaaaagtccacagtccagagtttcacctgagacaaggcaagtcccttctgcttatgagcctgtaaaatcaaaagcaagctagttacctcctagatacaatgggggtacaggtattgagtaaatacagccattccaaatggtagaaattggtcaaaacaaagtgtttacgggcccatggaagtccaaaatccagcagggcagtcaaattttaaagttccaaaatgatctcctttgactccatgtctcaaatccaggtcacgctgatgcaagaggtgggttcccatggtcttgggcagctcagcctctgtggctttgaaaggtacagcctccctcctgactgctttcatgtggtggtgttgagtgtctgtggctttcccaggcacctgaagcaagctatcagtggatctaccattatgggctctggaggatgatggccctcttctcacagctccactaggcagtgccccagtagggactccgtgtgggggctccaaccccacatttcccttctgcactgccctagcagaggttcttcatgacagccctgcccctgaagcaaaatttgcctgcacatccaggtgtttccatacatcttctgaagtctagggggaggttcccaaacctcaattcttgacttctgtgcacccacaggctcaacaccacgtggaagctgccaaggcttggggcttccactgtctgaagccacagcatgagctgtatgttggtcccttacagctatggctggaacaactgggacacaagttcctaggctgtgttccaagttcctggaacacaagttcctagggcaccaagttcctaggctgcacatagcacgaggaccctgggcccggcccacaaaactgcttttttctcctgggcctcagggctagtgatgggaggggctgctgcgaaggtctctgacatggagaacattttccctgtggtcttggggacattttctccaaggtcatggagattaacattaggcttcttgctacctatgaacatttctgcagttggcttgaatttctcccccgaaaatgggtttcttcttttctatcacatagtcaggctgcaaattttccaaactttcatgctctgctttcctttttaaactgaatgcctttaacagcacccaagtcacctcttgaatgctttgctacttagaaatttcttccaccacataccctaaatcatctctctcaagttcaaaattccacaagtctctagggaaggggcaaaatgtcaccactctctttgctccagttcccaagttcctcatcttcatctgagatcatctcagcctggattttattgtccatatcactttcagcattttgggtgaagccattcaacaagtctctaggaaattccaaactttcccacattttcctgtcttcttctgagcccttcaagctactccaattcctgcctgttacctagttccaaagtcacttccacatttttgggtatcttttcatcaatgccccactctactggttccagtttacggtattagtccatcttcacactgctgataaagacatatccaagactgggaaggaaaagagttttaactggacttacagttccacgtggctgaggaggcctcagaataatggcacgaggcgaaaggcacttgttacatggtggcagcaagagaaaatgaagagcaaaagcaga

SEQ ID NO: 1888372 - DNA, 4001 bp, Homo sapiens
catgccactgcactccagcctgggtgacagagtgagactctctctctgaaaaaaaaaaaaaaaaatgacatgaaactgactcatcagagctccatcaggccacgggctacaaatgtggctgggccacgtagacagaaagacacacggccctggtgtaggagaggaaaacacactgttttcagggaggtggaattaggggtttccctgtcccttctctctcaaagccttttccaatgaatctagaatttttagtttcttaataatgttcctgttgctcttccatctggatgcaaaggagatctattcacgacatctccaagaatgaactccataagagcagcagagtggtcaaggcctactttcccaggggttcattttctttttgcctttttttttttttttgagacagagtttcactcttgttgcccaggctggagtgcagtggcacaatcttagctcactgcaacctctgcctcctgggttcaaggaattatcctgcctcagcctcccaagtagctgggattacaggtatccaccaccatgcccggcaattttttttttttttaagtagagacagagtttcaccatgttggccaggctggccttgaactcctgacctcaggtgatccactcgcctcggcctcccaaagtgctgggatcacaggcgtgagccaccgtgcccgaccaaggttcattttcaatgctgttgacacgaaggctaagatcacaggggaggtcacaattttaggatctcagcttttagaatgctgtctttttaaccccttcagcatttccatcttattggaaaagggcaggcaggagggcagatgggagggagggaggcagttgggctttcttcctgtccaggggccagctctgccttcctggtcctcactcccagccccactccttccttcccctgttctgtgcctctcctatctactccttccacatccctagccacctcacaggctcttcatggggctcaagtgagataatgcagggtgtgaaattctttgtcaatgaacgcatcaactctacgttccatttgctgtcattatctcctgtatctttgttccacttgtgcaggtgatttgtccccccgccagtccccgtcccctcacccccagtttcatggataaggaccagctgtagactctgccaggccctgggcagtgttggtatcgtgcttggaggtgctgctcagttatgcaacccaccctcctcccccagccagagccacaaagccactagggcactgtaccagtttgtttatttatttatttttgagatggagtctccctctgtcacccaggctggagtacagtggcacgaccttggctcaccacaacatccgcctcccaggttcaagcgattctcctgcctcagcctcccgagtagctgggattacaggcgcatgatgtcacgcctggctaatttttgtattttcagtagagtcggggttttaccatgttggtcaggctggtctcaaactcctgacctcaggtgatccacctgccttggcctcccaaagtgctgggattacaggtgtgagcctctgctcccagccccaccgtgtttagcttggttaggcacagagccttgcatgaaccagcacctcggggaccccatgacgaggtcagagcgggtgagaggcacgcaccagtgtgactgagccactcgctgggactctgggggcagcgtggtggggcttgagatcaaggaagtgcctgcaagtggattcaacgatgagacacttccccggcccacagggtggaggggttggctggaggggttgcctgtacttaccagagacggtccccgagcgagcttgataagctgaaagagacgctcaggagagccctgacagagctccccaggctggaaaggacagaactccccaccggaactttcattttcaaagttcagcacctcagttaagtaattaataggtctggtcacgttcacagctctccaaaagagactgatggagctctgcttttcctccggaagtgctttcatggcaagcccagagaagccccctaggaggcagcctgtcatccaataatcacttcctctctcaggcccaaattccaaatcagctcagcaatgggcagggcggccctgagccacgtccagaggttgggatttgctgactcctggaggatattctgagtatagcaagtaagtgaactcgcacaaacaatgcgttcagcaatgggaagaaaacagctgtttttgtccgagaagtgtctggcatacccaagacttcttaaagagaggaaaatattaacctagagcataacaacccctttctcttttcagtcaaaacctagacagactgtgttgatattaagttaacaagttccatgggctaataccttccgaatgaaatgagagggttcttaaattaatagatgaaaactccccttcatacatcagagaactaaggaaaggtaattgcccccaatatttattttcgatttggaaaatccaaagcaagaaggctttgaagaagtcaagatctgattataattctaggctcggtgccaatgggataaattatctggcaactttttttgcacagttattgattctatttgtctctgacgccaagcgcccagcatggcacaaagcctcacaaagtgctccgaaaagggtgtcatccccacaccgttgataaggctcagagtctctccacggccataatgcaaccccctcctccccagggggctgttggcacctcaacccactaagggatcaggaagtagagtttgccagtgaggagcctggagacttcaagcctgtttggccttggtgttcttgtgatttagtgccctggactggcaggtctagggactttttgctctagacaaactttttaaataggccaggtgcagtggctcaaacctgtaatcccagtgctctgggaggctgaggtgggagggttgcttgatcccaggagtttgaggctgcagtcagccataatcacaccactgcagcccagcctgggagacagaagaagaccttgtttcaaaaaaaatttttttaataaatataaatttaaaaaataaaaaatcccaacacatgcacacacatacatgcacacacatacatgcacacacacacatgcacacacatacatatatatgcatgtgcaaaaggtatgcccaagctatactctctttatttgagttttaatttacagaagttttcaacctggccaggcctggaatcatggagaatgggctgggaatgggtctgcagaggttcccaaggacatgtttgaaaagcatcctccacctgggagagctgggtcagaattagcacactctaggagagttggggaacagctaagagcggggcacaccagctcgactaactgagcctgagccagtgggaaagtcctcatagcagtggtcactggagcacgaaacagggacatggctggctggggctccttcctccgcccctccccaagcacaggtgggcatgccgtggtggggctgggaaaaggcctatggccagggaagcgcaggatgacaacaaaggaatggtcaaggcctaacaaacagaaacagcgatgcaaattgcctaggagatggagcggcagtcactggagctggcgttgcccagactttggttggcttcagggtgacagttcaagaaggcagctcctcctgtgggccagtgagcttgctccaagagcagccctttccagctgacgcccagagtgacccaaaggctctcccggaaagtccggttctaagacgatacagctgcccgtcatggagcaacctgcccaaaaccacagggggaaaaaaatccaataaccaaatcccggtgaccacaccctgtctgcagttactcagaactcactggccaaggtccagggagcagaccgagtcaggctgaagtctatccacatttaattttcaattgaaaatggaaacaagtcaagccaagacaaacccagggcctgatttaacagcatctactgc

SEQ ID NO: 1888373 - DNA, 4001 bp, Homo sapiens
atctgtaaaatggggacaagaaaagcaccaattacttaattagccaattaattaactagagatggtgttgcccggccactcaggctagtgcacagcagtgagatcacagctcactgcaacctcgatctcctgagctcaaggcaccctcttgcctcagcctccagagtagctgggtctacaggcatgagctactgcatctggccaggtaatctatttaactcattctacagagaaaatgtgactctttactttgtcttcttttctttttttttcaaacggagtcttgctctgtcccccaggctggagtacaatggcgcaatcttggctcactgcaacctccacctctcaggttcaagcgattctcctggctcagcctcccgaataagtgggattacaggtgtgagccaccacacctggctatcttttttgcatttttagtagagatggggtttcaccatgttggccaagctggtgaactcctgacctcaggtgatccacccacctcccaaagtgctgggattacaggtgtgagccaccatgcctttactttgatctggtcttctcctgaacccactccacaggttattgggtaaaatatgacttctaatcccatccagtttaaatcttagtgtcatccaatttaatttaaaaagtccctgttgaatttacatagcttcttttggtaacagcccaaagagaaacatgctcaaagcgctgccccttgtgtttgtccctaaaatgttgcagggtgtgtggtgaggttgcgtgtttacacagcttcccccccatgctgattctcctgtctgtaactggtgaacttctggtctgttctttgggctcaggcactatcttggggacacatctgctatctctccctggctggcttttgctacctgcagaccccaggctgggatccacaaggccagggaggtacttggcttactgcctctcagctcagggtctctgctatgggagaatgaagtggcctgggacagctgatctttgaggtttcctttgaaatgtttttgccttttgtttttaaagagttttagagacagggtcttgctctattgcccaagctggagtgcagcagtgtgatcatagctcactgtaaccttcaactcctgggctcaagtgattctcccacctttgcctcctgagtagttgggactacacgtgtgcactggcactcctggctaatttttaatttttttgtagtgatagggtcttgctatgttgcccagactgatctcaaactccttgcctcacacgatcctcctgcctcagcctcccaaagtgctgtgattacaggcgtgccaccgcccccagcccagactgctttgtgggctgtcgaatttgctaggacatgtccaagctctggattggtatatggggcagcctgttaggttgctctttctataaactgacacatggggaaagacaggatatactcactgaaaaacagaacacctgttggcttggcttgacctcctggcttcaggttcccattttcccactttacccctggcatctttcctcctggcatctccatccccatttttgctactttaccacttcttgttggcgaaccgctgaacagtttttataaacatttcctgttttagtcttccacgcctggctcttgatatgccaagtggagaagaaaagctggacattctttctcaggtcaccagcccagcctgaaagactagctcttcctgcaacatctttctcttgagtgcatgaaggagaatctcacgttggtctatctccttgcattctttctgtattccttatgtttccactaggcagagggatgtctccaagatcagagcaaagaaaaactctgccaaagagaaaagcacgttaatgctttctgcaaggctcttggattggtcggaaccctgagagcgcgccaacaagcaaaacaaggcggtgtggagcaacacactgtttcagtgagcgcctgggtgcagatgggctgaggcctaaaatggcgtcagccccaaatgagcacggggcaggaattttatagtctcctgtaaacaggaagtgtctcagtctgatgtaactgctacgcggtagacagacggcctctctctgggtcttcaaggggtgcatgtcttcccgccagctctcctcctgcttctgctgtcttgctgacgcacgctgcgccttgggactgggcctgagaagagaggaggagttattcacataccaccaacggacccaccccccccgcaccccttcccccggcccccccgactcccccctccccctgcctctccctcccccctttcccctgccccccctgcctccccctcctcccttcccctgcctccccctgtctccccctcccccctttcccctgcttccccctgcctcccctcccccctttcccctgcctccccctgcctccccctccccccctttctcctgcctccccctgcctcccccccgcctccccccgcctcctcccccccgcctccccccgcctcctcccccccccgcctgccccccgcctcttccccccccgcctcctccccccccacctcctcccccactgctgcctcccccactgcctcccccgtccccctcccgcccccaccaccggcaccagcttccaagctctgggtaaagtctttcactttctaaactgctgcccttctagtgctgatgctggactgaagcttcctgcaggctgggatcctgtctgcatatctcgcaatgtgttcccaggaccaggcgtagtttctggtaaaaactcaaggaatatttgttgaatgagttaatgaatgaataatgatgataattcataccagagttgcctataaataagcgtacggtgaaccccgtgaacaagtcattttcacttggaaattggacgtcaatataatattttatactgctcactgtaaatattccttactgaggtaaaatgccatcagattaccagtaagagaatgtagttaatgttcctatattttgcttttttgggtcaatcatttggtaacagcaattagaaaagaaattggagagtacagggcctgtctgtggaagttcttcagaacctcagtgccattgtcaagagaaaatgacctgagtttttcgcactttagagggggtgttaacaatgagtgctttcccgattcgatgccatcaccagccatatttgtgttgaatcaggtgccttatggtaaaatatgtcataagtatacaaatatttttccaaaaaagtctgtactatgcgctatttctttttgtgtttcactcacaactatgtcttcttttctatcatcacacttggctaatgattgttagtagatattagtcaccataactctccagcacaggagaagcttaaagagaaaacttcctggcgcacgcctgtaatctcagcactttgggaggccgagagggcacatcacctgaggtcggcagttcgagaccagcctgaccaacatggagaaacctagtctctactgaaaatacaaaattagccagccgtgggggcgcatgcctgtaatcccagctactcgggaggctgaggcaggagaatcgcttgaacctgggaggtggaggctgcagtgagccaagatcgcaccattgcactccagcctgggcaataagagcaagactccgtctcaaaaaacaacaaacaaaaaaacaaaaagagacaagttccatgggaggtggcacgcattggatgaaagtgtagttatataaagaaatatgacttaaaagaaagtaatccaatgctggaagcaaggagaaaataataaaggataaaaagataaatgggaaatctgagctaatggtattggttaggctaagaaggcatctgcatgttttcaccttgatggtgtcagttgtggagtgcctggtagaagtgttgtgagctgccagaaaggctgtgcactatactcttcagaaaaatctatcagtagggatgagttcagtctgtcgtgggcatgtggtttaacacaatttaggacaattta

SEQ ID NO: 1888374 - DNA, 4001 bp, Homo sapiens
aacattaaccctttcctgacggtagagtccttgtggcctaatcacctcttaaaggtgccacatcttaatactagtatgatggcaattacatttcaacatgggtttcagaggggaccaacattcaaaccatagcagtctcaaacactgggctggcagtggaagaggaggctgatctttaaagaatataaattttttttttttgagacggagttttgctcttgttgcctaggccagagtgcaacggtgtgatcttgggtcattgcaacctctgcctccccggttcaagcgattctcctgcctcagcctcctgagtagctgggattacaggcatgcgccaccacgcctggctaattttgtatttttagtggagatggggtttctccacgttggtcaggctggtctcagactcctgacctcaggtgatccgcctgcctcagcctcccaaagtgctgggattacaggcgtgggccaccacgcccagccagaatatgttctttaaaaacaggcacaattccatgaagtaaactcacattggaatggttaacaggtaaagtgatccagctggctgaaacaataggcattcaccggcatccaaagtacataaagatgagcactttgagactgcgccactgcactccagcctgggcgacagagtgagactctctcaccaaaaaaaaaacgtgagcactttcacctcaagagtcgctaggctcagatgctgaatgcaccctgaaggaactctaaagataccagcctctggagttttcacagccaacagcattcctaggtagactggttgagaacacggctagttggagggtaaaaagaatgacttgtgaatgctcactaggtctttgaatatgtaagtagacacgacttcaagccagttgctcagccttgaatatatcctagagtccatcaccttgggctgtgagtggcttgtgcggtcatctgtccatctctcagctgggcgagaaacttgatgtcctttctgagaggtggccctggctctgcctgggacctgctactcttctccaaagtgcattttttgtgggtgggttttcactgtgggtcctgggcaggtgagtgctggtgcccagtgttggggagcagggtagatagaggtgtggctgctacctggctgggcccggacttggcagccttccttcatggccctcagccacagcctgttccatagtttgttctcgatgtgtcagctttgtgttcccatgagaacaatgggctccttgaggacaggcattgcatcgtacctgtggtctcttccctaacgccccccagtacgcccagcatagacagcacagggtgcaagcagtcagatgagcagggctcccgttcccagcacgggacccagcccgttacctcgctgctatgtttcccacgtaaacggagcaatacccaattctaaagaactgttctgaggactaaatggaatagtgtaaaaaataaattgacatgaagtgaaggtcaattaaaatgcactagcttggccaggcgcagtgtggctcatgcctgtaatcccagcgctttgggaggccgaggagggaggatcgctggagcccaggagtttaagaccagccagacaacacagcaagatcccggctctagcaaaacattaataaaaattagccgggcgtggcggtgcccaccggtggtcccaccttctcgagaggctgaggcgggaggatcgctcgagtcctggacgtcgaggctgcaatgagccgatttcgcgccattgcgctccagcctgggcgacagcgcgagactccttctcaaatatagaattttaaaaaggccatctcgactgccgcgggggtcgcgtcctctccatccccgaccttggacgcaaccccgggcttgggtcccccacgatctagacagaaactcgttgtttctcgtgctccgcgccacccgcgtcctccggtctgtttctcccaggtgcgtcggtgaaaggcggagcgccgccaccctacacccgcgaccctgcgcccgcccgagccgcttccgggtacttccggcggccgcggggctcccggcagccgcggctcctgtttccgccgggcggcgagaacgcaggaccagcttccgggaggcgctccgcacgtttgccgtgctccgccgggaagatggggaaagtgagggggttgcgcgcccgagtgcaccaggctgccgtgaggccgaaaggggaggccgcccccggccccgcgccccctgccccggaggcgacccctccgccggcctcggccgcggggaaggtgagctggggaggcgctggccgggggctgccgcgtgggtccgagggcgggtgagctgcggggcgccgcctccgggagggttccgcgaccccggccttccctcgggctctgcgggcatttgctgcgctacagacgcgaccttcttgcttcgcgaagcgtcgtaaactccgaggctccgctctgcgctgccgtcctgggcacacggactcgcgccgctcccggggaggggagagagccaggaacctcccgctgcggtccagggttgccacgcggaccccagaggttcctgaatcgcactgagctccccggaaaggaaaggacgttcccagagttagagaagaacggagagcaaactgaagagagaccccgttccctttagcagtcggctggcctgtttctccatccccctcagccctaagcaagcacgaatctaccttttgtctttattctagacactgcatgtgagtggaattattgctttcaggatttttttttttttttggcttttgccttaaatattttgaccgatgtgtcttggtgtaggtatctgcatttattttgcgtgttcactgagcttcttgcgtgtgtaggttaatgtttttcgttacattggcaagtcttcagccattatttccttgaatatttttttctgcccctttctgtcactcctctctttcggatacttccattataaatatgtacgtcgtgcttaatggtgtcccacagtgctctgaggcgctgttcactcagtttttctcttttcttcagatggcataatctatcttaattcaagtttactgatgttctgccagcccagaggtgcttttgaacctttccagtgaaattttcattttttttgactccagaatttatttactttctttctcttctcctgttcctcctcattttaaaaaatactctttactgatgttttctgtttgatgtgagaatgtcattataccttcgtttagttctttagacacggtctcttttagtccttagaaatatttataatgcctactctgaattctttacatgtgggctgctcaaagcagtttctgttgcctggctcatgctggcaggtaggagcaggtgggccttctttgaatgtatcactttttgtggaaaattgggcattttggatagtcctgtagcaaccagggattagtatctgcttgattactttgtttattgatctggaactgaactatgtgacctctctccttgtccccttctggctgtgtgcagcctctgatgtgcccccttggttttttttttttcttcctgtttttctcttttagcctggctagttggatctgcttaagctcctcactggtcagcaattgttcttaaagcctccttggccagggggtttttgccttttaccactggatacctctggcttggaggtggctgtcagattcagcgtgttcacatttttgaccttcatttctgccctcagaggcacagccaaggactagtagcttacagagtccctctgctcactcctggtagggtgcgtccttgaacatgcgcacagcctccagactgccagggatgcgacctcctgggagttgttcctgggtcagaggggcttactgtctacccaggagccttgggcaccctgccctctgcatctgtcaccacccagagctccttcctggtcagcaacacccttaggcgtgagagccctcacacgagctgcagacaaggcgagtcccttctggc

SEQ ID NO: 1888375 - DNA, 4001 bp, Homo sapiens
gagggtgggagaggccagctgatgagatgtttcgtgttccatgctatagagcttggaatttattctgtaggcaatgagatgcttcttctctaggacttaaagcagaaaagtggcatagatagattttcatttaatacagaccatcctggctaaaatgtgtcaatggattacaacagaacaagattagaggcaaatcaactaggtacctgctgtgagcagtccagatgagaggtggtgcagctgtgacttagggaagtggtgctggatgggaaggaagagacttggggagtgttccaagggtgtccgcgcttgagctccccacagaagcaggacctgtgacaagggctgatgtgcaggctgtttaggaattgatgccaagtaacagcaatgggggctgggaggagtgaaagagggaggtgggcttggtgtggtggctcacacctgtaatcccagcactttgagaggctaaggcaggagaatcgcctgaggccaggaggccaagaccagcctgggcaacacagggagaccgcatctcaacaaaaagttttaaaaattaaaaattttaaaaatagtgggaggagaaagaagcatcccagtgtggtgttattggcctggttacctccatgggctgctgggactggatcccctggagaccccctgaggaagcgtgtgaaagatgcctcagaattgtccacccaagacatggatggaagacagatgagctcatcagctcctgcccctattggtcaaagttttcccccaaggaaagccacctcccttgagcttccaagtttacacacaagccagtatagctaagcaagtccccgcaggcttggacagaaagcctgccacagcagatacccactgccacagctgtcaggtgacagcttgttgcggttgtcagagcaacgcccaggagcaaaaaaggcgagccaggtcaggcgcagtggcaaactcctgcaatcccagcaatttgggaagccaaggcaggaggattgtttgaggccaggagttcaagaccagcttgggcaagaaagagacccctgtctctacaaaacataaaaaattagccaggcatggtggtgcgtgcctgtggtcccagctactcaggaggctgaggcaggaggatagcttgagcccaggaggtcaaggctgcagtgagccatggtcgtgccagcacaccctagcctgagtgatagagcgagaccctgtctctaaaaacttaaagaaaaaaacggtgagccaagagcatgtgaaaggagcgtgaaaggagcatgaaagggaggtgggcagaagaagctggttggatagaggaagtgaaaggaagaggcgcatttgtacagacagccgcccttctggaccgagtaaccacgtggagagtggttctccatccacccacataggacgcacaaggaaaagaagaggttcccaaagataagggatttcatggggaaaatacctcatcgaatggactgcgaccctcaagggaagatgttccataagctcggcgcgagtcaggcagtagggagaggtcttgagatcacaggtgaagtgaaggctcccaggaagggtgattgcagggcgagggcctcctgacctggagacagggccccaaggaacagtcatacgaagagggcagaggacaaatgaagagggagtggacagaaagagaaatgggaggagagccatgtgccaggagccaagtgatttaaatgcaggtgtagtgccctggagagttccatgtgtaagaacaagtaaatcattgttgcttacctctcccttgaaaaaaaaaaaataccctgcttcttgtcctaagttcccaggctctctttttgcctactccctccccagttgctgagtccagtcaaccctcctgctacagtatcccctatagcgccattcacctgccctcctctgctcccttggccaacatctaggttcagaacctcattgtctctcttctggtctgtcctgcctcctcctccctctgctgctgtccatccaggtggattttcctaaagggaaaaggtgcacttgagggcaaatttctcttggccatgcacttaggagggggatttctgggtaaaggggtaagttcactgcttttctaattctctactttttccttatcctcacccataaatcttacaacccccttgaagtgcaataactttatttctaggacctctcagagcctttgcctgtgctgttcccacttgccgggaatgcctttcccttcatccccaatagttcaagccccaccttttcctgagcccagctcagatgccaccccctcatccaggaaggcctccttgatacctccctaccagaattaatctctccttctcttgtggtctgaagactcttggctttctcccctgtcctatttttgcttgttatcactgacattgctttacacgctttttctcctctgctgggagcaagggcagtttctatgtcacaatgccccactatgcccattaagctacagtgcacatggtacccatcccgagaccaacattctttttacacttctgtgcttctgacctaggaaagtcttacttttcatagagtgtcatagctgagttggaagctcttttcttagagcctcttaaaataatggcgtgccttatagtcaatgatctcttacattccattaaatacagtaggagatgttcaaccaatatttgctaaattggaggagttaaagtcattttgagtaggagagggaatctagacccactatttggattagtacagattttagtgcaactcagggcttctgcagagcccctccagctttcacctgtccacttagttgatgatgagcacgcctgcgaactcttcacactttccaaacccaccaaggcagcttctcccgtaaggacatgtttcttaccttcaagacccctgttgcctccagcagcaatctcagtaatgacgtctacttctgtttcctgcttccttctccctgactcctgcttcctggagtcccctcagataaacctcctgtgcccaagaccttgtcagggtctgcatttacgggaacccaactaaaattccaggaccaccatataaaggtccctttgtcgggggctgggcctgctctggatacggtagggaagtggctccagggtctgcggccagcgaggagagggtccggcagtcaccagtgggagctgtttcctcccgtattcctcccacctgtccctacctgtcctgctggcggggtaaagagtgggatttacctcgtgacagctgccttacagccccatgaaaaggcactttgggctgcggttggggggagcgcatctccagggattgcagggtaggaggacaagaactctccctggcctgggagtcagggaaatggagagatcagagcaacacaagtgctgggaacagatggggcttcctgggctccagcgctaattaaccagctctgcagctcaaggcctgggcctcatgatagtagtctgagggcccctggggtgcagggttgagcacacaaggctgcacacaggcagagggagaggggtgatcccgggaacagccatccctccattccctaatccagaggccgctgcccttcttgggccagagagcagcagcttctaatacagatctgggcttctcactcagcaggtgccagggacccaaggagacaaatggaggaaaaagagtgaggaactcctgccccaaggaggccgctgccaccgcccactggccgcatgccaactggaccccagatgataagcgtgaaactcccagaggttgagattgggagactctcctcctccctgcctttcatcttgtgtcccctctcttgtcccttcctcacttgcaagaacagaactcatttgatgtgtttccgctaccaaatcagagcagtgagtgcagagttggggaggaaattgaagggaaacaattcaaactgtttcactggagttgcaggcgctgataaaggcatcttcgttagttaatgagttaatttctgataa

SEQ ID NO: 1888376 - DNA, 4001 bp, Homo sapiens
tcagctccagctctatctcatttccccacgtctgagaggctggaagagaaaggagtggatcttgagttggcaactcccatttctccatcagcagaaagagaaaactggttttcaggtttcctcctaccccatgaagtaagagtcccttcctctaaatattaaagaaatttattaactatctagattttccttgacttttgcttctttatctaggctatgttgttcaatatgacagccactagtgatttgtggttactgaactcaagaaatatggttaatcaaaattgagatgtgctgttagtgaagaatacatgccaggttttgaagataatagtccaaaaatacctgaaagaatgtaaaatatctcactaatgttttttatgttgatttcacattgtaaagataatattttagatatattagattgtacaagatatgttgttaaaaataaattttatgtttcttttgactttttcaattgtagctactatagtttaaaattttatattttatatcactttatatgtctttttttttttccaagatggagtcttgctctattgcccaggctggagtgcagtggtgtgatctcggctcactgcaacctctgtctcccaggatcaagcgattctcctgccttagcctcccgagtagctgggattacaagtgtgttccaccactcctggctaattttttgcatttttagtagagatggggtttcaccatgttggccaagctggtctcaaactcctgacctcaggtgatccacccaccttggcctcccaaactgctgggattacaggcatgagccaccgcacccagcctcactttatatttctattggatttggacaatcagagaggaaggaaaaacccgagtccccagtagccttatttcatgcctctttctttccatttttcagtctctctccaccctcatgcgttccaggtattgggaagtcaattcttttgagacaaacatcaagaaaccaaagaaagatcaataggaagatcatttcatcacatttatagcacatggcaccaaatagacagtcagcatccattcagtcaatcaatcatgcatttaattaaaatgaagaatacagaaatttggcaatctcatgtcctgaaaaaacagatacactaggaatgagtaatttctcttttcactcttacaagttctgaaaaggaggagatactatgattaggctatgaactatactgtgtatagtcacttattaaaatcttattttatataatggctatctgtaggcatttaaaaaaaactcccttctaaaggtctagatatcttgaggtcaataaatgtgctctgtatccaataagtactgagcaaatgttgttgaatataatgaataaaataaatgatataatcagtctatcactttatctttctaaccaaaattaaaatttgaagctaaaatgttgtatggttgattcgatgatgatataggcattaaaacatgagttgtgccttaaggtatgctttgcttttatctgataaaacaatcttatttaaattttttttttttaaataatagagactgggtctcaatatgttgcccaggctggttttgaattcctgggctcaagcaatccttctgcctcagattccaaaagtgctggattacaggtgtgagccaccacacccagccaaaaaaatcttatttttaagtcacttcaaaaagtaacccatttgagagtgaataaattcttcccagattaaatcctggctgatgaagaacacttattcctaaaataaaatccccatccatttttgtcatctcagcaaccatctaaaaattgtcccaggaacaaactgattcaccctatatgaaataacagaataacagagaagaacgataatcccattaacctggtagatccggaatgaaatgcagctggaggatggagcagattggaggtgggaacagggaacactcagcaggctcccagccccgaacacccctggagtctcaacagcctcaatccatctggaagggagggcttgggggaagggctgagcatggctgcagggatcaaagctaagcaggggaaaacagctagagcactgtctgctctttgagcaaagataatagagtcctctctgtggtgaagagaatgaacacacaggaagatttaaaaacacaacaaacccggagccgatcagattcctttattccatacctcaaactcatcaggcttgtcctcaattcagagtctctctatattgaattacagggttagaaaaataaagggcatcccattgagtgcttttcaaacagtgggttgccactctttagtgtgagagaatcaattcagtgggtggaggtttgcatttagaaactgaaataaattagaatggaaaatagaaggaattgcatggaaaagggataaatattgtttcatgaattttttggtgtgtgtgtgtttggtacaggtaaaatacatcttactgtaggcattagccaaactgtgaaactgaaaattagtcaactctatctccctcccgtattattatgggttattaaaatcagttcttcaggccttcaggaataggctttttagaacctccacagctaattctctgttgaggtattcctcctgcattctagaaatatagacaatgtcacagactcagtgcaaaccatcctgaaaaatagctccaggatcaggcattgcattatgaggaagctaatactgtttgtcagaatctgagggcagcctccctttaaagaccctaattaaggagagggaatgaagaaaaaatggtaatagcatgcctcaaatgtgaggctgcctcttggccactattcattagaaagcccacaaactgtgggctctatttaaggaacgtctgggatggttttgggcggggaagcaaaacagacccagtcaaatacttccccttttattctcaactctgttgtcagcttacttttctcaccttgatttatttcttgaaattttagtcaaattcattgacaatttgccttatgattcacaaagtagatgagagtgaatagagaagcgacctgacagagaagagagcaggactatttaaaagattctggcaagaggtgagaacattcctcgatccactatagaaaaccaccagtgatcaaacaaacacagtgaattccatttctaggtctcaaggaattaagcataacattcaaagttgactagataaaggaaagatttattattactattattttgagatggagtttcacccttgtcatctagggtggagtgcagtggccggatctcggctcactgcaatcttcgcctcccgggttcaagcgattcttctgcctcagcctcctgggtagctgggattccagctacccgccaccacgccgggctaatttttgtttttgtagttgagaaggggtttcgccatgttggccaggctggtctcaaactcctgacctcaggtgatccacacgtcttggcctcccaaagtgctgggattacagttgtgagccactgcgcctggtcaaggaaagattattaatgacagacttcattgcgttctgcaaagctgaaaggcaaggaaagaactgggggatggaggggggatttccctaaaagaagtcctagtaaagttgtatatcaagaaaaaggcagatatcttcatatccagacacaaaagaaagttcttaaggttttacaatggtatggccactaacacaacctttcaaagaggagcaaacgtccttatcgccccaagaaatcaaagtaaaccatgtgaaacccaagtgtaggaaatcccgctgctcagataaagtatccagtgtagcactgaaacagcactattgctttcaggcagcctggcttaaccttgagtaaagcctttcctgggagttcagctcagtgaaacagacattctgtcaactgtatcagagacaaggattttagctgtaattatggtctgctaatctggtgcagctttagttaaacaaacagaatcagcacatt

SEQ ID NO: 1888377 - DNA, 4001 bp, Homo sapiens
tgtgctgtgactgtctaggggtggcgtccccatgcagcttgtgctttgggaggggccagctgcctcctcgccactgcccagcatagcttgtccccgtgcccgccaaagaggtcctcgtgctggcctcacaacagaagacggccacagccctgctctccccaggccaccacgtccacgagtgctgcactgtgagggtgcagcccagcgcctcagaggcagcagcacctgtgagatggcgtgcagatggaagtaggccaatagactccaaaggaagcaccactgaaaaatcagaggcgtctctcagagggggcccacgagggaggtggtatgaaaggtttttaaaaggacaaagcagacttcggagctgcctctagaggagagcagcaggtgagttccgagttcacctggcacgcttttcggcagagcccaggaatgcccacttctgagcgctgagtgcacaacccagctcgggaggcctgcggcagcaggaatggggaggcaccgtgagtccctcaaagcgctgctggaaatgtcactctgcgcggtgtccacccgtgctcggggtgggcagcgccactgaatgacgcgggcagcttgggaggccggttcgcgaacgccgcagcagcctctgctgacacgggggctgctccccactcacagagccacaggttcctgtgggttcatttatgaggatgtaggaatcataggagttaggtacatcttttcctgaggtgagagccagatgaggggagccaagacagagaatagcccacgtctgccctgggccccgggggcggggcctacacaggctcccaggagtgtgggtggggcctgtttaaacttcatgccccgggacctgcctgggagcctcctgcacaagactcgccccactccggaggcttagcagcaccggagctgctctgtggcctgttggcagagaggagtctggtgctcctgtgcacgggggtcacagcaaagccaagtggccgtagcacctttaacactggccccgggtctctacacctccctgccggccgtcagctcctggccgcagccggcactgacctggagcaccttaaggagcccctctgcaagtccctgtgcatctgagaggtcagagaggcagaaacacagttccagggttcaaacctaatatgcctcagcattctgggcactcacatggtgtgctgggcctgtcctgccacatggcccctgcgtgaggaagacagagcctgggcgtggccccacatccctgtgagctgcccatgggcctggaccctggctctggcagactaggctgcatagcagatcagcttctcctgagccattttcatccaggccacacctgccagcttgggccagggacaggcagaccctgggcccagggtcttgagcttgacccgcaggaggtctgggccttatgccctggggagaggagagcgcagaaagccagtgtcacggcagccccaggggaacaggccccaggcctggcggggtctggatctcagttccacaggggaagctgtggccgcaggcatggtaacctcaccaaacaaaaagctgcccatctttcagaatatgagcaagaagtttgtgagtccttgatcaccagaggggcaacgtggggcccgagatgacaaggagtccaggccacccacagtagctcctccttcagccttacagaggggctgcctggtctgctttcctggccgtgggttgcccctctctgggggccgatgtcagcagacctgtgggggatacaaacagaaggaaccttggaccccttcctggtacctccttactcatctgattcaaaccctcccaattctgcctccaaagtggaccctgactctccccagtccttaccgtccagtctccaagaccagtccacccagggagcggccagaagacagcccacctgcgccaggcctgtgtgtgcctttcctggcatctggaatggggtttggtgcttgctgcctgtagccaggcctgctggtcatgccttcctgccctgctgggcctcatctccgtgacaacgtcttggccttcctgccatcctttgtaagtgctgcctggtctgggatcacgtgtgccggctcctctgcttgcagtacttggctgcacttcccagtatattcgttaaaatgttgtgacatgagaattagcatatgacacgtacgtaacgtgagctgcggagcatagctttctcatgaacagccgtgaccccaggaccaggctaagcgagatgacccatgctgccgtgggtgcttcctcttctttaccgtgatcctgcattttgttttctcatctcttctctttaaaataattttattttattacacatgattgcttgtttctgaactcttagaaagtgacatcagtccctacatagacttcccaaacctgttctgtttagtcacacacaaggtgtcttaggttggtatgtgtttctgggcagagctgcagtttgtgtgcctggctgcatagtgttccagtgtgtgaataggcatcatttatttgtttttccagcagggtcatgcggctcgcttgccattgtgagtgatgcttccgtggacattcctgtgtgtttcttttggtgcacacatgaggtgtttttggtttaaggaagtggaattgctgcatcataaagtctgtgaaaggtgaactttcaggaactttcaggaccatgtcagtttttgtttcaaagcgcgggtaccaattcccatcccccagcagcgtgttagcgccacggatgatctacagtccaccaacattctgaatgtttgccaatgcagtgaatgtaaataacgtttcactgtggtctgtatctcccgttccacatgctcttgtgctgtgactttgatgcacctcccgccagggaggggatcgtgaccctccctttaatctgggcaggcatgtgcctccagcggaaatgatgttatgtgacatctgtgtgcaagccacaggcagcagcacagcgctgcagagctcccaggatgctggctcttggagcctagggatggcgctgtgagaacaggccacggcgccctagcttcaggttatagggcatggctacgtgcctgtggaaattctcctgcgggcggtttcatgtcgaaggcctacctgtagccctgggttgtctgcctcttgggggtagcggctgtgtggaatgcctgcgttctggatttggctggctgcctcctctggcatggtgcagagcccacctgcaaccccatatttgccctggtaggtctgaggtgcgattccactcagatttatttttcctgtgaggcgagcgagcttcctaggtggcactgcacgttgcaccgcatggcatgatgaggcgtgtggtctggccgctccttcactggtgctgagactgaggattgagcttagggggtcagcctgatccgccactgctgggttccccaccagccttgcagcttgctgtcaatattcattgatggtcattgcctggatgcagtacacattaggggctgcagaacggtgattttctaattgtgttgttctttctgtacttattagttgggattcatctatgtggaataacgtttgcctcatccactagggctgtttggttacctaaactatggttcatgccagaaaggcaggatagatgcttcattctttgcactcagttgttctcactgcgatgagttggtttctggaagccccagtgttgtcctgtgaatttgtgtctttccctgcttttctctccctgtgaagcatcattgttaactggtggatgttatacacacagtggagtttggccagtgcagctgccatttctttactcaaactgttctgtagtttttgggctcccctcgctttctgatgtaaccacatcagtcttggatggctttattgccttctgtcgtatgtgttcccaccttaccttttatattttcttccacagaccacctggaatcaaactcttttgggagacctgtttttgttctaataataataataataatact

SEQ ID NO: 1888378 - DNA, 4001 bp, Homo sapiens
gaggattgctctagcccaggagttcaagaccaccttgggcaacatagcaagaccccacctcttaaaaacatatataaaaataaaaaattgtccaggcatggtggcacagacctgtagtctcagctacaaaggatcgcttgagcctgggaggtcaaggctgcagtgagccattatcatgccactgcattccatcctgggcaacagagcaagacactgtctcaaaaaagaaaaaaaaaattcaggctaaataatatattagaccagttgaaagggatcaatagaaacattaaagaaagattctatagtgggttagttctgcagtgtcccctcaaaattcatgtccacctgccatctcagaatgtgcccttttggtaatagggtctttacagatgtaattagttaagatgagattatgctggaagactaatgtccttataagaagaggagaagggtcaggcatggtggcttatgcctgtaatcccagcactttgggaggctgaggcgggtggatcacttgaggtcaggagttcgagaccagcctggccaacatggtgaaaccgtgtctctactaaaaatacacaaattagctaggtgtagtggcaggcgcctgtaatcctggctactcgggaggctgaggcttgagaatcgcttgaacacaggagacggaggttgcagtgagccaagatcatgccactgcactccagcctaggcgacagagtgagactgtctcaggaaaaaaaattaaaaaaaaaaggaacaggagaggagaagacatacacagatgctcagcagagacagcagccatatgaagacagaggcagacattggtgtgatgctgccccaagacaaggaatgccaaagattgctagcaaccaccagcaagtggaagaggcagggaaggattctttcccagcgcttggagagagagcatggtcctgacaacattttgatctcggacttctggcttccagaactatgagagaatgaagctctgcacctgtatttggtgtttagttatggtgaccgcaggaaactgatacatatgccatgtagtgcagccactcaaccacaaggggcactgtctggcagcaagttctacaaacacaaactgtccaaaataatcactgaagttcacagagaaagccatacaaatagcattcaaatatttttaacgatgatcaacaggctacaatttatcatttttaaaaacataaaaccattatcatcttgctgaataattcatgacctttgtaacaaactggctgagaaccacttttaaagaacatcctggtccggctatcattacacacacgggagggtatctgtaggataaattcccccaacaattccctttccaggaagagacgcatatttttaatttcaatagacaacagccaaattgccctccaaagaggaggtacattacactcgccagaaatatacatgaatggctggttttccccaggcttggcaatactttgccaagctaagaggtaagaatgggctttaaaataaaccctgatccagctcccaaggagaggactggggccttcggacccacatttcccagcacaggtgcttcaccagcctgccatggccccttctctgtccagtttagcaagggtgtggcagatttcctttcaggcacagagcccagccttccagacatcacacttaaactggttcctaccacatttgcaaggagaatctcttcttccaagtcagcagtgtttacaataagcagtatgcttttccctgagtcactctgaatatagagaccagaaaccaattccagggtagcaaagggacagccaccatggtgacctcaagcatacaaatcacacacctgcttgtcctgcctggtcaagccctgttgggaccatgcataatcctgaccccagcactcaggcacagaacacttaggagaggaaggcgaggtttcagctacatgaggtggcattgtaggaattgtcttctccctgacaccccccatggcactcaacagcctcactgtcctgaccctaagccactttgtgacccacccctgggaagggcaggcagtgaagaactaggcatagagaagaggaggtggggagttaccaagctgtttgctgacctcttcatttgactcagaacctgaccttaatcttgcttccagaaaaacaatgggccccattcctgcccaagcttgccttctgcaacccagactttcttagaacgcgatgggagtcaagagcgctttctttaaggcgaagctgtagacaggttcccctcacctcccacctctgcccacattatctgcctctagcaaataatggtagtcatgactgtgcctgttacccaggagaacaccaatcaatggctgtaaagacatgaatgtatggttttagatggtgtctgcctgcctttgctgaaaaaatgtaagaacagcaaacatttatgtattaccgtttgtcagtactgctctaagcacttttataatattaaacattcatgctgtactccttacagcaatcgtaagagctaggcactaaaactattcccattgtacagatgagcaaactgagacactgagagattgggaaccttgcccacgatcacacagtgagtaagtaggagctacaataaggagccatgaaggcagggagctccactcctgcccttcccaggcctctgttcactcctgagcatgactggtacctaacaggtgctcagacagtcgctggatgcagatgagggaacggctgtggacattcagtccttcagaccacaaaaggactttggaaggagaagaaccctggaagaatgccatgttactggcaaaggtttgggttcttacccagtgatttggtaaacacaaagggacaatggcattaagtgatagcaaagccaatctaaacagaatcacagcagtaaaccaccagaacccacaactttttttttttttttttttttgagacagagttttgctcttgttgcccacgctggaatgcaatggcgccatctcggctcgccacaacctccacctcccgggctcacccaatcctcccagctggaactaccgcacacaccaccacacccagctaatttttgtatttttggtagagacagggtttcactatgttgcccaggctggactcaagctacccacctacctcagcctcccaaagtgctagaattacaggcatgagccaccatgcctggccaccagtattttgccaggctggagtgcagtggcacaatctcggctcactgcaacctccgcctcccgagttcaagcaattcttctgcctcagcctccctgagtagctgggactacaggcacgcaccaccacacccagctgatttttgtatttgtagtagagatgaggtttcagcatgttggccagattgttctcaatctcttgaccttgtgatccaccctcctcagcctgttgggattacaggcacgagccactgagcccggcccagtctttttcttaaaaaatctgctcacaattccaattatttgcgcaatgctgtactaagtacaagagaaaggtgtttcctctcagccaggacagaaggtaggaatcttcctgtaactgcagtcctttctatggccactaaaacaaattaccacaaactgaggggcgtgagataacacatgtttatgatcttatcattctggaggttagaagtcctaaagtcaaggtatcagagccgtgctccttccagaatccctgagggaggaacccctctgctgtcctgtcaacttctggaggctgtctgtgttccttggcacatgcccttcctccatctccaaatctctcctgacctctgcttctaccacatcttcgtcttggacccttctgcctccctctcataaagacccttgggtctacactggacccaccttggtaacccaggctaatctccccacatcaagatccgtaatcacttctgcaaagtccctcttgtgaaggaaagcaaattcacaggctctgcagattctaatgcag

SEQ ID NO: 1888379 - DNA, 4001 bp, Homo sapiens
acaatgcccatgagtagtgacacagtaggtgtttcataaataatgtctttttaaagtcacagtccaggataaaaatgatatatctgattgtcattcagttcgttaaataacgatcatatataaaaagagaaagagagagaagagagaggaagggaggaaaaagagattgatattttgcctgcaagttcaccaaaggctaccatgttggtttgtgcttgtttttttgtttcagtttcttaagtaagagtgattcacttgtgctgattcaacttgaaccatgtttacatcagatgctcttatgcccacaattgacaaatctaagagtggtcatgaaacaaaacggacctcactggccccaaagtcatcgaatctacaattttgacctttaggctatgtgcccacagaactggacgacactgctgaattcatgtaaccctaagcgctgtgaaacgctccatcactgtgctatttgacagcaaggatggcgccacttctgagataactcatgccgcagagctcaacaacataccccttgttcaaagtagagatgatgggcgttgaaagggccatgacacagaggtcttttgtgtgatcagacttactctgtgtggggtaataggagtgtcgtctgaagagtggtttggctggataagaccacgaaaaaaaaaaagtaccaaacaatcaaaaagcttaatcatggattatcaagaagaccattttcccacccacatttgattctgaattcaatcaaacccttaatgactcatatgaggatttcagggtgttctatcaaaaatctgctgaaatagacccaaaacacagcaaaatattaaggtgaaatattatcagtaccagaaaaagtatctccaatactttttctcagttttcagtttcttatgattatgatgatgattcatttctgctgattcaacttgaaccatattcatatcagatgctcttatgcacacagttaacaaatctaagagtgatcatgaaacaaaacggaattcagaaagcaggaaagtatctccagtactttttctcttataaagaacataccatttgttgggtaagctactgatgctagatgcagcccactatggaagcaggaaaagaatctacttagtcactgaatcaacacttaccatgtgcctggcatggtgcaaggctcatgcagcagaatttatttcttcatgcttttattttgtttccatctttaatagtgatcagagctatgaagaagatcttggagggtaatgaaacagaatcacagaagggaattttgtttcattcagaactgggaacagcctatttgagggagggcagtcacgtgagatttaaaagatagtgtttgagctcctgtgactcccagtgtcttttaactttgtatttttactgagacccacaaaagaaattcataggtgactgctggtcctggatttttagggacaaccaagattgacatgtgattaattttctgaagacaactagattctggccatgacaaggggcttctgggatgaaaagctaggaccacagagggccagggggggaagtgggaatgagaccaaaaacaccaatagaaccaagaatcagtgaggacagagcaagggagaaaggagggtcagagagcaggcaacatggcctccaagaagttcaggtgcagaatgaaggacatcgggggaatatctgtccattaacctgcctggagccctcttcgtattctcctagacacccgaaactattctgcagcgtttttctttgctgatttagacgttacaaaaaatgtagtttcactgctgatttttctccagaccatttgtgcattcttgctctgaacaccccaatccataatcattgtcagctgagaccaaactagctgctaaactacttaccaatgtattcagtctccacggcatcgatcccagcagaaatgcaaatcagcttttccagggcgaacctccctcctgaagaagtgagtctaggccagcaactgccgcctggaggaatcctgaagtgccccccagatgtgtagggtcttggttgtcacacagtgcatttgacacatcacagtcaggggtccgtaatctgctgcctccagcagtaagataatgatgttgtagtttctcttctcttcctcttgcccactagaatttacttggatcctagcgaataaagatgggagaagggatatcagtcctgcccatcacctgctagcatctaccaccattttgggatagctgggctctacagctgtgtagacgacaaggtgcataccagtgccacataagccatgtttcaggaccaaccaatggtcagggcacacagtgtaaagtgagagagaggaaccaaggctggagggctcagggcacatgccccaaaactacagacactaaagggattggagccctgttaaataaagtgaaccctcttttccacaatttatttctctatcagccttggcaattgtccccacgacaagaaggagcctagctggggccactctgcaaattcatgaggcaggggagacatccaagctgggcatatgcatgattattacaggaagaggaaaacatctgagctatttagcatctcacagttcaaatggggcgattgctgagacactggtgtggaagagacaaatggggtggggaaatttttctaatcttaataaaatctttttgctttttccagtaagtaaaggagtgagtgatgacgtgtctgacccttctttaatatcatcaactggagcgagaaagacctgaaagaaaatatttagaaaaagagtgttcatattatgccttgcctgtgctatgccttaataaattctctcattagcaataagccaattctatataaacaatgttttctcagcaggcaacagcaagttcataagtactcttaacactcattaaagctcacatgcttcaagaacatgcttagaaatattgtgggtttcctggctctcggcacatatttcaatggggaataaatgggtgcatggaatacagtgaagagcaagttccttcaacaagttctgtcttttcttgccactgctcagtaacaaaggaagcagtgagcaaaacaattatttgggctttaaatggaaacaggaaaagaccagacatctaaaattggagaaaatgtacatgtcagaggctaattcagaattttttaaatgactttttttgttattctgggaagatgttttaagtttttattgtaaacaaatgtcacttttgaggcagatggaaaagtaatctaaatttagaaaatgtgtcattattaattgaccttagttatcagagaaagtttttttcaaagatctgctaacttcaactccaaactggacacaactgcctcctgtaacttacttcctttaacgcctcaatcaactacagtaactcgcatttgagattgattttatttgcctttaaccaaaacttgttagaaacagcctgcacaattatttctctttcctcatcctatttctttttggtacttctgtggggaaatgtgaccagtgtttgcaaaacaacacaagaaacacctctcaattgttttctggcattattaacttgttattgttaccagcaactctgcatctccacaactatcaatagtttattgcttgtttctttacttagattcattgacattaatagggtgaaatgtaatgacttacggtcagcattttggaataataaaaatgattaatttggaagttctttgcaatattctatacagttcaaaagccaacatctaaaaatgtatactgcatggagagaaataacaatttagtttcaattataaattaaatacatgtaaactccttaaatcattcttataattggcaactataaatcagttaccaggatctttcaagaatatttaaagccatatagtatagaaatgttttctattgattaaaaatagatgtagatagagattccatactagatgcttactcacatctgcatttacctactttttctttctct

SEQ ID NO: 1888380 - DNA, 4001 bp, Homo sapiens
aggattcctggaagttggagttcaagaccagcctgggcaacatgggaaaaccctgtctttactaaaaaggtaaaagttagctgggtatggtggcacgtgcctgttatcccagctactcgagaggctaaggcaagagaatcgctggaacctgggaggcggaggttgcagtggcccgatactgcgccatggcctgaccaacagaacaagactccatctcaaataaattaataaatacgttagttaatcgaaaagtttaaaaagaaaacttcaaggacgttgcaggaatgcacgggaatgcttctctcattcctaaagatcagagcagaaacacagtaccatcaggttgagatacaggccattgtgaatctcttctcactgtgctcaactgacaccaaagaagggcaggtttccatgccgcccgttcatcatcaccgctctcgtcaagtataattgcagagtcatgactacacagagatctctcaacccaccaactgcgtccttacttgtatgagtgcagttgaaagaataaacagggcatttagcgaagtaatcatcatatgttcttttgtctctcgtgtctctcatgaaaccaatcacattcgtggaccactttttccccacccttcgaacatccacagagcatcaaaataaaagagcagtgaatgccttttacgcgacaaggaggaaaaacaacaaagtgaaagtcacagaggcttgtgatacacagggagatacagaataaggagaattttccaaaatccacacaaagacagacagacagagggatggaaagaaagaaatgaagaaaagagagagagagtaaggaagatcaagaaaaagaaaatagacagacagagatgtaaagggaagaaagatgaaaaagaaaaccaaaagacatagaaacagaaaaaaaaagaatgagaaatgagagaaaaaagggaggaagaaaaagagagaagaaaaagaaaagacagaaagaaagagaaagaaaaaaagagaaaaaatgaaggaaataaaaaagagggcagggcattgtggctcacacctataatcccagcactttgggaggctgagttggaagaattgctagagcctaggactttgagaccagccctggcaacacagtgagaccccgtctctactgaaaaagaaaagaaaagaaaaaaatccgggcattatgatggcaggcgcctgtggtcccagatcctttggagcctgagttgagaacatcgcttggggtcgggaggtggaggctgcagcgggtcttggtcagacaaatgctctgcagtctgtttccgaggctgtcttgaactcccgagctctagcgaactgccctcctcagcctccgaaattgcagccgccacaaccaacggtcctgaaggtgtcattgacagattttagtaaacagggtgtttcgccatattgcgaatttgaacccaggcatttgaagctgcagtgacccaaagtcgcgccactgcactgcactctgggtgatagaggaagactccatctctaaataattacataaataataaaaacaataacaataatgacaaacaataatacaaagaaataataagcagcaataataataaacaaactcgtgggagtgaaaaactataaaaggtaatttagatcacagttaattgcagtttatttcaaggaatttttttctttaacctgtctctcttaccttctgaaacactcagactggagggcaaggcatcatcacggctcacttcagcttcgacatcacagaattaagtgattcctgtagtctcagccacttggaaggctgagataggaagatcacctgagggagtcctggaaagtcgaggcggctgtaagccgagattgcattcttacactccaacctgcctcaaaaactacaaataaataaaaggtaaatgtaaaacaacagcaacttcagtgtgtagaaagaggagcaagaaaaataaaagaaaaacaaaacgaagagaaactgaaagtactgtggaaacagttggagaggaagaaacaacgcaaggaaaaagcgacacctagtgaatgcgggcggtactgctgctgaccaaagttatctggtctaccttagaaatcccaagttgacggtcaagtccaacgcttgccgcggacatcaggtgggcacggcgaccagagacctgaggactggggccttaggccctggtcccaggtcttccagacagagaagcccgcggccgtgtcaactggatgttgcttgcttcccgcagtcggctgattcgcgggctgatcgggaagccaaaggccagcatctaatcgacagggtccaccctaaagaccaaatgtggtgctcgcggagggaagcgatcagacgcagttggaaccttatcacacagaaccggcccaggtttgaggccgtctaacttggcagacctgccagccatttccccgcagtccgctggttgacccggacagagaagaggagtaaagacacaagggtagtgactagctagtctttcatcccagcacccctgaggcggggagagggactgtgaccccaacagccacccacgggcatcgcgcgaacactactcaggcagggactgcaggggcaaaacctctgacacccgcgcctcagccattcgcacgaggctcgaagaatccggtcccaactcgtggaggaattcccagcgggatgggagaaagaagctcaatcagagaggtggaacatcgagcaggggcgccaaccctacctcgcaacccccagcgctgcatcttggaaagcctgctgttggggaacgacccctcccaaatgcacggccgacgccaatgttatctcgcgagagacagccctgcatgccctggggctccggggcggggggcctgagcaggcccgggaactaagtccccgggggcaaaaggaggaaagaaggaaggtagaggtccagggctgaattatacaggacacgccacaacgctagttttcccgcacactggttgagagccccttgtgtggagggctgactttcaataggttgcagtgagggagttgctctgctccataggaaaccctgacccagaagcagggcgtttaccaatagtttagtatcagattccccataagcatgttatgtgacgggccagggagcaaacgcctttctggccgcaccccgttttttaggatggggggccgcaccccattttttaggatgataagaccggagcaaggtcttggcgcacagcggggcggagcgtccggccggtggcaaaggctggggactggctatctgaggccaaccgagtcttgccagcgctgctgcatcctttcttctgggcgggattctgatttagaggcgttcagtcataatcccacagatggtagcttcaccccattggttcctcagtcaagcacatacaccaaatgtgtgaaactttgattcctctcatactcagcaggattaccatggtagcaacacatgggcaacaacacatggagaacacacgcagtaaaactaacctgtctcacatgggtctaaccatgatgttttccagggcatgcactccgcttttagatgaatccattccactttgccttgcccttcacaaagaaaagagaactcgctggccacagtggctcacgcctgtaatcccggcacattgaaaggctgaggctgacggatcacctgatggcaggagttcgagtccagcgtggccaacatggttaaaccctgtctctatgaaaatacaaaaattagctgggcataataacgggtgcctgttaacccagctcctcggtaggctgaggcagtagaatcgcctgaaaccaggaagcggatgttgcagtgagccgagattgctccattgggctccatcctgagcctctaagcgagactccatctcaaaaaagaaaaaaaaaaaaaaaaaaaacgagaactctctctagggctcccacctgcttttgcagaatcagagaatgtgattgccggcaaaggttgaggggagggcgcaggggaaagaagggg

SEQ ID NO: 1888381 - DNA, 4001 bp, Homo sapiens; identical to SEQ ID NO: 1888380

SEQ ID NO: 1888382 - DNA, 4001 bp, Homo sapiens
gggtcaaattggtcctaattctccagaatacatcttaggggcgtttttgccttggggtggggggaacgtttcccatctgaaaaaagaacatagggatgccagcacccctagtcattttccgatgagcattagccctagagcgtcctctaagggcctaatgcttattcttttccagggtgagtaaccacccatggacctctgcttatcggattagttatgctcaccgatgtagcagtcctgcacctgttttcccgcctcccttgaccacaaagaaaggggtccgggctgctggattctagtggtcctttaccagcatgcccaacattgcctttgcgaccaggggtgagtcctagagcttggctgggttcctgagcatttcataaccacctagctgccccattaagatgcattcctataaaagcagttcttatgaaaatttatttcaaagagggcataggtaaccttttgagtaaggattgagaagtctttttgattctgtaagtattttaaggcttgtctgagtggaaacagctggcatgtttaaggagacaaatttttaggcaatttttctaactgcttccacaagagtctctgtatcaattactgaatacccattgtggtttttttcctcagtcacctgggaggaaccatctatcgtcctgtcctgaagggagttcctcctaggtctggtcggacctttgtgtggtaattaagatttaaatcctctgttaggaaatctgctgggttaagggaattatcagtggttggagttacattacccttttctaacaggatagccccatactttaagatttttgagttagtaagctatcctttttgctttttcgacttagaaaactggcgaggtgttctcacaatgaggtttcctctaaaagttatttttctacttttagcaaagcagttgctgctacagatcgaatgcatctgcgggttactgggttaaggatttttgataggaaagctacgggttgtcagtggtctcagtgatttcaggctacgcccttgtttacactgacaacaaggtagtattgcagtgttatagggtcacgcagaagaccttcaattaccaattatagattttaaatttaccctggcttttaaaggaatagggcacactggttttttttttttctttactttttttttttttttttttactatttctatctttttctttctttttctctttgactccttctttatctctctctctctccgtctctctttctgtctctctgtctctctctctctccgtctctctctctctctcttagccattacaaacttggggccctggcaaggatggtgtggaacgggtcccacgtaactgcccatgttgagagctgtatacctaaatcagaagggacaccagggataagactccctcggttatagcctaggtgcttaaggacgcagagtagagcttccttagatccctttggagatacaacttgctagaggaattaaaagtctgaaccatcagtacctaggaggcagggatcagaggacgtagattcagaggtaaggagaatattggggctacactttcaagaaagtcgtggttgggacccaggaggtatgggtcagaaggaaaggtaagaggcacatgcatgggagactgttaaagagacttctggctgcaccatgatctcaaccggctaccgccgggagctcgggactacagctttctgcctctagttggccctcgacttccccaagaaaattgaaagtggaagctacctccagattgtccaatgtccccaacccagaagggttgggggttgttagaaagcccttccccagatagcctcacacctgggtcttaactctggcggccacgctaatcatttttaactggctgacaagtgcccggtattttccttcaattctaaggaaggataggacagaagagcaagtgaaagtggtccagtattactcaccgctttggaggtcccttcctggttgccaaaatggtggcgagccacttccaagatggtggcaagccgcttctaagatggtggcaagcctcaggttctctaacctggggttcttggcctcacagattccaaggaatggaatcttgggccatgtggtgagtgttatagctctgtcagaagccgtgggtcacggaagagaaccgtggaacccagtgactactgtttagcttgattaggacgaacccgggcacttagccgtgcaggaacaacggcaagcctttagcccaatcaggagcagcaatgggcgcctcgctggatcagaagcacagtggacaccctgccggatccggagggatgggagtcagcggcaggtctgcgacggcagcaaacagcagtggtggacggtgagtgaaagctcagctcgagctgtaacaaacatggaccagaagagtgcagttgcaagatttaatagagtgaaatagagtgaaaacagagctcccatacaaagggaggagacccaaagggggttgccgttgcaggcttgaatgcctgggtttatatcctgatccttgtccctcatgctgtgctctcaggcaatagatgattggctatttctttacctcctgtttttgcctaattagcattttagtgagctgtctaactggttagatgtgagctaagttgcaagtgccgtgtttaaaagtggatgcggtcaccttcccagctaggcttaaggattcttagtcggcctatgaaagccagctagtcctgtctctcataacctcatgtgactaggcacagtgaaaaagcagtcgaagcttcatttgcacaaagttattgaagacattatataaaattacctttaagctatatgtatcaatatatatgaaatataaatgaattttgtgtttagacttgggtttcattcttaagatatctcatcctgtatatgtaaatcttcccaaattccaaacatttctggtcccaaacatttcaaataaggaatattcaacccatatgataggagtgcaaaaagagaaaaggatttgaaaatgaagagggttaaatgcaaatgttactcagaataaaatagatgatatttttagcattagcaatcttacatcctagcttcaatatcatttataattttcagactaacaaagtatcatcacgtttttctcactgttaaataaatgaaatatcttgtattatttaaaatatatagcactagtttttttattttattatccgtgtgtgtgtgtatttgaccacagaatgtgtaagattatagttcttagaaataaaagtcaagacaagttattaaaataattaaatataatatgcaaacttaaatgtaattttatgtagaccttttcttattctgagactgctaaatttcagctatgtgcaattttacaataactcccggaagaccatatcttattacggacatcattatgttgaaagtgatacaaatttagaaccccaaatgaaaaaattaaaaaaaaaatgtttattagccttactcacttaggctttcttgtagaggaaataagaaatgctaaagattttgcatagcaaagttgaagtctgttataacagtaggagagaagtaatatacaaattcacttgttgatatttttgaaagaaaattctaaaagtgtcctctttcaaaatatcagtactttagaaatgaggttcttttgttaaggtaacaaaattgccctggttatattaattgtgaaatgactatctaaagattgcaaataataattcaattgaaaacttaattatcaaaaaaagttaaataacaaaagtaaactcctcaacatcatctctctcttaaaaccagtgactcttcttatatttctactctcaaattaaaaatgtcatcaacaggcttagtggctcatgcctgtaatctcagcactgtgggaggcccaagaaggaagatcacttaaggccagagtttgagatcagcatgggtaactcagtgagatcccagcgctacaaatttttttttaaattagctgagtatggtgt

SEQ ID NO: 1888383 - DNA, 4001 bp, Homo sapiens
cgtttcacacacacccaagagcaaactttcacccatgcaatgtttgctgtataagcatataaaagttacctgtataacaaatgtttccatcaaaggagaagctctaccagcacacttgaaatatgatctataaaagtgaaatatacaatacatagttattatattagcactcataggaattagcacttataggaagcaaatatactacaaattagagtaaatgaaataaatgtcatccagcaagtaacatcataaacactggtctgaatgatttcatatgtctggttaaagtttgttttctttgtgttggttttaactataaatcccaaaataaatttgcctattactcactgattttatggaaattgtaagttgcttatttaaggacattaaaaatactctttagcagtacccccctttattttttactgtgaagctgtgttaatttcagagaagttaacattaccaaaaaaacaactattttaattaatataaacattattatagatatgctatatatctatatatgtggttgcataatgtgtgttttatgtacatacagatgtgtatatatttatatactatatatatatatatataaaatgctaactctagccttataaacccttttaaatttcaaataaaaatcataaggtatgcctgatgtcactttacattttaattcagaaaaaaattataaaatgaaaagaaatccctaaaagagaaggaatatcaagaaggactcaattgctaaagtaggtcaaggacaattaaattgctttcttaatatgtctgcttataatttgattatttctgtaaattatatttttacaaagttcctttgaaaatattgttcttttgttttgataagcttttaagacacattcacacattttatttcctgtcagccattttctttcatcataaaagtcattttgttagggtcttgatttaattatagactctattcattagggcaactgaccaactcaagaatccctactgctttattcaatagaagtagttcctggagttttgtgtttaatgcactccattttccctagttcataaagtgtgaaaacttatattttattcagtatttttcttggctctctgattgaatcagtttccaaggaatgagacatatgtgtgagttatatctcctttacaaatattctttcttgcaaggaattactttttcattgccaatatggggattggctaggctaagtactcatatatgcctattgtgaaaacatgttttattgaatggccttaaatctttatgtttcttgttataaaaatccgtaagaaaagaatattgcaaaagatttaaaaatttttttaaatgtgtatatttgtaaggttaatttacatattaattgttgtcagtaaaattaattgttgtcagtaaaataatcttgacacctaaaggactttttaataaacacattgacagagttgtttcttctgctatgcagcctgtcttctgcaccatattgattttaaggtccttacgtgtggaatttgttttggacaatattggatagaaggccctcgaagagtataataggggtatgtggtgggggaaaattagtatttcacttttcttaatagccattgttgaaccatgcacccaagcactacaacaatggttctgtatccacagcccacaatgggattcaacctatgaactttgtaggggaacaaaaaagttaaatctttatgttcactaatatatctaactgaaatttagtacatcttagatatatgcaaacaatacaaagtagtattagagtgcctggcctatcttgttgccaattaaaattttgtatattttcatatcacattaccttgctgcagatatactgaaatatgttgactggagaataattctctgggtgaccttagaccaacccgtttctccccattttctcacttagagttctcaagaatgattgcagaatgtgttgtgaatgcaatgtcctgagataagaaagaactatctggaacagcctggtctctttcccagtccttccctagaaacagaatgtccttcaatgctttaacccagtgatccatggaactctgtggttataaaacccattatgtgctggtttccagggcctcttagccatggtgcaattaaggtatgcacagataagactctgtctaccctgggcagctttcctgatccatggcagtctggcttacaagcaatactaggcttctattgtctctttctgtatatttgtaagtaataaatctacttcatataactcattatgtataggtgttctatctcatcaaacaaaagcaagttgggaaccagtgcagagtgaacctgcttcacatttaaaatcaaagctaccacaatattttgctacttattagtccagccttaagacttcatcatttgatgtgtcagtatgatcacatacataactgaattttataatctctatagtttgactaatatgtttcaaaataattaaatttatttgtaatcctaagtattttattttataaatgtataaaaattacagtgagcacacaggaaacaaaggcaaaaataggccaatgaggcctcatcaaacttaaaagttttcatttgtcaaaggatatcacgaacagagtaaaaagagagcccatgaaatgggagaaaatatttgtaaatcacatagctgataagaggttaatatctagcatatataaagaactcctacaattcaagaacaaaagttcaagtaacccaattaaaagtaggttaaaaacttgaataaacatttctccaaagatgatatgcaaagtccagcaaacatgaaaagatgctcagtatcactaatcatcagagaaattcatttttctgtgagatatcaccacacatccattgggatagaaaccataaaaaacaaacaaaaccagaaagtaacaaatgtgttagcagggatatggacaagttgaaacccttgtgcattgttggttggattgtaaaatggtgcaacctttatggagaacaatactgacttccttcaaaaaattacaaataccaatatcatacgataatcagcgatcacacttctgggtatttaccccccaaaaagtgaggttctcaaagagatctttgcatatgcatgttcatagcaacactatttacagtgtagatatagaaagcataatagttgttaccaggggctgggaacagggggaaaggaactttgttgtttaatccatacagagtttcaattctgcatgataaaaacattttggagatcttaacactgctaaactatacccttaaaagtggaaaattgtatgatatgtatgttttacttcagtaaaaatcatatactgagaacaagcctgtaagcttcactggattttcccagtctttggtgtgaaaagggttacaaatccctacactagaggaatattggacaagcctgatttgccccttcatactgattctttcagaacaagtttattaatttttaatcttctgagatgaatcatcatacaattcctcagtttatgaaagtatctctgcacagcctagcattttgaaaggaaaataaaataataaataatgttcctacccaacacttacctgaatttagttgagactgccatgtgtacatgtttgaaaaagatttgggaataatcagcaagaaaaccctctctctccttcctcaaaaattatctacaactcctagtattttcttcataatttccagatttacataaaaattatgaaaatctagttaactaacatttaaaggagaataagattttatcttatagacagtaagtgccagatatggagataaatgatctgattatcttactagaattgaatttttgcggctgagtttttgaataaaccaagacttataatattcctgtaccctataaagcacattgactactgattctttcctgcttctgaaaaaggcacaaattgagagggaagtttatatgttccatctcagatacaagcaata

SEQ ID NO: 1888384 - DNA, 4001 bp, Homo sapiens
tgtaacataaaatcttagtattcaagtgtctacataaaatttaaccttagctaaaagtagaaatatactaagaaaaagatgaagtaaaaattaaaattaaaatatctattattttctcttagtagagattttgctcattcattttaattattgctcaattcaaattatttttaaaatacttatatgtaaaatagtaaagagaataacaatatgttcaaaactaaaagcaacacactgtgggtgaattaagcagcaaaaccatccacatatgaaaggtagtctttgatatatccctggactccatgtactgtttatggtttgtacatttttgtttgccagtaaagcgcctgggcagtattagacaagaacaaccaggagttcagttattttactgtacacaacaaaatgctaataatgccaggactctgcaaaggcaattcttgctaaaaggtcattgtcagcaagcatcgttgaacttctgttgatcttcattccagagattaattgtgcttgattgcatataatattattttcattggaacaactgatgttgactgagagagtgaggtctgatctccctgggattactcaaaggattttggaacacagcatttattcttgtcttcctttaatctagtgaccttgttgacatgatctgttagggtagttgtttcaataattctatatttattctgttattttgaaaatgtttcttctctgttttttaattcaattcacagaaaaactcagaaatcatgatatttattacatgtttcctcctcatattttcaaatttaaaaaaaagcagaaaacaagagcaatagcaacaaaaaaacaccgcttgagtcaaactttcctactaaagtatcattctcgttttatgatttaagtagtttagataaaataaacacgagcatttgatgtattgtagtcaatatgcttaatgccattttctttctcagaaagttgtagagtaggttttcaaggagaacttttaaagtctctattttaatttttttgttctaaaaaacctgtaaataaaactgaataaataaataaataaaattatgtctgtttttgcataatattttttctattgttaagatgctctagactgaattacgtatcctgaaattctattttgaaattttagcccccaacaatttggatataaggcttttatgatgttataaaagtgcccccctaatctaacaggactagtggctttataaaaggtggaagaaagagagttatctttctttctccatgatcatgtaccaggaaggtagccatttgcaagccagaaggggagttcttgccagaactcaactatactagcatcctgacctcggacttccagcctgcagaactgtgagaaaatacatttctattgtttaagtcaccctttctatggtatgtttttatgacaacctgaataagatgtaagagattaacaaaacattttttactcttatcatctgtggtacagagacatgtaattaaaagacattgcaatggaatatattgtttaattagatagcatataactggaaagtatacattattggaaggtattaccagaaagcaacttggtacttaatttgttcaaaattcaaatataaaatctattttcctgttgttgtctgtggagaagaatcataccatacaaatgtttctcaggaaaaatatatactgtactctttttaaaagattatttgtttctgaagcctacttctaaacttcccaactctttggggtttctttctgtactgttttgcagttgttttcatgatacattatgtacctatttctaaaactattgataggagtttccagagatcagggagttgtaggtattaatacatttcccacctctcttggtgcccagttcaggactcgttatctcatgggtgcttggtccatactgctgatgtctgtaataactcaacatgaaaattaatgtttcattctcttttcctgattttccatgagaaatggcctcaaaagtcctgagctaattgtttctacgttctaacttgtaatgtatttggaatgttgagtttagagtaagtcttcctctgattacctcatgtgaacacttaaatcttttttgggttgttccaaatgagtcttcaaatatgaaccttttcaattatttattaaaaatcatcttgcttcccataatatattgatttttaataaataattgaaaaggttcatatttgaagacttatttggaacatatacatatatattattttgttctctttttgtcagttatatacaatttctgtcattttggaatttttgccattttggaagctcactgggtatacttacactggtcctgatcataagtcatgtgtaatgtcagtgaaagcacccactataataacaaaaaaaaagacaagaatccttctgtggagtatctctaagcagcattcactgacttaatagaatgccagaaatgcaaaatccttaaattgttaaaataagacttggcgatttgtcttttccccattaggcttaatgcattttggaagtcgatgattagaatgaggaagggaactcacactgtaatagctaagcctgatgaataaactcacatgatcatcattaatatcaagccactggtgactgagacttctgtacatgcataattattattcttggctgggagaaggtagagaaggctgtaggagctacctcctcatttgattgtcacattccctgaaatgccttagcctgtaaatcacactttcttctagacaagaacaccttttaaatccaccaatcatttttttttttactttagatttctagtctgtatttcattaggcatatttcccacactttttgtagattttgtgagacttgtttaaaagactttactaaggagaaaagtcttattctggaagaatcatttactttccttgttctatttatagcacacaggatttgacaaacaggtactttttaattccatccctaaggttgaatttccctttatgtttcatgaataagggaactcaatagaagaaagcaacttacccgttgtagaaatggcatgaaaataacaaatggaatcaccctcccacatttccatttacttttactcttctaaaataaagtttcttaacactcaatgttgacattgagtttttcttctgggaggctgtcctgagcattgtaggatggttagaagtatccctggcctctacctactagattctagtagcatccccatgctcccagtggtgactgtcaagaatgctttcagacattccccactgctgttattgcagcatctgttaaaaaccacatatttgtgccaaatagattaaactatcttcttcccagtaaacatactcttcctcgaggacattgtctttcaaagtccagtctctattgttacaaataatatttaagtgatcatgagaactatttctggtattttattttattttttactatgtctgtgtgagtgtgtgttttgcttgttttacttgtttttttggtttagttttattttggggttggcctagatacagaagagataaatacatattaacaatgcaaactcaataaattctcagtgacaaatttcacactatgcttgattatattgttaatattttcactgagactaaaggccattaatatgaatggctagagcattgttgaaggagacagtgagtttaaaattttgttttaaacaactgaccagcattccttcctgaccatggaagataagcagtaagggtttttgtgtccttggcttcactttttgataacacattacctctgaacacattaaacaagtgcaggaaaatggcctcattaaacatgacttgctatttaccaaccataagtgcacacacatacaaacacaaacacacacactcacacatacaccaagcataggcctagagaaataggtctggttataaaagtatgacagtgattcttatcaattctctttgcaaatctacactcacatt

SEQ ID NO: 1888385 - DNA, 4001 bp, Homo sapiens
caatgagaaacccagatctcattgtgcttacatatttacctatttgataagatgccctgtatataaccaaactcctgcctctgccatgacccctgatccatccaggtttactgcttacccaaccctggaagcctgggctgcctgccacatgaagtcccttatccccttgtagaacacttgccaggtaacatacaggatgctcagttaaatttgaatttcagagcaacaacgaattattttgtagtatcagtgtgtcccaagaaaagttatactgcttatatgtataactattatttctttaaaagcatcagtatagtttcattgtttatctgaagtttaaatttaactgggggtctcgtgttctgacaccacagttcaggcttctcttagcataggtccgactttgtattcacttgctgctcgcttcatatacatgtcccttcccttcaccttagcactctggctcccccagctaagctgaccctctgtgagacacaatttctcattctactgtgtgctgtgacaccctgcactgagttgggctgtgacgtccagccagcctgaaattcgccaggcccttcctcagctccgccacctggtccagggcaacccacccgttacgggctgtcctctcactctgaaacctcaccttgagccactacacctctccccaactcccttgtggatgtctatgtcctgcttcacccagtatttttaggacccaatgttcagagagggaaagagagggaggaaggaaaaagaaagaattctgaaacatatttgaggatagattgcagagtttaacactaagtgctcatttcatgataatagatcatcatgaaaaacacaggaaagttctactaacagcaagaataatttataatttctatttgcttccaaaaacagaaataaaaggtcagaagtaaaccgttttggactgtttttccccaagtgtgaatagtaataagcctgctttgttaggagaaagaaaaaaatcaagacggaggggagaagaggaagagaaagaaaagaataaaagagaaagagaaaaggaaagagaaaaaaagggagggagggaaggaaggaaggaaggaagaaggaaggggagaggaaaagaggggaatctattatgtataatgttaaacatttaaatggtatgaaatgctttaaaacactaaaattttacattttattacttgaataagaaatctacacaatctggtagatgaggcagggaatgttgcctcccctatgtatatatttttttctttttcttttgttacaaatctttattttatttgtgctagcaaagtgcccagacctaagtgatagtagacaatttatgtaatctagtgagtcacaaatgagacaattctatacccctagggagtggtttgaatactgtggatgtatttttggtttcaaaattattgggaagaggaactagcttggtgaacatgacatgagacaatctaacatactgaagaattattcattcaaaacatcaaaagtgcttccatggagaaacactggtataagcctaaagctgcactccacccctagttttccatcctttctagcagcttacacatggcgagagtacccagttctaatcaatgaaacctcaaaggaaatgtgaagttgctctaggaaagctatttgtttctaatgaaagatgacatcatagaactcaccatcactttccacttctttcttcttcgaaagcagccatctgtgtccaagagaactatagaggcactagatgttgcactgttaagagctgagccaaagctgcacctcccttcctccagctacggaaggaaaataaatccttacttgtttaagccacagaggtcagtttttctgttattttcaacatagcacattcctaactaaaactatggtatttttatttcaagaagagaacatttaaatgttcggctttcagggatctcctgattagaagagatgactacgaactcccctttcaacctatcttgatgatctatattagatgaggtgacagagggagggaggagaactagaaacagggatatctcctagtttggtataaatgcaaagaagacttcattaaaggcttattgaatggtgaatgccttgaatgctgcctcttagtgcccagtagcccgagggctatgaagcatgtgaaagtgacatagagaatttattctctaggggctaaaggacctatctgttaataacactttctaactgcttgacattcagctaaatacttaacctaagattcctcagttacatgaaggtaataatggttgctacctcaaatggctcttgtgaggattaaatgaggtaatgcttgtatacagtgcaaagtatagagtaagtatcaatgaaggtaaaatactggtgatttttcatactctctacataattttaaattgtgtttctttggttaattacttttggctgttactttttttgttggtagtgaatttaagaaccatgagaagaatgttatccagcaaatgctgtatactttaacatgcttataaagactttttaaaagtagcttcatgtatcccttcttcatttttatagtggcaatttaagctaactagctggcattttatcatgcatttacagatccacaactctagtaaataaagttatcagacaggaatacaattcagaaatatatttaaagagcaaagcttatttttctaagaattttactttgttgatttaaaaaaacaatattttattgtcttatctaagtgaatttcatatccatgacaagtttgttaatgttatttaatcccctcagcatatcaatttaaagatcaaaggttaaaattttataaaacaaattgtgaggtaatgcaatgtcaatcttgtaatgttttatgagaataatgcaattaaattataatatataaaattcttacatttctaatcaaagcttcataaaatgaacatattgtatagagtgattacaaactgaaaaaacaattttcttaaatagaagatgtgacagaacatagttaagaggatttactaggtaatacattttgaggacttcttaaaacaataaactacacatctttaatatttttaaaactgccagaagtctgtatttaatataggatcatgctgtatttttgaacctctgttttgttgtaatgatatcatactgaaatgtaatgcaaagtaaaatgtatacaatgtaaaacgcaagtcttacatatgttgctattggatacactgcttataaagctaaggataaaagataactctaaactctgagtcatacaacagttataaagcaaatatgcacatttatatctcaaaagataaaattgcaactgttactaagcaggagtaaattctttgctgaatcatccttattgcaaacatgttttgtcattagtggctagattgcccaattcaattttcctacgtatcaatcagtgcctaacgttttaattttactaacccctttggaactattatcacatcctaatattaatgccaattgtagtaattgtgcgctaaattccctttgcctctaaaacatatcttttccataaatgtatgtgaacatttctgaagactcatttttactaacatgtattttattatataaacagaaatatgtatgacaaatatataaaataacagacattaatcatacattaagatactattataaaacggaaatatttggaaattcaccttagaagttttaaaaggagttgacaaagagtttaagtttgtttttctaccagtctgtaatatttatgaagtcagacagatctgtgttctcctgtatgtagccctaaacaccaagcccaatgcttggaatttaatagaggaccaatgagaatttgttgaattgaaaccaattgatccttattatgctttctagaaacagggaaaagaaaaaatttgaaagacttggtaatttctctttcacaaaatgatcattcaagtagatattaatagaaacagctttcacgatt

SEQ ID NO: 1888386 - DNA, 4001 bp, Homo sapiens
acaccccgatctgcattttcaacacggcagactggggtaggatctatggccatggaacaaaggcaggttcgcttgtaaatgctgaggcaggaacaggcagttatttaaacaagacggcattaaatctacaaaaaaaatccccgccatgcccagagccagctcccaggtgaccctggcccatgggatggcgtctcctgccaaggacacagggctcccctccccggggcagtttgtggcaaagctggagctggtttcagtgttgagacacccctccctcccccactgctttcaccggatagtgtttccatttctttctgggttcctcttccatcctcttggctccactcctgcaattcgcacatggccctcatgggccaccgtaccctgcaccctacatgtccttttgcagtatcacctgccttcacttgactgattctctcactcttccaattccaatccccacaagaagaatttagagggtcccactcatcttttcaagttaggaaaaccagtcaaaaattatcagcaggtggtatagacagcagccatttaagcctattatggggcggtgggtgggcaggccatgactgacacctctagcaaccaatgagattgaggaaagagactcttctgccttccaattggtcagcactgctcttaaaggccctgagctgaccagacgctgtcctcccacctcgcaggtggagagggaccctggggccagtggaatgtttggctctattttctgcgactaaaatataattgtatttgtctgtgatctagaaagtacatgactttttttcccatagctactttattatcagctgtaagtcatagcaaccatgacccaagtcatttttgtacgtttatcttgtttttattactaataccagtgctttacctacatacagtctcttacctttgacaaattctttcacacatgctaatttggataatatacgaaatgaagcgtatcttattctctcctttccatagagaaagaaatgaagctcagagaggttgagtaatttgcccaaggtcacacagctagaaaagtgagaccgggattagaacccaattttttggactcttaagtcagccctccttacatgtttttgaacgttttatggagtattcagaaaaatatttcccgaataaatgagatctcactttcccctctctctcatgttttccattttggaaatctttacagtttaagggtcaagatagtagataaagttttttaaaaaataaactttccacaagtgcagaagtaaaatttcttaataaataggaaaagattcaggacagataatatgaatacactgatgaaacaataacttataagatgggcctggcaagaagtaaaagtgtcccacataaattctcactgttgaaggaatgccccatcattacagcagagggggtcatagacacaggctttatgcctcgtgctgaatgtctaaccgcacgcagagttggtgccccatagacagagcctctcacccctccccagcctctgtgcaatgcagacggctgtgtctgtcctctctggcctctgagaagagatgagtgacccaaaaggataagctggctttggactctgtcctcctctggggtatcagaactaggtaaaaaccctcctgcatcttgaatgtggtggctctggggacactctgggcccacatccttgcttctggccacatttttatggttctgaaacttatcactgtgtggcagtttgccagagaatgaggagaacggggtcatggggtccccgccatgcccagagccagctcccaggtgaccctggccctgtgaacaaagttcacactaaaacaaggaagagctttcctgccccacctctcttctcatatttggggccagtcgggtggggagaaaacttcttaccacatgcagcctgtgtactccggtctggtgggatagcaaggtcctgctgtgcacaggtcaggccccgggtgtcctcctgccctccacccagccactgacaaatagagctttcctttgttttgccctgtgaccaaagttcttatatgccttaaaggggaaagagattttttcttatacaaaatcacccagaagccattcaaggcaaacaactcacccaagggcaatcaggaaactgctgacagaggccagccaaccagaaccagggtccctgggcactgggtgcagagcccagtaccctgaggaagctgccatcaaaggagtgactcatcccaaatgatgtcggcattgaccaatgaaaacaaaagctgaggtagagaaactgtcagaggggccttacctttccaagcctgggtaccaacactctgagtcctcattggatcttcttttgaagaccgacccctgcagggagaccctcgatgagtaaaaaatatataaacaaatataaacaggtcagtgagccgaccaatcacatcttacatccgatgggataaagccagtgtgtcagggctggccatgggctcaaaaatgtgtgggtaagaattaatgtggaatcatgctgggcttggtggctcaggcctgtaatcccagcactttgggaggccgaagtgggcagatcacttgaagccaggagttcaagacccccctgccctacatgggggaaaccccatctctactaaaaatacaaaaattagccaggtgtggtggtgcaggcctattaattaatcccagctacttgggaggctgaggcaggagaattgcttgaacctgggaggcagaggttgctgcagtaagctgagattgtgccactgcactccagcctaggcaacagagtgagactctgtttcaaaaaaaaaaaaaaaaaagaattaatgtggaatccacacatgttgaatcagaaaaattttgtactgccctacctccctttagcaaaggaggacaggacaatgaagaatctattggcaaagcagagaaaacaggctatatcgcttgccaagcccctggaattctgagaaggtgcttctcctgtgatagcggtcactggtacggcaagaggttgacaatccctggccaaaactccgaagggggtggcatgtttctgcagaaacgcagcagagggtcaggtaccccaaatgcaccctccttcctggtagcaagcagggtcccccgctggaagagctgcctgtttggggcaggttttctaaatattaaaatgtcagtggccgggtggagggcaggaggacacctggggcctgacctgtgcacagcaggaccttgctaccccaccagactgcagtacacaggccgcatgtggtaaggtttctccccacccaactggccccaaatatgaaaagagaggtggggcaggaaagctcttccttgttttggtggcaggcaagtgtctgtggtcaggagccatggagactcgtgccacggactgcgaagccacccagccatctggcccaagctcctgtgaccggaagagcttgttttgccctgttcccccagagccagcagcgcagaccacagggggcttgcattatgttagcaaatgaagaaatgctttaacaggaataggcaaattgtcatctattttaaagatttacttctaacatagaaacacaatgaaaatccagctatattatccacagaacaactacagggcttacaaaaaaaaccctctttcatcatgcatgtcagcgtgacctggcgtgtgagcccagtgcaagcaatggactatgtttctagagaccttatgcgcagctgcactccgggagagcacctaaagtctaggtctgaggtctgggggaagtaaggcccaggcaatccctctcctgaccctctctacgttggatctgatgtttcttccacaaactgggaagttcaggttccccagaatctggctttggataaggggaagcaggaacaactctacttttatataaagctggacatttgtccaaaattgcttccttgttgctgtgccacttggggacatgaaccaagtcagatgaggcttcattttggcatca

SEQ ID NO: 1888387 - DNA, 4001 bp, Homo sapiens
caacttgatccataatatatcaatgtacaaataccacgggttaaaccatacctctaaaataaatcaactatatatataataaaatcccatatgcatgggagaagatgatactatttctagtctttacttttttatataattgaaagggacttccattcaatcagaaacgcttggacattcattttatatccaaatgataaagtatgtcaaaatacacgtcttagaaaccacttgtatttagcttctgatgggagaaaaaaaatgtggatacagcatttaataaataaggtatgagagcttttcactcaatatccttatgatccaaaaatctgctgctgctaaacttaaaagcaattactgttttataaacagtgagacataattcagaaggcacttaatccaacatgtgtaaaatctgtgtaaatcatcaaaagtgactagctgatggagatttctggtttctggcactaaatcgccattggcctatggttcttaatattttccttcgtcaaggtacacgactataaaactccatgaggattgacaaatacctcttttgcaaatgagctaacgtaaaatacctcttttgcaaatgggccaagaggcagtctataacatatgatcatttaagggagaggtaaggtcctggaactaaattgtcctaaattgtgttaaaccacatgcccacgacagactgaactcatccctactgatagatttttctgaagagtatagtgcacagcctttctggcagctcacaacacttctaccaggcactccacaactgacaccatcaaggtgaaaacatgcagatgccttcttagcctaaccaataccattagctcagatttcccatttatctttttatcctttattattttctccttgcttccagcattggattactttcttttaagtcatatttctttatataactacactttcatccaatgcgtgccacctcccatggaacttgtctctttttgtttttttgtttgttgttttttgagacggagtcttgctcttattgcccaggctggagtgcaatggtgcgatcttggctcactgcagcctccacctcccaggttcaagcgattctcctgcctcagcctcccgagtagctgggattacaggcatgcgcccccacggctggctaattttgtattttcagtagagactaggtttctccatgttggtcaggctggtctcgaactgccgacctcaggtgatgtgccctctcggcctcccaaagtgctgagattacaggcgtgcgccaggaagttttctctttaagcttctcctgtgctggagagttatggtgactaatatctactaacaatcattagccaagtgtgatgatagaaaagaagacatagttgtgagtgaaacacaaaaagaaatagcgcatagtacagacttttttggaaaaatatttgtatacttatgacatattttaccataaggcacctgattcaacacaaatatggctggtgatggcatcgaatcgggaaagcactcattgttaacaccccctctaaagtgcgaaaaactcaggtcattttctcttgacaatggcactgaggttctgaagaacttccacagacaggccctgtactctccaatttcttttctaattgctgttaccaaatgattgacccaaaaaagcaaaatataggaacattaactacattctcttactggtaatctgatggcattttacctcagtaaggaatatttacagtgagcagtataaaatattatattgacgtccaatttccaagtgaaaatgacttgttcacggggttcaccgtacgcttatttataggcaactctggtatgaattatcatcattattcattcattaactcattcaacaaatattccttgagtttttaccagaaactacgcctggtcctgggaacacattgcgagatatgcagacaggatcccagcctgcaggaagcttcagtccagcatcagcactagaagggcagcagtttagaaagtgaaagactttacccagagcttggaagctggtgccggtggtgggggcgggagggggacgggggaggcagtgggggaggcagcagtgggggaggaggtggggggggaggaggcggggggggaagaggcggggggcaggcgggggggggaggaggcggggggaggcgggggggaggaggcggggggaggcgggggggaggcagggggaggcaggagaaagggggggagggggaggcagggggaggcaggggaaaggggggaggggaggcagggggaagcaggggaaaggggggagggggagacagggggaggcaggggaagggaggagggggaggcagggggggcaggggaaaggggggagggagaggcagggggaggggggagtcgggggggccgggggaaggggtgcggggggggtgggtccgttggtggtatgtgaataactcctcctctcttctcaggcccagtcccaaggcgcagcgtgcgtcagcaagacagcagaagcaggaggagagctggcgggaagacatgcaccccttgaagacccagagagaggccgtctgtctaccgcgtagcagttacatcagactgagacacttcctgtttacaggagactataaaattcctgccccgtgctcatttggggctgacgccattttaggcctcagcccatctgcacccaggcgctcactgaaacagtgtgttgctccacaccgccttgttttgcttgttggcgcgctctcagggttccgaccaatccaagagccttgcagaaagcattaacgtgcttttctctttggcagagtttttctttgctctgatcttggagacatccctctgcctagtggaaacataaggaatacagaaagaatgcaaggagatagaccaacgtgagattctccttcatgcactcaagagaaagatgttgcaggaagagctagtctttcaggctgggctggtgacctgagaaagaatgtccagcttttcttctccacttggcatatcaagagccaggcgtggaagactaaaacaggaaatgtttataaaaactgttcagcggttcgccaacaagaagtggtaaagtagcaaaaatggggatggagatgccaggaggaaagatgccaggggtaaagtgggaaaatgggaacctgaagccaggaggtcaagccaagccaacaggtgttctgtttttcagtgagtatatcctgtctttccccatgtgtcagtttatagaaagagcaacctaacaggctgccccatataccaatccagagcttggacatgtcctagcaaattcgacagcccacaaagcagtctgggctgggggcggtggcacgcctgtaatcacagcactttgggaggctgaggcaggaggatcgtgtgaggcaaggagtttgagatcagtctgggcaacatagcaagaccctatcactacaaaaaaattaaaaattagccaggagtgccagtgcacacgtgtagtcccaactactcaggaggcaaaggtgggagaatcacttgagcccaggagttgaaggttacagtgagctatgatcacactgctgcactccagcttgggcaatagagcaagaccctgtctctaaaactctttaaaaacaaaaggcaaaaacatttcaaaggaaacctcaaagatcagctgtcccaggccacttcattctcccatagcagagaccctgagctgagaggcagtaagccaagtacctccctggccttgtggatcccagcctggggtctgcaggtagcaaaagccagccagggagagatagcagatgtgtccccaagatagtgcctgagcccaaagaacagaccagaagttcaccagttacagacaggagaatcagcatgggggggaagctgtgtaaacacgcaacctcaccacacaccctgcaacattttagggacaaacacaaggggcagcgctttgagcatgtttctctttgggctgttaccaaaagaagctatgtaaattcaacagggac

SEQ ID NO: 1888388 - DNA, 4001 bp, Homo sapiens
acatcacagggttataagaaagcacccaagggtgtctttcattcctcctctctgatcctcacaaccatccaaacacagcccgatctgtccttgattcatcttgtgatgaccaccccaacagcagacccctgtgacacccctcgctgaaatcctgcctctcccccaattcttattccgttctctccacaaccaaaaaggtcaaggtggcatacacattcctccatgcccccttccctgcaaccccacctctcgaggggtaagacccttccctgggtgatcacactgcactggatgtcacatctgtgcacagggctctgcacactccccacaaccccactttactttgcttcccctggacccagaggcagagttctcctggtcttatcctacctgtaccttctacctgcaatattctgcccctgaccctcctagggtcctccttcttacttttagatctcaggttaaatgttgcctcctgggtgctctcccatagcccctgttctcccatcactggattggaaatgtctgcagagcacatattcccatcacttgcttgtcttttattacctgaccttgcccatcactaaaatgtaagttctagtggtctgcaggcctcatcgggttggcatttttcatctctgtatcccaagcccctagaacagtgcagaagacatgatagacactccatggatatttattaaataaatggatgtgagtgaatgcaataaaacaagcactttcagtcaaataaacccaagagtgctggtcattctccaaatttgttttctgcctgctctgtgccatggaggccaactcctctggcttgcacttcgcaggccctctttcaggcagctgcctgtgcacctgcagtcaatgagaggatgggagcaaaaagtgggggcagttttccctggtcccttgacagggcctcactgggctcagatgacatcacttcctctctcctcccttgaaacctgggggtgggaaaccttggcatctgggaggcttcccatcatttgtctgagctctcatccctgcccacagctcaggaaacttcctttgtcaaagtctcttcatctgcaccatttagcatgaactgttccttgtgggggcaatgctccttctgcgtgcatacaatttagatatcttttctgtatatacagaatgtatgcacataactttaaaaaaatttacttaatttttaagggggtggtttcttcattttctgctttcctctttagctctgcttccaagttcccctcatcactgcggtccctagtgaaatcttccaactgcatggtgtccagcacattttcagccagagattttagttggctcgtggtatctttcatgacctgttttttttgtgcattcaaaggtttccagcctttctttctcctccttcctttcctgtactctctgctcccatctcgcgatctcttggtcgagcacttccggactttctgcaaaataggtgttttcattcaaactgtgttatttccttctgaagttttcctccatcctcctttcatccttttaagatgtgtcctgcatcaatcacttgggaacgcttaggagactcacttttccatgtttttttttccagaaagcctcctgtgtcctgcagagaagacctgctcagatttttattaagggtcgataagcagagggattgtaacattcaaggtctggcctccatcaggggtgacttgagggcttcctcagcctgtctctttagtccagtgttccaccttctccatggacctgctggtgagaacaacacttttactaagctcttttcctctttataaagtgtcatctcttaatgactaagaccaccacagcaacacaaaccaggacctcccagggatgcccagggacccccggggctcatctcatgatctcagccatcaccagcacagcagcccgcagcagcttcagagcggctggagagacatttggggacgagcagcccctctgtggctctgcctctgtttgccagtggcctgtggaccacaactgcctactcgggaccctgcggagtgttctgtatctaatgcaaacaggtgcctggcaaccaggacagataatcagttgggctgggggaggggagcaagccagattctaaaaacagtgtccctgacattgctgtgcttactgcacagatagaggtgatattatattccctgcccaggtcatgagggaactgggagtggctgacagcactctggagctcagccacaccaggcccagctggccccacagcaaacccagagggtcgaagtgaggctacgccctgtccctttctgtccacaagggcctgtcagggcacagtggtggggcctgtccctgggtgaggctcagtctcctgatttcaagtttccttctgcacagggaaagtgggtcctgcccaccaaggtccgagggaccctcctctgaagcccctctctcctttgtgtttggtcaaggttagcagatggggagaggactgaagagtctccccaaaggtctaaactgagagacctggattttcaatgtaacaatccaggagaaataagtagatggagtctaaaatttctggtggagtctacaatttcatggattttctatgaagctggtttgtccctgttcagcaagtgtcctgagtgagggtgactctgctttgggtatgacaggttgacccaagctccttccctcatgcctcccaaggtggccctgggaacagtctccaatccactgagccgtcttcagaagtgcatgtctactacaaggggatggggccttctttcggctcatatttgccaccttttgcttattaagctacttctctctcctagaatccctctggcagaccgagactcacagcctcttgttcatcctctgggactttgccatgagcaactcgctcatggtccctttacccagaatgaaattagagaactgtccgccaaggccagccctggggtcttgagagattgcctagctcaggcagtaggggccccatggatgtagaggaccaaggctccgactggccaggtggtgagggccggggtggaggtctaggtcagccaacgcctgaagcgatagttgtgataatttccttctttccttccttccttctctctctctttctttctttctctcttttttttgagacagagtcttgttctgttgcccaggctggagtggagtggcattatcatatctcattggagcctcaaatgcctgggctcaagcaatccccctacttcagcctccccaatagctgggaccacaggcatgcaccaccatgccaagctattttttttttttcctagagataggatctcgccatgttgccaaggctagtctgaaactcctggcctcaagcaatcctcctgccttggcctcccaaagcgttgggattacaggcatgaggcactgcacgtggcctctttttttaaaaacaaaacaaaactgggctttattttttagagcagtgataggtttaaagaaaaattgtgcagagatattacatagacccttgactcctcccacagtgtcccctattattatcagcattttgcattgttgcagtacgtttgctaaaatggatgaaagtactggtacattattatccatgaaagtccatagtttacgtgagggttcactccatgtgttgttcagttctagcagttttgacaaatgcataatgtcaggcacgcacgattacagtaaagcatagaagagttccactgccctaaaattcctcctggctccacttgctcacgccgcccttcttgcccctttgccctgatactttttctgtagtccacattgtctgatataaatacagatattccagcattaacatggtatatctatctctatctctttacttgtattctaattgtgtctttatagttaaagtgagtttcttgtagacaacatacagttaggtctggtttttttaatccacccagctagcgtctgtcttgtaattcacatatttagaacattga

SEQ ID NO: 1888389 - DNA, 4001 bp, Homo sapiens
tcccactgagtcttgggggagataagaagggtctcaagtcccaacagtcacagagcactcagctagtggtctcctaaaaagaataaagcctcagcttggttaggttggctctctgggccaaatgacaacctgaactgggggccccaaatctggcagcccatggaaatcacttggaagcagggttattccagatctgcggaatcagagtctgctttgaaccagctctccaggcaattccaatgagcaggcagatgggaagcagggatttgaacaagacttcattactattacaattatgtaaagtaatttctaaaatctccctcttctttcacatgagataatgaaagaaacccgtttgatacatttttttgcataaactatatgattgcttttttttacaatgtagttttagggaatttagagtcaggcatgggtttgggaagcaggacttgggttgagactctggccttgaccctaatgagcagtgagacctcgggcaagacatgtgaccttcccaaacctcggttttcttaactgtgaaatggtggtgatgattgaatgagcagtgcagggctcatgtgagagtcaaattaaatagtttttataaactgccttgtgcactgggagcatttggaaaatggaagcttttaggaacattgctgtgctgtctctatccttggtaatgtgggcaattcacaatgtgaagggtaatttttgcttctctcactgtatcaccgtgtcagcagcccagtttaagccagcacagtagaccatagactccctacactctactcccagccctgcagtctaagacagcatcttgcggggatgagtctaaggcaactgcaggggcacagataagtccttttattgggcattttccccagctcagggtcagacacggatgctcttgggtaacaaaggagtccagtgaaatcccctcccaagagtaaagcaggagaattgccgtggcaaccccaacctgaaaacaacgtaggcatgccaatggtgcagtgggggttcaagggcgtgattgggaaagtgttatggaagtgtctcagctagactttgatgaacgcatgggattcgtgcaggtagagatggctggaagtgctctccgggtaaaggaaccagcgcaaagaagagctcagagatgggttgtggtgggtctgagttagggtggccatgagacttcatcagaccggttggtgctgctcccacacttgggggaggggaagcatgttgtcagccctacccacccccacactgcctccccagcagattggggctgccagggagctgggatgggccctttcctcatccgtgcagggtgtttcattccacaggatgtggccgacctgaaccaaggccacggcttcggctctacaattaagaaaccaccacagttctgactctgcgaacaacagaggtgtttatcctgagagttatccaagttaaactggaggacgcctgtatgctagaaggttctatggaggcactgaagaggggtgaagccaccatgatgtaaattaaaggtgacatcctagtcatgtggtctttctgatggacagcacgagagccaggtctggattggtttaaaaaagtggagttggtttcaagggccacaaagacagccttcataactttaagactcattccatatgggtttaatacttacagttcctgagagctaggtgctttgcttaggcacggaacgcattgccttgccatccgaagccatgcattcaagaccatgaactgtgagtcaaattaaatgttgagtgttcctttttctgcaagaaaatggatgcctcagttgaaaagacagataagaagtgcagaaaaagaaagcaaagcaatcagcgtttcaagataacgatcccactccatggaatgtgggctccaggaggcaggcatggggtccagtctcatttacctttttgtcacctgtgtctggtaattggaagtgctccataaacagtggttcaaggaatgaagtaagagaaactcctctccagctaatgaaagtgaatgtttctatggggatgtggcagttatgagtggcaggggcacttgctttgtatttaggcttctgcattccctttagcccttaaaagaacattctctaggtagaacatttatcaggacaggccctgttttgagaaaaattgaaatattggcactttgtatcaaaagcacaggagcgagaacatgcggtgtttggttttctgtacttgcgatagtttgctcagaataatggcttccagcttcatccatgtccctacaaaggacatgaactcaaccttttttatcgctgcacagtattccatggtatatatgtgccacattttcttaatccaatctatcattgatggacatttgggttggttctatttttatattttatttagaataatgtatatctatattcgtaaatgagatttaaaaaaaaaaagcacaggagagctaccgtgccctctgggacagtttcacatggaggaattttgcttacctgaccgtcagcagggttccccaacctggagttcacttggaggtgctcattagaatgcaggttcctaggcctaccaaaccagattccctgggacagggccaaaaatctgcattttaaaaaataatttcaacttctattttagatgcagggggtacacattcaggtttgctacacagatatattgcatgacactgagatttaggataggaatgatcctgtcacccagatagtgggcatagcatccaacagttagtttttcaaccgttgtccccctcccttcctctctccctttggagtccccagtttctattgctgccatttttaggtccatgaacacccactgtttagctcccacttataagtgagaacatgaggcatttggttttctgttcctgcatttcattcccttaggataatggcctccagctacatccatgttgctgcaaaggacatgactttgttcttttttaattgctgtgtcatattccatgatgtgcatgtaccacattttctttatccagtccaccatgggcaggcacctaggttgagtccctgcctttgctattgtgaatagtgctgtgatgaacatatgggtgtgtgtctttttggtagaataattttattttgggtacatacccagtcatgggattgctaggtcaaatggtaactctgtcttacgttctttttaaaaattttttttatttttaatttttgtgggtacatagtaggtgtatatatttatggggtacatgagatattttggtaccagcacacaatgagcaataatcacatcatgaaaaatggggtatccatctcctcaagcatttatcctttgtgttacaatcccattagactctcttctctttttaaaaaatttgaaatatattggaaaacatggtttttgtttagttttttatttaacttttaagttcaggggtacatgagcaggtttgctacacaggtaaacttgtgtcctgggggtttgttgtacagatgatttcatcacccaggtattaagcctagcattcatgtcaagttatttgagtaatctccaagctgctttcctcagtggctgaactaatttacactgccaccaacggtgtataagccttcccctttctccccagcctcgccagcacctgttgttttagccatgctgcctggtgtgagatagtatctcattgtgattttgattcacagggaatctgcatgtctgaaagttcctcagatgaatcgagtaaatactaacacttgtgagctagcactgacttcttcaagcagcatgcctatcacctgtgacagctccttctgggggatgtggtgcacacagcacacagccacctcccccaggaccaccctttgacctccttcagtggtgaaaccatcccagctaccaacaagtgcagaggcagcaaaaccaaagtaaaccaggaagagaagtaggcaagaccatatatgtgactaataacaaagtttcttgcaaaataaa

SEQ ID NO: 1888390 - DNA, 4001 bp, Homo sapiens
caagccctccaagcatctgtggaacaaagactttttttatttctttctactgcctccactatccagtgaattttcctcccaacttagaacatgactcatcaaggaggaccctgtttccaggggttacacatgcggtttccgcggtggtggccctgtacggccagtggaagtggcacagggacagagaggcacatgccggcccctccaagggcccaaggggtgcacgcggccctcggctcctgtcccggcacctgggcatggcggccatcccctcccctccctcctttgtggggggtgaacccatctccatctcctcctccctgtgaaggtccaggggtctggctggcccgcgtgtttgctgggcacctagggcagggcggcgtctggccccagcctgtttgcggagtgtgaatgagtccgctggccggaggcagcctgcggttggatctccccgggcttcgggtggggcgggtcccagggccgcgggtggggaaagtgcagcccatcctggtcccaagcgggggtgcgacggctcaacactggtccttgtgagtcaggctctccctacaggacgtcccccaggtgatcgctggggcctcgttgaccacgggcctccccagtcgccaacgggaaggcagaaggcagaaaagaggccagccgggaggcggccgttgccacaggagcccgcggcgcggggaggacgcctcggctgcaggcggggctcctggcaagcgtcggggacgcggcctcccaccggtcgggtcgggagggagcaggcttctggggagagtgggcgacctcggcgatccaggaatcggtctgcgacagactgactcctagataggaaaacacacgtttccggcagcatcgcctgtaactggaaagacacaaggctcaatgccggggactggtccgtcaatcacgggccctgggacagtcctgcggcccccagacagcggcgaagaaagctctgcgcgccccggtttgttccgggagcgcctctgggagccgcaggctctggatatcagagggagggcgcgaccccgtggcgggagccgcagggtgctggggttgcgttcccgccctctctgcgtttcctttagtgactcccgctaagaggggctgaggcggaaacccccgcactgagtgtgaaactcaggagctcgctgaggccccctggtgcttcccggggccgcgtgcattggcctgatttcattttgttccgttgcctgtaagctgagaatttcattttctggtgagaatccgccatagaagctctggttctgggaactgtcatttcaaagagacgcaaaaaaaaaaaaaaaaaaaaaaaaagactgaaagactgtctcgatggcgctgtgatctcgctgggttgagaggccactgccctgaaacccagggcccgtgaggcaaagggtggcggggggtccagggctgcccagcgctggcaacacagaggctcccccaagccatgccgggggctggcaccgcctcctgaggacccccgagtggatccctctcccaggctggcatcacgccccatcccgtggctcccgggcgcccatcaggggctggtccaacacgccctccagggagggctggagactgcagaagagcgctctgagcccgtctgaccgcacggggtgggctcccgccgcaggcaggcccggcccccgggacacggacgcggcagggacgtcccccacggcacggggcccgcagcccctagagctgggccccggaggcggctgcgaggctgcggggctggacgggttaagcctttcccgttacctcatgctggcctccgcctctgaacatctggcaggaatatttctttacagccgtctgagctgtgggggagtctggctgcgttcccagagccttttcctcagatttcagcggaatgggggagccagcaggagccggcgtggaccccagggaggaggcttcccgggaagggacggcgctgaggccgcacctggcccccagagcccaccctgaaggctcccgggcagccagcgcattcctgctgacgagaatcacttccggcgccgctgacccggcccgggagaccctgttccggcgccgctgacccggcccgggagaccctgagatgtctgtgggcagcagtgggagccctcgggtggggttgccgaggctgcggagggccagggctgcacgagtggcacagctcagacctggggtccctgtgtgagaccccgcaccccgggccggggcccgaaactccctcctctgtgcccccatcatggcttctgggcccaaaaggtcgtggggggaggggcgggctcccgagcactgggtttcaagccccgatgctgtcggtcctgccggccccatgctcagacacccggttcccttcgcagcgcagggcagggcccaggggcttctaggacctggtctcggagctccacacaggccctcccccggcagtggggagctcagctgcgggggctgccccatgtcccgctcacccgccggcatgcagcagttttaacgaggctggggcagtagggaagaaagggttaggatcccttacagaccagcagcccccactccggctgggtcccagagagacgggggcggggggctccttgccactctgcagggagctgaacatgggtggtcacagtcccacatcaccccactcctcagacacccagagggtttccacgcaggaccacagcatctgtagggggccactcagaccctccgtctctctgcctgaccacaccgtggctcagagaaactgctggcatcctgcctggtataccccaggctggatgtgccaggaaagctggggcagtcagaactgggtgcggtcccagctctgtcacccactagttgcctgagctcgggtcgggacacaggctcccagaagctccgttttctcaagttgtcaagagaatgtccactctgtcggtgggagctgatggagggagtaacagtgacagagctggggctcccatgaggccgaggtccacaggcccggggctcagagaccagtccagatggacgcagcacacagctgccaggggcccgcccacccagcccagcttcccagcatctggtttccattgtccccacatgggagtcacagagcctggggccgagtgcctgggtaacatctgggcttctcaggaacactcacactccctgggccaatcaaaccccaaagagagggtgcggtgggaacgcggctggtctgtggaaagagacctcatctccgttcagggcctccaggcctcagggccatctcagtgcccaccttacggagctgtggctggaggctctgggatcaggacaaactgggagcgagacgcagccatccctgctctgggctgggtctggggtcccagggtgccagccacagccaggccggagggcccagagcaaggccctcccaggtgcccggcctctggagtccccacccttgggaggcagagaccctcgcgttcagcagggtgacctccgtgatctagggctcctgggctactgccagttccctccccaaacatgtgaccccaaaagcatcaggatctgagggttgtttcagagctgggggaggggttgggtgctcttttgccctcaggagagcaggcccagtactcagtgagtgcccaggggtgaggagggctcaggaggccagcgccgggccatcagcctctgcaccccagggtctgaactcagggtctgagcgagtccagggctgccctgcagtgacagggagggccgagggtggcagaactggtgatggtggctctggagatggcggtgggggaaacgggggcaggcagcctggctttgggaccccaggccccaaggtcacagtgacctgtagcctgctgggtccagatacacaagcaattgtcacagcctagcagctggggggctctaggagggaggctggggctgcacagtgaggggcagtgcggggtgtgggacacggtttctggagtctctgctcccccagcctcgtc

SEQ ID NO: 1888391 - DNA, 4001 bp, Homo sapiens
tttgaggttaatagtctcaagatttaatatttgatgataataatccctgaatggctaaaggaactgctcagcatcacacagttacccagtgatacaacacagaacattttaaaataatagctttgttttcactacagtacagcgattttattgggaacaaaaatacagtccattttatctaatagggaatgtactaggggtaaagggaagtgaattcatcagcttgtctaaataaggaaagggttattaatattagcaaataatttttagggagacaagttataaacctaactgcctcatcaccagtgcatagcacagtgcctggggaaaagcaggcatttaaatttatataaagtaagtgaactaaaaaagaatggatttaggtaagaaacaggttcagagttcatgtgttctaccactttaatcttatatactaagaaatttcttgattgaatcaatttgcccaatgttttctccatgaaaaacagggtattttcctttactgagcacctgaagaagccaatgaaaatggaacaatacagctctgcagaagagtcagaaaagctatcaggaggatgattcttatgactgtctttcacatagttggattatgtgtcttagcctaaagacaccaggaagtttctgtgctcagaaatgcctcctgatgcccctctctaatgcagcactggagggtctccataggacactcgttccttgtgcttattgctttgctctttctgatggagtacctatgaactcctattcactgattttgttagattttacttctattcatgccttagggattcaatgcagtatttacgtcacaggattgaagggtcaggacttctgggaagtgagaagaaagagagatttgtataatttttttcggtagcctgccttaccttcaagctccacttgttaaactcttctaaaaagcctagagccatagttttgatataatctgtgataatacaagagttctcccttatccatggttttgttttcagcagtttcagttacctcaggtcaactgtggtccaaaaatattaacctattttgagagcgagagagaggaaaaaaagaaacacattcacataaatgctatttcagtatcttgttatacttttttattttattgttagttattactgttcatctctcactgtgcccaatttataaattaaactttattttaggtatgcatgtataggaaaaatatagcttatataggaatcagtactatcagtggtttcaagcatccactggaggtcttggaacacatcatttgcaaataagggagaaaatttgtatttttttgggagaattggagatttgaaatacagaggtgagtctaaatttggtttctgggagttaaaattatttatcacacgttctgttcttataaataaaccctccagtctaacccaaagagagacttagcaatttgcagctatgatctaagaagacattaatatcaaaaattgcaagtggttagaaatgagtaaaataaaagacatcctctcccaagacctgattaagatgtagagaaagattcttcaaaatcagataatgtaatgctcctttaaaattcacattttattttttcttatttaccataaaacttttctaagttctaaatagcttctacaaataaaaataacataaaaggaagaaagttctgataacatagaatatagagtaactgagtagaaaagaaaaatcttttttttctggtctgatttccttagtaataagtaatataacttattagttatattagtatttatagtaagcaatataacttatacgtttttaagccacgtcacatcaaatgaaatatcaatcatagctcaataaactgtctatggttagtaacaccaatggctaagtttaaagacgcttcataccttcagggattaattgaaaggaaccagtgtgctagatttcatgataaagtagaactccatgaaaagctgaatcataaaagagttccaataatattggggcctttcaattttgccagggttctgtactttcgtttacataatgtttaactgtagagaagaaataagatataatcacttaaggcaatgatttctcctgtgagctctcttacacaaatctaatgctgtctctctttctattttaattttcataattatgcaacgtatgtatacaaaagagaaaaaagcaaaagttcatatttcagtaagttttcataaagtaaacactcccatgtaactatcaaccacatcaagaaagaatattaccagcacttcagaaacccctcccatgaccacttcctgtcccttaaggataactgctatgaggtttttctacaccttagttttgccatttttgaacttcatttaaatagaccaatacagtgtatactcttttgtgtctaacttttttagtcatcaagtttgtgaaattatcttcctctgtggcagatgttcaaaaaatttttactatcatttactttagaaaaattggtttagattttgtctctgtagacttttagacgggatttctgtagtgtcacaaaaacttcagatgctcaaattcatttttaaattgtcgattttatttcttaaattaatgtatttagatatcccagttggttgaacatctccttgacaactctcccctttaacccaatcttccacacttagctgtataacttgtaataactcatgaaaacccagacacatacataggaataggaattggaattctgaaaagtttaagtgtaattagaaaaccaaacccatgctcacttcattaactgatctctgtttctctcctattcatgtagctgaaattaagtcccttccaaaattcaatgaatgagacaaatcattcttgggtgacagaatttgtgttgctgggactgtctagttcaagggagctccaacctttcttgtttcttatattttcactactttatctagcaattctgttgggcaactttctcatcatcctcactgtgacctcagattcccgccttcacacccccatgtactttctgcttgccaacctgtcatttatagacgtatgtgttgcctcttctgctacccctaaaatgattgcagactttctggttgagcacaagactatttcttttgatgcccgcctggcccagattttctttgttcatctcttcactggcagtgaaatggtgctcctagtttccatggcctatgaccgttatgttgctatatgcaaacctccccactacatgacaatcatgagctgctgtgtatgtgttgtgctcttcctcatttcctggtttgtgggcttcatccataccaccagccagttggcattcactgttaatctgccattttgtggtcctaataaggtagatagtttttttctgtgaccttcctctagtgaccaagttagcctgcatagacacttatgttgtcagcctactaatagttgcagatagtggctttctttctctgagttcctttctcctcttggttgtctcctacactgtaatacttgttacagttaggaatagctcctctgtaagcatggtgaaggcctgctccacattgactgctcacatcactgtggtcactttattctttggaccgtgtattttcatctatgtgtggcccttcagcagttactcagttgacaaagtccttgctgtattctacaccatcttcacgtctattttaaaccctgtaatctacatgctaagaaacaaagaagtgaaggcagctatgtcaaaactgaagagtcggtatcagaagcttggtcaggtttctgtagtcataagaaacgttcttttcctagaaacaaagtaaacttatgagactgttaccactttagccctgtctccatacacttacaagtggattcactgtaatcttaaagcaaatcaacttggcctgtgggaaaggtcagttgattgattcgaagcaaactgtaatgataataaaaactcatgaaataaactttagtgattttaagtattctttctc

SEQ ID NO: 1888392 - DNA, 4001 bp, Homo sapiens
gtaatgctctgcctaaatcattcattttaaaaatgatgggtaaaactttacaaataaaatgaagtatactttatgttaaataattttgaattctctatatttaaaaataatattgagattattactccagtaaacaaaactgaaatgctaaagattacatttaaataacacattctttattattattattttcttattttaaattttactttaagttctgggatatgtgtgcagaacatgcaggtttgttacataggtatacatgtgccgtggtggtttgctgaacctaacaaactgtcatgtaggttttaagcctcgcatgcattaggtatttgtcctaatgctcttcctctctccccttgccccccaccccccgacatagtgcattaaaacatcaagtattgtaatttgcagtttgtgatacaccgtgtaggctagaataagaaaccttttaagtatgaaataggaagatataaagaaattaattaatttttaaatttaattttaaattttcaattaatgtttatattttaataataatgcttatagtttaatattagctattgatgttttatctataaaggtagactatgaaatttactttttgcatatttcaactttcttagttttcaagatttttcaaatcatgtacatatttgatgatttttatgattcattgaggtaactatttgataatattgttcaaaatgaccacattaattatgtttttagtaatgatttactccccaaaaggtatatgtttccaccttaaattcctgtaaataaaattcttgtgatagcttcttaaaaagtaagagaaaagaaagagaaaactgattcgtttctacttggagcttgatttcaaatatgtaaaccccaactacgtaattctgtacacaggaatctcattatttattttcatagttgctgctttatttaaaattttgtctctaaagtttatatttggcaagacaaataaaaataagctggtttataatttttcttattctaagatgtgcatgtgtatatgtgtaaatatgttttaatttctaatggcctgtccagatgaaggtatcactcctggagacatggcaacccatatgagaatgtttatatacactggggtggagaagaacagccatgcccaaatcctaatttaaatcaccttcacctttgaaatgttaaaactgtatgtgtctttttcagtttctctctgctcctccttttctcctatgctcttgctcagaaaacatttaatttcaactcaggtgtatttattagaaagaatccttccattttaatttttttgaaagtcattggaagcagatcctgtgtccttataaaattccacaataaaacatttacttttgtaagctatgtgtatctagatggtgatattattgttaggaaataaaaggagagcatttggtaactatggcaacatgatatgtttcaaaagaaatatggactctttttccttgaagaaattagatattttccttgactggtacttagggatccaagtctagaagagaaataggattttttaaggctcactattttagtcttttttttttttggaaattgttcacctagccacatctgacaaaataaaagattaaatttgaggctgcagaaacaaaattgcagttgtaatttgccagcacctagtccatgttagggtaaacaaacacagtcaattcccatttatctaaagtttaagcaataataattttcaaaaatggaatttcttgccgtattattttttctccaaaacgcacaaaatgagaatgtgttagtctagtctcatgctgctgataaagacatactgaagactgggcaatataaaaaggaaagaggtataatggagaactcacagttccacatggctggggaagcctcacaatcgtggcagaagacaaggaggtgcaagtcacatcttacgtggatggcagcaggcaaaaagagagcttgtgcagagaaacttacatttttaaaactatcaaatctcatgagactcattcactgtcatgagaacagcgtaggaaagatccacccccataattcaatcacctcccacccggttcctcccaggacatgtgggaattgtgggagttacaatttaagatgagatttgggtggggacacagccaaaccatatcagagaatattctttatatagagatatattgaaaaatgttacttctggtttcagtcattacacaataatagagtccgacttctaagtcaatagttttaaacgaacaatttattttcaccacaaagattccaaaacactatgtgactgtgaattatcatcctaatcagattaattttttgatataattttagggttagtttggattattagtgtgtgagttctgtgaaaattatgacagtaaaatatgcctgtagccatcagcctataacaggagatctcattgtgagctcaaggaagaaggaaacacactgaaatttctatattggtgcaggatgatggtaattgcaagaaagggcttaaataaaacagtagtataaaactcaatctgatacaaaaaagtcagcggcaagacaaaaatagtttataaatataaaataaggaatcaaatctaagcttgtgcgtgaataagattaaaaaattatcaaattcatgttcagtatggtaggagtgacctagacaaaagatgaggaagaaagagtgactatctaagtaattttatgggattattatgacttttaaaaatatttgatcttttgaacatctcacaggataaaatattgaattaattagaatatttagttgactgaaacacccattttcttacttattttaaaaaactgaattttaatgtatataagtatagattaatgaatgtatacataaacacagagaaagagagagagagaaaaaaacattctctgcatattgcttcttcttgcaagaatgttaagaacaaacatttttctttatgtctctctccaattaagttaaagatggtggagctgcatactagttgctattataatagctttttcataacattttgttcacagttgggaaaaacaaatgagcaaataaacattgagatgtaaaagcagtgtaccactacctttaacgtaccagtctttattaggtaagagagtgttttgatgtgtatattatcttctgctttataaggtagcttactttcacctgcttaggtgggaacagatagatgatagatagatagatagatagatagatagatagatagataaatagccagatagattaggtagatatatagacatataggtagatggatagatagtgtcttagtccgttttgtgctaatgtagcatgccttagactgggtaatttataaagaacagagacttatttcttacagttctcgagactgggaaatccaaggttgaggaacctacatgtaacaaggaccttccttctgtgttatcccatggtggaaggcagaagagcaagacagcatgtatgcatgtgacagagaaataggaatagtgctgaactaatccttttatcaagaactcacttcctaggtagctaacctactctcaagataatggcattaatcaattcattcagcagagcacttgtaacctaagttacctcttaacaaaaacatttttgtcaactaaagtacagggttcatgagacaaataaaattcatttatatcgtatataaagtaacttaggttagcacattttcttcctctaccaacttcagtgaggttgtgtcacacatgtgaaatacagttagattttttttttgcttagatggtgtcagggatctccagacatactatatgtttctttttaaatttgcgtacattaaggtttactatttcttctgtaaagttctgttggttttgacaaatacctaatgccatgtatccaccattacagtatcatacagcatataatcatagctttattgacagaagaatcatttgtgcatcaattattcttccatcctcctttactc

SEQ ID NO: 1888393 - DNA, 4001 bp, Homo sapiens
gctttaaacaatttagatattttatatgaaacagaccatttaagaaaactctcacttaacaaagtgagtcttaatataaagaacagtatcagatagtttgtcttaagcaaaaatagagcaatttaccagttgaaccaaacttatcatttcactcagctcatagtaaatattttagtaaagcttaaactaaaaacatttgaaaggacatatgcacaaaaaagtaatgatcattaacaatggaatcattcatattgaaggcattttttaattttttctcttaaatttgatatagacctaaactactaactagagatttttgtaataggtatggatttaatgtgtttagaaacaatataaccaagtaaagttttaatttatttattcataaattagtaggattgaaaggatatgaaaaactattcatactgaactgtttatgataataggagtggcgtgtgaaggcagaggaattgttggtttctatcttggtatttataattgctattttaaatagggatattatgtttatatgttatataataatttaagcatatggtatttaaaaacaatgaacattaaatacacaaattacatttttcattgtccccctatttattaacctgggacagagtgtgatgataagaaaaggaaggatctgggcagctgtcatagatgtcccaggccactccttgcttttctggaagtggcttgtgtttacttgtacccttgtacttatcagtgaagtttgacatgggataacagcactaatccatgtgagtctgccttgacaatttgacctttttatgttcacaaaaataacaggtaattctccaaagagtaaatttaaattagcacagggagaaaaatcagttcgctaatgagaagagaaaaatccaataagcacacgtgataaaccatttccctcaaaatttaaaaaggtaactgtaccaggtgaagatacagatgtagaaaagaaaaaagaaataaattcccatatctgatgggaatataaatcagtatcaacataagagaaagcagtttggcaacacaaatctagggaaaaatccactaacccaaaaagtaaaaaattacatgtgtatgtgtgtgtaggtatgtagcctagtgaatccactgcacttttatataaagacttgtatataaagcaaatattttcactgtagcactttttgctatgaggcaaaattagaaatgaccatcagtcaaaaattagatagacaaattttggcgttttcatacaatagaatactggaatttagcagttgtttaaccatacctgagcaaagctttatgaatcaacatgaatcaattattacaaataaagatgaaaaacaagaagtttctaaaaatacgtatatattttgtcagtgcaatacaagatagtgtttttgtattagatatttatgtagtgtgtgaaataacaaaaatggtagtactgaacaccaagtttagaaaattagttaactctgggatatgaggaagagaaataaaattggtgaaaataaatttaaatacataggatcttcaaaacttcatggaaaatatgtattatcaaaaatactatgtgtgctgagattcaggggatcacgatggacaggaggcaggactagattgaagctccaggcagagcaacctacggaggcttgcactgtgaattttagctccagatcaacttcaagaataaagtagcaatcccaagaagacccacagcccctctgaaggaagcggactgctcctgcaggacccgggagacaccccaaatactatgagtgtcccaactgtgcaagtgggaaagggagtgtcccgaacacacacccccactggagaagctgaaggtgtttgtgggagaagtttccgactttacctggagctgagtcaagtcagagagctgagcgaaatacaggggtacaggaagcagcagaaaggccctcggagctcactgggtccccaagcagcccattcctgcctggcaacacaaagatccatccggagggcggccagaggagcagggggtaaaactctacagggagaaggaattctctagctgaactttgtaaccatttgaacagggcaagaagcctcctggccagaactcaggggagggcgcgaatctggcctgcagacttcacaggcagggggaggaactaaagcccttttctctgggggctgggagatggatagcattcagcaaattttcaagccattctcaccctccgcctaaaaactgactctgttacgggggcatagtgagagtgagaccagcccttcagtttgcgtgggagctgggtgaggccagtgactgtcagctttctccgacttccctgacaacctgcatgactcagcagaggcagccttaatcctcctggtacataactccagtgacctgggaatgtcacccccatccccaacaacagcttcagcaggacccacccaaaaagagtctgagctcagacacgcctagccccacctccacctgatggtccttccctatccaccctggtagcagaagacaaagggcatataatctcggagatctaggcccacccactgccagttcctctccacaccactacagctgatgctctctggaaagcaccacctcctggcaggaacccaaccagcacaaaaatagagcattaaaccaccaaactaaggacccttatgaagtccattgcaccctccaccacctccaccagaagaggcgctggtatccacagctgagacccattgagttcatatcatagaactctgtgcagacaacccccagtaccagcccagagccagggagacttgctgggtggtggggcccagaagagagacagcaatcactgcagttcagctcacaggaagccacatccatagaaaaagggggagagtactacaccaagggaacacccagggggacaaaagaatctgaacaacagccttcagccctagaccttccctctgacagagcctacccaaatgagaagaaaccagaaaaccaaccctggtaatatgacaaaacaaggatcttcaacacccccccaaaatcatactagttcaccagcaatggatccaaaccaagaagaaacccttgatttacctgaaaaagaattcaggacattagttattaagctaatcagggagggaccagagaaagatgaagcccaatgcaaggaaatccaaaaaatgatacaagaagtaaagggagaaatattcatggaaatagatagcttaaagaaaaaaaaaaaacataaaaaattcaggaaactttggacacacctttagaaatgcaaaatgctctggaaagtctcagcaatagaattgaacaagtagaagaaagaagttcagaattcgaaggcaaggtctttgaattaaccaaatccaacaaagacaataaagaataagaaaatatgaacaaagcttctaagaagtctgggattatgttaaatgagcaaacctaagaataattaatgtacctgaggaagaagagaattctaaaaacttggaaaacatgtttgggggaataatcgaggaaaacttccctggccttgcaagagacgtagacagccaaatacaagaatcacaaagaacacctaggaaattcatcacaaaaagatcttcacttaggcacattgtcgtcaggttatccaaacttaagataaaggaaagaagcttaagagttgtgagacagaagcatcaggtaacctatcaaggaaaacttatcagattaacagcagatttctcagcagaaaccctacaagctagaagggattgggaccctatcttcagtttcctcaaataaaataattactagccaagaattttgtatccagtgaaactaaacatcatatgtgaaggcaagatacagttgttttcagacaaacaaatgctgagagaatttgccattatcaaaccaccactacaagaactgctaaaaggaactctaaatattgaaacaaatactggaaacacatcaaaacagatgctctttaaagcat

SEQ ID NO: 1888394 - DNA, 4001 bp, Homo sapiens
tggcctcccccatgtgacctctcccctgcgtggcctctcccccgcgtggcctctgccccatgtgacctctcaccccgcagcctctcccccttgtaacctctcccctgcatggcctctcccccgcgtggcttctcccccgtgtggcatcacccgtgggttctcattgcatggagccctggccccttactgtgggtgaggagtagggggaggattggccgttgggttctgggttccgcagtccaccgagggcagtctggccctctctgtgcctcccccagggatgttgccggccctttgtccccttctgtcacgtcccctgtcacctgccctctaggacctgcatggctgcagtcccaccagctgcctctggggggtgcccatggccctggaatgggcttgggggagaacgcgccgccccggggcctccaaccctttgctccaggccacttgctccaccctctcttgctgccccgtgtgacccaggatctgtttgggcgagtgcctcgttctctccctgagtggagcttctgcaggtgcttcacgaaggctggcacccacctctacctgtgtaccacggcctgggatggaccctgcagctgtggccctcctggcactatccctaccctgtgccctggtgggtgtgcagtgggaacaggcaccctggggtccttggaggctcagcctcctcagccctcacccccgagaccccatcgtggcgcctgtgtccactcagggattatcccaagcctggccagaggtcgggaggggacagagggagccacataggagcctctaccagcccctttcttaccacggggtgggggcgcttccctcccacagggtctcaggcttgtgggctccccccagctgcccaggccccagagggcacttctgacccttctctttggggtctgccctggggggctccaggccacttgctccaccccatccctcttctggagcctcccagcacctcagttccgactgtggggaaaacagaaccctaggaagcaacctcacggctgtgggcaggggagggcggccgggagccccagctgccccacagggacattgagtgaaggcagagcctgggagggaagtcagatccgtgcatgggtcccttcctgttggtgttggcgtccctgagtgagcagccatccgccgccccctggaaagagacctggagaagcagcttcaagctttggagcccagcccagctgctagcagcccctgggtcacagtgcgaagggggaaggcaggggcttgaggaagaaagtgagaggattgtgcctgggggcccctggagggccagtctggaggcgcgttggggtgaggcggtgctggctgtgcccgtctgagatgggcagagggaaggcgcccagggctgagcccagggtccccaggccagtccctcactgctctggggttcagtttcctcacctgcacaaagggcgggtcccgtgctctccggaggccacacggggtctccctgaggcactgagtctggcttgtttctggaaactgaggcacaggaggacgttgataaccggccttcctctgttctctttcccaggggtgcagctcgtccgtcccatggtttcagatttgcccggtgtgttgcaaccaccacctggcactcagcttgcccggtgccgcctggccccgcagcctttcccaggccttgcaagggtggcacagatggggaaactccatctgcaggggcgtcacccccgagggatgtgtcctccacactcccttgatggtcacgtgggtcccgggagggcgcgtgtgactcttcccaggattgcagcgttggggcgttgtgccagcctggccccgtgggtgcggagtgccgtggacccctcggccctcctgaccttgtttccctttgatgtagaagtctgcatggcatgaattccagtgacaatgggccgggccaggctccctgtgcccctggtaccgctgcccagggccggtctctgcagtcaccctccttccttcctggtggctcctccctccctcctttgttcttctttcttttcctgcctaaatgtttatcgagtccctcctgcattaagtacccgtgctgtgcaacaaattaccttgaacttggtgacttcaccaccactgcatgtcagcgcccagccgtagacgagggtttgggaggcatggctgggcctgcccagggctccctggctgaagtgggtgctgaagctgccaggcactggaggctgggcctctcgcacactccctggctgttgggagggtgcattcttctttcttccttgtcttctagaggatgcactcttggctgtaggcctcccgtttctctcacgggctattcctggggttccctcagatcctggaggtgcccacagcccccttccccgaggctcccccccccacacactttgcttcttcagtgccagcaggagaaattctccctcatcagcttcctcagagaagggctcacctggtcaggtcaggccccgcactcgggcaggcacagcagggcgcaccccatgacgcacccagaacccgcccccacagccccggagtcctggccgctgtccccagccctacgcccctctcagagcttgagccaggggcagcgcaatgggcagctccttccctctcctgtccctggaaaactgctctgggtgatttggcggagagtgagaggattcgaaaacgctggtacgtggcaggggctggcagattccaaaagtggccccagactccctggacacccagaccatccacctggtgccacagtacctgattcccatggccagggcattggggagccaggcaggggcaggggaggggcgttccaggtcctccctccttgccttgacctacatcccaggtgacccagcgaggcccaggcccccgcccagtctgccccgcctcacagtcaggcttcatcctcatccccagcagcccctgggccccccatgtcaccctcagggcacttgagggcagggtcaggccagaccaagtgtggggcctggccaggagcaggtggtgccggggaatgagtatagggcttatggtgccgtggcctgtctgctgcctggtctgtcctaaggccagtggccctgtccctaggctgtggggcacaggtcccattccccgggggagtgaagggctcaggcagcaggcagccccgtcccctcccctagggtgtgcctgggtgactcctgggctggccgactgggagctagcctgagtgtaggttttgagtctgagcaccaggtcctcaccctgcccctggcaccccttgggcacctcctggcaccctgtctgctttgtgccacttgccctggggtctgtccctcccttggacagacaacagtgtcctactttttttttttttttttgagagagagagtctcgctctgtcgcccaggctggagtgcaatggcatgatctcggctcactgcaacctccacctcctgggttcaagcgattctcctgcctcagcctcctgagtagctgggattacaggcacacgccaccatgcccagctaatttttatatttttagtagagacggtttcaccacgttggccaggctggtctccaactcctgacctcatgatctgcccgccttggcctcccaaagtgctgggactacaggcgtgagccactgcgcccgacccataatgtcctactcttgcctgaaggctctgagccgttcgggtctcctggacacggagaagccacagcccagtgccacctgtccttttctctccgctgctcacaggggccgaggtctgcacacccatggctgccccaggctgcccgccaggagctgccttttccctggccaggctgtttctcagccctgcggttcccaaggaaacgggcttccaggcaagcccgggtggagttcacttttctcccaattggaattcggctgaattgaatccagcctctgctcccctcacctccgcatcctgaatttctgctcccagctccctcggcctgggtcaggtt

SEQ ID NO: 1888395 - DNA, 4001 bp, Homo sapiens
ttgattatataagtaaacgccacttgggaagctggataggtaaatgggttctgcgttatttctgcaactcttgtaagtatacatttatatcattataaaagttaaaaaataaaaatataaaaagtaaaatgcattttatttcaaaagaaagaaaagaaaccaaagttatattttagaaagatatctatggtaactgataaaatttgattttatggattatattagaaaagtagagaatgtgaactgatgaacttaaagaaagggactaattgaagaagcataacacacggccacgcacacagtgctacttcctgaaaattagatttctgaatggcgccactaaacttcaggtactttttatgttcctaggattgtattacaggagttattaagaaattattttggccgggcgcggtggctcacgcctgtaatcccagcactttgggaggccgaggcgggtggatcacgaggtcaggagatcgagaccatcctggctaacacggtgaaaccccgtctctactaaaaatacaaaaaattagccgggcgtggtggcaggcgcctgtaatcccagctactcgggaggctgaggcaggagaatggcgtgaacctgggaggtggagcttgcagtgagccgagatcgtgcaactgcactccagcctgggccacagagcaagactccgtctcgggaaaaaaaaaaaaagaaaaataaagaaagaaattattttaggcagctagaaagggtaaaagagtcctcggtaaggctttttttttaataataaagcagcccccaaaacatttcttttctgacagaaagcagcctgaaaaaccagacctgcaagcatcgatatgcaagtcacaggcttgcatatgtaaacgcaggtggctcagagccaagtacacccaatatggcggttcccgctactttttctttgttgccacgtgtgcagacatcatgacagtgagccaggtagaggccatgtgtacaggtatcatggcgaccagccaagtagtcacatttacataatcaaagttagggtgggagggacttttttgggggggctatttgaatgacacaactggtcaagtcaatcccttgggccctatgcaaatcagacgccacctcctcaagcctcccagtgtaacctactgccttccgccccagcagggttattctgtttggagccctcctccctttgtaaggaagaactgttcttttctttttcttgcttactaaactttccagtccttaatccgctccacgtgtgtccatgtcactaatgttctcagcacgagaccaaaaaccctgggtgtttccccagacaatggagccatatcaattggaccaataatcatgtgagtcactgaaagacatgcctttgacatgtgcattcatttaaattactttacatctttttaatatgaaaaaaatagattcaccttaaaggtaatcagtatttccattttagtcctatttaaagaagagttttaagattaactttcaggagggactattgtcaagagattcttgggcacttatacataggattaacaacatttattaaggcctatgataaggtagcccttgtgatagatgatcaaaccaaatataaacacaaaacctgtttgtcatggtgaatggaaagtatagacaaactagctgaataaatatgtatacattaaacatagagggaacatgaataattaactccaatgacagtggaagttagtaatgaagacattattttttagagggtagagaattccaagtgatttgcagttaattacctttaactatttgaaaatactttccattataatttaccttttcttgttgctgttgtaatgtcagctgtaaagcttagtattgctattttgtaggtaaaatttcctttacttcctcctattgagaggtgaaaacgtgctagcagcccttgctcgctctgggctctcggcgcctccttggcctctgcgtccgctctggccgcgttccaggagcccttcgacccgtcgctgtgctgtgggggcccctctctggggctggccgaggcctgagccggctccctctgctggcggggaggtgtgtggggagaggcgcgggcaggatccatggctgcgcgaggcgcttgcaggccggcgcgggttccgggtgggcccaggctcagcgggccctgcactcggcgcggcaggctggcgcctgctgggcttgattgggggacgagctccctctgggctgccagagtgcctggactaggtgccgcagtaaaatcctgggcgagcgctattgagaggtgaagccggctgggcttctgggttgggtgggaacctggagaactttgctgtctggctaaaggttactaaacgcaccagttggcactctgtgtctagctaaaggtttgtaaacgcactaatcagcactctgtcaaaatggaccgatcagctctctgtaaaatagaccaatcagcaggatgcgggtggggccatataagggaataaaagcaggccaccgaggcagcagcacaatcccctcgggtcaccttccatgctgtggtagctttcttcttttgctgtttgcaataaatcttgctgctgttgactttttgggtccatgccccctttatgagctgtaacactcaccccgaaggtctgcagcttcactcctgtggccagggagaccatgaacccaccagaaggaacggacaactccagatgcgccacctttaagagctgtaacactcaccgcgaaggtctgcggcttcactcttgaagtcagcgagaccacaaactacggaaggaaaaaactccggacacatctgaacatctgaaggaacaaactcctgaccatctttaagaactgttaacactgcgagggtccgcggcttcattcatgaagtcaccgagaccaagaacccaccaattcgggacacactatctctactctcatcttgacttctgactgtttttaagtttttctctgcatctttggttttcaacaattcttttatactttttgatgttttgtggtctggtattttttagtttcccccacttaagattttattatttttatgtctgtggcataatgtcacttccaggctttgccagttctcagacatgacctatttgataattgattcctaataattctcaactcttttcctctaattaaatatatgttagaaactttcaccatgttacatgcgttcttaccctctagtcaacattttccttcttttgttatttactttatttatttatttttgagacatggtctccatctgtccccgagtctggagtgcaggggcaccatttcgactcagtgcaacttccgcctcccagaatcaagaaattctcgtgcttcacaagaaaaaatagctgggcatggtggcacatgcctgtactcccagctacttgggactcatgctgagcaaaatttttgtgtgtgtttttagtagaggaggggtttcacagtgttggccaggcttgtctcaaactctgggcctcaggcaatctgcccgtcttagccttcccaaagcattggaattacaagcataagtcaccacgcttggcccgttttccttcttttaattgcttatgcttctacctgaatgtttacttttgacctatctttctactgattaattttctcttcacctgtgtctaatctgctgttaaatacataaaatggagttttcatgtctattttcttttttggtttttgaataaacattggtttattttatttgttaagtaaatcgtgttgtggatatttaaggtgtatgcaacacgatgtgagatacacatagtaaaatggtcagtataataaagcaaattaaaatatctatcatctcacatagctatttatttttttgtgtgctaagaacggctaaaatctattcatttagcaaagatcccgaaaactacaatattattaactatagtctttttcacatcttcatgttgatctctagccttcttcatcctatgtatctgcaactttgtat

SEQ ID NO: 1888396 - DNA, 4001 bp, Homo sapiens
tactctcagcccagcgaggtcaccaacaccatgtgtcctgagccttagcaccaattcacacccacttacagctccctcttcctctagaggcaccacttgggctgaacctgtgtttggcctttttttttgaacactgtagttttatcctgggtaggtattcctaaaaacacactctttagttttagttttttcatatttttataaaaggttatcatggtgcatgccattttctgggattcatgttttcaactctgttagggctcgcagtgtccaagacccctccagtccttggcccacagaggaaaccgagcctcagagaagggcaagctcctccccacagcatagccataacccatcacataggttgacagcaaccaacatattagcatggaatgatcatttcttagaagctgtgggaggaacttccaccccccacatcgtttctctgtctcgtctcaacctcaggtatcaaggttgttttgttccatatttcacagatgaggaagcagggactcaaggccggtgaatttaactctggtcatatggctggcagagcaggccctcaacttgggcttgtctgacctgctgcaggagcccatgtcagcctgactctcccacctggacacgagttcccaaggcacgtgtggcatcagaggtcctgccagtcaaagcgtcggatctgtgcttccccccatcaggctggtgccacaggaggaaggaaagggcaaacacctcttcctgggagcaggggtcaggtcagcctgaggcggcaggaattttagcaaatccaagttttctcatgtctggacagcaccttgtagcacccactctgatggtgccaaggctcaggccgaagccagtcccatgagtgtggccagggctctgcacccatggcaatctcaggcacgaaatatgcatagctgtgtgtggtcaaggtggcctgccctgggatgtcagggctctgcacacatgcacacacacacagacacacacacacactcactcacttaacatgatgcatctctttgaatcctcacaacaacctttgctatgaattggtgattccaaaccaccccactgtacagatgagtgcactgaggctctgtgggctaaagtctcctatctgaacaatcagctcatgacggcagagctgacattcctctcccatgaagaaaccacaggcttctcacaccaaccccaagacaggaacatcaaggacacacctcaagtctacgcaggtcccaagactctcttccaatcgccatgcatttctgtctatttgtcagggagctggtctttactgtcttcatcaaaggtaaggaggtaagggtaagaggttactgttgcatgtaaatacatctggaagagccttccacccaccttattgcaaaatagagactgtgggagggaacaggcctctgcagtccccccctgttgcctttgctcatgtgagcagaggctcccctctctccacgtagacacaggtgttcatcagggctcagggatacttcaaggagcacaggcaggctcttgtatcctcttctgggtgcttggtgcagggcacagcctgtgcaactgtacatagcagccctgcgatgaaagaggagaccagccttgggtgctgtgggctggaagcagcttttgctctgtctggttttgccaaatctggtgccaggctcagagcagggagagagacacagtcagcctacttccagcactggcagcacatctgtccaaagagaaacatgtcttttcctagcacaaccagcagcaccagaagcacctctcctaatctgtcaaccgtctctctgtttttctcctctctctctctgcctcctcccttcttccccctccatctatctctgtgactttgtctctctccatccctctcccctcctctttctgtctctgtgactttgcctctctctctctatcactctctctgtgtcagtgtctccctctgggtctctgggtctctgtccctccccagtaggttctatttagatttgttgtgacaaattgatgtcatattcacatagatggcattttaaaaccacagaggtcttcagagccagagcttcattcacactgcaggccagggacactgttgccatggtaacatgactctccacttcctgccttacccgggctcccgcattcagcatcaccttcatctccctcagcaacaccacagatgattaaataaagcactttaattaactcggatttggtgtggggtcttcatcatcgctgctgggaacaagcgtttgtaaaccctcggggctacatgtgcccctctccgaggcagtctgtgaacccacactggccacttctcacaatttgggctataggaaatttatatccaagtagcacttgatgagattctaaggtaatagccacaagccacctccttcacaaggcgtgagcttccttcgtctgccgagacacattaacttcatgtaaattataatgtctttgagacgaaaatgtcttagtctgttcaggctgctatcacaaaataccataggtgacttatgaacaacagaaatgtattttctgcagttctagaggctggaagtctgagattaaggcgctggcggagtcagttctggtgagggaggcttcctctccgatggcctctgctcaccctaacttcacatgggaaggggtgaggggtctctctggggtctctttcatgggatcactaatcccggtcatgagggttctcccctcaccacctagtcatctccgaaaggctccacctcctaatatcatcaccctgggggtgtggatttcagcatatgaattttatggggacacagatattcagatcattgcaaaaatcaatgcattattaggcatggccagggagaatcgactgtggatcttttagataaaggggctctggtgctggggtgacagacctgccttcctggttttcaccctagaagcaggcaggaaggagaaggaatgaagggaagggggaaggaatgacgcaggcaggggcctctaaacctggatccaggaacttaaagggtaaaaattacatttttattttcgctagcctttaactgaaatgtatcatttcctttcaataggtacctaggcaacaagcacagtggcgtgttagcatccttgtgactttgacaccagtaaaaatcactggatcatctcattccatgttatgcctgtccaccacttatgcccatcactgcttcaaaattcccaggttattagtaccacctccgaggcttgttatagatctggttatggtatattaatagcacatgtgttgctacctcattcattgttttataatggtatcttaatcttaatgtaagtggtttcctttataacctgtgtgttttattttgtgcattcaaaaatctgattctgaaaattggcccacaggtttcacagactgccaaagaggtccgggggcataaatggctccagaaaaaaaaaatctagtattattaatatggtccattattattggtgttattgccattcataggtgttagacattggcccctcaataaaaaggatatgtatctatatcgatcaatcaatcagatagatataaaattctgaagatatttatagaagatatacaggtatctatatctacctgtagatatggataatttgtttgccaagaaaattgaggatttcaacatttatttatctctatttttttttccattgaagtcctcaaaagtgatgccaatatgacatgtggaagtgagaacttgggaagctggcctgggatttctagtgggaaaaagtatattttaaaaattaagggccgggtgcggtggctcatgcctgtaatcccagcactttgggaggctgggggacagatcacctgaggttgggagttcgagaccagcctggccaacatggagaaaccctgtctctactaaaaatacaaaattagctgggcacagtggtgcatgcctgtaatcccagctactcatgaggctgaggcaggaaaatcg

SEQ ID NO: 1888397 - DNA, 4001 bp, Homo sapiens
agtgtaaatcaaaaataaaactctaagcttccccaacccactgaatggatccctcatctccaccagggggattctgaagaacctgaaaaatgagctcaggccaggaagggacggggattggacatggctcattatacccacctccctttggagttcaggtgcagctgaccagactgacagcagactccatagcagcaagacaccaagttccaatctgacgctggtatagcatcacgtgacaacaggccctcaaagtatcaatgtattttaccccaaaatatatctctttgacaaattttgaaatggccccgcaaagcggtgtcttgtggggaaattcatattctgtagactccccttccctttccagctctttttctgatcctgaggagactggctgagagtctagtgccttttgaaggtctgaataggaaacatttgccatgtattgcctctgagggcggacacctatgagatttcatccacataataaggacctcggtctccacagccccttctcttaacccagacactcctttctattgattccaagccttcagatagtaacttctttcaaccaactgccaatcagaaacatctttgaatccacctattacctggaggcctttccacttggagtcgtcctgactttctggatcaatccaatgcacacctcacatgtactgactgatgtcttatgtctccctgaaatgaataaaaccaagcagtaaaacaaccgccttgggccaagttctcaggacgtcctgaggctgtgtcatgggtcatatttggctcagaataaatctcttcaagtattttacaaagtttggctttttttgtaaacaataggcagatataaattccatttgctaatttttttaaatgctgtgtcttggttcatgaaagacattggtctgtggttctactgtctggtgatgtctgactttgctatcaaggcaatgctggcccatacatcgagcagggaagtgcccctcctcgtccatcgtctgagtggctggattcctattatttcttctctaagtaggattcaccagcttggccctctgggcctggaattttctgtgtgagaaaatttgataacaaattgatctcaaatttaacagataataagcattagtattttcttttttggtaactggcatccttcaagaaattcgtccaattataccgttttgggggctgcctgcactagagtcagcgtggcgtcccctcagaaggccgggtttgccagcgccgcgccccaagccaggtcggtcggccagtgctggtgccctcggggaacagcgggagctgcctggaggctgcggggagcggcggcggcgggcacgcacctggctcccgaaaccagacctttaataacgcctcgcagaaggggcggggtgggaggttggcagcgcaggggcggcagccccggatccccccaggtctccagatcaccccatcgagccccgcgccctagcagcacagtccctccagggctccttggagggccaggcctcagcccgggtgccccctcgccggggctccagggttgggggcacccaggaggccgcaggtgtggagctcgacggcgccccccgactagaaacccaggctctcatgcgcggctcccgccccgaccccagctccagaggggcgagagcacccggcgccgaccccgtctacggaccccctcctccgccccgcccccgccgtccagccctcccgcccctaccagccccgggcctcctccccacggacccgccccgcgccaccagccgtcagccctcccggcccccagtctcgcgtaccctccccactggcctgcagggtccaccgacttcccgaccccgggacctcccgacccccggacctcccggcctcgcggaccctcaggagcccctgcgtgggctgcgccagggcgcccgcgacagcaccgccgcgaaccacagccacggcctccgggtctgcaatggaacctctagccgctgcggtcaggagggcggagactctgcgcacgcgcagttccccctcccgcccctgcttgccggtgatggcgcataacgcatgcgcggggagggcggagctgggcgttgccgtggctactgggaacgcatttcacgggggcggggcgtggttccggggcggggcgcggccgccggaagtgcgtggccgcccggggccatggcgacactcagcttcgtcttcctgctgctgggggcagtgtcctggcctccggcttctgcctccggccaggagttctggcccggacaatcggcggccgatattctgtcgggggcggcttcccgcagacggtaaacgcgcgtccacggtgccaacgctggggttccaggaccgggcagggtcagaggatgggatgggggcggggcggggtcaggggccagggagatgggatggggtcaggggcaggcccacgggatggagggtggtccggggccagggagatggaatggagcggagttatggggcaggggccagggggatgggatggagcggggtcagggggcaggggtcaggggaatgggatggggtcagggttctggggcaaggaatgtggcggagtaaggggccagggtgatggtataggggcagggggcaggggccaggagggatgggatgggggcggggcagggatcagggcgatgggatgggatgggggcggggcaggggccagggtgatgggatgggatgggggcggggcaggggctagggccaggaggggtgggatgggatgggggcaggaacgggggcccgagggatgggatgggggcggggcgggagccggggccaagaaggatgggacggggacgggacaggggcaggggcaggggcaggggccggggccgggctggagtctgggggatgggatggggcgggggctgggggcagggtcgggccagcgggttggctgtagtcgaggctgcgtcactgcggcccgggtctgcaggcggggtcgtctgcgaggcccggggcgcagcctcgggagcccaggaagggggccgggttgctcaggctgagcgtgggctggctccggaggcccctgcaagtgacacgggtccaggcctgggtgtgcggagccgggagtcagtgccgggcgggcgctccgcagtgaattctcagggccaagacgagcttcgcggccgccctgtggctgtgggatctccaagcggaccccgggaggggcctggacgcagaggtgtgcacggcccctcgtggcgttcgcaggcctgggcgctgcacgcagcttcactcgcgacgatgggagtatggaaaaccagcgcagagcagggaaaggagagcgccagggacagggtttctgtagcccttggggacttgtctgtgccttggggacttgtctgtgccttggggcgctttgtgtccttcctctagggcagtgatcttaaagtgtgtcctggatctctgagcttttgtagccgttttaatagtagtaccagagtattatacgcctttttcacttctcatgaatgcactgtggagttttcctagaaaccacttgatctgtgatgtcacaacagattgaatgcagaaacgggtatgggaatccagctgtcaccaaacccaaaagagatttgcaaaaattaagaacatcatcacagttcttctaattcattttttaaaatacacttattttttatttaaatatgtggtttttgttaacatgtaatggcttcttatttttagctgaattaaatacttgtagctttaacgtctaacataggacgtatcaatagacatagtgcacataaccagccgtcagtcattgtttccagtgtaaaggggtctttaaaccaaacagtttgagaaccatgtgggtactgattcttgggttccagtcactgggattcctctgccttagtgttgaactattgctaattgttaaaacgatgttagcatgtctgctgcttctgcttacaggctccgtaagtaactggtcatagagaaacaggccactcactgccttc

SEQ ID NO: 1888398 - DNA, 4001 bp, Homo sapiens
aaaaagccacaattgccagtatcagaaatgagaaagatgacatcacctcatacttcacagatgttgaaaggataaaggaatattatgaacaactttatgctaataaattcaacaacttatatgcgatgggcaatttcttgagcgatacaaactacatacattcagtcaagaataaaataaactcagcagttgtatatccattaaataattcaaccacatataaaaatgataatacatcatgaccacgtgggctttatcccaagaacacaagattgatttaacactttaaaatcaatcattatactctatcatattaatagatcatcacgcaaaaagattctcaatagatgcagaaaaaacaaaatccaactttcattcctgattaaaaagactctcagcaaacaagagaaaggatagtcttttcaacagtctggaaaaaactgattatccacatacacaaaaaataaacattgaatcatatctcatactataaacccaaataaacttaaaataggtaatagacccaaatgcaaacctttaaaactctaaaacccttgtgactttgggtgaggcaaagatttcttatatatgacaccaaaagcaggatccataaaagaaaaacataaattggatttcctcaaaattaaaaaattctgctctttgaaaaactgttaagagaatgaacacacaatccaaaggcttggagaaagcatttacagatcacatatctgataaaggacttgtatccagaatatgcaacaaactcccaaactcaataataagaaaataaacaacccaattaaaagtgagtaaaagatttgaactcaacgcttactacaggagatggagaataaacagatgaaatgatgctcaacatcattggccaacagggaaacgcaaattaaaaccacagttccatctatcaccacacacctattagagtatttgaaattaaaaagacaaaccataccaagtgctggggaggatgtggaatgtaaaaccatacaatcgctttggcagtttcttaaaaagtttcacatatggctaccgtggcatccagccactccactcctagacatctattcaagagaaagaaaagcattcatccaaagacttgtgcacaatgttcggatcagctttatctgtaagagccaacaccagaaacaacccaaatgcccaccagcaggtgaatggacacaaactgtggtacattcatacactggagtaccatgcagctgtaaaagaaatacgcattgacaaaccaaatgacgcaggcaaatctcaaaaataattgtgctgagtgaaagaagctacacaaaaagtacatattatatgattccatttgtgcaaatcataggaaatgcaaagtaatcagtagtgacagaatgcagatcagtgcttgcctggggatgagggagggcagggagagatgaccaagagggaacccggggtgttcactatgctgattgtggtgatggtttcacaggagtatccgagtgttaaaacgtaccaaattgaaatatgtggcttaccgtctgtcaattacaccacaataaggctactttttgaaaaccatgaggatggctcaggtccggctcaaatgcccccaccctgcgttccttccttgggatgtcagacgctggagctggagcagaaggggacctagatgggcggagatctagccctactcacccactggccacggggtaggcgagggacgctcagcaggggcttcccgcagacccagggtcttcaagccccagaagtcctgatgccagagggaagaggggatttgcccagagtgaggggcaggggctggacccacagcccctcccggcgcgcagaccccgcccccacccataaccacgccctcagcccccaccacctcgtcctcagccccacaaccacgcccccagcatgccacaattactcccacaacccgcccacagcccctgcgacctgggtcttagtaccagctccatctaaagccgcaccaccggcccctcccatgcccctcccatgcccctcccccatctcttccaggccccgccctgccgcagaacccgccctcaagccccgcccccgcctaaccacaaatcccgttccggtctccttacatgccccgccccttccccgcccccgcggggaatcgacacagcctgtctccgcctttcgccccgccccctccaggccccgccccaccccgcccctcgcccgcgcaggccggagtcgcggcctccccagctagtggtcgcgggcgcggtcgcaggggcagcggggtggccgccgcgccaggcgtggagctgggtctggcgggctccgagaggcccgggagcggcgcgcagagcagcctccggccgccgccgcgcaggtaaagcccccgcccagccctgggagcgtggattcccacccaccccatgaccatccccccgccgcgagtgctggggtctcgggggtcccaggttccgggggtcctagggccggagggtctaaaggctggaggtcctgggggtccgagcctctcccggccggctccgcgcgcggccccgccgtccacgcccagcgcgggccgcgcgcacagggcttggcttctctgttttctcggtttccttcttcaggcagttgaaagaaaaggcgcggttctgtgcccggtgcgagccgcggctcctttagggctggcagggaagggcttgctgggttatgacagtttttaggggttgtcggagtcagccaggcgttggctgctggagtagcccctggcgcgcgagcgcccgctggtgcccggccacgtgcccagcttgacccgcgctccaggttcgggagaagctgcagccgtcaccgtcctcctggcgtccaccctgaggagggaggggctgggtggtccaagccgccgccactccgccgcccggcctttggtccccagcggtgctgtaggtggccaggggtggccgcagtgaccacccactgggccatgcggagccccctggcagtgccagctccctgcacttgtgggacgctcctcccgggcgcattgggagtctccagaagtaagttacaggcagagctgtttaaggaggcgtgctccccaccccagacccttcagtgggccctcaacaccctccccaccagtggacgcgtttcccaggtgaccgcagccggcagtgctgaccaccctccctccctctccgctccctcctgcgtcttccctttcagagctgccagagtggactgcactgcttctcccagcggggcaggatggcggtttcatgtctggttggataaggccttgcctgcggaaaccagctccatccccaggccctagcagaggctcgcgtgtccccgtccccaggtcaggtcaggatgggcaccgtgcgcccacctcgcccctcgctcctgctggtctccacccgggagtcttgtctcttcctcctcttctgcctgcacctgggcgccgcctgcccacagccctgccggtgccctgaccacgcaggggctgtggctgtcttctgcagcttgcggggccttcaggaggtccccgaggacatcccggccaacaccgtgctcctgaagctcgatgccaacaagatctcccacctcccggacggggccttccagcacctgcaccggctcagggagctggatctgtctcacaacgccatcgaggccatcggctccgccaccttcgcgggcctggccgggggcctgcggctgctggacctgtcttacaaccgcatccagaggatccccaaggacgccctgggcaaactcagcgccaagatacgcctgtcccacaaccccctgcactgcgagtgcgccctgcaggaggccctgtgggagctgaagctggaccccgactctgtggacgagatcgcctgccacacctcagtgcaggaggagtttgtggggaagcctctggttcaggctctggatgcgggtgccagcctctgcagcgtcccccacaggaccacagacgtggccatgctggtcaccatgttcggctg

SEQ ID NO: 1888399 - DNA, 4001 bp, Homo sapiens
tcaaactttccctattttaggccaggtgtggtggctcatgcctataatcccaacactttgggaggctgaagtgggaggattccttgtggccaggagtttgagaccatcctgggcaacatagcgagaccccgtgtctctaccaaactttaaaaaaatcagccaggtgtggtggcacacgcctgtagtcccagctattcaggaggctgagcccggaagatcacttagccctggaatttgaggctgcagtgagctaatgattgtgccactgcattcccacctgggtgacagactgagatcctgtcactaaataaataaaagacacctctattttagtaaatgaccaccaccatatacccagttgttgaggccaaaatcctcagagccttctgtatctggcttaatgaataagctggatgcagtagtatgtaagcagataggaacagtgttttttctcatgactgcccctagaagcttaactgtgtcaattctcagacgtagtttacagctttttcttttctttcagacattaaaaagagcggattattttactcataaaaagtccagtccattaagatatcaaaactcaaactcttatccagttgaaacctcttccctcacctagctttgccaggttcagtgtgagattccatccaggctgaagccccttatccctattcttcatgtttctacatggaggaacttacctggagaaaaacttccagcctctttctgcttccagagaagtagagtgactcatttgattgaatttcagagaacagatagggtggagtgtgctcaggctcctctgggtactctttctggggtctgtgggttgactggaggggtgtcttctggtgggcactcaattgcatagtgcttggtgaggcagtttcatggcctagaggctgggggatatgtttgtctgacttaacgggtgatttagtagcttgccctcttgcttgcagatttaagccttgtccttcaagctaggtttttaatttgtggcaaagctgatattttgatacccacccatcttattgctgtgtctttttcatccgtttctgaactgggataggaagaggtgattatccttgattgtctaaaaccccgctattccactgtggggaaggtgcctgtgggtattcttttgtccactctctcttccaactttctcctccggcttgctgtggctcaccgccccttcgaagttaggctgggggtaggaattgaggagtgggtgccgaaatgctcactaggctggggcagttgtaactggatgtcagggcttctgtgggccaggtgaagacatgctggggtcttctgtgggtccttgacctgacttacggaccactggctgcagcctccagacgtcagccatgtttccaacagtcagacgccccctgccctgttgcgcccggctgtcccttccaagttcggtcactcgctctgcctccatcttcctcttccctctgctgctaaggcttttcacctttaatttctcctggggccacccccaactccagcgaccccgtgagcagctgaggctctaccgcgctcggtcctggccagcgacgcagcccttccctggcggggctccagggcttctggcccctgtggtccgccaggtgtgggggcccacggcctcaccgcgcctaccccactccccccggcgaagctacgcggcgctcagcttcccagggacgccggcggcgccctcggctcctccgctccgccccgccctccccctggtctcgcactggagccgacggcccgcgcccacctcacctcagggcggcctcccgcccccacccccggccccggcgtccgggcaaatcctgcagcgcgagagcaattccctgccacccgaccttcgcactcgctgtcgctcgctcgagcctcgctccccacgtccttccttccgacccgcggctggaccctcctcacaaatttctcagagaggctcacctcaaagcgcggcgcacgaggccgggctcccgggacgcaagcctctagagggcgcgcgagaggccccgcccccgcccttcggccccacccaccagccccgcccccacccgcacccaccaggccccgcccccacctccccacccaccagccccgcccccacctccccacccaccagccccgcccctcatgccccgccaataaggccccacccgcctcccccgtcccgtcgccttcacccaccatccccgctccctcaggccccgccccacgccgcatggggcaccaagcgctccaccactgtggtcgcctggcacaccccggggtcacgctcgcggcgctctgattggttgcgtgggcgtcggcccacctaagcctgagcgcctgccgaggcctgcgcctgcgtagtgcgcgcgggaggggcgggaggggcgggaggggcgggaggggcggggctgggcggcaggtcccgggtgcggacatctggcagctggcagtgggcggcgtagagcactgcagcagcaatgacggagggcacgtgagtcccctcgccccgggctcctgacgaatgcggggtggtcctaggtgctgaggagagcgcgactggggcagtgggccggcggccggcgttggggcggggcctgggtcgctgatggccggtggtcctcaggtgtctgcggcgccgagggggcccctacaagaccgagcccgccaccgacctcggccgctggcgactcaactgcgagaggggccggcagacgtggacctacctgcaggacgagcgcgccggccgcgagcagaccggcctggaagcctacgccctggggctggacaccgtaagttgcttccgcggagcgtcagcgagctcgggaccctgaggggtgagccgtgaggagcacgttttctctcagaaaggcgggtgggaggacccggccagcgacgcccatccccaaggcgagcgcccacgggaactgcgttcgcgggcccctccgcttcagccccttcatctctaaaccacgcataggagactcctaatgttttattttttagcaccttattttgagataatttttgacttataggagagttgcaaagatagttgtaactttgtttttattcacaaaaagtgtttggatccactgtcttagttgtgtgcattgtaagagattttggtcgtcagagtctgcagtgtaaacagggtctcctgccgagccccggccaccgagggaaaggctgtgccgccccttgggccctctttgagaggcccgagtcccaggcccaggtcggcacccgtgccccaccctacagtctgggtgcctggtttattccagacatcttggagaagttgtgaagaatacatgactggcaaataaagcaacgaaaatgtgcagctgttcttttactttgctgaggtgtgatgctctcatcaaagagtttcagacttttgatggaaacagctgaaacttttaaagtaatttacattcactgttttgacttgggctgtatgtgaagagggttcctctggccgggcaacagtcccgtcagctatctctttttttttttttcgatctctttgcagaagaattactttaaggacttgcccaaagcccacaccgcctttgagggggctctgaacgggatgacattttacgtggggctgcaggctgaggatgggcactggacgggtgattatggtggcccacttttcctcctgccaggtaggagtatgctgccccagcctgatggtatggccaccctggatcacccttgggatcctggcccagcctggtctagggttttgatgaagcaggtgaaaatccaggggctcacaagaaaagggctggcaaactctgccctatgtcagagtcgtcctgctattggtctaggggatcagctagccttgccagtgtagggtgacaggctctctgataagagaagcaagtggttctctagggctctgtgttgccttgagggaggaggaaggtgggctttgaagtctcagtacaggatgggatggacattccaggtggaaggcccag

SEQ ID NO: 1888400 - DNA, 4001 bp, Homo sapiens
ggagggtgtgggggacgtctgtgcctgacccaagccacgttttcaaatgcctaccagaggaacaaagatgtttctgccaatttcgcaacacccccaatcctccaccgacctcgtagccctgaagcaacttcggctggcacaaacccacaaagagtgggaaagaaacacacagagactgagagacagagggagaagagagaatgggagagaaacacacagacacacacacacacacgcagagtcatacagcacaggcattgaaacacacacccccaggcaacccctgaggctccggggttctgctctggaggagaacgaccctcgggtgagagagcagcccaggggcacgcaggccgacccgtcctcgagatcacggacagcggcgcgacttttggcgagactcaccccaacaaacaccgtccgtgcaggcctgaggctgggatcccgtgctgcttccccggtctccacctggggtttcatcttcatagtcggccctttgcgactgctggcatcaggagagtttcccttcgagcccgtggagaggtgagaccggagcctcagagcctcgatacccaagcactgccacggagggctcctgctctgcaaagcctcggggactggtttctaagacaaccgtgggaacccctgtgacccgagaaaccgctggggcctcgcgcatgcgcattggctgagccgactcacgctccactcctgacagataggctgcgtcccctttaaatatcgcgaccgccgcgcggcagccgcgatgctcctgctgccgccacgaaggcggctgtgtcctgggtcctgtttggggtggcatgggagaggggaccgcgggtgtctcgtcctgtcccaggcccaaacccccagggctcctgtcctcaggacctgcttgagtcgacttccaccaagggagggggagcttcaggacgcctgctgtgttctctggactcccgttgagatcccattctggccccatcggagtgacataggatgggctcaccacatgtggtcaggccggcagggcctcgctgcagcacacaatgaccccataggtctcaaggcctagtgtcagagcaaattcactcatccatcagccctctgcctccctcctcctttgaaagtgcagtggcctgccccgcttgtaaaagcccaggggttctggaaagccgaacgcgctttacaggacaactgcaaagaggaacagaggcgaaacccagggggagaccatgtgaccacgcgtggcactggccagtcccacagcagttggtgttaatgagtgtcaccggagggatatggggcgacggcgaaacgaagggtggggtccagacatatgccggtggaagggggaaacgggtgacatttccgtcaatgccaaaggaaaatcaaacaacacctgggaaccgtggggtaggggggcctcctgtgcctgacccaagccacgttttcaaatgcctaccagaggagcaaagaggtttctgccaatttcgcaacacccccaatcctccaccgacctggtagccctgacgcaacttcggctggtacaaacccacagagagtgggaaagaaacacacagagactgagagacagagagagaagagagaatgggagacacacacacagacacacacacacacacacacacacacacgcagagtcatacagcagaggcattgaaacacacaccccaggcagcccctgaggctccggggttctgctctggaggagaacgaccctcgggtgagagagcagccgaggggcacgcagcccgatacgtcctcgagatcacggacagcggcaaggcttttggcgagactaaccccaaccaacaccgtccgtgcaggcctgaggctgggatcccgtgctgcttcccccgtctccgcctggggtttcatcatcatggtcggccctttgcgactgctgtcatcaggagaggttcccttcgaccccgtggagaggtgaggccggagtctcagagcctcgatacccaagcactgccacggagggctcctgctctgccaagcctcggggactggtgtctaagacaacagtgggaaccactgtgacgggagaaaccgctggcacctcacgcatgcgctttgggtgagccgactcacgctccactaatgacagataggctgcatcccctttaaatatcgccaccgtcgcacggcggccgcgatgctcctgctgccgccccggcgtcggctgtgtcctgggtcctgtttggggcggcgtgggagcgggggccgcgggtgtctcgtcgtgtcacaggcccaaacccccagggctcctgtcctcaggacctgcttcagccgatttccagcgagggagggggagcttcaggacgcctgctgtgtgctccggactcccgttgagatcccattctggccccctccgagtgacataggatgggctcaccacatctggtcaggccggcagggcctcgctgcagcacacaatgaccccataggtctcaaggcctagtgtcagagcaaattcaccgatccatcagccctctgcctccctcctcctttgaaagagcagtggcctgccccgcttgtaaaagcccaggggttccggaaagccgaacgcgctttacaggacaactgcaaagaggaacagaggcgaaacccagggggagaccatgagaccacgcgtggcactggctaatcccacagcagttggtgttaatgtgtgtcaccggaggcatacggggcgacggcgaaacgaagggtggggtccaggcatgtgccggtggaagggggaaacgggtgacatttccgtcagtgccaaggaaaatcaaaccacacctgggaaccgggaggtgggggtgccgactgtgcctgacccaagccacgttttcaaatgcctaccagaggagcaaagaggtttctgccaatttcgcaacacccccaatcctccaccgacctggtagccctgacgcaacttcggctggtacaaacccacagagattgggaaagaaacacacagagagtgagagacagagagagaagagagaatgggagacacacacacacacacacacgcacacacacgcagagtcatacagcagagacattgaaacacacacccccaggcaacccctgaggatccggggttctgctctggaggagaacgaccctcgggtgagagagcagccgaggggcacgcaggccgacccgtcctcgaggtcacggacggcggcacgaattttggtgagactcaccccaaccaacaccgtccgtgcaggcctgaggctgggatcccgtgctgcttcccccgtctccgcctgggatttcatcatcatggtcggccctttgcgactgctgtcatcaggagaggttcccttctaccccgtggaaaggtgaggccggagcctcagagcctggatacccaaacactgccacggagggctcctgctctgccaagcctcggggactagtgtctaagacaaccgtgggaaccactgtgacgggagaaaccgctggcgcctcacgcatgcgcattggctgagccgactcacgctccactcctgacagataggctgcgtcccctttaaatattgccaccgccgcgcggcggccgcgatgctcctgctgccgccccggcagcgcctgtgtcttgggtcctgtttcgggcggcgtgggagagggggccacgggtgactggtcctgtcccaggcccaaacacccagggctcctgtcctcaggacctgcttgagccgacttccaccaagggagggggagcttcaggacgcctgctgtgttctctggactcccgttgagatcccattctggccccctcggagtgacataggatgggctcaccacatgtggtcaggccggcagggcctcgctgcagcacacaatgaccccataggtctcaaggcctagtgtcagagcaaattcactcatccatcagccctctgcctccctcctcctttgaaagtgcagtggcctgccccgcttgtaaaagcccaggggttccggaaagc

SEQ ID NO: 1888401 - DNA, 4001 bp, Homo sapiens
agttccaattgtgcaggattatcagtaaaaaacattttatatgtttatggtgaaaatgaacaaacatgactgcattctcaattcagttttggtatatttcttttatgagacagaagttaatatatagtgtggttcatgaatatgataacattaaaaaattttcacgtttgaataacctatatctgatatcactatagccaataaacatctaccccttacattgttttggaactaacttgatggaacctttcacagatattatttatgatcatgttaaaacagatgttagtaaacacatacttgtatgtgatattcttttttacaagaagtactttcagatccattgtgtgaacattgctattaaatgtaatcaagcttctgtgtacatgtagacacacatacatagatttctttgtattaagaaacttatggttttaaaaaatactcaattccaatgagaatgaggtcaaaagaaataaaagataaatactaccaaagctctttactgtttatattacctcctttcatttggagctttaaaacttatatttatacatatacatacacacacctaaaatttcagaacttctagataaatgaagtagatgatataaataaagaatctgaataggtacagtgtgcatacatgcttaaacatattctgcatgctttatatagatgtgtatgtttatgatattgttatagtaatttttaataactatgactaatagatgatttgtattctgtaatatttcaagtaggtattataagaaatttttaaaaagatgaacaaagactccgtacagtattctaaaatacattcataaatttattttaacaatgcagaagacacataatttatggcacccatctaaggcaatagttaaaagaatgaagccactttgttgcttctattaaggaaagtctgtcatctccattttgaatcttgatatttgtaacattattgtaaaatttttaaatagatttagcatactgattctatctccaagaaagacatatctgatgtggcaatggctattaaactttcaaatatgacatattacttatggttggaatagttacctccgataaagctaaaattcttataaaactaaaactatgcagttcatatgcagttgctagtcaaagcagtttgacttcataggtggcgtttactgttttatctcacgtaggcccatgatatgtacacagtaaactgtaaaaaattttaaaaagacatattttcccagattattggtgaaactttcactcttggactctcgtaacaaaataattgttagaattgttaagacatataaagtatgttggttggatagaagactcagaaaagccctggcaataaatacaaagtataaaacagcattcttcttaaatcggtagtaaaatctaatagggtcaataaagaagattgtaaatcatgttatttctaggcctcaagcatgcttatagctgtatatgacatagtctgagccatagttatatggaggcatacaggatttatttaagtagctaatgtatatatttcaatgcatatgaaaagttataaatataatcccctctcttcattaactgaagagatatcctcttatactagccaccttaaaatgcaccaaaagaagcattttaaaacacttatattttaattttgcttcttacacaggtttcttatattgcttttgtatgatcgttataatacaaacgctatttcagtgcaactgtgtaatcactttagagtacagtttctgacaatagtatttttggggatgggtcatggtgaaaacgttgctgatgataaagaaaagcattgttcttttctcctaggcagaatctatgtatgttcttttgttctggtggtaactgcagacaatcaataaggtccaaagctgctggttcccctccgcctaggtcccaagagcctgacttgtgatgttactaaaatacctcacaagttagggtctcagggactaggaaaagtctggtttgatgcggtagaattcttcttccagaaataaggatagcttagaaattacagttgggttcacttagacttttacctctaaatactatttaaaatacttcagtagaaatatatatgatatataaaagttaggatgagctgagtaatcacgacgaccatttatagactaattccagaccttaaaataatgaagaatatgagaaacaatgcagacaatgaacagttaagagtcattccattagatccaaagaaagagactaaacatgggttaaaatctgcttctagcagatttgtacagcaacaccatagcctctattacattaaagaaggattatatgccagttaatgggaccctaattgaaattttgcttcccattacactgctatacagcacaactggtaaggtgggcccaggacatataatactttaaatcggatttaaatatataccgttgcagttaagaacaaaacaaaaacttttctgcatgtcataatttaatacctctgaagcttgatttttctctttgaatctccaaactattcagacagcaaatatttccacgcatactctgtagttatttgagcaatgccacttaataaacatgtaatttaaaatgctggcaacatcataaaaaaaccatgattctatttcttgaataattacattataaagctcaatacttttaaaaatacacaaccccaatcctgtatattcactgaatttcctccgatcttttagccttgtttgtggttcgagaacagaatttgtactttaggaatgatccaaggtttagtagcatagaacgcagggtaaaacaatcggaccagccataatgtaaaagtcctggccacagaagtggaatctggctcttctgaggtggttgatcttaaaagggaaaagaggaggaaaaaaaaaaaaatggaaagaattagaatgttttcctgtagaacaggtgaatcatccatttccaagtaagctgcaaggaaagctatactgcacaaaatatttggtaattggcccccctcctccaccctagtaccacacccctttccaaccaccaccccccaccccctgtccagatctttactctgccttgtaagactttaaatattctgctccatgatgtaatgcatcattatataagatctctttctgtttatcatttgatttcccatactgaatcacttatggcttaaaataaatagttaaaaaacaaaaaccaaaaaaacaaaaaagcagcactcacaaaaagcgaaaaaataaaacagcccttagatctaagtccatgcttttccctaaaactgaatatggctttacaatttttgaccatagcattcaaccaattatcagaatgaaaaatctcacccctccataaaaatgacattaacataattataccacccccatcacggagacccatcctccttagggaatacatctgatgctccaaagatggaaatcagtcagattttagttgctctccaacgtacctttgcttctcactgactgactggcttttaccctccacgcactcacacgccaccccctcccctcggctagacacggatgcccgagcgagcacgcgcgcgcacacaggcatacagatacacagcgagaggcgaggcaaagcatctgatgctgactcagagcgcttctgtgagcagggggtggcagcggctggtattttcactgcgctcatcattaacattaactcacagtctagcatccaccctctcccagacctgctggactgcagcatttgcatgacgctgtcactctagcctttgcaggtcagatgatggaagcaaaaaaaaagaaagaaaagaaaaaagccccaaggctgtctcataggaaatgccttcatttcttccagggtctcctcatttttccacctttctacttcctctctggctgtttctcagttgtttgacatctttccggaagaaaatgtcttgtgcttcattgagccagtcgtcagttggtcctcccctcacctcacac

SEQ ID NO: 1888402 - DNA, 4001 bp, Homo sapiens
agtgcctttgtaatgtttatagctttttattgtaacagcaggaaggttatactacaatagtttattccagtcctaatgttctatgactttgtgtctttaggcagcaagcaggattttgaagaactgggactcaaagcaaggagtcctcttgtagatatacagtggcagataaaatgaattgaacagacacttttttttttttttgagatggagtctcactctgtcacccaggctggagggcagtggcacgatcttcgttcactgtgaactccacctcctgggttcaagtgattcttctgccccagcctcctgagtatctgggattacaggcacgcaccaccatgcctagctaatttttgtatttttagtagagacgaggtttcactatgttggccagggtagtgtagaactcctgacctcaagtgaaccacccgccttggcctcccaaagtgttggaattataggcgtgagccactgtgcctggcctgaagaaacactcttgaatgtgttctacctacatgggagctccgtggagccacaagctcattccaggtgttaggagaagaaatttgtgttggcagcacatacaacttgaacagaaagtgaggagaagaaatttgtcttggcagcacatacaacttgaacagaaagtggggcaaagccaaatgggtattcttacatgagaatactgtgtcctaggagtcaggaatgttccctttagtgtcctcataattttcttccattgtctttttttggcagatagcttctggaattataatttgtactttgcaaaagaaaatgggccataaaaattattttaaatcaactaaagactcatgagatttatttggttacagtgaataacctggacaaaatgttgagaagagttgttaaaacaagtttacattaaatatactaacaattacgtttggttacatatttgtaagtgatggttatttagaaaaactgcatagaaatccaaaccttaaatattctgcaaatcaaatcattagcttttctcttctctaataaagtagggtgactagttcttggattaatctaactataacattaatgtagcacttgattatcttatggaataattctctatctcatctaagcctcacaacaaccttgtaaagtattatccccatatggaggaagaaacaggcttagaagtggaaaggtagattctctgctcgcacaaccgtattatgtggctaagctattgaacttgaacctagatttgggacttcatttcaaatatgaaattttttgattaaatctttttatcttgtatggaaaaaatatctcattagctgtcagatgttatttaccctgctaactgttaaaaatatttcattaaaaaaattcagcttcatagcctttcagtttccctttaagagtcaaataaaagtattaattttaaactgaagttgcctgaacagaaaatcgttacctgggggaaagtaccagtttctaaatcttttaaaaaacgttgccagacaatccatgatataactggaggttagtagtccttctaatttttaactacaaaaatattatagaaatttgtgtttagcccacatttctaacagttgaatcaaaggtgtttatgaacattataatgaacaagccaaaacctgcaattaagaatgacatgaatatattttctgttaatgataaaaacaaacatgggcttgacatttaaatgaaaatgtttgcatttaggatactactgataaatcttttaaataaccttactttcaaaacttagtttaaggttgaacatcccagtgaccagattatgattaacagattgaaaaatgataaagcctgaagtctaagtttatccagcagggtgactcatgcttctttgtcatcctcccacggcagcaatttgttccatgtgaatgctagtaacaggcatcatacactgttaatgctaatatgtaggagtcagttggaggcaaaaacccctatcacgattagcattaacagcatacagcctacagcaagccttcagcactcagaggatgaggcataaagaatttaaaccacagatttccccttcctggtttgtgccacctgcaagagagaaagaaatgtttgtgtatgcacatgcggttataaagctggagtgacagcatatagtaaatctgaaaggaaaatagtccattttctgttgaaaggaaggagctcattaaatccttggaagtaattttttgaaagtggtagagaaattggcaattaaaagatgacattgttacctttaggcatatttgaagactttgaaaattatgttttaaattctattctctagttttgaatcgggtacacatatgtatcatcttctttaaataaaaaacaaaaaccgctcttcggagttttcaaatgccaaaatgcaaagaggaaagcttgcattctgacacagtacagttttttttttttctgatttgtacttcatctaggagctagacaattaaaggcccaaatgttcaaaatagtcctttatgatttatgaaaattaaaacccaattaacctgttttataagggtagggttcaggctgaatttttctttctgtaatacatagttgaagttttacctttattctttcaggaaatgtgatacaagcaatggaggtttgcctacaaacgaatctatctgaaaatgtccccgtctactatttagagattcctttggggaaagcactacccagtggctttggttttgactacataaaggaagtatgacttaaagagtcctctgtgtttcaaactacttgtcttaggcagagggttgattaaaaaaaagaacaagatgaatttgctacttccttttagagtctgattttactctctcagataaagtgacatttctcccacaggtttctgatttcagtgttactataacagaacctagaagttagagtatcattcaagtatgtggtctcctgcagtacaagaggggaatcaccttttcttttatttaataatgaaaccagctagatataaaaatgtgactaagttcaaaagaaacgtatgaagtaaaaaattccccagtgaatatattttgacagggcagaatatcgtggtttggaaatttccaaaccaaggaaatatattattcttactgatagtatttttttttaaactttactgttttctgagatgaattagttgatgatgaaaaaatttgggttaaatgatgtcacttcaggaattcaattcattttacagaatttcagtcaataaagattgtaaaaacaaggactttttttcccccttacagggtcctggacacagtaaatgctcaataaatacatattaataatgtagtgttagtgccaccccagccaatataactcgcccttttcttaaaagatgtgtttaatttgtattgaaggtaaattgctggcatactattctacccataaattttattcctgttctttaaagataacatatgagcacaggtattaaaataaatatatttagtatactaattagctttttccctctttttaaatatacatacgaattgcctgattagagcactcagaaaagtgacagtgtttttgataatgtgttatatatattaaaaattctaatagctttttttatttgttcaaactctaaatgtatattgaaataaaacatgtcacacaggtccccttttgttctcaaacacaaccttgtcatacaggcatgatgaattccgaacactgcagagaaatgagaagtttgtctaaatatactatagaaccttaggtcatatttaaaacacaatgatagatgaaaaacattaatgaacagaagaaaggagaaatatcccagaaaaaaaaaaaaatatatatatatatatatatattctacaatttaaaaatagtagacttttaaggacattagaatgactagaaggtcattcattcatcagtgtggagtctatgtccacttccagtgtttttgactgggctaagcaaccaacaacagaattgct

SEQ ID NO: 1888403 - DNA, 4001 bp, Homo sapiens
attagttcaaatatctatgttaccaaaattgaaatgatatcaaattgcacagcaatgtcctgatggcctttcctctaactttctgggtttgtaagggtagggttgtgcctatcctgctcacctttgtctctccagtgtctagcatagcgtccagcacaggcagactatgatgcctgttttttttttgttgttgtttttttttttttttttttggtaaagaccagtgaattacactttttacacatgactaggttaaaacaaaagtagacatttgtgcaaacaccactgttctcccttgaagtggttgtaggtctcagacagtgctaatttttctctttcttaatgtgtgtggttaggaagctgggtcctgtggccagagtgagctgacccactatgtgaggaaacttacttatcacagcctaataaggagtagtccttgcagcagaagtaattactaaatgtgctttggtcatttgacagaaatcagggaggcagcaaggagtcatggaaatgagcccaaactgagagtcaaaaccctgtggtctgccgacacccccatcccacatccgtacctaaaagcaggctgtgcactagggacctagtgaccttactagaaaaaactcaaattctctgagccacaagtcctcatgggcaaaatgtagataccaccacctaaccctgccaatttcctatcattgtgactatcaaattaaaccacaggcaggaagttgccttgaaaactttttatagtgtatattactgttcacatagataagcaattaactttacatatacccgtttttaaaagatcagtcctgtgattaaaagtctggctgccctaattcacttcgattatacattaggttaaagccatataaaagaggcactacgtcttcggagagatgaatggatattacaagcagtaattttggctttggaatatacacataatgtccacttgacctcatctatttgacacaaaatgtaaactaaattatgagcatcattagataccttggccttttcaaatcacacagggtcctagatctgctgtgtgatgctggaaaagtaacttcacttctgtgggcctcagctccttaatttttaacatactttggattcttatatctttgtcagctgtcaacttcagtgttttcaggttaaattctatccatagtcatcccaatatacctgctttagatgatacaaacttcaaaagatccggctctccctcgtaaaacgtggaggacagacatcaagggggttttgtgagtaaagaaaggcaaccgctcggcaaaaacgcaccctggcacaacaggagcgaataaatacagacgctgattgagcgtttgctccatcttcacttctgttaaatgaagacattgatatctaaaatgctatgagtctaactttgtaaaattaaaatagatttgtagttatttttcaaaatgaaatcgaaaagatacaagttttgaaggcagtctctttttccaccctgcccctctagtgtgttttacacacttctctggccactccaacagggaagctggtccagggccattatacaggtacgtccccaaccatccaaggaaactttgcaaagaagctcaagtattaggtttcgaacacccctccttccccctgcctctgcccgcgggaatccatccagcgcaatctctggtcccgggcgaggcgacaccactgagtccccagggggcacccgcaggcgcgcgcgggaccaggccgggctccacggccacgtgcgcgctgcccccgccttgcctcgccagttaacccggcggtgaccctcgcaccgaagtcccccggcgtccctgccacgttcaagagaggaaaggcgggcgggagcgcgagactgaagtcggcgtacctgcagtgccaggagcgtctccttggttccccgcgcttgctctgcgggcggctcggggctccgctatccgctcccttcccgaggctgcaggcggcgctgggcccgggctcggccgcgcacaggaagcccgcgcctgcgaacgtgcgacccttttataactcacttgtgactcataaccgaccaggcgccttttctgcaacccccccccccttctcccccctcctgcctgttcttggaacctacagcttgaaaaacttttttctttttaaaggaaaagtcgaaaaagcccagcgcccgggtagttggtgttttcccctttccctttctcgtgggtcattgcgtgtgtgtattttttttctctcaacacacgccgtgtactttcctgcaccgcgccgcaaggcttgggctccaacctttgttcttaaagaaaaggaaacgccttcaaatgacggcccagacgtcgcccgaactttcagtcggctggagggggaagtggcgacttcttgcaactgggtggcaggagtgtctctactctctccttgcagggagcccgagaggagcaagtgggaggtttttcctcctggaccgaatcagctggagaccagcaggtccctaagagaggaagaaatggtcttcaggcgatcctggatttcatccctacctcatcacccttcaagagcccgcgtttggtttggaatacgtaactgggctttgagaacgtttgtactgtgtctggtacccgcatttatactcgggatgtcaagatataggacttaaaacttcaaaaattttgacctcaacaacattctccccctgccctccactcccatctccaggacatattcctggagcatatgggacttcggtcgttttaatttttggttttgtcgcttctctcttttctcccggaccctgccacaaggggaacattttcctggagcagccatttgattttgggggatggaaaggaacaaatagatctaaagcctggcaagtttatcctacaagcctagtcgagtaactcattcatgggtctcagttcaataaacgtttagacttgaagaagaataaggaaatatggggaagagaaggaggacaggaatagatctagcctcatcaacatgtgactggggcctttttgtaagaaagacggggccactgctggattgcattgcaagtatccagtacttggacctccctgtcaagggcacaagacattttagaatagtttgtattaaactgatgccagttacatgtcagaatacatgtcagagctggaaatcccatagtacttaatttacagatggctcaggttggttaaggaacttgggagcattttaaaaccctctattcttaagatacatgctttttctcttataattcaaacaagaataatcatgatgataacaactaacacttataaagcatttaccatgtgccagatcctgtcctaacactccttatatgcattaactctttcagtcctcactatgatcatatgagggaggagcattataatctctatttccagatgaggaaactgagcacagagagattaaacatgttaccttagatcctagtaagtagtcaagctgagattcaaactcagttccaaccctggagggctggctccgtagtccagtctccctgctttccagatccatgtgacgttgaggagctggggaagttgtgcagtggggcatgtggcaaggatgcatggtccccacccaggtggggcacgtccctctgctggttacagatgcctacaatgcctttctgaatttcccatttctcattctaggttgaactataagaaattgcccataggcaattctagggtgacctttcatccccagaatgacaagtttgtataatgcactttaatagaaacaggaaattgctcaatcctcccttctcccagtggtggaagtaatttcaggtcatgtgcaaacctccgcattttaggtcccagtttgagacacccagaatagtggatggataaatgggttttaggagtcaaatacacctgcattttacactaattctagctgtggaatctgaacgttaaactttttatgtctcagcttcctgtaaatgacaataatgatgtctc

SEQ ID NO: 1888404 - DNA, 4001 bp, Homo sapiens
tgggtgcccatttccatatctcctcgatgggcaggtcttcctggcctgggtctccagccagccccccacttgagctttcaagccagtagcaactcagcaactccctggacagagcttccaggagcaacagaaatcctctctgccactgcctctgcagtggaactgcccttgctaccctcagaatatcaagggagcaaagaccctaagtaccatattgacacctccaacaagctgcagttgacacaaggaacaagtcagtccatcttccacaggtacaacacaccccttactgctcatcaccagacaaggaaccctggcttgggcccacaacacagaccctccatcctggggtgattacattaagtaactgctaacttacacctctctggggtggagcccccaggagacaaggaaagtggtggagcagcaagtcagctgatgtggagcccggagggcagggacagctatgtctctaggctccacttgctcttatgagacactttatcccagcactttaggagtgctgaggtcagaccagccccatctcacatgcaggattgcccagcacagatcaggtctaagagttctcttcgtaaaaaaggggacttgcttaaaaaagaagtctggccacgtttgtgtagagcagttgtgctgtgctgaggattcacttttgagagagttctcctctgagacctgatctgtgctgggcagtcttgcacatgagatggggctggtctgacctcagcaccccttagtctgcttgcctctcccaggaccccagccaggccacacctgcttagagggcactttcgggtgcccacaccatagcttctgtacaagcggaccatgcctgatcaatggagagctgcagcaaggtgacctctacagccacgcactagcctgcacattacctctccatactgcagccctttatatggaaacttcctacatcactttgctgtgtgtgtttacacaggtgggttttgttgtacttgccctaacagcatatgggaatgcagcacacaccccaacccacaccaactgccactgaagatgaagccatggtgggcacagaaccaaaaaccccacccctgctagcatctcacccttgaggtaatgctgtgcagaggaaaagggaccttcttataccctgagtgaccactgttgcttgggggggatcaaagaaggcaccttcactggccagccacccaccccaaaccagcactacctccagtgcaacagcacacacagcaggggccccctggcccacaccccagctgttttgcctccaccactgggtgaatgcccacagggaggcagggacttttgcatctggtagcattctgccacagctgccgcactttggtcccctcagtgcagtggactccaaacctcgaggagccagagaacaaagttgtggcccaatacaagttccccagagttaaagcacacagtccaagaattgggagctgcatgttggccccttaaaatcctccaaaaacaaaacctgttggctgaatccaccttacaccacaatcaaatcctcaaggtcatcagatataataaaggaaaaataccctgtccaaacgtcagcaacctcaaagattgaagatggataagcccataaagatgagaaaaagactctgtgcaagaacactaaaaactcaaaaattcagcatgccttcttttctccaaatgactgcatcaactctccagcaagtgttcagaactgggctgaggctgagatgtctgaaatgatacaagcagagttcaggatatgggtaggaacaaagttcattgcgtgaaagaagtatgttgtaatccaatacaaggaagctaaaaatcattgtaaaacattgcaggaagtaacagacaaaagagcaagtataaagaagaaaataactgacctgacagagctgtaaatcacactagaagaattttcataatgcagtcacatggtgattgtgtgtgattgcattatgaatattattgtatgtgtgggcacctgagagtgccctgtaagcaggtgtggccaggctggggtcctgggagaggcaagcagactagggagggctgaggtcagaccagctccatctcatgtgcaagaccatccaacagaatagaccaagaagaggaaagaatcccagagcttgaaaactggctttctgaaataaaacaggcaaacaagaatgggggaaaaaagaatgaaagggaatgaacaaaacatctgagatatatgggattatataaacgaccaaatctatgactgattaatgtacctgaaagagatgagaatggaaccaacttggaaaacacatttcagaatatcattcatgagaatgtccccaacctagccagacaggccaacattcaacttcaggaaatccagagaacctcagtaagatatgccatgagaagatcatccccaagacacataatcgtcagattttctgaggtcaaaataaaagaaaaaatgttaaaggcagctagggagaaaggcaacatcacctgcaaagggaattccatcagatttagcagacctctcaactgaaactgtacaagccagaaaagacattcaacatctcaaagaaaagaaatttcaacccagaatttcatgtccagcaaaattaagcatcataagtgaaggagaaacaagatccttttcagacaagcaaatgctgagggaattcgttatcaccagacctaccttacaagagctcctgaaggaagcactaaatatggaaagaaaagaccaccaccagccactacagaaacacactgaagtacacagacaagtgatgctaaaaaccaactacataagtctgcaaaaaagccagctgacagcatgacgacaggatcaaatccacacataccattactaaccttaaatggaaatgggctaaatgctccaattgaaagacacagggggcaagctggataaagaaccaagacccattggagtatgccgtcttcaagaaacccatctcacatgcagtgccatacataggctcaaaataaaggaatggagaaaaatatttcaaggaaatggaaaacagaaaaaagcaggtgttgcactcctagtttctgacaaaacagactataccaatacagattaaaaaaaaaaagagggctgggcgcggtggtttacgcctgtaatcccagcactttcggaggctgagacggatggatcacaaggtcaggagatcgagaccatcctggctaacacggtgaaaccctgtctctacgaaaaatacaaaaaattagctgggcatggtggcgggtgcctgtagtcccagctacttgggaggctgaggcaggagaatggtgtgaacctgggaggtggagcttgcagtgagccaagatcgtgccactgcactgcagcccaggagagacagtgagactccgtctcaaaaaaaaaaaaaaaaaaaaaaaaaaaaacagaaggagattacaaaggtggtcctgacctttgataaatctcattattgcttgataccaacctgggctatctttattgcccaaaccaataggataatgtgctgaggttagggagcttctcccccgcagataatccctgatctcccaaaatttggttgacatctaaggttgattgccatacaactccttttctgaagttttacttatttccaacaaggcaagttttcctgcttccatgatgatggagagcaggcacctcctttcttgagtttcagcttgcttctgacagggaaggtgagtgtaagttttttccagcttctaagatggcagagaacaatcaccagcctgagacttatttccaggtaagtagctgaattagagttttgtcttaaaatttttccttaatgactaaaatttaagattactcaccagctgcttttaatttctccttaccattagaacactcagtaatcatatgaattgtgcatttgtttgttttgcttaactctttttgtttgtttatgtttggggttttgttgatgttgtttcacttttctcccatc

SEQ ID NO: 1888405 - DNA, 4001 bp, Homo sapiens
ccacactggtctcaaactcttgggctcaagcaatcttcctgcatcaccctccttggtagctggaactacaggcatgcaccaccatgcccaaataaattttcacaatttctaatattattttggtgtttaattaaagaaccaagaagagaaactgataaaaagctctctcctaaaaactacatgatatcaaaataatatgtgccaaaaaaacctatatgctatgtggcacagtttcagaactgaactttatcagacagattccctgattactgtaataagtaactggatccattaaagataattttaaggatgaggtttttttaaagttacaatagaataattttaaaagtcacagtaagtttacttatgcaaagaaacctttaccagattttatatattctctattgtggacacgttttttctaatataatgttgctgtcactatgtattctacagcccgttccagtttttggccctcacaccctcaaagtatttaccaatcatttgttatttactgaagtaaaacaaacaaacaaaaacaaaaaacaaaaaaactgtttaaatcaactactcatatttctataaaatgtttttatgtgaccaactttatattaccaacatgaaattatgatacatacaccactgctaaacatgaaaagtaaatactatacagaattagattccaactgagaaaatcaatttaacaagagaccattttaccttggtagtacgattaaagtcttcctcaacttttgtagactgtgaattttcagtagtcggtttgccaaaaagactagagaaaaaagataaaacaaaaatgagcaaattcatatatttaaaaagaaaatctgctagttcatatcttggtgctcactccaaaaaatgagaacaaaaaaaatctggggaaagatcagtcctcgatatattaaatcatgtttcttggcataattaaaatatgccatctggtttttgttgtttttttttttgagacggagtctcgctctgtcgcccagactggagtgagatggcgcgatctgggctcactgcaagctctgcctcccggggttcacgccattctcctgcctcagcctccccagtagctagggctggagcccaccaccgcgcctggctaattttttgtatttttagtagagacggggtttcaccgtgttagccaggatggtctcgatctcctgacctcatgatccgcccgcctcagcctcccaaagtgctgggattacaggcgtgagccacggcgcccggcccctctgtttttaaaaaagattgtatttacctattttcgactctatctctccaacctgtaacatccaatgaacactcactcttagttccataaaaaatagtgaccgccaatataattggcataccctgagtataattcgtcctcacaaactgtcctctatggtgaactgaaaatgtacttaatggctgacataacttttgatatctaaactggaacaaacttgataacctaaaatgaggaagaaaggtacagttaccttgtcccttatccattgtctatctctgattcaaagactaatctgtgtcactggaaaatgacattctttgtttttcggcataaaaaccacttaaaaaggccttgttgcttcccttcaccctaaaacgctacaagagagtgccctgaaatatctgaaatgttgaaaagctgaacctacaaatgtcaaaatacaaatctatatttgttattgggaatagttttctcacaaaaattgaaatattaaaagtaataaagtctaactacttattttataattgtccttccttgttcaggtctacataaactagcaaagccttaaaaatcttcataggtacttatacccaaggagagagactgctagaaaaactgagtcctgatagttgaatttctctaagtactatatatacagagagaaagatcaggaagtgggagccactatatatagtgaaagtgtctcccacttccagatctttcttctgcagagcttcatggcagtctccaacctttaaacatttagctcatctaagcacagattactgaaaagataaactcaatgaccaaccaataagctctgtatttacctgttcctgaaaaacaactaaatggagtctcagtcatgttaccaaaaacccaactgaagctccatgactaatttgacagccaatcttccccctgctttacatgtacatgggtaggacatcagaggcttggaagaagaggcaaacgggaggggacacctgccttaggccacagatctatgtaattcagcaaccttcaatcccctagcactcaaggggctctaagccactcctgtgagatttggggtgaaagaacagaataggacatttctattctgattgtggagacttttctgagttggtctttttttctaaatctttcaatagaaatcttgaagtttgcccattcctccaattaaacaagcaaaaaaagcagcaacctattcaggacttctttgaaccctattttagtatgcctttctagataactcccaatgtcttctgtgtttttggtcctctaatttatcttcatcaaacgtcataagatccaatattctgatctctttggtaaataaaacccttactcctaccaatcctgggattgtttctcttcaaacttggcctttccctgataattccattcttatctacttccactgggttctccagctaattccattcttatccctttccatttgtttaatcagatccatccccttttcctttctattattcaaacactcacttacatgatgatataaaaacaagagtaatgggctttgaaatgagtttaaatattacttctgctacctcttgtatttaaataagtcactttgagtttcagattctccatgtgaacaacaatttttccaggatattaaatagagtttaaaatatgaaagtattttgattagtctccaagagtcctaaaaatcctaaaattccatgtgctttaattttagctatagaaaaacggggctggcagaaagaaataaaataatagaagaaaagaataccaaggaaagcagagaagaaagtaatcaggaaaagattataaataagtcatgaaagaagagaaaagactctagaaaagaaaatgaagagtgcatgcaactaagaggggaatgctttgaagaagaactaaattaagaagtcagtaaatagagaattctataagaaatagtctctaaatatgattaacatatctatatgtagatattctccactaaaagtgaaataatccatctataggatttacctggtattgcatatgaaacaaaagcctatgtcttgtggccacagctaagtaagatctgctctaaaaacggcgataaaaacaaggtactggttaccactttaacagttaaacatgttagaacaaagtcttgaattaatcagtgttctatgggaaatctctaaaaagagttaacatataacaaaatgtgactttgtgaattgatcccatctggacctgtatcttgatcctagtgatgcacaggtctccatccatctatgccgagggggaagtgaagggattagggagcaaggtaagcagatggcaaactcaagggtcagctactttttagctatgaaatcataggtcaattaatcaacctctctgaatcacatttgcctgattaatacaaagtaggtgacagtagcacagatgctttgcaaagctgtgtgatgactatgtgaaatgataaatattaagcacataatacgttgtatagcccagagtagaatactcagcagatagtgatttcttttctctatattttctgagttaacatatacgttttaaaaaaccgcaaagtcttacctgaatgtggactctacagaactcacatccactattaaagaaaagagtaaaatacattaaatcaacaaatacaaataaaaaatacagaatattaaaaacataagagggcacgatggcacatgcctgtaatcccagctacttg

SEQ ID NO: 1888406 - DNA, 4001 bp, Homo sapiens
tcttcaaatagtgcattcaattgagcaaaggacttcaaatcccacttggattagacagtttgaaagtaggagggggcagatcaattgggattttttttttttttttttcagatcactgtgcttgggaacatttgtttcttgctacaaaaagtgttagtaaatgaacatcagagtaagagaaaaggaaagctgtttgattttatttttgtgttgtaatcgggataccacttggtccccggacacctcactcagcccctgtttttttcccggtagctggaatgcttttcacactctgcacacccgcgtgtagatgcatcgctccgtgcagaggggcagggccgccggatgagcgaggacacagctgacaaaccaactccgagaaaggaaagcgggcgcaggggagacgctgctccttcctcagagcagcaagcgagccacttcttaaccgggttgcttttagctgagctcatgcataaatcctttttaaagggtactgcgcctttggaagccggccacgagcctctttagcaatgagacagcatggtggtggggtggggggggggcgggggggagggagggtatgaacacgaggtgattttccccataatagcccgtcgcccaaggcccaccgctccgtctcccgctggaagtaggtgtcgcccgcaagaaggaaatcacgttattggaggcggcaagttccaggtctcctctcccgcccagccccgcggagggggagctcacaagttctgaaacactcgcgcacacccctcagtgcgccccgggcgggggctgccgtcctccgcgactcaagagcgagcgcccccgctccccggcccacccgagcccctctgcgttccccgctcttctgtgcggggacagctgctgctttgggggcgacgctaagccgcgtggaggcgtctctggacagccccctccctccaacgagcccgaaaagcccgcggcagcagccgggggtccctaccttctgcgggggggtcccgatcagcatctccaggtagtagccgcggccagagtccccctgcaggttgtctaccatggccaagaagttggcggcgcccgcgggggacgccagggcaggctccagggcgagcgccaagccgtcggcgtggcgctcggcaggggtcccgggtcccggggtgggcgcaactacgcggttcgtggccgcggccacccggaggggcagcgtgaagggcgcgggggccagctccggggcggcgcgcaggagccactgggccagcagaggcagcagcagcgcccgggccagtgcgcccatgcccacggcggggcccggggggcgcgcccagcctagccggtcccgtcccgtccggcagccgcggctcagcgactcggccggcgcgcggggctgcgggcagggatgggcgcgcaccgggaccggcggcggcggggaggacgggaggagggcccaggggaggaggctcgcgggaggggaggaggctcgcgggaggggagaaggcggaggccggggaggcgggcgcggaggcgcagagccgccccagcccgcgccgccaagttgggcaagttcttctccgctgccccctctggcggccgcgactgccccgcagcggcccagcccctcccccgcggccaaggtcacagcggggctcggggggcgccggggtccacctgcgcctgccctccccaccctcgccgggctcaggccgcgcctcttccccgggaaactcgagtcccgaatttcctcggaaagcgccccagcggccacggccaacggatgtgacgaggctcatctgataccggggggaaagtttcgagaacccttaaaggggcagcgagggcctgaactagggccccggccccgcgcgcttgggggtccgcgggggtctattcgcccggcagtggcgggagcttccgggggtgactcggaggtcagcgaggagagcggtggatcgggaaggagcctggagcctcgcgcgcctttccgagcctgcgcctcccctcgccaagctcctccgcctcatttcagtcgccgggtctggctgctttcgaggcgtttcccgtccgctgcccccgagcccccgccctcagtccagcccgttccccggcctcatcccccggcggcccctgggtggttttaaagaggtctcagtggaggctgggagggtggagggtggaaggaggcagaggaggatgcgagagctttggagaattttccctaaaaatcgggggaggtggggggcgtggctgctgctggcgcctggccccagcctcattgcccccccttactccctctgttgcccacagctagctgcgaagctgggcttcaccccagccaccttccccccacccccgcccccttcgccccctccgccgcgcccctgtccctaatgcaggtcagatgctactggaacccgctgcctcccctggcacccagccctcaggccacctagtaagttgctgtcaggatcccaaatcagggccacgagtccaccctgctgtgatccctgcccttctcccccacctccccttctatccccagccagctctctgcggactgtctaattaatactcgtttagccatagacgccaagacgcagaaatgcgttgagtaatgcaagcaacgagggttattttattttagatactaaaggcaggggggacaattagacaagctaaagtccatcgatttctacagaaacaaggaatagaaaattctttgtacctcctccagctgaattatgttggctgttttaaaaaacaaacaagcccatcttcaaacagtggggagttagaagccaagcttccccgaatcactgcaattttcagctacttctactcaagatttgatttttattcctgtgttcccaattttagaatcacgtctagctctgcaagggacctttatgtcagagatcttcaaatgtattgattttcagatgactttaaccataaatcacacttcccccaaactatatctcaactttaacaaatccccaactccatgaagaaaggcatagctggatcccgtgatataacttaagttgatattctccataaatctgcatagttattccagagcccttctattcatatattcacgtttcagattcaaggttgtggagggaatgtgattttttttaaaatgattatttatactccttggtgtccagtcttgaggggttcaaaaagacattcagacagctctgggaagaatataatctttctgaaaagcacatgaaatgtattagggccattgataaagaggctatgtgacatataagtttaatactagagacatttgctctgtctaataattaaaagccacaagggaaatttttaaaaaatcaagtctaattaaagtttgtacaagaaacgcgtgactcagtctagggtgagtattcctaagcttttcattttaagagggatggtttgggtttgtggggaaaaggatgcataaagatccagggatggaggagcacacaggcttccatggatggcagagctgtcttgtcagaaaataatgcaagctgaagggacagcattgggtgactgtctccttggttgtctctgttttcatgaatggtcttagagcatatgatccctattcaagcctatggtgctgggtggatttgggagacaataattttactttccaggtgttggaactgaaatgataagtggcagccctctcatggaatagcattgatttttaaaccatggtgaccgatgcagggcagagaaaggagaaggtgagacccaccctcctgacctcacccctaacatcagaggacatgggatactgccctgctcttcctcactccaccagagcctccaactccttcccttctccttacagcctctcagcaccctcgttttcagccatggccttcctgagtccattcaggaaaacaaaagccctgcaattagatgggccttctctccttggaaagaacaaacatcaccattaaacatgaccctggacggtggagagcgaggaaggatct

SEQ ID NO: 1888407 - DNA, 4001 bp, Homo sapiens
ggcggctcgggcctgctttgaacactctaattttttcaaagtaaacgcttcgggccccgcgggacactcagctaagagcatcgagggggcgccgagaggcaaggggcggggacgggcggtggctcgcctcgcggcggaccgcccgcccgctcccaagatccaactacgagctttttaactgcagcaactttaatatacgctattggagctggaattaccgcggctgctggcaccagacttgccctccaatggatcctcgttaaaggatttaaagtggactcattccaattacagggcctcgaaagagtcctgtattgttatttttcgtcactacctccccgggtcgggagtgggtaatttgcgcgcctgctgccttccttggatgtggtagccgtttctcaggctccctctccggaatcgaaccctgattccccgtcacccgtggtcaccatggtaggcacggcgactaccatcgaaagttgatagggcagacgttcgaatgggtcgtcgccgccacggggggcgtgcgatcggcccgaggttatctagagtcaccaaagccgccggcgcccgccccccggccggggccggagaggggctgaccgggttggttttgatctgataaatgcacgcatcccccccgcgaagggggtcagcgcccgtcggcatgtattagctctagaattaccacagttatccaagtaggagaggagcgagcgaccaaaggaaccataactgatttaatgagccattcgcagtttcactgtaccggccgtgcgtacttagacatgcatggcttaatctttgagacaagcatatgctactggcaggatcaaccaggtaggtaaggtagagcgcggcgaggccccgacgcggccggacggccggccggggggcctcgcgaggacgggcccggcgccccgcaagcgaggaggacgacggacggacggacggacgggccgcggacgggcggacgggagggagcgagcgggcgcgggggcggcggccgggaccggtggggccggggcggggcgcgggaaccggacgccccaaccacccgccccccacgcgacacgaccaccggggccccgcgccacagacccgcgacgcttcttcgtcggcccgcccgcgaggaggcggacggcccgacccgcgcccggcggccgggagggaccggcggccacgcgcgcgcgccccggcgcccgcgggcgcgcgaggcggggacggcgctccgccgccccgcggcgccccgacgtccgggcggcgagcgagaggcggaccgcggtgcccggcccggggacagtcgcgccgtgcggccgcagcgcccgcgcaccggtccggtcgagggcccggggccggccgaagcccggctccgagccccgccggcgggcgcgggcgcaggggtggcacacgccacacgacggccaagggagggcgaccgaggccggccggcgcgcccgcccccgcccgggacgggggaccgcgaccggggccgaggccccggcccgggccccaccccccgacccggggagagggcgagcgaccggcaaggcggaggtcgacccacgccacacgtcgcacgaacgcctgtccgggagggaccaccgggccgcgctcgggcgcacgcgcgcgccgaacggggcgacgccacgcggggaggacgggctctccccgacgccgacgcccgggacggacgcctcggggaagggccgcggcaggcccgggaagcgaggcgcacccgggggacgcgccgacccggttcggaagagcgggccgggagaagacgagagaccacgggcgaggccggggcgacggggaaggcgcgagaaaggcggccggcggggaaggggacgccacggggacccctcgagcgcggccgaccgcagccgggacacacgcgcggggcctcaccgccgccggcggcaccgcgcggcacccggggcggccgaccggccctcggcgatccccgcggctccccccaccaccgccgccgcagtcgcggccggtcccccggaaccgtctcctcccccgcacgcgccgcaggccgacccccggaaccctccgggaagcccaccgggccccacgcggggcgccaccgacccggtccccaaggcgcgcgccgggggacgcggacgccgggccgatcagtggccggcggcggcgccccacgaggcggtgccgggttcggtcccaggcggggccaccaacggacgtgaagccggtgagccgctcggggggaagaagaggatcggcgggcggcgggcggggaagagggcacagacgggcgagggccggggaccgcgagggcaagggcacccgggagcccgcagaggcggcggctccgggagaaacctcaggcacggccgggccaccaggaaaacacggccgcgggatcccaccgccacagacacgagggcggtcccgcggcgccccgcctgggacgccggacggccctcggcccccaccgagaaccgcctcgcgagccccggggccccgccaccgggggccccggagcgaccgcagccacgaacccgacacgccaccaccaccgtcgctcgtgattctcgtccatcctccgacccggtcccgctccgggagaccggcgcgcccccaccgtgggacgctttcccagggccaggcgggcccgaccccgtgccacgcaaacgcggtcgtcggcaccggtcacgactcggcacgggagcgggcggagagccgactcgcggcggagggagtcacgcgccggacagagcgccgggcgcgcacacccaccgcccgccggccgccgcgtcccaacccgctgggacgccgggcccggcccggcgggatcctcccccgactcggaagggggaggcgcgggccacagtaggcgacgagccgcactcggccaccaccgcggtggccggcggaaccctcgcttctcccccccaaccccgtcgagggggaagcggaggagggtcctctgcgagcgggtcgctacggcagcgctaccataacggaggcagagacagaggcggcggcccgggggatccggtacccccaaggcacgcctctcagatcgctagagaaggcttttctcaccgagggtgggtcacactccccccacccgccagccgctcctcctcgggcccgcagaggcgccgagggacgcctggggaagggagggggccctgcggtacgaggaaacacctgcgcgcggccacctcgagcgttcgcgttcagggcgggggcccggccggtgcgcgcgtgcgcgcaaccccaccaggcccccccgtccacccacctccttccttccgaggcagagcgcctccgaagtcaacccacacacgaccggtcggaggcagaacggcagcccctcggcggccggccggcgcacgcgtcacaccggcccgaacccaccgcgatcgctcacacggcccgcgcgcacccgccagaggggagcacgggacgtgcgctcaccgagagcaggcgggcgcccttccccgcgtgggaggggcgcgtctcgtctcgtctcactcaaaccgccccgaaccccacaccgacgagctccctcaggacccacgcgcggacaccgcggcggcgaccggaggagggggcgccgggggcgggaacgacacaccaccgttcggcctcgggcacctgagggacaacccggagcgctccaggagcaccgcaagggcccaggcggagccgacgctcgcgcaaaccccccgagagggcagcacgacgggccggcgggacggcacccccaccgccgcggaggggggccgcccgcaagtcgacaaccactggaggcgacagcgagggctgtctgccgcgtcagaggaccccgccggcccgcacccgcgacgcagaaggcggcgggcgggacggcgaggtcgggccggggtccgcaccccacgccttcccacacgcaccgccggcgggcggggagaggagagacgaggggacccccgcggggcggagcgagaaggacggtcccgttcgccacgaacgtccgcccc

SEQ ID NO: 1888408 - DNA, 4001 bp, Homo sapiens
  modified_base (2396)..(4001): a, c, t, g, unknown or other
ctaagttctggggtatatggacaggatgtgcatatttgttactaaggtaaacgagtgccatggtggtttgctgcacctgtcaacccataacctaggtattaagcccagcatgcaacagctgtttttcttaacgctctgtctcccgaaaagccccagtgtgtgttgttccccttcctgcgtccatgtgatcccatttttcagctcccaatacaagtgagaatgtggcgttttgtactcttttcctggattagatttaaagtggactcattccaattacagggcctcgaaagagtcctgtattgttatttttcgtcactacctccccgggtcgggagtgggtaatttgcgcgcctgctgccttccttggatgtggtagccgtttctcaggctccctctccggaatcgaaccctgattccccgtcacccgtggtcaccatggtaggcacggcgactaccatcgaaagttgatagggcagacgttcgaatgggtcgtcgccgccacggggggcgtgcgatcagcccgaggttatctagagtcaccaaagccgccggcgcccgccccccggccggggccggagaggggctgaccgggttggttttgatctgataaatgcacgcatcccccccgcgaagggggtcagcgcccgtcggcatgtattagctctagaattaccacagttatccaagtaggagaggagcgagcgaccaaaggaaccataactgatttaatgagccattcgcagtttcactgtaccggccgtgcgtacttagacatgcatggcttaatctttgagacaagcatatgctactggcaggatcaaccaggtaggtaggtagagcgcggcgaggccccgacgcggccggacggccggccggggggcctcgcgaggacgggcccggcgccccgcaagcgaggaggacgacggacggacggacggacgggccgcggacgggcggacgggagggagcgagcgggcgcgggggcggcggccgggaccggtggggccggggcggggcgcggcgaaccggacgccccaaccacccgccccccacgcgacacgaccaccggggccccgcgccacagacccgcgacgcttcttcgtcgcgcccgcccgcgaggaggcggacggcccgacccgcgcccggcggccgggagggaccggcggccacgcgcgcgcgcgcgcggccggcgcccgcgggcggcggcgaggcggggacggcgctccgcccgccccgcggggcggccccgacgtccgggcggcgagcgagaggcggaccgcggtgcccggcccggggacagtcgcgccgtgcggccgcagcgcccgcgcaccggtcccggtcgagggcccggggcccggccgaagcccggctccgagccccgccggcgggcgcgggcgcaggggtggcacacgccacacgacggccaagggagggccgaccgaggccggccggcgcgcccgcccccgcccgggacgggggaccgcgaccggggccgaggccccggcccgggccccaccccccgacccggggaaagggcgagcgaccggcaaggcggaggtcgacccacgccacacgtcgcacgaacgcctgtccgggagggaccaccgggccgcgctcgggcgcacgcgcgcgccgaacggggcgacgccacgcggggaggacgggctctccccgacgccgacgcccgggacggacgcctcggggaagggccgcggcaggcccgggaagcgaggcgcacccgggggacgcgccgacccggttcggaagagcgggccgggagaagacgagagaccacgggcgaggccggggcgacggggaaggcgcgagaaaggcggccggcggggaaggggacgccacggggacccctcgagcgcggccgaccgcagccgggacacacgcgcggggcctcaccgccgccggcggcaccgcgcggcacccggggcggccgaccggccctcggcgatccccgcggctccccccaccaccgccgccgcagtcgcggccggtcccccggaaccgtctcctcccccgcacgcgccgcaggccgacccccggaaccctccgggaagcccaccgggccccacgcggggcgccaccaacccggtccccaaggcgcgcgccgggggacgcggacgccgggccgatcagtggccggcggcggcgccccacgaggcggtgccgggttcggtcccaggcggggccaccaacggacgtgaagccggtgagccgctcggggggaagaagaggatcggcgggcggcgggcggggaagagggcacagacgggcgagggccggggaccgtgagggcaagggcacccgggagcccgcagaggcggcggctcggggagaaacctcaggcacggccgggccaccaggaaaacacggccgcgggatcnnnnnnnnnnnnnnnnnnnnnnnnnnnnnnnnnnnnnnnnnnnnnnnnnnnnnnnnnnnnnnnnnnnnnnnnnnnnnnnnnnnnnnnnnnnnnnnnnnnnnnnnnnnnnnnnnnnnnnnnnnnnnnnnnnnnnnnnnnnnnnnnnnnnnnnnnnnnnnnnnnnnnnnnnnnnnnnnnnnnnnnnnnnnnnnnnnnnnnnnnnnnnnnnnnnnnnnnnnnnnnnnnnnnnnnnnnnnnnnnnnnnnnnnnnnnnnnnnnnnnnnnnnnnnnnnnnnnnnnnnnnnnnnnnnnnnnnnnnnnnnnnnnnnnnnnnnnnnnnnnnnnnnnnnnnnnnnnnnnnnnnnnnnnnnnnnnnnnnnnnnnnnnnnnnnnnnnnnnnnnnnnnnnnnnnnnnnnnnnnnnnnnnnnnnnnnnnnnnnnnnnnnnnnnnnnnnnnnnnnnnnnnnnnnnnnnnnnnnnnnnnnnnnnnnnnnnnnnnnnnnnnnnnnnnnnnnnnnnnnnnnnnnnnnnnnnnnnnnnnnnnnnnnnnnnnnnnnnnnnnnnnnnnnnnnnnnnnnnnnnnnnnnnnnnnnnnnnnnnnnnnnnnnnnnnnnnnnnnnnnnnnnnnnnnnnnnnnnnnnnnnnnnnnnnnnnnnnnnnnnnnnnnnnnnnnnnnnnnnnnnnnnnnnnnnnnnnnnnnnnnnnnnnnnnnnnnnnnnnnnnnnnnnnnnnnnnnnnnnnnnnnnnnnnnnnnnnnnnnnnnnnnnnnnnnnnnnnnnnnnnnnnnnnnnnnnnnnnnnnnnnnnnnnnnnnnnnnnnnnnnnnnnnnnnnnnnnnnnnnnnnnnnnnnnnnnnnnnnnnnnnnnnnnnnnnnnnnnnnnnnnnnnnnnnnnnnnnnnnnnnnnnnnnnnnnnnnnnnnnnnnnnnnnnnnnnnnnnnnnnnnnnnnnnnnnnnnnnnnnnnnnnnnnnnnnnnnnnnnnnnnnnnnnnnnnnnnnnnnnnnnnnnnnnnnnnnnnnnnnnnnnnnnnnnnnnnnnnnnnnnnnnnnnnnnnnnnnnnnnnnnnnnnnnnnnnnnnnnnnnnnnnnnnnnnnnnnnnnnnnnnnnnnnnnnnnnnnnnnnnnnnnnnnnnnnnnnnnnnnnnnnnnnnnnnnnnnnnnnnnnnnnnnnnnnnnnnnnnnnnnnnnnnnnnnnnnnnnnnnnnnnnnnnnnnnnnnnnnnnnnnnnnnnnnnnnnnnnnnnnnnnnnnnnnnnnnnnnnnnnnnnnnnnnnnnnnnnnnnnnnnnnnnnnnnnnnnnnnnnnnnnnnnnnnnnnnnnnnnnnnnnnnnnnnnnnnnnnnnnnnnnnnnnnnnnnnnnnnnnnnnnnnnnnnnnnnnnnnnnnnnnnnnnnnnnnnnnnnnnnnnnnnnnnnnnnnnnnnnnnnnnnnnnnnnnnnnnnnnnnnnnnnnnnnnnnnnnnnnnnnnnnnnnnnnnnnnnnnnnnnnnnnnnnnnnnnnnnnnnnnnnnnnnnnnnnnnnnnnnnnnnnnnnnnnnnnnnnnnnnnnnnnnnnnnnnnnnnnnnnnnnnnnnnnnnnnnnnnnnnnnnnnnnnnnnnnnnnnnnnnnnnnnnnnnnnnnnnnnnnnnnnn

SEQ ID NO: 1888409 - DNA, 4001 bp, Homo sapiens; identical to SEQ ID NO: 1888407

SEQ ID NO: 1888410 - DNA, 4001 bp, Homo sapiens; identical to SEQ ID NO: 1888408
  modified_base (2396)..(4001): a, c, t, g, unknown or other

SEQ ID NO: 1888411 - DNA, 4001 bp, Homo sapiens
tgcccttccgtcaattcctttaagtttcagctttgcaaccatactccccccggaacccaaagactttggtttcccggaagctgcccggcgggtcatgggaataacgccgccgcatcgccggtcggcatcgtttatggtcggaactacgacggtatctgatcgtcttcgaacctccgactttcgttcttgattaatgaaaacattcttggcaaatgctttcgctctggtccgtcttgcgccggtccaagaatttcacctctagcggcgcaatacgaatgcccccggccgtccctcttaatcatggcctcagttccgaaaaccaacaaaatagaaccgcggtcctattccattattcctagctgcggtatccaggcggctcgggcctgctttgaacactctaattttttcaaagtaaacgcttcgggccccgcgggacactcagctaagagcatcgagggggcgccgagaggcaaggggcggggacgggcggtggctcgcctcgcggcggaccgcccgcccgctcccaagatccaactacgagctttttaactgcagcaactttaatatacgctattggagctggaattaccgcggctgctggcaccagacttgccctccaatggatcctcgttaaaggatttaaagtggactcattccaattacagggcctcgaaagagtcctgtattgttatttttcgtcactacctccccgggtcgggagtgggtaatttgcgcgcctgctgccttccttggatgtggtagccgtttctcaggctccctctccggaatcgaaccctgattccccgtcacccgtggtcaccatggtaggcacggcgactaccatcgaaagttgatagggcagacgttcgaatgggtcgtcgccgccacggggggcgtgcgatcggcccgaggttatctagagtcaccaaagccgccggcgcccgccccccggccggggccggagaggggctgaccgggttggttttgatctgataaatgcacgcatcccccccgcgaagggggtcagcgcccgtcggcatgtattagctctagaattaccacagttatccaagtaggagaggagcgagcgaccaaaggaaccataactgatttaatgagccattcgcagtttcactgtaccggccgtgcgtacttagacatgcatggcttaatctttgagacaagcatatgctactggcaggatcaaccaggtaggtaaggtagagcgcggcgaggccccgacgcggccggacggccggccggggggcctcgcgaggacgggcccggcgccccgcaagcgaggaggacgacggacggacggacggacgggccgcggacgggcggacgggagggagcgagcgggcgcgggggcggcggccgggaccggtggggccggggcggggcgcgggaaccggacgccccaaccacccgccccccacgcgacacgaccaccggggccccgcgccacagacccgcgacgcttcttcgtcggcccgcccgcgaggaggcggacggcccgacccgcgcccggcggccgggagggaccggcggccacgcgcgcgcgccccggcgcccgcgggcgcgcgaggcggggacggcgctccgccgccccgcggcgccccgacgtccgggcggcgagcgagaggcggaccgcggtgcccggcccggggacagtcgcgccgtgcggccgcagcgcccgcgcaccggtccggtcgagggcccggggccggccgaagcccggctccgagccccgccggcgggcgcgggcgcaggggtggcacacgccacacgacggccaagggagggcgaccgaggccggccggcgcgcccgcccccgcccgggacgggggaccgcgaccggggccgaggccccggcccgggccccaccccccgacccggggagagggcgagcgaccggcaaggcggaggtcgacccacgccacacgtcgcacgaacgcctgtccgggagggaccaccgggccgcgctcgggcgcacgcgcgcgccgaacggggcgacgccacgcggggaggacgggctctccccgacgccgacgcccgggacggacgcctcggggaagggccgcggcaggcccgggaagcgaggcgcacccgggggacgcgccgacccggttcggaagagcgggccgggagaagacgagagaccacgggcgaggccggggcgacggggaaggcgcgagaaaggcggccggcggggaaggggacgccacggggacccctcgagcgcggccgaccgcagccgggacacacgcgcggggcctcaccgccgccggcggcaccgcgcggcacccggggcggccgaccggccctcggcgatccccgcggctccccccaccaccgccgccgcagtcgcggccggtcccccggaaccgtctcctcccccgcacgcgccgcaggccgacccccggaaccctccgggaagcccaccgggccccacgcggggcgccaccgacccggtccccaaggcgcgcgccgggggacgcggacgccgggccgatcagtggccggcggcggcgccccacgaggcggtgccgggttcggtcccaggcggggccaccaacggacgtgaagccggtgagccgctcggggggaagaagaggatcggcgggcggcgggcggggaagagggcacagacgggcgagggccggggaccgcgagggcaagggcacccgggagcccgcagaggcggcggctccgggagaaacctcaggcacggccgggccaccaggaaaacacggccgcgggatcccaccgccacagacacgagggcggtcccgcggcgccccgcctgggacgccggacggccctcggcccccaccgagaaccgcctcgcgagccccggggccccgccaccgggggccccggagcgaccgcagccacgaacccgacacgccaccaccaccgtcgctcgtgattctcgtccatcctccgacccggtcccgctccgggagaccggcgcgcccccaccgtgggacgctttcccagggccaggcgggcccgaccccgtgccacgcaaacgcggtcgtcggcaccggtcacgactcggcacgggagcgggcggagagccgactcgcggcggagggagtcacgcgccggacagagcgccgggcgcgcacacccaccgcccgccggccgccgcgtcccaacccgctgggacgccgggcccggcccggcgggatcctcccccgactcggaagggggaggcgcgggccacagtaggcgacgagccgcactcggccaccaccgcggtggccggcggaaccctcgcttctcccccccaaccccgtcgagggggaagcggaggagggtcctctgcgagcgggtcgctacggcagcgctaccataacggaggcagagacagaggcggcggcccgggggatccggtacccccaaggcacgcctctcagatcgctagagaaggcttttctcaccgagggtgggtcacactccccccacccgccagccgctcctcctcgggcccgcagaggcgccgagggacgcctggggaagggagggggccctgcggtacgaggaaacacctgcgcgcggccacctcgagcgttcgcgttcagggcgggggcccggccggtgcgcgcgtgcgcgcaaccccaccaggcccccccgtccacccacctccttccttccgaggcagagcgcctccgaagtcaacccacacacgaccggtcggaggcagaacggcagcccctcggcggccggccggcgcacgcgtcacaccggcccgaacccaccgcgatcgctcacacggcccgcgcgcacccgccagaggggagcacgggacgtgcgctcaccgagagcaggcgggcgcccttccccgcgtgggaggggcgcgtctcgtctcgtctcactcaaaccgccccgaaccccacaccgacgagctccctcaggacccacgcgcggacaccgcggcggcgaccggaggagggggcgccgggggcgggaacgacacaccaccgttcggcctc

SEQ ID NO: 1888412 - DNA, 4001 bp, Homo sapiens
  modified_base (2767)..(4001): a, c, t, g, unknown or other
gggagtggtggaaacctgatttataaccagctgctgagaaaagcagctaaaacaacgtagggctttccattgttattaatgggaggacagtcttgcaggactcggccctttggaatctaatgttatgtcccggtagatagcgtcaccattgaattcaaagacacacatatgttgggaataatttttctggtcatttgctgcatgtcttatttacaatatgtaatcaaattctttaccctgactttatggcacctgggttaagaaccatgatttgaaggaaaaattggtctgtcattttctgagtttgaaaaattgttttcccgctagcggtttgctattgctttctggttttcttttgtttcgttctgtttctaagttctggggtatatggacaggatgtgcatatttgttactaaggtaaacgagtgccatggtggtttgctgcacctgtcaacccataacctaggtattaagcccagcatgcaacagctgtttttcttaacgctctgtctcccgaaaagccccagtgtgtgttgttccccttcctgcgtccatgtgatcccatttttcagctcccaatacaagtgagaatgtggcgttttgtactcttttcctggattagatttaaagtggactcattccaattacagggcctcgaaagagtcctgtattgttatttttcgtcactacctccccgggtcgggagtgggtaatttgcgcgcctgctgccttccttggatgtggtagccgtttctcaggctccctctccggaatcgaaccctgattccccgtcacccgtggtcaccatggtaggcacggcgactaccatcgaaagttgatagggcagacgttcgaatgggtcgtcgccgccacggggggcgtgcgatcagcccgaggttatctagagtcaccaaagccgccggcgcccgccccccggccggggccggagaggggctgaccgggttggttttgatctgataaatgcacgcatcccccccgcgaagggggtcagcgcccgtcggcatgtattagctctagaattaccacagttatccaagtaggagaggagcgagcgaccaaaggaaccataactgatttaatgagccattcgcagtttcactgtaccggccgtgcgtacttagacatgcatggcttaatctttgagacaagcatatgctactggcaggatcaaccaggtaggtaggtagagcgcggcgaggccccgacgcggccggacggccggccggggggcctcgcgaggacgggcccggcgccccgcaagcgaggaggacgacggacggacggacggacgggccgcggacgggcggacgggagggagcgagcgggcgcgggggcggcggccgggaccggtggggccggggcggggcgcggcgaaccggacgccccaaccacccgccccccacgcgacacgaccaccggggccccgcgccacagacccgcgacgcttcttcgtcgcgcccgcccgcgaggaggcggacggcccgacccgcgcccggcggccgggagggaccggcggccacgcgcgcgcgcgcgcggccggcgcccgcgggcggcggcgaggcggggacggcgctccgcccgccccgcggggcggccccgacgtccgggcggcgagcgagaggcggaccgcggtgcccggcccggggacagtcgcgccgtgcggccgcagcgcccgcgcaccggtcccggtcgagggcccggggcccggccgaagcccggctccgagccccgccggcgggcgcgggcgcaggggtggcacacgccacacgacggccaagggagggccgaccgaggccggccggcgcgcccgcccccgcccgggacgggggaccgcgaccggggccgaggccccggcccgggccccaccccccgacccggggaaagggcgagcgaccggcaaggcggaggtcgacccacgccacacgtcgcacgaacgcctgtccgggagggaccaccgggccgcgctcgggcgcacgcgcgcgccgaacggggcgacgccacgcggggaggacgggctctccccgacgccgacgcccgggacggacgcctcggggaagggccgcggcaggcccgggaagcgaggcgcacccgggggacgcgccgacccggttcggaagagcgggccgggagaagacgagagaccacgggcgaggccggggcgacggggaaggcgcgagaaaggcggccggcggggaaggggacgccacggggacccctcgagcgcggccgaccgcagccgggacacacgcgcggggcctcaccgccgccggcggcaccgcgcggcacccggggcggccgaccggccctcggcgatccccgcggctccccccaccaccgccgccgcagtcgcggccggtcccccggaaccgtctcctcccccgcacgcgccgcaggccgacccccggaaccctccgggaagcccaccgggccccacgcggggcgccaccaacccggtccccaaggcgcgcgccgggggacgcggacgccgggccgatcagtggccggcggcggcgccccacgaggcggtgccgggttcggtcccaggcggggccaccaacggacgtgaagccggtgagccgctcggggggaagaagaggatcggcgggcggcgggcggggaagagggcacagacgggcgagggccggggaccgtgagggcaagggcacccgggagcccgcagaggcggcggctcggggagaaacctcaggcacggccgggccaccaggaaaacacggccgcgggatcnnnnnnnnnnnnnnnnnnnnnnnnnnnnnnnnnnnnnnnnnnnnnnnnnnnnnnnnnnnnnnnnnnnnnnnnnnnnnnnnnnnnnnnnnnnnnnnnnnnnnnnnnnnnnnnnnnnnnnnnnnnnnnnnnnnnnnnnnnnnnnnnnnnnnnnnnnnnnnnnnnnnnnnnnnnnnnnnnnnnnnnnnnnnnnnnnnnnnnnnnnnnnnnnnnnnnnnnnnnnnnnnnnnnnnnnnnnnnnnnnnnnnnnnnnnnnnnnnnnnnnnnnnnnnnnnnnnnnnnnnnnnnnnnnnnnnnnnnnnnnnnnnnnnnnnnnnnnnnnnnnnnnnnnnnnnnnnnnnnnnnnnnnnnnnnnnnnnnnnnnnnnnnnnnnnnnnnnnnnnnnnnnnnnnnnnnnnnnnnnnnnnnnnnnnnnnnnnnnnnnnnnnnnnnnnnnnnnnnnnnnnnnnnnnnnnnnnnnnnnnnnnnnnnnnnnnnnnnnnnnnnnnnnnnnnnnnnnnnnnnnnnnnnnnnnnnnnnnnnnnnnnnnnnnnnnnnnnnnnnnnnnnnnnnnnnnnnnnnnnnnnnnnnnnnnnnnnnnnnnnnnnnnnnnnnnnnnnnnnnnnnnnnnnnnnnnnnnnnnnnnnnnnnnnnnnnnnnnnnnnnnnnnnnnnnnnnnnnnnnnnnnnnnnnnnnnnnnnnnnnnnnnnnnnnnnnnnnnnnnnnnnnnnnnnnnnnnnnnnnnnnnnnnnnnnnnnnnnnnnnnnnnnnnnnnnnnnnnnnnnnnnnnnnnnnnnnnnnnnnnnnnnnnnnnnnnnnnnnnnnnnnnnnnnnnnnnnnnnnnnnnnnnnnnnnnnnnnnnnnnnnnnnnnnnnnnnnnnnnnnnnnnnnnnnnnnnnnnnnnnnnnnnnnnnnnnnnnnnnnnnnnnnnnnnnnnnnnnnnnnnnnnnnnnnnnnnnnnnnnnnnnnnnnnnnnnnnnnnnnnnnnnnnnnnnnnnnnnnnnnnnnnnnnnnnnnnnnnnnnnnnnnnnnnnnnnnnnnnnnnnnnnnnnnnnnnnnnnnnnnnnnnnnnnnnnnnnnnnnnnnnnnnnnnnnnnnnnnnnnnnnnnnnnnnnnnnnnnnnnnnnnnnnnnnnnnnnnnnnnnnnnnnnnnnnnnnnnnnnnnnnnnnnnnnnnnnnnnnnnnnnnnnnnnnnnnnnnnnnnnnnnnnnnnnnnnnnnnnnnnnnnnnnnnnnnnnnnnnnnnnnnnnnnnnnnnnn

SEQ ID NO: 1888413 - DNA, 4001 bp, Homo sapiens; identical to SEQ ID NO: 1888411

SEQ ID NO: 1888414 - DNA, 4001 bp, Homo sapiens; identical to SEQ ID NO: 1888412
  modified_base (2767)..(4001): a, c, t, g, unknown or other

SEQ ID NO: 1888415 - DNA, 4001 bp, Homo sapiens
attcacactgaatagtgttcaactggggaattctatgccttactgatcttcatacatttgaagtatatttcacttcctagcccaagaaagagaaagaatattggtaatccatgtttagattaatggggggaagaggcttcttatctgtgtctattcttcttcttttgaatttgacattttatttggtttaactaagggaaatggcattcacaatggttatcgaaaagagagcctcttaactacctgaaaattaacttccttcattccaaagcacactgtttcagagcacttagttactttgttttatgattatctctcccatgcagaatccaaagtgtggcatgcatcacatgaagtgcccttgtgcaatacttaaaccatcactctgattcactgaagtaaaataagctgtgctttatgaatggacacctattaaattcaccaaaaagtatgcaccacccccaacacatgggattccttataatggcagcttttaacacctttaaaatgagaaatatttttcttttcttactacaggttgattctgctcaaaaaaaagaaaacaaaaaacttactaatatccaaaagttcttgcctttctagaccagctccctatgtctgggaataaacactaaaataacttgggagtaagtcagttccaattaacagtccctccacccattcctaattgggttaacactttttattaggagttatttgtgcactttgtacaaatgctaatgaacaactcccaaatgctaataaatgtgtccatctgaaaggcagaaaaagcagaacaaaactagagtagccttaacagttcaaaagtggattctggaactaataaaatactctacgtactctacatacacaggcaaagtattagtatagaaagaaaaattcactatcttgatatgtcagggaaaacgtgatattgaaatcttttctctctctctccttccttccttccctccctccctctttctttttctttttctttcttttctttctctgcctctctttccttttctttttctttcttttctttccctccctccctctctctctgcctccttccctccctttctccctctctctctttctctgtttctctttctttctatttctttctttcttttctctttctttctttcttctttctcttttctctttagaaatttaggcataacaacactacagagaataaaactatcattacagtacacagtagccacaagtagcctatgatctgaattacttgaaaagtgattgtttttccaagttaacatagtaatgtagcagaagctttaaactgacaatcttctattgcaatgtttccagagattcttcaaaagctttcaaattaaccaaatattaggcagtagtagaaatagtaaaaatccatatatactgccctataccttttttactttcttttttttttttttttttccgagacggagtctggctctgtcacccaggctggagtacagtggtgcaatcttggctcactgcaagctctgcctcccgggttcacaccattctcttgcctcagcctcccgagtagctgggactacaggtgcccgccaccacgcctggctaattttttgtatttttagtagagacggggtttccccatgttagccaggatggtcttgatctcctgacctcatgatccacccgcctcggcctcccaaagtgctgggattacaggcgtgagccaccgcgtccggccacctttttactttctgttcactttttaattttctgccttctctagacctaggagaggcttttattgtctggtcactaaagagtcttcataacagctgctttacactagattttatttttaaaattctcacccaaggggaaatgtatctattaaacattaatgctaactatgaagaacccactactgagtaaaggcttgatgagaactccctggactaacctgttcatggtctcttcccagtcccccatgcaagcctacccaggcctgtggctttctcggaggtcatccggcctcattgtttgagacttttccaggccctggcacctcctctaacttcactacagctcttcctgcttcaaattcatccattttatgtcttcatcatccatgactttcgtttgaaataaaaaggccaggctgggcgcagtggctcacgcctgtaatcccagcactttgggaggccgaggcaggtggatcacgaggtcaggagtttgagaccagcctttcaaacatggcgaaatcccgtctctactaaaaatacaaaaattagccaggcgtggtggcagacatctgtaatcccagctactggagaggctgaggcaggagaatcgcttgaaactggaaggcagaggttgcagtgagccaaggtcatgccactgcactccagcctgggcgacagagtgagattccgtctcaaacaaacaaacaaacaaaaagatttataaacagcctgcttacacacctctcggttcttcttatctcttctgagaccttacccttgcatttactgaaaacaaatagaaaattaaagtaaattctagagtcattttctggatgcctaaactcacaattgttaccacgttgtcagatttgcgttcatctttctcttttttattttaaatgtttatggatacataatgttgcgcatattaatggggtacatgtgatattttgatacaggcacacgatgtgtaatgatcaaatctgggtaactggcatatccatcaccttaaacatttatcattttttttgtgttgagaacattccaaatctacttttctagttattttgaaatatgcaatacattattgttaaccacagttgctgtactgtgttactgaacactagatcttattcctcctatctaactatatttttgcacccattaaccaacacctctctgtcctttctttccactacccttgcaagcctatggtaaccaccattctattcgctatcttacagagagagaccccttgtgggccagtctctcagtctgattctttttcatatctttccaaaggcatcacaataatgcattcgtttttgcatagcattccaggaaattgtctatacatatatttatcggtttataccatttattgttgttttaagttacaaaaatgccatcttattggatacatatatgtatctgtagctttctttttatattaaatttatttaaataaaaatatctaaaacatatccaagttgatatttatatatttgtgcatttattatcactacagtagaacttttaaatgtcaggcactgttctcagcactgtattacaaatattaactcaatcctcataataattctacatggtacacaccacttttattcttgttttatagctgaggaagctgagacacaaacagattgagttacttgccaaagctacccatgtagttagtagcagagatgagatttgaactgcaatactgacaccattgtcagactttatgcaaataaccatgttgctatgatacacacatctagtttattccttgttacaaatttatagaattctactgtataaaaatattttattgatatatcgctctaccattcttgattttttactatcacaaaccatgtggcaagaaatatacttctatataggcccttgcatctactgtctagggcttctggaacatgtatatttagatgcaattgctggacatacataatttcaattctagcatggtagttacgatcaaggcttttggattcaggctggcagagtttgaatcccagctccatcacttagctgtgtaactcagacctgttttagtttctcatattttgttatcttttagccattattctatggagtcatttgttcttttaaatgtatttttagagaatttgtgcattctttttgtatgcctttgtctttcatatgttgctaatatattcctctggtcagttgtttgactcttttgtaaagtcagatctgtggatacacagttcccataaaatg

SEQ ID NO: 1888416 - DNA, 4001 bp, Homo sapiens
attgttgtataatagaaacatttattattttaaccaataaacagttgtctttacaataattagtatatttttaaaacttttccttttagagttcctaacttatggcttactagaaacacgatcttgctctttgggaatataaatgagcacattgttagtaaattttcatggaaaattgtggtcaagcacaagaaatgctaatgtccattaatactcaaatagcatttaaagggaaagtttatcattatgaatctgtcatgtcaaaaagttgcggcttatattttctctttatgtttcatatctcaagaggcttgttgaggtccctttcatctaaattgatcatttttcaccattattggggtggaatcatgttcctatttgagaatctcttaaaagattacatgacatctatgaaaaactatgactttttaccagaaaaatgcatatattcatgtatacacaattaatatatgacatatattttctgcagattggtcaggttgagaaatgctacattaaatgttatgagtaagaaggtacagatttcagaagacacaacctatgaaattacagctcatttggggagtaaaagatgacctttcctcaaattatgaattaaaatttagttttctatccaaatttctaataaatttatactctgctgcagacgtctggctgcagtttgcccctgtaatagaaaacaaattataaggccagattttgataaatttagcatgaatttccatcagaattttaggactttcctaagcatgaccatatgggaaggtgatcagagacgtatctgcattacggctttgttaaagctgcgggtgctattgtaatagacaagttacaatcctaagacatctttttaaatgtaattgagttccattatccttctgtgtttctgggccccagagcagttcagaagagtctctgccttgagtttgcctttggaacgtttccagagaggaacaggtgataccataaacatatccctgttgccatttggggtaagcaagtggctctatgtggcggctccttctggatgtaaattgattttaatgatttctttctttctcctgggcaggatttatgtgggcatcattcatgtgacaccctgggaatggcagacgttgggaccatatgttctccagagcgcagctgtgctgtgattgaagacgatggcctccacgcagccttcactgtggctcacgaaatcggtatgcagcgccttttcttttccctcaccaaatcaaacacttgtaacagctgcaacaggaaccaaaatacttagcaattaattccagatttctcctggttcagatgtaccactgggaattaaatttgtttatatctgcacttttaaggttaactaatacgagcgacagggaaggcaaagtcagcaacacggtggatgttttcttctgacagtgtcatttaaaagttcaagagaaatttgctactgctactgccttcttactatctttttaagcatccgtaaatgacccctggatgaaatttgtcacaggcaactttggtatgcagagatgtccttcttagaagttactggagacagtactggctcatccagggctaatcagtttgcacagaaatttaacatgttttatttcattgtcagtgataattgtaggctcctgtcaaaggtcatcaatggcttatggtaaatatttctgtcttgttcttaatagcaaggaaaggaagccaagcctgacactcaacagggtttgctttaaaatgtcacttacctaatttgtttgttgtaagaaacacatctaaatcctacatctataaatagaggactgagttgattgctaaaaaatatttccaaaataaagaatatgtgcttcctaattattgacctagattactaggtgtatgagaaattggcttagtacatttaggactagatgttggaattagacacaattttttgtgtctaacttttttctgtctaattccaacatctagtcctaaatgagcccaatttttgctaaattactttatacctatgtcacactggtctaattatttaaactctctgagctccagttttcatatctgaaacatagggataatagtgcctatttcagggaattattttggggaatatattgggtagagtttagatagtagatgttatttatatccacatgtacttatgttttgctttttagctaaatagttcatttgcttttgaaatgtatgtatcaactcagcatcacatttttgggagcaaagcatggtttgataattatggtaccttttgccatctatagcaaaaaagattttgatttaaacagattttgatttttaaggttaaaattataacttttaaatgggaattaaaactacttttttacattcctaataggcagagaatattttcacaaagcatccatttctaactgctatgttttctttggggagttaaataacttctaatccaaggtacagtgtaattgcataattcacaatattgccgcagtaaaacagaattcagtagttaaatgtcagttcttaagtatggcattaatgttcctgacacgtttcttacctcctaagcagaaaaacacaaatataaaacctaaacgtaaataattatccaatagcatcactgagaataattcagtgttttattgattaggcgtctttggcttcagtagtcaaagatctgagtggagtcccagctctgtctctgggttctctgttttatctcagacaagtgatttagatactttgagtctccatttcttccctataaagtgggctaatgaggaggcatggctgtcttctcagctgcactagaagaactggtcagcctgaaagcgtctttataacacatgccatttaggctccagggtagggatcatgtctctcatttatgcctattaatccttactgataaaaacacagcctaatacagaaccttaatcaatatttattacgtatctatgtatgtgcttgactgcgtaagcgggagaaagaaacatgagacttgctcaaggcaacattccgatctgcaccggaaactaagaggaattagtccaaatactcaggaggatgtaattaaatagaggagacttttaaagtacactggtaattaatcaccatcattcagagtgagaggagtcccataagaaaggttctaagtccctggaaaggcagaagctgattcgtcacaggtcaagcggagaaattatggggaataagcagcagagctgaatgttggcgtcatccatccacaggattatgggctccaaatcttgatcttcaaaaggaaagattccacattccttaaaggaagggcagtttctttcctttctagtgattggttttcacacattgactgcatctgggagatttccctgtaagacaaacactgtggcaataagtgcagcttcttcagggatgctttgacctcaagttaactagggaggattgaagagccctgcagggtcacctttcccagctctcctgaattcctaaggcaatcttgggttacaaggctgatgcagcagtctgagaggcaggaagccagatgctgataagcacaaacgttatattaaaactaaatatatacatgtgtgtgtacacacacagtaagaacttttctcaatagtacaagaatattagacatagttatacaaggaaacaacgtaggagaaaggtgggcttctgtatgaaaactaaaacctaaatctttgatatatgattatgcccttctgtgcacttaaatttttggttggatcatctttgtttatttctttagaagtccctgtaattcattgcccaatcaaacactctctatttaacttcccttttgtattacatatgaactaatctgagctatttaaggtctggaagtgggggaatatggattcaattctgctttcataaaagaatctggttctcattcagtttattttctaatctctttattattctttaatttcactttttgcctaaatattatgaac

SEQ ID NO: 1888417 - DNA, 4001 bp, Homo sapiens
ttctggccatgttgtgaatttccatagctgtggtgcaatatcagagccaggaaacccacatgggaacattcccagttaacattatccagtagactagatgccttcatcttttattcatttatttgttctttaagatggattctcgctctgtcacccaggctagagtgcagtggcacgatcttggctcactgcaacctctgcctcccaagttcaaatgattctcctgcctcagcctccccagtagctgggattacaggcatgtgccaccatgcttggctaatttttgtatttttagtggagatagggttccaccatgttggccaggctggtctcgaactcctgacctcaggtggtccatcctcctcagcctctcaaagtgctgggtttacaggcatgagccactgcacctggccaccttcattatttttaacccacattcatttgtgtgtatgtgctcgtgtagctctgtaggtgtatacttccgtttaactttatcccattacaggtccatgtacccaccaccaccatcaaatgaggaactattccacaccacagaagaattccttattcctatctgtctgtgtttgcacctggccccatcctacccattgtacctgtctactagtatccactaaggtattctccacctctgctgttttatcgttttgagaatgctttataaagataactttttgaagttggctttttttcactaagcgtaatgcccttcagactcatctaggttattgtgtgtgtcaacagttcatttcttttgattgctgaatagcagcattccaaactatggatggaccatagatttttcaaccattcacctgtgagaaacattcattttgttgttgttgttgttgctgtttgtccagaatttagctactataaagaaagctgctatggatatttttatataactttttgtgaacataaattcatatttctttgggataaatgcttaagagaacaattgctggaccacatggtaagtgcatgtttagttttatgagaaactgccaaagagttttccagaatgtctgcaccatattacatacccaccagcaatgcatgagagatccagtttctccacatctttgccagcatgtggcgttataatttttaaaaaatttttgttgttctcataaatgtgtagccaggcatgcatttttgatgtgtagacctatccacctatccatcagggcatgagtcaaacatttccaaaggcagtgacttgtccttggtacagcccatgatgcatcagacatgtagattctcaccaaaatacctatggaccaactgccttctatctagaagtgttatcacactttccactgcatactctgctaataggcacttttatccacacctcattattctcctccatcattgccctctggattgtaaactgcttgaggttaaagatgatgtcttaattgtgtagaccctaattgttggcaaatagtagctgctacacaaatttgtgtgtgtgtgggttttgttgtgggagactgaaattctgaagcttttttttttttggtgtggggggtgggagggagtcttgctctgttgcccaggctggagttcagtggcccaatctctgctctctgcagcttccgcctcccaggttcaagcatttctcctgcctcagcctcccaagtagctgggattataggcgtgcaccaccacgcctggctaatttttttatttttagtagagacagggtttctctgtgttggccaggctgatctcgaattcctgacctcatgatctgcctgcctcggcctcccaaagtgctgggattataggcgtgagccactgtgcccagtcaattctgcaactttttttattgcaaagaaggaagggtgctcaaggcatagagaacaacacagaggcctcaccttgagaggcatagccatggggtttagattgaacatgaatttagttttgatacttaagaattctaacttcatgttcaatctaaacaccatggcagccctggtctcagccttacctctgcagtctagttgtcgcttggacagtacatcctttcccagtaacgagatgacacacccctgtgcatatttcaggctgctttctatcttgtttttcaccattctcacaccaagaacaccaaggtttgtgaggcctctgttgtatattgtgacaaagagcaatttatatggttggcaataaagcaggttttttaggggttgatatttttcagtttaattttcatccctttagtgggttgaattgtggtccttcaaaaatatatcaacatcccaacccctggaatctcagaatatgaccttacttggaaatacagtctttgcagagttaaagaaagtaagaacctctagataaggtcatccttcattagggtgggtcctaaatccactgaagaatgtcatataagagacagaaaaggagaaggcacagagacacaaaaaagaagccatgtgaaggtggaggcagagactggagtgaggcagccacaggctcagcagtgtgaagggttgaggaagcctctggaggctgggagaggtgaggaactgatgtgccctcagagcctccagaaggcaccagccctgctgacttcttgatttcagatgtctgtgagagaagaaacgtctgttgttttaagccactccatcgtggtcattttgcatggcagacctaagaaacggatgccatcttcaagatcatttgaacagtatagaaaaatgtatttcacaaaacttttacttattatttcacatttttaaacttcatattccacgttttgctttattttgggtatcaaggcttctagggcatattttaatcaccccagaagcatggacataataagacctggttaaagagtgcactgtgagtgagccatggggtgaaggatcctgctgctgcctcacagcctcctgcctccctgtgcacacataggtttactgtcaggactgtaatgaggtttgcatgaataaacagctttagaaacagctttcaagtttccaccaaaatacctgttaggaagtcttgtttccaccataattgctaattgcttacctacatgtgacctgggtatccataatgcagacatgagcaacacatgattgtagaaaattctaatttaaattattacatttttatttgggttccacgcagaaaacatcttaggcagccactgcagattatttctagaagcgaagggaaacctggcttggagatggagtgggtgagaagctagaagggaatctgttaaggatgccagggatggaggggttccttctccatgaaaataagtggagtcaaggaggaatccttgaggcagcctctccaagacatgcaggatcatgggttttgactaggggaattttacgatattctagtgcagggatataaggaggcaatgtccagggaacagggctcttcccccaaagacagaacccctgggtccctcatcctttccgcatcttctgctgtgtttggtatccaaggcccttggcccagccatttggagtccactcaaatccacacctacatggtgaggaataaagggagacaaactcattggagtcattgcccccatagagcttcctttcctagacagacggaaacccagcaaacacacgaagcgagacatcaggcaatgagtgatacctgggtgtagagaacaaggcatcccttctattcttgctcctaaggatttcaggtagtttgttgcccagcccacttaggctataaatgctgctttctctccaactagtcatagctatcagccagcctggccactttggaaataagaatatttaatgcactcatggacgtgggagcctgtgttctaagacattcttactcagtcatagttagctgagactctaaagagtggcatatgtaatcaagataaaatatgaagtgtgcatctggtatattttggagcctataaagaaagattctgtgctgataatatttacattgggtttttcttgttgttttgt

SEQ ID NO: 1888418 - DNA, 4001 bp, Homo sapiens
ttgatgcagagaggtatccaaagcacagcatgacaatctccttgatatgaggagatagagatagaatttcagacaggtgggtttggctggaaaattgcagagcatgtattagaaagaagtatgatgtacagacaatggcttttatctgcttcaatctgttgcacaatgtaaaccacacatgccgtggatgaacatctagtaatagtgtatagaaaatcaaagataactatgttcacagatttctcattagaaagtatgccaggacggggcatggtggctcatgcctgaaatcccagcactttgggaggccaagacaggaggaatgcttgaccccaggtgtttgcgaccagcctggccaatatagtgagtcccagtctctaaaaaaaaaaaaaaaaaaaaaaaaaattatatatatagccaggcattgtggtttgcgcctgtagtcttggttgctcaggaggctgaggtgggaggatggcttgagtgtgagaggtcaagcagtgagctgtgttcatgatgctgcccttcagcctgtctgagattgagactctgtctcaaaaaaaaaaaaaaagaaagaaagaagagaaaagaaaagaaagcaaaaagaaagaaaaaaaaggaaactatgccaggcagtagacaataaaatatctttgaagtaggaaggaaaaataaccatcaatctagaattttatatagagtaaaatatctacaacaaatcaaggtaaaactgatacttttcccaacaacaaaagttagaggaatttatcactaactaaattgaactagatgaactattacagtttttaagcaaggaagctgttatttgatggaagctaaggtatacataatcaaacaatgattaccaatgtagaagtttcctttcattttctgaaaccgtttttgggacataacacgctgcttatactgtgtgtttatatggtacagtattatgttaaaataaactaataacataaggatatatattgtgaacacaaaacaaccataaaaatagttatagttgattaacagtatttaaaatgaaatacaaaaataataaaagactgacaaagagcaagtaaaaagcaacaacaaaaatagatggaataagtaataagcaaggacaaaaaaaaagaactattgttccttctttcttttcctttccttctgtgtcactttcagcataggtagttaaataatgcagtaaagtaacagagaaaataaattatgtaatagggttccatggttgtttgtgtttattggaaagtcactgcttgtttgcaattgaattgagttctggttttgaatggaaagtgtagcctcttggagttgtcaaccttgctcactcatttatagacataaaatgcttatcttgtactcagagtcttgctgaactttcaagcactgtgggtccacaagaattctgcgttcacgtggcatcacaaacgctgtatgtgaatagaacagtaagaaactgaacatgtatatcacagacatctctgctcacacttgtactcaagtgtcccatcatactgcacttttaaaacacagaggtaaaattatttaaaaatttaaggcagtaataagagagtgttaaatcaaaaacagggcacttctgagcatgaaatcttgtatgactgtacaaggtacagtgcatgaagctggccctacatgaacaaaacgaattatttccttctaagttctagaacaaagtagagatatccagtctaaccactgaaattcaatattgcatcaacattcttgccaatgcaatatgagaaagataaaaattaatacaacacatgccattagtaacaacgttaaaaacatgaacacaggaataaacttagcataatgtatgccatacctgtttactgaaatcttcaaaactttgctgagaaaaataaaacaagatcgaaatattaagattggtgtgaaagtaattgcagtttttacgattgaaagtaacgcaaaaactgcaattacttttgcactaacctaatatattgcaatgtataatgtgattacagattggaaggcttaatgttgttatgatagtatctctccccaaattgatctatatgttcaatgcatatttaaaaaacaattgtagcaaagttctttgtagaaattgttaagctaattctaaattttatatggaaatccaaaggacatattatatacaaaatgatttctaggaagaagaacaaaattagatgagcagcacctttttcttccaagactccctatatactccttttaggcaccagtcatagaggtagtatggctgaggtttacaactggatgtatagataatggaacagaatagaaaatccagaaacatgtcattttttatgtgcttaaatttttgaaagtatttccatggttattcaatgagaaaaattatagtcttttaaacaattttatcccagagggaatgtaagtatatttaaagacaaaaaagaaaccttaacttataacatgtctgcacatgctcatatacaagaggtatacaagaatagatggaagaggagtaagataaaaataccaattaaggcctttggactaacaagtgatggagtctttttttcctgccactaacacttttcgtataactttttcccctagaaattgtaactagccacaatttgaaaattagagattgacagtgaagtgtattagtcagttttcatactgctgataaagacatacccaagactgtgtactttataaaaaagaagaggtttaatggactcacagttccaggtggctagggaggactcacgaacatggagaaggctaaaggcacgtcttacatggtggcagacaagagagaatgtagacagacaagtctacattgtcttggcagacaagtgaaagaggaaataaatcttcagatctcgtgagacttattcactaacaggagaacagtataggagaaaccatctccatgattcaattatctgccatgagtccctcccacaacacgtgagaattatgggagctacaattcaagatgagatttgggtggggatgcagtcaaaccatattagtaagtctcccctgcattatggtgtactgttagtgtgtcactcatatcatatcagattccttaaacatttgtttgcataaagtccccatgtaattctattccccatagtaagtacctgcttctctagcaccatgtactatgtactatgcacaagtagccagaatcagatttgtctacagaattggagaactattatctccgaacttttgttctcctgctaacagctcttaaacattgagagatgtgtgtagaggcttaaatactccaagcgctttttctctaatcaggaatagactatttttgaaggattgagtaaaagctgttctttgcaggacttttctattatcatactcatttttggactcctctcatgtcctgtctcatttccccatgtggttatcaacttgtctagggataatgtaaaataacacatatcatgctggtctcaggacaaaactccatttattacagttggtgcaaaacagtcagattttatgcctatgatgctggtataattattataccatgatattgacccatttcactccaaaaccccttctagtttgtataataatttatacagtcatcattttataatgtgaaatagtcacaaccacaaccacattctacccaggagagagagtgtagaaaaatctatgataatttaggaaagaaagagtcagacaaagcaggtgctcttgaagtttaaaaacaaaacacattttgaacatgcaagaaactttgtgaatactgtttgcggaagcctccttgacaacattatgaggggatgaactccaggtggaaaggagtaattgctatttaacaaataaatgaaagaaaggctaaagttgacagaatagattatatattgtatatgctctgataatgtggaaataattcatctaacacaaaacggaacagatggctttgataagaagataaaaaataa

SEQ ID NO: 1888419 - DNA, 4001 bp, Homo sapiens
tccttctaatggccaatctacctctaatgctggccggtctatcttacacaaagttttaagttttcctagtgtcacagtactccatagtctctcttaaattctttttttgaaattttccaacatagttcctagtagggtgggcttatttgtgcctgacctatgcttctttgagacaaaataccatgctcactccacacgcacaccacaaaacaaaaaaatgggtaaaaagggcacacacacagttttgcagtttgcaccaaacaaaaatcaaaaccaaaatcagagtaaccagaaatctaagccaggtcaaaaccaaaaccaaagtatcaagcaatccaagtcaaatcaaaaacaaaaaccaaagtgccggtacaggcacgctgtgggtgatcaggccatgcttccactcaaatggagtgggcaagttctcaagaccagtcccgtcaagcaattcaaaccaagtcaaaaccaaaaccaaagtgcctgtacaggcacgccgtgggtgatcaggccacgcttccactcaaacggagtgagcaagtttcaaagaccagtcttaccaagtttcagatgtgcagactccaagtgcctgttccttccaggtgttcagccactgcattgatcctccacgggggcctgccacacactgctctggggggcgtcccaccgggacaaatgcctcatattcgttatatcctcaggggatgttacttctaatgtcacacgaggtgttctccctgtgttctatttcataatatcctagggcaattttacttttaatgacaccaggttgtacacattgtgacattattcatgatattctagaaagatgttgctcctaatgtcacaggggtgtaaaccctgtgatagtattcataatttcccaggggtctgtactcctaatgtcacagaagataacactctgtgacattattcataatattctagtgagatgatactcctaatgtcacagggggtgtacaccctgtgctattattcttactattctagggggatgttattcttattgtcacaggtgtgttccttctgtgatattattgaaaatatgctagcaggatattactactaatgtcacaatacatcttgtgatattattagtaatattctggggggatgttacccctaatgttacaggggtgtacaccgtgtgatattgttcccaatattgtagggggatgttactcctaatgtcacagggggtgtacacccttagatattatttgtaatcttatagagagatattatttgtaatatcttagagagatataactcctaatatcccagtgggtgtaccccatgtgtgtacaccctgtgatattatttgtaatatccatggtaaacattacttctagtatcccacagagggtacaccccgtgatatttttcataatatcgtagggagatattgcttctaataacacagtgggtgtacaccatgtgtgtacactctgtgatgtgatagcttatatcctagggagatattccttctaatatcccagtgagtggacaccctgtgatatcattcgtaatctcctaggtagatgctgctgctaatatcacagagggtgtgcccccagtgacattattcataatatcctagggagatgttactcctaatgtcacagggggagtgcgccctgttatattattcataatcttctatgggggggttacttttaaagtcacaggggtgtacaccctgtgatgttattcgtaatatcctaggaagaggttactcctaatatcacatgggttatcctaggaagaggttactcccaatatcacactcctaatatcacaccctgtgatagcattcggaatatccaaaagggacgttacttttaatgtcacatggggtgtacaccttttgagattattcataagatcctagggacatactacttcaaatatcacatgggtgtacacacatggtgtacacattatgtgtgaacacctactgtgatattattcataatatcctaggaaaatgggactcctaatatcacagtgagtgtacatactgtgatatcatttgtaatatcctaggggaatattactcctaaaccaaaggcgtgtgtaccctcatgatagtattcataatactctagggagatgttactcctaatgtcatatcacaggggtgcacaccctgtgatagtcacagtatatgagagggatattagcactgaagtcacaatgtgtgtacaccttgtgatattattcataatatcctacggggatgttactcctattgtcacagggggtgtgttcgctgcgatagtattcatagtctcctagacggatgttacacctaatgtcacagggtgtgtacatcttgttatattattcgcgatatcctaaaaagacattactcctcatgtcacaggggctgtataccctgtgatattattcgtaatatcctagtaagatattacttttaatgtcacagagggtgtacaccttttgaaattatttgtcacagtttcgtgggctgttactcctaatgtcacacggggtgcacactgaatgatattacttgtaatattctatagaactcttactcataaatcacaggtgttctacaccttgtaatgttattggtcatattctaggggactgttccatcaattaatgtcacccggggtgtacaccttgtgatattattcgtaatatcctagcaggatgttactactaatgtcacaatacgtatataccctctgatattattcattatatcctcacggattattactcctatgtcacacggggtgtactccctgtgatattattcggaatatcttagggggattttgcttttaatgtcacagggggtgtacacattgtgatattactcgtgatgttctagaaagatgttactcctaatgtcacagggggtgtacaccctgtgatattacacaggctaaccccctgtgacattattcgtaatattttagcaggatgatactcctaaagtcacaggaggtgtacgcccagtgatattattcagaatattccagggggatgttactcctaatgtcacaggtgtgtataccctgtgatattattcacaatatactagcgggatatgactactaatgtcaccatgtgtgtacaccttctgatattattcataatatcctgggaggatgttactcctaacatcacaggggtgtacaccctgtgttattattagtaatattctaaggggatttaacttttaaaatcacagggggtgtcaaccctgggatcttattcgtaatatcctaggaagatgttactcttaatgtcacatggggtatacagcctgggttattatttggaatatcctaaagggatgttatcttaatgtcatggggtgtgtacactccttgatattattcataatatcctaaggaggtattactttaaaaatcacagtgggtgtgcacacgtggtgtacatccgtgatattattcacaatatctgactgaggtatgacttttaatatcacagtgggtgtacaccctgtgatattatttgtaataccctagggagatgcgattcctaatgttacagtgggtgtacactctgtgatattatttgtaatgtcctaggaagatattactcctaataccaaagtgggtgtacaccatgtgtgtacactctgtgatataatccgtaatatcccagagagatattgttcccaatatcacagtgggtgttcaccctgtgatattattcataatatcctagagagatattattcctagtattacagcatgtgtacaccatgggtgaacaccctgtgatgttattcataatatcctagggggatattacccttaatatcacagtgggtgtacaccatgtgtttctattttgtgatgctattcatatgttagaaagttattagtcctagtgccacagtgggagtataccatgtgtgtaccctctgtgatgttatttgtaatatcctagggagatagttctcataacatcac

SEQ ID NO: 1888420 - DNA, 4001 bp, Homo sapiens
agtcctagaacaaaatctaggaaatagtcttctggatatcggcctaggcaaagaatttgactgagtcctcaaaagcaattgcaacaaaaccgaaaattgacaattgggacataattaaaataaagagcttctccacagcaaaaaaaactatcaacagagtaaacagacaacctacagaatgggagaaaatattcgcaaactatggatccaacaaaagtctaatatccagaatctatagggaagttaagttaaacaaatcaacaagaaaaaacacacaacctcattaaaaagcaggcaaagggcaagaacagacacttcttaaaagaaaacatataagcagccaacgaaacatgaaaaaatgcccaacatcactagtcatcagggaaacgcaaatcaaaaccacaatgaggtactatctcacaccagtcaaaatggctattactagaaagtcaaaaaacatcatgttggcaaaaccactgaaaaaagggaactcgtatacactgttggtgggaatgtaaattaattcagcacctatggaaagcagtctggagatttctcaaagaactaaaaacagacctagcattcaacccagcaatcccattacttggtaaatagccaaaggaaaataaaattgttctaccaaaaagacacctgcccttataagtttatcacagcactgctcacaatagcaaagataagtggtggctcatgcctgaaatcccagcactttgggaggctgaggtgaaaggatcacttgagttcaggagttcaagactatcctgggcaagaaagtgagacccctatcgctaccaaaaaaaaaaaaattttttttaattagccaggcatgatgtcacatgcctgtaatcccaagtacttgggaggccgaggcagaaggattgcttgagcccaggattttcagactgcagtgagataagatagcaccactgcatgccagtgtgaatggaacagccagaccctgtctcaaaaacaaaactaaacaaaacaaaaatagcaaagacatagaatcaacccaggtgtccatcaacagtggattggataaagaaaatgtggtacatacaagccatggaatacttcgcagccagaaagaaagaccaccaccatgtcctttgcagcaacatggatgcagctggaggctgcctccacttatcttaagtgaattaatccagaagtagaaaaccaaatattgcatgttctcatttataagtgggagctaaacccttggtatacgcggacataaagatgggaacaagagacactggagactccaaaaggagagagggagggagaggaacaaggactgaaaaatctcctattgggtactatatctactatctgagtgacagattcaacagaagcccaaaccttggcatcacgcaatatactcttgtaacaaacctgcacatgtaccccctgaatctaaaatttaaatttaaatttttttaaaaaatgggcaactaggaaaaaaataacccctatctctgggtctaaggtactaactgctgaaaatgagtgaccttcgatcatgaaagtggcagtgaaagtgtagttccccagagagaggcaagctatacacaaggcagggggaggccaggaagaaaagaggctgatttatagtatgagaaaggtcttggggctccagaggactcaagggtgggcgttagtgaagtgggggaggtgaaaagaggggagaagagtgccttggagatgtggtgagacggaacaagccatgagcatgttggaaggcagccaaagatcccagggggaaggcccctctcaggctggtgcatgctgagatcccgagtcaggatagagggtaaacacgcggctttgctcagtggccaaatggaagactgccaagaaagtcagtgaatggctctgaaggcaattctccccatctcccactgcaatcaacaagagctcaccaggacccaaaggcacagagctccagggactggaaccggagaggctagaagtgacccagccctcacacacagctttgccttggaagttgaagggggactttagctggcccataaatatggaccttgtacagaccacagaagcaaaagaggcaatggattagtatccagaacacacaaagacctacagcagatcactaagaaaaatgcagcccaacaggaaagtgggcacaagacacagacaggtgactcaaaggaaaaactggaatggtacaaacatgtgaagagcctcaacctcactggcaatctaaatctgaaggaagggagagaaggacaaagacagacagatgataggtggatgataaaaatactctttaaggccaggtccagtggctcacgctgtaatcccaacattctgggaggctgaggcaggtggatcacttgagcttaggagtttgagacaagcctgggcaacaaggtgagaccctgtctctacaaaaaataccaaaaaaaaaaaaaaaattagctgcgcatggtggcgtgcagagtagctgggaccccagttacttgggaggctgggatgggaggatcacttgagccccagaggtcgcggctgcagtgagccgtgattgcaccactgcactccagcctgggtaacacagcaagaccctgtctctccccctcttcccccggcacctctctctccatatacacatatattttttctctttagaggaatataataaatagcaaagtgctgacaaggacgtgggaaacacgaacactgacatggtgcaggtagaaatgtacactatggtgaccaatttggcagtatcttatcaaattgaaaatgtccatgtactacttctcaaatatttcctctgggaaaactcctggagaactctcagacaggttagcaaagagtttatcaaggatgctcactacggcattatatttgtcaagtaaaacccgaaagtaacttaaatgcccatcagtcagggaaggataatccaaatattacatctcctttgatgcaaggtacttaaaaggaatgaactagatccacaagcaatttgtaaaattatacccccaaacaaaaccatctatgccagcctgggcaacatggagagaccccgtctctacaaaaaaatttttaaaatttaacaattagccaggcatggtggcatgcactgacggtcccagctgctcagaaggctgagctgggaggataacttaagcctaagaggtcgaggctgcagtgagccatgttcataccactgtgctccagcctgggttacaaagcaagactctgtctcaaaaaaaaaattttttttgcatatatgttacactgtattatatgtattatgtatgtatagatatttgttagcacaaaatattaaaatggactagaaagcttggttctggataagatggcctgaacacaccctccagtctcgcttccactgaatgcagctataaattccaaagagaatacatgaagcagctatttgaggactctgaaaagtaaacagtagcaggcagataggggaagaagatcaaaattttaagaaccactaaaccagcagagagtttaccactttttcctttagtgtccctggcctggactcgagggagctccaaaacccaaaagtagccctgagccacacagagagcaccaggagaaggtctctagtgaggctcaaggagtgggaaaggggtctcctgccagcaaccaagcacggtagcagtggggacatcccccaggtaactcaaactctgggggaaaggaattttttccttacacctgaaagctctaagagcttctcaactcctgccgcagggcgggatgagggcagagttgcaggcacttggacacagcagggtatatgaagccccagcattccaggtgggggactgaaaaaggcagtcccaggtaactaaagtgtacccagagagttaacagctcagaaaagtgaccccaaaaagttgtttataaattcctggcctcatcccaagttgtgcctgtgtggatctgatcataaacagtatctgaaagactct

SEQ ID NO: 1888421 - DNA, 4001 bp, Homo sapiens
atacaagcatattcaaccaaatactagcaaacccaattcaacagcaaattaaaacattcattcaccatgatcaagtaagattcatcccagggatgcaaggatagttcaacatatgcaaatcaataagcataatacaccacattaatagaatgaaggacaaaattcacatctcagagaaccaaaaaaaaaaacaagaacaaattatatcccgaattactagaagaaaggaaataataaagatcagaatgaaataaataaaataggctagaaatatgatttatacatacagaaaaacattttatacatacagaaaaacattttacaaaatttaacatcccttcatgaaaataaaagaaactctcaacaattagttacagaagaaatgtacctcaacacaataaaacccatatatgacaaacttagaaataacaccatacggaacagagaaaagttgaaagcttttcctctaaaatctagcacaagacaaggatgtccactttcatcacttctattcaacatagtactagaagtcctagccagagcaattagacagaagaaagaaataaaagggattgaaagagaaattaaaaaggtaaattatctgtttgcagatgacatgatgttacatataaaaaactctatggattacaccagaaaacagttagaattaatatataaatccagtaaagttgcaagatacaaaatcaacacacaaaaaatcagttacatttctatatactaatagtaaactatctgaaaaaaagaattcaagaagacaatttcatttacaacagctatttagaaaaaaaaccctagaaaaaactttaaccaaggaggtgaaggatcttacactgaaaactataaatcattgattaaataaattgaagaaaacataaatatatagatttttcattttcattaaatagaagaatgaacattgttaaagtgtacccaaagtgatctacagatttaatgcaatgctcatgaaaacaccaatggcattcttcacataaattgaaaaaaaaatcctaaaattagtatcaaatcacaaaagaaccccaaatagccaaagctgaaatcataacagtacctgactttaaaattatctataaagatatagtaaccaaaacattatggtagtagcataaaagcagacacatagaccaatggaacagaacagagagcccaaaaataaatatgtgcatttatagccaactgattttcaataaatctggcaagaacacccaatgagaaaaagatagcctcctcaaaaaatggtgctgtgaaaactggatattcacatgcagaagaataaacaagactctctatgtctcaccatattcaaaaatcaactgaaaatggattacatatttaaatgtaagatcccaaactgtgaaagctactagggaaaagctccacgacattcgtgtgggctggtcaaggattttctatttaaaacctcaaaagtaaaaattagacaaattatactatttaaagtgaaaaaagcttctgtacagcagtgaagaggcaatctacaaaatggaaaaaaatttgcaaaatatacatctgataaggagttaatattcaaaatatataaggaacttaatagcaagaaaacaaataacccttttaaaaatggctaaaagacttgaatagatacgtttcaaatgaaaacatacaaatggccaacctgtatattaaaatatgctcaacatcataatcattaggatatggaaaatcaaaaccaaaatgaaatattacctaatttctactaggattactattatcaaaaaggcagaagataaatattgtaaataatgtgccaaaattgtcactgttagtgggaatataaattagtgctattagggaaaacagcatggagtttcctcagaaaatgtaaaaatagaactaccatacaatccactccctcagtactgcatataaatccaaggaaaattacatcagtatatagaagggatgcctgcatttccacattcattgcagcattattcacaataaccaagacatgaaatcaacctaagtgtctattagcagaagaatcactaaagaaaatgtggtatatttacataatggaagagtattcggtcacaaacaggaacaaaatcccaccatttgtgacaacatcaatgaacctggatgatttcatgctaagagaaataagccaggacagaaataccacatgatctcacatatgtggaatctaaaaagtggaactcgtagaagcagagagttgagtagtggttaccagaggctgagctaagtaggaggagagggattgggtgatcctggtcaaaggatatacaattaaagttagatataataattgtttaaatgtttagatatgcaaacatatagagaaaaaatgtagacaagtgattgtataaggccaggaaggttggggagaggagaactggcggtggaggagttagagaaataaggaataaccattattggttatggagtttcttttggggctaatgaaaatgttctaaacttgattgtgatgatggaggcacaactctgagaacacttcattgtattgcacatcctaagtgggtgaagagtatatgcattatatctcaataaagctctaaaataaaaattatgggtttattctgctacttctaatatccatctaaacttatgccattacatacatgtattctccatttcccacagtgagaattctcaaatatattaatatacttaccctttgtttaatatattttcaaaagtgttataccaactgcactatgaacaacaaacctatgaagttgggttcaaaatatctttctttttaagaggcaggcccctatttgttttgataattattactcaatattgtatatattaaattatcacactgagtaatcagaatatatatgatctttattggttaattaaatatatttaaagaaaatatcaaaatttatttctttaattttgtgtggatacatattaggtatatatatttatggggtatatgagatgttttgatataggcatgctatgtgaaataagcacatcatagagaatgagagaatggggtatccattccctcaagcatttatactttgaattacaaataatccaattacattatttaagttatttaaaaatatacaattaagttattattgatgatagtcaccttattgtgctatcaaatggtagatcttattcattcttttttatttcttattttttgcacccattaaccatcttcatctcccctcccaatcttccactacccttcccagcctctggtaaccatcctctctctgtgtccattagttcaattgttctgatttttagatcccacaaataaatgagaacatgcattgtttgtctttctgtgcctatttcacttacattatgatctccagttccatccatgttgttgcaaatgactggatctcattctttttttatggctgagtggtactccattgtggatgtttacattttctttatccattcacctgtttatggacacctagagtgcttccaaatcttacctactgtaaacagtggtgcaacaaacatatgagagcaaacaaatttccttttcaaaatatctaagtttctttttgtctttggattcaaatacatgtcaaagttacttgtattatttttttcttcaatgtatttatgttatcaatttaatatattttgtttttgcattgtttcgaattttctttttcatttcttaacatttatatctactgaaatatataaattggtaacataatttcaaaattaaaaaccctttcccattatttcttacatttatcaatcattctctttaggtaaccagatttataacatttgctttatcatttctttgcttatttttgccaaggtatttactataaatggcaacacactatttacactactttacactttcctctttgttacttaacaatatatatccttgctatcattccttagcagttgatagagacatttttcctttt

SEQ ID NO: 1888422 - DNA, 4001 bp, Homo sapiens
tatgcctctgtatatgtgtcagtgtaagaatcggtgtaagaatcagcagccatagacatcattgaacgatcagcagtataagatgacatcatagatcggtcagctgcagagtacgatgacatcatagaccggtcagcagcagagtatgacgacatcatagaccggtcagcacccatggacatcatagatcgatcagccattggggacatcatggagcgttcataagctgacatcatggagcgttcataagctgacatcatagagcgctcagccataggggacatcatagagcgctcgtaggctgacatcatagagcgctcgtaggctgacatcatagagcgttcagccataggggacatcatagaccgctcataagacatcatagagcgttcgtaagatgacatcatggaacgttctgcagcataggacatcatcatagaacgtctagatgctaacatcaggggtctaggtgctaacctatatggcctgggtgctattctataggacctgggtgctatcctgtagggtctaggtgacatcctatagggatcaggagttagtctgtagggatcatggcctaatctataagggtcttgtcctaacctgtaagcatcatgacctaatctataggggtcatggcccaacctatagggatcctgagctaacctgtaaggatcctgagctaacctatagggatcaggagattttgaacccaacatagcagaatcttgggtactagacgctaacatctgggcatccatggtaccagacgctaacatctgagcatccatggtgccagaagctaacatttgagagtccatagtgccagatgctaacatctgggaatccattgagctagttgctaacatctgggagtccatggtgctggttgctaacatctgagaatccatggtgctggttgctaacatctgggagtccatggagctggttgctaacatctgggagtccatggagctggttgctaacatctgggagtccatggagctggttgctaacatctgggagtccatggaactggttgctaacatctgggagtccatagtgctagttgctaacatctgggagtccatggagctagttgctaacatctgggagtccatggagctagttgctaacatctgggagtccatggtgctagacgctaacatctgggagtccatggtgttggatgctagcatctgggagtccatggtgttggacgctagcatttgggagtccatggtgttggatgctaatatatgggtctccatggtgttagaagctaatatatgggattctggggccatcaagggatccactcctactgttacagaagtctcccccactaatgtagtaggcagctcctgtgctaccgtattataggattccagcgctgtcgtcgagggcacctccagggactgcgacacggtcatcgttgacagctccgatgttgtcaccacagactgaacagagatctccagcgccacagttgccacaggctgcccaggcaactctggcgccccaggctgccctggcaactccagcacccctgttgccagaggctgccccaaaagctccagtgctccagctgccccagactgccccgagaactccagtgccccagctgccatgagcggcccaggcaactctagtgccccagttgccacaggctgccccgacaactccagtgccctagttgccgaaggcagccctggcaactctggcaccccagtcaccgaaggctgccccggcaactccagcgctgtcgttgccactggctgtcctggcaactccagcaccatcgttgcctcaggctgccccagcaaccctgttgccgttgtcacctcaggatgcccaggatgttccaccgttgtcatccccacaggctgctccaactctgtcgtcgtcacaggttgttcggtcaactccattgctactgttaccgcaggctgctctggcaactctactgctgctgtcaccaaaggcagccctggcaactcctgtgccatcacaggtggctctggtacctcctgtggtggctccaaccccatggatggtgctggaagccctggcaattcctgcgacaactgtggcactggtgtcacagagggccctggcaactcaggcactgctgtcgcagggggccctggcaactcaggcactggggtagaaaggggccctggcaactctggcaccggggtagcagagggcccaggtaactccagcactggagtcacagggggcccctgcaactccggcatggaggtcgcaggtggccccggcaactccatcgctgaggccaccgacgactcctgcagctccaacgctgtggtcttaggcagctccggcaactcctgcggtcttgtcatggatgaatctgcaatctccgatggtacgtctacaggctgctctggcaatcttagcgcttcaattgcagatgactctggaaaatccattgttgttgatgtgcttggctcagggtacacctcagtaggtgtctctgatgataccacaagggtttctgaaggctctaacacttttgctactgggggctctaccaacatgatctttgatggctctggagatgtgctctccacagatttcagcacagacttcatctgatactccactgacattgttacaactggctcagatgacttcaacaccagtgttgtagtaggcactggtgctgctgcaaaggaatccagaatctttgtcatggatggttctggcattactgccacagactgctctgactgctctgagattactgatgtagatacaactgacagttctgcagtttttgtagctggcttcagagtttctaagatgtgtggctctgatacctccattgatactacaggaggttctagcacaactgcaggggattcattggtctcagatgggccaaatgctcttgtaggaagctccagcgccacagctgaaggttcagaatcaaactttaaaaaggaatcagattctaaatctatgttcccatcatcatgagatttcgtctttgactcagattcttctggctgtcttttatattttttttccttttctttcttctttttcttctttttgtttttgtgctttttatgcttctttgactttttagtgggaatttcatcagtaggatctgtttgtacagatacgcatctactttttctggagccctctttcaagtctaaaagtaatagaaattaattttgtcagacattccccaaagtagagttagattaaatcatataaacccatatttacattccatgttaaaacaccttagtacaggccaagtacagtggctcacgcctgtaatcttagcactctgagaggccaaggcaggtggatcatgaggtcaggagttcaaaaccagcctggccagcatggtgaaaccccatctctactaaaaatacaaaaattagccaggcatggtgacgcgcacctgtagtcccagctatttgggaggctgaggcggatcacttgaacccagtaggtcgaggtttcagtgagctgaaattgcaccactgtactccagcctaggcaacagagcaagactctgtctcaaaaaaaaaaaaaaaccccacagtataacacctcacgttaaattaaaagttaccaaataaactatttttcataaaacagttaacctggagactactacttttctgataattctttccacaactaatgcctgggttaaaaataaattattaaacaccaaaacttactttgaattacattaagacatgtttcactaaattctattaaaataattattccctccagctctcaaatcatagcaaaattacttttaaactacttttgtcactgaatatatttcatgttattagttgctacagtttctattaaaaatacccacataatataatttttgcgattattaacccttgtttatacaggaagcaacatggcactggctctggaacagactgccacttttgaatcctcaatcagttcatcacttactaggttaatgg

SEQ ID NO: 1888423 - DNA, 4001 bp, Homo sapiens
ataagctggccaaaattggctggaggtctgcagctgtttatcaataaagaatgtttataagaccagtcctttgtccaactggagttgtagtaggtctgcaaggcgtttgggggtgggggcgcatactgagggagggaatgtttccattggctggcatcaggcagtctatcggggtcagttggaaattttccagctgaagttgtgttggctatgctttttcgaagctggtttctgcttacttaatagcagttaataatgcaaaaatacgtaactaacccctcatccttctggctgtgacattctggaggttttgttttgttttgttgtttgttttttgtttgtttctgtcaccaggctggagtgcagtggcttgatctcagctcattgcaacctccacctcccacattcatctcctgcctcagcctcccgagtaggacattctgtttttggtgcatctcattttaggaaacaggagttcattttgtccgtctgttggagtatattttaacaagtcaaataacatcactttttgatttgattaattttgatttaaagacatgaggtactgggctacaaacttcatagagacccccagatgatctcatgataaatgataccagatgatatgttttgatttacataactttacagataacttaaaatgacaaataaagacacgtctttattatgtagaatgatggaaatgattaccataataactgtagtgggttgaatattgttcaccaaaattcatgttcagccaaacctcagcatgtaaccttatttggaaatagagtctttacagatgtaatcagttgagggggtcttgtgattaaatcatcctggatttagggtgggccctaagtccaatgactggttgtccttataagaagacaagacagggagacacagagaagaacaccctgtgaagatggaagcagaaattggagtggtgctgccacaagccaaggaatagcaggagtccccataagctggaagactcaaaaaattctccctaagagccttcagaggaaacatggactttcagacaacttggtttcatacttctgacctccagaaatgtgagaagataaagttctattgttctaagcccctaagttcgtggtagtctgttatgacatccctaggaacctaggaacctaatatagagaaataaaggctatgctttttatgtggcatgatggagatggccccagaatagtgaaaggccatggctcttctccttccattgtgtacacagaaaagaacaccccttcgaaagcaaaagcaaaggccaggcacggtggcttatgcctgaaatcccaacattttgggaggccgaggcgggcagatcacttgaggtcaggagttcaaggccagcctagccaacatcgcaaaaccccatctctactaaaaatacaaaaagaattagccgggtgttgtgactcacacctgtaatcccagctactcaggaggctgatgcaggagaatcacctgaacccaggaagcggaggttgtggtgagctgggatggcgccactgcattccagcctgagcgatagagtgatacgtctcaaaaaaaaaaaaaaaaaaaagcaaaagcgaaagcaaagaaagattcaagggcagatttgcagtgacttatcatgtctacagactgggaaaagctggtagaaaagaggaggaaaccattctcaggaaactctacctttcaattcctccagtcatgagctccagggttggatgctcccgcaatggcaaaactccgctctcgttactgtcatggggccaccaccacccaccaagcatcagcccatctttccataatgtcaagtctagagtgacatttgtctaatgtttgcctacctggagatgttgccccgcccaccaccaccagcaaaaacaaccggcacccatcttatacggataattccctacctaaggagttctagaaatgcatggcccaccaaaactcagggtgggtcatgcatttctagaggaagaaatggtgatatggagagaaagcttgtcctaacccacttctaccaaagtaggattaaagtcaatttgaaaaaaaacacccgtttctccttttatataaaaaccaaatgcagaaactatagagaaatgtaataagcttgactctacacaaataccaaaatacactgtaaacaaaattaaaggtaactgacaaattgaggaaatatttgcaacgtatatcacaagccaagttttcaagcatcaaaagtccttacaaaacccatttttacaaagatgaatgtcaagttttaaaatggacaaaagacaggaaaatgcaaatcacacaataaggacaaatggcactcaagatatgggaaaaagtctattcttcctactaaaaaggaagtgaatacaattaaagatgccaatttttgacaataaaatgggcaaaaaaattttaagaaaaaagagaatttccaatgcgggccaagtatcgggacacttactggaaggcagtttccctctacctttagaaagcctcaaagtgagcatatgctttggccctgcaacctcgcttgtaggaatttatcctaaggaaacagtcaggggtgacctcaaagattcatctgcaaggatattcaacatggctttgatgcaggaaaaaaagtaaataaataaaaggaaacaatgtaagtcttcctaaattatgccaaattcctatgctgtcattaaaaaacatctataactccatcatctaggtgattttgacttttgctttggacttgcctgtacatttctaaattctctatgccaaacatgcattgttttgtcatcagattttgttttacaaaaaaaaaaaaaaaatcgtctttatgacaaggggttaataggggaactgtgcttcccaggaattgaccaggcgtctacacccacctactgactcaagttacctaagactgacagagccttaagaggtcaggagagcgccagagcgcgtgacaggctccctcgtctcggtgcggccacgcgggaaggcagggtcccgggcgccgaacagggacggcaggaggatcgtttacagacgtctacacaagaaactcacttcccgtcaccgaagacaaacgcgaggccacactgacctccaggcccaagacgcccctccccgccgcggctcctgctgcccgagtgcgcatgcgcgcgcccagcccccgcaggccggcgcttcccaggaggccccgcgcgcgggtttccatggggacgcgccggcgctgcggcgttggcgcagtcgtgggaacagcgcggagcaggtaacggccccgctgctgccgtcgtccccctcagccggttaccctgttacagccccagctctgggcccttccggaccctcctgctacgctctttctgggcttccagtatcgccggtcactcagtcctcgcccctgcctgcctcgctggcgccccgccgtttcctcctcgcggcacagtttgccaaggaacagctaccccggctcggcagtgaccgggcgccccggcgacacacgtactctcaggcccgctgggcagggggacggcctgggccgaggtgacctagcgctcccggggccgcgcctgggtctggcgagggggcggaggccgatctcaccgccgccccaccgagggaactttggggtttttctatctgaatcttctatctgacctccgattttgcctctgcttacttgctgttttgctttggattagtttttctttctaaccttagcgctggcatctccctatctcgtaggaatctaaatcttttgaaatgtcttctctgtctgtgtttgtcccccactcacccagcctcggggctctttatccacaccctcccctcagcgtgttaacgtttcgttgccacacttaagccaacggttaacttttttcagagaccagttttcacggctgaatgtgagcttgagccttttttctgtctacactcaatccctagatgaactcatccagtcgcctgtactcagagcctatctg

SEQ ID NO: 1888424 - DNA, 4001 bp, Homo sapiens
tggtaggcacggcgactaccatcgaaagttgatagggcagacgttcgaatgggtcgtcgccgccacggggggcgtgcgatcggcccgaggttatctagagtcaccaaagccgccggcgcccgccccccggccggggccggagaggggctgaccgggttggttttgatctgataaatgcacgcatcccccccgcgaagggggtcagcgcccgtcggcatgtattagctctagaattaccacagttatccaagtaggagaggagcgagcgaccaaaggaaccataactgatttaatgagccattcgcagttcactgtaccggccgtgcgtactcagacatgcatggcttaatctttgagacaagcatatgctactggcaggatcaaccaggtaggtaaggtagagcgcggcgaggccccgacgcggccggacggccggccggggggcctcgcgaggacgggcccggcgccccgcaagcgaggaggacgacggacggacggacgggccgcggacgggcggacgggagggagcgagcgggcgcgggggcggcggccgggaccggtggggccggggcggggcgcggcgaaccggacgccccaaccacccgccccccacgcgacacgaccaccggggccccgcgccacagacccgcgacgcttcttcgtcgcgcccgcccgcgaggaggcggacggcccgacccgcgcccggcggccgggagggaccggcggccacgcgcgcgcgcgcgcggccggcgcccgcgggcggcggcgaggcggggacggcgctccgcccgccccgcggggcggccccgacgtccgggcggcgagcgagaggcggaccgcggtgcccggcccggggacagtcgcgccgtgcggccgcagcgcccgcgcaccggtccggtcgagggcccggggcccggccgaagcccggctccgacccctgacggcggcgcgggcgcaggggtggcacacgccacacgacggccaagggagggcgaccgaggccggccggcgcgcccgcccccgcccgggacgggggaccgcgaccgccgatgccccggcccgggccccaccccccgacccggggagagggcgagcgaccggcaaggcggaggtcgacccacgccacacgtcgcacgaacgcctgtccgggagggaccaccgggccgcgctcggcgcacgcgcgcgccgaacggggcgacgccacgcggggaggacgggctctccccgacgccgacgcccgggacggacgcctcggggaagggccgcggcaggcccgggaagcgaggcgcacccgggggacgcgccgacccggttcggaagagcgggccgggagaagacgagagaccacgggcgaggccggggcgacggggaaggcgcgagaaaggcggccggcggggaaggggacgccacggggacccctcgagcgcggccgaccgcagccgggacacacgcgcggggcctcacgccccggcggcaccgcgcggcacccggggcgccgaccggccctccggcgatccccgcggctccccccaccaccgccgcagtcgcggcggtcccccggaaccgtctcctccccctgcacgcccgcaaaggccgacccccggatatactccggtgaaatccacccgtgctccacgcggggcgccaccgacccggtccccaaggcgcgcgccgggggacgcgggacgccgggccgatcagtgcgcggcgcggcgcccacgagcggtgccgggttcggtcccaggcggggccaccaacggacgtgaagccggtgagccgctcggggggaagaagaggatcggcgggcggcgggcggggaagagggcacagacgggcgagggccggggaccgcgagggcaagggcacccgggagcccgcagaggcggcggctcggggagaaacctcaggcacggccgggccaccaggaaaacacggccgcgggatcccaccgccacagacacgagggcggtcccgcggcgccccgcctgggacgccggaaggccctaggccccccccgagaaccccctcacgagccccggggccccgccaccgggggccccggagcgaccgcagccacgaacccgacacgccaccaccaccgtcgctcgtgattctcgtccatcctccgacccggtcccgctccgggagaccggcgcgcccccaccgtgggacgctttcccagggccaggcgggcccgaccccgtgccacgcaaacgcggtcgtcggcaccggtcacgactcggcacgggagcgggcggagagccgactcgcggcggagggagtcacgcgccggacagagcgccgggcgcgcacacccaccgcccgccggccgccgcgtcccaacccgctgggacgccgggcccggcccggcgggatcctcccccgactcggaagggggaggcgcgggccacagtaggcgacgagccgcactcggccaccaccgcggtggccggcggaaccctcgcttctcccccccaaccccgtcgagggggaagcggaggagggtcctctgcgagcgggtcgctacggcagcgctaccataacggaggcagagacagaggcggcggcccgggggatccggtacccccaaggcacgcctctcagatcgctagagaaggcttttctcaccgagggtgggtcacactccccccacccgccagccgctcctcctcgggcccgcagaggcgccgagggacgcctggggaagggagggggccctgcggtacgaggaaacacctgcgcgcggccacctcgagcgttcgcgttcagggcgggggcccggccggtgcgcgcgtgcgcgcaaccccaccaggcccccccgtccacccacctccttccttccgaggcagagcgcctccgaagtcaacccacacacgaccggtcggaggcagaacggcagcccctcggcggccggccggcgcacgcgtcacaccggcccgaacccaccgcgatcgctcacacggcccgcgcgcacccgccagaggggagcacgggacgtgcgctcaccgagagcaggcgggcgcccttccccgcgtgggaggggcgcgtctcgtctcgtctcactcaaaccgccccgaaccccacaccgacgagctccctcaggacccacgcgcggacaccgcggcggcgaccggaggagggggcgccgggggcgggaacgacacaccaccgttcggcctcgggcacctgagggacaacccggagcgctccaggagcaccgcaagggcccaggcggagccgacgctcgcgcaaaccccccgagagggcagcacgacgggccggcgggacggcacccccaccgccgcggaggggggccgcccgcaagtcgacaaccactggaggcgacagcgagggctgtctgccgcgtcagaggaccccgccggcccgcacccgcgacgcagaaggcggcgggcgggacggcgaggtcgggccggggtccgcaccccacgccttcccacacgcaccgccggcgggcggggagaggagagacgaggggacccccgcggggcggagcgagaaggacggtcccgttcgccacgaacgtccgcccctcgcccgtcgcggctcggacccggcccgggagagcacgacgtcaccacatcgatcacgaagagccccccgggagcggaggccggccggccggccagcgagccgatcggctccggccaaccccccactccggggaaggggcggcggacaaccccgcggagacgagaacgcctgacacgcacggcacggagccagcggggtggggttgtcgcggccgccccgggcgcccgcagcggagagcgcacgggggcacggtggccctcgccgccttccccgccgcccccgggtgggtcagagacccggacccgggccggcaccgggagtcgggacgctcggacgcgcgagagaacagcaggcccgcgggccccggcaggcggctcaagcaggagcgcggccggctagccgggtcaccggtaggccagagccccgcgcgcatccggaggcccaacctc

SEQ ID NO: 1888425 - DNA, 4001 bp, Homo sapiens
gagggggccctgcggtacgaggaaacacctgcgcgcggccacctcgagcgttcgcgttcagggcgggggcccggccggtgcgcgcgtgcgcgcaaccccaccaggcccccccgtccacccacctccttccttccgaggcagagcgcctccgaagtcaacccacacacgaccggtcggaggcagaacggcagcccctcggcggccggccggcgcacgcgtcacaccggcccgaacccaccgcgatcgctcacacggcccgcgcgcacccgccagaggggagcacgggacgtgcgctcaccgagagcaggcgggcgcccttccccgcgtgggaggggcgcgtctcgtctcgtctcactcaaaccgccccgaaccccacaccgacgagctccctcaggacccacgcgcggacaccgcggcggcgaccggaggagggggcgccgggggcgggaacgacacaccaccgttcggcctcgggcacctgagggacaacccggagcgctccaggagcaccgcaagggcccaggcggagccgacgctcgcgcaaaccccccgagagggcagcacgacgggccggcgggacggcacccccaccgccgcggaggggggccgcccgcaagtcgacaaccactggaggcgacagcgagggctgtctgccgcgtcagaggaccccgccggcccgcacccgcgacgcagaaggcggcgggcgggacggcgaggtcgggccggggtccgcaccccacgccttcccacacgcaccgccggcgggcggggagaggagagacgaggggacccccgcggggcggagcgagaaggacggtcccgttcgccacgaacgtccgcccctcgcccgtcgcggctcggacccggcccgggagagcacgacgtcaccacatcgatcacgaagagccccccgggagcggaggccggccggccggccagcgagccgatcggctccggccaaccccccactccggggaaggggcggcggacaaccccgcggagacgagaacgcctgacacgcacggcacggagccagcggggtggggttgtcgcggccgccccgggcgcccgcagcggagagcgcacgggggcacggtggccctcgccgccttccccgccgcccccgggtgggtcagagacccggacccgggccggcaccgggagtcgggacgctcggacgcgcgagagaacagcaggcccgcgggccccggcaggcggctcaagcaggagcgcggccggctagccgggtcaccggtaggccagagccccgcgcgcatccggaggcccaacctctccagcgacaggtcgccagaggacagcgtgtcagcaataacccggcggcccaaaatgccgactcggagcgaaagatatacctcccccggggccgggaggtcgcgtcaccgaccacgccgccggcccaggcgacgcgcgacacggacacctgtccccaaaaacgccaccatcgcagccacacacggagcgcccggggccctctggtcaaccccaggacacacgcgggagcagcgccgggccggggacgccctcccggccgcccgtgccacacgcagggggccggcccgtgtctccagagcgggagccggaagcattttcggccggcccctcctacgaccgggacacacgagggaccgaaggccggccaggcgcgacctctcgggccgcacgcgcgctcagggagcgctctccgactccgcacggggactcgccagaaaggatcgcggcagagggaccgctccccggcacccgggggacgggggcgggacggtccccggctccccacggggactcggaaacgaattcggccgccgcctcagacggccaggatgagcgcggacccgcgaccgggccgggaagggcgtccccagcctcccgcgccacgcgcggcgggtccccgcgggtcgcggctcgggcctcgggagctacggcgcgctggtcgaccggcccgggcagccccacgcccgccgcgggcccagaagcgcagcgacagcctctcccccacataaacctgcacgccagagctgtgactcacaagcgacgcgccacagctctggcgccaccgggccagccgggctgacgaccgcgggctttccggagctctgcctagctcacagcggggacggtcccctccctcggcagctgccaccgcagctccggaagccgagagcacgatctcaaagcggccgccagatggagcccgacaaccgccgcggacgtcagcgagacagatccggctggcagggcggcccgtggaccgcgaaagcgaaaccgtgagtcgagaagctcttcccgaggccgaaaacgcagcccctctgccccaaccccacacaaacggtgcccaaaacgcgtctctgcctcgaccgcgacagagtcagaagacaacccacggcgcgtgggtgtttggagatgcctctcggaagcagggagggagggagggagggagggagggagggagaaagaacacacaaggactcggtcgcgggtcgctgcagacacacggagaggcagaatgcgtaggctcttccggaatccacgcagagacagacggggggaggggagtggggaaaagagacagatggcgaaagggaaggagggagggaagggagcagggagggagggagggagggagggaggaagacaatggagaaaagagagacaatttagaaaacgtagatacacaaagtaaacttctgaaacactccattttttaaaagacagacgggaaggaaagaaacacgaaaaagagagaaagaatgaggaaagaaacgaaggaaagaagggaaaaagaaacagagaggaaagaaaaaagaaggaaacacagggaacgaaagagaaataaagcacgaaggaaaaaaggacagaaagagagaaagaaggaaaggaagagaggaagaaaaacctaaagaaggagagaaaggaagaaaggaaggaagaaaaacacgaaggagaggaagaaagaaaacagagataactacgtacgctcgttcatttacacacataaatacgacgcttttcatacgtaaaataaacgtctttatcgacgatcccttctttatagagcgatgtgtatttatttgtataacacagacacctacatctatcatacagaagtctatttccatacaaccgatacgtatttaccatacgcaagagtattcaatgcagagatacacgttgtcgttgtttgcatataagcgtacagaaacgtttacattaatacatataagtaaacgcgtggaaacgaaagaaataaaaaagcgaaatgagtcaacaggccgggcacggtggctcacgcccgtcatcccagcacttcgagaggccgaggtgggcgcatcacaggaggtcgggagttggagaccagcctgagcaacatggagagacacggcgtgcctactaaaaacacaaacatcagccaagccaggcgtgggggtgcctccctgtaatccccgctaatcgggaggctgaggcaggagaagcgctcgaacccgggaggcggaaggtgcggtgagccaagaccgcgccattgcactctagccgtggaaacaagagtgaaactctgtctcaaaaggacgaaacagaaagaaagaaagaaaggaaggaaggaaggaaggaaggaagaaagaaagaaaagaaagaaggaatgaatgaaagaaaagaaagcaagaaagaaagaaagaaagaaaaagaaaagaaagaaagaaaagaaagcaagaaagcacgaaagcaagcaagcaagaaagcaagaaaacaaggaagcaagaaagcaagcaagaaagaaacaaaagaaagaaagcaagaaaacaagaaagcacgaaagcaagcaagcaagaaagcaagaaaacaaggaagcaagaaagaaagaaacaaaagaaagaaagaaaacaagaaagcaagaaagcacgaaagcaatcaagcaagaaagcaagcaggaaagaaacaaaagaaagaaagaaatcgagaaaacaagaaagcacgaaagcaagcaa

SEQ ID NO: 1888426 - DNA, 4001 bp, Homo sapiens
aggaaacacctgcgcgcggccacctcgagcgttcgcgttcagggcgggggcccggccggtgcgcgcgtgcgcgcaaccccaccaggcccccccgtccacccacctccttccttccgaggcagagcgcctccgaagtcaacccacacacgaccggtcggaggcagaacggcagcccctcggcggccggccggcgcacgcgtcacaccggcccgaacccaccgcgatcgctcacacggcccgcgcgcacccgccagaggggagcacgggacgtgcgctcaccgagagcaggcgggcgcccttccccgcgtgggaggggcgcgtctcgtctcgtctcactcaaaccgccccgaaccccacaccgacgagctccctcaggacccacgcgcggacaccgcggcggcgaccggaggagggggcgccgggggcgggaacgacacaccaccgttcggcctcgggcacctgagggacaacccggagcgctccaggagcaccgcaagggcccaggcggagccgacgctcgcgcaaaccccccgagagggcagcacgacgggccggcgggacggcacccccaccgccgcggaggggggccgcccgcaagtcgacaaccactggaggcgacagcgagggctgtctgccgcgtcagaggaccccgccggcccgcacccgcgacgcagaaggcggcgggcgggacggcgaggtcgggccggggtccgcaccccacgccttcccacacgcaccgccggcgggcggggagaggagagacgaggggacccccgcggggcggagcgagaaggacggtcccgttcgccacgaacgtccgcccctcgcccgtcgcggctcggacccggcccgggagagcacgacgtcaccacatcgatcacgaagagccccccgggagcggaggccggccggccggccagcgagccgatcggctccggccaaccccccactccggggaaggggcggcggacaaccccgcggagacgagaacgcctgacacgcacggcacggagccagcggggtggggttgtcgcggccgccccgggcgcccgcagcggagagcgcacgggggcacggtggccctcgccgccttccccgccgcccccgggtgggtcagagacccggacccgggccggcaccgggagtcgggacgctcggacgcgcgagagaacagcaggcccgcgggccccggcaggcggctcaagcaggagcgcggccggctagccgggtcaccggtaggccagagccccgcgcgcatccggaggcccaacctctccagcgacaggtcgccagaggacagcgtgtcagcaataacccggcggcccaaaatgccgactcggagcgaaagatatacctcccccggggccgggaggtcgcgtcaccgaccacgccgccggcccaggcgacgcgcgacacggacacctgtccccaaaaacgccaccatcgcagccacacacggagcgcccggggccctctggtcaaccccaggacacacgcgggagcagcgccgggccggggacgccctcccggccgcccgtgccacacgcagggggccggcccgtgtctccagagcgggagccggaagcattttcggccggcccctcctacgaccgggacacacgagggaccgaaggccggccaggcgcgacctctcgggccgcacgcgcgctcagggagcgctctccgactccgcacggggactcgccagaaaggatcgcggcagagggaccgcggcccggcccggggaccgctccccggcacccgggggacgggggcgggacggtccccggctccccacggggactcggaaacgaattcggccgccgcctcagacggccaggatgagcgcggacccgcgaccgggccgggaagggcgtccccagcctcccgcgccacgcgcggcgggtccccgcgggtcgcggctcgggcctcgggagctacggcgcgctggtcgaccggcccgggcagccccacgcccgccgcgggcccagaagcgcagcgacagcctctcccccacataaacctgcacgccagagctgtgactcacaagcgacgcgccacagctctggcgccaccgggccagccgggctgacgaccggggctttccggagctctgcctagctcacagcggggacggtcccctccctcggcagctgccaccgcagctccggaagccgagagcacgatctcaaagcggccgccagatggagcccgacaaccgccgcggacgtcagcgagacagatccggctggcagggcggcccgtggaccgcgaaagcgaaaccgtgagtcgagaagctcttcccgaggccgaaaacgcagcccctctgccccaaccccacacaaacggtgcccaaaacgcgtctctgcctcgaccgcgacagagtcagaagacaacccacggcgcgtgggtgtttggagatgcctctcggaagcagggagggagggagggagggagggagggagggagaaagaacacacaaggactcggtcgcgggtcgctgcagacacacggagaggcagaatgcgtaggctcttccggaatccacgcagagacagacggggggaggggagtggggaaaagagacagatggcgaaagggaaggagggagggaagggagcagggagggagggagggagggagggaggaagacaatggagaaaagagagacaatttagaaaacgtagatacacaaagtaaacttctgaaacactccattttttaaaagacagacgggaaggaaagaaacacgaaaaagagagaaagaatgaggaaagaaacgaaggaaagaagggaaaaagaaacagagaggaaagaaaaaagaaggaaacacagggaacgaaagagaaataaagcacgaaggaaaaaaggacagaaagagagaaagaaggaaaggaagagaggaagaaaaacctaaagaaggagagaaaggaagaaaggaaggaagaaaaacacgaaggagaggaagaaagaaaacagagataactacgtacgctcgttcatttacacacataaatacgacgcttttcatacgtaaaataaacgtctttatcgacgatcccttctttatagagcgatgtgtatttatttgtataacacagacacctacatctatcatacagaagtctatttccatacaaccgatacgtatttaccatacgcaagagtattcaatgcagagatacacgttgtcgttgtttgcatataagcgtacagaaacgtttacattaatacatataagtaaacgcgtggaaacgaaagaaataaaaaagcgaaatgagtcaacaggccgggcacggtggctcacgcccgtcatcccagcacttcgagaggccgaggtgggcgcatcacaggaggtcgggagttggagaccagcctgagcaacatggagagacacggcgtgcctactaaaaacacaaacatcagccaagccaggcgtgggggtgcctccctgtaatccccgctaatcgggaggctgaggcaggagaagcgctcgaacccgggaggcggaaggtgcggtgagccaagatcgcgccattgcactctagccgtggaaacaagagtgaaactctgtctcaaaaggacgaaacagaaagaaagaaagaaagaaagatagaaagaaagaaagaaagaaaggaaagaaagaaagaatgaatgaatgaaagaaaagaaagcaagaaagaaagaaaaagaaaagaaagaaagaaaagaaagcaagaaagaaagcacgaaagcaagcaagcaagaaagcaagaaaacaaggaagcaagaaagcaagcaagaaagaaacaaaagaaagaaagcaagaaaacaagaaagcacgaaagcaagcaagcaagaaagcaagaaaacaaggaagcaagaaagaaagaaacaaaagaaagaaagaaaacaagaaagcaagaaagcacgaaagcaatcaagcaagaaagcaagcaggaaagaaacaaaagaaagaaagaaatcgagaaaacaagaaagcacgaaagcaagcaagcaag

SEQ ID NO: 1888427 - DNA, 4001 bp, Homo sapiens; identical to SEQ ID NO: 1888425

SEQ ID NO: 1888428 - DNA, 4001 bp, Homo sapiens
gaggaaacacctgcgcgcggccacctcgagcgttcgcgttcagggcgggggcccggccggtgcgcgcgtgcgcgcaaccccaccaggcccccccgtccacccacctccttccttccgaggcagagcgcctccgaagtcaacccacacacgaccggtcggaggcagaacggcagcccctcggcggccggccggcgcacgcgtcacaccggcccgaacccaccgcgatcgctcacacggcccgcgcgcacccgccagaggggagcacgggacgtgcgctcaccgagagcaggcgggcgcccttccccgcgtgggaggggcgcgtctcgtctcgtctcactcaaaccgcctcgaaccccacaccgacgagctccctcaggacccacgcgcggacaccgcggcggcgaccggaggagggggcgccgggggcgggaacgacacaccaccgttcggcctcgggcacctgagggacaacccggagcgctccaggagcaccgcaagggcccaggcggagccgacgctcgcgcaaaccccccgagagggcagcacgacgggccggcgggacggcacccccaccgccgcggaggggggccgcccgcaagtcgacaaccactggaggcgacagcgagggctgtctgccgcgtcagaggaccccgccggcccgccccgcgacgcagaaggcggcgggcgggacggcgaggtcgggccggggtccgcaccccacgccttcccacacgcaccgccggcgggcggggagaggagagacgaggggacccccgcggggcggagcgagaaggacggtcccgttcgccacgaacgtccgcccctcgcccgtcgcggctcggacccggcccgggagagcacgacgtcaccacatcgatcacgaagagccccccgggagcggaggccggccggccggccagcgagccgatcggctccggccaaccccccactccggggaaggggcggcggacaaccccgcggagacgagaacgcctgacacgcacggcacggagccagcggggtggggttgtcgcggccgccccgggcgcccgcagcggagagcgcacgggggcacggtggccctcgccgccttccccgccgcccccgggtgggtcagagacccggacccgggccggcaccgggagtcgggacgctcggacgcgcgagagaacagcaggcccgcgggccccggcaggcggctcaagcaggagcgcggccggctagccgggtcaccggtaggccagagccccgcgcgcatccggaggcccaacctctccagcgacaggtcgccagaggacagcgtgtcagcaataacccggcggcccaaaatgccgactcggagcgaaagatatacctcccccggggccgggaggtcgcgtcaccgaccacgccgccggcccaggcgacgcgcgacacggacacctgtccccaaaaacgccaccatcgcagccacacacggagcgcccggggccctctggtcaaccccaggacacacgcgggagcagcgccgggccggggacgccctcccggccgcccgtgccacacgcagggggccggcccgtgtctccagagcgggagccggaagcattttcggccggcccctcctacgaccgggacacacgagggaccgaaggccggccaggcgcgacctctcgggccgcacgcgcgctcagggagcgctctccgactccgcacggggactcgccagaaaggatcgcggcagagggaccgcggcccggcccggggaccgctccccggcacccgggggacgggggcgggacggtccccggctccccacggggactcggaaacgaattcggccgccgcctcagacggccaggatgagcgcggacccgcgaccgggccgggaagggcgtccccagcctcccgcgccacgcgcggcgggtccccgcgggtcgcggctcgggcctcgggagctacggcgcgctggtcgaccggcccgggcagccccacgcccgccgcgggcccagaagcgcagcgacagcctctcccccacataaacctgcacgccagagctgtgactcacaagcgacgcgccacagctctggcgccaccgggccagccgggctgacgaccgcgggctttccggagctctgcctagctcacagcggggacggtcccctccctcggcagctgccaccgcagctccggaagccgagagcacgatctcaaagcggccgccagatggagcccgacaaccgccgcggacgtcagcgagacagatccggctggcagggcggcccgtggaccgcgaaagcgaaaccgtgagtcgagaagctcttcccgaggccgaaaacgcagcccctctgccccaaccccacacaaacggtgcccaaaacgcgtctctgcctcgaccgcgacagagtcagaagacaacccacggcgcgtgggtgtttggagatgcctctcggaagcagggagggagggagggagggagtgagggagggagaaagaacacacaaggactcggtcgcgggtcgctgcagacacacggagaggcagaatgggtaggctcttccggaatccacgcagagacagacggggggaggggagtggggaaaagagacagatggcgaaagggaaggagggagggaagggagcagggagggagggagggagggagggaggaagacaatggagaaaagagagacaatttagaaaacgtagatacacaaagtaaacttctgaaacactccattttttaaaagacagacgggaaggaaagaaacacgaaaaagagagaaagaatgaggaaagaaacgaaggaaagaagggaaaaagaaacagagaggaaagaaaaaagaaggaaacacagggaacgaaagagaaataaagcacgaaggaaaaaaggacagaaagagagaaagaaggaaaggaagagaggaagaaaaacctaaagaaggagagaaaggaagaaaggaaggaagaaaaacacgaaggagaggaagaaagaaaacagagataactacgtacgctcgttcatttacacacataaatacgacgcttttcatacgtaaaataaacgtctttatcgacgatcccttctttatagagcgatgtgtatttatttgtataacacagacacctacatctatcatacagaagtctatttccatacaaccgatacgtatttaccatacgcaagagtattcaatgcagagatacacgttgtcgttgtttgcatataagcgtacagaaacgtttacattaatacatataagtaaacgcgtggaaacgaaagaaataaaaaagcgaaatgagtcaacaggccgggcacggtggctcacgcccgtcatcccagcacttcgagaggccgaggtgggcgcatcacaggaggtcgggagttggagaccagcctgagcaacatggagagacacggcgtgcctactaaaaacacaaacatcagccaagccaggcgtgggggtgcctccctgtaatccccgctaatcgggaggctgaggcaggagaagcgctcgaacccgggaggcggaaggtgcggtgagccaagatcgcgccattgcactctagccgtggaaacaagagtgaaactctgtctcaaaaggacgaaacagaaagaaagaaagaaagaaagatagaaagaaagaaagaaagaaaggaaagaaagaaagaatgaatgaatgaaagaaaagaaagcaagaaagaaagaaaaagaaaagaaagaaagaaaagaaagcaagaaagaaagcacgaaagcaagcaagcaagaaagcaagaaaacaaggaagcaagaaagcaagcaagaaagaaacaaaagaaagaaagcaagaaaacaagaaagcacgaaagcaagcaagcaagaaagcaagaaaacaaggaagcaagaaagaaagaaacaaaagaaagaaagaaaacaagaaagcaagaaagcacgaaagcaatcaagcaagaaagcaagcaggaaagaaacaaaagaaagaaagaaatcgagaaaacaagaaagcacgaaagcaagcaagcaa

SEQ ID NO: 1888429 - DNA, 4001 bp, Homo sapiens; identical to SEQ ID NO: 1888425

SEQ ID NO: 1888430 - DNA, 4001 bp, Homo sapiens; identical to SEQ ID NO: 1888426

SEQ ID NO: 1888431 - DNA, 4001 bp, Homo sapiens; identical to SEQ ID NO: 1888425

SEQ ID NO: 1888432 - DNA, 4001 bp, Homo sapiens; identical to SEQ ID NO: 1888428

SEQ ID NO: 1888433 - DNA, 4001 bp, Homo sapiens; identical to SEQ ID NO: 1888425

SEQ ID NO: 1888434 - DNA, 4001 bp, Homo sapiens; identical to SEQ ID NO: 1888426

SEQ ID NO: 1888435 - DNA, 4001 bp, Homo sapiens; identical to SEQ ID NO: 1888425

SEQ ID NO: 1888436 - DNA, 4001 bp, Homo sapiens; identical to SEQ ID NO: 1888428

SEQ ID NO: 1888437 - DNA, 4001 bp, Homo sapiens; identical to SEQ ID NO: 1888425

SEQ ID NO: 1888438 - DNA, 4001 bp, Homo sapiens; identical to SEQ ID NO: 1888426

SEQ ID NO: 1888439 - DNA, 4001 bp, Homo sapiens; identical to SEQ ID NO: 1888425

SEQ ID NO: 1888440 - DNA, 4001 bp, Homo sapiens; identical to SEQ ID NO: 1888428

SEQ ID NO: 1888441 - DNA, 4001 bp, Homo sapiens
aatccgacatacaccgatggggccttttaaagagtctcgcttcatggactgcaggggcagcaggtttctggtgggtaagtggaatctgacgggatttcacgcttcttcccttaggcacacctgtttgccccaactccccaccctttgtgggacggctcgaggtcccgcactgttgctgggtgtaccgagccacccctacatgttggttgccttctttcccttatcagggcccaggtctgcctctgtactagcaacccccgggcacctttgctcccgggctcactggcacacatgcactttatgttgaggcagtgggcgcatattcctgatatacatatttcctgatctcctgagctcacaccaacagcctgggattaatcgcccaacaccagataacacgttataaagctcacttatcagctgggcctcacaggtctgctccagcctcatcacccgaaaaggcatttagccagccctgctacttggagcttcttatcacatctgaaatcacctgggtggcactcatcagagtgcagaccatttatgggcagctataaaggaactggatccccgagccaggggtgcaaagacactcagacaccagctctccctccccggccggggctgggccttctgatccccgtggtccacacacatccaatgagtggctatttagtgtcagggaagcccttccgccactcacgcagaatcagacaggaggtggggcggggatgcagtcgggcaggtggacctgagcccccatgggacctacacttctaatggagttgggtgcgggatgggctcagaagagagggagagtggtccgggcggcgggggactctgcaaagaggagtggtttggaaactcctgcctggaagccgaggagacaaaagacccctgtgggaaggactcgttacctcgctcctgggctccggggggcttttcacgtccagatcatgagcagtttctttcacttcgtcatcaggcttttcacacaggtcctcggtttcagaagtaatttcttgtggggaagaaaggggacatgtcactcggatgatgacttctgcgtacacacgcgttccatataaacgcagggcccccacgagctgggggatttctcacacgcctcggcccagcctgagctcaccaggcaagcccaggggccctacatggacaatttgctggccaaacccaggcccccccatcggtaatcatttgaaggcctcaccagactcaaggcggaagccttccccgggggagcgccacctgccagtcacagggagcagagctgccagcacctggcggatgagctccccattcagcccgtttcctgccgtaagctttaaatgcagcagtttccatctcatcagggtgactttcctatgccagagacacatctgtcccaggaagtcaactcctcaagagaagggcgacgccgccggccaccggccaggtaagtccccgggaagagcatggctgcacctgaacttcaggctcccatacagactcctctgggtggcaagcccaaccctggtggggagcagggggcggatggttggaggcaactcagttccagctgccgtggccgagccgtgagtaccagaggccgcaggcaggtgctgggtccaacctatctgtgcagggctcatttcggcccacctgttacacgccttgtttctcacccaggcctggtccctcaccctgtcctgtctgtcacctctgtctcctgtgacacccacagaatgtggcggggagaccccggggtgctcaccttggaaggtgggcctaactcgcggatccccctgccagcaccgctgcatgaggcgtatcaggtggctgcaggcgcgcggccgggctctgcacacgggcggcagctcggggcggtggcccttcaccaccttcaccatgatgtgcaggatgttcttctcatctgccaagggaaggatgcgagtcaggggctctgcagggctgggtggcagcatctcacccttgggaggaaacgacacactcgccgggggccacaatggggccatccccacaccaccccagggagacggctcccccactccgtttcaaaggcagagcttcctgtaaccctcaccctcatggtgcgccatgctctctagtttcctggttttgaaatcgacctctttccctgggttctgatctaccagaaggagtcagtgtgtttggtcacagagcagatctttctaggcatcccatccaaaggaagatgaggttcaaaggagaacaatatcttatgaggctcattccatcaacagcccaagccagcaaagggaatgaggctcacgcaccatggaggagccacagcgtcctacatccacagagacccaactctctctacaatggcgaagaagtcttcctcagttccaactccaatcccaagctcaggtccccagctggcctcccctgccggtgcaccagggctgggatgtgtggaagggctctttcccctcaattcaccatgtggggccgcacctgtcctttccaactgccttcactagcatgcatgggctctagcttattattattattgccacaacttctaccctgactgggaagggcccagggtgacatccagtgggccaagttcttttttctgcttagcctggaaccctcaaggttcttgttcccaacagccctctctgccctccagatccaaacacacccacgcatggaatggcagctctttggagaggccatgtgcctcagcaggtgtggaaaatcagccgagaatcacccacggctgccaggattccatacaatgttttgctccactttcccattaaatcttgtgcaataaatatcgttaagtgtttagcaggctatttccatgattattcagacttcaaaaccaacagctcctctaaataaaatggaagcaaactgaagtaaacgcccggaatgtttcctgctgccaagcacagactggaaaagctggggagaggccttgttctcctgcaccttgaaccccctcctacccatttttgcctgaggttgcaattttttgaatttgaaaaatcagaccttggcgatgaccttgaacagtaggacacgaataattcccatatgattagcgttccaataagggaacactaggcatattcagcaataaagcacaagggcttgagccttgacctgtcccctgcgcctagcttcgggtgtcacatctatcagacactgcctcatttcacaagccttcgggctgtaggccactgtgcgggagaacgtacagaaggcaagaaaggcgacaggcggtcagacaacacagacggacaccggccagcagaggcctggcaggacgcgttctgtgctttctactgacattcttttaaagctgccaagatacttgatcttgcgatgctggaagatctcttctcaccccagcactttcccatacatcggctcctagtctgagccccgactaacaaggggctaggccttgactctcatcttcatttttagacattttcggtcacaccacaaaatatcatgagtagcccagaaatgtctttagaggaaaagggaatctgtccaacaaagctaaaaagtcctggatttttatgataagtaagtcaaggtgtgacaactttgaggatggtgttcggaatggtggctgcctggctggggaagcaaacaccacagctctcaagctgggcaggggtgccactcctgcaagcaactccatggcactgagcagctctggaggttggctgcgcaagcacgcgggtacatgtaatgctcctgaactgtatgcttcacacggctgacatgctaagttttgttctgtgtattttatgactatttttttaaaaagtaaacaaaaaagaattagctggaaataccagcacaggcaaacccctggagacagaaagcaggtgagtggttgctggggcttgagcaggaggaagggcgagggactgcagaatggccatgggctttgccttctagcatgatgagaatgttctggaattagacag

SEQ ID NO: 1888442 - DNA, 4001 bp, Homo sapiens
agaccccacgcaagcccctgagggtggagctgatacttctgggccagaggcagtgcctgcttttgaggagggcagaccccgggtcgcaggaagccaagggcgggacttaccagcttgtcgtgtctgaaggagggtcctgggggccctggaggcccttggggtcctgggggccctctctctccaaccccagggtctccctgggaacacaagacaagcctatcataccctgggcacgcacacagcccccaccttgagccaagggccaacacaggaaggggccccacccagccacggagactcaccttgtcgcccttgggacctacgtcccctggagtcccggggaagccttgtggcccggtgtcgccctggaacacaacatccgggggcccggtcagggaaggcaccaccatgggccgcacccagcactctcagtgctcctcccccaagcaggggacggacgggagctgagcccttcaggggagtctctggggcccggaaagtacgagggcgccaggcccagcagactgtctcccgcctgagcccatttcgccagccacgcctgggggaagctgcgggcagcatccctcgggaggtcacagcaggttccccgaaggcctccacaacagctggtgcttgggtgttacatacatgtgtgtgtgtgtgtggtatgcatggtgtgtgtgtgaggagtgtggtgtgtacatgtgtgatatgtatgtgtgatgtgtgagtgtgcatgtatggtgtgcataatccatggtgtgcacatgtgtgcacacgtggtatgtgtatgtgtgtatccacgtgtggtatgtgtaatgtgtggtgtgtgtgcatgtgtccacgtgtgatgtgtgcacgtgcgtgtagcatgtgtgcatgcgtccacctgtggtgtgtgtgcacacacgtgtgtgtagtgtgtgtatgcaagtgtatccacgtgtggtgtaatgtgtggtgtgtgcacacatgtgtgtaatgtgtgtgcatgtgtccacgtgtggtgtgtaatgtgtggtgtgtgatatgtgctgtgtgtgcatgtgtggtatgtgtacgtgtggatcctcacccccccacacacacgcgcagtcacacattcacacactcaaacacatgcacatacatacacacgtgtgtgtgccctgtgggtgggccccgtggatcatcaccccacactcacacgcgtgcgtgtaccctgttgcagtgggtgggccccgtgccgccccccagccgactgtcctttgtctgccgtggtcctcatcgcaggcagcttggctgtggggtgccaggcggtcggtaatgaccgttcggtgggcaccatgagatgccctccctgtcctttcagaccttctagactgtttttaacttgaaccctcctgtccagcgttcgtgacggccccactttctgccgagtgttaccatttgctgggcaggctgttcccaggtctttattcgcagtcgatcacgtcattactgtgcttggaaacggtgtttgctgatttttaaagactgaactgcgtgttttgcgacgaagctcggacttcacagagtctcaggtcgccccgtgcttccctcccccgccgacttgcaccaccccctgccccgcccgacttcctttttctttgctgtgcgtcttccctctaagggtttggaagctctgccttttctcacttcctttccttcttcatggtagttgtggcccaaatgtctcaacacaaatgcataactgctatttcccatcaacagttacactcatcttttctttacaaaattccactttcaaaatggttttgctgtacagtctcctcactgggtcgcgtttaaaaagagtgtcactggcaacaaagccctggggtctaagcaaacatcacagataacacaggggtcagaaagaaaagcagactcaccggctttccgtcttcaccggggtcgccctgggtgtgcaagagaagccattagtgatgggaaatgactcctccggcgccacctacagtgtctacatggaaatgcaccccacgctccaagtccccacgaggcggcagacgccttcccccgatgtcctcgcacccgcgccaggagcctcctcacacccacaagggctgtgtctgagcagctccgcctcccacgtctgaccaccttccagcaccaaccccgagcaacggtgggcctaaggaggctgctgacctgccccgatcccagctcagctcactcccatgtcggccgcagcctctccccctcctacccaagcccccaccctccagaccgggccggactcggggggacgtgaggactcaccggctcgccgtcccttccaggggtgccgtccctccccggaggccctgggggtccttgtggtccggggacagtttgcaacgctgggcctgcaggacccaggggactcactgggcacgggagacccgggggaccaggtaggcatggggatcctggggggcctgcccggccaggtgggcccggaacacctggctcccctttctgccccttcaggccgccctgggaataaacagaacacagggctcgggctggggtggggccccacacaccctgcccacgtgtcccgctgcgccctccagagtcccaggctgggctgcttcccacagtggacacgcagggtggacgcatgctggcaccgagtgctgggcacaaaggaggcacgggcacagaggggcttcatcagggctcaccagtgagtggcccaaaaggccacaggtgctctggttcagaatggttcaggagcacagggaggtggccttacctctttcacgcggcccccaggggtccggacactcccgtcccacgtggagacagaatctgagccaggaagtgtctgagctgggaagagaagcagaggtggccacggtcacgccccccgggtggccccagctctgctctcggcaccccagacggccccggcagcccaaacgctttcagtcctggagcccggctggacactgtcagatccccagcctcaggccgcactcccctgagctccagctcccaggcaaaggcaacagggagacagaatttaaaatcaacagtgaggccggtgtggccatctaagccaatgacagctgaagtctgggagatgcttcctgaatttgttacaagagaccctggccccccagaatgccttcttatcacccagcatgctttgtcccttttcctttttccctcttaacttttacttaaaataaaaatgaaaaccaacagaaatcctgcaagagaagcacagtgaacacccagagcctgtacccagagccaccatccgggcctcggcatctccccacctgccacacacacacacacacacacacacacacaaaacacataatacacatcacacacatgtacattacacatgcacatcacacacatacacacaatacgcacactacacatcacatacaacacaacatgcactgcacaccacacacgtacactacacgcaacacacacaccacaccacacacaatacacacaccacacactgcacacacacatgcccacatgcatgcaccatacacactacatacacatcacataaacatcacacatgtcacaaacatgcacatcacacaccacacatcaaacacctgccatatatttcacacaaacacgtgccatatcacacacacatgtaccatatacaccacacactacacacaccatacatcacacacatacctcaccatcacacaaacacacgttacacaccacacacaccccacaccacacacacaccacatccagaaaagagcttacctcctaacgaagccaccgtggtctgctcctcgacttcttcacttctggaatcttccgtgctgctgcctccagccaagggtggcgtggtgacggggggtggcgcggggagcctgggttttagggccgcgccctggaggacgagaggggaggtggcctgttattcggccggcagatgcccggtggagacttgcttggtttgtgaaatgaaatactta

SEQ ID NO: 1888443 - DNA, 4001 bp, Homo sapiens
aacattgactggcaatactttggaagcctaggatgactgttcagccagctaggacaggagcagaccctgtgagatgtgtggaaaaggatccttgaaaagatggtgctatggtttggctgtgtccccacccaaatctcatcttgaattgtaactctcacaattcccacacgtcatgggaggaccccagtgggaggtgattgtattaagggggccgatctttcctgtgctgttctcatgacagtgaatgagtcttacaaggtctgatggttttaaaaacaagtttctctgcacaagctctctctttgcctgctgccatccgtgtaagatgtgtcttgctcctctttgccttccatcatgattgtgaggcctccccagtcacgtggaactgtgagtccaattaaacatctttcttttgtaaattgcccagtttcaggtatgtctttatcagcagtgtgaaaacaggctaacacagatgggataagggagagggagctggaggtttagaaacagtgctatggatggaggtctgagcagggaggaggatggatggagaacaatcctgttcagaggagggcgacagggagttgtggttcctgaggaggggcagggagtcagggaggatgctggttccaccgtggaaagcaacagggcagggaaaggagatccgaccccctcttgaatgaggctggacactcctagccagtgtagccacaaggagagaggtgagaggaagcctgggggaaataacctgaatatttgagggatgagcctaagaaaagatatatgaggtgagatttttaaaggtgaagaaagatcagagagattatggacctaggatggcaaatgcagcagtacgtgtttgctttctccttgggcagaaatagaaggaaaaaaatctcatggatcctagaatagtatgcatttgctaattaaaggcaaaaatggcctctgggaagggaactctgaaatgcacggattgcaagtgagatgatggtgaggaactattagtatttaggaactctctgaaactttgagagataaattggatttgttcaggtatggaggacaggagtttaaaggtccagggacaagtggaatccatccagccatttttgtacaggaggaggaagaataaagaagtagggtcacaaaaataaataagtaggagttcagaaagttaaggaggctgggtacagtggctcacgcctgcaaccccagcactttgggaggccaagacaggagtattgcttgaggccaggagttcaagaccagcctgggaaatataacaagaccccatctctattaaaaaaaaaaaaagtgaaagaaaagatcacaatacagggaaaagtgagctaagaatcccggcattagagagcccttgatgtggtcctgaatcggctatttctatctgttccctgagcctaacctcagcgctggcctctctaaacctcttttcagtcctctcattttgaaaacagggcccattacacattctctgaaagcttgctgagtgatttaaccacatagtctaggggaggcactcatcaaacataaggcctctctttttgatttttatcctatagtggtatctatctagaggctggtgaagacagtgtggtggaaggaaagtgggaaggatacactgaaataggacatagacgtagaggggagtcgatggtcatctggcttgatagggaaagttagagagctctcctgaaccacagttacagagcttgggattataacacacacagccccagagaaaacactttgtttaccatatttcctcttctgctggggctctggcaccttaattggtcaaaaggcagcaaagatccgcaaagcctgttctgaatttatccaggtctatgcatgaacggcttccttctcccaccttcctttgcaaggtccagctattaattacactaagtgacaaagattctccttgttgcatgatggacacaaggatgaatctttgttactgactgcaaataacagaacgagtggtgaccaagagtcaggctgggaatacacgcttcaaatcacgcaatgggcatatggcactttcttctgaaatgacacaagaggctgcagagaaacagagtgggtattattttgttaacttcctcctatgaaaatagagcctccgtccttttttttgctggttcatttctggcactggaacaaactgtctctttacattagttcagttctgcagagaaacgctcacttagaaggaaatcgttggaaaatccaggcaagaatccattttttaaagtcaccactgaatgattgctttcttattgtgctacatagggctggaaaaatcattcctttttgtacatatttttcttttttactttgtgttttcattctgcttaagacacacatatgtgccaaaaatgaaaacattttcaaagggcaagtttcaaggactcctaaaaataggaccagttgccaaatatatatttccccaatatgtaaatggctgaaaaggagcacaatgaaaagcatatgctattcaaattttctttagaaaaacaagagctggaggagctgactgaatctctttaaactagtggcttccatgtaaattttatctttaagtcttcagacatcattctttgaatattttacatctatcttttaatcaagactgaaacaagctactaagaataatcttattttccaaatgggaaaaagtcatttcatcacatcagcctgtaacttgacatgaaccttgcaaataagcattaaggccaaaaaaggtataaaacacccagaacagctaggccacttgtggctgcttcacagatctaggggcaaatccatgagctggaaagtaaagtcacattagttcgggtaagaagtcttttatttcttggcttctgcggcctgcaatcaggaattacctgaaattctttctggaaacaaaaaggcagagcatatatacattaattaaaatcaaagaagtcagtggtggaaggggtttgcttagcattctatggctgtcacccagtatgaatggatgttctctattcttaagcctgtgccttgtaatttaggaaaattatcattctttgtgaaaaatcccattggtgagctaatctcttaaatgccttcttttattttctgaaaacaaaaacaaaaacaaaaacaaaaaaccaaaacttttttgatcaatgagtcaacatgtttaatgattataagttgtcttgtcaaaggtttacaaacctgcatggctgtgtccttcttgggtgggctcctgtggggctggagtcccctgaattccctggagacctccttttcctccagcagggctatggagacagtgcttggccaggaagtatggctgacagtctacacttttatccttggaattatcttgctttcccagctctggttaaaatttttctttcatatcttaatatttccatgatagaccatgggggagggaaaaaacctcagaaaaggtttcacccttgctgttaaaaagttgtgacctttgctcacatttgccagagaaagtggcttataccaccaattaacttgaattattaactcttagattaataatttattagaaacctaaaggcctgggcactgccagatccaaacgatttaaagaaaaacaaagaaaacaacatagctctgattataacaatttgtagacagtgcttggaataagcaatggcattttggctttccaaaggatttcttattttccctctaataccatactgactgaagagtcaagcagattcactaataatacctataatgactcatgcagatgttggttttaatttttttttatttaagaaatattcattgatatggtttgtctgtgtccccaaccacatctcatcttgaattgtagttcccataatccccacatgtcatgcatgggaaggacctggtgggaggtaattgaatcatgggggcggttatctccatgttgctgttctcgtgatggtgagtgagttctcgcgagatctgat

SEQ ID NO: 1888444 - DNA, 4001 bp, Homo sapiens
agaccatgggaaaagcacagtatttaggcagaagtgtaccatttttccaagtacagtctgtcacagcttcccttggataggtaaaggaaatctcctgaccccttgcatttcccggatgaggtgacacactgccctgcttcaactcaccctctgtgggctgcacccactgtccaaccagtgccaatgatgatgaaccaggtacctcatttggaaatgcagaaatcacctgttttctgtgttggtctcactgggagctgcagatcggagctgttcctattcggccatcttctatccactaaccttcaaattctcacacccggaggttagtttcagaagatcatagaatttgtcattgtgttcaggtacttagtatctcatctttaaataataaaaaagcattgtctgacactgttttaaaactatatttagaaataccaagaatttaatagccaagataactttgaaaaagaacaaaggttgaggatttacatgattaaacatcaaaacttggtataaagctaaagtaaatcaaatagtaaggtattagaacaagcatggacacctagaataataaaacagaaaacagatcagaaacagacctttctatatacagtcacctgatttttgacaaaagcactactacaatttagtgtgaggaatggccttttcaataaaaggtgctggatcaactggatatctatgaggaaaaatttattttgacccctcctcaaaccctatacaaaagtgagtttgtgatttgaaaaaatcacatcaactagatctgagaccctgctgagaaatgtaaaataatgtaacctcttaaaaaagaatgtaggacattatttttataatgttgggataggcaatgattttccaaattgtacataactataactaaccataattgataaattaaactttcataaaattaacaatttctgttcatcaaaagacaccatttagagagtgaaaagccaagccacacactggggaaaattactaaaaatacaaaaattagccgggtgtggtggcacacacctgtaatcccagctacttgggaggctgaggggagaatcgattgaactcgggcagcagtggttgcagtagccgagattgcaccattgcactccagcctgggaaacaagagtgacacttgatctcaaaacaacaagaacaaaaaagacttagcacttattacgtagtcattgcttccatttgtgtatattgacatatacacaaatgaaatacatattacatttatagtaatatgtatttcaatacatattacatttatagtaatatgtatttcaatacatattactatatatgtaattttatatataaattaaaatttatatataataaatttttacttatatatttaataaatatatgtaattatatatatttgtatatatacaaatatataatattaatacatttattatattatatataataaatgtattattgctgctatctataaacacacactgtgttgctattactcctgtaatcccagatgggcagggatttactgtgagaaagttgaacctcaactggaaaagtatatggttttggggttttgtttgtttgggttgtggaaaaatagatgtcagaaaacaaagtggatatcaagatactagaacagtaagaatttaggtctgggtctggaaacgacattcgaacatcaatatgtaatagtagttcatgtccaaaactcacaagtgagattatcaaactccaggggagtctattaatgtgtccataaaatctaccccataattttgacataatttttccagcccaaaatacaactgacatcatcttatgggtccggaagtgccatacaccaagcaaaatttctaccggagaaataacaccgtaatcgtttggggagcagcctgaccagtgttccctgagttacgccgaccgcccccaaccatccttctcacctaattattaccaggtcaggaagatgtcctgctgcacgctcaggcggtcactcctcctttccacaaggcccatgtccgcaccgttcgccccggggctcccatggcccccgacctccagtctccggcaacgatggaccctcacagacacggcagggagcgaagggcgcacactcacctccctggagtcagtgggaataaccccgggcgctctgagggtacgtcccacacccggagccgcacgggcccatccccgccaggtccgggcaggcagcccgagcccgggaccccgcctcccccgcacctagggtccgggccgagcttggcagctgaggtcccgctcccactcccactcccagcgcctccccctggcggcggcggccgcctgggaggcccctccccgggcgctgcctcctcagagggtgactgccgcctggccgggccggacagaggccggcccctcttccagctcctcctcaccccccggaggagacgggggacggggatggggttctaaccaggcagcaggacacagcaaggccagccacggcacagcctcctcctccaccatctcaccaggctccctgccagggccggcgcagggcagcgcctgagctactagggagtctggtccggctgctgctccgccgccgccgccgccttctcacagccacaacaacactgcagcagcgaccacacagagcgcgctcccgacgccgagccgggcgacgagcggggacgcgctcgcacgctcgggcgctgaacccggtgtccggggaagggggcgggtctccgcgggttggacgggggcggggcctggacaggtggtcacgccccaggagatgggaggggctgcagcccagacgaatacctgcggctggggagaggctcgcgaaaaagaccagcggaggcagaagggctagacagatgggaattgggcgcaggaaaagcgatgacaaaaaaaatatctggaagaaaaccaaaggtggtcctacaaatttttaggaggcgtctttccctggggaagacatggctcactctacttaccagaaaaatagaacaacagtggtatctttcacctgcaattgtggtcaggataaaaccagtttaatatagtgcaagtaaatgtagtgttttagaagatgtattcagaatacaatttcgttttttcttttcttttttttttttctttttttcttttgagacagagtctggctctgtctcccaggctggaatgcagtgacatctcagctcactgcaaactccgcctcctgggctcaagcgatcctcccacctcagcctcctgagtagctgggactacaggcgcagaacatcatgcccggctaatttttgtattttttgtagacatggagtttctgccattttgtccaggctggtctcgaactcctgggctcaagcaatccacccacctcggcctcccaaagcactgggattacaggcatgaagcaccgcactcgatccagaatacaatttcaaactgattcaacttcagctcctaatcaaaagcttagcgggaagaagtgaattttcaaacaaaataaagccctccccccaaaattgtaacctacccacactagcctgcggaattccacaaaccaggattgcattaccgtaggccctaacagattcacctctgagttgccttttaacattctacccttgatttttctggaaactgggagaactagtcaaatgaaatctattcctgcatctgttgtaaagtttttccacagcactttctgaaatttattttcaatgtttattgttttttcactccacttagaatgtaaaagctacttgaagatgaggatcttgtttgtcttgttcatcactatttccccagcacctgaaactgtgcaggctaagtagtaggcagtcggatttcttgatagctggctgggcgcagtgacccacggctgtaatcccagcactttgagaggctgaggcgggtggatcaccagaggtcaggtgttcgagaccagcctggccaacatggtgaaaacccggatctactaaaaatgcaaaaat

SEQ ID NO: 1888445 - DNA, 4001 bp, Homo sapiens
atgggagggaatctcctggtctgctggttgctaagaccatgggaaaagcacagtatttaggcagaagtgtaccatttttccaagtacagtctgtcacagcttcccttggataggtaaaggaaatctcctgaccccttgcatttcccggatgaggtgacacactgccctgcttcaactcaccctctgtgggctgcacccactgtccaaccagtgccaatgatgatgaaccaggtacctcatttggaaatgcagaaatcacctgttttctgtgttggtctcactgggagctgcagatcggagctgttcctattcggccatcttctatccactaaccttcaaattctcacacccggaggttagtttcagaagatcatagaatttgtcattgtgttcaggtacttagtatctcatctttaaataataaaaaagcattgtctgacactgttttaaaactatatttagaaataccaagaatttaatagccaagataactttgaaaaagaacaaaggttgaggatttacatgattaaacatcaaaacttggtataaagctaaagtaaatcaaatagtaaggtattagaacaagcatggacacctagaataataaaacagaaaacagatcagaaacagacctttctatatacagtcacctgatttttgacaaaagcactactacaatttagtgtgaggaatggccttttcaataaaaggtgctggatcaactggatatctatgaggaaaaatttattttgacccctcctcaaaccctatacaaaagtgagtttgtgatttgaaaaaatcacatcaactagatctgagaccctgctgagaaatgtaaaataatgtaacctcttaaaaaagaatgtaggacattatttttataatgttgggataggcaatgattttccaaattgtacataactataactaaccataattgataaattaaactttcataaaattaacaatttctgttcatcaaaagacaccatttagagagtgaaaagccaagccacacactggggaaaattactaaaaatacaaaaattagccgggtgtggtggcacacacctgtaatcccagctacttgggaggctgaggggagaatcgattgaactcgggcagcagtggttgcagtagccgagattgcaccattgcactccagcctgggaaacaagagtgacacttgatctcaaaacaacaagaacaaaaaagacttagcacttattacgtagtcattgcttccatttgtgtatattgacatatacacaaatgaaatacatattacatttatagtaatatgtatttcaatacatattactatatatgtaattttatatataaattaaaatttatatataataaatttttacttatatatttaataaatatatgtaattatatatatttgtatatatacaaatatataatattaatacatttattatattatatataataaatgtattattgctgctatctataaacacacactgtgttgctattactcctgtaatcccagatgggaagggatttactgtgagaaagttgaacctcaactggaaaagtatatggttttggggttttgtttgtttgggttgtggaaaaatagatgtcagaaaacaaagtggatatcaagatactagaacagtaagaatttaggtctgggtctggaaacgacattcgaacatcaatatgtaatagtagttcatgtccaaaactcacaagtgagattatcaaactccaggggagtctattaatgtggccataaaatctaccccataattttgacataatttttccagcccaaaatacaactgacatcatcttatgggtccggaagtgccatacaccaagcaaaatttctaccggagaaataacaccgtaatcgtttggggagcagcctgaccagtgttccctgagttacgccgaccgcccccaaccatccttctcacctaattattaccaggtcaggaagatgtcctgctgcacgctcaggcggtcactcctcctttccacaaggcccatgtccgcaccgttcgccccggggctcccatggcccccgacctccagtctccggcaacgatggaccctcacagacacggcagggagcgaagggcgcacactcacctccctggagtcagtgggaataaccccgggcgctctgagggtacgtcccacacccggagccgcacgggcccatccccgccaggtccgggcaggcagcccgagcccgggaccccgcctcccccgcacctagggtccgggccgagcttggcagctgaggtcccgctcccactcccactcccagcgcctccccctggcggcggcggccgcctgggaggcccctccccgggcgctgcctcctcagagggtgacggccgcctggccgggccggacagaggccggcccctcttccagctcctcctcaccccccggaggagacgggggacggggatggggttctaaccaggcagcaggacacagcaaggccagccacggcacagcctcctcctccaccatctcaccaggctccctgccagggccggcgcagggcagcgcctgagctactagggagtctggtccggctgctgctccgccgccgccgccgccttctcacagccacaacaacactgcagcagcgaccacacagagcgcgctcccgacgccgagccgggcgacgagcggggacgcgctcgcacgctcgggcgctgaacccggtgtccggggaagggggcgggtctccgcgggttggacgggggcggggcctggacaggtggtcacgccccaggagatgggaggggctgcagcccagacgaatacctgcggctggggagaggctcgcgaaaaagacgagcggaggcagaagggctagacagatgggaattgggcgcaggaaaagcgatgacaaaaaaaatatctggaagaaaaccaaaggtggtcctacaaatttttaggaggcgtctttccctggggaagacatggctcactctacttaccagaaaaatagaacaacagtggtatctttcacctgcaattgtggtcaggataaaaccagtttaatatagtgcaagtaaatgtagtgttttagaagatgtattcagaatacaatttcgttttttcttttcttttttttttttctttttttcttttgagacagagtctggctctgtctcccaggctggaatgcagtgacatctcagctcactgcaaactccgcctcctgggctcaagcgatcctcccacctcagcctcctgagtagctgggactacaggcgcagaacatcatgcccggctaatttttgtattttttgtagacatggagtttctgccattttgtccaggctggtctcgaactcctgggctcaagcaatccacccacctcggcctcccaaagcactgggattacaggcatgaagcaccgcactcgatccagaatacaatttcaaactgattcaacttcagctcctaatcaaaagcttagcgggaagaagtgaattttcaaacaaaataaagccctccccccaaaattgtaacctacccacactagcctgcggaattccacaaaccaggattgcattaccgtaggccctaacagattcacctctgagttgccttttaacattctacccttgatttttctggaaactgggagaactagtcaaatgaaatctattcctgcatctgttgtaaagtttttccacagcactttctgaaatttattttcaatgtttattgttttttcactccacttagaatgtaaaagctacttgaagatgaggatcttgtttgtcttgttcatcactatttccccagcacctgaaactgtgcaggctaagtagtaggcagtcggatttcttgatagctggctgggcgcagtgacccacggctgtaatcccagcactttgagaggctgaggcgggtggatcaccagaggtcaggtgttcgagaccagcctggccaatatggtgaaaacccggatctactaaaaatgcaaaaat

SEQ ID NO: 1888446 - DNA, 4001 bp, Homo sapiens; identical to SEQ ID NO: 1888444

SEQ ID NO: 1888447 - DNA, 4001 bp, Homo sapiens; identical to SEQ ID NO: 1888445

SEQ ID NO: 1888448 - DNA, 4001 bp, Homo sapiens
acacaaagaatattataaagtgcctttcctttaaacaaaaatgtgttcacattctcaaattatactttatatacatatttattattaatttattgacatgtttctggtttagttgcttctggtttattcaacagatatagctgtacaaaaataaagggcaggagacgagggaaatacacaaaagacacaaatctaatttttaaaaatcatattgttaaatgagacttaaaatagaatatttagttgaaattgatgctaaaagaaaaacgattcatctggaaagaaaggtatttaaattcaacagaaatatgaattatctaagtgtaggatcataaactgtcatgaactaattagtaaaaatgaatttactctattatttttattctagataaaaagtacttctaaattttaacttatctgtttagaatgaatgaacacattcaacacagtcaaaaatcgacacatgtattactgatgcggagcagtccaggaattaaatttaaacagttttaggagcaataaataaaactcagatgtttgaccactgccataactcattcaaatattcaatagaaactcatcacagagtgaggtcttacactccattcactaatccaataaatagttagtgctcattatgagtaaggcattggaggggatacagtgaaaaataaaacatggactttgccctcaaggggcttacagtctagtgcggaaaaaatcagcaagcacataaatagccataacataaggtagaaagtgatgtgtcataaggaaaacgcaaataatgtgctatgggagctattaactctagcagacattttttattatagtgtctaagcagccaatataaatagaccaatgatccatttgaaaattaaggtctgaattttgttaatctatagatgataaaaagctttaatattaatgcaatttaagtcactacctacaattttcttaaaatgtttgaacatggagtgacaacccattagaaataccattttgacattgttcataagcagatacaaatggaataatctaatagggctgaaatgatcattttaatgtaataaaggcccaaatcaatgatccaagatactcatgacacattaccttcttgcacacaaattggctcaatcaggttaaagtgatgaagaattcctcgacggctcaagtgtgctccaaggaaagctagaaggttgtacagttaactcccagggtgtaactctaaaccatacaacctactacctcaacccggatgcacacagcttccaatgttgcttcaaactccttatcatatcttcagtcagctcctccaaatatggcagccatacacctaagggcttggcaaggatatagatataatattctaacattttaccagtaaactttgctgctaactgtttctcataggactaacctaaacacttgggtttccagcataggtcacgtaaaatgtcttctgaccatctaacctgccatagttctagtcgcaattaatagtaaaagtcaattgcattcagcctcattttttcaggagaaataggctcaataaaaacatataaatccaatggtagtctttaattttcttactgaagttgaagaggtacactaagcactacagtatgcactgaagtttctgaacagaatctattcagatcctggtccaaaccctgctataaaggttcaactttcttatgcaatttactgtacatggaatcgaacttgaatgggtgtgatataaacgcttccaagttgttgagaattgaagcctgccttgtaagacagacaatgattaaaataaacattaaaaacaaaggaaaatataatgacttcaaaagtatataatcaactggagtttaacaggattttactgaactattgttgaacggcactgtgtatagcattttgtcagattaccacactgacacagacccatagaagcgagcttgtgcggtccacttcaccacaagatcggatctacgggtttatgccaatgggcaacatcttgcatgggccccctattaatatagaatttgttgtaaatatctgatgcaattaagagtcaaaaataatattgatcctttagtataaatgttttaaatgctgagttctaaggatgcatattctccattaaaggccttcataaatattcaaaactaaatacaaatttatatgcatgagaatttaaaaagtagtttattgaaaaatttttcacgaactgcttttgtttcaatagtaaatattttggaattaaactattctaattgagttttaaaagaaaaaagaatccatacatgcatgtatgaattatataattgtgaggcatgaatgtagtattacgagcctataattaaaaccaaattaactattaagttaattgtgtatgagttagaccgtgcttattttaatttttataaaactagtttagttactggtttcaaggaattggtaacattataactttctcataaaacagtaagatcttgttcactagctagagaatacaggaagttattatcagccttaaatatatacatctgtgtctatagtcggaatggtgctaaaatttacaatatttggatgagttaatataaaactaaactaaatggcacgataatggcatgattactaatactccacactaacatttatactccagatgtattacatgacataggatatcttctttcctaaataaaatatatttaaacttattgttcaaaaaagatacacttaaaatgcatggctacatacaactctcatctggtcaacaggttgggcaaaaataaaatattactaaaaaatgttttaaaccaccagacaacaagcaaacacacaaacgagtaaacataaagccagccacatacacgtttttttaagattgtaaactcaactgcaacaaaatgataagttgtacaatcattaatcatttcacatctataatcacttagcatttcctaattatatctttattgtgtaaaataatactacatactaattgcttagtgattttgcatattttgaaataaatacgttttatagcctttatatagatcatgtgttctacataattttaaaccattatttattcttaaattgtcctcataattattaaaaactatagtaaataatcaacaatcatacattcagttgtagtaaaaatatttcaacatatatttataaatgcaaatgtgaaataagaggcagcattgggtttagttttaccataactataagaaagcatgttttggtttcattgtcttatcaggtcatgtaaaaaagatgaaaaagcatgaccttattcccctcctcctgatttcacttccttttatatggtacaacaaataagaaaatataatttttttcttttcctataaagctttctagtaaaccgtattgcacctatcttaagcgtatggatacacagacatatattcaatgggacacaaactgcccaattgaccacaagaaatttttcacaaaggtaggtcatagcacacattttcaaatgaaaaccatcaataaaatttcaacagttacactcataaagaatatgaaattaattcttataacaaaacacagtcaaaagaatgttgtttttctttaaaaacagtaaatcttatttgctctttgttttttatttttacctgaaatggttttctcctatgatcactttcttcacttttcatatccattttaagtttttccctaaaacaaccacaaaaggagaaatatcagacaactgctgtctaggaggagcatctgagtggatcgtgggaatgagggtagacgatcgagaagaaaacacgatatcaaaatgggcaaaaccttttaaagtattttttttttaaagccttggaagactcacagggccccacccaggctactcatatgacatataaagtggtttcatagtttgcatttatgcgttcattttggttcgtgttgttttcacagtaacagttttgaaagtgaaaggacgatggctgttaaagaag

SEQ ID NO: 1888449 - DNA, 4001 bp, Homo sapiens
aatatgcaataaagatatgacttaatagaaattgcattgaagtgtgacccagttttgctctctgggattttataaagcaacctgaaatcttcacatgccacatgttccagcctctttaagttatctatagaaaaaatgactttatccctgacaactaaatacaaatgtgcaaggcaaaattgtatttccacaggttttctgcagataaatgaactcatttgtgaacgttatttaatttgatctactttggttatgtaacaatcctataaatttgctaaaggtattacattgcaaatggatagcaggcatttttatagaaacactaaggcaaatgttaaatattacacattttaaaaaaacaaactgtattactgcaatatattctgaaataatacgtaagctggtcccttaacttcttttcaagctggttcttgtattcattttttctagtaaatggatgcaaatcaggtgcattgtgctgggatgggaagggggagatttgtccagaaatgacctcagttctattcattaataaaatgacaatgttggctgagagcagtggagaatgaaatataacaagagtgaactttcctccatgtgacagatgcatacaagtgctttttggataaagcactgtatgtaaaatggccactgcagcataaaatctggaaacgttaaaggaagttctaagatacagattgtttgaaaaacctgcaacttccatggcaatgcacaccttattctctgttgccttgtacaattctgaaccccaacttggagaagcatgtattcattcataagaagagggatcagacaatataaacagaggtttaatgttgttaagaattttttttaagaaagagaagataatttttgcaagttcaaaacaaaatagaattgtacccagaatcactttcagtgacggcagacaccaatgggggggggggggggggaggtaaaagccatcagagagaatgtagccacatttttgcatagcggtttaaattatgccagcagaataattaatggaaggacctaatatggaaaggggggggggtgacaggaaagggggaagtctatgttaaacaaagttcattactgcatgatgtaaatgagtttctcaccaatgatgtcactgattggctgagctgcagagctggcttcgagcatggccggattggctgctagctcttctggtgcctgcctgctcgggcagcggttgaaccagatactttctgtctctcttgttgtcgtttgaagcaaatcttgttcagcccagctgtgtctccatagtagtggcaccctaagagagagtctccctcctgcttcccacagctcgtctgtgaggcggtcgctgctgtgaaataccagctcttggtaccaagcccagacagcgttctcagatccatctataacacacacacacaaaaagaaaaatagaaaaagcagttctttcatctgaattgcatcctaaggaggattaagaaggcttctattgctactgatttgtgttccttcaatttgatggttaaaatagtttttgaaatacagtatcttctcatctgcagtagaacaccattggttaaaattggttaaaaagatggggggaacccccctctcccatgtttaccttgatttcagaaaaataattcttcattttcttcctaagcaccgtaactgatgtttttggtcccctaccagaatttttaaactctcaccagatttctaattacagccgagtcattatttttcaggttaagacaagggatcttaattagcattcttttttagctatgcgaaatgagacagggcatgaaacagaaacaatctatggagaggcagagagagagaaagaaaaaaaatctgtgcagcttttacagttgagctgacaccccctccttccccgctctccctccaccccccttgcaaaaagaatgcagtcatatgaactttaccagacaatggagtacctacaggctctcccctagacaagtcctttataaccagccagtgctatgtgctgcagacagtggccaatcggcaggctcctttctgcagcagggacacaataggtgcattggccacactgtcctcctagaccctgacagcagttcaggttcattcattgtacactggaaggcacatatgtctttaatattcactgtgaaattatcagtgcgactgcctttatttcaccataattacatcaacctaattaccgcgcacaagctgcaatagcactgtttgcacagagtggcgcatagccatgcatgccgtaaaaatatgcatgaacatgcctgcttatttcaataataaaatccaccaattttcttcccacagcttcctccagaatacttcagtggaagatagccatcgcttttccccttcaaaagaaaaaagcatatgtgtgtgtataatacatatatatacatacatatacaaataatacatattaattaaacattttcctagtcatttattggggtgaagtataggagtagaatctagtcagtaaatacaaggtcattaaatacctaaggcatttaccccgtattactaggcatcagagtgaaggagtaagtgaatctgcatgaatcactatagccatgactacatgccgatttattttgagtctaactgtcatgcacatctgcatatgcctaatttatgtatttttatattacataattatgtcatgccttgaaacactgactcaaaatgcttgaaaaattaaatcttcgctttttgtgtattagttcaacagagttaggcagtctgtggtagaaactgtctgcttttttattttattttatgcatgttacatttacatattcatgaacacaaaagctgttatgaccgaggattctgcagcaggggatgagaaggcacgatcccgcatacagatgtattaatttctaggggaagaatggcagcctatgatgaccaggaagagaagatgtttgggggttccatttggggtttacctcattatataataaatgatgtcgctaacctgccaacaaatgtttaagtataataaacttggaaagtaaagccaatttgtattattcgtggccattcatccacactgtaaaaaaaaagaagcattttgaaatgcagacttctgactcaggtccttgcaggtaaaataaaggggatgtgctcagaagctgctcattatttcacaatttacatatttcttgctccaaatcagaatgctaagctttaagctttgattattttctaagtcggaattttaccaatgtttgcctgtatttattggtgtattttgatagctcatgattctgtaatcaggaatgcaattcatcattaaagtaggcacattaggagaaacagtaacctatttatactcacggtgctgtatgtttataacatataatcattccaaagagaaagaatcccaatcattttttataattttttataaatttatattttgtagtcctggtttttaaatatatgtaaaattggtatcataaaatgtattccagttgcttttgaattttataagcattttaaaagaaaagcacagctcttctatctatactttccaaaaatcaagttttaataggagggatggggaagccaaattcctaactaaaccaaaagatcgtacggctcaatcataaaaaacacaaataatataagaaaatactgcatttttattcctgaactgctacacacattgaaattgaaatacctgaaatcatatatgtaaattagttgcttgatagataatgtaaaatccttttttctctaagtgaatgcaggtaatttcagaaaaaagcaaagcttatgcaactacttgccttgcctttttgatgattttcctattaaaggcaaatttgcctaaatatttgaattaaccataaaaatgtactagtaataaaattaaattatgtagacctcattcctctctccccctcactttcacacacacatatatatatacatatgtacatacacatatacatatatgt

SEQ ID NO: 1888450 - DNA, 4001 bp, Homo sapiens
atccattcctttaaaccttccatttttctacttcagtttgtcaagtgttcccaattccaagaaatcataattcatactgtgcgggaggttgcagatttttggctctggaggttgtgcagatgttattccttaaggaagacgatcgtgattgcctatgtgagtaatagctgtgagtcggctagaagccaaaagttctcttacagcagaatgtataaaccattctcctactgaaagaaggcccccagtaggataatatattattacacatgattcaaattacaggatctgcagcaggggagctcgtgactgattcaggacagtcgccccctgaatactgatgatgggatgatggaatacctcatgaattaaaagggccatggtttcccatctaaatccttcatatgctttaaaaagtgactatgcctatcattgcattctctaagcttcttaaatgaatcatgcactattatgaaacccttgtcaatatttttaaaattccatgtttttgaataattatattcaaaacatccttttaaaagaaagacaatgaaacttcaccttctctgctagaaaactgtgcgcctttaacgcaaatatgcaataaagatatgacttaatagaaattgcattgaagtgtgacccagttttgctctctgggattttataaagcaacctgaaatcttcacatgccacatgttccagcctctttaagttatctatagaaaaaatgactttatccctgacaactaaatacaaatgtgcaaggcaaaattgtatttccacaggttttctgcagataaatgaactcatttgtgaacgttatttaatttgatctactttggttatgtaacaatcctataaatttgctaaaggtattacattgcaaatggatagcaggcatttttatagaaacactaaggcaaatgttaaatattacacattttaaaaaaacaaactgtattactgcaatatattctgaaataatacgtaagctggtcccttaacttcttttcaagctggttcttgtattcattttttctagtaaatggatgcaaatcaggtgcattgtgctgggatgggaagggggagatttgtccagaaatgacctcagttctattcattaataaaatgacaatgttggctgagagcagtggagaatgaaatataacaagagtgaactttcctccatgtgacagatgcatacaagtgctttttggataaagcactgtatgtaaaatggccactgcagcataaaatctggaaacgttaaaggaagttctaagatacagattgtttgaaaaacctgcaacttccatggcaatgcacaccttattctctgttgccttgtacaattctgaaccccaacttggagaagcatgtattcattcataagaagagggatcagacaatataaacagaggtttaatgttgttaagaattttttttaagaaagagaagataatttttgcaagttcaaaacaaaatagaattgtacccagaatcactttcagtgacggcagacaccaatgggggggggggggggggaggtaaaagccatcagagagaatgtagccacatttttgcatagcggtttaaattatgccagcagaataattaatggaaggacctaatatggaaaggggggggggtgacaggaaagggggaagtctatgttaaacaaagttcattactgcatgatgtaaatgagtttctcaccaatgatgtcactgattggctgagctgcagagctggcttcgagcatggccggattggctgctagctcttctggtgcctgcctgctcgggcagcggttgaaccagatactttctgtctctcttgttgtcgtttgaagcaaatcttgttcagcccagctgtgtctccatagtagtggcaccctaagagagagtctccctcctgcttcccacagctcgtctgtgaggcggtcgctgctgtgaaataccagctcttggtaccaagcccagacagcgttctcagatccatctataacacacacacacaaaaagaaaaatagaaaaagcagttctttcatctgaattgcatcctaaggaggattaagaaggcttctattgctactgatttgtgttccttcaatttgatggttaaaatagtttttgaaatacagtatcttctcatctgcagtagaacaccattggttaaaattggttaaaaagatggggggaacccccctctcccatgtttaccttgatttcagaaaaataattcttcattttcttcctaagcaccgtaactgatgtttttggtcccctaccagaatttttaaactctcaccagatttctaattacagccgagtcattatttttcaggttaagacaagggatcttaattagcattcttttttagctatgcgaaatgagacagggcatgaaacagaaacaatctatggagaggcagagagagagaaagaaaaaaaatctgtgcagcttttacagttgagctgacaccccctccttccccgctctccctccaccccccttgcaaaaagaatgcagtcatatgaactttaccagacaatggagtacctacaggctctcccctagacaagtcctttataaccagccagtgctatgtgctgcagacagtggccaatcggcaggctcctttctgcagcagggacacaataggtgcattggccacactgtcctcctagaccctgacagcagttcaggttcattcattgtacactggaaggcacatatgtctttaatattcactgtgaaattatcagtgcgactgcctttatttcaccataattacatcaacctaattaccgcgcacaagctgcaatagcactgtttgcacagagtggcgcatagccatgcatgccgtaaaaatatgcatgaacatgcctgcttatttcaataataaaatccaccaattttcttcccacagcttcctccagaatacttcagtggaagatagccatcgcttttccccttcaaaagaaaaaagcatatgtgtgtgtataatacatatatatacatacatatacaaataatacatattaattaaacattttcctagtcatttattggggtgaagtataggagtagaatctagtcagtaaatacaaggtcattaaatacctaaggcatttaccccgtattactaggcatcagagtgaaggagtaagtgaatctgcatgaatcactatagccatgactacatgccgatttattttgagtctaactgtcatgcacatctgcatatgcctaatttatgtatttttatattacataattatgtcatgccttgaaacactgactcaaaatgcttgaaaaattaaatcttcgctttttgtgtattagttcaacagagttaggcagtctgtggtagaaactgtctgcttttttattttattttatgcatgttacatttacatattcatgaacacaaaagctgttatgaccgaggattctgcagcaggggatgagaaggcacgatcccgcatacagatgtattaatttctaggggaagaatggcagcctatgatgaccaggaagagaagatgtttgggggttccatttggggtttacctcattatataataaatgatgtcgctaacctgccaacaaatgtttaagtataataaacttggaaagtaaagccaatttgtattattcgtggccattcatccacactgtaaaaaaaaagaagcattttgaaatgcagacttctgactcaggtccttgcaggtaaaataaaggggatgtgctcagaagctgctcattatttcacaatttacatatttcttgctccaaatcagaatgctaagctttaagctttgattattttctaagtcggaattttaccaatgtttgcctgtatttattggtgtattttgatagctcatgattctgtaatcaggaatgcaattcatcattaaagtaggcacattaggagaaacagtaacctatttatactcacggtgctgtatgtttataacatataatcattccaa

SEQ ID NO: 1888451 - DNA, 4001 bp, Homo sapiens
taacaaaacactttgggcaattatgataagaccacaattttttaaagctcaaaagattcatgcaaataaaatctttgacattttctttcaaaaaaaatattttcactttcctgcagcactaataaacagctaggaactgtgtatgtgggcaagggagaatgaatgtaacaggtgacgagagcataatgaacttgttctcttagaaaaggatttgtcagtcacattttgcaattgttgaaggaagcttgtatcaaatcatagaaacagttcggaaaataattattctttttatacataatttttgtataaaggcaagcctattacttagttccacaacagttgatttttccttaaatctttgcaaaagagagctaagtaatgcttcaaaattgccttataactgaaagcacattcatttttttcttaaaagctttcttccctttgaagagttttggagcttctaactccaatatattttttcagtttcttagtttactttagcaaacagaatgtataagtctccaaaaacaagagcctactctagtaaattttattttttaagtgagtatacaaaatttgtattacgcagctgctctttaaaaagtttaaatgaatgtgacgcacgaagtaaccacacagacctctatatttcatcagatcaacagggtgaaagcacatgtttcacttcgtctcagttggtaacatctaatgcagtcaccttgttaataaaattgcttttttagcaaagtcaacaacagcaatgatatcttggcacttaataaattgtaaaactgaatctgcaatttttgccaaagaaaaacatttctattaacatttctaggaatagtctctataggctctgatatttttaaaataagaagcacatttaaagtagagttataagtatgactacacggggagttaaacaaaatttacactctgagacattgttctccagaaaacataagcctagcaactttcaaaatatttgcaccaaaataaaaactacttggtaccatttcaaatttttttaaagtgtgtaaagtttcaatgaaatatgagcaaacaagacaaaaagaaacaaaagaagtttgcatgccgcttcctaaaagaaatttaaacaattctttgccaggaataacatccacatactacaagaagggaactgttgaaatcaaacacacttactttttaatatgtaaagatgcacttttttttttcctattttaagttaaaaataagaggacacaccagtgatcttgctggcagtcagataacgcacaggccctgacccttcaactggccaggaattctcacacaaagctcttttcatgcagactgcgctatatattcctaagataaggcggcaaaacatgaagccgtggagaagtgacacaaagtcgaactaaatgaaatgtttacatatattctgtcacaccgttgttccttcatcatctatcccacacatgatttgcctaaaacaatgctgattcaagttgaagagaagcatgatttaaaccaaaggacaattttcagaaaaaggacacacgagacaatacaaatattgtatttttctgtttgcatcaccaaggttagtgtgaaatcaagcagaaacaaaaccacatcgtctaagaacttctaagaaatgcttttgctataatttccctcaaagcacaacagatttcttaacttgttttacaacatagaaagtatattttaaatataatatcttaaatctgcactcaccatgaaaaagcaacagttgcgtagagtaaaagtgtgctattttctgcccctgttccatttcagttttgcctatggttgtccaacacccaaaagcccagagctgccacccagaggccccttccacaagctggcttatttgcctgtcaatctgagtgccggcttctctattatgcagctgtgcactttgctgaagttctaatataatttccatacgcttgccaccgcctgaagtaggcgatttgttctttcagttcaatgaatactcaaatcacttttcaggtaactgtaggatcaagctttaagttgttcaccctcaagttaaggagttcttggtaagaagtgggtggagagaagtaagctcactacaagggaattcagagtgtaatcagaacgcagagagaaacttcctcttttttccttccttgctagcctgagctactagtgcctctttcacagaacttaggaatgtaaagggaggacgcaaagaggccccgccagacaaccctttctcaatcaattagcttgcagccattacttgtgaccttaggtcacacagcataagtgtgtggggcgtgccttcaggggtcccaaggctacttattacagcttagataaccaaaaccaagcagacactaaaatctagaaatactttaatagaaaatgtactgaagatgtgactaaaggtaaactccgagtttttttttttttttttgcagtaactttttgcagtaactactatctaatccagtcaaatatattttttttttttttacattaagaaatctaaaacaatgttttccatgttggatcaaacaggatttagaatgaagcagtgaaacttttttttatattaaatttcaagctgggaatagagaaatgacaaataatatatcatatagatcacaggatcatatatgtgttactcatatagctcaggttccaaggtctcatttgagttttgtaaagaatgctggtttattacacctaactgcagagtagaactactgtaaacaaagttctctatgcttaaggaagtcaaaataatatcactttaggggctaggaacaactattttaaactctaaagattacatactatcttagtatcatgatttctctcattctcatagttgttttaatgagaatttccttttgagctctatgtcagacaaatgttttttctctttaacatttttttaaaatgagaactcaaactaacggaaaataggagaaacactaaaggaaaaggtaatattttaaaactacagatttgtgtaaatttcatactgtaagttttcatattccttgaaaacactaaaaaatagtagccgccaccatcaataaatcaatgatacagaaacatcaggcaattttatttcaaattaaatccatgcttttgaataatacaacccaattaagaagcacaggctttgatactgattggattagccaatctcttccctccaaaaaggctgttactcagaaatggatttgccacacccacgttttctcaaccttgttacttgatgatgccacaaggcatgtctgactcagcacagtgcaggaatggcaatattcctcatggatacctggccaactaaattgtctgcaaagtggacagtgacataaataaaacagacaaaccaaaaaaaaaaaatcaagaataaataagacaggtgtaaaaaaacagcggccaaataatactgtctgatggatagagtcaattttaaaaactgcagtaacaaataatgtggtaataggagtgttaaaatcagttatgggtgggggttagggcagaaattaagagtttctactttctccaatatacaatagagagtcactgataggtttgaaaaaacagattgacattgcctctcaataaattttaaataataataatttgatgtcttttagtgattctgttatggacgttttatatattgaaaacaggcattattgaaaaccatttttggctctttagccaatagatatgtagaaaatcaaaaattctaattactgtttgaggaatacctagtttttagaaatttctacaactcagcaccaccctatcattgcatgtttcatcttactctgttataaaaagagcaagcttttttttttcttgtttctttcatttgagactaacaaataacttctaaaagtcaacaaggccagcaggtcttatgcattagaagtctgcaattaaacacctgaagatctggcctctattctgacagagctacatgcacaaaacaa

SEQ ID NO: 1888452 - DNA, 4001 bp, Homo sapiens
tctatttggcccatcaatagatttggcttctaaataaatacacctagtattgggagatacatacatagaaacacataggaaagggatcctaggctctcaaggaaaaaactatttataaagatacaattgtttacccatttagttgtccctttctttcatccgtgggttgaactgccatcattagacacaatggtgttcctatttgctatgagtcactttccttttcatctcttcatgtctttttgtttgtttgttttaggtctatgtctactgcctcttattcattgcttcttgattagtccttgcaaatatttttctttcacagagagaaagagtctttactactgtagaccaatcaaattattttgcttgaagtgactggtattcactttctaaggctcacatgttctacgtgttgggggtagccattccttcttcactacattgttagcaagttctaggtattaagatattttggatgcctgagcattctagaaaggtcagcaccacatagccagtatcttgaggtccttaatatatatttgcatctaaacgtctctttaatgaattccatgtttcatatttggagtcttaaattaaagttctaacatcaacaactacttaatcctgtgtctgaaagatgatctatgtaagatagcctcactacacaaattacaccactaacagctgctaaagttgacagcaaactaaggttccaaagagtcccatttgctttgtaacacaaagaatattataaagtgcctttcctttaaacaaaaatgtgttcacattctcaaattatactttatatacatatttattattaatttattgacatgtttctggtttagttgcttctggtttattcaacagatatagctgtacaaaaataaagggcaggagacgagggaaatacacaaaagacacaaatctaatttttaaaaatcatattgttaaatgagacttaaaatagaatatttagttgaaattgatgctaaaagaaaaacgattcatctggaaagaaaggtatttaaattcaacagaaatatgaattatctaagtgtaggatcataaactgtcatgaactaattagtaaaaatgaatttactctattatttttattctagataaaaagtacttctaaattttaacttatctgtttagaatgaatgaacacattcaacacagtcaaaaatcgacacatgtattactgatgcggagcagtccaggaattaaatttaaacagttttaggagcaataaataaaactcagatgtttgaccactgccataactcattcaaatattcaatagaaactcatcacagagtgaggtcttacactccattcactaatccaataaatagttagtgctcattatgagtaaggcattggaggggatacagtgaaaaataaaacatggactttgccctcaaggggcttacagtctagtgcggaaaaaatcagcaagcacataaatagccataacataaggtagaaagtgatgtgtcataaggaaaacgcaaataatgtgctatgggagctattaactctagcagacattttttattatagtgtctaagcagccaatataaatagaccaatgatccatttgaaaattaaggtctgaattttgttaatctatagatgataaaaagctttaatattaatgcaatttaagtcactacctacaattttcttaaaatgtttgaacatggagtgacaacccattagaaataccattttgacattgttcataagcagatacaaatggaataatctaatagggctgaaatgatcattttaatgtaataaaggcccaaatcaatgatccaagatactcatgacacattaccttcttgcacacaaattggctcaatcaggttaaagtgatgaagaattcctcgacggctcaagtgtgctccaaggaaagctagaaggttgtacagttaactcccagggtgtaactctaaaccatacaacctactacctcaacccggatgcacacagcttccaatgttgcttcaaactccttatcatatcttcagtcagctcctccaaatatggcagccatacacctaagggcttggcaaggatatagatataatattctaacattttaccagtaaactttgctgctaactgtttctcataggactaacctaaacacttgggtttccagcataggtcacgtaaaatgtcttctgaccatctaacctgccatagttctagtcgcaattaatagtaaaagtcaattgcattcagcctcattttttcaggagaaataggctcaataaaaacatataaatccaatggtagtctttaattttcttactgaagttgaagaggtacactaagcactacagtatgcactgaagtttctgaacagaatctattcagatcctggtccaaaccctgctataaaggttcaactttcttatgcaatttactgtacatggaatcgaacttgaatgggtgtgatataaacgcttccaagttgttgagaattgaagcctgccttgtaagacagacaatgattaaaataaacattaaaaacaaaggaaaatataatgacttcaaaagtatataatcaactggagtttaacaggattttactgaactattgttgaacggcactgtgtatagcattttgtcagattaccacactgacacagacccatagaagcgagcttgtgcggtccacttcaccacaagatcggatctacgggtttatgccaatgggcaacatcttgcatgggccccctattaatatagaatttgttgtaaatatctgatgcaattaagagtcaaaaataatattgatcctttagtataaatgttttaaatgctgagttctaaggatgcatattctccattaaaggccttcataaatattcaaaactaaatacaaatttatatgcatgagaatttaaaaagtagtttattgaaaaatttttcacgaactgcttttgtttcaatagtaaatattttggaattaaactattctaattgagttttaaaagaaaaaagaatccatacatgcatgtatgaattatataattgtgaggcatgaatgtagtattacgagcctataattaaaaccaaattaactattaagttaattgtgtatgagttagaccgtgcttattttaatttttataaaactagtttagttactggtttcaaggaattggtaacattataactttctcataaaacagtaagatcttgttcactagctagagaatacaggaagttattatcagccttaaatatatacatctgtgtctatagtcggaatggtgctaaaatttacaatatttggatgagttaatataaaactaaactaaatggcacgataatggcatgattactaatactccacactaacatttatactccagatgtattacatgacataggatatcttctttcctaaataaaatatatttaaacttattgttcaaaaaagatacacttaaaatgcatggctacatacaactctcatctggtcaacaggttgggcaaaaataaaatattactaaaaaatgttttaaaccaccagacaacaagcaaacacacaaacgagtaaacataaagccagccacatacacgtttttttaagattgtaaactcaactgcaacaaaatgataagttgtacaatcattaatcatttcacatctataatcacttagcatttcctaattatatctttattgtgtaaaataatactacatactaattgcttagtgattttgcatattttgaaataaatacgttttatagcctttatatagatcatgtgttctacataattttaaaccattatttattcttaaattgtcctcataattattaaaaactatagtaaataatcaacaatcatacattcagttgtagtaaaaatatttcaacatatatttataaatgcaaatgtgaaataagaggcagcattgggtttagttttaccataactataagaaagcatgttttggtttcattg

SEQ ID NO: 1888453 - DNA, 4001 bp, Homo sapiens; identical to SEQ ID NO: 1562467

SEQ ID NO: 1888454 - DNA, 4001 bp, Homo sapiens; identical to SEQ ID NO: 1562473

SEQ ID NO: 1888455 - DNA, 4001 bp, Homo sapiens
aagtttgtgtatgccacttaacctatattttaagtcaccctatcccaaagacatttcaaggtcagtgaaaatttttccaactattgtcaaatgctgtaacaaaagtagaagtataaataggaaagagggacaagaaaaagaagatagaaccaatcaagccactagtcaaattgcctttatgtttttcaaactctgggcatgtgtctttttcatgactaaaatgagatgtggaaaagctgtggccttctaacaaatctaggaataagtcttgctaccccccagtttaatttgaagaaagaagctggaattccaacccagaacccagaaattttgacctaaatctcctcagtccaaaataaaaaggaaccaggaatatgcagaacacttgttcgtaaaagagcttagtacccatgcttcccactataagaaaggaagcatttctagtgtagccttacagacacacaggcatggtggaaaggattttgggctttggagtaagcaagtttggtttcagtacccaactcctcttgaaactgaatgatttcagttgtcataaaaggtacctctcggccgggcgcgatggctcacgcctgttatcccagcactttgggaggccgaggcgggtggatcacgaggtcaggagatcgagaccatcctggctaacacggtgaaaccctgtctctactaaaaatacaaaaattagccgggcgtggtggtgggcacctgtaatcccagctactcgggaggctgaggcaggagaacggcgtgaacccgggaggcggagcttgcagtgagccgagatcgcgccactgcactctagcctgggcggacagagcgagactccgtctcaaaaaaaaaaaggtacttctcaagcaacacatttgatatcaacagttttttctgagacagtactgacatagaaatcccctctagttcttagaactaaatccaagaatctttgtgtttctccttcatgacttgaagtggcttcttttctaataaatttagttccgtgtcctgaaaccagggtgggtacagcttctctaaaatggacgaaaaaatcaagtcacatgacagggcctgaagagggaaatgatttttgcaacataaccaaatttaaatcctgctttggctgttgaaaaccagaaggagaagaggtaaagaaaaagcaaacgcaagtggagacagtttgagtgctgggttcttcaggttttcaatttctttctgccctgttggctttgacttcattctctttcttattaggtctattcaatggaagcagaaatctatgggacacgctgatattagccaggaagcaccatttgttgaaaaatgaggatgagataaaagggttaggtgcctttagttactaaattccacggttggcaaaagctattcatccgtcggtgacaaccacagctgtcgtggcctccctacggccatgttttgttggactcagccttgagatcctggtttgtgacgtcccactctccatcgtatacacctaagcactcttcgatagaaccctgtgagctccagaacacacaagaaaaggcaccgaacagaactgtcccagagcaggcattagtttttcttctgctacctatccagacactcagactaggaactcggtgccgtttgctgggctgtcgacaccatggacagctcttcaggcgccacctggttggctcggcgagccgaccgtcccgagcccttcctcctctcccgtcaggcccgtgggggcggcggggttggtcctgacgcccagcttggggagcagcaatacgcagccccccaagcttttctccggagtccctccccggcgctcacgctctgaagagcccacgcaaaaggaccaaggaggccagatcttccctctccctgcacccccggcggtgggatcgcagctctgcctgggggcggccgcaggaggcaaaggtagctggagactgaggctggggccgcccgcgggtgccaggcccagccggtcggcgcagagtgggcgtggtctccctcctgatgccccgccccttccctcgcgcggggcggatcttccgcccccggccgcggcgcaatgcggaagagatgggcctgctggagcggaagtgacgctcccggcggctgtggcggcggctgcgggagaaggaggaggaggagccggaggaagaggtgagcaagccggcggggggcggggagctgctgcggccagacccacgggcagccgggcgggcggacgcctccaagaccagtctctgcctccgcagcgtcagcgggagcggtgaggggcgaccgcgagcagccggggtgcgggaggacgggcggggttgtgagcagaccactggttgtgcggggtgccgcgtcaggctgggggctgtggtgacagcggctgtcagcccgcccgcgggaacgaaccgaatccgcctgggcgccggggtatctcttctggcgcataaatggagggtttgggctgctcggctcttccgtctctccgagaaggagccgctttcccgggcagtcgactgcccgggacccccgaggagccccagtcgggtcggtgccccgagtcgtgactcttcccgggtggccattcgtatttatcggccccgcctgccgtccccccagccggcggtagcccggggcaggagaggcggcggtaacctgtgccttttcccttgcccttcatcgccacccccgggagagcctgtcgcgtgggataatccttttccttctcctgccccctaaggagctttgaaccagccttgtcacccttccctcccacctccgctcctttcacctcgaaggaactgcttgaagtttccaaataggttccctttcaacgtagtgacagatcttgaagcaggaagctgataaacagctccggacgaaatacgctcaaaatttttcctttcagtaagcataaattaaacgggaaactcaaccagaccgttgattgacttacagtgctaaaaccttgtcttgccttggtatgagaattgatagcttttcctcttgctttttggtaaaattaagtgacgacttatcttttggaaaaagccattttctcccagagctgtctgttttttcccaccccaaccccccatcaaaacctggcggggagggacttttggatgctttgcagtccttgctgcagaaggaaacatcagcttcatttgctttgctttgcttggttttcgcagggctgcctccgaagaaaggagaatggcgttcagtaaaggattccggatctatcacaaattggatcccccacctttcagcctcatagtggaaactaggcataaggaagaatgtctcatgttcgagtctggggctgtcgctgtgctctgtaagtcatctgttagagcccaatttgtcatggtctctgttttgatttgaaacaattcagatgcaaccattttttagaaaagagcccgacaaccctttcactgtatttcctctagcagattatgcttgtatttccttttaatcaaacttattttcctgcaaactttttgttaacaggtttttgttgagggggtgcagggagatgcaggttttggttgcaggattttgctttcttgggttctgctgctgcttctaaaagtaaatgttttttccaaagaaatattgtttcagtttgtatcatgtatcacataaacccatacagtgtcttgcttgacatatttactggtaggtcagttatagtagtaggtattatctaatattatccaatattgttggagtatttctgttatggccgttgtgttttcattaagggaattgtaaacaacctctagattttcatgtgagatacatgattgattttgtattatttttaaaagtattttgatagtctaatttaaagaaaaggactattgtaccacaagaaaaatagattagtaatgtttgagttattttaggggcagatggatgaaattaaaattaatttggatactgggtctttcttaatgtaagatatgccaggtgtgggggctcacgcctgt

SEQ ID NO: 1888456 - DNA, 4001 bp, Homo sapiens; identical to SEQ ID NO: 1562481

SEQ ID NO: 1888457 - DNA, 4001 bp, Homo sapiens; identical to SEQ ID NO: 1562484

SEQ ID NO: 1888458 - DNA, 4001 bp, Homo sapiens
ctatccatccttgaggttcacctccagaaacacttgcatagtgggtagatgagcataaactgacaccccccacacacatatattcacagggtggatctagacattgttcattctggggcctcacattcctgggctgtaaaatggaaataaaaacacccacctcatgcagtttgggaggagcataaagtgagatacacacagtatgtgccaccaaatgattattcctcctctgcccccccccaatccccaactgtgcgcaccggcatgtccttcctgcaacctgcttctctgatgcccgttgctgagtggtttaggaaagtgtgcatgctggcacttcttgaatgctgattccacacgccctccaccccgctcatccccagcagcttgaagggtgaaaagcagaccgtgcaaaactcatatggaaactcacagtcactgaacttgtgtgtctgagagcagtgccgggttgaaaacttcaagttaggagagtgagttagctacaaggaagtgaggcagaggaaagagagttccaatttgcccttaaaatgccagaaataacaaggggaggggggtgaaattttctcccaaaacagcactgtatcttcttttcctgggaacacacattcacgttcaaaggtatctcgtgcggctctagcaagtgtgactcagtttcatagccgcattcggccttgcctgccccagttcctgtggatgggcacctcggcgcaaatagggaccagtctgggatgggggctcagctgggcagtgagcaggagatgaacaggacaaagggcagaagaaacccagagtggggtggggagggcgcacgctttcatgagttgctgctgtgctactggaggtgtaggacctgcgtgccccctgcaggaacccacgtgactcacggtcaggagcttgggcgatgggaacgataggccttaagaggcgccccacactgcggtcagatcaccgcagaacacagagtcccaacaaaggtattggaatcggagtgggaggatggaaggaagtcgtcctggccttgcttacttgggagcctgcacgaatcccctgaggccttgtgtggccgcctctccccggggcagaccttgcctctggcctacacctctcacagactgcccaccccttctaggtgcccccaaaaaaggtcccctctgagcggagctgctgggagaggaaacccagaagagaggggcgagggaagctggagagcagggttttagccccctgtgctgcactctgattctatgtaaatgtccgagtcctggcaataagggtcccgattagcagcatctggtccccaaaatgaggcctctctaaaacggctcctctgggcccaagatcagaggccacagccaccctgggctgcagatcaggcctgataaacggagcatcttcaaagtctttgctgtcttggcaaaactccctttaacactcagaaagtgccttcatagaaggggaagtgtggtctccagacctctaaggcacacaagacatcccagaacaaggcacacaggaagtactgtttcagggaaaaggagaggaaaaaagaactagaagttcgagatcctgggcaggcgtgtggctcacgtctgtaatcccagcactttcagagatgaggacgggcgatcacttcaggtcaggagttcgagaccagcctggccgacatggtgaaaccccatctctactaaaaatacaaaaactagccaggcgcggtggcacgtgcctgtaatcccagctactcgggaggctgaggcaggagaatcgcttgaaccagggaggtggaggttgcagtgagctgagatcacgcccctgcactccagcctgggcgaccgagtgagactccacctcaaaaagaaaaaaaaaaaaaaagtgtgaggtccccctatctcaaccaccaatcctgggaagacttaccttacattagtgatttcaaaatgtggtccctggaccaggaaccagcagtgccagcactgcttgggaacatttcagaaatgcacatccttgcctcccacccccagacctgatgaatcaggcttggcagagggccctgcactctgtttgcaaaaccctccacgtggttcggatgcagctcaagtctgagaaccactgctctgcctgaaaaatctctttacaatttatatgactactactacaaaaactaactaaacacacctgccatcacagtaagaccacagtaataatatcaggaaaccaaacttatcagaaatgtcaattaagctcagaccaggaccatctgcatctaacctggtggtaaacgggaaatggggggtgacttcaggcaaatggggggtgacttcaggttccttacacggaacgctccgtgaagacacctgttaaaaacaactttgaaaaagaaggctgaagtgacagactcagtctacctgacttcaaacttaattatcaagctaccatcataaaaactttgataccggtgagaaggtggacagaaatcaatggaacaaaacagacaacccagaaatagacctaaacaaacatgcccaaagcattttttttttttttgagatggagtcttgctctgtcgcccaggctggagtgcagtggcgcgatctcagctcacggcaacctccgcctcccaagttcaagcgattctcctgcctcagcctcccgagtagctgggattacaggcacgtgccaccacacccagctaatttttgtatttttagcagagacggggtttcaccatgttggccaggagggcctcgatctcttgacctcgtgatctgcccacctcggcctcccaaagtgctgggattacaggtgtcagccaccgcgcctggcctgcatttttttacaaagacaaaagcggattggattttaaaatccaagcgaggaagggcaaccatttcagcagttagtgcaggaacaactgggcatccacagttcattcaaagaaatgaactataacttcatatcttactagaaaattaactcaaaatggatcacagtcttaaaacataaaatattaaataataatagaacttagaaaaacagagaaaatctttgggctctagggcaagccacagtttttaggcttgtcaccaaaaacacaatctataaaaggaaaatcatttgcatcttcattcagaaggcaacaggcaacccaaaaaccaacatgtcaaaaagtaaaaacatctggatgctcctgacaaagtctctctgcccccacctcctacatcttaggacgcagttgtcagagagacctggaaccgctgtgacctctctcgcctccctctgacacccgcccatcacccactacctgcagccccccttactacctcccttggccacatcccactttctcccacctgtaaggctgcaaagggtctccagataactcttcctcctctgcctgggccgccaacccattttccacactgcagagcagttcttctagaacataaatccaatcacatcgcttgccagcctgaagcttcactggcttcccactgtcccaggaacaaaacccaaactcctgcacatgaccaggcactgcctttctcagcagccttctcacctcacctccccacccccaccctctccagccacgcttcccggaacgccaagctgggtcctgcctctgggcctttccacatgctcgccccccaaggctggccctctccccagccctctctgcaatgcccgctcactcctcagtccccactccccactcccctgctcagtcctcactccccagccctctctgcaagttcccactcccctgctcactcctcactccccagccctctctgccatgcctgctcactcctcagtccccactccccactccccggctcactcctcactcccctgctcactcctcactccccagccctctctgccatgcctgctcactcctcagtcttagcttaacgtcacttcttcagggagggtctccctgatccacctgtccacagcgtggcatgctttctaaaagcgctctg

SEQ ID NO: 1888459 - DNA, 4001 bp, Homo sapiens; identical to SEQ ID NO: 1562486

SEQ ID NO: 1888460 - DNA, 4001 bp, Homo sapiens; identical to SEQ ID NO: 1562488

SEQ ID NO: 1888461 - DNA, 4001 bp, Homo sapiens; identical to SEQ ID NO: 1562489

SEQ ID NO: 1888462 - DNA, 4001 bp, Homo sapiens
acgaacgagcgagcgaacgaacgggcacgcgggccccgcccgcgcacgcgccgcgtcgcggtgggggggtgggtgtgcggagggaagcgcgcggcggcggcgccgccgcgggcctcgccctccgggctccgttaatgatccttccgcaggttcacctacggaaaccttgttacgacttttacttcctctagatagtcaagttcgaccgtcttctcagcgctccgccagggccgtgggccgaccccggcggggccgatccgagggcctcactaaaccatccaatcggtagtagcgacgggcggtgtgtacaaagggcagggacttaatcaacgcaagcttatgacccgcacttactgggaattcctcgttcatggggaataattgcaatccccgatccccatcacgaatggggttcaacgggttacccgcgcctgccggcgtagggtaggcacacgctgagccagtcagtgtagcgcgcgtgcagccccggacatctaagggcatcacagacctgttattgctcaatctcgggtggctgaacgccacttgtccctctaagaagttgggggacgccgaccgctcgggggtcgcgtaactagttagcatgccagagtctcgttcgttatcggaattaaccagacaaatcgctccaccaactaagaacggccatgcaccaccacccacggaatcgagaaagagctatcaatctgtcaatcctgtccgtgtccgggccgggtgaggtttcccgtgttgagtcaaattaagccgcaggctccactcctggtggtgcccttccgtcaattcctttaagtttcagctttgcaaccatactccccccggaacccaaagactttggtttcccggaagctgcccggcgggtcatgggaataacgccgccgcatcgccggtcggcatcgtttatggtcggaactacgacggtatctgatcgtcttcgaacctccgactttcgttcttgattaatgaaaacattcttggcaaatgctttcgctctggtccgtcttgcgccggtccaagaatttcacctctagcggcgcaatacgaatgcccccggccgtccctcttaatcatggcctcagttccgaaaaccaacaaaatagaaccgcggtcctattccattattcctagctgcggtatccaggcggctcgggcctgctttgaacactctaattttttcaaagtaaacgcttcgggccccgcgggacactcagctaagagcatcgagggggcgccgagaggcaaggggcggggacgggcggtggctcgcctcgcggcggaccgcccgcccgctcccaagatccaactacgagctttttaactgcagcaactttaatatacgctattggagctggaattaccgcggctgctggcaccagacttgccctccaatggatcctcgttaaaggatttaaagtggactcattccaattacagggcctcgaaagagtcctgtattgttatttttcgtcactacctccccgggtcgggagtgggtaatttgcgcgcctgctgccttccttggatgtggtagccgtttctcaggctccctctccggaatcgaaccctgattccccgtcacccgtggtcaccatggtaggcacggcgactaccatcgaaagttgatagggcagacgttcgaatgggtcgtcgccgccacggggggcgtgcgatcggcccgaggttatctagagtcaccaaagccgccggcgcccgccccccggccggggccggagaggggctgaccgggttggttttgatctgataaatgcacgcatcccccccgcgaagggggtcagcgcccgtcggcatgtattagctctagaattaccacagttatccaagtaggagaggagcgagcgaccaaaggaaccataactgatttaatgagccattcgcagtttcactgtaccggccgtgcgtacttagacatgcatggcttaatctttgagacaagcatatgctactggcaggatcaaccaggtaggtaaggtagagcgcggcgaggccccgacgcggccggacggccggccggggggcctcgcgaggacgggcccggcgccccgcaagcgaggaggacgacggacggacggacggacgggccgcggacgggcggacgggagggagcgagcgggcgcgggggcggcggccgggaccggtggggccggggcggggcgcgggaaccggacgccccaaccacccgccccccacgcgacacgaccaccggggccccgcgccacagacccgcgacgcttcttcgtcggcccgcccgcgaggaggcggacggcccgacccgcgcccggcggccgggagggaccggcggccacgcgcgcgcgccccggcgcccgcgggcgcgcgaggcggggacggcgctccgccgccccgcggcgccccgacgtccgggcggcgagcgagaggcggaccgcggtgcccggcccggggacagtcgcgccgtgcggccgcagcgcccgcgcaccggtccggtcgagggcccggggccggccgaagcccggctccgagccccgccggcgggcgcgggcgcaggggtggcacacgccacacgacggccaagggagggcgaccgaggccggccggcgcgcccgcccccgcccgggacgggggaccgcgaccggggccgaggccccggcccgggccccaccccccgacccggggagagggcgagcgaccggcaaggcggaggtcgacccacgccacacgtcgcacgaacgcctgtccgggagggaccaccgggccgcgctcgggcgcacgcgcgcgccgaacggggcgacgccacgcggggaggacgggctctccccgacgccgacgcccgggacggacgcctcggggaagggccgcggcaggcccgggaagcgaggcgcacccgggggacgcgccgacccggttcggaagagcgggccgggagaagacgagagaccacgggcgaggccggggcgacggggaaggcgcgagaaaggcggccggcggggaaggggacgccacggggacccctcgagcgcggccgaccgcagccgggacacacgcgcggggcctcaccgccgccggcggcaccgcgcggcacccggggcggccgaccggccctcggcgatccccgcggctccccccaccaccgccgccgcagtcgcggccggtcccccggaaccgtctcctcccccgcacgcgccgcaggccgacccccggaaccctccgggaagcccaccgggccccacgcggggcgccaccgacccggtccccaaggcgcgcgccgggggacgcggacgccgggccgatcagtggccggcggcggcgccccacgaggcggtgccgggttcggtcccaggcggggccaccaacggacgtgaagccggtgagccgctcggggggaagaagaggatcggcgggcggcgggcggggaagagggcacagacgggcgagggccggggaccgcgagggcaagggcacccgggagcccgcagaggcggcggctccgggagaaacctcaggcacggccgggccaccaggaaaacacggccgcgggatcccaccgccacagacacgagggcggtcccgcggcgccccgcctgggacgccggacggccctcggcccccaccgagaaccgcctcgcgagccccggggccccgccaccgggggccccggagcgaccgcagccacgaacccgacacgccaccaccaccgtcgctcgtgattctcgtccatcctccgacccggtcccgctccgggagaccggcgcgcccccaccgtgggacgctttcccagggccaggcgggcccgaccccgtgccacgcaaacgcggtcgtcggcaccggtcacgactcggcacgggagcgggcggagagccgactcgcggcggagggagtcacgcgccggacagagcgccgggcgcgcacacccaccgcccgccggccgccgcgtcccaacccgctgggacgccgggcccggcccggcgggatcctcccccgactcggaa

SEQ ID NO: 1888463 - DNA, 4001 bp, Homo sapiens
acgaacgagcgagcgaacgaacgggcacgcgggccccgcccgcgcacgcgccgcgtcgcggtgggggggtgggtgtgcggagggaagcgcgcggcggcggcgccgccgcgggcctcgccctccgggctccgttaatgatccttccgcaggttcacctacggaaaccttgttacgacttttacttcctctagatagtcaagttcgaccgtcttctcagcgctccgccagggccgtgggccgaccccggcggggccgatccgagggcctcactaaaccatccaatcggtagtagcgacgggcggtgtgtacaaagggcagggacttaatcaacgcaagcttatgacccgcacttactgggaattcctcgttcatggggaataattgcaatccccgatccccatcacgaatggggttcaacgggttacccgcgcctgccggcgtagggtaggcacacgctgagccagtcagtgtagcgcgcgtgcagccccggacatctaagggcatcacagacctgttattgctcaatctcgggtggctgaacgccacttgtccctctaagaagttgggggacgccgaccgctcgggggtcgcgtaactagttagcatgccagagtctcgttcgttatcggaattaaccagacaaatcgctccaccaactaagaacggccatgcaccaccacccacggaatcgagaaagagctatcaatctgtcaatcctgtccgtgtccgggccgggtgaggtttcccgtgttgagtcaaattaagccgcaggctccactcctggtggtgcccttccgtcaattcctttaagtttcagctttgcaaccatactccccccggaacccaaagactttggtttcccggaagctgcccggcgggtcatgggaataacgccgccgcatcgccggtcggcatcgtttatggtcggaactacgacggtatctgatcgtcttcgaacctccgactttcgttcttgattaatgaaaacattcttggcaaatgctttcgctctggtccgtcttgcgccggtccaagaatttcacctctagcggcgcaatacgaatgcccccggccgtccctcttaatcatggcctcagttccgaaaaccaacaaaatagaaccgcggtcctattccattattcctagctgcggtatccaggcggctcgggcctgctttgaacactctaattttttcaaagtaaacgcttcgggccccgcgggacactcagctaagagcatcgagggggcgccgagaggcaaggggcggggacgggcggtggctcgcctcgcggcggaccgcccgcccgctcccaagatccaactacgagctttttaactgcagcaactttaatatacgctattggagctggaattaccgcggctgctggcaccagacttgccctccaatggatcctcgttaaaggatttaaagtggactcattccaattacagggcctcgaaagagtcctgtattgttatttttcgtcactacctccccgggtcgggagtgggtaatttgcgcgcctgctgccttccttggatgtggtagccgtttctcaggctccctctccggaatcgaaccctgattccccgtcacccgtggtcaccatggtaggcacggcgactaccatcgaaagttgatagggcagacgttcgaatgggtcgtcgccgccacggggggcgtgcgatcggcccgaggttatctagagtcaccaaagccgccggcgcccgccccccggccggggccggagaggggctgaccgggttggttttgatctgataaatgcacgcatcccccccgcgaagggggtcagcgcccgtcggcatgtattagctctagaattaccacagttatccaagtaggagaggagcgagcgaccaaaggaaccataactgatttaatgagccattcgcagtttcactgtaccggccgtgcgtacttagacatgcatggcttaatctttgagacaagcatatgctactggcaggatcaaccaggtaggtaaggtagagcgcggcgaggccccgacgcggccggacggccggccggggggcctcgcgaggacgggcccggcgccccgcaagcgaggaggacgacggacggacggacggacgggccgcggacgggcggacgggagggagcgagcgggcgcgggggcggcggccgggaccggtggggccggggcggggcgcggcgaaccggacgccccaaccacccgccccccacgcgacacgaccaccggggccccgcgccacagacccgcgacgcttcttcgtcgcgcccgcccgcgaggaggcggacggcccgacccgcgcccggcggccgggagggaccggcggccacgcgcgcgcgcatggcgcccgcgggcgcgcgcaggcggggacggcgctccgccgccccgcgggcacccgacgtccgggcgcgagcgagaggcggaccgcggtgcccggcccggggacagtcgcgccgtgcgccgcagcgcccgcgcaccggtccggtcgagtgcccggggccgtccgaagcccggctccgagccccgccggcggcgcggcgcaggggtggcacacgccacacgacggccaagggagggcgaccgaggccggccggcgcgcccgccccgcccgggacgggggaccgcgaccggggccgaggcccggcccgggccccaccccccgacccggggagagggcgagcgaccggcaaggcggaggtcgacccacgccacacgtcgcacgaacgcctgtccgggagggaccaccgggccggctcgggcacgcgcgcgccgaacgggcgacgccacgcggggaggacgggctctccccgacgccgacgcccgggacggacgcctcggggaaagggccgcggcaggcccgggaagcgagcgcacccgggggacgcgccgacccggttcggaagagcgggccgggagaagacgagagaccacggcgaggcggggcgacggggaaggcgcgagaaaggcggccggcggggaaaggggacgcacgggaccctcgagcgcggccgaccgcagccgggacacacgcgcggggcctcaccgccgccggcggcaccgcgcggcacccggggcggccgaccggccctcggcgatccccgcggctccccccaccaccgccgccgcagtcgcggccggtcccccggaaccgtctcctcccccgcacgcgccgcaggccgacccccggaaccctccgggaagcccaccgggccccacgcggggcgccaccgacccggtccccaaggcgcgcgccgggggacgcggacgccgggccgatcagtggccggcggcggcgccccacgaggcggtgccgggttcggtcccaggcggggccaccaacggacgtgaagccggtgagccgctcggggggaagaagaggatcggcgggcggcgggcggggaagagggcacagacgggcgagggccggggaccgcgagggcaagggcacccgggagcccgcagaggcggcggctccgggagaaacctcaggcacggccgggccaccaggaaaacacggccgcgggatcccaccgccacagacacgagggcggtcccgcggcgccccgcctgggacgccggacggccctcggcccccaccgagaaccgcctcgcgagccccggggccccgccaccgggggccccggagcgaccgcagccacgaacccgacacgccaccaccaccgtcgctcgtgattctcgtccatcctccgacccggtcccgctccgggagaccggcgcgcccccaccgtgggacgctttcccagggccaggcgggcccgaccccgtgccacgcaaacgcggtcgtcggcaccggtcacgactcggcacgggagcgggcggagagccgactcgcggcggagggagtcacgcgccggacagagcgccgggcgcgcacacccaccgcccgccggccgccgcgtcccaacccgctgggacgccgggcccggcccggcgggatcctcccccgactcggaagggggaggcgcg

SEQ ID NO: 1888464 - DNA, 4001 bp, Homo sapiens
aacgagcgagcgaacgaacgggcacgcgggccccgcccgcgcacgcgccgcgtcgcggtgggggggtgggtgtgcggagggaagcgcgcggcggcggcggcgccgccgcgggcctcgccctccgggctccgttaatgatccttccgcaggttcacctacggaaaccttgttacgacttttacttcctctagatagtcaagttcgaccgtcttctcagcgctccgccagggccgtgggccgaccccggcggggccgatccgagggcctcactaaaccatccaatcggtagtagcgacgggcggtgtgtacaaagggcagggacttaatcaacgcaagcttatgacccgcacttactgggaattcctcgttcatggggaataattgcaatccccgatccccatcacgaatggggttcaacgggttacccgcgcctgccggcgtagggtaggcacacgctgagccagtcagtgtagcgcgcgtgcagccccggacatctaagggcatcacagacctgttattgctcaatctcgggtggctgaacgccacttgtccctctaagaagttgggggacgccgaccgctcgggggtcgcgtaactagttagcatgccagagtctcgttcgttatcggaattaaccagacaaatcgctccaccaactaagaacggccatgcaccaccacccacggaatcgagaaagagctatcaatctgtcaatcctgtccgtgtccgggccgggtgaggtttcccgtgttgagtcaaattaagccgcaggctccactcctggtggtgcccttccgtcaattcctttaagtttcagctttgcaaccatactccccccggaacccaaagactttggtttcccggaagctgcccggcgggtcatgggaataacgccgccgcatcgccggtcggcatcgtttatggtcggaactacgacggtatctgatcgtcttcgaacctccgactttcgttcttgattaatgaaaacattcttggcaaatgctttcgctctggtccgtcttgcgccggtccaagaatttcacctctagcggcgcaatacgaatgcccccggccgtccctcttaatcatggcctcagttccgaaaaccaacaaaatagaaccgcggtcctattccattattcctagctgcggtatccaggcggctcgggcctgctttgaacactctaattttttcaaagtaaacgcttcgggccccgcgggacactcagctaagagcatcgagggggcgccgagaggcaaggggcggggacgggcggtggctcgcctcgcggcggaccgcccgcccgctcccaagatccaactacgagctttttaactgcagcaactttaatatacgctattggagctggaattaccgcggctgctggcaccagacttgccctccaatggatcctcgttaaaggatttaaagtggactcattccaattacagggcctcgaaagagtcctgtattgttatttttcgtcactacctccccgggtcgggagtgggtaatttgcgcgcctgctgccttccttggatgtggtagccgtttctcaggctccctctccggaatcgaaccctgattccccgtcacccgtggtcaccatggtaggcacggcgactaccatcgaaagttgatagggcagacgttcgaatgggtcgtcgccgccacggggggcgtgcgatcggcccgaggttatctagagtcaccaaagccgccggcgcccgccccccggccggggccggagaggggctgaccgggttggttttgatctgataaatgcacgcatcccccccgcgaagggggtcagcgcccgtcggcatgtattagctctagaattaccacagttatccaagtaggagaggagcgagcgaccaaaggaaccataactgatttaatgagccattcgcagtttcactgtaccggccgtgcgtactcagacatgcatggcttaatctttgagacaagcatatgctactggcaggatcaaccaggtaggtaaggtagagcgcggcgaggccccgacgcggccggacggccggccggggggcctcgcgaggacgggcccggcgccccgcaagcgaggaggacgacggacggacggacgggccgcggacgggcggacgggagggagcgagcgggcgcgggggcggcggccgggaccggtggggccggggcggggcgcggcgaaccggacgccccaaccacccgccccccacgcgacacgaccaccggggccccgcgccacagacccgcgacgcttcttcgtcgcgcccgcccgcgaggaggcggacggcccgacccgcgcccggcggccgggagggaccggcggccacgcgcgcgcgcgcgcggccggcgcccgcgggcggcggcgaggcggggacggcgctccgcccgccccgcggggcggccccgacgtccgggcggcgagcgagaggcggaccgcggtgcccggcccggggacagtcgcgccgtgcggccgcagcgcccgcgcaccggtccggtcgagggcccggggcccggccgaagcccggctccgagccccgccggcgggcgcgggcgcaggggtggcacacgccacacgacggccaagggagggccgaccgaggccggccggcgcgcccgcccccgcccgggacgggggaccgcgaccggggccgaggccccggcccgggccccaccccccgacccggggaaagggcgagcgaccggcaaggcggaggtcgacccacgccacacgtcgcacgaacgcctgtccggcagggaccaccgggccgcgctcgggcgcacgcgcgcgccgaacggggcgacgccacgcggggaggacgggctctccccgacgccgacgcccgggacggacgcctcggggaagggccgcggcaggcccgggaagcgaggcgcacccgggggacgcgccgacccggttcggaagagcgggccgggagaagacgagagaccacgggcgaggccggggcgacggggaaggcgcgagaaaggcggccggcggggaaggggacgccacggggacccctcgagcgcggccgaccgcggccgggacacacgcgcggggcctcaccgccgccggcggcaccgcgcggcacccggggcggccgaccggccctcggcgatccccgcggctgcccccaccaccgccgccgcagtcgcggccggtcccccggaaccgtctcctcccccgcacgcgccgcaggccgacccccggaaccctccgggaagcccaccgggccccacgcggggcgccaccgacccggtccccaaggcgcgcgccgggggacgcggacgccgggccgatcagtggccggcggcggcgccccacgaggcggtgccgggttcggtcccaggcggggccaccaacggacgtgaagccggtgagccgctcggggggaagaagaggatcggcgggcggcgggcggggaagagggcacagacgggcgagggccggggaccgcgagggcaagggcacccgggagcccgcagaggcggcggctcggggagaaacctcaggcacggccgggccaccaggaaaacacggccgcgggatcccaccgccacagacacgagggcggtcccgcggcgccccgcctgggacgccggacggccctcggcccccaccgagaaccgcctcgcgagccccggggccccgccaccgggggccccggagcgaccgcagccacgaacccgacacgcccgcaccaccgtcgctcgtgattctcgtccatcctccgacccggtcccgctccgggagaccggcgcgcccccaccgtgggacgctttcccagggccaggcgggcccgaccccgtgccacgcaaacgcggtcgtcggcaccggtcacgactcggcacgggagcgggcggagagccgactcgcggcggagggggtcacgcgccggacagagcgccgggcgcgcacacccaccgcccgccggccgccgcgtcccaacccgctgggaacgccgggcccggcccggcgggatcctcc

SEQ ID NO: 1888465 - DNA, 4001 bp, Homo sapiens
acactccttagcggattccgacttccatggccaccgtcctgctgtctatatcaaccaacaccttttctggggtctgatgagcgtcggcatcgggcgccttaacccggcgttcggttcatcccgcagcgccagttctgcttaccaaaagtggcccactaggcactcgcattccacgcccggctccacgccagcgagccgggcttcttacccatttaaagtttgagaataggttgagatcgtttcggccccaagacctctaatcattcgctttaccggataaaactgcgtggcgggggtgcgtcgggtctgcgagagcgccagctatcctgagggaaacttcggagggaaccagctactagatggttcgattagtctttcgcccctatacccaggtcggacgaccgatttgcacgtcaggaccgctacggacctccaccagagtttcctctggcttcgccctgcccaggcatagttcaccatctttcgggtcctaacacgtgcgctcgtgctccacctccccggcgcggcgggcgagacgggccggtggtgcgccctcggcggactggagaggcctcgggatcccacctcggccggcgagcgcgccggccttcaccttcattgcgccacggcggctttcgtgcgagcccccgactcgcgcacgtgttagactccttggtccgtgtttcaagacgggtcgggtgggtagccgacgtcgccgccgaccccgtgcgctcgctccgccgtccccctcttcgggggacgcgcgcgtggccccgagagaacctccccccgggcccgacggcgcgacccgcccggggcgcactggggacagtccgccccgccccccgacccgcgcgcggcaccccccccgtcgccggggcgggggcgcggggaggaggggtgggagagcggtcgcgccgtgggaggggtggcccggcccccccacgaggagacgccggcgcgcccccgcgggggagacccccctcgcgggggattccccgcgggggtgggcgccgggaggggggagagcgcggcgacgggtctcgctccctcggccccgggattcggcgagtgctgctgccgggggggctgtaacactcggggggggtttcggtcccgccgccgccgccgccgccgccaccgccgccgccgccccgacccgcgcgccctcccgagggaggacgcggggccggggggcggagacgggggaggaggaggacggacggacggacggacggggccccccgagccaccttccccgccgggccttcccagccgtcccggagccggtcgcggcgcaccgccgcggtggaaatgcgcccggcggcggccggtcgccggtcgggggacggtcccccgccgaccccacccccggccccgcccgcccacccccgcacccgccggagcccgccccctccggggaggaggaggaggggcggcgggggaagggagggcgggtggaggggtcgggaggaacggggggcgggaaagatccgccgggccgccgacacggccggacccgccgccgggttgaatcctccgggcggactgcgcggaccccacccgtttacctcttaacggtttcacgccctcttgaactctctcttcaaagttcttttcaactttcccttacggtacttgttgactatcggtctcgtgccggtatttagccttagatggagtttaccacccgctttgggctgcattcccaagcaacccgactccgggaagacccgggcccggcgcgccgggggccgctaccggcctcacaccgtccacgggctgggcctcgatcagaaggacttgggccccccacgagcggcgccggggagcgggtcttccgtacgccacatgtcccgcgccccgccgcggggcggggattcggcgctgggctcttccctgttcactcgccgttactgagggaatcctggttagtttcttttcctccgctgactaatatgcttaaattcagcgggtcgccacgtctgatctgaggtcgcgtctcggagggggacgggccgctcggcggacggacggacggaatcgcgccggcccgaccgcccgcccgacgctccgtcgggagacgggcccggcgagggggagaggcgacgggagagagagccgcggccgagggcacccccgcgccgccccgccggagcgggacgaccggagggaggggcacgggccgggggcgggacgggcgccgcacgccccgacccgtctcccccgcggaggtcggggggacgggtccgaggacgcggcgccgccgccgccccgacgcggaagtcgggacggggccccggcgcggcgcggcgcggccgagccggaggcgggcgcgcgacggcggacgacaccgcggcgtcccgcgggtcgccgccggggacacgcgaaccccggcgccgcggccacgggcgcggccgggcgggccgcggggcgggctcccggccccggccgacgcgccgcgaggcgagccgggcgggcgggcgcgcgcgcgtacgcgcggggagggcgaggaggacgggcggggcctcggaggaggggcggcgggggaggaggaggggcgcgggagcggcggtcggccggacgccgggccgccaccgggggcgggcggcgaaccgcggcgaccgggacgcgctcccccgaccctctctccccgccggcacccttccccttccggacccgccttcctcctcccccaccaccacaccgcacgcaacacgcccccaccgccgacgacgcgcgacgacgacgacgacgggcacgggaccttccacccggccggggccgacgaaccccgaaccccgagccgcgcgcggcgcgagggagccccccgagggaggaacccggaccgcaggcggcggccacgggaactcggcccgagccggctctctctttccctctccgtcttcgcgggcggcggcggcgccgccctccccgtctctctcagccgggcgcgcccccctctcccccccgccacccgacgcgtgaccacgcagggcccgcggggggagggggaaggggcgggcgcggcggcaagaggagggcggacgccgccgggtctgcgcttagggggacggagggcccccggcgggccctgcgagggaacccccagccgcgcaccccgaggagcccggaggcacccccgggggcgattgatcggcaagcgacgctcagacaggcgtagccccgggaggaacccggggccgcaagtgcgttcgaagtgtcgatgatcaatgtgtcctgcaattcacattaattctcgcagctagctgcgttcttcatcgacgcacgagccgagtgatccaccgctaagagtcgtacgaggtcgatttggcgagggcgctcccgacgacgcaccgggaggaggcccttcctggcgcggcacgtccccccgcccccccccaagaggagagggggttgcctcaggccggccagacgagacagcaaacgggaccggactccggagaggggtcggaaggtttcacaccacggggaggcgcgcgccgcccacgcgggggcgagcgcggacaccaccccacaggcgcccgggggttcccgcccccacggcgcggggcgcacgccacacgcgcggcaggcgcgcgacggccgccgggtaaagcccccacccgacggccgccgcggcggcggcggcggcgcggccccggccggggagcggagtccgcggtggaggcgcgggaggggccgggcccctcccgacgggactcccccgcgggcccaccaccgcccccgacccacgggcggacgggcgatccccccaaggggtctttaaacctccgcgccggaacgcgctaggtacctggacggcgggggggcggacgaggaggcgggggaggggaccggcgtccggcccccgaccctcgagacgccctagcgggaaggccggggagagcgagcggggccgtgcccggcggcgcggagcggcgcggcggaggcgacgggaatccggccggccccgaagacggggagccggcgcggcgggg

SEQ ID NO: 1888466 - DNA, 4001 bp, Homo sapiens
ccttagcggattccgacttccatggccaccgtcctgctgtctatatcaaccaacaccttttctggggtctgatgagcgtcggcatcgggcgccttaacccggcgttcggttcatcccgcagcgccagttctgcttaccaaaagtggcccactaggcactcgcattccacgcccggctccacgccagcgagccgggcttcttacccatttaaagtttgagaataggttgagatcgtttcggccccaagacctctaatcattcgctttaccggataaaactgcgtggcgggggtgcgtcgggtctgcgagagcgccagctatcctgagggaaacttcggagggaaccagctactagatggttcgattagtctttcgcccctatacccaggtcggacgaccgatttgcacgtcaggaccgctacggacctccaccagagtttcctctggcttcgccctgcccaggcatagttcaccatctttcgggtcctaacacgtgcgctcgtgctccacctccccggcgcggcgggcgagacgggccggtggtgcgccctcggcggactggagaggcctcgggatcccacctcggccggcgagcgcgccggccttcaccttcattgcgccacggcggctttcgtgcgagcccccgactcgcgcacgtgttagactccttggtccgtgtttcaagacgggtcgggtgggtagccgacgtcgccgccgaccccgtgcgctcgctccgccgtccccctcttcgggggacgcgcgcgtggccccgagagaacctcccccgggcccgacggcgcgacccgcccggggcgcactggggacagtccgccccgccccccgacccgcgcgcggcaccccccccgtcgccggggcgggggcgcggggaggaggggtgggagagcggtcgcgccgtgggaggggtggcccggcccccccacgaggagacgccggcgcgcccccgcgggggagacccccctcgcgggggattccccgcgggggtgggcgccgggaggggggagagcgcggcgacgggtctcgctccctcggccccgggattcggcgagtgctgctgccgggggggctgtaacactcggggggggtttcggtcccgccgccgccgccgccgccgccaccgccgccgccgccgccgccccgacccgcgcgccctcccgagggaggacgcggggccggggggcggagacgggggaggaggaggacggacggacggacggacggggccccccgagccaccttccccgccgggccttcccagccgtcccggagccggtcgcggcgcaccgccgcggtggaaatgcgcccggcggcggccggtcgccggtcgggggacggtcccccgccgaccccacccccggccccgcccgcccacccccgcacccgccggagcccgccccctccggggaggaggaggaggggcggcgggggaagggagggcgggtggaggggtcgggaggaacggggggcgggaaagatccgccgggccgccgacacggccggacccgccgccgggttgaatcctccgggcggactgcgcggaccccacccgtttacctcttaacggtttcacgccctcttgaactctctcttcaaagttcttttcaactttcccttacggtacttgttgactatcggtctcgtgccggtatttagccttagatggagtttaccacccgctttgggctgcattcccaagcaacccgactccgggaagacccgggcccggcgcgccgggggccgctaccggcctcacaccgtccacgggctgggcctcgatcagaaggacttgggccccccacgagcggcgccggggagcgggtcttccgtacgccacatgtcccgcgccccgccgcggggcggggattcggcgctgggctcttccctgttcactcgccgttactgagggaatcctggttagtttcttctcctccgctgactaatatgcttaaattcagcgggtcgccacgtctgatctgaggtcgcgtctcggagggggacgggccgctcggcggacggacggacggaatcgcgccggcccgaccgcccgcccgacgctccgtcgggagacgggcccggcgagggggagaggcgacgggagagagagcgcgcggccggcggcacccccgcgccgccccgccggagcgggacgaccggagggaggggcacgggccgggggcgggacgggcgccgcacgccccgacccgtctcccccgcggaggtcggggggacgggtccgaggacgcggcggcggagccgccccgccccgacgcggaagctcgggacggggccccggcgcggcgcggcgcggccgcgagccggaggcgggcgcgcgacggcggacgacaccgcggcgtcccgcgggtcgccgccggggacacgcgaaccccggcgccgcggccacgggcgcggccgggcgggccgcggggcgggctcccggccccggccgacgcgccgcgaggcgagccgggcgggcgggcgcgcgtacgcgcggggagggcgaggaggacgggcggggcctcggaggaggggcggcggggaggaggaggggcgcgggagcggcggtcggccggacgccgggccgccaccgggggcgggcggcgaaccgcggcgaccgggacgcgctcccccgaccctctctccccgccggcacccttccccttccggacccgccttcctcctcccccaccaccacaccgcacgcaacacgcccccaccgccgacgacgcgcgacgacgacgacgacgacgggcacgggaccttccacccggccggggccgacgaaccccgaaccccgagccgcgcgcggcgcgagggagccccccgagggaggaacccggaccgcaggcggcggccacgggaactcggcccgagccggctctctctttccctctccgtcttcgcgggcggcggcggcgccgccctccccgtctctctcagccgggcgcgcccccctctcccccccgccacccgacgcgtgaccacgcagggcccgcggggggagggggaaggggcgggcgcggcggcaagaggagggcggacgccgccgggtctgcgcttagggggacggagggcccccggcgggccctgcgagggaacccccagccgcgcaccccgaggagcccggaggcacccccgggggcgattgatcggcaagcgacgctcagacaggcgtagccccgggaggaacccggggccgcaagtgcgttcgaagtgtcgatgatcaatgtgtcctgcaattcacattaattctcgcagctagctgcgttcttcatcgacgcacgagccgagtgatccaccgctaagagtcgtacgaggtcgatttggcgagggcgctcccgacgacgcaccgggaggaggcccttcctggcgcggcacgtcccccccccccccgcccaagaggagagggggttgcctcaggccggccagacgagacagcaaacgggaccggactccggagaggggtcggaaggtttcacaccacggggaggcgcgcgccgcccacgcgggggcgagcgcggacaccaccccacaggcgcccgggggttcccgcccccacggcgcggggcgcacgccacacgcgcggcaggcgcgcgacggccgccgggtaaagcccccacccgacggccgccgcggcggcggcggcggcgcggccccggccggggagcggagtccgcggtggaggcgcgggaggggccgggcccctcccgacgggactcccccgcgggcccaccaccgcccccgacccacgggcggacgggcgatccccccaaggggtctttaaacctccgcgccggaacgcgctaggtacctggacggcgggggggcggacgaggaggcgggggaggggaccggcgtccggcccccgaccctcgagacgccctagcgggaaggccggggagagcgagcggggccgtgcccggcggcgcggagcggcgcggcggaggcgacgggaatccggccggccccgaagacggggagccggcg

SEQ ID NO: 1888467 - DNA, 4001 bp, Homo sapiens
ccggggccccgccaccgggggccccggagcgaccgcagccacgaacccgacacgcccgcaccaccgtcgctcgtgattctcgtccatcctccgacccggtcccgctccgggagaccggcgcgcccccaccgtgggacgctttcccagggccaggcgggcccgaccccgtgccacgcaaacgcggtcgtcggcaccggtcacgactcggcacgggagcgggcggagagccgactcgcggcggagggggtcacgcgccggacagagcgccgggcgcgcacacccaccgcccgccggccgccgcgtcccaacccgctgggaacgccgggcccggcccggcgggatcctcccccgactcggaagggggaggcgcgggccacagtaggcgacgagccgcactcggccaccaccgcggtggccggcggaaccctcgcttctcccccccaaccccgtcgagggggaagcggaggagggtcctctgcgagcgggtcgctacggcagcgctaccataacggaggcagagacagaggcggcggcccgggggatccggtacccccaaggcacgcctctcagatcgctagagaaggcttttctcaccgagggtgggtcacactccccccacccgccagccgctcctcctcgggcccgcagaggcgccgagggacgcctggggaagggagggggccctgcggtacgaggaaacacctgcgcgcggccacctcgagcgttcgcgttcagggcgggggcccggccggtgcgcgcgtgcgcgcaaccccaccaggcccccccgtccacccacctccttccttccgaggcagagcgcctccgaagtcaacccacacacgaccggtcggaggcagaacggcagcccctcggcggccggccggcgcacgcgtcacaccggcccgaacccaccgcgatcgctcacacggcccgcgcgcacccgccagaggggagcacgggacgtgcgctcaccgagagcaggcgggcgcccttccccgcgtgggaggggcgcgtctcgtctcgtctcactcaaaccgcctcgaaccccacaccgacgagctccctcaggacccacgcgcggacaccgcggcggcgaccggaggagggggcgccgggggcgggaacgacacaccaccgttcggcctcgggcacctgagggacaacccggagcgctccaggagcaccgcaagggcccaggcggagccgacgctcgcgcaaaccccccgagagggcagcacgacgggccggcgggacggcacccccaccgccgcggaggggggccgcccgcaagtcgacaaccactggaggcgacagcgagggctgtctgccgcgtcagaggaccccgccggcccgccccgcgacgcagaaggcggcgggcgggacggcgaggtcgggccggggtccgcaccccacgccttcccacacgcaccgccggcgggcggggagaggagagacgaggggacccccgcggggcggagcgagaaggacggtcccgttcgccacgaacgtccgcccctcgcccgtcgcggctcggacccggcccgggagagcacgacgtcaccacatcgatcacgaagagccccccgggagcggaggccggccggccggccagcgagccgatcggctccggccaaccccccactccggggaaggggcggcggacaaccccgcggagacgagaacgcctgacacgcacggcacggagccagcggggtggggttgtcgcggccgccccgggcgcccgcagcggagagcgcacgggggcacggtggccctcgccgccttccccgccgcccccgggtgggtcagagacccggacccgggccggcaccgggagtcgggacgctcggacgcgcgagagaacagcaggcccgcgggccccggcaggcggctcaagcaggagcgcggccggctagccgggtcaccggtaggccagagccccgcgcgcatccggaggcccaacctctccagcgacaggtcgccagaggacagcgtgtcagcaataacccggcggcccaaaatgccgactcggagcgaaagatatacctcccccggggccgggaggtcgcgtcaccgaccacgccgccggcccaggcgacgcgcgacacggacacctgtccccaaaaacgccaccatcgcagccacacacggagcgcccggggccctctggtcaaccccaggacacacgcgggagcagcgccgggccggggacgccctcccggccgcccgtgccacacgcagggggccggcccgtgtctccagagcgggagccggaagcattttcggccggcccctcctacgaccgggacacacgagggaccgaaggccggccaggcgcgacctctcgggccgcacgcgcgctcagggagcgctctccgactccgcacggggactcgccagaaaggatcgcggcagagggaccgcggcccggcccggggaccgctccccggcacccgggggacgggggcgggacggtccccggctccccacggggactcggaaacgaattcggccgccgcctcagacggccaggatgagcgcggacccgcgaccgggccgggaagggcgtccccagcctcccgcgccacgcgcggcgggtccccgcgggtcgcggctcgggcctcgggagctacggcgcgctggtcgaccggcccgggcagccccacgcccgccgcgggcccagaagcgcagcgacagcctctcccccacataaacctgcacgccagagctgtgactcacaagcgacgcgccacagctctggcgccaccgggccagccgggctgacgaccgcgggctttccggagctctgcctagctcacagcggggacggtcccctccctcggcagctgccaccgcagctccggaagccgagagcacgatctcaaagcggccgccagatggagcccgacaaccgccgcggacgtcagcgagacagatccggctggcagggcggcccgtggaccgcgaaagcgaaaccgtgagtcgagaagctcttcccgaggccgaaaacgcagcccctctgccccaaccccacacaaacggtgcccaaaacgcgtctctgcctcgaccgcgacagagtcagaagacaacccacggcgcgtgggtgtttggagatgcctctcggaagcagggagggagggagggagggagtgagggagggagaaagaacacacaaggactcggtcgcgggtcgctgcagacacacggagaggcagaatgggtaggctcttccggaatccacgcagagacagacggggggaggggagtggggaaaagagacagatggcgaaagggaaggagggagggaagggagcagggagggagggagggagggagggaggaagacaatggagaaaagagagacaatttagaaaacgtagatacacaaagtaaacttctgaaacactccattttttaaaagacagacgggaaggaaagaaacacgaaaaagagagaaagaatgaggaaagaaacgaaggaaagaagggaaaaagaaacagagaggaaagaaaaaagaaggaaacacagggaacgaaagagaaataaagcacgaaggaaaaaaggacagaaagagagaaagaaggaaaggaagagaggaagaaaaacctaaagaaggagagaaaggaagaaaggaaggaagaaaaacacgaaggagaggaagaaagaaaacagagataactacgtacgctcgttcatttacacacataaatacgacgcttttcatacgtaaaataaacgtctttatcgacgatcccttctttatagagcgatgtgtatttatttgtataacacagacacctacatctatcatacagaagtctatttccatacaaccgatacgtatttaccatacgcaagagtattcaatgcagagatacacgttgtcgttgtttgcatataagcgtacagaaacgtttacattaatacatataagtaaacgcgtggaaacgaaagaaataaaaaagcgaaatgagtcaacaggccgggcacggtggctcacg

SEQ ID NO: 1888468 - DNA, 4001 bp, Homo sapiens
gcgcccggcggcggccggtcgccggtcgggggacggtcccccgccgaccccacccccggccccgcccgcccacccccgcacccgccggagcccgccccctccggggaggaggaggaggggcggcgggggaagggagggcgggtggaggggtcgggaggaacggggggcgggaaagatccgccgggccgccgacacggccggacccgccgccgggttgaatcctccgggcggactgcgcggaccccacccgtttacctcttaacggtttcacgccctcttgaactctctcttcaaagttcttttcaactttcccttacggtacttgttgactatcggtctcgtgccggtatttagccttagatggagtttaccacccgctttgggctgcattcccaagcaacccgactccgggaagacccgggcccggcgcgccgggggccgctaccggcctcacaccgtccacgggctgggcctcgatcagaaggacttgggccccccacgagcggcgccggggagcgggtcttccgtacgccacatgtcccgcgccccgccgcggggcggggattcggcgctgggctcttccctgttcactcgccgttactgagggaatcctggttagtttcttttcctccgctgactaatatgcttaaattcagcgggtcgccacgtctgatctgaggtcgcgtctcggagggggacgggccgctcggcggacggacggacggaatcgcgccggcccgaccgcccgcccgacgctccgtcgggagacgggcccggcgagggggagaggcgacgggagagagagccgcggccgagggcacccccgcgccgccccgccggagcgggacgaccggagggaggggcacgggccgggggcgggacgggcgccgcacgccccgacccgtctcccccgcggaggtcggggggacgggtccgaggacgcggcgccgccgccgccccgacgcggaagtcgggacggggccccggcgcggcgcggcgcggccgagccggaggcgggcgcgcgacggcggacgacaccgcggcgtcccgcgggtcgccgccggggacacgcgaaccccggcgccgcggccacgggcgcggccgggcgggccgcggggcgggctcccggccccggccgacgcgccgcgaggcgagccgggcgggcgggcgcgcgcgcgtacgcgcggggagggcgaggaggacgggcggggcctcggaggaggggcggcgggggaggaggaggggcgcgggagcggcggtcggccggacgccgggccgccaccgggggcgggcggcgaaccgcggcgaccgggacgcgctcccccgaccctctctccccgccggcacccttccccttccggacccgccttcctcctcccccaccaccacaccgcacgcaacacgcccccaccgccgacgacgcgcgacgacgacgacgacgggcacgggaccttccacccggccggggccgacgaaccccgaaccccgagccgcgcgcggcgcgagggagccccccgagggaggaacccggaccgcaggcggcggccacgggaactcggcccgagccggctctctctttccctctccgtcttcgcgggcggcggcggcgccgccctccccgtctctctcagccgggcgcgcccccctctcccccccgccacccgacgcgtgaccacgcagggcccgcggggggagggggaaggggcgggcgcggcggcaagaggagggcggacgccgccgggtctgcgcttagggggacggagggcccccggcgggccctgcgagggaacccccagccgcgcaccccgaggagcccggaggcacccccgggggcgattgatcggcaagcgacgctcagacaggcgtagccccgggaggaacccggggccgcaagtgcgttcgaagtgtcgatgatcaatgtgtcctgcaattcacattaattctcgcagctagctgcgttcttcatcgacgcacgagccgagtgatccaccgctaagagtcgtacgaggtcgatttggcgagggcgctcccgacgacgcaccgggaggaggcccttcctggcgcggcacgtccccccgcccccccccaagaggagagggggttgcctcaggccggccagacgagacagcaaacgggaccggactccggagaggggtcggaaggtttcacaccacggggaggcgcgcgccgcccacgcgggggcgagcgcggacaccaccccacaggcgcccgggggttcccgcccccacggcgcggggcgcacgccacacgcgcggcaggcgcgcgacggccgccgggtaaagcccccacccgacggccgccgcggcggcggcggcggcgcggccccggccggggagcggagtccgcggtggaggcgcgggaggggccgggcccctcccgacgggactcccccgcgggcccaccaccgcccccgacccacgggcggacgggcgatccccccaaggggtctttaaacctccgcgccggaacgcgctaggtacctggacggcgggggggcggacgaggaggcgggggaggggaccggcgtccggcccccgaccctcgagacgccctagcgggaaggccggggagagcgagcggggccgtgcccggcggcgcggagcggcgcggcggaggcgacgggaatccggccggccccgaagacggggagccggcgcggcggggccggacgacgggccccggcggggaggagggcaccgagacccccagacccgccgcgacgccgccgagaaccgcccccgcgcccgccgacacccacgccgtcggggccgctgccggggaccgctccccgccgcccgccggccccacgacacgcgcacaccaacgacacgcccttctttctctttctctctctctctctctctcccccgtctccctcccgagttctccggctctcgcggccggcggggccgggcggcgaacgaacgagcgagcgaacgaacgggcacgcgggccccgcccgcgcacgcgccgcgtcgcggtgggggggtgggtgtgcggagggaagcgcgcggcggcggcgccgccgcgggcctcgccctccgggctccgttaatgatccttccgcaggttcacctacggaaaccttgttacgacttttacttcctctagatagtcaagttcgaccgtcttctcagcgctccgccagggccgtgggccgaccccggcggggccgatccgagggcctcactaaaccatccaatcggtagtagcgacgggcggtgtgtacaaagggcagggacttaatcaacgcaagcttatgacccgcacttactgggaattcctcgttcatggggaataattgcaatccccgatccccatcacgaatggggttcaacgggttacccgcgcctgccggcgtagggtaggcacacgctgagccagtcagtgtagcgcgcgtgcagccccggacatctaagggcatcacagacctgttattgctcaatctcgggtggctgaacgccacttgtccctctaagaagttgggggacgccgaccgctcgggggtcgcgtaactagttagcatgccagagtctcgttcgttatcggaattaaccagacaaatcgctccaccaactaagaacggccatgcaccaccacccacggaatcgagaaagagctatcaatctgtcaatcctgtccgtgtccgggccgggtgaggtttcccgtgttgagtcaaattaagccgcaggctccactcctggtggtgcccttccgtcaattcctttaagtttcagctttgcaaccatactccccccggaacccaaagactttggtttcccggaagctgcccggcgggtcatgggaataacgccgccgcatcgccggtcggcatcgtttatggtcggaactacgacggtatctgatcgtcttcgaacctccgactttcgttcttgattaatgaaaacattcttggcaaatgctttcgctctggtccgtcttgcgccggtccaagaatttcacctctagcggcgcaatac

SEQ ID NO: 1888469 - DNA, 4001 bp, Homo sapiens
ccggtcgccggtcgggggacggtcccccgccgaccccacccccggccccgcccgcccacccccgcacccgccggagcccgccccctccggggaggaggaggaggggcggcgggggaagggagggcgggtggaggggtcgggaggaacggggggcgggaaagatccgccgggccggcgacacggccggacccgccgccgggttgaatcctccgcccctttactgcgcggaccccacccgtttacctcttaacggtttcacgccctcttgaactctctcttcaaagttcttttcaactttcccttacggtacttgttgactatcggtctcgtgccggtatttagccttagatggagtttaccacccgctttgggctgcattcccaagcaacccgactccgggaagacccgggcccggcgcgccgggggccgctaccggcctcacaccgtccacgggctgggcctcgatcagaaggacttgggccccccacgagcggcgccggggagcgggtcttccgtacgccacatgtcccgcgccccgccgcggggcggggattcggcgctgggctcttccctgttcactcgccgttactgagggaatcctggttagtgtcttttcctccgctgactaatatgcttaaattcagcgggtcgccacgtctgatctgaggtcgcgtctcggagggggacgggccgctcggcggacggacggacggaatcgcgccggcccgaccgcccgcccgacgctccgtcgggagacgggcccggcgagggggagaggcgacgggagagagagcgcgcggccggcggcacccccgcgccgccccgccggagcgggacgaccggagggaggggcacgggccgggggcgggacgggcgccgcacgccccgacccgtctcccccgcggaggtcggggggacgggtccgaggacgcggcggcggagccgccccgccccgacgcggaagctcgggacggggccccggcgcggcgcggcgcggccgcgagccggaggcgggcgcgcgacggcggacgacaccgcggcgtctcgcgggtcgccgccggggacacgcgaaccccggcgccgcggccacgggcgcggccgggcgggccgcggggcgggctcccggccccggccgacgcgccgcgaggcgagccgggcgggcgggcgcgcgcgcgtacgcgcggggagggcgaggtaggacggcggggcctcggaggaggggcggcggggaggaggaggggcgcgggagcggcggtcggccggacgccgggccgccaccgggggcgggcggcgaaccgcggcgaccgggacgcgctcccccgaccctctctccccgccggcacccttccccttccggacccgccttcctcctcccccaccaccacaccgcacgcaacacgcccccaccgccgacgacgcgcgacgacgacgacgacgacgggcacgggaccttccacccggccggggccgacgaaccccgacccccgagccgcgcgcggcgcgagggagccccaccgagggaggaacccggaccgcaggcggcggccacgggaactcggcccgagccggctctctctttccctctccgtcttcgcgggcggcggcggcgccgccctccccgtctctctcagccgggcgcgcccccctctcccccccgccacccgacgcgtgaccacgcagggcccgcggggggagggggaaggggcgggcgcggcggcaagaggagggcggacgccgccgggtctgcgcttagggggacggagggcccccggcgggccctgcgagggaacccccagccgcgcaccccgaggagcccggaggcacccccgggggcgattgatcggcaagcgacgctcagacaggcgtagccccgggaggaacccggggccgcaagtgcgttcgaagtgtcgatgatcaatgtgtcctgcaattcacattaattctcgcagctagctgcgttcttcatcgacgcacgagccgagtgatccaccgctaagagtcgtacgaggtcgatttggcgagggcgctcccgacgacgcaccgggaggaggcccttcctggcgcggcacgtcccccccccccccgcccaagaggagagggggttgcctcaggccggccagacgagacagcaaacgggaccggactccggagaggggtcggaaggtttcacaccacggggaggcgcgcgccgcccacgcgggggcgagcgcggacaccaccccacaggcgcccgggggttcccgcccccacggcgcggggcgcacgccacacgcgcggcaggcgcgcgacggccgccgggtaaagcccccacccgacggccgccgcggcggcggcggcggcgcggccccggccggggagcggagtccgcggtggaggcgcgggaggggccgggcccctcccgacgggactcccccgcgggcccaccaccgcccccgacccacgggcggacgggcgatccccccaaggggtctttaaacctccgcgccggaacgcgctaggtacctggacggcgggggggcggacgaggaggcgggggaggggaccggcgtccggcccccgaccctcgagacgccctagcgggaaggccggggagagcgagcggggccgtgcccggcggcgcggagcggcgcggcggaggcgacgggaatccggccggccccgaagacggggagccggcgcggcggggccggacgacgggccccggcggggaggagggcaccgagacccccccagacccgccgcgacgccgccgagaaccgcccccgcgcccgccgacacccacgtcgtcggggccgcggccggggaccgctccccgccgcccgccggccccacgacacgcgcacaccaacgacacgcccttctttctctttctctctctctctctctctcccccgtctccctcccgagttctccggctctcgcggccggcggggccgggcggcgaacgaacgagcgagcgaacgaacgggcacgcgggccccgcccgcgcacgcgccgcgtcgcggtgggggggtgggtgtgcggagggaagcgcgcggcggcggcggcgccgccgcgggcacacctccgggctccgttaatgatccttccgcaggttcacctacggaaaccttgttacgacttttacttcctctagatagtcaagttcgaccgtcttctcagcgttcgccaggccgtgggccgacccggcggggccgatccgagggcctcactaaaccatccaatcggtagtagcgacgggcggtgtgtacaaagggcagggacttaatcaacgcaagcttatgacccgcacttactgggaattcctcgttcatggggaataattgcaatccccgatccccatcacgaatggggttcaacgggttacccccaccgccggcgtagggtaggcacacgctgagccagtcagtgtagcgcgcgtgcagccccggacatctaagggcatcacagacctgttattgctcaatctcgggtggctgaacgccacttgtccctctaagaagttggggggacgccgaccgctcgggggtcgcgtaactagttagcatgccagagtctcgttcgttatcggaattaaccagacaaatcgctccaccaactaagaacggccatgcaccaccacccacggaatcgagaaagagctatcaatctgtcaatcctgtccgtgtccgggccgggtgaggtttcccgtgttgagtcaaattaagccgcaggctccactcctggtggtgcccttccgtcaattcctttaagtttcagctttgcaaccatactccccccggaacccaaagactttggtttcccggaagctgcccggcgggtcatgggaataacgccgccgcatcgccggtcggcatcgtttatggtcggaactacgacggtatctgatcgtcttcgaacctccgactttcgttcttgattaatgaaaacattcttggcaaatgctttcgctctggtccgtcttgcgccggtccaagaatttcacctctagcggcgcaata

SEQ ID NO: 1888470 - DNA, 4001 bp, Homo sapiens
cccggcggcggccggtcgccggtcgggggacggtcccccgccgaccccacccccggccccgcccgcccacccccgcacccgccggagcccgccccctccggggaggaggaggaggggcggcgggggaagggagggcgggtggaggggtcgggaggaacggggggcgggaaagatccgccgggccgccgacacggccggacccgccgccgggttgaatcctccgggcggactgcgcggaccccacccgtttacctcttaacggtttcacgccctcttgaactctctcttcaaagttcttttcaactttcccttacggtacttgttgactatcggtctcgtgccggtatttagccttagatggagtttaccacccgctttgggctgcattcccaagcaacccgactccgggaagacccgggcccggcgcgccgggggccgctaccggcctcacaccgtccacgggctgggcctcgatcagaaggacttgggccccccacgagcggcgccggggagcgggtcttccgtacgccacatgtcccgcgccccgccgcggggcggggattcggcgctgggctcttccctgttcactcgccgttactgagggaatcctggttagtttcttttcctccgctgactaatatgcttaaattcagcgggtcgccacgtctgatctgaggtcgcgtctcggagggggacgggccgctcggcggacggacggacggaatcgcgccggcccgaccgcccgcccgacgctccgtcgggagacgggcccggcgagggggagaggcgacgggagagagagccgcggccgagggcacccccgcgccgccccgccggagcgggacgaccggagggaggggcacgggccgggggcgggacgggcgccgcacgccccgacccgtctcccccgcggaggtcggggggacgggtccgaggacgcggcggcggagccgccccgccccgacgcggaagctcgggacggggccccggcgcggcgcggcgcggccgcgagccggaggcgggcgcgcgacggcggacgacaccgcggcgtcccgcgggtcgccgccggggacacgcgaaccccggcgccgcggccacgggcgcggccgggcgggccgcggggcgggctcccggccccggccgacgcgccgcgaggcgagccgggcgggcgggcgcgcgtacgcgcggggagggcgaggaggacagggcgggccctcggaggaggggcggcgggggaggaggaggggcgcgggagcggcggtcggcggacgccgggcgccaccgggggcgggcggcgaaccgcggcgaccgggacgcgctcccccgaccctctctccccgccggcacccttccccttccggacccgccttcctcctcccccaccaccacaccgcacgcaacacgcccccaccgccgacgacgcgcgacgacgacgacgacgggcacgggaccttccacccggccggggccgacgaaccccgaaccccgagccgcgcgcggcgcgagggagccccccgagggaggaacccggaccgcaggcggcggccacgggaactcggcccgagccggctctctctttccctctccgtcttcgcgggcggcggcggcgccgccctccccgtctctctcagccgggcgcgcccccctctcccccccgccacccgacgcgtgaccacgcagggcccgcggggggagggggaaggggcgggcgcggcggcaagaggagggcggacgccgccgggtctgcgcttagggggacggagggcccccggcgggccctgcgagggaacccccagccgcgcaccccgaggagcccggaggcacccccgggggcgattgatcggcaagcgacgctcagacaggcgtagccccgggaggaacccggggccgcaagtgcgttcgaagtgtcgatgatcaatgtgtcctgcaattcacattaattctcgcagctagctgcgttcttcatcgacgcacgagccgagtgatccaccgctaagagtcgtacgaggtcgatttggcgagggcgctcccgacgacgcaccgggaggaggcccttcctggcgcggcacgtccccccgcccccccccaagaggagagggggttgcctcaggccggccagacgagacagcaaacgggaccggactccggagaggggtcggaaggtttcacaccacggggaggcgcgcgccgcccacgcgggggcgagcgcggacaccaccccacaggcgcccgggggttcccgcccccacggcgcggggcgcacgccacacgcgcggcaggcgcgcgacggccgccgggtaaagcccccacccgacggccgccgcggcggcggcggcggcgcggccccggccggggagcggagtccgcggtggaggcgcgggaggggccgggcccctcccgacgggactcccccgcgggcccaccaccgcccccgacccacgggcggacgggcgatccccccaaggggtctttaaacctccgcgccggaacgcgctaggtacctggacggcgggggggcggacgaggaggcgggggaggggaccggcgtccggcccccgaccctcgagacgccctagcgggaaggccggggagagcgagcggggccgtgcccggcggcgcggagcggcgcggcggaggcgacgggaatccggccggccccgaagacggggagccggcgcggcggggccggacgacgggccccggcggggaggagggcaccgagacccccagacccgccgcgacgccgccgagaaccgcccccgcgcccgccgacacccacgccgtcggggccgctgccggggaccgctccccgccgcccgccggccccacgacacgcgcacaccaacgacacgcccttctttctctttctctctctctctctctctcccccgtctccctcccgagttctccggctctcgcggccggcggggccgggcggcgaacgaacgagcgagcgaacgaacgggcacgcgggccccgcccgcgcacgcgccgcgtcgcggtgggggggtgggtgtgcggagggaagcgcgcggcggcggcgccgccgcgggcctcgccctccgggctccgttaatgatccttccgcaggttcacctacggaaaccttgttacgacttttacttcctctagatagtcaagttcgaccgtcttctcagcgctccgccagggccgtgggccgaccccggcggggccgatccgagggcctcactaaaccatccaatcggtagtagcgacgggcggtgtgtacaaagggcagggacttaatcaacgcaagcttatgacccgcacttactgggaattcctcgttcatggggaataattgcaatccccgatccccatcacgaatggggttcaacgggttacccgcgcctgccggcgtagggtaggcacacgctgagccagtcagtgtagcgcgcgtgcagccccggacatctaagggcatcacagacctgttattgctcaatctcgggtggctgaacgccacttgtccctctaagaagttgggggacgccgaccgctcgggggtcgcgtaactagttagcatgccagagtctcgttcgttatcggaattaaccagacaaatcgctccaccaactaagaacggccatgcaccaccacccacggaatcgagaaagagctatcaatctgtcaatcctgtccgtgtccgggccgggtgaggtttcccgtgttgagtcaaattaagccgcaggctccactcctggtggtgcccttccgtcaattcctttaagtttcagctttgcaaccatactccccccggaacccaaagactttggtttcccggaagctgcccggcgggtcatgggaataacgccgccgcatcgccggtcggcatcgtttatggtcggaactacgacggtatctgatcgtcttcgaacctccgactttcgttcttgattaatgaaaacattcttggcaaatgctttcgctctggtccgtcttgcgccggtccaagaatttcacctctagcggcgcaatac

SEQ ID NO: 1888471 - DNA, 4001 bp, Homo sapiens
gcggcggccggtcgccggtcgggggacggtcccccgccgaccccacccccggccccgcccgcccacccccgcacccgccggagcccgccccctccggggaggaggaggaggggcggcgggggaagggagggcgggtggaggggtcgggaggaacggggggcgggaaagatccgccgggccgccgacacggccggacccgccgccgggttgaatcctccgggcggactgcgcggaccccacccgtttacctcttaacggtttcacgccctcttgaactctctcttcaaagttcttttcaactttcccttacggtacttgttgactatcggtctcgtgccggtatttagccttagatggagtttaccacccgctttgggctgcattcccaagcaacccgactccgggaagacccgggcccggcgcgccgggggccgctaccggcctcacaccgtccacgggctgggcctcgatcagaaggacttgggccccccacgagcggcgccggggagcgggtcttccgtacgccacatgtcccgcgccccgccgcggggcggggattcggcgctgggctcttccctgttcactcgccgttactgagggaatcctggttagtttcttctcctccgctgactaatatgcttaaattcagcgggtcgccacgtctgatctgaggtcgcgtctcggagggggacgggccgctcggcggacggacggacggaatcgcgccggcccgaccgcccgcccgacgctccgtcgggagacgggcccggcgagggggagaggcgacgggagagagagcgcgcggccggcggcacccccgcgccgccccgccggagcgggacgaccggagggaggggcacgggccgggggcgggacgggcgccgcacgccccgacccgtctcccccgcggaggtcggggggacgggtccgaggacgcggcggcggagccgccccgccccgacgcggaagctcgggacggggccccggcgcggcgcggcgcggccgcgagccggaggcgggcgcgcgacggcggacgacaccgcggcgtcccgcgggtcgccgccggggacacgcgaaccccggcgccgcggccacgggcgcggccgggcgggccgcggggcgggctcccggccccggccgacgcgccgcgaggcgagccgggcgggcgggcgcgcgtacgcgcggggagggcgaggaggacgggcggggcctcggaggaggggcggcggggaggaggaggggcgcgggagcggcggtcggccggacgccgggccgccaccgggggcgggcggcgaaccgcggcgaccgggacgcgctcccccgaccctctctccccgccggcacccttccccttccggacccgccttcctcctcccccaccaccacaccgcacgcaacacgcccccaccgccgacgacgcgcgacgacgacgacgacgacgggcacgggaccttccacccggccggggccgacgaaccccgaaccccgagccgcgcgcggcgcgagggagccccccgagggaggaacccggaccgcaggcggcggccacgggaactcggcccgagccggctctctctttccctctccgtcttcgcgggcggcggcggcgccgccctccccgtctctctcagccgggcgcgcccccctctcccccccgccacccgacgcgtgaccacgcagggcccgcggggggagggggaaggggcgggcgcggcggcaagaggagggcggacgccgccgggtctgcgcttagggggacggagggcccccggcgggccctgcgagggaacccccagccgcgcaccccgaggagcccggaggcacccccgggggcgattgatcggcaagcgacgctcagacaggcgtagccccgggaggaacccggggccgcaagtgcgttcgaagtgtcgatgatcaatgtgtcctgcaattcacattaattctcgcagctagctgcgttcttcatcgacgcacgagccgagtgatccaccgctaagagtcgtacgaggtcgatttggcgagggcgctcccgacgacgcaccgggaggaggcccttcctggcgcggcacgtcccccccccccccgcccaagaggagagggggttgcctcaggccggccagacgagacagcaaacgggaccggactccggagaggggtcggaaggtttcacaccacggggaggcgcgcgccgcccacgcgggggcgagcgcggacaccaccccacaggcgcccgggggttcccgcccccacggcgcggggcgcacgccacacgcgcggcaggcgcgcgacggccgccgggtaaagcccccacccgacggccgccgcggcggcggcggcggcgcggccccggccggggagcggagtccgcggtggaggcgcgggaggggccgggcccctcccgacgggactcccccgcgggcccaccaccgcccccgacccacgggcggacgggcgatccccccaaggggtctttaaacctccgcgccggaacgcgctaggtacctggacggcgggggggcggacgaggaggcgggggaggggaccggcgtccggcccccgaccctcgagacgccctagcgggaaggccggggagagcgagcggggccgtgcccggcggcgcggagcggcgcggcggaggcgacgggaatccggccggccccgaagacggggagccggcgcggcggggccggacgacgggccccggcggggaggagggcaccgagacccccccagacccgccgcgacgccgccgagaaccgcccccgcgcccgccgacacccacgtcgtcggggccgcggccggggaccgctccccgccgcccgccggccccacgacacgcgcacaccaacgacacgcccttctttctctttctctctctctctctctctcccccgtctccctcccgagttctccggctctcgcggccggcggggccgggcggcgaacgaacgagcgagcgaacgaacgggcacgcgggccccgcccgcgcacgcgccgcgtcgcggtgggggggtgggtgtgcggagggaagcgcgcggcggcggcggcgccgccgcgggcctcgccctccgggctccgttaatgatccttccgcaggttcacctacggaaaccttgttacgacttttacttcctctagatagtcaagttcgaccgtcttctcagcgctccgccagggccgtgggccgaccccggcggggccgatccgagggcctcactaaaccatccaatcggtagtagcgacgggcggtgtgtacaaagggcagggacttaatcaacgcaagcttatgacccgcacttactgggaattcctcgttcatggggaataattgcaatccccgatccccatcacgaatggggttcaacgggttacccgcgcctgccggcgtagggtaggcacacgctgagccagtcagtgtagcgcgcgtgcagccccggacatctaagggcatcacagacctgttattgctcaatctcgggtggctgaacgccacttgtccctctaagaagttgggggacgccgaccgctcgggggtcgcgtaactagttagcatgccagagtctcgttcgttatcggaattaaccagacaaatcgctccaccaactaagaacggccatgcaccaccacccacggaatcgagaaagagctatcaatctgtcaatcctgtccgtgtccgggccgggtgaggtttcccgtgttgagtcaaattaagccgcaggctccactcctggtggtgcccttccgtcaattcctttaagtttcagctttgcaaccatactccccccggaacccaaagactttggtttcccggaagctgcccggcgggtcatgggaataacgccgccgcatcgccggtcggcatcgtttatggtcggaactacgacggtatctgatcgtcttcgaacctccgactttcgttcttgattaatgaaaacattcttggcaaatgctttcgctctggtccgtcttgcgccggtccaagaatttcacctctagcggcg

SEQ ID NO: 1888472 - DNA, 4001 bp, Homo sapiens
gcagtccaggatggtggccagtgccccagcttggtgccaccccacagcgtcgcctcctgtccatggggccttggcaagcctttcgctctgtaaggctaaactccctcatgtgccaaacagatattctcaacaccgacctgtcccctccacgggcagacagacagtgggctctgctgcaggaactgcctctgtttggaccgcacctccacctttcccagcagcctaaccacaagcaggtcacgtaaccttggcaggccatgcttccccttcactcagtgggattaataatgagagcacctactcacagggttgtgccaaaattttaatacagtaaggcaagaaaatgcttggaacggtgcaagtgccttgcgcatagcatatgctcaataaatgctagctgttattactatcggttttaaagttcataaactcagccttctgccaaagagcaccaagatcacttctgcactgctacatgatgagagaggcagacatttctttttttttttttatcttcatacatgcccagttcctggaacagcttcggggccacgttcttgaggttggcggagatggctttcctgtccctagcctccctttggtggcattttcagagttaccttgtacttattgacttcctctgcgtgtccattgctttatacatattgtctcaaatcctcttgacaaccatacaaagtagggctcattccccttgtttacagatgagaaacttggggctccgtgaggttcgataaatggctcaagttcacacaggtggtggatgatggtgacagggagaaaccaatacctcgattctaaagcccacaggcttcctgctccccgatcccacccctgagcttgggcctatcttcctcctggcctccctatcaaaggcaactcgtagaagaagcccctggtgataaagaaaacacgattcctcctggagctgagtggagtttacacttcaacatggactgaagcctccagggaaagaaataaaggtctgtagagagaagctacgtcctggtgagcagagacatgacagcagcagtttctgctacacctagagaaagcttccttgaattcagtacatcctggggagaagtcccaatggattccctaagcatgggaattttgaatgctggcctctctctctctctctctctctctctctctctctctctctctgtgtgtgtgtgtgtgtgtgtgtgtgtgtgtgtgagatagagagagagagagagagagacctttatttctcctgagaggccacttctgagctttgaatcaggagtgatgtgagcatatatatccctaatgggaattatagtttgggttccaatttttatacaaagatctcccacttcccagggctccttccagagctgaagcctggcagccttggccgaggccatctctgaaccctctgcatggatgtgcacattggctgttgtggtggttcaaattttgccctagaccctcatcaaaaccaacctggttaattgtaacattgcctaaggagccaggtgggcaggcacatggtgggtgcttaaccaaggtggtgctggattttggggaagagagaacatccaaatgacagcaggggccggttactcctatggcaactgcatttctaacacagcctaaggacgttcttaaggactcagggattcatatacattgccctgcctaatgagttcacaaggtgaagggatttaacctgcaaaggattgtggtatctgagcaatgcaaaggggaattgaggaggattaggagaagtgtctgctagttatgtgcatgcttgaatggaatccacctcataaattcagtgtctgcaaaactgtgggtgacaggagctgagaagacctggtttctcgttcggactctggcaccaaccagctatggaaccctgggcaagtgaacctctctggtgccctaaggtagagaaatgtctaaaaatcactccagccaaatattcggctcttcctttctagcagtttaaaaatatttataattatagattttaaaaaataaagttatataatttttagatgccaactgaaactatacagaactatatatatacataactctatataactctatgacacagcacataaaacttacaaagcatcatatagaacaatgtctcatagttcatatgtctcagggttcacttattttttaaacagatttattcacatctgtaatacaattatttctttgttttgaatacaacctggagggaagcatatgggagacacagcctttatttaaaaaaatgaagtaatgatatggaatgattgacagttggatagaattttcattgtcggcacttctacttctttatatgaccctgcacctttcacagtgctaatatttgtttaaggttgcttaacgttgttcctctcctctagaactttggaagtaaaagccattctcatctttagaaacagtagattcaataataataaataataataaactagaagcctgagtttctgttcctacctgtcagtcaatgcctaaataatttcattttcacccattcacccattcattacatgaaaggggctgggataagagagaacactcctgaaggggaggactactttttctcctccttttagttcctacccactcttgcatgggttttatacacatatgtggtttcagattttatgaattctatactttcaaagtgggtgaatgtcaagttcagctgtgactgttaccgagctggatgaagctgcccagatgcagcctgcagatggtgtggaatgaggggctcagtgcacagagttcaaagtgcaaacagaagctgtgtaagaaagtgcagcaaactgtggttggtgttaaaactgctcctgaaaaaaatggcactcaaaccaatgtatcttagttgacctaaactctcttttgcacattctggggcagtaataagaaacaaacattgatagctatacatattataaaattttgcacagtaaaaggggaagtgcttctctcttgagcaatgagtgccactctgacattttttgtctcccttaaaaaactcacctaggatgggccgggtgcagtggctcatacctgtaatcccagcattttgggaggctgaggcgggcagatcacgaggtcgggagatcgaaaccatcctggccaacatggtgaaaacctgtctctactaaaaatacaaaaattagccgggcgtggtggcacacacctgtaatcccagctactcaggaggctgaggcaggagaatggctgaacgtgggaggcggagattgcagtgagctgagatggggccactgcactccagcctggtgacagagctagtagactccatccaaaaaaaaaaaaaaaaaaaaaaaccaacaacaaaaactcacccacaatggaatgtgactatggaataccctgcggtgtgttcagagctctgacttctgtttgctctttttaacataacccccatctggcaagctgactgctgcaagattttctgggtctttctttaggatctactaacaatgaaaaacatatatatgaaaacctacacattttcagaagcacatgagagctgatcaagacccacgtacctcccaaggagaggagatgacagaggctgctctgtggtgttgctctcaggctatatttgatttattgctcaaatcttattatttcattctccattcgagactagcaaagtttcttttgagaagtcacagtctctacggagggtattctaacgcccagaagtaaaagttggatgttggcaaagaaagcaaagtagaatctttgcaaaatgttggagctgcatagttctctctcccaatggacatgtttcaagactgaatacgttgagtatttgatttagaatcaatttaacatgaacttcgcatttatgcaaagcagcatcagtcctgagatcagcagagcgattgagcaagcccaactagcaaactgagatttctatttgtgatgacctttcccatttgaggccccaa

SEQ ID NO: 1888473 - DNA, 4001 bp, Homo sapiens
tatctaatattagcaggtagactttgtatactatcagtctattccaatactagcaaatagcaactttgaacctcttgttccatctatattacactgcaaagatcttgtttttttccgctgtttcacagtgggcaggagtgagtcatttatagatatttctgaattcaatccattttgctgtattttgaagtaaaaaaaaaaaatggtaaaaccactctgctttagtatgcctggccagttgtaacatattttataattttgaacccaaaaagtatggtgtgctttcaagttagtgcttaaattgactcaggcttcaggttttaaggtcacattattaatttttccacatttatgatctcaacatattttatatttaatcttttgtgaggaataatttgtctttaccttgagctgtgtttgtgctaggccataaaatcaggcagtgaccctgtggaatcaatggggacattaaagcgactacagaaactggtttggactaagaaagccagagtgcagaatctggatgaggtgaaaccgacattaataaacctccgtaagtaagaactcaataagctgttaaaactcctttgagggagaactaaggaagcatacgttaatgaagcccattttgataaagtcttaagataatcattaaacattgaggatttttttttattgccaagttattttaaaacagacatccccatctgttcctgaattttaccccgtatttatgcaccgccccgtttctccttgccttcaagaccgggctccgagacacagtgagagagagcaatggaggaagctcagcagtgtccactgtcgccattccttggccatagaaaacaatgtatttgaattttgatgtaagcataacaaattggtatgtccatggcatgcaactttgattttcatttatttatttataatagcatgccttaagtaatcgaactcttttaaaaatacccattaaacgtttggatttaaagggattccatgacatagagcaattgactctgggtgatatatatttctattttctgtaactgttttctacattactagaaatttcatcagagtctttgccacattgtgtaaatatagatctcacaaatgaactttatggtattacagatatggcttttttaaatttttgtcgttcttgttttttgaaaaccatttcactgtgagacacactgcatccatacatctcttggtagattgatattaaaatagacaatttcagaatgtcagtaggatttcagtccaaaccactgagattttattcttttaagtagggcaaataattttatttatttccttataattctttattatacacatgaccttaaaaattaaaaaaatatttaagaatagaaacataagaggtgggttttttaattgtatttttttctcaaatatctttcagcatattatttgtatgtggcctccattctttccagtgagatagaatttaatcaattgttatggtttcaaaaatgtcagaaaaatgcgacttttacaaaacaaaaaattttatatagcaaaataacttgctttttaaataaatgctgctgtaaataattttataaaattgaatgacttcttggtttatccattgcagtgtatttatttctcttatataaatggaagaataattcctatatgtgaagaattataatcatagtttttaacctatttctttgtcattcagaagatgaagatgacacgttgatttcttgtttgaaattaaccaagtcccgagaaaagaaagtgaatagtgttagcacgaggaggaaggaagaaatggagattagattggatactctttctgcatcactgggtagatccagcactttaaataactgcaacttggaagataaattagcttggtatgaaggtgaagcttacatgtggcatcactggaagccttttcctgaaaaccctctctggacatgtcttgatttccaaatagcacaagttggaccctgggaccactgctcctcttgtattcgccacacacgtctcaagtcttcctgctcagatatggatctcctacattcatgggtaagtttgcagactacggaaatgtgtcatcttatctggggttttgtactgtcgggaaagaaacagatagcaaaagtgctaatcagtgaaatttatcagtttcagaaaagttaccagagcaagagttgtctttccaaaaagcaaccaaactcttgtgacttttacccatattaacatttcatatattcctttgtgtacaaattaatgactgcataaaatttttccagggatttctttttgattgaaggaagacttcgtgtgttgactgagatcaagaaaatgtgaagtgaactgtctaaattattgcaattataatgaaatttcactgaaaaataatagctaattttaatgagcattttatttgggcctgccattttcctaagcattttatatgtattatctcatttaaatctcacatcaactctataaggtaaggacttacattatgaaatattaccttaagaaatattatttttggccaggcacggtggctcatgcctgtaatcccagcacttttgggaggccgaggcgggaggatcatgaggtcaggagatcgagaccatcctggctaacaaggtgaaaccccgtctctactaaaaatacaaaaaaattagccgggcgtggtggcgggcacctgtagttccagctactcgggaggctgaggcggaagaatggcgtgaacccaggaggtggagcttgcagtgagccgagatcgcgccactgccctccagcctgggcgactgagcaagactcgtcctcaaaaaaaaaaaaaaaaaaaaaaaaaaaaaaaagaaatattatttcccctcattttacagttgagaaaatggaggcacaaaaagttggtaacaggtgcaaagtcagacagctaacaggaggtagagccaagacctataacctaggtcttgcttttagctagagctcctgcttttagctactacattagagtgttttccatatacgagggcagactctaaggctattatgtgatacgtgagaaagagtatgctctctggagtcaaacaaatttggatggattctggctgtgctactttttttttgggcttggataagttatttaaaccttttaatcttaactttcttaactaaaaaatggaaatagtcaagaagctaaagtcaaatattataaatcttctagtacttaagagtggtacttttttttcaatttccttgtaaattgctcaaggcatgttttataactttacctacagctcctctggtcatgtgtgttttcagtgaatgaatgggacaattctgtgtatccagggagcctactctctaccattttcctcaaagaatcagtctcttcttagacagaagctacattttataacatatttagaggtctcttaaaaggcatattttctcttggaactttttttgccttttaagatttgtgcattaagtctgcaaagactagaattaaagtaacttgtgttcaaagtgccatagtaaatataacaggtatctgataacagacttcgaactgatgaaactgaccaacattaatcatttctaaatatcctccttcttctttaatcttcatcttcttttctgggactgctgcactttgcaggttttctcttagagtagcttcttggagagtagctggtaatataattaggacgtgcttctgatgactccctctgatatcttcagaagcaggatcaaggctgatgactccttggcaagtggctaagctgttgtataggcatctgaacacaaatagtcagagttttcttcaagaataaaatctggactccctaacttggcatttctggatttcatcagtctggactcaatctaatttttcagtcttatctgtgcactacccccaccttattgatttcctatgccgaactgccaaactgaatgatttgctattcctaaaggctgtctcacactttcttccc

SEQ ID NO: 1888474 - DNA, 4001 bp, Homo sapiens; identical to SEQ ID NO: 1562512

SEQ ID NO: 1888475 - DNA, 4001 bp, Homo sapiens
cctgtaaaacaccggagaatatctccattcccaagggaaaacagacaacagaaacgcggatcaccaagcacatacctttgttttcagtgtggataataaaatattgatggtagagatcctatcttcctttatccctgagctaaaaatgcaaggaataaattctgaaagtaaaagtttcaaagcattaaattcaaaaatattttgaaaatgagaatagacgagagaatattactgtttaggtggtacagcaaacaatgccatttactttttcaagttttttttttttaactatacaagtttccggtagaaataaccacttccatgacataagaaatcaagaagccaggcagagtggctcatgcctgtaagcccagcactacaggaggccaaggtgggaggatcccttgaggccaggagttcaagaccagcctgggcaatatagcaagaccctgtctccaaaaaaaaatttaaaaattagctgggtatggtggtgcgcacctgtagtcttactgtagtcttaggtacctaagaggctgaggtggcaggatcaccagtacccaggagtttgaggttgcagtaagccatgatcgcaccactgcactccagcctaggcaacagagcaagacgctgtctccaaaaaaacaaaacaaaacaaaacaaaaaggaagaaagaaaagaaatcaagagcacctacaagcgaaccaatgacagaactttttaagaagttcagtaggtctttagttccattttacttttcttttctcatattaaaattaactaaatactatttgaaagagaatgtacggtataacaaactaatacaatttctctcttgcttagacttgctgagatgtgtttaaagagatggtcatgattttttaagttggcagtagaattttgggtgatttagtttgtttactttttgctttctcttcctacttttcaatccccaaggaaatggccaccagagcttgacactgttatcattattaatgcagtagtgacagtgggcagaagcagcaaaacaattacaaatttccttgctccacacatgcttactgggcacacagaatttctacaaaagcaaattcattatttgtgaaaaaggaaaaatcagaaaataccagacaaaccaaaagaataagtcaaagcttcagtaccgagaagttaacactgttaacatcatctgagttaactattacccttctgatgtattcatgctactctatttgagtaaaatgagatcatactttatagttttatagtttacacccaatcatatatcactaaaaaactttgaaatcattaagtgcagcatgttttttttctttttgagacagggcctccctctgtcctccaggctagagtgcagtggcgcaatctccacttactgcagccttgacatcccaggctcaagcaattctcccacctcagcttcccaagtagctgagacaacaggtacacgccaacacacccagctaacttttgttttgtttgtttgtttgtttgtttgttttggtagagacagaatctcactatgttgtccaggatggtctcaagaactcccgggctcaagcaatcctccagcctccaactcccaaaatgctgggattacaggtgtgagccacgacggccagcctccagagtatttttaatcgctgcattccatcttatgaccagtccccaatttgctcagccaatcccttactggtggatagttagaagacccatttccagctaatataaatattattccctaacaaaacctctactcacatctttaattatttcactgggataaatgactagacatggaattgcaggatcaagtatcttaaaagtttttttatcttttttctttatctattgtgcaacccacttcagtgccagcagcctacgggaacagaggccaggcaatggttcagggctacagtttgctctggcatggggtactatgagaggtccagggggacgggcccatcataaatccaaacccatgcataagcaccttaaaagttttgatgtgtacagccaaacttcccagcagaaacattaaactgtagtatgttccagcccccttcaacagtgtaaatggtaccaactgtcactgaataaaaggccagacagctgaaatggcccacgggaatttgaagaaactactggccctggcagcagcaagatatcctgaacctagtgcctggtaacaagtaggaaaaaaaaaaatctgtccgctgcattatgcagagaccacatctccactctcatgctgctccaccacagcagcaatagagcgccccacacagaccaggctgaccacatacagggtgaccgccacctgcactctcctcctaaatcgtcccggcagtcacgttccaggggcagtccagatctcccatcctgggagggagaagaagggctggagacccaaacaccctgagtacagcaccctgctactcctcctcaataactcccagagttccggccaggacatgggactgctcctcacctccagacaggccaggattccagggaatcttaccgagcaactgccatgtgctgagctaagtgctgccatttatcatcttagtgaatctcttgataaaatgcaaggggccctggcagattaaatgatgccaagcctcactctagggacacagccaccaaaaggtggtcaagttggaattctctgaagccctgttactgatgttctcgtaacacaggtctaagccaccaaagaaactaactttgttttttaaaacgacatctcccaaggaaatccaggtagccaaggctatgagtctgagtaggttccatagccataaagcctcctttgtttgcccgactctgcctctctgaagtctgcatttatcctctgtgacggcattgttcagcattccagacggcataacaggaacaactctgttcactcttgaccagtgatatcaaaatggtactgaccaaggctttgcacccgctcacccacctccctgccccacatccttcaatctggtgtacacagcaactgcaaaggctgcagactttttttgaacttggaagaaacggtttgcagtaggtttttcaaaacaaatgggctttcctaacggacaagggagtacacctacctttcacttccaacacctgcactatagtgctgtcatcacccgcaattaaaaaggagagagcaaactgaacgtaggcctgccgaacgtcgtacactccctagaggacaaaggagacctacatgtcacatgcatattccacatacagccaaaggaatcagcaacacagtggccaagcacacccctcccgtctcaacatcaccagccccccagccttgtccccagtcaccaggggatgcaagtctgaaaccaatgctcattctccatggaaagtaaaaaattttttccgttctctttccccggtaatcttctctactttccttctctttcaagccctattctcaatacaaaagtatgggtaaaaaatagtagtgttcccttccctgactataacacatacattttcgtttcttggccactttggtgtagagcaagactctcagcctgcctagatccatctcctctcgcttgctgatgaaaataatctatgtttttgaaaatccagagatgatgaaatggctggtactgcttttggtgagacaccaatgtggtgatgtctggtttttatgagatattataaataacttattagctcataccacaaaccaaagcacagatgctgtcacgttactaaccctgttaggccttcccagggttgtagccagcactgtccacatgcatcagccaccaaccagggcactgggcacgtttggggagggccccaacaccgtgacagcagccagtgcctctagggaagccgctgatcagcttcccctcccagtatcattaagacaaagctgtgtcacatcactcctcgttttgtatctaaggaactcaaggcatgtggtcatgtcagtctctcatcagctgttccagaactag

SEQ ID NO: 1888476 - DNA, 4001 bp, Homo sapiens; identical to SEQ ID NO: 1562525

SEQ ID NO: 1888477 - DNA, 4001 bp, Homo sapiens
tcacgtgacccactgctctgatcccaccgttctagccacagtctgccaggccctgggcatgacaggaagggggttcacagatcagtggcatttacacgggtaagctttgaacactgtcttcaactgaaaggccagtgtgtgaacaggccgggcagctggaccactccgaggctggcgccttcccctcctttcgggcagttcccagaaggctcaagaccacagtttgaaatccacttaatctctcgagtcggcctgggtctatatcctaagaccgtggaaatcattttgtgccaccgtatcctgtaggcattggcaggaccagcgtaatttttagttcttctcgtgggagacagtcacagggtcatgccatttaactgcactgaagggaaaacgtgggaaatggatttttggtgctgtgtagaccacatttcatagcggttggcatctcacatgcttatgcaaagcctaactccgcaccctggggcagacagtgggagcccagctggattcctacactcaagccctccagcatcaggtttattttccaggacaccagagtgattgtttattccataattcccacaaaggagacagtaaacaacagaacagaggtggagcgggcacggaaggccaggaagtggatggtggctgccagcacttctgtggagacccagggcccccctccaggagccccggtgttcaacctccacagtgaacaggggatggatggctgagatgtcctcgaaatttttttggacttcctcaggcgaccacaggattccttctcaaagagcctgatctcagcaggcacccgaatgggcatcctggtgcttcatgctctacaacagctgggaacgccatgtcctggccccaggcgactggaaactgctttcctccccgacatcagcaccaaggggaatgttcccagtgccattcttccaagtcagggagagcgtcacaatagaaaccgtctctgtggagaggatggcacctgaagccatggaataggaagggagcatcagaggctgctggctggtcctgcagagccgcctgagaggcctgtgggagcagcagagggtcccggccttgggcgccatccgctctctgctgctctggagggagaaaaaggacaagttgaaacttgcacaagcagcctccattctggggagttcccttgtattccccacaccaacccgcacctcagcgaaggcctgtggaagacttctgcagtgacagccccgatgaaccatgcttgccgtgcccgtcccctgtgcggtgcctcacgtccactcaggccccggccatctcaccctcctggggagatggagggaagcaccatggggatttgctttttcttgctgccgacggagcccagccaccacgggagggaggcccggccagcctgcggtgggtgggtgacatgtggcccggatctgcccggggcgcctgcctgtaagtgggcccagcagacaccccatggagccgaggcaagccgtcccagctgaaccggcttaagctgcaggcccacagagtcatgagcagtgaagagaggttttcgccctctgaggtttggggtggcctgttacacagaaatacacacaacgtcctcaggcacgtatctctttaagaatgtgtcccgagaaggcgtcccaggagtcttgatttttatttagccgtccacggttgcccctttgggtgcttcgccttcagatggggtgaagggctcacttgttagctggctggccccaaagacaggcttgttttccaccaggcagtgactgaagccggcagcctgctgcataccgcgggccttcccctgacctgtccgggactgcgggctggcggctgacacctgcggagtgcttaccgcataccaggctcccaaacttccatctgtgttcgtcttttaagttttgttgttttccagagtcggagtctcagtgttgcccgggccagagcgcagcggccatttataggcgcggacctcggcctcgcacaccacagctccagctctgagacacaagcgacccgcacccccccaccgcccagccccagcctccagactggctgagatcacagtgtgcgccaccccatccctggcttgcgatggtctcttactccccactttacaagggaggaaagaggccgagggcagagtgggccgcctgaggtttggaggccagggctagtacaacctcaatttgaccctggaacctgccgcttcccccacccaggtgcgggacccacccgcttgtccacacctggctctgcccaccgcccccggctgctcctctgggctcaggtcgccgcggtcaggagctgccaagtttgcctatcaaactttatcttcgtgcagagaactgcagcctggagctggttattccggtcagtgaaaacgttgcatttctacatatgcttatcatcatctgtgtaaacatttcttggtataactgtggaacagtcagtaaatatagataaatcgaagagtaggtctattgcatatgctataaaaaaatgcttttactatcaacctaaaacaaacaaacaaacaaaaaaaatcaaacaaaaccaccatcacctaaacgttggtaactggagcagctgctagtgtcagtgcggactaaacaggagacggcgggaaccgtgtccagccagggtcctgggccgcgacctggttctcccggagtctacagtgaggatgacgggcggggagagggggccggcgggacccgcgtgtcccaggcaactccgggagagggagaagcaggggtggctcggcgggggctcggcgggggctcggcgggggctcggcgggggctcggcgggggctcggcgggggctcggcgggggcagcgcccgctgcagggaggagcgcgggggcccgggagcctgggcagcaccgcgagacgccacctccgcaaaacgcaaacgccaatcgccgggcgcctgcggtcccagctaccagggaggctgaggcggcaggatcgcgtgagctcggaggtccaccgcgctccagtctgggcgacagtgagaccccgtccccaaaacgaaggcgggcagagtctcctcagccgcgctcgggcgggcggcgccgcgacgccaggccggtcccgcgctctcgccccacgctccggagccgcccagccgcggtctctcagctccggccgcgctccagccccaacggccccgcgcccgtccgccgcaggtggtcgtgagggaggtgccacagctccggctgcccacgacagacacgggcgccccagcgcgcgcacgtccggcgtcgctgcgccgcccccgccccctcggcgtgcgcgcgcccggcgggccggcgggggcggggagggggcggagccgccggcggcggggctgaggcgctgaggcggccgtggcggcggcggcggcggcggcggcagcggcggccaagcggccaggttggcggccggggctccgggccgcgcgaggccacggccacgccgcgccgctgcgcacaaccaacgaggcagagcgccgcccggcgcgagactgcggccgaagcgtggggcgcgcgtgcggaggaccaggcgcggcgcggctgcggctgaggtgagggcggcgcggggccgcggcggctcgggcgggcgcgggctccggaccccgcggtggcggcgtttatgtaagcgccgggcagggactggtggtggggccggagctgcgggccgtcccgggagcggagggcgcccgcggagaagcgagggtgccgcggcaccgcctcgcacccaccctcctgggtcgcccgtctgctccggcgctcggctcccggaggaagctgcgcccgggcggccccgcgtcccctcccgagggcgccgagtccgcgtgggatgcgccgcgctgcgccgcggggagggcaggtgcgccgggacgaggctgcgccctggggaccgagactgcgttttggggaggggacggtgtgccctggagatcggaggctgcgctggggacgaggctgcgcccggggaccagag

SEQ ID NO: 1888478 - DNA, 4001 bp, Homo sapiens
tagacattagatgcacaatttatttttgaataaaaatatgtattacctactaatttagtaacaatattacctaaagatataatctaataatttaatacaaagaaacattataagttcactaaaataaatgttatagaaatatactgggctgtattaactattttcctattaacatgtggattccacagataacttcatatgagtattcccatgacagtacatcttgcttttctatacctgaacatcatggaaagtgcatcttgcaacccagtaattttggcctacgttttttaaaatgtacataatatgtatttcctgcagtacaccattctactcatgtttcccaataacacctttccctgtatccaagccctcatattatgctctgacaataaattgggcttttccatctgacttgtccagtgaatggacaatggaaaatgtgatgcaaatatccattggttcttgcctttttggacacagtcatattgtgaagaggtctggagctaccctgttggagacacagggcctagccaagagtcaccacaaaccaccagattgtgaaggaaactatcttaaaccaaccaggctcagtcaaggcaccaggtgactaaggcctgttttgtgatccaggcaacacaaatatatcaactacccagctgaacccaccacaccaaaatgcagatccacagaacttcaaacaaataaaatggtggttgttttttataagctagtaaggtttaattagttccttaaacagcaaatattaactgttacacctaagtgaatagaattcaatatgtttttaacgaaattatgtagggggagaaagtcttaaattacaaatcaaatgcaatcaatagaacttcacaatctatgctaaatttggtgatggactaggtttaatatatctcagacactggaaacaacaagctaagtttgaaggaatgggactgtatttggagagtatttcaatcttttcaagtatgacaggtcactcctgcaccccagaccacactttcaggccccttcaaataaggaatatttcctaggtccttgcctgttcttctcagctgaattcacctcaaccttctgaaagttcttccaaaccttccactatcacctagtctttgaaaatcttgtgcattctagggagtagaattaatatttcctgagcgaggaaaactgggatcttcacctgcgaccttttatcctcctctgaagcaccagtgagaagttagaccagagggctgttctttcaagtgcgcttcttattcatagggaaccctccctttcaaactttataacacacagtgaagactgaagtacccttaaggctgaagaccatcatccagtaccccatctccctcgcggaatcagtgagttcctccatggaaactaggtctcgtataaacttccataaatgcaatccaggaggactaggcaggtcacacagtgaaggagggaaccagaaacttcacttgttaaatagacaccaggaaacccaactaatacaaacgcccagcttgagactagaggcacacgcatttcgcactactactctgggaatggggaacgtctcccgagaactgtgtgttagcacggggacagatgggcaaactgagctacatgagggttggtaaccgggtccctcagtggcaggacaggagcgcggcctgcagactccgggcccagggccaccagcctcgcctacccactcctgcgcctctggaacccgcttcactgctgggaccccacgtctgtcctcccagcccccgccagggtccacggcccgcaaatgcacgtcaggcccctcctgcccgcgatgcgcccacgcgtctgcccccacaaatggggaacactggtctggccccccgggatcccccgaggcccacaggttcctcttcgccctcgcacctacctacagggacatagaaccaagccccaggcctgctcagctacacgaccgccgctgggatccgcacttccggaggaaaatggcgaagtgggcggggcggcgcatgcgcagagagaaaagctggttcccaaggtccttgatggtaacatcattggaaggtgacactacatttcctatgaggctctgcggtcccccgttaggaacgcacgccggacattctgttttgcccagcagtgagtccagttacccggagacccggagttaatggatcaggactggtccctacccacgtgacacagatgtggcattctggttcgttattaaatcctggtttcacagcctgggacattgtgaaaataatggagaaattccaatagaaaccaattggtctatgctgttaatgagtaactttttttttttttgagatggagtctcgctctgtcacccaggctggagtgcaatggtgcgaccttcgctcactgcaaactctgcctcccaggttcaagagattctcctgcctcagcctcctgagtatctgggatcacaggcgggcgccaccacactcacctaatttttgtatttttagtagaaacggggtttcaccatgttggtcaggctggtctctaactcctaacctcgtgatccgccctcctaggcctcccaaagtgctgggattacaggcgtgagccaccgcgcccagccctcaagtctatttttcatagatgcattcgaaagcatgaaaaaaatcatgtctctattttactttaaatttttaaaaacacaactaatgaatatggtaattctcttccaatctgttatcttttatctcacgaaactaatttgtgagctttcaatttacacagttagaaaaaaatgctctagtgtatatactaggataaaataacagggtcataagacaagtgcactccataatctttgtgacaacttacacttccagtgtctgatgaacatttgcccataaactcccacgtttcatccatccatccatcaatcaaatctacctatctttatttatttattgtgcgaaatacctgaactttgcctttccttccctgatttctgccacaaactaggcaaggagttctgcctaggggtttttcagagctccggctaccaccgaggttcctaacagggaaattcccagcttgaatgcttggggttgatgtgggagtgcgtgtgaaacgggtgtggggtgaaagggcagtgaactttgtaggtgggtagatgggggtgtgaagggctttcaggtaagaggcacagaggaaactgggagaggcagcgaaagcacttcacgcctcagatcaccagaagatgctcccaccagcaccatgacagtttgccagtgccatggcaacacaggaagtccccaccccttgccatggaaacagctggaagttactgcccatttctagctatttctgagtaacccgccccttaattagcatgtcattaaaagtgaattataaaaatgactacaagccacccctaggctgctactctgggagcacaacccacagagggctccctgccctgcaggagcggacgcagggctgtaacaccgccaatgcctccatagagctgctttattccaccacaggcttgcttttggattccttcctgagcgacgccaagaacctgcccttcctcagtgtgactcttgcctaaaatctatccctggttttctcttttcctaagcatgccctgacttgttctttcatctcctctgaacttgcaattgctcctcagtgactctattctgcagatccagaaaactcaaccttaatcttcccagagccctgttgtctccaatattggaatatctagccttgctttctcagacgcctagattacaggcctctctcttgaacacctattggtaaggtatccggggatcctttaaatacacgatgattggcagggtttacataggggaaatcagtgcctgacaatttgccttccaggatatggattgtcattccctctctttgtgggccccagtctcctatacataaaagtagagattgtaatactcatttgacttgcagatacctcaccccgaacc

SEQ ID NO: 1888479 - DNA, 4001 bp, Homo sapiens; identical to SEQ ID NO: 1562535

SEQ ID NO: 1888480 - DNA, 4001 bp, Homo sapiens
gacttatttacgaaaccaacttttttccttcagttgttaggagccactccgtcatctgctgctggattttaatctaggcctctaatatctttggcgacatccagtttatcctgagttttcggagggactggtggccactgcttctcaggacttcctggaggactcagagatttcctggccaggatctgacctccttcaggattgacaggacaattgtggagccccagtctctgaaaacctccaacaagagaagaaaacaccggtctccagggagagagcaaagggcttaacgaaacgatcccctctccaatgccccttctccctgagattctgcagatctagggaagtgcaggtgtccagcctgtgggtgtcagaatggctggggagatatttcccccacagggacagtcagtcacattggtcacctacatgagggtatgggcagaaatcacagagtcctcacctgggtccacttacctggtgcaacaggacttattttcaaatcatcaaggccaaaaagcgatcggaatgagaagggggcttcaacagcaggcggatcattttcccccatggtgactatttcaggacctctgacatccggctccgcctccacctctacctccttagccgaggaagaacagaaagcatttgttcccctatttatacttgtagcatcaggtgcatcttggtcatacggtaaatctttgaaattcgacagtccacacaaagcgcattcagtatcgattaaccaaaaacagtcatctggtgagaatgcattttcgtctgagctacagcagataacagaaaagcttctagaattagcaaaaaaaaaaaaaaaaaaaaagtatgaacttaattctgctaagacaatgactttcccattgtttgtccaaccaatcttcaaatcgattgctttagagggactccctctcaccatttagaagttgccatattgctattgttcagaagataaattactctcaaagccctttccattgcttttttgcgattgttttcacctgtcccacataaacgcaattctttccctgtgcgtgtggtacacctaccataagcataagtagtttcggtactcacataattcccgagtcccaaaaatgtagatggcaccacggaagagatagtaggccacagtgttactggcttcccataaacacagccctttcctggctcacacgggcatgacctaattaagaacgaaagtacccgagccgtccggtgcccggtccttcccccacatagcaaagtggggagtggctttggaccaacggcttgcatcaaaataaccccggggctgtgtttcctacgaaagaattccacctatcacaatgccaaggagaccagagacctttctaagtcattccctgtaactctgagagggcggaggaagcagggaaatagcagaagattcccaattaaattctagttccctctcccagatatcaggcatggctgctctgggaacctgcttcctccaagggctaaaatccacaggggctccagcaggcacatcagcacagacactcagatcatccgctttcattccctttgtgactacctgttgtaacgtttgaaattccaaagggatctagtaagccatttgaagcaacccgtgtttcccaagatcatagtaaaatctaaacaagagttctgtgccaaaaatgttcatttcatttctatcgcaagaagagcttgaaagagtaacttagaaaagcaagaagttcatgttgggccattttctggctttcattcttgctgatacctctgtttattatcagcatgtagcaaattacatcgtttatccatataaaaagaataagtgggcaaatggcttctgaaagatggaacctgggtgagaacatcccctcccaaacaggctgtggttggcaagctgtacaacactgagaagtgttgagaagcatcttctctcctcacacccattttactcaccatttctggagctgccatcattaaaagcagaaataatttcctttttcattataaaaacaagtgtgatggtaagcaggccgccaacaggttagtccaatcggggaatattttccccaagtcactcagccttgtcgactcaatcatcgcagcaaatggcattatcgcgggcatctgtgtaacccaagctgccgtgggcctatcaaatagcccttggtggtatggctgcagagaccagggagggaaaaatgtggcttccctttaattagtcagtaaggtgagcaaaccttttcagaagctttgcatcagggagtgatcggaacacagccgctccttttacttgaaagaaggggtaggctctgcccagtgctgagcatgtgaccgtcaagagggcagacatactctctggtgggggtttctgtccctccctgtaactgagcccccaagttcaattctgcagctactcctgcagacaaaagatggggagcctgaagatgctcatcacagcctgcgctccacaaaagacacgtcatgtttccttcctcggaggcctctgcatcccaagaggcttctgcacacagcactgcttaaaggggtttaaccgctgctgtggggaccagagcgctgagcatctttgaagggctgaatttaccattgtggatggcaactcgcaaatccatgcatttattcagcaaatatttagcaagcatctgccatgggccagactctagacacagtgcagccagcaagaaaaacaaagtgctcccatggggccccagatgttaagcgctaggaagagattaggccggggagggtctgagagagatgagggcagagtggtacaggacggcctctagggagagtgttgtttcagcagggaccttgatgatgttttagtagagaccttggtgaccagtgaagtgagtcttgtgaaattcctccaaggagggcgaccaccagctccaaagcctggaataggggccacgctggagtgtttgaggaaccccaagaggggccgtgagcctagaaagcagggaacagggaatagccgatggcagatcccaaggcccaggggcatgggaagggctctggtttgcctttgatgtgtggaaagccttgggcgatctcaatggggcaaatttgggttgacaggcagggcatagagtggggtaaggatggggggacacaaggacagccacaaggaggctgcacctcatgggccacaagggccatgactcggcacgagtggtgatgacggtgaggactggctgcctgaggttgattttgaaggcagaattggcaggatgtgctgacggcaaacgcctgagagatgcgtccaggcagtccttgattaagacagtcttactttctccgtcccagtaggtacctgcccacacacctgtcagtgcctttgggtgtgatctatggtctccttcaagctcacacatctctccttcacctatttcctgactactctttctggtccctcaacgaatgtttgccctcaaaggcaatgacaggaaatttaacatgtcattctttctttgcttttacctgtgtgttataggagatgctccccgctggagtacagctctggcgggacagagtctggaatgcactttcactcctaagaccccgccgtgcccagcacagccatgtgtgtgtgacaggggctctgtctgcatagaagagctgatcataaaccctggggggacaaataacaccaaatcgacatacaataaccaactacgagggcatgttaacacgtgtgtcagatgtaggtcaaaggtcaagccagctccccacggggtagcagggagaggccctacaagggtggctggtcttccttgctgtaaaatatcctctcagaaagtttaccgacaaatcaattccactgagctcaaactaaaattttgaggaaccaaacaaataagcttatctggggcccagcgcgtgatagttacgcagccagtgccatgagcagacttggtttcagggcatgagcgccttatcctatcctgatgtctcctgggagc

SEQ ID NO: 1888481 - DNA, 4001 bp, Homo sapiens; identical to SEQ ID NO: 1562543

SEQ ID NO: 1888482 - DNA, 4001 bp, Homo sapiens
cagggctgtctgcagagcggtgtggcgttcccagggccccaaggtgtggtgtgcgtccagctcagctgcttcctctttcagggttgacgccatggtggacctgctggacctggacccactgaagaggtcgggctccatggagcagaggttggcctccctggaggagcaggtgggtccgaggtcggggcctccgtcaggaggtgccactgctgggcctggtgggcggctctgccatgtggtggcaccaagaaggagggctctgaggagtgatggtgaggaggaggccggaacgttggggcagccattcccagctggaagaggcaccctgtgtgtcctccagaaaaccccgcccaagggtttctgtgactgagttccttctgtgtgcactgaggcctccacggccgggctgtgctcctcgctgctcccaggaaacagagtgcttctcccctcccggcctccagggaggctgtgggactctgtgcctgagccctggagaggccgcaagaccgaggtggggaggacttagagacggcctctcagggtctgctcccaccaccccatcaacgtccaccagctgggccgggctgtgctgtccaacaacagcacctgcggccacggcagcccctgcgggcagtgctgagccctgtggatggctcagccaccctgtgctgctgctcccagccttgctctgtggggcagggctgggacctgtgctgctggggcatccaccatccaccagtcctgcccgttgcacccaggggtctgcccaggccgccctctacccctgtcttggccatgctgggacccctgacagggtgcccagcactgagccacacgagtgagacatgtcccactgtcccctgtgggaggcgcatcagcctctggggaggctcctcctgggaggtgcaggaaccctggaagcctctggctttggcggcctgtgacctctccctgtggtgcagaattgcctgactgtgccttcatgctggctccatcctctggcttgtccagtgcagtgacagtcccactgttgtgtctcttggggaggctgcaccatcagatgtgtgacttggcagcccccggggggagccgggtgggcctggggcagcgttctggctggcttggtggctgcctggggaggacgtggtgtctcactttcaaagggcgcaggggctgagtgacaggggtggggctcctggctgggggagtgaagtctcggtgggcagtggggtgtgtaccatgcgtgtgggtggcaggtgctcactgtgtctcgggccatgccttccaggtggcccagacagcccaagccctgcactggatcgtgaggacgctgcgggccagcggcttcagctcggaggcggacgtccccactctgggtgagtgggtggccaggccagcagctggtctccagccgcctgtttcttttgggtctggggtcagttgggaggagaggcagctgggggtggggggctctgtccaggaggaaggcactggctgcagcctgttccaggcagggccagcgccctcaggaactcagcccacccaccgacgctggcgccgaggccccgcccaatccctgacctgacctggttcctggacgtccacggggaggcctggcctgctgtgccctgagctccccacataccgcactgcagagtgggggtgcgaggcgggcggctgcagactgtgtctgaacctggtcacgtaggctgagtgacgagaagcaaagtctgttttcctaaattcgcagccggctatgaaatgcacatcagtagccttcctcgggctgctgagtttcgccggccctcaaggagcatatttgccctcgtaaccgcactgcgagttcagctcattgccgagggccctgactgccgctgcacaaagaggcaggtgccggcggggacgctgcctgagctcccgtggctgtcctccctgggggccctgcccacttcagagctggtgttcgacctgcatggccatttgggctcggggaggtggaggagcccagatgttttggcggaaggaccacagaggaagtccttgtcctgcgggcgggcacctgagcccgggctccgccttgcgtcacgtcttcctgactgtccccagcctcccagaaggccgcggaggagccggatgctgagccgggaggcaggaagaagacggaggagccgggcgacagctaccacgtgaatgcccggcacctcctctaccccaactgccctgtcacgcgcttccccgtgcccaacgagaaggtgccctgggaggtgagcgcctgcccaagcccaaccaggcggagtggccgggcccctggggaggggagggcggccctgtccccatccatctggtattaatcctggctcccagccactgcagccacagggggatctgtgcgtctggcagcccctgtttgacatttgaggaaaccgaggcacagagaagtcaagtcacaggggcctcacagctggaggtggtggaggggcctgaggggggcacactgatccccacagagctcgaggcttaggctcctcccatgaccatcccagggcccagccccccggccccattcccccaggtcatgccctggtcctagaccccacccaccccggtgaatggctctggcccctttccaggtgccaggcatggaagagagacagagacacagagacagagagatggctaatggcccctgggagacccccgccctcctggtgcagggcttctctctggcctatccagaacattccaggctgctgcttccgctgcctccccttggtctctaccacatagaatcctccttgcctctagggtccagcttagccccctgccccactctgggaagacccccaaggcccccaagtcacggccacctgcccttcagctggccccagggtgggggtccctgatcccagcccccggccctgcccagcccccagctctgcctggcacccggatctgcccagcttggagcttctgccctgcatgttgggatgttggggtcgggttcagacccagctgagcagccctttcaccctggtgcctggcccagctttgcagtgggggtaaaaatctgagggaaaactccctgttttgcgacagacggagttcctgatctatgacccacccttttacacggcagagaggaaggacgcggccgccatggaccccatgggagagtgagtatgagccgctgtccgtgctcccagctggccccaaacccagggcctcctaggggctcccttgagaatcccagtcagagcccagcccggggaggtccaggtgagcaggaggggcccgtgggggcctgaaggggcccagctcctactgttgtgtacacccagcctgcagctactcggctgggcccttggtgggggggtgatccctctgcctgtctgctctgtcccacctgcaacacgggcacacagacacgccttctcctctgctcccagcaccctggagccactgtccacgatccagtacaacgtggtggatggcctgagggaccgccggagcttccacgggccgtacacagtgcaggccgggttgcccctgtgagtgtgccccctgcgggccccgccccgtcagcctttggggtttgcctggggggcaggtttcctctctgggcaaaggaagcatttttctcataaaacaaaatcaaaaaaagcacgtgagccaccgaaaggaagaaaacatcaactcactgcatctccgtagcccccaggactgggcttgggggcgtgggacttgccccctggcctcgggcaggccctgccccatggtccctgccgtaatctggggacgtggatttgtctgtgtacgtggggatggctgtgctgggagaggacgatgcctcagaggatgggcaggggctgtgcggcagggaggggacacggagatgggcactggcaggcttacctggccgggaaggtggcctcgcctggcatcctgttccccacaggatcggcgctgcacccatcacacaggtgaggaaacccaaaataaag

SEQ ID NO: 1888483 - DNA, 4001 bp, Homo sapiens
actcctggctttacaaaggatgacaatgttaacttactaatatcttacttatatgatttttaaaaattaaaaaaagaacactcataataaagaaaaagagccagcggcggtgtctgctgggggcactggggattccggggtgacctgcctgtgggctccgtggcccctgcgtggcctggcagccatggcaggagaaacaggcacggggcggcggtggcagttgtgtgtccccagcacgaatccacgccatccaatgtcaacgccgagaacaaaacaaacattaggctttttagaacaacatttagaataagacaagttggagaatgaattgtgattaaaaattagtcatggacatgatgcccagtctagaaacagatgaggcagacgcctcgggatttgaaagctgcgggaactgacagaacacagctacacactcgcgacttatggccctgtcaccactggacagtggtatggacagtttatgaactaaattatgaaacacagaaagtacttaccaattaattaaggtaatgtttaataattaccatcaaaacagcacacacaagtcaaactcctagcccttctacccagcatggggaattccctacacttcccggagacgtgatgtggcctcaccaagtccaaaaccctattcaagggcgctgaggggttttgtggcttctgtgtgtaaccttggctctgactgccttcaaatggtcgcttgtgtttgctttttagattcagtagttctattaaatccacagatatgtgcagccatggctgcagacaactctggaacattctcatcccctcacaaggagccccccacacccttttccagcccctccctcccaactgggcacccccgggcccacttcctgtctctgtgatttcccgttctggacactgcacagaaatggactcgtagagccgtggcctctgtacctggctttttctcgcagcaccgtgtcctccgggttggtggtgtggccgcgcggctcagagcatcccccttctcatggctgagtcacacttcatccgtccatttgtccgatgatgggcatttgccagagggcgtgattctgaagaataacatctgtcctacagcgagtgtgacccagggctgctttggaggcagaatcgggcactagatgccttattttgtggtgaaaccgaagccggcttctgatgtgagcctcggtgcagccggacaggatcttccaccactggtacatccgacgtggccgcttgtcttcctcgggtctgggtttcagagctcagatccgactgaggagtaaccccgcggattcacactgacccggggcccgcggccgtgcctccagaccagagcatgtgatcacaggcgtcctcgtcctcctcccagcgagctggcacgggctgcatgggaaccaaatcataacccaccattaatggaggtggctccagatgtcaccctgactgaccgaaggagtgaggagcccaaggccccatgggctctgcccgccctgcctgtcactggacacctctgtgatccctccctctcccaaggccctgtctgagcccctgctgcaggccggccccacaactgcctgcagggaagcaccgggatgaggcccctctgctgcctgaactggccacagccctgaggctgctgaatacagaggcacccgcctggcctgcatgtcagcaggacgcctgcgtgtgcatggcttcgacctccatttcctcatcttgagatgtggggctgacgctgacagctcggcaggtgggctcctggggaggaaaggatccaggggagccgctcctcagacccctcaaaccgagccatccccaagcacagatgcatccttggtaaattcaggtgagactcctaagacaggacacagcaaatttgtttgcaacaagaaacagcttctgcttctaggagaacatctgtgaacgagcaggtcctgcaggtcctgtaggcacctcctggagtgacctcacggccgctgacctcacagctgaagacacaatgctgagagaagaaaccaggcacagaggccacagcactgtgacgccatttctgcacagtgtccagagcgggaaaccaagctcctgcctccagcaggcaccagcagcctgagactttttctctgattgtttcaacctcttaaaagtggacttttgtaccccggtgttcatagcagcagcattcacagtagccacatggaggaaattccccaagtgtctgtcagcggatggacaaacacaacgtgtccattcacacagcggagcgttactcggccttagaaaggaaggcgattctgacacacagtgcgacacggatgaaccttgagtcactggagtctcagctaaggcagacacaaaggacaaataccgtgcgattccattcatatgaggtccctagagtggtcaaattcatagagacagaaagtggcgtggtgggtgccggggctggggggggggggggggggaggggggagggggtgatgtttactgggtgcagagcttcggttttgcaggatgaaggcgttctggaggtggatggtgggggcggccacacagcagtatgaatgtgcttaatgcccctgatctgtgcacctaaagatggttgaggtgggaaatgttatgttatatgtattttaccataatttaaaatttgaggccaggcatggtggctcatgcctgtaatcccagcactttgggaggctgaggtgggcagatcacttgaggtcaggagttcaagaccagcctggacaacatggtgaaaccctgtctgtactacaaatacaaaaattagccgggcgtggtgccgcacacttgtaatcccagctactcgggaggctgaggcaggagaatcgcttgaatccgagaggcagaggttgccgtgagccgagatctcgccactgcactccagcctgggtgacagaatgagactccatctcaaaaataaaataaaataaaatttgaaattttttttaagcaaacaactaatttacattttcctggaatagaccaacacatatgtgactgtgagaaaatcactccccactttggccccggctcctcctctataaattttggaggtagcttctggccaatcccccagttccctggcgatgtctgttgtgtcctaatatccacccacttgttcctgcagtgctctggactgggagtttttctcggtgggagaagattatttcctggtggtggccaactccttcgatgggcgtaccttctcggtgaacagtattatttacaggtaatgagctgccgaggccggcctcctcccagagccttgcttccccactgtgggctcaccgaggccggcctcctccaagagacttgcttccccactgtgggctcaccgaggccggcctcctccaagagacttgcttccccactgtgggctcaccgaggccggcctcctccaagagacttgcttccccactgtgggctcaccgaggccggcctcctccaagagacttgcttccccactgtgggctcaccgaggccggcctcctcccagagccttgcttccccactgtgggctcaccgaggccggcctcctccaagagccttgcttccccactgtgggctcactgaggccagcttcctcccagagccttgcttcccccgagggctcaccgaggccagcttcctccaagagacttgcttcccccgagggctcaccgaggccagcttcctcccagtgccttgcttccccctaagggctcaccgaggccggcttcctcccagagccctgcttccccctgagggctcaccgaggccagctaccccccgagggctcaccgaggccggcttcctcccagagtcttgcttccccactgtgggctcaccaaggccggcctcctccaagagacttgcttccccactgtgggctcactgaggccggcttcctcccagagccttgcttccccactgtgggctcaccaaggccagcttccccccaagggctcaccgaggccaacttcctc

SEQ ID NO: 1888484 - DNA, 4001 bp, Homo sapiens
actaaaaatacaaaaaaaaattagcctggcatggtggcgggtacctgtaatcccagctactcgggaggctgaggcaggagaatggcgtgaacccgggaggcggagcttgcagtgagccgagatcacgccactgcactccagcctgggcgacagagtgagactccatctcaaaaacaaaaaaaaaacaacaaaagcaaatggtgacatcgagcagcaacgaaagggtggcttggggacttgggcacagctgcagagcacagcaatccggccgacagcagttcccgtggaaacacccggggctccacaccagtcatgtgtcatcaggatcatactggtgccctgacatgaacgtgcgccctgctggccccaggctcacacatgcagagccccagcacactggagcatgtttgaggagctttgccagaaccaggaagggatttgaaacgttatcacacaaggaatagttgcaggacttgaggctttatcctgaaagaagacgtaggcagtcacttccaatcatctaacgaatgagctggtggggggcagggggcgggcctccagggggtcttgagagcagagtcgcgcaccctggatggaaaggcaccacaagtgactttctcgtcaactaggcaaggtctcctaacagctgttgtgccacggagaggctgctgtcctggaggtcctgcattctaaatcacaaagtgaggtgacaagagaaaggatccctgcagtgggttggggagtgcgttttggagattatcatcctagatctaccaacaccgtgatcctaaagcccctgtgataacaccaagtccaatttacagtgtcttcttcacgacactgcaccaaggtgctcaagatgccccagtgccccagagcgtacctggccagctgcgtgtcacccatgccatcctctccagctaagggtccccggatgtttgacaaaaatcctgaaaactgcaggagtcaggctaaagaaaaaggctgaaagaaactgagctagctctagaaacagaaaggaatttttttaagttatacttgtcttcagaagtattcaagatgatactgcacttacgaaataaaaaatgctactaatgagacagagagcttggacattaaaaatgcaattgctggcattaaaagaagacattcattaacatgactgaaatataaagttaagagtatcttctagaatgtagaatgaaaagagacagaatcaaaccaggagagtctgtatctggctaaccaaagttctagaaaaaaaagaagagggtgaggacagtgatggaattgtcagagaaggcttgaagaaaaccgcccagatctcatcagactgaaagggcgctgagcccaaggagcgcgagagcaaaggaaagttaccttcaaagcacacaggagccgcggcagcctgggatttcccatcggcagccctggatatcaggaggtaggagggctcagtgttctgaaggcgagtgatgtccacagagcccccgcaggacaaggacgctggccactgccatgcacggctcccacatgtcagtggcttcctgccatattgggttagttctcatatcaagtcagacaaggagcacacacggtgggaagcagcaggaaggggctgacctgacctgtgctcacagcccatgggccagtgccagtcacatgtcccagcctagctggacctgtactcacgtgtcctcacagctcattggctaatgcttgtcatatgacccagcctagctggacctgtgctcacgtcctcacagctcattggctagtgccagtcacatgacccagcttgtccctgtgtcacgtgtactcacagctcattggctagtgctggtcatatgacccagtctcctgtcagtctgagacctgtgggagccctggactaggcggtgttcctggggggtgcactggcaagcccaggtactcaaccagaatgagaagatcagaactggaagtggtggctccacccaaagatgaccataaggaaagttctggaatgagaactggtatgtgtcctagagagaagccagcccagatggtctggggtcagggagggcataagagggggtttgggggctgtggagtccacggagcacaaagtgtgtccagggatggcgtgctgaaggagtgacagaagcacagactgcaggagtcgaggaaggcagagacacaggggccaggccaggacggccttcctgtgcagcagccgctgaggtgggacaggaccgaaagccccagggtgcaggagcgaggggctcctgcgatgggaagatgggagagctgggagcgttctcgcatgcagagctggtgtgttttcttcctctgggaaggaaggaggggagggccatacccaggaggggacaactagaaacttgttgaaaagcagcgtacatagatcacaggtccaaggacgaagcaggtgaacccgtcctgtgattttaagcatgaaaggagaatgtttgcctggcatgggggactgccccagggatggcacagttggtcatcccgacatagaaatcgcctgggtgggtggtgccatagcccggcccctggctctgggggctgacattaccgtaaggtcaggaccacacgaagctgatcctgatgtgtcactcagagaatcgccccgtggccgaacccaccctgggcgcgggtgttggtgtttattagtggaggtacaacccaggctgcttgggggaggggagaaggagagcagaggccctgcatctccatcccacaccctacaccgtgggtgaagaggcgaggccagaagccgcccaccaggaatcagaggagctcccagcagcacccactgaggaggacagttgccacagaccctaagcaggagcagctctgccttcaggtgcccagaccaggtgcaggcaggcagcctggcgctcccagataaacaaggcctggcagccctggccactgccctgcatgtggagcacagctcccttcactcctgacagcctcattctgaaagccctggaattcctgctgatggcagccttccttgttttcctgttttggaaagccttttggagatttctggaaggtggtctgtggctgcgcatcctcagctggttggcgattccacctcagacccatctcacaggtgtggaaactgaggctcaggagcagggacctggccacaaacacacggcggtaagcggccgagccagggcgtccacaggtgtccctgtgtccacatgaatcgcctcctctgtgcctgccccatggggatggagcctgcagcctggtttgggccgtgacgggagtgcctgggacgcctcacaccatggtggggtctcagcccttcactcatggggcccatccctttgatggactacctgctcttcatgaaatgacgtcgggactggattctgagcttcgttgatctttgtgtgttctggaaggcagtcgggaggtgttcgtggaacgtggttaccgaaaaacacggggcttctgtcacgggtgatgtggtggaggtggcagcccagcccagaaggcggccactctacattttcaggccgcgtgtgaaggccagctttgatctacaccaaggactggagcagtggtcctggagatgcacgggcatcctcagaagggggccagcagcaaaggggcagaaatggaaccaccggaaccaaggggagggtctgggctagcgacccatggcgaagtcccaaggggtgggtgacatccgcctgaaagaaacatcagagaagagcaggggctagagcaggaccacagcagacagaaggaagcacggctgcagctcccaaagcagaaccagaactccgggaacggggacctggctgctgggggcgccatcatggcccaggccctgaaggtgccttaggagggccctgggaaggcgctgggaccacgcacacatggacgggcttcctctccacctggcctgagcctcatctttcaaaactcagtaattcctcaaaactcacaaagcccactttcatgttttgcca

SEQ ID NO: 1888485 - DNA, 4001 bp, Homo sapiens
tatctttacccttaggccgtccatcccggggcctggggtttcctgcgccagtcacggtgggctgtgtaggtggccatgtgttcggtctttccccaggaggtacgtaccatgtgctgggaggcctggaggctgagccgccccccgcgcctatgagttgcaccctcacagcggcggccaaacctcctgctcactttgccccataggaagaggttagagtgaggcggaacgggttggaatcccagctctgacactcactcactgtgggatgctgcacaaatgacttcctctccctgggcctcagtatactcatctgtggaatgagattacagcaacatcccacctcctatggcgatggagtaaattaaggcacaatgcctgtgtgggtttagcccagtgcctgtgcatggcgacagtgcatttctgatggcccctccagcgttcagggctaactcttccaggattaactttcatatcttggatgagagctcatctaggaaggtctcctagcaacccctgggttcccactggtccttccgcctcacggggctcctttttgaacccctcacatcatttccattcaatctcttgctcctaacagcacggcccctattccttctctttcccaacatctgctctcaggagagattctcatacagtgtgcatttgttctagagtgagggtcatcactgggcttctatgaggcaccgctgtgaaccctctgcaccgaccttagccagaggagcaggactcccaccggcatccttctgcgtaagaggccttgtgggtcttctggggctctggaatcaacgccgcttttcctggggccagagtaggtggagctgagctccccaaagcttccagtttgctgcctgctcccacccgcctcgccactgcgcgagccctttccatcccctctgcagagtgagagaagggccgtgagtgaggatcctggcctagggctgtcaccatccccctcacctgctggccaggctaacctactgcaggctgcttcctttccttaggttcacgggtaccgctatttgtccagcgtccatttgcggtggcattaggatgaggtgctctgtgccctctttctcccagtgtgaatctgacacacgcccccaggagagtccgaggggcatcacttctggaggacgccctgggccctgaaagacagctcatggtccaactgaggagcctgcaccttgctgggacagggtggcccaggagatctggggtctgtacctgctcctggaccctctccagcttgttgttctgggtggggccagctcaggaggggcacctgggctgggagtctctgaagcagctgcccccattgctccaggagagggctcagcccttgtcccagctgcggggccagtgggagcagtgtgcagcgtcctgccctgggctctcgctggctctgcgccctcgcctggccagcccgggagggtgcagaggctcactggcagctcttcctgctcccacacctgcctcttcctctgaactggagggccggcaagcctcaaggcttaatgcaagactaaatacagctgtcagcgccttcctctgagctcgcttgggagctgtctggggggacggaggagtgaagattaggtgaatcaccacgccccaaaatagacatcaggtgcttggtggtttgagccagcgtcttgcctggtgcctctgctgtcctccgtggactgcagcccagccagcctaggctccaaccccaacccggagcacccccaggagagttacctgtaggctggaggttgagtagcaccccaggaagaggtgtgggttggcaccagcagtgttctgatggcaaggcagcccccaggccatgctagggtggtggcatagctgttgtggcagctgacgagcttgctgttctccagggaagctgcttctgtggagaccgcaggaagcacaacagaaaaaaacccacaaaacgagcctcagagcactcagcagcagggttttctttgcccagaactgaactggtcctgcatcgtggcttaaattccacctgaattggaacttctctggcatgccgggtgtgggttcgttcccgagcacctccacccgcagctctacagaagcacgcgcagaaggcactgtcacctccagcagggcctggccctgacgacctcggctcagccaccccatgggagctacattgtccttgtcctcaccttcattcccctcaggcgggccccccggtgacatgacatcacaagtctttgggcacaggaggagggacatacctgtggagacacccgggtgctctagaatatggcgcgggaagttcatgttgtactccgctggaccccacccccggcgtgggaagttcatgttgtactcaggctgacccccaccccccccacgagagaagtccatgttatactcaggctgacccccactcctggcatgtaaagctggtgttatgctcagctggacccccacccccggtgtggaaagctcatgttatactccactggcccccacccccggcgtggaaagctggtgttatactccgctggacccccacccccggcgtggaaagctggtgttatactccgctggacccccaccccccatgcggaaagttcacgttatactcagctgtgtccccacccctggctcagttactttcctatttcttggttgagacactaagtattggagaatgttggcacatcaaagagagaggagaaaacatttcaagttttgggtgtggaaacagaataaagaagagagggctacatgcacacccatgggtgctaatatttaaggaatgaacatttcctaatctttgcccccaaataagccaaccaatgtgaaggtgggcacaggcaggccgtaaggttgtcatgagagtgttggacggatgccccaaaatgcccctgctcccggccgttcactgcaaagacggctaggaaggactccttccagcatgggtctgtcttctgatcactctttggctgttttctcatgggttttgattgtgtctccccctggcagactgggacgagtgtgtggacagcgcggaacacgactgctcaccggctgcctggtgcatcaacctggagggctcctacacctgccagtgccgtaccaccagggacgccaccccctcccgcgcaggccgggcctgtgagggtacgtgtcgacccccctgccgactctgggaagaccccctgcccgagaatctgggggtggggcaaagcccaattctccataggcacagggctgaggacctatggtaatgttaggggcctacagaaatgttttcatttcaatttattttaaaatcagaagaaagaaattaatagaaggatagtaaatatacataaaacaatgaatctagcttggattacactcatctctatctaaatgccattataaaatgtaatttttgatagattgttaagtggaggggtgcaggggtccatgaaggccaagttccttgggcccacagaagtcaggatgcagcccggggtcgagggattccttccccagtggcctggagcccgagagggtgtggcctggagcccgagacagtgtggaagcccagagaagctgcagagaggcccgatgggggccgctgagctctagtcctgctgtatcggcccccagtcttttctgtggaccagttctgatgagtgggtcggggatacctgggatgctgaattgagcagcaggaggaggccacgtagggacctaaaatgcagtgactgattagcaatgtcggcccggacacaggcgtggcagaggcgcccagccactggcttgccagcccctgctgagggctttctagctggaaggagcagccgagaccagttccctggggagaatattccttagacactgcgtgtgctgtcctgcttcctaacatcccacaccttgtcttctgtttttctcattcgcctaatgtcctgcaagtcgatgacagcatccagcaccaagtcccacattgagcacaaatctgggggaaa

SEQ ID NO: 1888486 - DNA, 4001 bp, Homo sapiens
tttgtgaggtgactagctcatgagggtggagccctcagatgtaattagtgagtgtctttataaagtaggcccaatcaagaaaggtcgggagacagagagtgaggtatgtacaggaaaagtccacatctgagccacttgagctctgggcaaagagtttcaaagagagggaacaagtacaaaagctctcgggcttttttcctcagcttagaatgtcctaggagcagtaccacatagtctgcaacaaaccagaatgctcctggaggcaaataatacaaagctttgatatggaaagacaagtcactatccagaggttggtgagcctcatatctgaacaaagggttaacccagcatcaatgattcatggcattaacttagtctaaaacatccaaatgcacttctgagccacacttgccatccatacatctctggctaaggctgtaaatgggcactgccaacttctgtttctttgtttttaatttgggactaggatacactgggtgagtcctggctccaccagttactagctggataatcctgggaagttcctcatgctctttaattgtttgtaaagcaaaccagcacagagggatggtaatttgcccaaggtcacacaggcagaaactgaactcagggcttttgactgtttcctaactctttctgataactttttggttgggaccaccatggcagaaaacaaagttggtggttagcgattaaccaaagaagaggaccagtgtggataatcagtcagaattaagtctgtattcactaatgagtgttgccttttacagatgactttttgagcatattcccctctcttaacattgctgcattagctcatatctgctaggggtgacaccctctctctgacctgcctacaacatagacatctccacaggcacaatcatcttgtcgggacagaggctcagcgtcaacacacgtgctttttctactagaaactctgagaccccaacaggccacaaaagcccacatcctcagatgttcaaaacacatctgcttacagaatatgaaacacaattttcttagactagaggacaacctgatggagaatttcagtaatcaccaagttacttatctaatgcgctggttcatgatttatttggacacatacctaagtatcgatgaagtcgtattaaaatatgtaccagcctgtttttacttatttttactttcattttatttcagagcatttaatgcggtttacaaatcaatcacatcttccaaaaacacactgtgttgtttttctcctcaaagcagtttttcatacattgcatcattttctgttcataacagtcccaaggactggatagggtcggctttgctgtctccattttaatgacaggaacttagatgtggaggccttacgctgtccaggaaggggttttacagacgttacttcgtttggtcttctcctcccaccctgcacggcgcaaagagcccatcagtttgcggaagtctggggtggaggacagtctggagtgacaggctgctaccagaccagtcgatctggttcgggctgtgacataagctaggggtcgaagtcaggggcacccgcacaggcggacctgcctggcacctagccaaggcgaatccaccttcccggccagccaccagggccttgaattggcaaagtatcgaatcctgttgtgtgtgaagcaagctcttcatgcgacaccttcagggcgacctcgggtcaagaactactcattgtgctgcttggacgcgccggggcccgagtcttcgtggatcggccaggccaggagtgaaaggtctgggagttcttccggccaagagcacccgaagagccactgggatcagaaatgcgccccggtggaccccaaaccctgcagccgggggcggggggtgtcgtggagtgtccgctcgccccatgccgtgaccgggacaaccggtacagcaaactcacatggagccccaagactctggatccccaagactctggatccctatcgccccgccccttctgcaggccacgccccttccgccggtcccagcctcgcgcgggtcggccccttccgccggcctttccccgagccccgcctcttccgccagccccgcctcttccgccagccccgcctcttcctgcgccatgtgggcctgaagcgcgtgtctgctgtctgtgccagtgctcctgccgggtcccctcaggtgtgtcgtttccgtcgcgcttccgccctctcggccatgggggtccccaagaggaaggcctcgggcggccaggacggcgcggcttcctccgcgggtgcagccaagcgcgcccgcaaagaagagctcacgggcgtgcggttcaaggctcagctgaaggacccgcagggccccgggccaggtgagtccggggcggcaggcgcagggtcgggagcacaggctggcgaggcggcctccgtgtgccgggcacagcctctcctttctgcagctttcgggtcacataggctcagtggcaagcctctggtttgcagaaaactgaggttcaggactgctgtgtacttccttgctctggactgtcggcgacagcgagagggccccgacttgcttgattgggaccgtttcatgttacaacacatttatttcccttgcccaggcagcatccctcagcgagctctaaaacctctttattgcagttgtcagggaagtaaatgaagtgtccttctctattgagtccttactgagtcggctcaggacggttcatgagacagtttgctactccttgggccgtcagcaccgttttcaatagcttccatcccccaacactcatactgacttgatgacttgtaacaagctactagaagccaccacagctacttgtcagttgaccaggaatgggccagtgactgagatgtagccgactctataatttaattacactttttgtaaagtgtgaccacccttcgcgactacttgtaatcgtttggaaagtaacatggtttgggaaaaacgcaattgaacgtgttgccatgtggaagcattgctctaaaataaaacagtggcagtttttctcccaggttaaataaacgattaaattaatggccaaaatatcttcaacttccaatttttgtcctcatttttttttttaaacgacagggtcttgctctgttgcccaggctgaagtgcagtggcactatcatagctcactgcagccttgaacttctgggcttaagctgtcctcccacctcagcctcccaagtagctgagattgtaggtgcacaacaccatgcccagctatgtttttttttttttttttactttttgtagagatggaatctcactatgttgtccaggctgccctcgaactcccagtctcaagcaatcttcccaccttgtcttctcaaagggctgggagtataggtatgagccaccacacctggcctgtttttaaactttgatacctatacctgtacttgctagtcacagctaggaagatgatacttagttagcatagagttatttatttccgaattcattaagtattactagaggctattatttgctacggtagagataaagtgatgaataaaaatgtcaaaaagcctctgccattgtggggtttacaaacagtcgagtggggcaggcagatattggtcagtaaaatcacatacatacagtttcaagcacgagttttccaaaggagaggtacatggtgcctgagggtgtttaacagaccttggatctaatctgggagctcaaagaaggctcccctgaggaagtggcttttcttttcttttttttttaatcatactttaagttttagggtacatgtgcacaacgtgcccctttgttacatatgtatacatgtgccatgttggtgtcctgcacccattaactcgtcatttaaccttaggtatatctcctaatgctgtccctcccccctccccccgacccgacaacaggccccggtgtgtgatgttccccttcctgtgtccatgtgttctcattgttcagttcccacctatgagtgagaacatgcg

SEQ ID NO: 1888487 - DNA, 4001 bp, Homo sapiens; identical to SEQ ID NO: 1562557

SEQ ID NO: 1888488 - DNA, 4001 bp, Homo sapiens
ctccgatgagccgggcactatgcgaagtctccggctgcctgcgggccgctgtggacgccccggcgggggtcaggaccgacccccatctgcgcggcgaacgagcccggacgccctggccgcggccgccgggtccccgcccaggggccaggtggccaggttgcgtcgggaggaggaaatggaagcgctctgagcgactagcgagcggcaggagccgcctcccgcgggctttcctcgcgggccgggagcgtctgccgccgacccgaggaccgcagggccccgctcgccgcccgcgcccgtcagaaagccgcgcgtcgctcccgtcgctgtcggggtcgtcggctcggggagtcgcccgccgtccaccggtgaacgggagcgcgtcctcccctccgagggactaagcgctcgcgccacgcatcccgccgcgccggaagcggggactactggcggcccagctgggcaggaccgcggccgaatgacccggggcgaccccgcagcaagggcgcctccggcaggcggcaaagtcccctgagaatcggcgcgctcctcgccgcgacggactccacccggccggggcgctcagcctcctcgccgtggcccccagcccggccgcctcccctaacggccgccgcaggctcccctcatggaccgagagcgcgggcttgcagcgcggcagcgtccgttcggcgcgcggctccgggcaggcccgccctcccccgtccccctgcgccgcgaggccccccccccgccccgccctccggcgcccggcgcccaatcagagtgccgcgcacgtgacgagcgatgcctgcgatgacctcatccctggtgtgggatgacgtcaaattcaagatggatggaatcacagcggcagcggcggctgcggcgcgcgcgagccgagtgtgagcggaaaggggcccggcgtctgcctcgagactgaagaccggtgagtaactgtcacgcccctagctctaggagaactgcggggctccttgggaggctacagcctccccgcaaaacgcggcctttcctgacgtaactctgaggtgatttctctcctcttttttctccaccagcgggttgcgggctccgagcgcttctgcgcgtgcgcgggacctgggcgctcaccgagcatgtcccgggttcccacgtagccgattgtaccttcacactgcgcacgctccctgccagcacttggcctcgccctcgcgaatgcgcatgctccattccctcacgggcttcactcttcaccctggccgagctgcccctggggtaggggacacgcctggcccaggcgcgcgcccctcgcgcggagcggttgaaacgcctcgtggagaagggcgcgttctcctgttccgggcaggggttgggggccggcggcccgggccgcggggtgtgcgcggaagctggccggcggccttggggaccccgcacctgccgcgacccgccgctcccttcacggtccgggacctagccccgccgccccgtcctcggcccggtggccggagcgtgaccgctcggtgcccgctggacgctccctccccgcccccggcccctcccgcggacgcctggacctcacagcgcgttttttttcctccagagcccccgcagaccttgtctgggacttcccggcggtcccgcagagcatagcaccctccgccggccaggagccctgctgctcggccggcgaccgtctccccgcttggaggagcccccttccccccgtccgaggtccgcggctggaggggcagggagtcaagacgccacccgtgccggccttagagacgcccgcggcagccccgccacatctcttcccggcttttcgggaacacgccccgtagtccatcctcagcggctcctgcttttccatcccagcacaccgctgggggctcgcactctgcccccggttgctatgcggtcccagccacgagggctctgcggttcgggagaattccgcaagagcgcgcgttcggaggcggggtgtttttagacaggtgccccggtgggattgcctgaccgagaggacggggaaagttagacttcacacggcctggggtttttcctttcgtgcaagcgctcacagccctggcaccgagcctccgagggcacgcgtgtgttacaaaatagtccagcgattgttcacacgatgaccctgagtcctcaattaagcagcttacattacggtcctcataccttgtttaagaagacaagaaagtgggttaatccattttagaaagatttctcatggaaaattatcttttaaagctttcctcgtgtacttggagtaaatgatgatctctaaggactagtagtcattaagtttaaatttaagcacccctaaatattgatgttaaaaagaaagtcaaaatttgaagtgctggtttacttaaaagtaactttttgtttatttttcctttttaacactttattgaaagtataatgtgcttcattctgttgaaatagaagttgaagaagatataacccctgccctcgaggaacttacactgttgaatattagatgtgtacactctgaaggaaaaattgtaaataacaaaattggggttaagttaagaaggtctctcgatggaaatgagataattaaagggacaattttttcttttcttttctttttttcttttttttttttttttttttttgacagagtttcactcttgttgccccaggctggagtacaatggcgtgatcttggctcactgcaacctccgcctccctggttttgcaacctccgcctccctggttcaagcgattctcctgcctcagcctcctgagtagccgggattacaggcttccgccacatcgcccagctaattttttttttttttttttttttttttgtagagacggggtttcatcctgttgaccaggatggccttgagatctcctgacctcgtgatccaccccacttggtctcccaaagtgctgggattacaggcatgagccactgcgcccagccgaagggacagttttagttgtccgcaaagccaatggaagtagagagagcagattataagctatgtaagagctaggtttgaccaggtcacagtgataggctataagggaaagagaagaaattttagggtctggcaacacaccaaagtaaatcgggaatatgtgaggacaaacagatgtgggagcagggacgagagttgtggagtttaagtaccatgctggacctgaggatatactgtgatggaaccgttcagtaggtacctgagaggctggagcctcaagagtctaaacagagatacagatttgggaatcatcgtccagtagtgattaaagtcacaaggtctaatagaaaaagcaaagaatactgccacgttttggggctctgtaacggatgctggagaaataaaggtgagccagtccaggtcttgagcctcaagtttgatgatttctctctttgccctgtacctagcttgccaggccttgtgctgggcatcagggatacgtgcatgcaaacaagggttctttctttagggagtcccttgggggagacacatgtaaaagaagattaattgaagaagttgtggtgttattacagagagatgaagtattgtggtagtttagatgactgagctgctggctaggggcaaattacaaaagctttgtagagtcggtgacatttcaactggatctttcgaaagaagttagccaagtaaaggagagggaagagagagattttgggtggcagaggctggatatgcaagtttgtagagtagatggtaagtagtgtccaataagggtggagagatgaattgtaaccagagtatgaaaagtcttgtatgccagtctgtagtttggattttctttaggaatagaaaaatcagtacagtactccaaagcagggcagtgatgtaatacgctttacttcagcaaaacaactaacagccataattttcactcgtgcatttaattggagtgaagagtacagaaaagtcaaatctttattgttgtggaagataacatgttgagcattgata

SEQ ID NO: 1888489 - DNA, 4001 bp, Homo sapiens
tgaattgcattccaccaaaaagatatgttgaagaaaagatacatactcacccccagtacctaagaatgtcaccttatttggaaacagggttcttgcagatgtaattaagtgatgatgaagtcatgctggagtaaggtgggtcctgaatccaatgaccaaggaccttatacgaggagagatacagagaaacacaagaagatgaccatgcaaagacaggcagtgattggagcacggctggtgcctgccaaggagtgccgagccttgccggcatgccagcaaactgggagaggcgaggagggaccctaccctggtgccttcagaggcagcatggccctgtaaaatcctgcacctggatttctggtctccagattgtgaaagatgcattctgatgtttaagctccctgcttgtggtaattaattacattggccacaggaaactaacagagaccccaaagaaaaggaagggaaacaaggggtttgaatcatcactccagttgagaattgagattttctcaggccttccttcgaaaagatgtaagtctggttgaaatggatacaggtaaaatggcacagaacaagtctgtgccctaaagaacaggtactaatactgaacccgttgggaaactccaattcttaaacacggcacctttcacaacagccagtgctcttgcggtgtttacatcatgctgggcacctggctgttgtctgcatactttacactcatcaactcaacccttccacaacccatggggagaccgaggcacagagagtttaagtaactcactcaaggtcacacagttgatcgccggcggggtcaggatgtgagacgtgggcccacagacttttttttttttcagggtctcactctgtcacccaagctggagtgcagtggtgccaacatggttcactgcagccttgacttcctgggctcaagcgatcctcccgcctctgcctctcatgtagctggaaacacaggcgcgcatcaccacgcccagctaattttttttattttttgtagagacaggatcttactttgttgcccaggctggtctcaaattcctgggctcaagcgatcctcctgcctcagcctctaaagtgctgggattctaggcgtgagcctccgcgcccgggcacaggctctttcttaagcactaagtgatgttgcctgtattcgttttctggggctgccataacaaattcccacaaaccaggtggctgaaaaccacagaaatgtgttctttcaaagttccggagagtagaagtccaaaagtgaggtgtgggcaggaccaccctcctctgaagcccccaggaagaatccctctgcaccttgcccagcgccccgcgggcgtcttcagtccttggtgctccttggcttggagcagcagtgccccagtcttggcctgcatcttcatgcggcctctccctgtgcatcccccaattataaggtcacagcattggatttaggactcaccctaatccaggatgacctcatctgaacctgaacacatctgcaaagactctttttccaaataaggtcacgttcaaacatacagagagtttgggcttcaatctacctttctggggactcaactcagcccaccacagggctcaggcctgccccaggaatgctgcgccctcgggctgctccaggctggaagggggcaggaagcagagccggcctccagggctctgccaggggccacactccagcccatgcactggggaccggagagagcccagcgggaggacagttggaacagaggctctgactaccgtgggaacagctcacacacctctgtgccgctctgggtgtgacctgttccgtcccttcacttgatttgtcctctgtatctggaagcgtcctctccatagtgcagcggtttccctgccaggctcccgggttattcccgatgatttgctttgctgcccagcacaaaggctagcatttatagccactctccagagagacccccccagacccaactaaagcagaatcacaacagaagcctagagaggttgcctggcaacgactccctattgtgcctgttgtgacctcgccttccccggcctcctgcagcgcccctgcgcactgccactgtcatcagcctgaggtgaatgccagtgtggggcttcgcacggctctgtgccctgtccccttcaccccaggggctaaagaccctggaggagctcggaatcccaggcttccagagcctgactcctgccctttgcccactgcccagcaaagtccgggctctacgttccatcgccacctggtcacccggtccctgccctgttgttcctcttttgcaggacttggcttggctctcttgtcctcagtccacgtcttgtctcaaacaaaggccctccccagacacagtacgctccccagtagtgacatgtgaacagccacacatccctgatttccagggacacttgtgacttcgcgtattcaccctccattttaaaaagtcacatttcccatgaagtgctgggtacagcattcaaagcgcatctcctggactgctgtgtgctctgggcagctgccagaggagaccgtggcaggatgtatgccactgtcaccagatgaataaccccttcttagcatacgttgcaatataatcaaatcccatcgtgcctgtttggtgatgttaattccagaattttattttatttttattgtggtaagaacacatgagatctgtcctgctaaaatgctaagtgtccaccgcagcatcgcgactatgggtgtgatgtcctgcagcggagctctagagctcattcatttggcttaattaaaacttaatgcctgttgagcagcaaccctcatttcccctccgtgagctcctagcagccaccttcccactctttggttctatgagttccactactttagccacctcatataagtggaatcctgcaggatttgtcccactgtgactggcctgtgtcactcatcgtgttgttgtgtattgcggaattgtcttcgttaaggctgaatagtatttcactggctgtacgcaccacgctttccattcgttcacatgtcgatggacattggggctgactccacatcttagctgttgtgaatgaacgtgggagtgcagacatctcctggagagcctgattgcaattcttttggataaacacccaggattgattaatgcagctgtggcaggggttcaatgggcaggcgtgttggggctgggggcagggttctgcgtagagctccggggcaggcacagggcatgaagaaggaaagtggggagtgaggaagcgtctctctgagggtagggctctggttatacctggtcccccagcctcaaaccgtcattgtcgcaggctcctctcaaatccgatgagccacaggcctgccctggatgctggtgtccataccatcaccactgtcttgttcaggctgtttaattcctccttgccagcattgcagaagacccccacctccgaccccacttctaatctcttcctctcctttgaacttccacaaggagaaggcttgtggaaggctcaaaacctgaacatgtctctcctgattttgaaaccccaccctgtgttcttgttacccaaggggagtccatacctggacacatgtgcacagaggcccccacctgtccatcctcagccctcacaccagggctctagctgggccccaaaccctcaggtccagagtgtcctctgagccccatgccaggccttctatctagaactcccttcccgatgcccattctttcaagtattcactgagcacctgccatgtccaggccctatcctaggtgccaggaatacaccgtggaactgatatttgggtggggtaactgacagtaaacaaagacacaagaacacagcagatattggtaagagctacaatgagtcaaattcaggatcaggatgggaagaactgaatgaaagaaggagacacaagaagaacaaagaggaaggatatcccaggtggagaaaagagcccacacaaggcccctgggcaggag

SEQ ID NO: 1888490 - DNA, 4001 bp, Homo sapiens
tgaacaaatgaaaggaagaagcccatacagtcaaaacagaagaagtttttgtgcatacacgctcggccctaattccttcactcttccagccattaaggaaacgtcacccagtagtggccgacactcagcagctattccaacacactcttcagtggctgcccaaggcttacagtgaaatctattctttaaaatttgttagtgaaagttcttgaaaatgcctccccagccgtttttagccgttttcgtgagaggtggtgttctgggttgaattgcattccaccaaaaagatatgttgaagaaaagatacatactcacccccagtacctaagaatgtcaccttatttggaaacagggttcttgcagatgtaattaagtgatgatgaagtcatgctggagtaaggtgggtcctgaatccaatgaccaaggaccttatacgaggagagatacagagaaacacaagaagatgaccatgcaaagacaggcagtgattggagcacggctggtgcctgccaaggagtgccgagccttgccggcatgccagcaaactgggagaggcgaggagggaccctaccctggtgccttcagaggcagcatggccctgtaaaatcctgcacctggatttctggtctccagattgtgaaagatgcattctgatgtttaagctccctgcttgtggtaattaattacattggccacaggaaactaacagagaccccaaagaaaaggaagggaaacaaggggtttgaatcatcactccagttgagaattgagattttctcaggccttccttcgaaaagatgtaagtctggttgaaatggatacaggtaaaatggcacagaacaagtctgtgccctaaagaacaggtactaatactgaacccgttgggaaactccaattcttaaacacggcacctttcacaacagccagtgctcttgcggtgtttacatcatgctgggcacctggctgttgtctgcatactttacactcatcaactcaacccttccacaacccatggggagaccgaggcacagagagtttaagtaactcactcaaggtcacacagttgatcgccggcggggtcaggatgtgagacgtgggcccacagacttttttttttttcagggtctcactctgtcacccaagctggagtgcagtggtgccaacatggttcactgcagccttgacttcctgggctcaagcgatcctcccgcctctgcctctcatgtagctggaaacacaggcgcgcatcaccacgcccagctaattttttttattttttgtagagacaggatcttactttgttgcccaggctggtctcaaattcctgggctcaagcgatcctcctgcctcagcctctaaagtgctgggattctaggcgtgagcctccgcgcccgggcacaggctctttcttaagcactaagtgatgttgcctgtattcgttttctggggctgccataacaaattcccacaaaccaggtggctgaaaaccacagaaatgtgttctttcaaagttccggagagtagaagtccaaaagtgaggtgtgggcaggaccaccctcctctgaagcccccaggaagaatccctctgcaccttgcccagcgccccgcgggcgtcttcagtccttggtgctccttggcttggagcagcagtgccccagtcttggcctgcatcttcatgcggcctctccctgtgcatcccccaattataaggtcacagcattggatttaggactcaccctaatccaggatgacctcatctgaacctgaacacatctgcaaagactctttttccaaataaggtcacgttcaaacatacagagagtttgggcttcaatctacctttctggggactcaactcagcccaccacagggctcaggcctgccccaggaatgctgcgccctcgggctgctccaggctggaagggggcaggaagcagagccggcctccagggctctgccaggggccacactccagcccatgcactggggaccggagagagcccagcgggaggacagttggaacagaggctctgactaccgtgggaacagctcacacacctctgtgccgctctgggtgtgacctgttccgtcccttcacttgatttgtcctctgtatctggaagcgtcctctccatagtgcagcggtttccctgccaggctcccgggttattcccgatgatttgctttgctgcccagcacaaaggctagcatttatagccactctccagagagacccccccagacccaactaaagcagaatcacaacagaagcctagagaggttgcctggcaacgactccctattgtgcctgttgtgacctcgccttccccggcctcctgcagcgcccctgcgcactgccactgtcatcagcctgaggtgaatgccagtgtggggcttcgcacggctctgtgccctgtccccttcaccccaggggctaaagaccctggaggagctcggaatcccaggcttccagagcctgactcctgccctttgcccactgcccagcaaagtccgggctctacgttccatcgccacctggtcacccggtccctgccctgttgttcctcttttgcaggacttggcttggctctcttgtcctcagtccacgtcttgtctcaaacaaaggccctccccagacacagtacgctccccagtagtgacatgtgaacagccacacatccctgatttccagggacacttgtgacttcgcgtattcaccctccattttaaaaagtcacatttcccatgaagtgctgggtacagcattcaaagcgcatctcctggactgctgtgtgctctgggcagctgccagaggagaccgtggcaggatgtatgccactgtcaccagatgaataaccccttcttagcatacgttgcaatataatcaaatcccatcgtgcctgtttggtgatgttaattccagaattttattttatttttattgtggtaagaacacatgagatctgtcctgctaaaatgctaagtgtccaccgcagcatcgcgactatgggtgtgatgtcctgcagcggagctctagagctcattcatttggcttaattaaaacttaatgcctgttgagcagcaaccctcatttcccctccgtgagctcctagcagccaccttcccactctttggttctatgagttccactactttagccacctcatataagtggaatcctgcaggatttgtcccactgtgactggcctgtgtcactcatcgtgttgttgtgtattgcggaattgtcttcgttaaggctgaatagtatttcactggctgtacgcaccacgctttccattcgttcacatgtcgatggacattggggctgactccacatcttagctgttgtgaatgaacgtgggagtgcagacatctcctggagagcctgattgcaattcttttggataaacacccaggattgattaatgcagctgtggcaggggttcaatgggcaggcgtgttggggctgggggcagggttctgcgtagagctccggggcaggcacagggcatgaagaaggaaagtggggagtgaggaagcgtctctctgagggtagggctctggttatacctggtcccccagcctcaaaccgtcattgtcgcaggctcctctcaaatccgatgagccacaggcctgccctggatgctggtgtccataccatcaccactgtcttgttcaggctgtttaattcctccttgccagcattgcagaagacccccacctccgaccccacttctaatctcttcctctcctttgaacttccacaaggagaaggcttgtggaaggctcaaaacctgaacatgtctctcctgattttgaaaccccaccctgtgttcttgttacccaaggggagtccatacctggacacatgtgcacagaggcccccacctgtccatcctcagccctcacaccagggctctagctgggccccaaaccctcaggtccagagtgtcctctgagccccatgccaggccttctatctagaactcccttcccgatgc

SEQ ID NO: 1888491 - DNA, 4001 bp, Homo sapiens; identical to SEQ ID NO: 1562568

SEQ ID NO: 1888492 - DNA, 4001 bp, Homo sapiens
tggctgggtgtgatgacacacgcctgtaatcccagctactcgggaggctgaggcaggagaatcgcttgaacctgggaggcggaggttgcagtgagccaaaatcgcaccattgcactgcagcctgggcgacaaaagcgaaactctgtaacaacaacaacaacaacaacaaaagaagataagagcctgcttgagaaaggaggtgaaagttcattcagtttgaagcattttgagttggctttgaagcctcttccatgagacctccaacaatttctctaagccagaaatcacctctttgcactccatagtatctttttcatctcaaattatttaaatctgctgtatttacaagtttgtctttcctttttttttttttttttttttttttgagacggagttttgctcttgttgcccaggctggagtacaatggcacgatctcagctcgctgcaacctccgcctcccctcctgggttcaagcgattctcctgcctcagcctcccgagtagctgggattacaggcatgcgccaccatgcccggcaaatttttgtatttttagtagagacggggtttcaccatgttggtcaggctggtctcgaactcctgaccacaggtgatctgcccgcctcggcctcccaaagtgctgggattacaggtgtgagccaacgtgcccagccgtctttactttaaatcacaaagaaaaggtactaggtcttatctgtctttatatggctctcttagcagtgccttacacatagaaagtcctcagagtttgcactcttgagaaggcagctccatcagatactagaaaccgtcagctaacatttatcaaaacaaggaacaaaacttgtgaattagcagctgaaacaaaatacctgaagtataatatttttaatgttagtagctgattctagatataaattagctccctttgtgctcattttacttgcctcttttttttttttctttgagattgcgtctcactctgttgcccaggctgaagtgcagtgttaagatcatagctagggagcctcgaactcctgggctcaagcgatcctctcacctctgcctcccaagaagcaggtgcgcaccaccatgataggctaatttgtaaaacattattttgtagatacagggtcttgctgtgttacccaggctggtctggagttcctggcctcaaacaatacccctttctaggcctcccaaagtgctgggtttacaggcatgagccaccgtgctggccttttctgacttttaaacaaccccgcagcgtaatctttgcattcctattttacagataaagcaacagaagcctccagcgactaagttaaactttcctggggtcacaaggtttacaagtggctgaataggatttctacagactggttccttcacccggctgcccgccgaagtaagcgggccttactgccctaattctcaataggaccccaaagaggacgcttctttgctcctgaagggatggcaccctctggattcgcggtaacagcaaatggggctctcactcctaccatctcagtgacagtttaaagcgcaccctaccgcaggaaagtgcccatatttgcacacacgcggcagagggcagggctgaaaaggggccctagggtgcagggggcgcgccctcacccggggaccccgcattttacaatattagctccaccgaggcgcacggaaccgcaggcgagcaactgaccttcggctccagcggccccaaagccgggggtgggaacgcgcgacccaggtagcggcatggactccgagcctggcccctcgggggttaaaactccccagacataaaggctccggacgacagaggtgcagccgccgcgtgcccgtgggacactgaaactcttcccttaccttcctcggtagtcctgtgagggaggctggcccggccggctgccctacggtgcggacaggaggtcgcggtcgggaggggccctgcccggcggttgctgctggaaccagcccccgcaagggcccgcagcggccgggccgtttacctcagacccgcgccgcagcctcccggagcccgcgcccaggactccctcacgacctctccagggtcccggcccgacaccaaggggcaggtgaggggtggaacctggaggcacccgcgccagggcccctgagggaggcgggagggggacagcctcagtcctgactcgcagccgaggcgcgacgactccgcgcagtcccgcctgtggaggggcgtgcctcatcgcttgctaaccgagaggcgaagggcaaggggcgaagggcaagcgccggatcctttcgccccctccccacgtgaggccctggaggctgattggccgtgtgctgcggaggcggcaagaggaacgtgtcctggcacgtgccgaaggagcgctaaaggccaggggcggtcccacccgcgaagccctggaaggcggattggctgcgcgaggaagtggcgtgtcctcacttgagctgtctgggagcgagagtaagagataaaggcaagggcgcctgaccgggcctgggcacctcctcccactgcgggcaaagggcaggcagttcgtgcgcggacacaagcactggcggaccgtggccatggcgggcgctgagtggaagtcgctggaggaatgcttggagaagcacctgccgctccccgacttgcaggaagtgaagcgcgttctctatggcaaggaactcaggtccgcagccaagaggctaagctaatggggtcttggggccacagagtgtgggtctgggggagcaggcagggagggcctcagggtctgaagggctcaggggaggcggtgagaagtcctgagttggcgggcagagaccatagtaggtcttgatgggacggccccggggtccttgggggttgcagaatcctggcgtgacctttacaaatctcttctcccccacgttgcccagaaccggaaggaaaaggacgggattttactctccagggctttctctgtggccatcccaaccctcctccccggagccgggcttgtcttctggatgtctggctggatcactgtctccaaccagagcacccagcaggtgtactgattgtccggccccagaccatccttcttgcggtgacccgacctctggctgacccttggaaatagaggctgtctgcatttagttggcgagggaacctttcccactggcaagccatgggcgctggtttttccactccctgcaagcttgtgcatcaccaggactttctgagggctgtatactgctggacactgtgtccacaaagctgaaaaagacacttcctggccgggctcacacctgtaatctcagcactttgggaggccagggctggaagattgcttgaactcaggagttcgagaccggcctgggcaacatagtgagacacccatctctataaagcatttaaaaaaatagccaagcatggtagcatgcatctgtagtcctagctacatggcaggctgaggcgggaggatcacttgagcttgggaggtcgaggctgcagtgagccaaaatctctcctctgcactccagcctgggagtcagagtgaggccctgtctcaaacacacacacacacacacacacacacacacatacacacacacacacacacacacgtctttggatttggagcttacttggataatcccggatgatcttatcttgagatcctgaccttaattacgtctgtgaagaccctttttccaaataaaatcacaatgacaggttccaggtgtcaggatggagacacagctcaacctgctacagtagcttcagggtctgcaggtggaaataactcaggggctatttgctatgtggaggtgggcctcaggtgggcgaggctgggcttgttgagctgccctggagatggtcattccaggtgaaggaggagcaggtacaaaagagggcgctggagagaatgctggaaaacctggatattcaaggggtcagagaaagagactttgtgggagattctggaggtgaggactctggggcaggacaggaaa

SEQ ID NO: 1888493 - DNA, 4001 bp, Homo sapiens; identical to SEQ ID NO: 1562574

SEQ ID NO: 1888494 - DNA, 4001 bp, Homo sapiens; identical to SEQ ID NO: 1562576

SEQ ID NO: 1888495 - DNA, 4001 bp, Homo sapiens
acttgatattatttaaccagctacagagtaactgttgacatgctaagtttcatacatacttgacttctcctctggcctaatttcttttttgaacttcgtgtctcatcttctaaattaacacgacgttgtgatgaaatctctagcctagcttctgacagcaaatgtttgttcagggcatcacccacttctcgttgaagctatctcacgactacctggtaagatgttatttttgttactgattttacatataaccttattattaaattttgttaataatatttaactctaatatatacactttgaaaaataccaccacacactgattcttctcctcctcctcatgtgtacacattcctgtttattactgaatccagttaaggataaagaaggcgttatctttgtgccacactggtgctgtgttactcatacaacacattcagtgcactgatgaatgtgcaatgcttaaaaaccttctgaagtctcaaaaagaaacaggtatgtgggtgggactggtggcagtgaattttacactgcaatgttttccctcttttttataagaagaagctcaaatcaacctcagagttcctcacatattcagtcaccagctcaaatccttccaatagatttccatctcagaagaaaactaacattccaatggccttagaggctctagttaacctggcttccacttccctccctgaccccagctgctatgtctctcttccctactcccaccgttcctaccacccctcattagtctaaaaatgaggatccgatgtgaaactaataaatcacagacagctaagctgatctttgtactggacaaccttatatccaaatgagtcattgagccttgaaataaaaattatgaccatatttttgactgaaaaattgaaagtaagttataaatgccagtgggaagattaaatcaaatatggtttgggtaacatttaccacattttccccatattataatgtaagaaagatgtctttaaagaatggaatggttgtatcaatatataatttgagactgaattattttcagatttaagtcaaattgacatgaattaaaaaaaattataccaactaagatacattaaaagctattgaggaagaataattataaaataggaaatacactttagttcatctgttcatctgggaaatctggaattaactgtcaaagtaatctaattaattgaatctatttcaaaataacactttaggtatgaatatttctttatatctgctttatcataatcctaaaatgtggcaacatacagacattaaaattatttcagcactgtaagactacattataaatgttagtctatattaacattttgtaactgaaacgtttaaaatttcctaagtgtcacattgtctttactcaaaggaaagcatctcctagctctaacttttatttgctggaaacaaattcagtttctaaggtgatatagcagaaccgtttatcatgtatatattttgatattcaactagattcagtgtttagccataaccaaatatactttaaattttacttcaggaagtttgaaaaatacttatttttcttgatacttacttctcctttttctttctctttttcatattggcattgtctttcttttaaaagagtgcattccttcatcaaccccttattgttctcttctagctttctacactcagcttgaagtttttctacagtatcttcacatttgacttggatattaattattgttttttcctgattgtcagctttcttgtgagcatcattacattgctgttgatacaacagattttggctttgtagttgaaatagtccatcctctatagactgctgctttctcacatatttttccaaaataggttggtcattttggtacatgtgttcaatgtccttcaatggacactgtgttcggcttaggactccttgcatgtgttctatacccaacgtcttttctttgagagcctctctttcataacggagctcagtttccaggccactggatgtactctcagctttagaaagttgctgagaaagaatctgaatgtgagaattagtattttcttgtaaatgacaccattcattcactgtgctctggaaagcaagctgtaggtctcttttcaatgactgacattgatcatgatcacatagggcagcagccagtctacaacggtatgattccatttctgtttccagtcttggggtgctttgtttttccttctctagctcaaaattgagcattgtattctcatccatcagaacattaagctctttactataccaggttattgtttttgttaatgtttcctcattcagctttagagtcttttcaaggtcttcattgttttcctttataatttcaatatctttgaaatatttattttcagtttcccggttctgatgttttattgtgtctatttccagcctgagtctggcaatttcatcccgcatcaagtgattttcctgccacaggtctctttctttttcatgagtatgagaagtctaaataaaacaaagaaaactttcaagtagcacccaataaaatgacatactatgatttcttctgaaactaaataagtaataacctgtacatttatataatgaaagagttgctatctggatatccaactggaaaaaaaaagttgaatcaaaacctcaaaccttttagagcataaattctcaaaagttcaaaaacgtatttgaagacaatgaatctatgaaagccaaaaaaaaaaaaaaaaaagaaaccactagaaattctttaagaatctgatttttttaaaaaaggcttttactgaatttcaacaaacccaaaaacataaatgattaataactatgactacatttagaaactgggcttacacactaacatctaacctttactttccctatagtaagagccttagctctgcagatatctggacagataaaattttccaaattccttaagtttctttttcctgtgaatattttatagataattctacttttcttacatttttagaggcagttttaacaatgacatgtattgataaatgacagatctaggcattgtactaagcactttggtatgcatacatcaataaattcatttagttatcacaattctgcagggaaaggttaaaaatagaagcaagctgctgggtttttcctaggtcctctgactgcttctagtgctcctccaccagatcacagttacttccatggggtagatataccaatacaatagaaaacttttctttcaaaacaccaaagaagataaaatttataaagctcttcttaggaaatcctgagattatgtactattatgataacttttatttccttttcacaatgtttgagaccataattaatgcaaaatagggaaaactacactgaactatatcactaggaacaaattacttaccgacaaaatatcactaagtatatatattatgggatatcattgttttccaaaggtctttgagctgaaataaaatataactttgaagccaagatttataataaataattgtagctataagtatcatttatttttaagatgaaataaaatttgtggtttgttttagaactaagtcaaagggatattctaagtaatattaataaaataaaattagaaatgtaaaattttaccaaacattaatttacctgatttgagttacttcttacagtcttcaattccacttccaatgatttgagagtcagtttagattgttttttcacttcagtttgtgtcctatattgctcttccattatttttaactcttctgtatctttttcatacaactcttcagcctttattctttcttcttcttgttgttgtaagataaatctgtagttaaatatacttatcttaaaatcctttaaaaacaaaacactcatatgctggtttattatcctaataaagtgcccatgttcttgaatattttttctttctagttttcatattaatttgtcacttcggtgtcttccaaagaagacatataaattgaaaggt

SEQ ID NO: 1888496 - DNA, 4001 bp, Homo sapiens
gtgtcgcaggctctagcctccagcaagcagcaggtagtccctcctcttcgcgcggagcaactgggcaggcaaagccagaaaagcctagaacgggatgcagagagtggtagcattagagcctcaccttgccatgctggccactgggtggcaggtgtcagtttcagtgaagacactcacacccaccctctaaagtccagcctctccttttggcccaagctggccagtgactgggccctggggtggggactggagacaccacagcgtccaggcttcctactccataggaactgctgggcccaccctggctgcatttcctgggaagcaggagcagcagaaactcaaccccagccagccctccccacccaagtgccggttcccattcctgacgcctccacccacagggcctggtcaccccgtggtatccgctactctatgtgcgggggtcccaggtggtctctgcaacacgtagcaagagggcgcaggcctgggaaccatctcggggctgggggctgggccctgctcaggattcccccagaaactcgagcaggaggagatggccctctggagcctgagtcagggagaggaggactgctcctctgaccactgctgtcactgacacctctgctgcctgctgccagggtgacagtgcagccccccgatagcgcccccaacaccctgccccccatcaccagcacctgatagcgcccccaacctgcccctgcctcggacactgaagcacctgctggcacctgcaacttgcccccagccacgggcactgcagcccagggtagcaacctcaatccgctccatgccatagacggtgtagccatgaatagcggccccaaccagaccaccgccactggcagtgacgccccaatatggcacccaaactaccccccactgcaagcagtgcaaccccagatagcgctccaatctgctcccaccgggagtagcagcccaggatagcgccccccatgcactccctgcctctggcagtgcagccatggataacgcacccaacccacgccctgccgctggcagtgtagtccccaatagtgcacccaacctgcccccgccccctgagccaacgtggccccagatagcatactcactggctccctgacaggcagtacagatctctgatagcacccagcccacccccctccacccaccatgggcagtgtatcctcagtagcacccccaaccaaccccccaccccctctccacgggcattctggtccctggtagcactcccaataaaccccgctacttctgcctcagtgtagcccccgatagcaacctcaacacccccctccctgccgccaatagtgtagcaccctatagtgaccctaacccgtcccccaccaccaacattgcagccccagattgtgcgctcaacccactccctgctgtaggctgtgcagccatggatagtgcccccaaccagctcccagacgcaggcaatgatgccccagataccacatgtcccacccaccacaggcagagtagcacccaatagcgcccccaacctgtgcccaacaagggcattgcagcacccgatagttctcccaactcaccccctggccgcaggcagtgcatccccagatagtgccccccaaaaccacccactgccgctagcagtacagattgggatagtgccccaacccacccccagccacgggcagcacaccccagatagggccccaacccactcccctccacaggcagtgatgccccagatagcacacccaaccagcccctcaacacgggcagtgacgccctggatagggaccccaacccaccccccatgcctcaggcagtacctcctgggatagcgaacctatcccaccacctttttaccatcctggctgcactgtcgtcttccttgccaccaccaaccacagcagcaaggggagccaaggcaggctcgagtctccagcgtgcgtggcaagtgcctcctcctccttctcctgtaagcctggaatggagcagctacaccagtggacactgaagagcctagaatgaggagccgcctcacttggcatcctttatatgtggagttgatgcaaatgaagttcctggactacatgttctgattggacaagagaaacctctaggcctagtctgattggactttgttatcatgttctgattggttatcctaagacttcctctcatccagtcacaacacgaaaataaagcccaatcatagtagacctagagatttttctctcatccaatcagaacatgtagtccaggaacctaatttgcataacctttgtaagcgagagtcttgccattccaggttcttctacgtctgcccgcccatctgttccgaccccagattagagaaggagttgtcaccggtggcatgctggaggcttgagcctgcagcagcatggctcgcctcactgtggctggtggcagtgaggtagagtacagcacagccaaagtggtagaaaggtggcagagtaggtgagctatccagggacttgtggcggggggagaggggcagtgagctcaggggccaaggattggatgcactatcgtgaactacactgcccaaggtgagggggggattgggggcgccatcttgtgtggggggtgtgttaggggcagtactgggtgttgcactgcccacggtggggaatggttgggtgttatcccaggcatcatttcctgcagcagtggtggggtgggggcttgttgggggcctatctgtggctgcattggtcacacgaggctcgagttggggtgctgtctgggacatcagtgcccatggtggggaactccttgggtgtgatatctgaggtgtcactgcccatggctgggggctggtttggggcgctatctatggactacactgcccacagccaggaacgtgttgggggcattatcgggagtggactgccagtggcaggggtggagggacgggttgggtgctattggggggctgcactgcccagcagggagtgtgtcgggtgcactatccggggttgcagtgccggcagtgggtggcagattgggtgcactatcaggggctacactgtcgcgtcaagtgaggggttggcggcgctatcctgggctacaccgccagtgatggggggcatgttagggtcgctatctggtgctgcactctcggcaacggggtgggtggcggttgggcgacctacccgggcgtcactgcccaaggctagggtctgcttgggggcgctatcccgggagtcacttcccatggcgggaggctggttgggggcactttccgtggctgcactgccaacatcagggagcagtttgggggcattaacctgggctgcactgccaatggcagggggcaggttgtgggcaccatcgggtgctgcagtatcctagatggggatgagttatggggcattatcaggggctgcactgccagtggtgggtggtggacacgtcagtgacagcggtggtctccaagagaggagcggtcctcctctccccggactccagactctagacggccacctcctcctgtttgtgctgaagtgtggcgggcgcacagtgtttccgcgggaatactgagcatggcaggggccctagacccactgtgcttcctggatccacgtcttcttactctgtttagcagagaccacctgggatccccaggcatacagtagctgataccatggggcaacagggccctttgggtggaggtgtcaggaacgggaactggcacttcagtggggaaggctggctggggttgagtttctgctgctcctgctccccaaggagtacaacccggctgagcccagcggttcctgtggagtgggaagcctgggtaccatggtgtctccagtccccaccccaggccccagttcctggccagcttgggccaaaaggagagactggactttggaaggtgggtttgagagcccctgccacccagtggccaacatgactaagtctctcacactactactctgcatcctgttctaggcttttctggctttgcccatccagtt

SEQ ID NO: 1888497 - DNA, 4001 bp, Homo sapiens
tacggccgccatgcggagctgcgcttcttggacctggttccttctttgcagttggacccggcccagatctacagggtcacttggttcatctcctggagcccctgcttctcctggggctgtgccggggaagtgcgtgcgttccttcaggagaacacacacgtgagactgcgtatcttcgctgcccgcatctatgattacgaccccctatataaggaggcactgcaaatgctgcgggatgctggggcccaagtctccatcatgacctacgatggtaagaatggaaggttcaggtggggtggggtgggtgggggcaggagaggttcctgggaagaaaaggagaaaggccttggtctgctgcctgcagaaacgatggctggactctgggacctgactttggggtcgatgggaagagagaggccaggccaggagatgtgggcccagggagggcagggagagtggctggaagtggaagcagaacttggggctttctgaaagaatgagaactgggctggcccagattccaatgggaaggaactgcctgatgaaggagctaagtccctaggggagggagagggaaaggagggactgaaaccaggatgtgggaagtctgtcctgagagtcatgggccctaggtgccaccccgatcccacagcgggagcgtgacttatctcccctgtcccttttcagaatttaagcactgctgggacacctttgtggaccaccagggatgtcccttccagccctgggatggactagatgagcacagccaagccctgagtgggaggctgcgggccattctccaggtgagggcttcctccctctgcccggtgccccatcggcctccccctcctccccactcccctgggccttgccttcccctctgctcagagcctcctctgggttccctgctccccacagggcgcccagctccgtccctccctttccttctcacagcctccttctctttcccacctcccgcatccctccctcctctcccgtcattgtcactgtccccaggccacctccctgtgccctctttccactctctcacctcctgctccattcaacccccctgctcttccagaatcagggaaactgaaggatgggcctcagtctctaaggaaggcagagacctgggttgagcagcagaataaaagatcttcttccaagaaatgcaaacagaccgttcaccaccatctccagctgctcacagacgccagcaaagcagtatgctcccgatcaagtagatttttaaaaaatcagagtgggccgggcgcggtggctcacgcctgtaatcccagcactttggaggccaaggcgggtggatcacgaggtcaggagatcgagaccatcctggctaacacggtgaaaccctgtctctactaaaaatacaaaaaattagccaggcgtggtggcgggcgcctgtagtcccagctactctggaggctgaggcaggagagtagcgtgaacccgggaggcagagcttgcggtgagccgagattgcgctactgcactccagcctgggcgacagtaccagactccatctcaaaaaaaaaaaaaccagactgaattaattttaactgaaaatttctcttatgttccaagtacacaatagtaagattatgctcaatattctcagaataattttcaatgtattaatgaaatgaaatgataatttggcttcatatctagactaacacaaaattaagaatcttccataattgcttttgctcagtaactgtgtcatgaattgcaagagtttccacaaacactagcaaatgtgtagatgtctttccttgtgtagcggacctgtagcggggaaaggtcacacaacatccctctggatccagaaaactcagctaaacctcacaggagaggaacctaaatgcagaccccaccctcactcacagagccccgcccaccctcacttacagagccccgggcgctgattggaagggacaggcccagcagtaagaggacagccagcagccagtctccctgttggaaaggaaccacaaacgtgcagtcaggggccctcgggagccgccctctgtccaccccttcctgattccacccccctagagagggagcccaggggaggccatggctgagacccaggacaggcccagtcgggggaaggagcccagggagggggcaggtgtctaggctgggcccaaagagagggctggggagaggagcagcccaggaggcagagcccagccacagaggggaggggagctgagtcccggggacaggaggctccagaggcagagacggagcccagggctagggcggcaggtgtcagggctgtggcttcagcttggcgtctgtcctgggccttctgcgctggttcccaactctgggatgtgtgacttatatgcctgattacagcggcggctcccacctcacgatttctggaaagtcctcagaagccgcatataagaccaagaacgggcctcacatgcagctgctcctgggcagaaacgactcactgtttccctggcctagacacacacaacacacaaacacacacaagacacacatacacacaacacacacaacacatacacacacaacacatgcacaaaacacatacacacacacacccacacacagtgacagagacttcacacaaagaaacctcctccaggtgccccagagcactccggggcgcaccccagccccgccctgagcagaggactttggcatttcccacgcaggggcgggtgcgggagggaccggcttgtcaaagctgccctttgcttgtgtctctgggtttgataacagtcctaactccacttgttggaagcaagtgatgaaaaacgtgcagtcattctgggcaaagggaccagtgtaggggaggcatgagaggctcacctggtgaaagaacaccagagttagtcatgtcacagggcagctcccagagagacctgcccctcgtcccccagaaccccaccttccaagggcccaggctcctgtcccccgggcctcaactcacagctttgcccatgacctgggagccctgggggtcctggtgaggtgactggacacagcctcatgacactgctgggacctgggctgggaactgagagcctgtggtccctctgggctgtaggggtcggggccccacagtggcggcagagccgggacctcgtacacagcagcatggactccagacccaagtggaacctccattctggtctcagggtgacccgggctgcacagcccagcacctgcccagggtccctctgccctgctctgtccctcaatagtctggacccctgctgggtacttgccttgtcccccccttacaggggaccagggtgaatcttgggcgaagcctgcacctgtgaaggaggccattctccttgctcccatccctgccgcccacatggggaaccagctccttcttgttcctggggacctttcctgggctctggtggaaactccagcggaatgtggggtctttcattttccctcagtgttgcagaggccgaaatggagaggggctgtcactccccaggaaagggcacaatctccttccttccctccagctggcccagggacggtgcacactcttatcctagtcaccctgaggactgcagccctggtatgagcccagagtcacccccaggttttatggatgccttacacactctgccctggcctgacctcaagaggaccaggaagtgcccagttgtcactgggttttgctgccctgagagagtcaggctccagtgcacagaggaacgtgtgtgtgcagggtggtggcactgtcagggggcacagcaatcccaggggagcgtgccctgctgttccaggttgtggcacttatggaagatcctgggtccagaggctggagtaaaatcgttcccactcacatctaacctaccctgggctggctcgtgggagtcaaaggcccagacagtggctggccctgtccatccttggccagggagggtcctggcctccctctgcgctggggggggagccccactcac

SEQ ID NO: 1888498 - DNA, 4001 bp, Homo sapiens
ggctccacctccagccctgggctcgccggagttacccagtcagacgatgccatttctgctccctcctgaaagaggaagtgtccaggatgagaacttcaggcaaagaggtgcctgtggatgggcagtgggagaagacttggagacagagcatctgtggctaaggacagggagatttggggtggtcatcacaaagaggagggcctgagggagggaaggcaccgttcctggggctgagaagtgaccccatccctgactctacacaaggaaaaatgagatgtggcctcgtggactaggctggattcggggcagaaggtcctggagaccaccagcaaagaaagcaaaaagctttccaggctcatcccaggtggtcggggcctcagagatgaacaagtgcctgccagggctgcagggcacccgtctgtgtcttcctttcatctcccctctgacctctggatgccagatgtctccaaaggacttcaacttttttttgtttgtttgtttttgttttttgagagagtctcactctgtcacccccgctggagtgcaatggcaccatctcagctcactgcaacctctgcctcccgagttcgagcgattctcctgcctcagcctcctgagtagctgggattacaggtacgaaccaccatgcccggctaatttttgtattttagtagatggggtttcaccgtgttggccaggcaggtctcgaactcctggcctcaggtgatctgcccgcctcagcctcccaaagtgctgggattacaagtgtgagccaccgcgcctgacctggacttcaactttaactatgaaaacctacagctggccaaagggcgaggggagacttgcctatcctaccatgtagagtgatcagatggtgacaccctgtcctgctggacaccagtgtccttcacaaccaggtgttagctggggatggacacaggaatcccagattggtagggaaaggggagccccccacaagaccagctttcttcctcccatcaggctcagaccaaacacattgcacaacgcagttgcatggaagccacaaagatggaaacccagggcctggggccctctgggagggacctacacacgatcatagcccccccgacaatgcctcgtgtgcccaacaccagcccaccaggtagctagagccattccctctggtcactggagcagagcagccaccacagcctcctgcaacacaccctcccatgctgcgcccacccgcctgggctctcccacctccctttgacctaccttgttcctgggcacagccccctgtcctggctgcagatctcagggtaacagacctccacacagctgctgatgcagaagtccaggctgcagtgcccacaagtggatagaggagggggtacgtgggatggaggggctcactatgggtcctcgttgatttccctacactgtgatctcctggagggaggaccatgtgccatccatccttgcatcccaggttcctgcctgagccgtggccctgagtgggtgctcttgggttactgttgaaggaatgaaggaactagtatatgaatgaaccagttgtccttccttgcctccccccttccctccctccctccctcccttccttccctcccttcattgacccttccttccctccctctctccctccctccttcccttccttcctttcttccttccttccctccctcccttcattgacccttccttccttccctccctcccttcattgactcttccttccttccctccctctctccctcccaccttccctccctccctccctccttccttccttccctccctatctccctccctccctcccttccttccttcacccttccctccttccctccctatcaggggacctggtccgataatcatgtaggttcttttctattttcttaagtgtcggctggcttgagaaataaagggacagagtacaaaagagagaaattttaaagctgggcttccgggggagacatcacatgttggtaggatccgtgatgcctcacaagccgcaaaaaccagcaagtttttattagggattttcaaaaggggagggagtgtgtgaataggtgtgggtcacagacatcaagtacttaacagggtaatagaatatcacaaggcaagtggaggcagggcgagatcacaggacctcaggactgaggcaaaattaaaattgctaatgaagtttcgggcaccattgtcattgataacatcttatcaggagacagggttttaagagcaacccgtctgaccaaaatttagtaggcgggaatttcctcttcctaataagcctgggagcgctatgggagactggagtctatctcacctctgtaatctcgaccataagagacaggtacgccctgggggggccagttcagagacctacccctaggtgcgcattctctttctcagggatgttccttgctgagaaaaagaattcagcgatatttctcccatttgcttttgaaagaagagaaatatggctctgttctgcccggctcaccggtggtcagagtttaaggttatctctcttattccctgaacaattgctgttatcctgttcttttttcagggtgcccacatttcatattgctcaaacacacatgctgtacaatttgtgcagttaatgcaattattacagggtcctgaggcgaaatacatcctcctcggctgacaggattaagagattaaagtaaagacaggcataggaaatcacaagggtattgattggggaagtgataagtgtccatgaaatctttacaatttatgtttagagattgcagtaaagacaggcataagaaattacaaaagtattaatttggggaactaataaatgtccataaaatcttcacaatccacgttcttctgtcatggcttcagctggtccctccatttggggtccctgacttcccacaacacctccctcccttccttgacccttccttccctccttccctccctccctcccttcctttcttcctcccttcttccctccctccctgcctccttccctccctccctccctccctccctccctccctctcaggagagagcagcacactggaatggctgagcttgaggaccccccatctggcttgcacagtcacccaaaccaccacccctccccttccctcctcttctgccttgaggaatctgactgtctggaaacttgtttctccttctccatgaacattctaaagccactggccatgcactggtgctaccaggtcacctggagcatctcctggagcccttgtccttaatgtgcccagacagtgaacagcttcctggctgagcatgtcaacgtcaacgagaaggcttgaagcctgacccctccactgccaacagccagaaattgcaggaaatgaggaccctgcaccgggctggtcagctgtcatgtgggatgtcagggggaggctttgggctgaagggtggttgggagccggtggggagagtccttggctaggactgtaggtgacaccaaggacaagactcaggacgtggaagactcaggacgtccacatggaaaggatgccagggccaaggccgagaggtgctggggagggctccccacctgccccacacaccatggcctcagcccctgtgacggaagctgactatctccccctcaccgcagtgtttagccctgctgggaagactgttcagaccaccagggaaagccctatgagacctggtcctgcctggagacggatggacgccaccagcctgtcctgggtcacagctgtccccagggctcttctctccctctgtaccttggcgggccccatcctctctccatttcctccatgatagccactttccagatttctaatgcaatacgttagtttagctttttctgcacttgctctaaacaccagcacatagtacacaatcttctgtgtgtggctcttgtcactcaaccctatgtttgcaaggttcacccattctgtttatcacggttgcaggtcaattcctattgctgtccactatcccac

SEQ ID NO: 1888499 - DNA, 4001 bp, Homo sapiens; identical to SEQ ID NO: 1562589

SEQ ID NO: 1888500 - DNA, 4001 bp, Homo sapiens
gcacgtgcctctagtcccagctactcggaaggctgagacagaagaatcgcttgaacccaggaggcggaggttgcagtagccgagatcgtgccgctgcactctagcctggacagagcgagactccgtctcaaaaaaaaaaaagaaaaaaagaaatgtcacagagggcttcacagacagataaatggagataaactaggaaaatgatagtgagatatggaggaacagacaggatcatgtacgtcttctataaacagcataatgtgcaattgattgtagcacaaagtagagttaagtagagaagatgaggagagtattcaaagataaaatattaaataatttttccagagtaaacaaatgaattattaaattcaggaagccaaacaatccccattgtggatgtgtaaaacataaattttatttgttttggatgtgcaaaacacttattttggctgctttttagaatttctctggcttggtggctgtttcactaagatgtgtttaagtttgaaacaccaccaaagacggagaatctctaaaaagcagccaagccggcctggggctcacgcctgtaatcccagcactttgagaggccaaggcgggcagattgcctgagctcaggagtttgagatcagcctgggaaacagggtgaaaccccgtctctactaaaatacaaaaaactagccgggcgtggcagcgtgcgcctatagtcccagctccttgagaggctgaggcaggagaattgcttgaacccgggaggcagaggttacagtgagccaaaatcatgccattacactccagcctgggcaacagagtgagactccatctcaaaaaaataaggcagccaaaataaactgtatcattatgatggaacacttagtagaatgacaacagactgctcaacaattgtaagtgaaagtataacacaatagactaatatttgtgaagtatcgaaaaaatgtaactgccaatagagggctgcaggtgctttggaaatatctttcaaatagaataaaatgagttgggcgccgtggctcacacccataatcccagcactttgggaggccgaggcgggcgatcacctgaggtccagagtttgagaccagcctggccaacacggcaaaacctcatctctactaaaaatacaaaaattagccgggcatggtggtgtgcacctgtaatcccagctactcgggaggctgaggcagaatcgcttgaaccgggaaggtggaggttgcagtgagccaagatcatgccactgcactccagccttagagagagagtgagactctgtcccaaaaaaaaaaaaaaaaaaaaaaaaaaaaaaaaagaataaaatgaaaaaaaatacttttgttttttgcttctggaaatggaaagaatggcataacgggttattcttttttgtgtatatttttttttttttgagatggagtctcactctattgcccaagctggagcgcagtggtgcgatctcagctcactgcaacctctgcctcccgggttcaagcgattctcctgcctcagcctcctgagtagctggactacaggcgcatgccaccatgcccaaataatttttgtattattagtagaggcagggtttcaccatgttggccaggctagtctcgaactcctgacttcgtgatctgctcacatcagcctcccaaagtgctggcataacaggtgtgagccaccgcgcccagccctaacaggttattcttacaggcttattagtactatttgataaccacacatataaattagatacatatacttttatatataaagtccttattacaatttactataaccaccataagccaaagataataccttggggtgaggaaagatgttgctcttgcagcttctcttgagagaggagtcccaagtagctgagaacaacatactttgtttcatagtgaaatcccagaggcacagtagaagaggacgccattgaattggctggtgaggctccaaaaaggtctacttatggatgtgtaaaacctaagaacaaaaaagtaattttttcagtttaaagtttattacatgccactttaacagttgtttcacaccaaaatgtcttgtgcaactcttttgaggtagagtcttgctcttgtcgctcaggcaggagtgcagtggcgcaatctcagctcaccacaacctctgcctcctgggttcaagccactgcactccagcctggcgacagagcaagactccctctcaaagaaaaaaaaaaaaaagtactgcacatacaattacatgcagtacataatacttgataatactagatgacttactggtttatgtatttactacactttttattgttagagtatactcctgcttatttaaaaaaaaaaaaaaagtgaactgtaaagcctcagggcaggtggtcctccaggagggattccagaaggcattgttactggaaatgtcaactccatgggtgttactgcctctgaagactgtccagtgggacaagatgtggaggtagaagacagtgatattaataatcctgactctgtgtaggcctgggctaatgagtctgtttgtgtcttagtttttaggaaaacagtttaaaaggaaaaggaaaaaaaaaagaaaatttaaaaacagaaaaaagcttataaaataaggatacaggcaatgcatggtggctcacgcatgtaatcccagaactttagaaggccgaggtgggaggactgcttgagtccagcagttcaagaccagcctgggcaatatagcaagactccatctctacaaaaaaatttaaaacattagctgggcgtggtagggcctgcctatggtcccagttactcaggaagctgaggcgggaggattgcttgagcccaggaggtcaagactgcagtgagttataattgcaccactgcacaccagcctgggaaacagggcaagaccctgtcttaaaaaaagagaagacaggccaggtgcggtggctcacacctgtaatcctagcactttgggaggccgaggcgggcggatcacgaggtcaggagatcgagaccatcctggctaacagagtgaaaccccgtctctactaaaaatacaaaaaaaattagccgggcgtgatggcgggcacctgtagtcccagctactcgggaggctgaggcaggagaatggcataaacccggaaggcggagtttacaatgagccgagatcacgccactgcactccagcctgggcgacagagcgagactccatctcaaaaaaaaacagaagaaaaaaaaagagagaagacaaaaagctaggtgtgctggctcatacccataatcccagcactttgggaggcggaggcagaggcaggttgattgcttgaaaccggcctgacaacatggtaacatggtaaaaccttgtctctaaataaatgttaaaaattagccaggcatctggtgcacacctataatgccagctactcagaagctgagatgggataactgcttgagcccaggaggtagaggctgcagtgagccatgatcacgccactgcactccagcctgggtgacagagcaagaccctgtctcaataacaaaaacaaaaagaaatagaagataaagttttctgataatttttttgtgttcattcaacacacatttattaagctgcaaggtactctataggcattagacatgaagacaaacatgataaatcaccagacctcaggagttttcataggaaaccaaaaatacttataacaaaaatacagactggaaaaagaggcaatgtcggcaaaatttaacatctgtgataagcaaactaagataaatatcctagaatgataaacaatttttaaaaatagaaaaagaatttcaaatatacaaaataaaatggctatagatataagtggttggcacagtggctcatgcttataattccaacactttggaaggacaagggaggaggatcacttgacaccaggaattcaagaccagactggacaacacagtgagaccctgtctctacaaaaaatgaaattagccctgggt

SEQ ID NO: 1888501 - DNA, 4001 bp, Homo sapiens
atgagccactgttcctggccacaaaattttaaaaagaatgctggtatggatttggagaaaagggaactcttataccctgttgatgggaagataaattagtacatattctatggtaaaaagttggaagttgccattttcaaaaaactgaaaatacaattaccagaaggtcaatgtgggcagattacttgagctcaggagttcgagaccagcctgggcaacatggcaaaaccctgtctctacaaaaaatttaaaaacttagccaggcatggtggtgtgtgcctgtggtctcagctaccatagactgaggtgggagggctgcttgggctgtggaggtagaggccacagtgagctgtgattgcaccactgcactccagcctgggtgacagaagaaaccccgtctcaaagaaaatgacagaaaatgcaaatactgtaagatctagcaatcccactactgggtataactccagagcaaatgaaatcggcaccagagatcagaaagacacaatggggacaggagagtttcttcatgaaatcattttgaggaaactgatatccatatgcaaaaaagaaaagaaaagaaataggacccttctgttacacgatacacaaaaatcaactcaaaatggattaaagatttcaacacaaaacctgaaaccacaaaacattattaaattcctgtaagaaaagatagggggagcttactttcaggacaacttgaatccatgctcatcagttggaaagagtttcaaaaagaaaaagaggaatacataaggggtaaaaacctcatggagaatggaatggtttgtgaatgatttttttaaattggggaccaaaatcacaagcaaggaaagcaagaacaaccatgtgaggctacaagaaactgaaaagcttctgtgccacaacggaaaaaatgagcccgaagtttggacgaaagttttgaggaatcatataactgctaaggggttcttaccgaaaatatacaacacattaacagtactaaatagcaatttaaaacaacaacaaaaaataatccaccccaaactgggcagaggcccagaacagacatttctgcaaagaggacaaaaaacccacaccgaggagtccctcgcccctggtcaggcggccacggtgggagggacacgagaggacacgcgctgcccaaaagtgaagaagagtgacccctgggtcctgatggcaggaacgaagatttaaaaatgcagcaaggcccaatgcaaatcctccctctgaggcttggacacgaggcagccagccagaactgggcctggccctgactccaacctgagcggggcttccctctctctccctctacacaggggaggttccctcagaaaaagtctttttctgttgttggtttggttttttttttttttttcagaactagaaatgtatttatttatttatttatttttaataaaaaccaagatttttttattattattatactttaaagttttagggtacatgtgcacaacatgcaggtttgttacatatgtatacatgtgccatgttggtgtgctgcacccatcaactcgtcatttagcatcaggtatatctcctaatgctatccctcccccctcccccccacccagaaaaagtcttaaacccctaaaaataccacagtctgctacacttgacaccctcaaaagccttcagagaatgaataccactgtaaaataaatactaaaacactacaagagaaagaggaaaaccagggagaacaggagaggaatgaacagaacataccagaaaactaaagcttctgtactcaccatgcaggaaaaatgccagggaaaagtgcatggcagcttcctcctcagcactcagggcccagacaggagcggttttctccccaggacacagctccaagtcgtccagaagcctccgtgatgcccctcctggcgggtcctgagggtatcagagctcctctcctcctcacggtggatgccgccactcactccatgcagcacctgcggggagaacactgcaagagcacgatgtggggcagaaaaggtggttggggcgccccctgatggtcacggtgcagagtgaagaatgatctcatcccatggtcagcatcggcccaggctgcggccccatcgcccaggaactcctcccgctcctgctcggcgtggggtgccacagccacctcctactcttctgctactgtcagtgctgcctgtcttcttggtgctccaacgctgacaatttggggagacataaacacttaggctatagcaaggaaaatccagaatggtggtggaagagaaggacttagcatcagtcacagtgtgagaccagcagcagcaacaggacctaggattcattccaatgagaatcacctggaaatctcccccaggaaaagagatcaaacagattcctggaggaaatgctcttggggtttctttaaagaagctagtgggactaagtaacacaagactggggcttttgtggaaagagtgatgtccactaataatgtcctcttaaggactgaacatctcttcccaaatagctgaatgtgatcggcagtaggcatcagctgagaccttttatgacggcccttgggtaaggaatcactcaagctccctcactcttccagggacacagttagcacggtgatgaagctccagcgctctcaccacctctagactctgaggggccatcccagctccagagctccccacagaagtggctctgtttgttgtaggtgcatcacaccgaggctggttctttaaattaaccctgggagtgtgatgaaaccagcagtaagtagaaaggacagaaacagggagttgctgctacaagacccgaaagtgcaggaggatgagggtgcactccttcacccccacagacacacactagaggacctcagtccccagcttcaagtgtctgtgagtgcctaggagagagtcatgcccacagacatcctgcattgtaggtcaacatcaagcccacccaatagctctggtgctcaattctcaagagataacaaacagccaaacaaaacttaaggctttgatgtttggtggtgacagaggcaggaaagagcaggtcacatggaaaagataatctttgagtagtaaagcaaggaaagatgagcacacacatgacacttaaaggccatagatgatggctcttttaattatgtcacttttttttttttttttttgagacagagtctcactctgtcgcccagtctggagtgtagtggcatgatctcagcaccgcaacctccgccctcccaggttcaagtgattctggtgcctcagcctcccaagtagctgggattacaggcgcccaccactacgcctggctaagttttgtatttttagtagagatggggtttcaccatgttggccaggctgagctcaaattcttgacctcaagtgattcacctgccttggcctcccaaagtgctgggattacaggcatgagtcaccacgcccagccaagatacccgatgtaaatcaaaattaaaagaatgcaaaaccataaagcacaaaatatatgcacatgttgaggttaaaggaactctcttctagatttcctgattctggttgctgaagtgcaacctttctcatccctttcctgtcctgacttttctggggctctaagcccatccttatctggccccctgggggagctaggtctgcatatgggatcttgagtaaagaaggaaatgagaaaaagcctcaggcaaaggaagagcatggacatgcaaaggccctggggagaaataagtatgacagagaaagggactggaagaagagtcttgaacatctgcaaagtgcagacacacattgggctagaaactgtgcttttactgagcaatttcacctaattttcacaaaacccaataacatgactacagatatgtttttttcttgaaacaggatctcactctgtcacccaggctggagtacagtggtgtgatcacagctcactgcagcctcaacttccctaggcccagatgatcctcccgc

SEQ ID NO: 1888502 - DNA, 4001 bp, Homo sapiens
ggagactaagcagtccccagcccctacttgtccctgagctgccattctcagccctgtgggaggagacagaaatccctgaagagaaaccaaaggaccaggtcaggaggggctgcggggggcggtggcatgagcaatcagggcagggaaggatggacagatgggggaatggagggaagaaggaatgaatgaaaaggtgaatgaatgaacagagagaacggccactcctcccttgctttagtttacaaagtactgggatcctcccaacagcctgcaagacagaatttctgggaagcagaccaggtggctggcagggaggggaggcttgccctggcttttgtgggcccaatgggaggcagggggcaggaaggggcatcctgtatgtgtcctccctgcagcggcagcagcaccttcctggaagagggtcaggaaacacccgctgtggcccctctccatcacgccctcatccaggacaccaagtatcagtcactcagctcacgagacccaggccctgactcagggagagaggatgtgaggggtggggcaccgggctcctcaggactgagagacctgagatgtggccccaggctgggtgtaggggcagactggctatggcagcattgtgtgtaacccagcaggccagtacccacgcagggagcctccaaaccccttcacccatgaccctgggagaagaccgcagccttggagaattggcctcactgaaggggcctgcaccggccagcagggtcagccggggccagacaggttcccacctgggatgtgcaaatgggcctcctgaatcctggagccaggtatggactcacacaccaccattgtccccaagtccccatctgccccacgggcacaccctgccgcctgttctgtgcaagggccctgaggctgtctccttgcgctcaagccctgcaggtgctgaagcccacacacatggctcctgctgcctgggccagtgcacgtgcacacacacgcacacacacacactcacacacacacacacatacccacacacaatcacgcacattcacacacacccacacccccatactcacactcacacactcacacccacacatacactcacacaatcacacacatttacacacacccacactcacacactcatagtcacacacaccctcacacagcaaaacacaatcacacacgttcacacccacccacacactcacactcatatacccccacccacactcacacatacacacaaacacactcacacacattcacacacacccacactcacacatacacacacccaaacacgatcacacacattcacacacacccacaccccacactcacactcatatacccacacacactgacacatactctctcacacacacacatgctcacacacacacactctcacacacacgccttctccaggaggggctggctgccaagggccacccagcttcctcccacgtctcactcaccgtccaatatccgagcagaccttggagtcagcagcaacagcggcgtgggcaaaggccgggggtcaaatggggcctggtgtcgagagaggaccacagccagcacaatgacagccagcacaagccccagccccagcaggaccaggccaaccatggctctgcagtcctgggccatggctctgcggcccagaaggagaggggaggccggtgggcagacggagggacagatgggtgggcagatgaatggacaagaaggtgcatagatagactcacaggtaattggacagatggacaaacaggtgggggctgaagacagacacgaagatggatcgacagataggccagatagctagacaaagaggacagtaagagaaagatggtcagatagacaatgggacagagatgggcttacagatgggcggacagacagacgggtctgaacagcgggctgccagatggacagatgggtgaatggacagacggctggcagctgtggcgagctgctgccctcaccaagtgcacactacggagtgaccaaactcacgcctcaacttctggttttcagctcctgcttgttgctggcaggaggccaggcagcaaagcgtctgaggggagttttccttgcctagaggagtcagctgctgtgttaactccctcactgctggtaggtccaaaggccccacctactgcccgccagagcccagggtcacactgtcgcaatgtgcaggagaacttggtgcctgctgcactgcggttgccaggtaggggcagggctccccggaacctccacaccatttcccgggttctcagcagctctaggaaagcagagctggggccgcttaactctgccctggatccggcaaggctgcccccctcccagagtggagccctgctccccagctcccatctctatcccctaaccctctccgcatggcccagcctagtcaccatcaaggtggagctgaacagaggcagagggaggaggacccaaggtggtgtcactcaggacccgggttcaagtccttatgtttctgcagcctggcctgggtcccccaaccccccccagggtgaccaagggcttcccagtctgcacagaggacagggggacttgacagcatcaaatgctggtgactacaagatgcccctgtagggaatgcagacagaccatgcctctagcccttggcaccaggcaccatccatccctgggacttgctgtcctggaaatgcagcatagacctccaaggaggggggctgtgccatgtgggggctccaccccgcctgcagctctttcccaccctggctgcaggtctacttccctgaatccaaatctgctactactgtgctggcagcgcagcctctctggggacactggcctggctctgttctccccaggcctcagggtgcctaaatgggaggcagccaggagagtgaggacccactgagggcctctgttgaccaggctcagcaggggtgcaggtgatgtgggctggacttcttcccacgtggcccccatagtcctccccgctccctccccagctgaacactgcctgctccagatgtctacacctggagtctgggcctctccatctgggcagcagagaaactgaggcacagagacagactgtgtccttacaggccacacagcctgccaggcccctatgtccggccagagcccctggtcagcctgggctgcagcgattgtttagaggtaggctgttcccacggctgcctctcacggtagggggggcctgcggacgcctcctcccgtccccacccgactcccaagcctcagtgacattgctcaaccaggagctgaagtgcattcctgggcttaggccaggccacccacccacccgctgcagtcctggaagctcagaggccacagtggagacagcagcgtgggggatgtcccccctcctctccccaccatcctcgtcaggcagaggccagggtgcagggaccaccggagcaaaggcccagggaaatgaatgggtgtcattctggtcctgatccgaggcacagccaggaaggtccctgtggggaaaagaaagagatatcagactgttactgtgtctatgtagaaagaagtagacgtaagaggctccattttgttctgtagtaagaaaaattcttttgccttgagatgctgttaatctgtaaccctatccccaaccctgtgctcacagaaacaagtactgtgtcgactcaaggtttaatggattcagggctgtgcaggatgtgctttgttaaacaaatgcttgaaggcagcatgcttgttaaaagtcatcaccactccctaatctcaagtaagcaggggcacaaaacactgcagaaggccgcagggacctctgcctaggaaagccaggtattgtccaaggtttctccccatgtgacagtctgaaatatggccttgtgggaaggaaaagacctgaccgttccccagcccgacacccgtaaagggtctgtgctgaggaggattagtataagaggaaggaaggcctctttgcagttgagataagaggaaggcatctg

SEQ ID NO: 1888503 - DNA, 4001 bp, Homo sapiens
gacactaactagccatgtggattgtgaacagtcacctcatccttcatggcctcagtttccacatctatgaaataaggggtctggtcaggagacacataacagcattctacatgtaactggagaaattgtgtcatggatagggaagggagggtaattaacccaattgcctctagagggcaaataattaacagaattgcctccagtttctccatggctttctaaagaggggtcaagacttgctggatgccagatgttttccagggatcccagagaattggtctatggaggcagtgctttactgtattatggaagaggaattaatcacactaattgcttactctgtacttttgcttaatgatacaatataaacaaatacaatgagaaatcattttaaagcaatcaaacgggcttcaagttattaaagctcctgaagaatcaaacattacctccatatatagaattattatactaggtgcaattaatgatttgatttatagatgtttttacataggtttgatatgcaacaagtctaggggtataaaatcaataaaatctgccttctaataagcagtggtttctgcctttttctttaaaaattatatcaaaatagtaaaacatgaatattttaaaataaaaaattattgacatttattttcattctgcctgctgaattttaacttttcctcaaaaagaaaaacttctttctcatgcaaactatccccatatccctaattaggatgaattattgaagcatcctgggtgatttctgaacactttcaatccttcaattattcaggtctagtttaatggcacctgagaacaattacatactgagaactgtcctaaactgacaaaggcgaccaaagagcttatacaggagcatacctgtaccctcacattggctccaaagtctccagagggaaacggacaggacatgatgaatcagctctttttttactgtattatgcttggaaagattgttatggaaacatagaataaatagatagataaatcaaccttgcctggaaaactggaaaaaggttcaaagaggaggcaaatttagaccaatatgtaccaagaactcattgattcttacgggagtaggttattaccagacagacaagtgaaattcagtaggcagaatgataataaatgtcatttattaaatattaaaaagacaaataccttccctattttagaaataaggtaggcaaaggaactgaggagtggaagttgaaggccagctctgggtgctttgtgaacagagcccagttgacagtgggaagatctgtgctctatgctaaggacatgctctgtaatgacaatccactcggttgcactaagaatttaagagcatttatatgaatatatacaatttaaggaaagataaagagaaaaatttgctatcaactctgtgtagatttggaaaatggtgtcaaaggaacagtttcacctgcatttctttgtctagaaagttttattttattaaaaaatgtagtctacaaacgagcctcaatttttggcaataaactcaaaaatgctacacaaaccatcacagaattcggtttgtccttgcaggaaagaaaaaagaagaaaacaaacctccatacgagaatgggtctaaaggaacttcccaaacctccatgattttgcaggaaacaagataaaggtaatcacctgcagcacctggacccatctagattaactactcagcctccagaggaaggtcttcaggactcagaccttagttatagattagaagttaatcacttatgtcttcagacaggccctgttccatgtttagagagagatctttgagcacccatcttcatacatttgagaacagggtcacagagagggagtctctgaggtcacagagtttattagttcattttcacactccaggaaagaagtttaattcacagttccacatggctggggaggcctcaggaaacttacaatcatggtggaaggggaagcaaacacatccttcacgtggcagcaggagagagaagtgcagaagaggggaaagtccccttataaaaccatcagatctcgtgggaactcactcagtatcacgagaacagcatgtgggaaccactcccatgatgtaatgccctctcacaaggcccctcccccaacacgtggggattacagttcaaaatgacatttgggtgcagacacagagccacaccatattacagagccagaagagctgagcagtgggcgctaagtaaatgttcattaaaccaaacccctgcacaaggctggcttcatagaggtgccacctgtgcagtggcaaaagccccactgtcagaggggacctgaacttggtttagtgctatgttgtcactgccttcaaattcttaacaatttttgaacagactccacattttcagttagcaccgggtcctgcaaattatgtacccagtcctgtccctgaaacaaagataaggtttgttcatgaagggactcactcgacccctccctgcccatctcactccaagatgccctaagtaaaggggaacacagagctaggagaaggcagtatttgaggatgatcttggaggtcccacctgatcatggctggtgatgcatgtgtgtgggtgggagaatttggctgctctcttctggcaccttccatcccatgtacaaggcctgcactttgcctgtctgtcccaagtcctcctacctgactcagaccaggaatgtggatgggggtggggggtggtggcgggcactggggcccagtactcctggtcccagctggagttccctgttgactgggggagatttggcccctctgactactcctaccccatccccactaggacaggagttggtgaaggggacagggtgggaggcttaactagtagccaggggcaggcggcaggcagtggggcgaagatcaggctgaattttcctgctactgatctgctctctggaagaggcattcatgaactggcttaggctgtggcttggctattttaggaatattcttaacccttcctgagtcactgccgccatcagacttctctcccagagcacagagcaccagactattccctctccttgtcccctcctccccagtccctgctttcctccctggcagctgaggtcagagttttctcaggggcggggcaagttgacttctgccaaggaaaactccggggtccctgagcccccttctttgtcctgtgacttctccctcttcatcacagctctggactcagcaaagtggcagaatgggcatcacctcagcccttcttctcatcttataaaattggaacttcagcatctctcatctgagggaaaatagttgacctgcatccccagagtaagatgggaagctgcagtcctgatttccagcctctggcagagcaggagcccctgcctgcctggctttgatgccctgttaggggcacgtttccagcagggagtcacatgccagagcccctcatggggttacctctgcctggttttttcctccactccaggttcttcccagagtctggctttttggaaaaacctaggccatgatataggcattacctctgtaaggctaaggggggtcccactgcgggccaggagggctcaacatcaatatatctgaatttcaagccaagacagggggaaaagatcttggctcagtgtcaggggtttctgtgtccctgacagctgggcttgcctgagctgggaggcccagcatatctgggccttgtgatgccttctgacagtaggagttggagtttgccaccaactgctattgggaaagcttgacatggtgatccaggaataaggctgatgatgccacaaaaatgcccaagggcctgtggtgtgcctgacagtgtcctgggaagtggatatagaggatcaataatcaataatcattatttccctgagaaaggaagctctcttggggtggttaaccaggtgtctggccacaagcctaggccagggttgatgggctggggcaagtgagtcatcccaactcattcccc

SEQ ID NO: 1888504 - DNA, 4001 bp, Homo sapiens; identical to SEQ ID NO: 1888503

SEQ ID NO: 1888505 - DNA, 4001 bp, Homo sapiens
tggtaccagtagactactgtattacaatacacatattgtaacatccagagcaaacactttaagactatacaaagagatacgagcaacaacattatacagaaatagatcaagatggagggaaagaaaaaggaaacgaaaaagcaaataataaaaacatcagacataagcaattatgtaactataagcaccttaaatgtaaatggtctaaataaaccaaaagacagattgatggagagcctataataaacacatggcccaactaaatactgttcataagaaacttcaaactcacttaaggacctaagtaggttgaaagtaaaagaatggagaaagatatcctgtgaaatcattaattttttaaggaagcaggagtgaatatattaatatctcatgaagtagacttcaagcaaaataatttaccagagctggagagggtcttcgctgaattttaagatctaaaatttcctatgctgccttgacatctttgagcctcacagggccccaaaggcctagccgtgggttttcctgtttctaccagacaccccctaccctgccacccaacaggaaaggctccccacctggctagttcttttatcagccaaacagttgcacctcagcctaagaagcttcacttcacctgtctgccagcccatgaatttattcaaacaagccaactgcattccccctcgggaaccattggtcattgtgtgctcttgttactatcaagcctgcctgcttcctcagcccacagccctcactccgctacagagtgcggtgcccatctgaccctgtgtggcatgcagtgtcctcctctgagctgtgggtatatgtgactaaaacactgctgtcaatctcatccatccacgccaggtgtcgtgttcagccatctcctacactttagggcagggacccctccttcaccaatggggtgaaaaggaagtgaccataacaactgcttaatgacaaaaggattaacccaccaagaagacatctacttcaacatcctcctcttagcaactgttaaaactaggcagaggccgggcacagtggctcatgcctgtaatcccagaactctgggaggcaaagacaaaggatagctcgaggccaggagttcgagcctgggcaacatagcaaggcctcatctctccaaaaaattttaaatttagccaggtgtggcggcacacacctatagtaccagctactcaggaggttaagccaggggaagtacttgaccctaggaagtcaaggctgcagtgagtcatgttcgtgccaccgcactctaatgtaagtgacagagtgaaactaggcagaaaaggagcaaggatttacaaaagatctgaacagtcaaccagcaaaatctgacatccgtataacaccccactccccaacagcaaaacacacacatttttaaagccaatagaaatctaccaagatgaagtacatttggggcaataaaagaaatcacagccgtgcccctctctgcgctttcttttctcaccatggggaggcgtttgggggcctcttgagggaccccctagatgcttctactcagagcccccaaagccggggagcctccactcctctgtatgcagcctcccctgtcggttctcgctacccagggttcagtggcctgggggctgacggagggggtcgcctctgccaaggcccctcccggcgcctccctagctcatccagcccaccttcctcccacgctggctcacgcaaagtgctctggttaccaggagcccttcctgaccagccccggccccttcttggccttcgcccacctggcctcccctggagccctgacctgggtgccgggcctgctgggtccagagcccaccccgccctgaacaaccccgagtctcagccaccctcagttcttaccctttcacagctggggagtggagtctgggccggcgcctcgctgtgccgcgctgtgcgcctctccgcgcctgcgccgccgctgtgcccctctccgcgcctgcgccgccgctgtgcgcctctccgcgcctgcgccgccgctgtgcgcctctccgccgctgtccgcctctccgccgcgccgccgctgtccgcctctccgccgctgtccgcctctccgccgctgtccgcctctccgccacgccggcgctgtgtgcctttgcgagggcggagctgagttctcctttgcacagacttcggagatacagcgaaggcagagcaatgttctcctcagcacagacccgggcgggcgggccggtggcaccgcgagggcggagctgcgttctgctctgcacagaccttgggggcactgcctcgctttgggacacctcggggccgcatcgacggtgaataaaatccttcctgtttgcagccctgtttgtggttggtggcagcgatggacactgcagccagccagagcgtagaaaggcgttggggtaagcgcgctatccaggctgcactgcgggtggcctgggaccggttgggagccctatctcaggcgtcactgcccgtcttgggtggctggttgggtgtgctatctggggctgtgctgcctgcacggggggatggtttgggagcccaaaccggggctgcactgcctttggcggggagccggttgggggcactatcccagactgtattgctggcaacagtgaggtgggctaagtgtgctatccggggctgcactgtgcggctgtgggcggtgggggggtgggtggcggtttcgggttgagggcgctatggggtgctgtaatgcccatggtgcggggaggcggggcggcttgggtatgttgggtgtgctgttgcgggggggcgacactgctggtggtagggggcagggtgggttgggggccatatcaggggctgtactgattgctttagctaggatttctggtactatgttaaacaacagtggtgacagggggcatccttatcatgttccagatcttagaggaaaagctttccgtttttccccattccatatgattctagctgtgggtgtctttcctgtagtttttattatgttgcggtatgtttcttctgtgcccgtttctttgaggatttatagcatgaagggatgttgaatttcatcaaatgctttttcggtttcagttgacgtgatcatactgtttttgtcgtttatttggttgatatgatgtatcacattgtatgttgagtgacccttgcatcccagggatacatcccacttgatcatgatgaattatctctttaatgtattactgaatttgattcactggtattttgttgaggatttttgcatcaatattagagatcctggcctgtagtttccttctttgatgcttttgtctgattttgttatcacagtaataatggtctcatagaataagtttggaagtattccctcctgtttttcaaaatagtttgagcaggattcgtactaggtctttaaattgtttggtgtgaagccatcagcagtgaagacatcagttcctgggcttttctttactgggagactttttctgatggcttcaatctcattacttgttaccaatctgttctggtcttggatgttttcattgtttaacctaagtaggttgtatgcatctaggaatttgccaatttctactaggctttccaatttattggcatataatagccagttatgatcctttgaatttctgaagtattagttgtaatgtctcctttttttaatctgttgattttatttatttgaatcttgtctcttttcttagcctggttaaaagtttgtcaattttgtttagctttccagaaaaccaacttttcgtttaatcttgtgtgttttttatttcaattttgtttctgctacgatcttatttattttcttattttcggtttagtttgttctttactagttctttaagatgtattgtttatttgaagtttttcttttgtttggatggtaggcacttgtagctgtaaatctctgcctttgtatggctttctgcgtaacaagttttggtatactgtgttttcattaccctttgtttcatgaaatt

SEQ ID NO: 1888506 - DNA, 4001 bp, Homo sapiens; identical to SEQ ID NO: 1562620

SEQ ID NO: 1888507 - DNA, 4001 bp, Homo sapiens; identical to SEQ ID NO: 1562623

SEQ ID NO: 1888508 - DNA, 4001 bp, Homo sapiens
catttggctcccctggcctgcgcagctgctgccggccgggccgggggatcatgccaggcagcccagccagaggtgagctgggtcacaggggtgagctgccaggcctgctcacccctcttcttggtgtgatcccctcaagtccaatccccagggaccttccccaggaatgctgagagcaccagctgtcccggccatgtcaggcatctggccaccaggtctccttccactccaggggcaaccaccgccagagggaaaaacggaaacaccaggttatttgtgatctgcatactcactcctcgtttagagagacaagcaggaggccaggggaatagatgggactgtgggaacagccaagggcagagggtgaagggcggcgatcagaaggaaagacggaatgcccacacattccctgccgctcccggctccagccgtggaggaagcggggctcggaggacattgcaccagacaggtcttgtttagaaaattggaaaagaacaaatattgattacaagagtgcaggagaatgggcccttccatcatcaaaaacaggtattcagccaggcgaagtgactcacgcttgtaatcccagcactttgggaggcaaaggcaggaggatcgcttgggcccaagagtttgagaccagcctgggcagcatggtgaaacccagtctctacaaaaaataccaaaaattagctgggtgtggtgacgtgtctgtggtcccagccattcgggtggctgaggtgggaggattgcttgggcccgggaggtcgaaccatgttcacaccatggcattccagcctggatgacagaatgagaccctgtttctaataataacagtaataataataataaaatacatactcactagctatgactctgctttacaggataattggggcaaaaatgttcttgggtgaaactgggtaacctaatttgaaaggtctgggaaacatggcccaatttcagcctcgctcgccactcacaggccaagtggaggttgcggttcataacatactggacactagacatcactaatgccttcattctacaaatgggaaaaccatggctgagaggtcacctgatctcccaagttcactcagagacgtggggatgggccgagctccagagcctgggccttgccctgctccaccccatacagcacgaagttccctggccaactaaggaaggagtgcaaggtgactgaagaaaacaaaaacaaacagaactgacacaaaaaacaaacaaacaaaactgagtgccaaagaaggagaatttgggggctgaggctgtggctgcagagtgggagtggggataatcaacgctgggctcctgagtgtctctggaagggcgggccctggtgtccagagcgcctggtgcccaccttcccctttcccccagggcccctgtctgagagctcttctacccactcctggctgctggggcacctgatattttccaaaacacaattttcacacccttaatagtgggctgcggaggagtcaggatcagagcctctagctcagatttccttccctgaaaggatacggtcttagaaactgcatgctgtgcagagtcctatcattcagaagaaacacaaaacccaagccctggggagtcacgtggccaccacggatgccccggcctcggactaagctaagggcattagcccgggtggcctgtagctgctctgcagctctgatcagtcctacagacacatggcaccccccacctgtcacctttaggaccctccagtcaggcccccttaagatgcagtgttccccatgctcacctttgaggcttactctgctgctaaggaaacagcatgcaacttcccagggttatgagaaataattttcctaggaatgtcaccagctgcagacgcccctgtcataaactgtcccagctctaagccgcctagggcttttatcccctcctcttagctactcattacccagcttaattaggccaggaaatgctggcgctgaagacactctcggcaggaggcagggctggaggagagattctcagcagcgccacttcctgaggcttgatctgggggctggggaaggctgtggaggaggtcggctggggatggcaggctgcgtcctccagtgaacagctgctgggaacgaagcagggatgcacgcatttgctccccaggccctccagggagctgagggttgcacttgtttacggtaacagcaccggatctgaaggccttggaaggctctgcctgcccccaccccaaccctcccatctcaattaaccagcttcaccaccccacccccactctttcctagggaagaggttgaaacctcagttaccactcacaatatttcagccccaaccctgacataatcacagtcaaagacccagcctgagatgccttccattttcagccagcccctgaccttcaccctgaaccaccttggtcatgcacaacctcctggttcttcactaggtggaacacaggaatggggttgcctgctatagagctgtatgtgcttcacccagttttggagctttctgctccagtggcgttggaaggggagtagcaatgttgagggttcatagaatggggtttatatcagacagatgggggtctagactgtagctctgccccaggtcattctgtgaccttgaatatgctatttcatttttctgcacctaagtttctttagctgcaaaaatgggggtgctaatatcggcttcttgggaggttgagatgatcttatatccttatagtagacacaggcaaatgttcagtaagaagtggccggtatctccgatgtggggcactagttcagaggcctgcagttaccaacttttctttgctgggaggtatggaaaggggaaaactagtattaatgagatcccgctatctgtggaaggtattcatacttacacgattttcctttcatttcccaattatctgtggaggctttgagatttaaatgagtaaactgaggctcggagagggtaggagggtgagtcatgcctcatgagtggcagagcagatcatacaacagggctacggcagatgcccagggctgctgagtctgggactgcttcgtggcctggaaatgtcagaatgacaccagtctaggccaggcgcagtggctcaggtctgtagtcccaggacttggggaggccgaggtgggcggatcacttgaggtcaggagttcgaaaccagcctggccaatatggtgaaacccgtctctactaaaaattcaaaaattagccagttgtgttgttgggcgcctatagtcccagtactcaggagcctgaggcacaagaatcgcttggacccggaaggcagaggctgcagtgagctgagatcaaaccattgcattccagcctgggcgtcagagcgagacttatctcaaacaaacaaacaaacaaaagaatcacaccagcctagagcgagtaggatgactagaatctcagcagccacagcaccaggtggatcatcgccctggagaggggaatatgagggctgagtcacagtgtcatccaaaaaggacttgtcagcctctgcagaggctgcctctcacctgcggaacacgtacccactgtgctgtaagtcctggagcaatttgcttcagccttctcaggtgtatggttttatgccttggcttttccattgtgtccacattttctcagaaaatgcaaacttcttgagaagtgacctcatttccctcacctgcagcaagacaaacgtaattcttggcactcagatatgcaatagtgctgtgattttaacttttctatgtaactgtaactttgaaaagtactctcccattccaccaagcaaaaaaagaaaaaaaaaaaaaagccccagggcaggggtggagggattggggcgtaaggggaacctccaattccatccagaggagggcactagtccatctgctcaggccctccacacatcgaggtgctcctaggtccccaagaaaatctcttgatccacccaaagaatcccaaactactgaccattggtt

SEQ ID NO: 1888509 - DNA, 4001 bp, Homo sapiens
acagagtttcaccatgttggccaggctggtcacgaactcctgacctcagatgatccacctacctcggcctcccaaagtgctgggattacaggcatgagccactgtgaccggcctttttttcttctttcttttttttttttttttgagatagagtctcactctgttgcccaggctcgagtacagtggcacgctctcagctcactgcaacctccacctcccaggttcaagcgattctcctgcctcagcttcccaagtagctgggattacaggtgcatgacgagctaatttttgtatttttagtagagacgggtttcgccatgttggccaggctggtcttgaactcctgatctcagatgatccgcctgacttggcctcccaaagtgctgggattacaggtgtgagccaccgcgcctggctatgcttttgaggagccgattgtcaaaaaaaactgtgggcatgtttaaaagccatcataccaagaaatttctaatgactaaatcagtttctaggtagtttaatagaaggaagggattaggaacattgcaatcctagagagctatgtcccctggcagggtttaagtgtcgggctattgtgagtttgactgacttgaattagtcttccaaattctgattagctgtagttgaactgaattaagatcttgcccttcaaagctgaggaccaaaggacaccgctaactacttcttcattttattattattattattatttttttttttttcaagacggagtctcactccgtcacccaggctggagtgcattggcgcaatctcggctcactgcaacttctgctgcctgggttcaagcgattctcctgcctcagcctcccgagtagctgggacttgaggcgcctgccaccgcgcctggctaatttttgcagttttcagcagagacggggtttcaccatcttggctaggtggtcttgaacccctgacctcctgatccactcgcctcagtctcccaaagtgctgggattacaggtgtgagccaccgcacccggccctattttattatttttaaaatagagaaggggtctccctatgttgcccaggctggtctggaactcctggactcaagttttcctcccaccttgaccttccaaagttctgggattacaggggtgagccaccgcaccctggcctgctaatgtgtgagctagtgcagtctctgtccatatcctcgactccctctctgctagtgctaagtacattgtagggtcccgcgtttttagcatagctatacctatgaatgggccaaagaatctgagggcatcctacacatttcaaacggtgggaatggagacctctttcctccagcagaatctcccctcatgaccgggggactaccagatccagctctgctaagggcctccacggacggagtcggctacctctccactttcagtgaccgaaatccattctttgttcattcacccttgtgtctactccgggaaacgcgcagcggacacagtcgtgttccctaagtgtttgctgacttagtcatctggccctctctggagtagtcattttgtaccttgtactacattcgtgcctctacctctccgcagtgcgcgcgggggcggactcacgtgcgcagtctccctatgcgctgggagggcgtcagcaggtttacagaaacaatgaaagacttaacaattggcgcgcgacgagcgtcccttgactggcaggggcccagaggacctgaacatcactaagggtctgccccagcggcccggccctgaagtcaaggttgagacccccggcccagacagtccgcgaagctgagggaggccggcctggggcctgccgcgcaatgttaccgggatccgcaggcacagggcgatagtacggacgccgccgcccaggccgtgcccattgtgcgccgcggccagctcaccgcgatctcggtctaggaggcggcgggaccccgcacttcttccttgcaacggagcccctttggcctgcgggtcgagttccataggcgcccgacgggctccgcgcgcttacaggactacaactcccgtgatgccgcgcgcgccgaccgctgattggctgtgcagcggacggactcgcggggggggggggccgcacgccgtgcacgtgcgcacggcgacggccggatggctgcgtggggctgtgtggctgcgctcggcgcggcgcgtgggctttgctggcgggcggcgcgcgcggctgcggggctccagggccgccccgcccgcaggtgctatgctgtgggccccgctcaggtgaggacgtccgggttctggccgagccactcgccactcagggccggaggcggggcggggagccgcggggaaggaggggcggccgggctggtatcccagcctcctgggaactgcctggaccgtcgtcgcgcccgagtgcatcgcgttcttgctggagggcggatgcgccctgccttcctctgactcgctggcggcctcggaaacgctactcccgcgggagagcgctcgtgggacggcctgggccaggctgcttgtcagcccctgcgcttcccggcagtttccgcgtccctgttttccctgcgcgtcttctgatttccaccatgaggacgtttgggtcgtgattttcatctgcatgtggaggaaactgggccgcgcgccgggagccgcgcctgcgggtgctccgcccccaagtgcctgtgggtttggtgcgggccttgggttcagttcagctcgctgtgacctcgactgagcgctggaggctccgcgggcgggagcaggagggctggagccggcgcctgctgtgtgcccggcgcggtagtgatgtgtgagcctccccgcaacttctgagaaggtgtgaccttgtgtggtcaggaagccgaagcttgacgagttttcaagtacgttttctcaggtcctgcagctgggagacggcacaggacactaaaccaggttggtcagatccacggctctcacgctcccttgggccgttttgccttttctggaaaaaggaatcactttgtcttctaaacgcacaagtaatattttacattaacatacggatttcacagtaatccttgcattttttttttttagacggcatctctgtcaccaggttggagtgcagtggcgcaatctctgctcactgcaacctccgcctcccgggttcaagcgattcttctgtctcagcctcccgagtagctgggattacaggcacccgccaccacatccggctaatttttgtatttttagtagagacagggtttcaccatgttggccaggctggtctcgaacttttgacctcagatgatcctcacatcttggcctcccagagtggtgagattacaggcatgagccagtgcacccggccaaattacttgcatgaaaaaaacacatagtgcttactttgtgccaggcactattctaagtacttcacagttattcgtataatctttataacaactccgaggaaagtactattattagtcttcccattttatagatggagcagaggcacagagaggttaagcagcttacccaagggcacacagctggtaagtggcagaatctggaactcaggtagtctggtgccagagtctaagctcttaacagctgtattatttttatgatttttaaatatggagcagctaaggttcaaagcagctgagtgacttggccagtgtcacatagctagacgtgaccaaggtggaagtttgaaattagaatatgttgataaaaggacttacaaactgtcaggatataaatataaggaaatatcgcccttatttataactgttgtattggctctagcatctctgcagagtcccgaaatgtctccaagtgactcttccggtagagcagaaaaagaagaatgcaggatgacagagtttgagcacgagctttagaattgaatcctgtgcagtctgttagcggcttcacttaaggcaatttacatagctttccaagctcagtttccccatctatgtaatggatctattacttgtaatcccagctactcgg

SEQ ID NO: 1888510 - DNA, 4001 bp, Homo sapiens
tgtgaagaaaaacctcattgacaattaaatgctttgttactgatgcatattttctaatatgggtgaccacaatgacacgcataaaacgcaaaaaaaaaaaaacaacatatgggactacatcaacgtgaaaagtttctgcatagcaaagaaaactactttccaaataaaaaagcatcctatagattacgcaaaaatttcaggcaatcatgtaattcacgaggagttgtcaactaacgtgtacacaaaaaacactacaaagtagaaaaagaatccaatctaatatttcgcaaagaacctgaacggacaattctgcacagatataaaatcgaacaacagataagagataaggtcctcaaaattaactattcattagaatactgtaattcaaaaccacacgcagataatctcacagttattgaatattcctagaaaaaatttttcaaaataagaggggctgggagccgtggctcacgcctgtaatcccagcactttgggaggccgaggcgggcggatcacctgaggtcacgagtttcagaccagcctgacaaatatcgtgaaaccccgtctctactaaaaataaaaatacaaaaattagccaggcgtggtggcgggcgcctgtagtcccagctacacaggaggctgagacaggagaattgcttgaaaccgggaggtggaggttgcagtgagccgagatggcgccactgccctccagccttggagacagagcgagactccgtctcaaaaaaacaaaaacaaattggaatgggggtttggttttggagaaaggggaactcatacactgtaggtggaaatgaaaattagggtacacaccatggaaaacagctaaatagctggaaactcctcaaagaactgaaactacagatgtcccctgctctagcgaggtctctttctaaaggtcccgaggcataaaaaataaccctaggccccagctcagaggcccgtggggctcggagggacccagtccagcgcttcaccgccgcctctgggccagggcgctcctataggctggacgcgggtcggacaggggcatagccttcccggcgggggtgtggacgctgccgaggccaggatcccacaaccgccccgacgctgacgactcgggcccagatgcccacttagaagtcagggcccgaaagcagggagcggccgagaaggagtagggagacccagagggttccaggtggggttcatccccctccacttaccgccgaggcctgccacctcctccaccaacaaacggaagccaccacatcttctccgagactcgctctgaccacgccgccgatgctgcccgggcctcgcacgaagcgcagtctcggcttccgtcggggcctgcatgctggcagcgtccctggcgccaggctgaagcaccaccccctcttaaaggggccgcggctgggactgggcagaagcagcttcgggttgcacaggctgagcgtctgcccagccccaggggtggacgaaaggcccccagtctctcatcctcccgggctctagggccctagaggtcgcagaagcgcctcctgtgaccccagcccctaaatcggctccctttgcctgaggagcgcccgggacctgcccctgccctcctcgggacctcagcttcaccatccgcaaagaaagcggcctggctggagctctggggtccctcaagctcggcgcctcaggatccagggtgggctcccctgcccctctgcagagggggcccaataaccacggaaagctgggggctggagggacagtcccgagggcagcagggcgtccttggcctcaccgtctacattcgtcctgtgggagcccgggggcgtcgctagggcccagactcctgcggcctcaccagggctgcctgggtcaccgggctccccaggaggcaggcaggggccctagggtccagcgctgcccccacctcaactccattctgcgtcagcatccgcgagggggtcctgcggactggacccagacccactccttcccggggagcgggaccggtatcggtctctgtgacacccacgggaggggccgtgctgacctctcccggggatctgggggcggggtgggggaatctcggccacctcttgaagctcgctgagccccccaccccagagagcgcgcaggagcaaaggaaaggacggagagcccacacattttcaatctttcatttccgttttttcttttttcccccctccaaaatgaaagacatgtgtagctttgtcccctgtacacgatccattccccagggccgctgtgcggatccagcccgctggttgcctctagggtccgcatgcggcccggggcctgcccaggtgaggtctgcggccgccacagcgctgaggtcccgcctggccggggagcacgagccgctggggatgctggctgcgaggctcccgggaggtggagcgggaggttgccccaggccctggctgcagagctcttgatgtcacgcctggcaccctccgtccaccgcctcggggcagcgcttcagagccccggcagaggcaagaagtcgatcacttcgttcttcattcgttggaaaaatttaaaagcacattataatccctggaacaaccacgtcagagatagagcaaaaaattaaaataggattgtaaatgacacactgaaataagtttattttaaaaatggtagtcaatggaaaaacaggatcagaagacaggagagacagggaaaacaaataagttatctgactgaaacagaattagaaactaacaacagtaagaaatattggacatctgaaaatatgtgaaaatttaacaacccacctctaaatcattggatcaaaaaaaaatcacaagataaattggaaaatattttgagctgcactccagtttgggtaacagactgagaccctgtttctaagaaaacaaaacaaacttcaaaaagctataaaattaaatgccaactttcccctttacccaaactctctgtggctctcctttgccctcagagtcaagcccatgcttctcactgtgggctccaggagctaggtggcctgaccagtgcacaccctatcaccatctcctcctctgcccacttgatcacgctgtccagtcacacacactctttatttttccaaatgccaagctcctgatcaccgctgggcctttgccaccgcagttctgcctgccaggaccagtctttccctagaccttcccattcctgcctcttcctggcttggctgcctctttccggtgcttcaggtctcagatcaaatgtcacctcttcagagaggatttccttgaaatctctgcctaacacagcctgtatcaaggtcaacacttttctctttttagacttacgttttgatataaagaagtttcataaaaatgacttgggcagctatcatctgtttaaaaggtctgactttgttgaaataatttgggctttcctgttctttgagttttgataaaacaactgtaaaatcatctgcctttttttaaaaaaattgagattgatgcatactttctgttattactattttttttacattctgtctcccaggctggaacacagttgctcatagctcattgcagcctcaaattaccttgcctttgtaacagtaggtcctcagtcacctttctcatctacagatgttggtttacttaagctttctaattacttggaggtcagcttagctcagtggttagcacaagttgctaataaatgctcaagtatgagggtgcaaagaaaggggtagggaggtgcaagactcttggcttcaaatgcccagtcccctactcatctgctcaggcccctgtctagcctctgcatctaagccaaactacacgcctcctcccctgagaagccctcttggatttctcctgtcctgtcttccctgctctatcctccgatgagtggatccacccatctgcctctgtgctgggcagatgccactgctctctgctttctggctggacaaggcaagggggcaggtgtgtgtgtagaagtccccctaaaccttggcc

SEQ ID NO: 1888511 - DNA, 4001 bp, Homo sapiens
tcgcttcccactattctcagtgagaggacacaggctaccccttgaggccagcccacagctctcttaccaggcagcaacttaccgcccctcactgtgtcctgtcgctctgctcttgtggcctgctgtgcagcaggcaccatgtcacccgttcatagatgagcaagccaaggctcggggcaggagaccggtgcagcaggctctcaccacctcatgggagcaggctctgcacacggcatgctctcaggcccctttggctgagtgcccagccccaaccccaagctaccccgctggctatccaagcactgggtggagtctggaggagagaatggttaggtgcctcctctgggtggcccctcactttagggaggctcaggggctgtgctccagcctaggtggacatggttgtggctgcccctgtccctcctcctgcccctgcccctcctcccacccttgcctgcttcctctgctccagctcagtcaagaagcgtggggtgctgctgagacagaagggggccagggagaatgcccatggcatgaagtcctccagacctgccctaacctccccctccccactctacaatgcgcaccccataaagacctttgtcaggcaacccctccaatgcaatcagaccagcgtggagcctcctgtgcctgaggaactagtcccaagcaatggcagccctcaaacccactgtgggcttgtcagcatggtactatgacagtgctgatgacagtagtgaggatgggctcagtcacagcgaccatagtgacggaggtgtggtgatggtgatggaggtagtgatggtgatagtgatggtgatggtggtggcgatggaggtagtgatggaggtggtgttactggcggtggtggtgtggaagcggtgatgggggtggtgatggtggaggtgatggaggctgtggtggtgatgatggtagtcatggtgatggtggtggtggtgatgctggtgatcatggtgatggtggtggtggtggtgatggtggtggtcaaaatagaggttatgtggtggtactgatggtgatggtgatggtggggatggtgagggtaatggtggtggtgatggaagttgtggttacagtgatggtgttgattgtggtggaggtgatggtgctggtagtgatggtggtggtggtggtggtggtggtgatgatgccggtgctggtggtgatggggtgctggtggagctggccatgatggtggttatggccgtgctcatggtgacagtggtgatgatgtaaatggattctcctcctggagtttcctggagaaacaacttctctgcttccccagggctgcctggtccctccctgcctgggggtggcccccagaggcaggaagagcagagcgtggactgagcctgacagggcagtcagtatcttgaactcacagagaacatttaatcttagttaaaagtaaataagttcatttactgggaggggaagaagggcccaatatttactgcaagcatgtggagtgattactccaggaggttcccttgggatgccaggctccatccccactcctgtcaggttcacctgtggcaggtgggagggaacggcatgggcccaccctgccctcgggcccccagaggggcatctctcttctaccccccacggcaggggctgcagggttggcaatgcccccttccctccctcagcccccaactcttggcagggccctggcccacggacccctggattcttgcatgtgggcacacctcagcccctggcaggacacccccaggccctcactggctctgttgctcacctgctgtgtgacctcaggaaccctgcccctttttgagcccctgtactcacctaggaaatgggtgataaaggcacgtgcccccggcgggggatggaggttggtgctggtggtcagtgttcccatgacaatgacctattggctgtgcagaaggtgagcctcatcttccaaactcaaggagtccttcatgagcacagccctcagccaccgagatcccccaaactcccatagttcccgaatctccacggccaagtgctgagacaagagccctggggctcaaggcccctcaggcagggtgcggtgagggcccgtcggaggaagggcttcctcctgcccatcctggctgggcgctgtgcgggactgcaggagcctgagttggggtaaaaggaatttcaggggagacagtcagatccaaggtcaactgcccagctcagcccaggactccagcctcttgcaacaagatgggccaggcccctcgctggagtctgctcagcaaggggcctgtgggtccctgggcaagcactagccgggtcctaccctcagcctggggcctccttccagcctcctccctggcgcagcccagctagagtttgttcatttcctgggggctcccgcctccccctcccctggccctgcactgcgtgagggcgcatctcctagaaccagccccccagagtctgctgagattaggagacctggaggttaccccagggacaccctgcccctgtgccccagacaggtgtcccccccactatgggtgatgaatgtcgaggagctgccattataattagtgtggaatgtgccgcctctcccagggaggaaaatcccatcttggaaatacacctcagatgcaagttgaatttcacccacggggccataaaaccattttttcaatcacctggtgctgttgggggctggcaccattaatcctggagatgttatttagagccaagacatcacttggggaaaaaaatcaggtccgcactccatgaggaacccctctctatgccctgcagaggcctcaggagatggacgagactgctcgggcaccaggcagggaggggcagggacgcagctaccctcacagccaccctcacggcccaggagccatgcctcacttcatcagctcctgccagaccctccctaccagagatggccccatcggcataagggaagactgaggccagagaggaatggaggaattggagggctggaacagctggtgggctggacggctcagctccacttgccctgcctgcccccagcagacactgccctcctcttcattcccaaagcccccacccggcccagatcctctcctgagatcagtatcatccaacagccttttataaaaaattgtttccttgattaccgagggtaacaatgaaaacacgtaattgaatctccaagaaattaccatttttataacttgcgcccagttcccgagataaattaaacgcctcccctgtatggtgagccgctcactgcgcatcagagaggggctgatactgccctttatcatcgatgcgggacttactaagaagaatgcctcacactgcctcccgggaggctcctggcacctccagctcatggccctgagcgggcagagttggccagctggaggcgccgggcgggtggtcaggtgggccccctcctgatcactcctggccctgttactggctagctgcgtggtggtgtgggtggtaagtgggagggccagtcagaatcttagcccagactcccaagaaaatcaggcctgtgcgcagccgggcagcgacagctttctgagaagtgcaaccctggagccagagtggggaaaaggcagggaagccgggtaggaggaaggaagtggagatggcagagagggaggatttacccacctgccccccacttgctggccaaagctgaccccacccaattgcgccagtgcccagaggacccaagatatcacaaggtcaggcagcagagcggctctgggggaggcgaggccccgctgaggcaaggcaccgcctggcacagggtccgggagcaggtgggggcagcagggtggccacacccacccaaggagctgctgggttggtcagcagaggggcggggaggtggggccagctaccgggatgggctgtccatctgtgagcagctggtagtgggtttcctgctggcagttgctagtggctggattctcatggctctctggctggctggaggccgtttgggt

SEQ ID NO: 1888512 - DNA, 4001 bp, Homo sapiens; identical to SEQ ID NO: 1562659

SEQ ID NO: 1888513 - DNA, 4001 bp, Homo sapiens
atgcagcattgtttctgacttactatcttggaaaggtttcagtagggtgaggagtttcaaaggtttctactttgcgcttccttacatatggtaccaaaggcctgggatcaatgtatacgctccgccctctgctaggtaaaaacatcccaagtatgcattgagaccagagaagtaaccacaggactcgggttgggaattctgcttatcatctgatttccataagcctgcaccctaatgagagggccatgatgcttcagggctcctggaaacagtgtcagctcagatcctgtatcagcccttcaaagacctagacagtcccttttccgaagtaaactagtttttttggtgtgtttgttgttgctgttcagacagtcttgctgtgttgctcaggctggagtgcagtggcgtgaacacaggtcactgcagccttgacctcctgggcttaagtgattctctcacctcagcatccagagtagctggaaccacaggcacctgccaccacgcccagctaatcttttaatttttgtaaagacaggttcttgctatgttgcccaggctggtctcaaactcctgggctcaaacgatcctcctacttcggcttcccaaagtgcagggattaaaagcgtgacccactgcccccagccagaatcagttttcttttttttttttttttttttgagactgagtctgactctgtcgctcaggctggagtgcagtggctcgcggcaacaaggcctgggttcaagggattgtcacgcctcagcctcccgtgtagctgggattacaggcacaagccaccaaacccggctaatttttgtatttttagtagcgacggggtttcgctatgttggccagggtggtctcaaactcctgacctcaagtgatctgcccgcctcggcctcccaaaatgctgggagtacaggcgtgagccaccacgcccggaccagttactttttaaagtggctctaggtccctttagggaaggattggaggaatatttcttggtatatgctcagatgctggtattgtaagatccttcctgagaggaaccaagcctccttgtcaattaatgggctctaggtctcaaaactgactcagatttaaacagaatgatcatgattttccactgcagcaaaagtgacattagccttgtgatcaccaatttttgatttctttctggttatcaaacaatactctagtcagatgccccaaagaacaccatggttcgacagacattgccacagatctctgtgggtccagcgttcctggtcgccgctctagcctggggcagaagcagaaatgcaggaggcacgcgtttaaatcaggacgccctcaatgggaggtgcgcaggccgaggagggggctgcggcaagctgcgagtcttcactttcttcggctcttgggtttgactctgtaattggttctaggcctggaggagacgaggaggatagggggagaggggaatgaatgaagacgcgcatctcaagcggggcagcaaaagactcctcattcagaggtgcggctctaccggccagggagtccccgtgtagactgggcatttatgcaactggagtcatcggaactgtcccaagggtcacattccttcagcaaatgtttactgcgtacccaccgggtgcccgcatcccgcactctgcccgcgctgtgcggccctgcctagcgcgcgcgcctcctccaggcctcacccacgctcaggacggacgcgcgctggacggctcttccttgtcggagcgccccaggggtcggggaagagggcccggcaagggagccctcgcgccggagctgcagctgcagccgccgccccgccgccccgccggctcccacggggcagagacgcagctcctctccggtcttcccgtacgctaccgcgcccgggcagttcctcgcccgcgcacgcgccgctccgccaactgattggcctccggcgcctcggattggcccaggccgtccaacagcagccccgcccagagagagaccattggtccttgcccataggggcggggcccggcagagatctgcggaattcggccttcggaaagagcccccgggccggggcacggagagagccgagcgccgcagccgtgagccgaatagagccggagagacccgagtatgaccggagaagcccaggccggccggaagaggagccgagcgcggccggaaggaaccgagcccgtccgaagggagcggagcgcagcctggcctggggcccggtcgagcccgcgccatggcggccgaggcgacagctgtggccggaagcggggctgttggcggctgcctggccaaagacggcttgcagcagtctaagtgcccggacactaccccaaaacggcggcgcgcctcgtcgctgtcgcgtgacgccgagcgccgagcctaccaatggtgccgggagtacttgggcggggcctggcgccgagtgcagcccgaggagctgagggtttaccccgtgaggtgggaggtcaggggtcagcctctccggtgcgcggatcggggtcaggggtcagccgcggggccctcaggatgctccatgttttcgcccccctcttgcgcccgcgcctggggcggggcggggccggcctggccgggagggggccggggccgcggcaggtagggccggccgcgggctgagcgcgcctggtgtgggtctgcagcggaggcctcagcaacctgctcttccgctgctcgctcccggaccacctgcccagcgttggcgaggagccccgggaggtgcttctgcggctgtacggagccatcttgcaggtgaggggggtgtgagcgccgcagcaccagtggctttagggcctgtcgcttacgcgatgcgggtagtattgttcccgttgcgcagttgaggacaccgaggttcacggtctgagtaacacctcattacaccgaagcctgggcctgtattcccagagctttgggaggctgaggcgagaggatcacttgagcacaggagttcgagaccagcctggacaacatagtgagacccccatctctaaataaaaatagaccaacgctaaagcctgtgctccagagcctccaggcaattggatcagaagtcgcagctctggtgggaggaaggcgagccctcatgtgtgtccctgtgccactttgccttggcccctttgctgtccatcctttttcagggcgtggactccctggtgctagaaagcgtgatgttcgccatacttgcggagcggtcgctggggccccagctgtacggagtcttcccagagggccggctggaacagtacatcccagtacgggcccagtcctaccctctcctccccaaggcacctccaccccctaaccctaccccagtgcccaatgtctgcctccacatccctcaccccaagtagggaatttcccccaaaaccctgacttcccctcattgccccagcccttcccactcctgccccagccccatcaccaccctgatagcttcctgggtgcagagtcggccattgaaaactcaagagcttcgagagccagtgttgtcagcagccattgccacgaagatggcgcaatttcatggcatggagatgcctttcaccaaggagccccactggctgtttgggaccatggagcggtgagtcaggagcctcctcagggctcctgtactcctgagctgaacctccatgccagcggatgtgtcgggggctctatccagccctccacttgagtggatctgatgtcatgggctgtcacagaacaggcttttaaatgcttgccagaggccacatgcagtgcctcatgcctgtaatcccagaactttgggagccgaggtgggtgaggtgggaggatcacttgagcccaggaggcggaggttgcagtgagctgagctcatgccattgcacttcagcctgggtgagagcaagactctgtctcaaaacaccaaacaaaaaaagaaaaaagaaatgattgccaaggccaggcacggtggctcatgcctgtaatcctagcacttcgggaggctgaggtga

SEQ ID NO: 1888514 - DNA, 4001 bp, Homo sapiens; identical to SEQ ID NO: 1562661

SEQ ID NO: 1888515 - DNA, 4001 bp, Homo sapiens; identical to SEQ ID NO: 1562671

SEQ ID NO: 1888516 - DNA, 4001 bp, Homo sapiens
aatcgggcagaaaacccgaatagacatcgctgccaaaattacataacatgcacaaacacgtaagagaaaaggtcctcaacattactattcatcagaaaagattgtactccaaaaccacattcagataccatcccacacctactggaatacatgttactgaaaatatcttaaaaattaaaaagaatgctggtgtggatttggataaagggaaaatcttatgcattgttggtgtaaagataaattaggatatacactatggaaaaaagttgtaggccagacgcggtggctcatgcctgtaatcccagcactttgggaggccgaggcgggcagattacgaggtcagaagatcaagcccatcctgattaacacagagaaaccccgtctctactaaaaacacaaaaaattagccgggcatggtggcatgcacctgtagtcccagctactcgggaggctgaggcaggaaaatcacttgaacccgggaggcagacattgcagtgagccgagatcacgccactgcacttcagcctgggcaacagagccagacttcctctccaaaaaaaaaaaaaagttgtaaattcctcaaaaaattgaaaacgcaactaccatatgatctagcaatcccactactgggtatacctccaaagcaaatgaaaacagtatcagagtttgcaaagcctcaatggggataggagattttcttcattaaatggttttgaaaaaactgatgtttttatgaaaaagaatgaaacaggaaccttctggtatacaatacacaaaaatcaactcaaaatggattgaagacccaaacacaaggcctgaaattacagatcatcatcaaatgtctgtaagataaaaagaggggatggtggagcacttagttttggggcaacttgcatctaggctcacagtttggaaacaggaaaagaaaaaaaggaaaaaaaagaagagggacaaaatctcgtcgagaatggaatgacttatgaatatatttattttttaaattgggaaagcgaatcacaagtaacaaaagcaaaaacaaccatgtggggctacatccaactggaacgcttctgtacagaaaggaaacaatgacccaaatgaaaaggaatcctacaaatggggagaaagtttgggggaagcatatatctcctaaggggttgttataaaagatatgcaatacgttaacagcgctaagcagcaataaccacaataagataacaccaaattgggcagggaccctgaatagacatttctgcacaggggacgtaacactgagcagaatggagagaaccaggtcctcagcatcgccgtcatcaggggtaagtccccgtcaggctcgcactagggtgtccctcccccctggtcaggtggtcgtgaccagagggacagaaggggacataggcttccctgggggcgggggttggaggggggtgaaagagtcccgatttgtcccgatggcgggaaggcaaatttaaaaattcatcaaatcctggaggcagctggcatcttttttcctccgtctgaggcctggacaggaggcggccaaaaacccagacctggcccccactcccacctgggccgggcttccccttcctctctccccatctatatgggacaggttccctcagaagaactcctcaaaccctaaaaataccacagtctgctacacttcccaccctcaaaagccctcagggaacaaaactaatggtaaaacaaatattaaaatactataagagaaagaggaaaactagtgagaagatgagaataaagggaacgttcgaggaaacaaacttctgtactcaccgtgtagaaaaaaatgccccggagaagctgagctgcacgcagctcccgcctaagcagtcagggccatagacgtgagctgttttctccccaggacggggctccaagtggtccccaagccgccgcggtgccccctgaggcgggtcctgaaggaaccggccccgctttccttcttctcattctggactccacgccacgcacgccacgcacgccacgcacgccacgcagcgtctacggtgagaacacgcatgcgcaccatgtggggcagaaaaggcggtttcagcgccccctgccagtcacagtgcacagtgcaggatgattcacctcatggtcagcataagcccaggtcaggtagggtagaagggtgccttgtgggacaccagggagcaggaactccccaacctatgcatgtggacctccccctgtgaagctcccttttttttttggacagggtctcactctgtcccccaggatgaagtgcagtggtgcaatcacagttcactgcagcctcaacctcccggacccaagtgatcctcccatctcagctttcaagtacctgcgaatctggctgctccactgttgggtgcatatgtattcaggataagtaagtcttgtgtgtgtatatacgtgtgtgtgtgtgtacatatgtgtgtgtgtgtgtgtgttgtaaatgggaatttatagggagaattggctcacctaattgcaaggcaaagtcccacagcaggtcatctgcaagctggagaatgagaaaaagcagcagtagtgtggctcccaggggaaccagccatgtggatttgtttatgtgcaaaagcctgaaaacaacggaaactttcactgcagctcccagtctgaggtccaagatttgagaatcctttgtgtttgctggtgcaagtagcagaatacaaaggcccaaatcatggagtttcaagtccaaagacaggaggataggaaaaggtgaccctcttccggagagacagagtgagcatgaacaggaaagcccagcaagctgaatgtgccctcttttctatcttctttgttctagctcagtgcatggactctggagccaggccacctgggttaacatcctgctccagccacttataagctggtgacctggagcaggcagtgaatcctctgcgtgtttcagcttctccatctgcagaaaagtaccttctcataagagttgttgagaggataaaatacagattaatatacatgaggaactcagaacagtgtctctgtgtgtatagataatacaaacacatgtacacacaacttctatccaactggagaccacattaaaatcctccgttttgaacaataccataatccccattttgtcccacacctccccacccacctcctcagtcggatgatccctggagaaaatatggaaccatctgtattaatgcagttctctctctctctctctttttttttttttttttttttgttttgagacggagtctcgctctgtcacccaggctggagtgcagtggcgtgatctcagttcactgcaacgtctgcctcccgggttcaagcgattctcctgcgtcagcctcccaagtagctgggattacaggggcccgccaccatgcctggctaattttttgtatttttagtacagacagcgtttcaccattttagccaggatggtctcgatctcctgacctcatgatctgcccgccttggcctcccaaagtgctggcattccaggcatgagccaccgcacctggccggcaccagtcttcttaaggctttacctgaattcaatgttagcgttatatcataagagggaccatattaacatttgttttttgtttgtttgtttgtttgagacagagtttcgctcttattgcccaggctggagtgccatggagggatctcggctcattgcaaccactgccttctgggttcaagcgattctcctgcctcagcctcccacatagctgagattacaggtgcctgccaccacgcccggctaatttttgtattttagtagagacgggttttcaccatgttgatgaggctggtctcgaattcctgacctcaggtgatccgtctgcctcagcctcccaaagtgctgggaatataggtgtgagccaccacgctcggcctaacattcgtgtatctcagaacagggactgaagcacagagagatttacataacactcctaggtatgtgcagcttctcagtg

SEQ ID NO: 1888517 - DNA, 4001 bp, Homo sapiens
ggtgagggaggcgatcacgttgctcacggctttgtccaagaggccgttggggcgaaaggggcgtcctgggggtgggagatgcgggtaaggggttgccttctccgtcccccgccttcccagttcccgctttgtgcccttctgcccatcacccaccggcttggtcggcgaaggcggcacaaaggcaggcggcctcctcggtcacccactgctccagcgacttcttgcccaggcccaagttgcgcaaggtggacacggagaagcgcctctgctcgcgccacgcgggcccatagcgcgacaggatcacccctgggggcgggacgggcacgtgggcgttgccatgaaggccttggccccaccctccgccacccactccaaccctggcgctccacaaggtctcccgcagtccctagcccggtccagctgggcacagggcccactctttgctcacccacattgctcccctgcctggggcggggtttggccccacctcgtctctgcccaccctgaccacctttccactcaaggaagatcccgcccgtcccgcccacactgagcccgcagcataggcgcggtccccgccaccgccacttcgacgcatcagcctcgcccaccgggcttctggcgggtctgggcagtagccccgccccctcccagcccacagactcgcacctcccccgtgcaggtggtttcctggcccactgtcctcagcccactcgctggcctttatctctgtttcacgtccaggaccccacgccctgtcggcgctgcttgggctacggtcactgtccacccggggcccacggaaacgcggtctctgtcccccaccgccgcttgccttgggaacgcggcccgaagcccaggacctggtagatgggcgcaggcgggcggtcggccgtgtcctcgccgcgggtcaccatcgcctcgcgcacggccgccagcccattgagcacgaccaccggcgtccaggccagctgcaggctgaacacgtccccgaagcggcgccgcaactgcagagggagggtcagggcctcttgtcaagccaggatcaccccagactacaggtcctagtcctatttgaaccttggacgacccccggggctaccaggagtgagcaggtggaaggaggagacccagcctcctgatcgtggggcgggggtgggggtcacaccttctgtgatggaggaactcagtttggatgcgtcacccaggtatgaccttgcaagagtcaccaaaattgccgagaggccccagttagcatcccattcccagatgatggtccatgccggtgagcagtgaggcccgaggacccacagtgcaaaaggtttgaaccgggtcactgcacccccttcatcctcgatttcgtgatttaaacggcactcaggactaactcatcttccattcccaaggcctttccttctggtgtcagcagaagggactttgtactccataacatatgttgcccaatgggcttgcatgcccactgccaagtccagctccacctccaggcccttgccctactcttccttggcctttggaaaatccagtccttcatgccatgtataaatgtccttccccaggacgtcccccaaacctgcttccccttctcagcctggcttctgatccagcctgtggtttaacccaccacccatgtttgctggtggtggggcatcctcaggacctctgccgccctccaggacctcctccctcacctggtcgaagcagtatggtgtgttctggaagtccacatgcagcaaggttgcccagcccgggcagtggcaggggacctggcgggtagcgtgcagcccagcgttggtgccggtgcatcaggtccaccaggagcaggaagatggccactatcatggccaggggcaccagtgcttctagccccatggctgcctcactaccaactgggctcctctggacacacctggcacccccaccccaccaggcacagaggaccaggcaggacactctcggcacaccgagcgcgtgacccttcccttataaagggagctgatgatggccttcgccctctgctgtgagtgaacctgctgtgttgactgtgctgccagtggcagagtcaggccagggcaggtatgggctgctccagaggtccttgccgctgcttcctgctccaggcccttacccagggtagggtggtagaaaggcctggtcggagaagtcaccccctctccccactccaagctccccaagcccacacaggcttctgggataaccagggtctcagtggacccggccatccacctcccagctaggctcatacaccctaatgtagtcacaacccctcctccagaacatgaccttgccctttccctacccccacctgcccactccagagtgaccttcagcacccttatctgtcactggcacttacctggggccttagagctcctgatgatgagtggcatcatgggcctggtcccttcacttcaccttgcactcttgacatgcacagacgctatgcacacacctgatggtgcacagatctcttgtccactcccagacacttgtccacttgttcacacttgcagggacacgattacacatgcagaaaatcacccacacaaagacaatattcacacatacacagactcacactgacactcagggcacacattctctctcacacacaccagtcacacacacatacagacccggcaccaagtaccccacttcccagccatgcccgaggtttcctggatgggacctctcctgtccagaggctgctcccggtgagcctcaaagctgtcacatggatcccagctcagcccacattctgggctctggccgggccatgacttcctgtttgcaacagggctgttcccagagctcccagttggtagcctgaaggccgttgccccagcctgtgacagcatcctccagggctgcctgagggtcgtcattctccactgcttcctggcctccatgtttctgattagaaatctggtggaaacattatggaggatcctttatttaggatatgttgcttttttatttttattttttctttagacagggtctcactctgttgcccgggccggagtgcagtggcaggatcatggctcactgcaatctcaacatcaagtggacctcctgcctcccaagtagctgggactacaggcaccaccgagcccaaataattttttttttgagacggagttttgctctgtcgcccaggtgggagtgcaatgatgcgatctcggctcactgcaacctccacctccagggttcaagcgattctcctgcctcagcctcccaagtagctgggattacaggtgcccaccaccatgcctggctgattttttgtacaagaagtttatagaacaccaagcagatttaacccaaagaagacgacctcaaggcatctgataattaaactccgaaaggtcaaggataaagaaaggatcctaaaagcagcaagagaaaagaaacaaataacatgcagtagagctccaatacatgacatggggcagccacctttccagtggaaaccttacaggccaggggggagtggcatgacatatttaaagtgctgaaggaaaaaaaacttttagcctagaataacgtatctggcaaaaatatccttccaacaggaaggagaaataaagaccttcccagacaaacaaaagctgcgagatttcatcaacaccagacctatatcccacaagaaatgctaaagggagtttttcaatctgaaaaaaaaaaggatattaatgagcaagaagaaatcatctaaaggtacaaaactcactggtaatagtaagcacacagaaaaacagagtattataatactgtaattgtggtgtgtaaactactcttattttaattagactaaatgatgaaccaatcaaaaataataagtacttttcaagacagacagtacagtaagacataaagaggccggacccggtggctcacgcaggtaatcccagcactttgtaaggctgaggtgggtggatcacctgagggcaggagttcga

SEQ ID NO: 1888518 - DNA, 4001 bp, Homo sapiens; identical to SEQ ID NO: 1562693

SEQ ID NO: 1888519 - DNA, 4001 bp, Homo sapiens
atctcatcgccgtggtcccttatgcctagtgacacggtcctggatagtcttccccctgctccttgacggtccgatcccacttgcccatgctgtattcgaggctgagcccagtctcttacccactgcagaatctcatcaccgtggtcccttatgcctagtgacacggtcctggacagtcttccctacagcgctttggcaagtgtcatttttccttttttcttttttttttttttgagacggagtctcactctgtcacccaggctggagtgcagtggcgccatctcggctcactgcaacctcccgactccctggttcaagcgattctcccgtctcagcctcccgagtagctgggattataggcacctaccaccatgcccagctagtgtcaattttcactgaattatttttttaacagtggggactaaagagggtccgcaagcagggctgctgctgggcaccatggagggccgcctggcgggacacgccccaacatacaggggtccttgggggctccccttcccctgccagctgggctggggtctctgtgtcaggattgccctcaccaccacctggggatggacctccactgtcatcctagggaaggggccagggaggggagtctacatgctgagcgggcctgtccgaggcctctgctatcccaatgcagcccccagtatttagacctgcccccagtgacctgctccctcttgcccatcattccaggaacttcctgctccacgcctgcgcacatcctgtcccgaggccagctccccctgctcagcctcaggacgcagccacccaccctcccaggagcgccttccctgcccctgtggcttcctgctggcactctctgcactgggttcttcctcctggtgtgtgggcccctagtctctgtctcctgtcgggtttgacttctaccagagcagggacctccctgagtcctcatggcccagaaaagtgcccagcatgcagtaggcgcatcataaatacctgtctactatcatgtggtgaactgagtgaagacatctcattaaagatgacattaaagaatagggcatagggcttggcattcagtaggcacacagtacatgacggctttttatttccagtctggggttgtgttcatgcttcagtttcccacctggcctgataggaggggctcagctgctgggctggctgtgtctctgtgccccttgcctggaaatgcctgaggaggggcagggtcctcatcccagccacatcccaggggttcccagccctctgaccttgaggagctgtgggaggcaaaggctgcagccaccctgtagcactgcaaacacaggctggggcgggaaggggggtacagagggtgtgcacaaggggcagggggcagggagagggtgtgcacatgggaccagggggagggagggggtgtgcacagagccaggctgtggctgcacctcgacccttaccactcccgcccaccccatggaaccccctctgagcccttacgcctcggcaggtgggggtgaggagcttaagtataggtctctacccaagatttgcaccaagtcatgtcagtcactggtgtacatccttgtaactgacacacacatcaaggtctttcctctacatcttcctgtctcaagatgagaacgcttgatagtggttaattattctcttatgttacgtgtttactggagagtgtgataacacatgaaatagtacgtaacatctacgtcagccaaaagcataaggactgcctgtctacccaaccagcatatttatccccgtatcagcgcaatgcttcactcccttctctccagatgggcctgatttgtatgtttctcttgctttttatagatgtttttctaagtatatggtatcttgaaacagcataatttggctttgattgtctttaagtgttatagataaaaatggtatactgtattttaaaaaaaactcttctagattaatatacttaagtaaaaaatggtattctgtgtactagctgggctcggtggctcacgcctataatcccaacactttgggaggctgaagtgggcagattacttgcggccaggagttggagactagcctggccaacatggtgagaccctgtgtctactaaaaatacaaaaattagccagatgtggtggtgcacacctgtaatcccagctacacaggaggcagggacaggagaatcacttgaacctgggaggcggaggttgcagtgagccaagatcgagccactgcactccagcctgggcgacagagtgagactctgtctcaaaaagaaaaaaaaagtattctgtctatggcttgcatacacacacacacacacacacacacaggcacacacacacaccccttgctgaatttttttttttttttgagacagagtctcgctctgtcgcccaggctggagtgcagtgtctcgatctcggctcactgcaagctctgcctcctgggttgacaccattccctgcctcagcctcctgagtagctgggactacaggcacccgccaccacgcctggctcatttttttttttttttttttttttagtagagacgggatttcaccatgttagccaggatggtctcgatctcctgaccttgtgatctgcctgcctcagcctcccaaagtgctgggattacaggcttgagccaccgcgcccagcctcttgttgaattttttactggatttgcattaaatctgtagaacaatttggggagaatcgacaactttataatactgaatctcccaatccacaaagagtagattatgtattatctctcttatttagattttttaaatgtctttcaatcaagttttataatttttctatacaggtcttgcatagtttttgttagattcttcagttaccttagttcctattgttattgcaaatggtaaatgtaacagcctgggactggccatttaaacccaacattacttctaagcttcatccattctgttgtgcaactgtggctgattcagtctcaccactgtataagaagactccaactaatggccaggagtggtggctcacgcctgtaatcccagcactttgggaggccgaggcgggcggatcacctgaggtccggagtttgagaccagcctgacaaacacggagaaaccccgtctctactaaaaatacaaaattagccaggtgtggtggcgcatgcctgtaatccctgctgctcaggaagctgaggcaggagaatggcttgaaccccggaggcggaggttgccacaaactgagattgtgccattgcactccagcctgggcaacaagagcgaaactccgtctcaaaaaaaaaaaaaagaaaagaaaagaaaagaaaagaagattccaactaatttattcattctcctgttaatggacatttgaatcagtctggattttctttttttctattactgtgtttctatggacatttttgcacctgcctcttggggcttgtatgcaagagtccctcaaaagaatattttgaggccaggcacggtggctcacacctataatcccagcactttgggagacgacacgggcagatcacgaggtcaggagtttgagactagcctgaccaacatggtgaaaccccgtctctactaaaaatacaaaaattagctgggcatggtggttagcacctgtaacccagctactcaggagactgaggaaggagaatcacttgaacctggaaggtggagcttgcattgagtggagatcttgccactgcactccagcctgggcaacaagagcaaaacgctttctcaaaaaaaaaagctttctcaaaaaaaaaaaaaaaaaaaaaaaggaaatacccaaagtgtgtttttcttgctaagaaccagtaattccttttcttgatttctgtgttgtttttgagaccctattttatttagttctcctctgatctttattatttttttcatgggctaattttggttttgctttgttcttgcttttctagttctttaaggtgcatcataagtttattaatttttcatctttctact

SEQ ID NO: 1888520 - DNA, 4001 bp, Homo sapiens
agaccttgcttaaacacacttattagttctaataactttcctgtagattccctaggattttctatgcaatcatgtgatctgcaaagggagatggtttcatttcttcccctctggcctggatggtttttcatttcttcttgccttctggcactggctttgacctcaagcacaatgatgacagggtggcaagagtagacactcttagcttgttggaggggacattctgatgcttaacacatgacatcctattcccagagtctccagttttggtgatagtgtctcggttcttgagcactttccagaagaaggccctaggagagtcaggagcccatggaagcatggccacagggcaggcagagcagggcccagctaagtcgctctggccgtgcaggagagagggctgcagctgctctgggcccacccagatgcactaagggccctgctctgctaagaagtccttggggctgggcaggctctttaggccatacatgcccacaaatgggtcatccttgtacacatctgggcattcttacaaagcttggacagagtggcaaggcagcactggtagactcctgagaaatggaaccaggagtccaggtagcatggcttgtgaacagagtttgactcttgtagccagtcactaagctgggggtttaaagttatgtggccgggcacagggaacttgataagcactcaaccagtgcttctcatggccctaaacagacatgcaccctatacgaggagaaactgccctgcagaatggggtccaagcatcaccctctagctctgggtcctctggtgggcttggctgcaaatgtagccttgtgctcaccacagtcaactgcacatgtctgatggtacatgccacagtgcccactttcacccagcctcaggcacagcctctggaggacagctttgtcctcccacccagcagccccccagtgtggagggacactgacaacattccactcaggggcagctttcactgttgtggcccagcctctagctgcagcctctcctccacagggcccctagagacagagatggccatcacaccctgcccaagctgctcttctacaggggccacaagtccaggggcttccaaaagtccccatcatttcattcctactgtggcacccaagaaagaaagaaactcatacttttgatttacatttctcttgagatctgaattcacacagagctgcagctacaccggtgtgcagaatgacaaagcatgcccgtggagtgtgaggggtgttaacatctcagagagcagtggcccacctgctcctctctttttgcaagtggaagggagaggatcaccctgagatcagattccctgtagtgtctaccttaaagcccccgcctggtggtgaggagtctgatctcgaaactgagaataatacttcatctttttctcgaagattctaaggtaaaaatggatgactgtaagcaatgacaactgtcactaccctccatatcatcatactagagaacaggaagagctccaatgtggacataaattagaagtctaggctggacgcggtggctcatgcctgtaatcccagcactttgggaagctgaggtgggtggatcactcgaggccaggagttgaagacctggtctggacaacatggcgaaaccccgtctctactaaaaatacaaaaactagccaggcatggtggcatgcgcctgtagttccagctactggtgaggctgaggcaggagaacggcttaaaccctggaggcgtaagtttgaagacaagtttgaagctgtcagtggtgacttgtgaacaaacagccacacttgagttcaagttcatttgtgaatgctgcctgtcaccccagaatgggaaggaggcagctggaggggtcgtgtcagacacgcccactagagtagtggcatcaaagtctctgagacatctctgtgacaaacgctgccattgctgctgcgcgatgctccataaactctcctgagtcctcaccactgaggaagcaaagggacgcccagcctccagccccaaatagggaggctgacttgggacgtcctatcaagagtctcacctgggtccagacacatgaacttgcagcactctttggggtccttgcggtactgttggcagccctggggcctctcacagagagcagccacacacatctcaggctcccctccatggcaggtgcagctcaggcatgggtcgtcccccttaggggtgaagtagaacccttcatccaccacgttgtccttgatgtcaacacatgtttgacctgcaatgagcatacattgtgtacagatgtatacaatgccaaaaaaggtagcctccccgtgtgggccacactgccaaaaaaggtagcctccccgtgtgggcctgtgaatgctacctgttaccttagaatgggaaggaggcagctggagggggcatgtgagacatgcccactagagtaatggcatcaaagcctctaagacagctctgtgagcaaacactgccatcactgctgcaccacttgacatgagctgaccttccccacctgggcctggggaacgaacaaggcaactgaagacttggccagattgtgctgagagtcttcccagggctggaatgccatggatctctggcccatggcacagggagtggctgtccaagagcagtcactacaacactgttagaacaaagtacatctagccagggcaaatggaggccggagagccaggatggagcacaatgccagactccagggtcactgcagaagtgtttgcctggaagttgctgaagtagattacttatgagattttctcaattctaagatgcagctgctatgagtattaaccatttcaaaatcagaatgtgtgtaaggaagctgccagttctgcttgggaaggcagtccactggacctgaggcacactctgcacagagctgacctaggatgagagtaagaggaatggccatggctaaaaacccagagtcttcaactggtaggcagacgttgcaaatgcctggaggagagacaaggaatgaaggagcctccaagagagccaccctcagtgaaaggcaaagagacatgagaaggtagcttcttacagtctccaaatggggtaaggatgtctagaaaaaagactcttccgaaatttcacaatcacaggtctatgcctcacttaagattgtagtcagctgggcgcggtggctcacacctgtaatcccagcactttgggaggccgaggcaggcagattgcctgaggtcaggagttcaagaccagcctggccaacatggcaaaaccctgtctccactaaaaatacaaaaattagccaagcgtggtggcatgtgcctgtaatcccagctactcaggaggctgaggcatgagaatctcttgaaccccagaggtgtaggttgcagtgagcagagattgtgccactgcactccagcctgggcgacagcatgagactctgtctcaaaaaaaaaaaaaaaaaaagattgggatcaaatctaggtcacccatgtggtcaggaactcccagggcaagatactcacatacaattattccctggctaaaatagagaaaaaagaatgaacagaaatgaacagagctcccagagaaatgtgaaacaccattaagtacaccaacatatgtgaaacaggagtaacaaatggagaggagagagagaaagaggcaaaaaaaaattagtcgaagaactaacagctgcaaactactcaaattcattgaaaaacaataacctatacatccaggaagctcaacaaattccacattcctaggataaatgcaaaggagccacaaactgacacatcagagtgaaaatgctgaaagtgaaagacaaggcgaaaatacgaaaagcagcaaatgggacgtgacttgttacttctaagggaaccccaataagacaaacaactgacttctcagcagaaacaacagaggctggggcagtgggataactgctcacagaaaaccatcaaccaagatccatatccagcaaagatatcttct

SEQ ID NO: 1888521 - DNA, 4001 bp, Homo sapiens; identical to SEQ ID NO: 1562699

SEQ ID NO: 1888522 - DNA, 4001 bp, Homo sapiens
acaaggataacctgctggtccccactctatagatgagcctctggtggtggccaggggagcaggaggtgtggcctgccaattgaagccccagcccagggcccttgccacagtgctagtgggccacccttgcccatcatgcagcatggcatccatctgctcagcaccctacacaacaccggaggtaggggagcccaccacggaacccctcaccaagaaggtcctcaccatggagaaactgaggtactggaggcggggcctctgcagtcacgctgggtcacgtgctccagtcagccaagctgcagcggccaccaagggtgcccagggtctggcctgttggtcacagtgttgacctcatggcctgaaatgggtcttccctgaccagacaggttccagcccaccatcatctatcactgcctcagccctggtgggtgcggagtggctgggagaccctgcccctcacaccctgggctgggggcattcaatgagcccccaacacacattccagggcctctgctccagattaggccacagcctgtctaggcacacaaggggcacccacaccctggaggcaaagagacatatgcctatgtgctcgcaggcacacatgatcacgcgcacagacacacgtgcagatgcataccaagttacacacacgcacacacgcccgaggcggggacccccaggacacggaggcaggcaggcagaggtggggcccaggatgtcttgcccctgtctgtgggcctggcctccccactcaacagacgagcatgtgggtgcgggagtgggtattgtgaaaggggccccagcatgtgccacccgtggagaccacagcaggcatgtcgcgtacatgcatgtgtggccgtgggcgtgcaagcgggggcgaggacacagatatgcaccctcagagtccgtgtgtgcacccagtgttcgtgcatgtgtacactggggtggcgctggcacgcatgtgcaccagaggtgtgcaagtgtgcagtccgtgtagacatgtgcacgtgcaaggaaacgtgtgtgcagcctgcgacaccatggacatcagcagggcagcctgggtgggcacctggggagcaccctccaggcagggcatgcccaactcacatggagcccaccctcccttgccccccactgcgggacctcacacccagtggggcgggggagtctcacgaaggctgccagggaggggatgctgattgccccaccacccctgattcccccagccaagcctctcaatgtccctcgggctgcggatgtctgggcattgctgcctcctctcaccgcccgccctggaggcagcgttgggacaaccttgtcccccacgccctctactgccgccaacgcccccattgatccccctgaggcctgacctcagaaaaacgggaggttctgagcccagtccgcgaggcgggggcggaggcggcccgatacctccacctactctcggtacccgcgtttctgcaaaaaaacccgctcattaaccccttcgtggccgcggcgccgaggccggaccccgtccttccagcccgcggcccccaccccggacctggcccagcctcggggacccccgggccgccacccccggccccgccatcgccgtcaacttacccgggaagcggcaacttttcctgctgcctccggctccgccctcccggggccggggcgcccttggccccagcctggcgcggcactgcggtggccctcccggccgcccggctacgcttccccagccttggaagccctggacgggccctgcggctccgaggaggggcgaaccaccccgctctgcgccccgccgcctgctgggctctggcgccgcgtggacactcacctccagtggacgccctcttcatcataggggtcaggcggagcgggtcggggaccgaaagtcgcttcggggcgggcgccagtctccggcccagccccgggccggcatccaggcgccgccgctccggcccagccccggcccggcagcgggtctaggctccgcgcgctccgctccgcccggctcgggcggggctcgggccgcgggcgcgcagggcgcgggaggcggcggcgggcggggccctcacctgggcgcaggcgcctgcctgggcgggggctggggggcgcgggcctgggcgggggctggggggcgcgggcccaagttggggcgtgagcggcgcggctggccggggagcgtaggccgggcagcaggaggtgctcagcccacccggccctagacaaagccgcgcattcctgaagaggcggcggccctgcaggcggcggaggggatggcggctggggccattgaggcctggggatggcctctgcgcgacccactcgcttcctggcctcacgaaacccatgaaccccccgcccccccccgccccctgcacagaagccccttgctggagcacgatcgcccccatttttcagtaagaaacaggctcaaggcttaagagcgttctgggggccctcttgggcctttgtggccctctctgcaccaccccagggaggggacccaggcctgatgttacccataaccctgcaggggtcccccacctcttccttcctgcggaatgtggcctccaaacccagaagacgctctccgaggccgcctgcttagtatcatcccccactctactaagccagcccccagcggggccgggggggcgtcatggagccagagaacccagtgacacccctacacacaccacacagggtgggggtgttccttctccgtcttctgctcggggggcatccgatgatgatgagctcctaagcccatcccggggtcttcagacaactgccaggctgtccctgcacctggaggagtgctgggagtcagctcagctgggctgggtcctccccaggcccaccctgcatgacaggaccagggtcttgcaggccaacctggtgtcagtctgtaggaccctgactcaaggacggagtgggccagcctgaggtcttgatggctcccctcagagcccaggtccactgatatgaagcagagagacctggtgactgggcagccctgtgctctctgcctgcccctggccatggaggtggccctgagggagatgagcagggcacagggctggtgacctgcctgccttgtccagaggaagtgaggacctcccagagccctggtgctcccatctgatcccagtggcaggcagcttcccagggtggagccatgctggccgggccctctgcctggtgtggaggctgcactgcccacatgcctctggctgccgctctgtggccctcatcaccttggcctgctttatccctatcacccttgtcccagcctaggcttatgagggcattgtggagtgcatgccattcccagccacacagaaggtgaggtggggcccagacacccccagccactctgtcccctggcctcctgaaggggtgggctgtgcacacactgccacctccccagagggtgctggctgccgagtgccaccagctcagcccctgaggtggctcaacaggtcctcccagagccacaccaagatgtcatcacccattgcacagatggggaacctcaggcgaagctgacagagccagtgggaggctgaggcctgacccctaaacaagcattcttcctccagggtccctgcacgcagcagcccctagactaggaactgagctctcaccacagggatgtatcagaccctagatgagtcatgaggcactgaccatcagtctgaggacagcgctggggtggaccaggctccagtctcgggctgctctgtgcttgcagagagggcttgagaggacacttgcgtgcttactatgcaggcgtctcttcaattaccagtgacccagagcggcccactacaattgaagattgtgaccccacaccctatctcataggtttaaagcccctcccacccctcctgcagcagccaaagtgaccattctggggcatgggatgggcatggggggaaatggggagccagggctaacctggaggcttctggcaccacagccctctccag

SEQ ID NO: 1888523 - DNA, 4001 bp, Homo sapiens
agatgcgaatcccaaagctgtcacctcctgagccagctgctgggccgggaatcctgctcccctgccgagacctctttgctgggccagaaccaggtcttggagagagtccggatagctcttggggctccgggccagggagagaaggggacattacaatgcatggaccatacagtcctccagcccagcagcctcaaccctcagcaggaatcttcagcgatccacaggtggatctgcagccattgtgcgcgcctgttcttcccgcgcgcctctccctccagtacctcttgtgtgcactgcccgctccccaccaaggcattgccagcaggtgccttgtgtgcatacctggccatgctaatcccttaaagtcacccttcctgcgcagatccgtgactcgcaccatctttgcacacacacccactcgctcaggttggaaagatgcattgcccgtcaacgggaaactgctcgcatagcctttggccaagttggcagctaaggcggatgcttagagcccagctctcaagagttgaagcatccgacggttccccactgctcccaggagtggttacctgggcactctgtgtctgtcacccctgtcccggccccgggggccaagggcctgccagtagggctcagttgcctggagcctgctcatcccatcccccagttcactttgtttgtggaatctccctgttgccactgcccctggatggaatggcagggccatcctacaagtacccagacacttggcatcagtggtgtgtcaaaacaactccaagggttttctgtgatcctgcaagccctgtgttccttgctggcgatcctgccttcaatttgaatgcacaggtaccacagcaagccggtgctgtgtgctcccaattccaggatgtcttgcagctcagccagtgcactgagcacaaggactctctgtggggcccaggagcagggagtcacccctttggggcccacaacatccagttgtgccccagactcctgtccagagaagatcgtgttgagggccctcctgaagaggggggcagggatgcctgagcaggacaaggaccccagagtccaagagaatcctgatgatcagagaagggttcctgagggcaccggggatgcacagtctgcatttaggcccctgtgggacaatggaggcctctctcccttcgtgcccaggcctgggcctctgcagagagacctccatgcccagaggtcagaagtcggataaaaccagagatcccagacctcctggatgagttcgtgcaccaaacaaaatgccatcgtgagctcctacagttccatgggaggcttcctgtcaccaaagaggagggggccagcctcatcccactgtcagctgcccctcaggtcctcaaagacagtgagtgaggaccggcctcaggctgtctcttggggtctcacccagtgtgaaaaggcagcagatgcagcaccagggcagacacttgcccccaggaatggctcccccacatcccaggcctctaggccccatagatgcaagtttcctctgctgccactcaggcaaggggagcctctgatgctgccacctcccttacagctggggtctggggtcactgctgaagacctggacctggagaagaaggtggcactctggtgcaaaagcgcactgcggggtgaggccaaggccatctgggactgcagaccctcacggccttcccacactttgtcctcacttgcaacagggacttcttgtctgcctgttgtatgtaaagcacccagcatggatgcacagcaggagagacacaagccccaagactatgtggctgtctttctgggctctgtcatccgtcccattgatctatgtgtctagttttatgctaggaccatgctgttttggttaccatgcacttgtcaaaaattttgtcattctaatttgcagtgaaatggggtgcttctagttttgttgtttttgctgaggatgactttggctctttgagctcttttttggtttcatatgagttttacgattttccagttctgtgagagatgacactggtattttggtaggggttgtattgaatctctagactgctctgggcagtgtggtcattttaatgctatgaattccttccatgagcatgaaatgactgtccatttctttccgtcctcttaaactttgtcatcagtgttttgtagttttccttgtagaaatcgttcacctccttggtaaaatttcctctgtggcatatcatttttcattttgttgctattgtaaatgggattgcctccttaatttctttcctagaccattattggtgtataaaatgctgctgatttttgtatgttgattttgtatcctgcaaatgactgtattaatttatttatcaagtctagagttttctggtggaggctttacatgtttgtaaatccaagatcacatcttcatcagacaaggataatttgatgtcctcttttccagtgtgggtggcttttatttttttctcttgcatatttgtgtgatgtctaataaaagtggtgagaacgggcatcctcgtcttgttcctgtttacagaggaaacgcttttcacttttccccattctgtagtaggttagctatggctttgtcgtatacagcttttattatttctaggtttttttttttgagatggattctggctcttgtcacccaggctgtagtgcaatggtgcaatctcagctcacagcaaactctgcctcccaggttcaagtgattctcctgcctcagcctccggagtagctgggaggcgcccgccaccacgcccggctaatttttgtacttttggtagagatggggtttcaccatgttggccaggccggtctcgaactcctgacctcaggtgatccactcacctcagcctcccaaagtgctgggattacacgcatgagccactgggcctggccattttcaggtatgtttcttctatgcctagtttgttccttttttcaagacatggtctcactctgtttttcatgctggagtgcagtgacaccatcatagctgtagctttgaactcatgggctcaagccacctcagcctttcaagtagctgggactacaggtgcatgtcaccagagctggctaatttttatttttatttttttgtagagatctattttcctcaggttggtcttgaactgctgacctcaagtgaccctcccagctcagcctcccaaaagcactgggttgacaagcatgagccgccgcctggcccagagtcacattttaacatcctatcctcagtgccgggctcaagtttcgccagtgactgaaaaccctaagggagagttttctgatcaggcccagcccagtctgtgcataggaagggaatggaaaaatggcctgtggatggttcttttggagaactggccagacaagcactgagatgccgtttcctggaatacagagccatgtgatgtccagcccagctgccaggtccagggctctcggcaccatctagtttgggagttcacccagaagcagcctcggttgcccaaagcagctggtctcccttccaatctggtcccgtttgagagatgcaaccgggccgtcttccaggaaaccatttcagtgcgtgcctgtctttgtccccgcactggctggcctctctgaaccatgagaacttgggttatgcgaggctctgcctgtcagttgagcatcatgaagcagctctcttctgttccagtgaggccgaccaggctccaacacccctgccacgggtctgaccattctccccctcacccagaagtgacctccaacccgatcctgctccctgtcttctggcagctgctctggggaagggcattttggcctcaagggctgagcatgtcattttctgttttctgtttatctttccggagctgttagggagctgttatttttattttttattttatttaattttttttgagatggagtctcactctgtcacccaggctgaagtgcagtggctcaatctcggctcactgcaccctccacgtcctgggttc

SEQ ID NO: 1888524 - DNA, 4001 bp, Homo sapiens; identical to SEQ ID NO: 1562704

SEQ ID NO: 1888525 - DNA, 4001 bp, Homo sapiens
tggtgactggagtaaacaatatcatatttttctagagcaagaagggagaattttgaatgttctccccacaaaaaaaaaaaaaaaaaaatgcctggacgagcaaatagagatcctaagtaccctgatttgatcattacccaacctatatgtatgaaaatgtacccctaattatggacctttatgttgtgaaaaaaagttaatagaaataaataggtattgctaaaaatcacagggaaccacaaaagcaatgaatatctaaaggaatcctcagaaatacaaagtgaagacccacaatcctcaatatcaaattacactgccaagttgtagttatacagctgatatatgatacttgcataaactatggacaaaaacagggagaacaaaaacatgatcaacacaaatatggacacagtcaactgactttgataaagaacactgcaatgtggaaggcagagaatgagtacctttgagaaaaatgatattcagatgcagaagtgagaaataggaccttattttacacgatgtatgaaaatgaacaccccctcccccaaattgaaggcaaaacaaaagaccataaaccacaaaatgtttttaactaaaacacaggatgagcatatattttgggtcacttgaatctctgctcacctctgcaaagaggaaaataaacaaacaccctagaagaaaaacctcattaacaattaaatgctttgtcactgatatatattttcttatatgggtgacaaaaattacatgcatgaaacgcaaaaataaatatatgggactatgtcaacatgaaaagtttctgcacatcaaagaaaactactttccaaattaaaaagcatcctatagattaggcaaaaatttcaggcaatcatgtaattcacgaggagttgtcatctaacatgtacacaaaaaacactacaaagtagcaaaagcatccaatctaatattttgcaaagaacctgaacggacaattctgcacagccataaaatcgaacaacaaataagagataaggtcctcaaaataaactattcattagaaaactgtaattcaaaaccacacacagataatctcacacttattgaatattcctagattttttataaaaaaaataagaggggctgggaatggtgtctcatgcctgtaatctctgcactttgcgaggccgaggcaggtggatcacctgaggtcaggagtttgagaccagcctgaccaatatcgtgaaaccccatctctactaaaaatacaaaaattagctgggcatggtggcggcccctgtagtcccagctactccggaggccgagacaggagacttgtttaaaaccaggcagaggctgcagtctgccgagatggcgccactgcactccagcctggaagacagagcaagactccgtctcaaaacaaaaacaaaacaaaccccaaaccaaaaataataggaatgcgggtgtggttttggagaaagggaaactcatacactgtaggtggaaatgaaaattaggatacacaccatggaaaacagctaaatagctggagactcctcaaagaactgaaactacagatgtcccctgctctagcgaggtctctttttaaaggtgctgaggcatcaaaaataatcctagactccagctcagaggcccctgaggctcggagggacccaggtccggcgtttcaccgccagctctgggccagggcgctcctatacgctggacgcgggtcggacattggcatagccttcccggccggggtgcggacgctgcagtagccaggaccccacaaccgcccccacgcggaggactcgggcccagatgcccacgaagaagtgaaagcacgaaaacagggagaggcagggaaggagccgggagggttcccggtggggtccacgcccccgccacttaccgcggagacctgcctcctactccaccatcacatggaacccaccactgcttctccgaagctcgctctgaccacgccgctgctgctgcaggggcctcgcaggaagtgcagtctcagcttccgtagggacacgcacgctggcagcatccctcgtgccaggttgaagctccaccccctcttaaagggacgcggctcggacttgccagaagcagctttgggtggcaacacaggctgagcctctgcccagccccagggggcgacgaaagacccctggtctctcatcctccccagctttcgggccctagaagtcgcagggacgctccctgtgaccccctccccgagatcggctccctttgcctagggagcacccgggacctgcccctgccctcctctggacctcagtttcaccatccgcaaaggaagcagcctcgctagagctctggggttcctcaagcttggcgtctcaggatccagggtgtgctcccctgcccctctgcagagggggtccagagaaccacagaaagctgggggctggagggacagtccggagggcagcagggcctccccggcctcactgtccgcatctgtcctgtgggagcccgggggcctcgctatggcccagacacccacagcctcaccagggctgcctgggtcaccgggctccccaggaggcaggcaggggccctggggtccagcgctgcccccacctcaactccatcctgcgtcagggcccgcgaggggccctgtggactggacccaggccgcccattcccagggagaggctattaattattgcctcaatttcagagcctgttatcggtctcttcagagattcagcttcttcctggtttagtcttgggagggtgtatgtgtcaaggaatttatccatttcttccagattttctagtttatttgcgtagaggtgcttatagtattctctgatgatagctggtatttctgtgggatcggtggtgatatcccctttatctatttttattgcatctatttgattcttctctcttttcttctttattagtcttgctagcggtctatcaatattgttgaccttttcaaaaaaccagctcctggattcattgatttttttgaagggttttttgtgtctctatttccttcagttctgctctgatcttacttatttcttgccttctgctagcttttcaatgtgtttgctcttgcttctctagttcttttaattgtgatgttatggtgtcaattttagatctttcctgctttctcttgtgggcatctagtgctataaatttccctctacacactgctttaaatgtgtcccagagattctggtatgttgtgtctttgttctcattggtttcaaagaacatctttatttctgtcttcgtttcgttatgtacccagtagtcattgaggagcaggttgttcggtttccatgtagttgagcggttttgagtgagtttcttaatcctgagttctaatttgattgcactgtggtctgagagacagtttgttataatttctgttcttttccatttgctgaggagtgctttacttccaactatgtggtcagttttggaataggtgtggtgtggtgctgaaaaaaatgtatattctgttgattttggtggagagttctgtagatgtctattaggtctgcttggtgcagagctgagttcaattcctggatatccttgttaactttctgactcattgatctgcctaatgttcacagtgggatgttaaagactcccattattattgtgtgggagtcatattttggttgaagttgagtttctagtcaaagaaaaaaacacatgaagggcattcatgtttccaggaacagaagcatcctgtctggtttttcaaaggtgaagggagcagtctgaaggggccatggcatacgtgtgtctataatcaaagctcagagccaaggccctgggggagggtcaggggttccccagggggtgcaccccatccaacactgcactgccaggggccttgtctttattaaattctgggccttttcctgggcaatagttacacaaggtgggttcaatgaaccctgtgtcctgtggctgccacccatttcagggtcgcaaaggtaatgatcacc

SEQ ID NO: 1888526 - DNA, 4001 bp, Homo sapiens
gtttgtttgagacagggtctccctctgttacccaggctggagtgaactggcatgatcccagctcactgcagcctcaaccttccaggctcaagcaatactcccacctcagcctctcaagttcctagggctacaggcacatgacaccatggccagctaattttgtttatttttttgtagaggcagcatttcgctctgttgcccaggctggtatcaaacccctgagctcaagagaccctcctgactcagcctcccaaagtgttgggattacgggcatgactcaccatgccaggcaaaatacaaagattgtttttaaagaaaaaaaaaaagggcgcggtggttcacgcctgtaatcccagcactttgggaggccacggtgggtggatcacttgaggtcaggagttccagaccagcctggccaacatggcaaaaccctgtctctactaaaaatacaaaaattagctgggcattgtggtgcttgcctgtaatagtagctactcgggaggctgaggcaagagaatcgcttgaccccagggggcgggggttgcagtgagccaagatctcaccaccgcactccagcttgagagataagtgagactctgtctcaaaaaaacaaaacaaacaaacaaacaaaaaccaaaaaaaacaagtgcctgactcgacttaccgttgggtttgcccctttgtcattcatgaaagcacacccaggcaggtccgcgaagggcgagagagaagtgggacatagtccagtcacccagtcaccctgactgattcatcctgtgtcaggcaacagccagccaggctcagcagagcacctcactgaccccgcggaccccagatgtgggagccctaaacacattgtgtgccacggagacggggctgtcacacagttactgtggcactggataacaggcctcccttaagggcagggaacttgggccatttgcctgtctgtccccaggacccagcctagggagcatccctgcccctgtggacctcactcaccctccctcactctgtctgactctaccatgctgggctctgttatattccttggagaggctcagcctgctcctgccccagggccttggcacctgccagcccctctgcctggcacgttctctctatcctcagctctgaacatggctggcgccctcttatcatcttggagtcctcctcgggaagcctgatgtgacctggtccccttccgtggtcaccccataccctgtgactgttttgttggcctcggaaccctcacttggcagctctgagatggcttggccctggctttattgtctttctccccaggaagtataaactccagcagtagccccctgcctggaatagagcctgaaagcagggcacaccatccatgtggagtgattgtcaaatgacgaaagcttgggctccaactcaggattaaccatccacctttgtgaccttggcaaagccactgatccacactgtccacccccgcagagtggagtggtgattgcctctttccagaggctgcatggaggaccatatgtccaggccatatgtgaagagggggttctcaacggaggcacgataaccacgaacccccaccgtggctggaagcagcctggccacagtgagtgggcaggtcccaccagcttctctcaccttccaggaggagccgcagggccaggaaggaaggtccctgtccttgcttgcaggcctctcccaggaggccagaagcaccccctgacaccccgctccctgagggtcccatccccatctgaaccgtttctgaccaggcaggagaagggcagaagctgacggcaagcacgaatgaagggcgtttgaaaggctgggaaatacgtcttatctccgcccaccccgcttttcaaatatgcttacctttccaagtgactgtgtgcatagcgaaagctgtcatggtgcacccagactgttattgcgatcgggggcaccccaagaagacgtttccacggcggcttttctattatagctggtacttcagatatgcaaatatatcttcccaaagcaagactctgggcaggtgttctcggctcagacggtgaagacatctccgtggaggtgtgaaggacgagcccaggtgtctatcccagctccttcccaggctggccggcaccccccgcccatgcctcaggagggcgctgtggctgcaacaggggctgaaggccttgcccaacatcagacttgcagacagggccagcttctcaggcgtgcaaccagggcagctgccaggggccgagcgcacagaaggagcctgcacttggggttaaggctttgctgtggtctccttattcttaattatatcttcaacagatgttttgtaagtgaagtctgatgaaacaatggagcatggcaccttgactcctgagctgtcccaccctccactgcactcctgccccttcctgccttcctgggtcaggttctttgccatgcacttcctgccactggtgccccagtgccaccgggctcccctccccacctttgtcccatgacccctggtgcatgtcacccaggctggggacgaaccacatcagcgggggaggcctgccttccactgttgctttctgcccctcaggagccagagccggggcctgcaccaggaggactggggttaggtatgtgcccaggagtgtccgggaggtaatgaggaaggcagcagccatccctgcctgactggcagtgccaggctgtgctcagcaggtggctgagtgggggcctcttgcccactcccaattctaaggttgagtgtgacgcctcggggccacctgtgggttggggtggccggcccatgggaagggagattcacctccccacccctagctggggtctgcaatttcagttttgcacctggccccacatatgacatagctggtcccatttgaaggggtctgggaggcaccacccccacgcagcccctgcctgagcctcattgcccctcagcttccccactccaacttcccagaccacaaatcagagcctgcttccctgcttagacctcccccttgtcctccacccagtgcccacagggtcagtgggagcccctcactgagaccttccagagtggccccatctactcccctctgcacactccagcctcggctctgtgtgccaggcacagactgcagtaggaactgggaggccaggccctgccctcacggagtagccccaatggggagtaacaatcccctccccagtttccccacttgaatccagctctcagacccggacccatcaccgggggaagaagcagagcctgcgtgaacaccgatcctgcaatgccctggtcagcatgtgagaagggcgccccgggcctccccgcagggatctctgtcattcgcttcggtaacacatgctggggaaaggaggtggaatccagggctggagttgatgccgacaccctggaaactgaaacaccgtcgtgcccactgggagaaaatgggcgtaaggtcagggaatcggggggccaggggaatgcagccttccaggcctgccttgccgcgtgttcactgaggcatggagtcagggaatcggggggcgggtcccttccaggcccgccccttgccatgtgttcgctgggtccgcaaaccccggcaacggtcacttcttgcttcgcaaatacttcgcaaatactggaaactttgtgctgtgggagctggccacgctggttcctgcgcccgcagggtaagaaccattccagcaggaaaggccgagtgaaagcctgaaccaggtgtctcttcctcttcttttatttatttatttgtttgtttgttttgggacagagcctcactctgttgcccaggctggagtgcaatggcaccatcttggctcaccgcaacttccgcctcccaggttcaagcgattctcctgcctcagcctcccaagtagctgggattacaggcacgcgccaacaagcccagctgatttcttttgtatttttagtagagatggggtttctccatgttggccaggctggtctcaaactcctg

SEQ ID NO: 1888527 - DNA, 4001 bp, Homo sapiens; identical to SEQ ID NO: 1562715

SEQ ID NO: 1888528 - DNA, 4001 bp, Homo sapiens
taatttgttaggaggtggacctgtcaataggaaggacaaaaaattattatcaccaatactctcaaagtaatcgtcactttgggtagaaaccccagtacactcggggaattttcagaattcaatcaagcccatccaactgtctccaagttttgacactgcctaaaggactcctcacagttggtttagcccaacccagtaagaaacatttaacaaataattaaaagtgctgtgccagggtggttgtgttgccgagatacggttgttggtagctggggagtggcaggcagatccagccaagaattgtgccctaagccaggagctctgatgatgaaatcacaggatgtttgagtttggggcttgatggtcatcccaggtggtttcctatcgtggaaaacatttgatgtataagagtaaggctcagccaggcgcggtggctcatgcctgtaatcccagcactttgagaggccgtggaaggcggatcacctgaggttgggagttcaaggccagcctgaccaacacggagaaaccccgtctctactaaaaaaaaaaaaaaaaaaaaaaaggccgggcgtggtggctcatgcctgtaatcccagctacttgagaggctgaggcacgagaatcgtttgaactcgggaggcggaggttgcagtgagctgagattgcaccattgcactccagcctgggcaacaagagcataactctgtctcaaaaaaaaaaaaaaagagtaaggctccactgggtgcggtggctaacacctgtaatcccaacactttgggaggccgaggtggggagatcacttgaggtcaggagttcaagaccagcctggccaacatggtgaaacccccgtctctattaaaaacacaaaaagcagctgggtgtggtggctggcgcctgtagtcccagctacttgggaggctgaggcaaggagaattgcttgaacctgggaggcagaggtttcactgagccgagatggcgccattgcactccggccctgggcgacagagtgagactccgtctcaaaaaaaaaaaaaaaaaaaaagagtaaggctctattgctactccctgatttaataaacgtctctgggacaaaatttcttcatctgtaaaaaaggtaaataaaaaaaacgcttacttggcaagttcattgtgacgaattatctacgacaccggaatggaaagtgctttacagattgcaaagcactccttacacatgagtaattagtgttcacaggtccagccacttttggggaggaggaaagtgtggtcttttagagaccaaacgtctttctaaagtcctgacagccaacgaagggctcggtgatctctgcgcttcaaactctgcccaattctcaaagcctggtttaagtacacttttccctcagcctaagggagtggcccaagggcaaaccgtcccgggttcgtgtcccacctctgcctcaaagattacaccctcttaggacaggtgcgtgtccctggtggcctgggctgccagctcgggaaggaggaggtggcaaccgcacccgggcggccgagtgcttaataatggcagttgccctgccagcccggtcacctgtcactccctcctccgacttctcccgcaccgcggccgcaatccagcccggacactctgagggctctctctgagctgggcacggtcctcgctgctcggccgagtgcagccccctcacctcagtgcgactgagacaaagcaagggtcccaccggcccctgtcccctccctaaggcgcgccctcagggcgggagacccacctcagccagccccccagctcagtggtccagaggctcgggtcccgcgctgacgcccagcgcctccctcctccacagccgtcactgaccgctcgctcgcctctagcctggaccccgctgtccagcagtcccggctggcccgcgccgcgctcctcccgctctggcagtcctggcactggtaggacgcccgcagccttccaccctagagggcgccgggcgggcacgcgctgggggcgacgggggtggggcgggggaggcggggcgacgcagcgcggggcggccggcggttggtgctcgcagcccgcgcgcccgccttcccggccacgtgacctttgggccccgcccagatcgggagttccgcgcggactcttggtgcgaccccgtcccactgagcgctcgggtcgggaccttcccggtgtccctgtggggcagagtcccgttgtgcagaagaggcgagctgaggcacggtggcaggcggggcgtccaagcagttagcgccgcgcctggccgctcgtccgcgcgggaaagcgttgtctcccttccttcggatggaattggaacggcagctctcgtagcgcccgaactgtgcggtccttgatttcactgctgtacccacagtgcgcagagcacaggggcacgcggtacattatttgaatgaataactttcttatcctggcctttctctaactctctcacttctacttgggtcacccgccccctccccaggagtcttataaaacaaccaggggaagaggaaacagaagtggctcatatgggtaaaagccctcgtcctgcaaatcagtgacacaagggagttagtccatccaatgtacagttttaaaaagattgctacgtagaaaaataataggatagggtaagaggagaacccagctaggagcttcagtgggatccagggtgttgatatgatggtggtctggatttaagtgatggcagtagggataaaaagaagtaaaaattccagcctgggcaacataatgagaccctgtctctacaaaaaaaaaaaaaaaaagttttttttttttttttaattatccgtgtgattgtcactcctgtagtcccagctactggggcggggtttgggggttggctgacgtgtgaggctccaccaggaggtggaggctgcagtgagtcgtgatcgtgccactgcactctagcctgggcgacagagggagacccagtctcaaaaaaataaatagaagtaaaaaatatttgaggtagcttttggagaataaacgggatttgctgatggattgaacaataagggatggagagggagaaatcaagaggaaatcactgaatggttggtagtgctatgtattaaaatgcaaaaactgccgggcgcggtggctcacgcctgtaatcccagcactttgggaggtcgaggcaggtggatcactaggtcaggagttcaagaccagcctggccaacatggtgaaaccctgtctctaataaaaatgcagcaattagcctggcatggtggtgcacgtctgtagtcccagctactcgggaggctgagggaggagaatcgcttgaacttgggaagcagaggtttcagtgagccaagatcatgccactgcactctagcttgggcgacagtcagtttcaaaaataaataaataaaataaataataagtgtgcagtactgggcacagtatatggtagttatgatcatcctattagacactgggatggtagcaaccggttgagaaaaataacctttattagttgcttaatcttttattaatactttaggggcacagccatacatttcacagagaatctgctagtgacaaatcatcttattcatcaaatatttatctatttatttatttgagacggagtttcgctctttcttgcccaggctggagtgcagtggcgcaatctcagctcactgcgacctgtgcctcctgggttcaagcgattctcctgtctcagcctcccaagtagctggaattataggtgcctgctgccacgcccagctaatttttgtatttttagtagagacggcgtttcaccatgttagccaggcaagtctcgaactcctgacctcaggtgatctgcccgcctcggcctcccaaagtgctgggattacaggtgtgagccactgcgcctggcctcatcaaatatttatttagtgcctaccgtgcaccaggcccggtgctggactctgggaaaacacaggtgaatttctgtcctcacagagcttcctac

SEQ ID NO: 1888529 - DNA, 4001 bp, Homo sapiens
tatctttctgagttgaaatactgcatctcattggataacaaaaaaaaaatttgactaagattacactggaaaggtgagtaggttgggtgattgactgtgattgacaattccatgattctggataacttccaaagcataaaaataaatgtgtgttttctttcacacgtagacaatacacatacttattactttaaaaaattaatatgtgcatggaagtgacttactacaaatatattaaagtaaatacacatttcacaaaaaaagaagagaggaagggaaaaacatgttaaaaacaaagagaggtacattttattgtgtgaaaagcctccaacggatccatactactgtggctttgttccaaagttttggaaagtaatgatttcataggttcttaattgggttaaaaactgcattaaaatagactttgccatattctcccctggggaataacttaatctgtggggtgggggatgtaacgttgaaggatgcaggatgtaaaaggaaattatatatatatatataatttgggaatttgggaataaactgaataaactgaatcccaattcacactgggactacaccagctgccaccatgcctggctaaatttttgtatttgtagtagagacagggtttcactgtattggccaggatggtcttgatctcctcaccttgtgatcctcttgccttggcctcccaaagtgctgggattacaggcctgagtcaagatacatattttttaaatgaagaaaaatttcaaagatactctgcttggtacaataatcaaatatataaattgaggaataaaacataatcatgaaacatatttataactgcatatggaaaatacagaggctaattttttaaataacatattttgaaagcattaactagtaatttgaaaagatcgcatttgacaggccagtatgaacataccttgaatgcagccacacaggttccccataagaaaaatcaaaatcagggaaaatgaaaccacaatggttcaatctgctctgacctttgaaaaactcagcacagatagtggcacttaggaccaagggcaggagatccctaatcccatcaccatggcgatagggcataaacattccagggtgaaggcacaatccacactgtgaggtccaactgctgccatgcagacaggtgggcttttacaagtacaggaaggtcatcaaaggctcagtgttttgtttcaaaaactgaatcccaagcccacacattattatgctggcttcttaaaataagttatgagacgggaaatagggcacccacaaatatatatatatataattatatataatataatatatattatatatataatatatttaatatattatatatgtattttatatgtatatatatatataatttgggaatttgggaataaactgaatcccaattcacactgggactacaccagctgccaccatgcctggctaaatttttgtatttgtagtagagacagggtttcactgtattggccaggatggtcttgatctcctcaccttgtgatcctcttgccttggcctcccaaagtgctgggattacaggcctgagtcaagatacatattttttaaatgaagaaaaatttcaaagatactctgcttggtacaataatcaaatatataaattgaggaataaaacataatcatgaaacatatttataactgcatatggaaaatacagaggctaattttttaaataacatattttgaaagcattaactagtaatttgaaaagatcgcatttgacaggccagtatgaacataccttgaatgcagccacacaggttccccataagaaaaatcaaaatcagggaaaatgaaaccacaatggttcaatctgctctgacctttgaaaaactcagcacagatagtggcacttaggaccaagggcaggagatccctaatcccatcaccatggtgatagggcataaacattccagggtgaaggcacaatccacactgtgaggtccaactgctgccatgcagacaggtgggcttttacaagtacaggaaggtcatcaaaggctcagtgttttgtttcaaaaactgaatcccaagcctacacattattatgctggcttcttaaaataagttatgagatgggaaatagggaacccacaaatatatatatacataaaattatatataatataatatatattatatatataatatatttaatatattatagatatattttatatatatatatatatatatatatatatatatatatatatatatataatttgggaatttgggaataaactgaatcccaattcacactgggactacaacagctgccaccatgcctggctaattttttgtatttgtagtagagacagggtttcactgtattggccaggatggtcttcatctcctcaccttgtgatcctcttgccttggcctcccaaagtgctgggattacaggcctgagtcaagatacatattttttaaatgaagaaaaatttcaaagatactctgcttggtacaataatcaaatatataaattgaggaataaaacataatcatgaaacatatttataactgcatatggaaaatacagaggctaattttttaaataacatattttgaaagcattaactagtaatttgaaaagatcgcatttgacaggccagtatgaacataccttgaatgcagccacacaggttccccataagaaaaatcaaaatcagggaaaatgaaaccacaaaggttcaatctgctctgacctttgaaaaactcagcacagatagtggcacttaggaccaagggcagcagatccctaatcccatcaccatggtgatagggcataaacattccagggtgaaggcacaatccacactgtgaggtccaactgctgccatgcagacaggtgtgctttcagatgtacaggaaggtcatcgaaggctcagtgtttcgtttcaaaaactgaatcccaagtccacacattattatgctgtgcttcttaaaataagttatgagataggaaatagggcacccccaaatatatatatataattatatataatataatatatataatatataacatatatataatttccttttacatcctgcatcccttatatataatattatatttaatataatatacaatattatatttaatataatatataatattttatttaatataatatacaatattatatttaatataatatataatattttatttaatataatatataatattttatttaatataagatataatattatatttaatataatatataatattctgtataatatatattatacataatattatatataacataatatataatattatgtataatatatattattatacagaatattatatataatataatatatataattatatatgaaatataataatgtataattatatatgtaatataataaagtataatatataatatatattatatattatataaaatattgtataatgtaatatgtaatatatagtatatcataatataatatattttataataaaatatattatatattatatatgattatattatattatattatatattatataatatatgatatattatggtatattatatataatataatatataatataattatatataatataccataatatatatgaaatataatatataatatatatcataaattatatataatatataatatatatcataaattatatataatatataatatatatcataaattatatataatatattatatatatcataaattttatatataatataatataatataattatatataatataatatataatatatcagatatcagatataatatataatatatatcagattaaagatataatatataatatataatatatatcagatataatatataatacatatcatatattttacataatatatatcatttattatgtaatatatgtcttttattatagataatatttttcat

SEQ ID NO: 1888530 - DNA, 4001 bp, Homo sapiens
cagcctcacctttctttccaggaagtggcagaaagaaaccacctgggaaggcgggagaacctcacctcactctgtaggctatcacggctctaataaggggtgtaggatgggcctctccaggccagatccttgctctggccaaacagagtcgcagggccgaggttcagctgcactcctctaaagcagcaggtcctgcctctccaacaggttcctgggagggactgcatctctggtaagccacaaagctccaggagtcagaagcctctactgcaaggtgcctgagcactggggtcacaggcccaggagcacagtggggcagtggggaggaactatcactgcacccttcatgcaagagaggtccctgactcactggtctccttggcccacaggcaggggtggccctgacggtcacgggttttgaatatccaggacgtggaggttgtaagacagcgcagcatagagatgcttggtggtgagatgcaggcagtacacagggctgccgaggcgggtcgacgtcagcgggaaggtgtgcgggcaggccctttggtgccggtcccacagccgtacaacgctatagaaggaggaacctgtggcaagcaagtggttgccatctgtctgcaggcagtacagggtgctgttgtggggctcctcccactccatgacacatttccggacactggtgcggcagtcccagtagcgaacataggtgtcatagccacaggagagcagtgcgaaaggggactcatatatgacatccagcaccccagcccttgggggaaagtctctgtccaagtgtgtcatcagctgcccactgttgaggtcccagattttcaggggtgagaagtgcccacaacaagccgtccctgtcacaaaagagctgagtaatggcctgatagcaacagaccagatttggtcttcagtctggatggtgtataaacactaccccagctggcctgaggccaaaggccacaccttggccgtcctgtccctggagccactcacaatgatatgatgccccctttgcaatccacacagttcacctcctgttcatgagcccagtacttggcagcgaaggtgctgtgaatcttaccaaggccaatcttcccatctcctcctgcactgacaatatgcgaggtggccagcacaaagtggcaaacgtcctcatcatgcccagcagactcccagaggctgacggttcaagctggcaccatctggacggaactggtaggccaggatgaaattagcctgggatatgtacaaagcatcatcctctagctgcatccagggcatctgactgcatctccacttcagcagaatcccctctcggcagcaccccactatccagttctgagacaccttcactgggacactggtcatcaggttggtgccgagccgcgtgaagccggagttgagcgaggcccaggctatctggcgccggagcaggtcgcagttggtgaagtgccacagccagcggtacacctgggccaggcggccgagggcccgcatgtcgaggtaggagcacatgtgcagcagcagcacttccggcaggcgccagagcgctggccccgcagccgggcaggcggctgactcccgagccgcctcctcctcctcctccctggctgccgccgccatggccgcccctgtccccgggatgtaggcccaaacctgacctccttgtccttgtactcttcccggcctggcgccctcccgccgcctagccctgaccctccattcctccttcccatactttcttccttgtgcctctttcccggcccctacgctcccctcatctcctttgatgatgcctctcgccccttcctccacgcttccgcctccctctgcttcctctcttgggcgtgtcctcgctcccgcctcagcccccggcccgctgcctccttcgccgtctgcggcccgggcttcccttccgccctgcttcctcttccgccttgcccctctcgctcgcttttcccttcctcttccccttccttcgcttccccctcgtcaccctcccttcctgcagcttcttcgcctctccgcccccgccctcacccgggcccgccctcacccgggcccgccattcccggcggccccacacccagcggccctggctgcccaagagcagctgcggggcagcccgacgcggagcccagcccgagccaccaccctccactaggtttaaaactgctgacacacacacggagaaacgggggtgggggggcttcaaagatggagggggcagcatgtatcaaaatacagcctcctgctctctggccatgggggaaagagccccagggagcaagaactggaacaaattaagtgccttctgtgttcctcaagccttagctctggcctggagtctgggggtctgcagcacagggtggcagagggaggggtccccctacaggaaagccacacctcagagcagaaaactcagcccccagcaccagccaaggggaggcccgaggccagagctgtgtgtctcggtagtccagaagtgctgggggaagggcttttaaggaatcacatgctcttcacacttagaggggggcctggcctctggccacacctgcccctagaggacttgtttcccagcggaggaagcctgctttagggaaagtgtgtgcacacagggtgtgatggtgcacacagggtgtgatggcgcacacagggtgtgatggcgtgcacctgtagtcccagccacacacagggtgtggtggcgtgcacctatagccccagctacgcggaaggctgaggccggaggatggcttcagtcaggagttctgggctgtagtgcactacacactaagtttggcatcaatatggtgacctcccaggagtcgggaaccatcagtttgcctaagaaggagtgaaacagccaaggttggaaaggaaggaggtcaaaactcccgtgctgatgagcagtggaattgcgcctgtgaatagccactgcactccagcctggacaacgtagtaagtccccatctctttttaaaaataactatctaaataaatataaattagaaaaaaaaaaaaaaaggctgggcatggcggctcacgcctgtaatctcagtactttgggaggctgaggcaggtggatcacttgaggttaggagtttgagaccagcctggccaacatagcaaaaccctgtctctactaaaaatgcaaaaaattagctggacgtggtggtacacgcctgtagtcccagcaccggccctgggttactcaccagcttctggaagaggtcgcccacccgctgctggtggctccactgctgcacgcgggggaagagcccatcatagaactccttgtggatctcgtagagctcaggcactttgaagaagatggtctcgatctgctgactcgtcagcaccggctgagaggtggtggcagcggctttcaaaggcttcatgggctggaagagggcacaagtgaggtagcacaggtgagaggggctgccatccgtcaggtgcattgtatggcagtagacagtcatggttacctgacatatgcacttttatttttaaatcacataacaaatacaattttaaaaccagcttggtttggcaactcagtcttccactggtatccactccagggatggcgagctgcacccaggctctgacagctgacctgggacttaagggcaaagaggctccccaaccctgtcaccctgccccatcccgccctgctcagctccctaaatcctcctcaccagcagcagtgcctccaggtggctcaggtaagtctcctcgctagccaggattcccgacaggacccattttctcatctccaagcccttttccaagtccagctcactctgcaggagaaatagacagaagtcagcctggaagggtggtagggggattcttccatcagggccctctgagagaggagggccagcttgttgacctctggacaaacccctgcccccacaaaggctccacatggaattaaagggaggcaggggaccctccgcacatactaagccacacactcacag

SEQ ID NO: 1888531 - DNA, 4001 bp, Homo sapiens
atcacctgaggtcgggagtttgagaccagcctggccaacatggtgaaaccccgtctctactaaaaatacaaaaattagctgggcgtggtggcacccacctctagttccagctacttgggaggctgaggcagaagaatcaatggaacctgggaggcagaggttgcagtgagccaagatggcgccattgcactccagcctggctgcaagagccaaactccatctcaaaaaaaaaaaaaatgcaacacaaatgcatttaagacagaaacctgttctgcaaagaggaagaggtaccagtagatgcaattatggcagcctggggctttctataggccaagtttaggctacctcattggaataatataatgtagtttcagaactgtgacttccggcttcagcaggctggaagaaatccatctcccattaatctttctatcagactccaggaaaaaaataaagcaaaaatattttcctatttcatctttaagaaagtcaaattattcaagacacactgagcacctatctgcataaaatagtctaatgatgataggagttaaaatgaagtaaaagatttgttccctgctgttaaggatcttataatccctttgggaagacaaggtcaatactgatacagatgaaagtataatcttcttcttcttgaacagtaagaatctataacttcacacatttctctctttgcccagactttgagcaaagcttatatttaaattcagtgcccaaattctgaagcaactcactttttctcaggagtccttctggattcaattatttatttacttttgagatctggttatgagactggctaattttttggtagagacggggttttgccatgttgccagattggtcttgaactcctgggctcaagcaatctatctgcctcggcctcacaaagtgctgggattacaggtgtgagccactgtgtctggcctggattcaattttttattacgagttttatttgtttcttttttaagatacatattctaatgacaaatcatttgaatcgttttgggaatcagaaggtcaaaagcactaaaaccttttctactggcatgaactagcagtacaagaaaaataacctgactgggcatggtggctcacacctggaatcccagcactttgggaggccaaggtgggtggtttgcttgagcccaggagttcgagagcagcctgggcaatattgtgagactctgtctctacaaaatacacacacacacacacacacacacacaccacacattagccaggtgtggcgtcatgtgcctgtagtcccagctacccagggagctgaggtgagagctctaggctgcaatgagctgtgattataccactgcactccagtctgggcaacagagtgagactttgtgaaagaaagaaagagagaaagaagagagaaagaaaaaagaaagaaaagagacagaagaaaaatgagaaaaaaagaagaaaaaagaaagaagaaagaagagagaaagaagaaagaaagaaaaagaaagaagaaagaaaaaagaaagaaagaaaagaaaaagaaaggaaggaaggaataaagaaagaaagatccatgatgaagactcacagaatctttgagttaaagggaacttggaagtcatggagtcaactcctgtcccaaagtagatatcctataagctctcagatgcttggatcccagcatttccctaagcagacttccagaccattctgtggtgagtccgcaattttggaaaattctttgaacagaaatctatctcccattcatccttatccctaatgatcctccttctgccctgcggagtgacatagaacaagccacgtacctcttcttcattggcagccattcctatacataaagtcaataatcatgttcttcagaagactccaggctagacatgctcaactgcagtggcccctcatcctgctgagcagtgcccaaggcctgcagcctcctcctctggtggatgaactctagtttatcaaggtccctcctggaaccttgtgctacagagtggtataaatatgacctggccagcaccaagattcctgggccagttactccgtgaaacatcaggttactctctgtctactaatatagctctgaggtttcattagctgtttcaccagctgcttcccacgtggggctcttactgaacctgttggttgacttaactccctatcttctgtttcacatgcacaagtcaggcctctactgtgcaatatatattttcaaccaaaagtgcaggccattatatttattcatgctaaatctgaacttagtggttttagtctatcaaaaactctaggaagacctttctttctcttttagagacaggctcccactccattgcccaggctggagtgcagtgatgcaatcatagctcaatgtagcctcaaactcctaggcttaaggggtccactcttgtgcaccaccacacctggctaatttctatttttttttcctagagacagggtcttgagctgggagtcctagtgcacacctgtaatcctagctactcgggaggctgaggtgagaggatcccttgagccaggagttcaaggctgcagagctatgattgcaccactgcactccactccagcctggatgacagaatgagaccctgactctttaaaaaagtaaaataaaataacaggttctcgctatgtcacccaggctgatcaaactgctaatcttaagggatccttctgcctcagcctccggagtagctgggattacaagctcattcttaatgtttatcctgtcaactatagattataactaaattttcatctatttttgattagctagctatggtagctttctgtcatttacaaatgtaggcagcctgccttcagacttcaagattactaatgagatgcagagtgaccttgaactagacagttaacctctgtagagctctgtttcctcatctgaggaaagcaagggagcagagaatgacctcgtaggtctctaggaatttcagtgtaccttatgcaaataaaatggccagctggtaaaagacagggaaggggaaaaaagcatagactgacccctttcactcatggtataaagtggtcaagtaaatgttctatgttcaaatatatgtattttaactttaaacctcaggcattgtcttcaggtaattaaactctgtgaacaacatggtagataccttcattcataattaaacattcaatttttgcatagtgctagtctgtgggggagaaaagctgcaaaatttacaggtattttgtcaatttaattgcagtaaatttgttcctaaattcagtacgttatctaaaactgcttgatgaaatattagtcttttttttttttctgagacagagtctcactgtgtcgcctaggctgggatgcagtggtgtgatctcagctcactgcagcctcctcctcccaggttcaagcaattctcctgtctcagcctcccgggtagctggaactacaggcacacgccaccgcacctggctaatttttgtatttttagtagagatggggtttcaccatgttggccaggatggtcttgatctcttgacctcgtgatccacccgcctcggcctcccaaagtgctaggattacaggcatgagccaccgcacccagccaaagtcactaatacaaagtattagtcttatactcactttaatgcaataggtgctaaacactgttttcagtattcagaaattcactcaataagagaatttataaaagatctattgccacgttgaatccactcctattaattttccaacagcctttagccctaaatttattcaagagtaaaaaaccttttggcctgatctgattttagaaggtacattttaaaatagtcaaaaggactagattccctcccatcacacttaactttctcagtggggaaaaaaacaaacgctgaaaaggtttaaagagattctagagttgacattgagcccccagccctcaccttctgccctctttgctatcttctctcaaggaagaa

SEQ ID NO: 1888532 - DNA, 4001 bp, Homo sapiens
cattgtgcacatgtaccctaaaacttaaagtataataataaaataaaataaaaaaaagaaagaaagaaattgtctcctaaccaaaaaaaaaaaaagaaaagaaaagaaaagaataagccgggcgtggtggctcatacctgtaatcccaacactttgggaggcccaggtgggtggattacctgaggtcaggagttcgagaccagcctgaccaacatggtgaaaccccatctctactaaaaacaccataattaggccaggcgcagtggctcacacctgtaatcccagcactttgagaggcagaggtgggaggatcacaaggtcaggagttcaagaccagcctggccaacatagcaaaaccctgtctctactaaaaatacaaaaattagctgggcatggtggcacatgcctgtagtctcagctactgtggaggctgaggcaggagaatcacttgaacctgggaggtggaggctgcagtaagccaagattgcaccactgccctccagcctgggtaacagagcgatactctgtctcagaaaacacacacacacacacacacacacacacatatacacacacacaaatttgttgggcgtggtggcgcactcctataatcccagctacttgggaggcttaggcatgagaatcgctttaacttgggaggcggaggttgcagttaactgagattgcaccactgcactccagcctggcaacagagcaaaactccatctctaaatagatatagatagatagatagatagatagatagatagatagatagatagataatagatagatagatagatagatagatagatagatagatagataggaagaaataagtaaaaataacaaccaaacaacaaaacagtggagtttatccaaagaaacagagactcttagaactgagaaaaggggccctgtttggctctagagacccacaccctgctctcggagtcaccgtccccttcccaaaggctactgagagagtccaagcgaagcttacatgtggggaaactgagtctcagaggggtgaaggtattgctcaggtccacttgcccagttttcagggcccatgtcccatgccctgccccgctcacctcccaatctccaagcactgcttggcatccgcggccacggcagccctggtgtacacatggttgtcaggttccttggaggccgagggcagccagagacagaggccgacaatgaccagcaccaggaccacggccagcaggcccagcaccactaacttcttcttcatggctctgctgcacccacggggtaaggagcagggtcaggcccagcctcagacatgccctggcccctccccaacagggcacagtctaaagtcaggcctcagaaacacaaggcctgtgtctccttcccgcttcccagaatacgtgcaggctgtccggcccccagacctttgcgcaggccatgccctctgccagaagctctgggcctcatctctgccctcccaaatcctccctgcttatcttcagagcccatcctggtaagaaccccatctccagcagcggcccttcctgggagcccccagatttccacacccctctttctgcagggcctggcctacctcctcacagtggctgagcctccactgcttagggagaagctccagcagggatgggcctggcctggtttctcctgtgtcccccaccccagcctagagcctggcactgtccaggagtcctctgaagaccctccaccccacctggagcatggggtttagcttccatagtgcccacaatcagagcgccccacagattcactgccacggggccaggacttaccgtccagcagcagacgggggccccaagccttgcctggggtgttggccacgaaagacaggaggatttggtggaaacagctgaggaaataaccggggtctccctcacactctgctgaagcctgtagccacagaatcttcttcagagactctctgatcaggcagccttctcgttctcctgaaggtcaagggaggttacctgaagcacgcacagcccagacctttctgggggactccgtgttacctccctctgcctctagctggtttctctgtctccagttgaactctggaggcaaagaggctgtcagtaacacatttgtttccatgaattctctcagcatgtctcccaggcacagggttttgcacggagcagggcaggtaggggacagggcattcctgcacaagcccaggatgtgcatgcggtaagcatggcaaagggggctcagggggcaccgccagcctgccctgctctgacgctggacttgccactcacctgctgtggggcctcaggcaaatcactgaactgtccagcctggatgacggcagcacctcacttgccttgctgctgggagtgttgtgaatagagtaggttagactgtgggcagggcttggtgaatggtagctgtgattatcatcatggctgcactggggacacccccaggaggcctgagtggcacaggtctcttgctcactgtatgtcccctgtggactcccttccaggctgtgcagtgagtggcagcagtgacccttgggaagtctcatggctacggcagcaggtgacaggtgtgacaacagggaagagggatgtggtgacagaggttggggttcccctctcccacagtcagtttcccacaaagggcggtgtctgccagcaagcccctccaatgagccccaagcttggtttccctccactccacgctgtcccagtgcagagcgtctgacctcagaggcagacacactgtcccagaggtggtctatgaatggagtccccgtgccctccccacacacagggaacatccaaatgccatcatggaagggtggccacctccccaggcttggtgggcctggggccgatagtgtgatacatttgaccccctcccagccctggatgcagacaccaagagcagagagacctggcagtagtcatgcagcagcgcaccaccccacatcctcagcacaatccaaagcagcccctcatccccaccgtgaccaccacagcctgaatccaggcgccacctgtttctgacctgaactccctcacagcccccgcctgcactccctccctccaacatcacctgcccttcagtcttccagaaagcagctagagggctctgtctgtccaactgcagaacaggccctgcctcctccctgccccgttggacagctcacacccttcaccaggcctgacagcgctcttgccactccaacaccctgggtcccagctgggagtccgggtcagggttaagggttcctgatagagacaccgattcctggaggtccaaagagcctcaggagctgggccagcaatatgcagcatctattatggacacagaacattcccatcacatggccgggtgcagtggctcacgcctataatcccagcactttggaaggcagaggcaggtggatcacctgaggtgaagagttcgagaccagtctggccaacatggtgaaacccccatctccactaaaaatacaaaaaattagccaggcatggtggcaggtgcctgtaatcccagctactcaggagctgaggcaggagaattgcttgaacccgggaggtggaggttgcagtgaggcaagattgcaccactgcactccagcctgggccacaagagtgaaactccgtcacacacacacacacacacacacaagaaaaaaaaggtctcctgctgggacacagactagttagagaaaggaaaaataaacaaatgatagtatgtgtattaataaaagaactagcaacacccactgcttagttgtgataataaaaactggacattaatataggcagaaaaacagaacagccttgatatggttaaccctttgacactggcaaacactgtgaccagtgctgcccacactggaagctcctgcatccctcttcctcatgtttccttcagcattaaggagcaacaagggagacagccagttcatagttccttacgcatggagccaaaggaccttcaatgta

SEQ ID NO: 1888533 - DNA, 4001 bp, Homo sapiens; identical to SEQ ID NO: 1562754

SEQ ID NO: 1888534 - DNA, 4001 bp, Homo sapiens; identical to SEQ ID NO: 1562755

SEQ ID NO: 1888535 - DNA, 4001 bp, Homo sapiens
caccatgctggctaatttttgtattttttgtagagatggggttttgccatgttgtctaggctaggctggtcttgaacacgtgagctcaggccatcccctcacttcagcctctcaaagtgctagaattacaggcatgagctggcttctaaacatttatgaatggaatgatggggtgtctgggaggcaggggaatagaaatgatgtaaactggaccccaagttggcaagagtcagagctgggcgatggatttgtggggttcctcgtgtccctcattagttagtattcactctcctttagtgcacgtgtgagattttccatggtcaaacagacaaatgcttgcactgaacctcccaggagaagcagagacagatggtgcaagggccccagggaagacttacctttcacttaagataaatttcccatctttgaggctgggcagcttcctgagggggttgatgtcaatgtatcctttgctgtggtggtgacctgggaggggcagggaaggtctgaggctgtgggactccaggggagagagaactgagactcccagagacccaaacgcctccctctctattttctcaagaagagggaactgaggcccggagggacattgcgtctcaccccaggtcacagggcaaggcagttgcagaaccggactgcgatcagaactgctggctcccagcctgctccaccctaggtttggtgactcccgtgcctcctacctgtgtcccaggaccaggacgacccttttacccagaagctggaggcctccagtgcccacccccaaagctggatctgaaaacacagcctttgaatcacctgaagccctgagggcctgggtcccatccgcaatcccatcgctctcactctgtctccactttaaggaagccaggcccagcacacagctggacatccaaagggaagcttctcggacacaatcagggtcatcttaacagggaacctgaggtgggggcaggaactgaaactcttcctggaccagccgcctccagttggaaacatttctgggggctccactcgcagcccgttcatttccacagcttccctgtctcttcctctgtgttctagaggcttctgcttttgcaggctgagcttttggagtccctctgtgctggggatggagttggagcccacccctctgaccctcactcagggttagtggagccctgagcctttctcaacactggggaggatgggtgtagacggactgtgcacttctgccccctttgccaacctggtgggcaggtgctgagttcacaaggtcctagaatcccacaaggaagccagggtgcctggtgggagcccagggagtcccagctactgttccttcccccttctcctcgaaaagcctgttcatctgtggcgtggggactgtcattagtgagcactgactaaggtaggctggacaaggatgcagcctacaagccgcgtggcatcttttccttccctgtggacctctggggtgattcccttgtctctgtctctgctcctcagaaacgcccctatcaggctgtgcgcggtggctcacgcctgtaatcccagcactctggaggctgaggtgggcagatcacttgaggtcaggagtttgagaccagcctggccaacatggtgaaacccctgttaaaaatacaaaaaattagctgggcgtggtggcatgcacctctaatcccagctacttgggaggctgaggcaggagacgcacttgaacccagcagaggttgcagtgagccgagatagcaccaccgtactccatgctgggcaacagagcgagactccatcaaaaaacaagaaaaaaagaaaagccgcaatctgtgtgtcctgcctccccccaggaccaggcctgccaggcagcagtgggagttgacctttcagcagatccacaaactgaaagttgaactggatgtcatgcttcttcgagaagatgtagacggcacggcagggtgctgacagcaggtccatgtagagctccagtgccatgttgagacacatgccaggccccacagccgcagttggccagccacagacctgggcctatgtctggccagagtccctggccctgtgccctctccgatctgggcccaggatcctgtgttccccagggaaacctcttgtttccctttgtgttgtcataaggccaggaagcctgcaattctcacagcatcaaggattctaaggaggcccaggagtaggctggggagaggcccgtggcaaaggtgtggcagccgtgaccctactctcccccttccacgtgtgcctgtgccccgtggtgccacctcacagacaccagtctgagaagggattatgcctgggaattcccacggctggattttcattgcagaacctgacgaaaggggctttgcagggtccagaatgaagaggaggcaatgagaattatccctggaggattctagaagtagaggctgggagtatccacaggtaaatcgagcctgaactatgactagaaaggaattgggagaaagagacacaggtgaatcgagcctgaactatgactagaaaggaactgggagaaagagacacaggaaactgtgagctttgggagcaatggggacaccaccaccaggaagtcagggggcactcagccggtgtgtgccacacagaggagcctagaaacttcctggccttggttggggctgcagtggccagactgtgtacctggtggccaaggaaggtaactagagccccacgtagaggactgagtgccactcactctatgctgtgatctaataggtctaggctgagaaatgggactgaccccacttctggtgacagagtaagcctggagacaagcgaagagcatgcagtgtgtttattgcagacagcagggtgcagtggagtgggctgcacccactgcacctgcttctgggccagctgggggtcccgccaagcctcactgtggttcagaggctggagtatgagcttgtgggcctccagcaagagctcagtaccaagggcagccgccacacgggcctgccacactgccagccggggcagtcttggaagaggtcgcagccaacggcagtgggctgggaagacagggcagctggggttggggctcagccccatgcccagagtccccccagagggcaggtgggtaggaaagcttcacctgcatcacctccgtcagcaccaagtcttccagggagatctgctccattgccaggaagggcctggccaccagcaccccccaatccaggtgctgcagggctggcatcagcctccccaacagccgctccagctgtgcagcatctgcaggctgtccggagaagtggggcaggagagactgggctgggaggagaggagcaacttaacccagactcttggaagcctcttgggcctcctctccatcccttcccggctgccactcattagtgatgtcctctggggctctgtgttcagaaggtttctaaggattcattcaggcttaggggaaggagtactgtgatagattagttatgtctgctgaggacagtggaagtgaagctaatatgtaatatgtaccaactggtgccttccatctctgggggtccaggcccctgccccagcctgcatgacagggcctaggaagctcaccttgcacaggtagacattggtggcaggcagctggatggtgacatgcttccacgccaagtactcatccacgcaggtgcgggcttgcagctcaggtgggtaccagtgtccccgtatctggtactttcgactcaggtataaaacgatgaccatgctgtgggcagggggtgtcagagatcttttctccagcctgtcagggccaggtggcttcattgctcatactcagggtgatttgaccaggttttctccccaccttcaccttcaggggaggacctcccctatactgcaactccctccaggcagtatctccccacgaccaaaccactctgtttctccatttccaactctgatcctccctgggcccatgtttccacctcccctcccagttaccatac

SEQ ID NO: 1888536 - DNA, 4001 bp, Homo sapiens
atcccctcacttcagcctctcaaagtgctagaattacaggcatgagctggcttctaaacatttatgaatggaatgatggggtgtctgggaggcaggggaatagaaatgatgtaaactggaccccaagttggcaagagtcagagctgggcgatggatttgtggggttcctcgtgtccctcattagttagtattcactctcctttagtgcacgtgtgagattttccatggtcaaacagacaaatgcttgcactgaacctcccaggagaagcagagacagatggtgcaagggccccagggaagacttacctttcacttaagataaatttcccatctttgaggctgggcagcttcctgagggggttgatgtcaatgtatcctttgctgtggtggtgacctgggaggggcagggaaggtctgaggctgtgggactccaggggagagagaactgagactcccagagacccaaacgcctccctctctattttctcaagaagagggaactgaggcccggagggacattgcgtctcaccccaggtcacagggcaaggcagttgcagaaccggactgcgatcagaactgctggctcccagcctgctccaccctaggtttggtgactcccgtgcctcctacctgtgtcccaggaccaggacgacccttttacccagaagctggaggcctccagtgcccacccccaaagctggatctgaaaacacagcctttgaatcacctgaagccctgagggcctgggtcccatccgcaatcccatcgctctcactctgtctccactttaaggaagccaggcccagcacacagctggacatccaaagggaagcttctcggacacaatcagggtcatcttaacagggaacctgaggtgggggcaggaactgaaactcttcctggaccagccgcctccagttggaaacatttctgggggctccactcgcagcccgttcatttccacagcttccctgtctcttcctctgtgttctagaggcttctgcttttgcaggctgagcttttggagtccctctgtgctggggatggagttggagcccacccctctgaccctcactcagggttagtggagccctgagcctttctcaacactggggaggatgggtgtagacggactgtgcacttctgccccctttgccaacctggtgggcaggtgctgagttcacaaggtcctagaatcccacaaggaagccagggtgcctggtgggagcccagggagtcccagctactgttccttcccccttctcctcgaaaagcctgttcatctgtggcgtggggactgtcattagtgagcactgactaaggtaggctggacaaggatgcagcctacaagccgcgtggcatcttttccttccctgtggacctctggggtgattcccttgtctctgtctctgctcctcagaaacgcccctatcaggctgtgcgcggtggctcacgcctgtaatcccagcactctggaggctgaggtgggcagatcacttgaggtcaggagtttgagaccagcctggccaacatggtgaaacccctgttaaaaatacaaaaaattagctgggcgtggtggcatgcacctctaatcccagctacttgggaggctgaggcaggagacgcacttgaacccagcagaggttgcagtgagccgagatagcaccaccgtactccatgctgggcaacagagcgagactccatcaaaaaacaagaaaaaaagaaaagccgcaatctgtgtgtcctgcctccccccaggaccaggcctgccaggcagcagtgggagttgacctttcagcagatccacaaactgaaagttgaactggatgtcatgcttcttcgagaagatgtagacggcacggcagggtgctgacagcaggtccatgtagagctccagtgccatgttgagacacatgccaggccccacagccgcagttggccagccacagacctgggcctatgtctggccagagtccctggccctgtgccctctccgatctgggcccaggatcctgtgttccccagggaaacctcttgtttccctttgtgttgtcataaggccaggaagcctgcaattctcacagcatcaaggattctaaggaggcccaggagtaggctggggagaggcccgtggcaaaggtgtggcagccgtgaccctactctcccccttccacgtgtgcctgtgccccgtggtgccacctcacagacaccagtctgagaagggattatgcctgggaattcccacggctggattttcattgcagaacctgacgaaaggggctttgcagggtccagaatgaagaggaggcaatgagaattatccctggaggattctagaagtagaggctgggagtatccacaggtaaatcgagcctgaactatgactagaaaggaattgggagaaagagacacaggtgaatcgagcctgaactatgactagaaaggaactgggagaaagagacacaggaaactgtgagctttgggagcaatggggacaccaccaccaggaagtcagggggcactcagccggtgtgtgccacacagaggagcctagaaacttcctggccttggttggggctgcagtggccagactgtgtacctggtggccaaggaaggtaactagagccccacgtagaggactgagtgccactcactctatgctgtgatctaataggtctaggctgagaaatgggactgaccccacttctggtgacagagtaagcctggagacaagcgaagagcatgcagtgtgtttattgcagacagcagggtgcagtggagtgggctgcacccactgcacctgcttctgggccagctgggggtcccgccaagcctcactgtggttcagaggctggagtatgagcttgtgggcctccagcaagagctcagtaccaagggcagccgccacacgggcctgccacactgccagccggggcagtcttggaagaggtcgcagccaacggcagtgggctgggaagacagggcagctggggttggggctcagccccatgcccagagtccccccagagggcaggtgggtaggaaagcttcacctgcatcacctccgtcagcaccaagtcttccagggagatctgctccattgccaggaagggcctggccaccagcaccccccaatccaggtgctgcagggctggcatcagcctccccaacagccgctccagctgtgcagcatctgcaggctgtccggagaagtggggcaggagagactgggctgggaggagaggagcaacttaacccagactcttggaagcctcttgggcctcctctccatcccttcccggctgccactcattagtgatgtcctctggggctctgtgttcagaaggtttctaaggattcattcaggcttaggggaaggagtactgtgatagattagttatgtctgctgaggacagtggaagtgaagctaatatgtaatatgtaccaactggtgccttccatctctgggggtccaggcccctgccccagcctgcatgacagggcctaggaagctcaccttgcacaggtagacattggtggcaggcagctggatggtgacatgcttccacgccaagtactcatccacgcaggtgcgggcttgcagctcaggtgggtaccagtgtccccgtatctggtactttcgactcaggtataaaacgatgaccatgctgtgggcagggggtgtcagagatcttttctccagcctgtcagggccaggtggcttcattgctcatactcagggtgatttgaccaggttttctccccaccttcaccttcaggggaggacctcccctatactgcaactccctccaggcagtatctccccacgaccaaaccactctgtttctccatttccaactctgatcctccctgggcccatgtttccacctcccctcccagttaccataccatcctgccctctgtgcccaggccccactccctggcatcagggtccccactcagagtgcctgccgtgtgggccctgcccaaaaggtctccaa

SEQ ID NO: 1888537 - DNA, 4001 bp, Homo sapiens
ccactgcactccagcctgggcgacaaagcaagactccgtctcaaaaaaaaaaaaaaagaaagaaagaaaaggggtaattatagtagtatttccagagaggcgccttctctacccaagaactagggacacatcctaaggggagcctccttcccctctcctggttccaagcaagaagacatgacttggctgtgcaattgggaaccctggtccctcctccaggaagccttctacccgccaacccccactgcaggctggtgagggtgctgcctctgtgcccctcagcccttggcacttgcccttgctcttgcacccctgccatgacctctccaggtcagggacagcatctgtccccagcatcacctggcacatggcctgcactgagtagctgtcagtgaaagttggtgaatgaaggcataaataaatgaagtcaaactctgtattaggccttcttgcattgctatgaagaaatacctgacgctaggtaatttataaagaggtttaattggctcacagttctgcaggcttttcaggaagtatggtgctggcatctgcttctggtgcaacctcaggaagcttaagatcatgacataaggtgatggggagccagtatatcacatagtgagagcaggagtaagagagaaggggaggtcttagactcttaaataaccagatcttgtgtgaactaagcaagaactcatcaccaaggggatggtgctgaaccattcataagggatctgccctcacgacccaattacttcccaccaggccccacttccaacattgggatcacatttcaacatgagattttgaggggacacacatccaaactacagcaaatcctattgggggcagaaatgaatctgccatacataggccacacctactatgtgctgacatgatacagggagaggagtatcaggaatgactgttggggatccctctgccattctcccatgagcagacatccccaggatgagctgaggggaatgcaatgagcaggccaaactctttccaagctgtttgaccacacccacctaccccagcactctcagcccctgcctggtgccctgtgctgagctgggtgaggctggggagactggtgagtgagggctgccctgccctttttgagcccccagtcttctggtgaaggaacatagcaacatggagtgattggtatggatgatgcaaaaccagggacatgggacccagaagtgcccgagccagcctggaaggcctctgccctgggccccgggtggctgtttgctgcacagctctccccacagcctgccccaaataaacagcttatcttcgtccctgaaaatggtgctctcgagttccatccttttcagagcgggtcctcccagactcctcttcctgcatcctcctccatcccgcttagtgacactttgccgtgggtggagcccctcatttgatcctcaagcccccgaggtgggtattatacctcgttcgcaggcaaaggctcaagcgaggtcagtcttaagttgctgcccactgacccgtctaccagtcctgtccttgcgtctccatggctcaggtcagggttatcctatctgcttcccacctctctccaacacatgcactccccaaggcaggctccatcaccgggccccagcccctggctctctcctccaacgcagctccccagccggcctgtaaaaccgaggacaggctcccgccacgccctcggcggtcctcaggccttggcggttggggaagcccgccaagggcgacggttcccctccagccccacaggctgtgcagctccggcaatgagtctccctcaggtctctgggtcagccggcgccccagtgcgtgcctcgggggcagggatcccggcttttcactactgttagtaacagctcgcgcgcgctgcttcacagcaggtgggtgagcctacttttagtcttcccatcgacacccttagatggcagttttaactttctccctacacacaaggagctgctatacatggttccggcttgacgcggatacctagtgacacttggcggccaggccgggcagacttccgggtgggtgatccctggcgctgtgcggagccattcgctgcgctgaagcagtgcgcatgcgcactggacgcttcttaccagcgtcctgactacaatacccaggacgcacccagcccgccgcctctcggagcccttttcaaaccgaccaatcggcaacccgcgtctcccggcgccgcgtttaaatccgtgccggaggcgcgtcctgcatcgtctgccgctttgggtaaggtggggtcagggtcgggggcgaggcttgcccggtgggcccggtgcggcgcggtgcccgccgttttcgggacggggaggggccgcgccccgccaggagccgggcctgggctcgagcaggggtcactgaggcccctcgcgccgtggtcggggatgccgggaggtctagggctgccccccaggcaaacagagcccccaacactctggcccagaagccgagaattccgttatctcgtctgatggcgttcgggctgactcccggcctggcggcactcgggccctggggtcccctgggatgcgatcatttcagagcggcccccgcgccgcctctcccagacctggccgcggccttcagctctctctgcctctgtgagccgagggctgaaggaagccggagccctgggccctgacacgtactcactttctggccccgttccaccctgcagtgacttctgacagctctctccatggaaggaggcggcggccgcgatgagccttcagcctgccgggcaggggacgtgaacatggatgaccctaagaaggaaggcaagtccttgctgctgcggcgctgttgttgttcaggatgttcagtagagatggagggtgatttaatgtttccctgagaaattctttctcaagtgctcgacttgtactctgcacctgtgaaacacatgacatctgccttcgttttctggttttctttcacctcctccccattttaagtttcatcacagccaggattctcatccgttttatttaccgcagtgctcccatgccctgaacagcacctaacactttgtgggctctcaaatatttattgtattgaattcgatgttttcttttttgtttgtcgctggtttctgtttgctaagacttatttaggatctttgagaccatgttaatgagtaagcctggccccaaacccctttcttcttgtgtctttgactggtttgggtatcaaggtgagggtacagcttcacagaatgagttacaggccacaccctctttttctctcaaagcgtttttatttatttatttatttatttattgacggagtctcgctctctcacccaggctggagtgcaaaggcgtgatctgtactcactgcaacctctctctcctgagttgaagggattctcctgcctcagcctccctagtaactgggattacaggcacccgctgccacacctggctcatttttgtatttttaacagagacggggttttgccatgttgcccaggctggtctcgaactcctgagctcaggcaatctgcctgcctcggcctcccaaagtgctaggattataggtgtgagccacctcacccagcctcacaaagcattttgacatcccttgggtagttttctcacactacccaaggatcctttctttttgagaccaagtctcactctgtctcccaggctggagtgcagtggcatgatcttggctcactgcaacctctgcctttcgggttcaagcgattctcctgcctcagcctcccgagtagctgggattacaggcacccgccaccacacctggctgatttttgtatttttagtagagatggggttttaccatgttggccaggctggtctcaaactcctgacctcaggtgatccacctgcctaggcctcccaaagtactgggattacaggtgtgaaccaccgcgcctggccccaagcatcctcaatgcctccattttgcaggaactgtcctggagactttacaaa

SEQ ID NO: 1888538 - DNA, 4001 bp, Homo sapiens; identical to SEQ ID NO: 1562760

SEQ ID NO: 1888539 - DNA, 4001 bp, Homo sapiens
ccaagacaggggtgagcccaggggcacatcccagcacgaggcaagaaggttcagacctgtgactaagaggcagatggcccactgcctgtcacagggaggaaggctggttagggggatggggggtgctttgcttaggacactgtgagtggggcacacgctggcacccagccttctcctctctttctcctgtactgaatgccgtaaagtcagaaaaagaggatgtaggctgggtgcggtggttcacacctgtaatcccagcacttcgggaggcagaggcaggcagatcacaaggtcaggagttcgagaccagcctggccaatatggtgaaaccccatctctactaaaaatacaaaaattagctgggtgtggtgggcctgtagtcccagctactcagcaggctgaggcaggagaatcacttgaacccggaaggctgcactgagccaagatcgtgccattgcactccagcctgggtagcagagagagactccgtctcaacaaaaaaaaaaaaaagaaagaaaaaaagaaaaagaggatgtacaccaggcaaacgcggcccaaacctcatcggatcccacttctctgctgaccacatccaagtcaggaggggaagaggggtggcgtccttggcctgaggtcacattctgtcctctatctgaaccgtgaaaaccaaggtaccttcccaccttggcagagctgacctcaaaatatctaaactgtcgcctcctcccgatccccgggcccagctctgggcagcgcctgcctctcaggcctgacgagtgcctgggtggctcatgcctgtaatcagcacttcaagaggttaatgtgggaggatggcttgaggccaggagttcgagacgagcctgggtaacttagcgagacctatatcttaaaaatacgaacaaaaaaaacaaaaaaaattgattttgtttttaagacggagtctcactctgtctcacaggctggagagcagcggcgtgttctcggctcactgcaacctccgcctccctggttcaagcaattctcctgcctcagcctcccaagtagctgggattacaggtgctcaccaccacgcctggctaatttttgtatttttagtagagatggggtttcaccacgttggccaggctggtcttgaattcttggcctcaggtgatcggcctgcctcggcctcccaaagtgttgggattacagacgtgagccacgagcccgaccaagtttgtttgtttgtttgtttaaattagccaggcatggtggtcccaggtaacttgcaaggctggggcgggagaatcgcttgagctcagaagttaggattgcaccactccgctcccacctgggcagcagggccaaacccggtctcaaaagcatttcaaaaattaaaattaaacattagaaagaaggacactgcccgggctcagccttcgcctaggaacgggactcgacaggagcgcttcttcctcctcccgcctccaccgctccggccctcgcgggtcccccaggtactcccgttctccaatcccgcgcccccaagcccgttgacctttaacctcctccgggcccccagctccggggcactacggtgaaggaggctgcagggcgccggggcttaccccattcccaccgccgggcttccgggcgactcctggccctgccccgagtccgcgcctccgacagcggtcgccggtacctctgctcctcgaagccccggcgtcggttgtcggagaagtcggcgcggaagcttcagaggccgtccagctgcttgcgctgccacgacgggctctctcggggatacagcatcccgtccggtagcgccaacgtgcagccatacaacagcagccggagagccgcccaggccactgccgccccccaggcgaggcttccccctccccgtctcggccgcagtctacggggataagagctgcgcgggaggagcattgcggcaaggtcgcgtgacgcgccggtagcgtgacgcgacttaggtcgtccgcgccatctttgttgagggcgattgccaggcctggaggggcggggcggcgcctgtggctggaaccctgggctaggcctttagggaagcgggacccccaccctcagccccaaccaagaagggcgtcgtctgctccccatcgtcgtctgctctgtgctggatgatccagggccacaggccaggacagaacccctgagattggtgggatccccgtttcttcaaggggcacctccacttgctttccccagcaggaactagagcaggccccagtggagcctcttccatgactgctggatgcagcctcttgcaggcatgcacgtccttgggaggcggcggtagccctgaccctgggcctctgggacctcgaccctaaccgaggggccagaagctccctcttggcgttgaagacacatgaagatgcagggagagaggccaagtgcagtggctcacgcctgtaatcccagcactttgggaggctgaggtgggcagatcatttgaggccaggagttcgagaccagcctggccaacatggcaaaaccccatctctactaaaaatactaaaaaaaaaaaaaaaaaaaaaaaaaaaaagccaggcatggtagcaggcacctgtgatcccagctacttgggaggctgaggctggagaatcgcttgaacccaggagacgaaggttgcaatgagccgaggttacaccactgcactccagcctgggcaacacaacaagaatctatctcaaaaaaaaaaaaaaaaaaaacattgcacagagagggtgccctgcgggaccccactttactccagtagggaaggcaccgtgtggaagggtagaggaagagatctggagacagtaaaaaagacaaaggtttattgaggggactttcacacaggtgcagtggctatggctggacatgagaaccactacatgatttgtaaaaaccatgcagcttccataacattttcacctaacatcctcgaccagttaccggtggaaggtatccaacttcccagtggtgaatccatacacatctgtagcaacctcaattcttgccgcctcagaagaaagaatttgaccgagggtcataaggcagaaaccagacagaggcaagttgcagagtaggagtaaaagtttattaaaaagcaggccggggccgggcatggtggttcatgcctgtaatcccagcactttgggaggctgagccaggtggatcacctgagctcaggagttcaagatccgcctggccaacatggtaaaaacatgtctgtactaaaaatacaaaaattagctgggtgtgatggtgagcgcctgtaatcccagctactcaggaggctgaggcaggagaatcttttgaacctgggaggtggaggttgcagtgaacgagattgagctactgcactccagcctgggctatagagtgagatagtatctaaaaaaaaaaaaaagtttattataaaactttagaacaggaaataaaggaggaaaggaaagaaggaaagtacaacttggaagagggccaagcagtcgacctgagaaaccaagtgcccagcttgacctcttgactcagggtttcataggttggcatcgttccaggatcttgccattcctgattccttagcttggggctccgaacacacattcttcttagaccataaagtcattcttcttttttttttttaattttatttttttgagaaggagtcttgctctttcgcccaggcggcactgcagtggcactatctcggctcactgcaagctccgcctcccgggttcacgccattctcctgcctcagcctcctgagtagctgggattacaggcgcccgccaccgcgcccggctaattttttgtatttttagtagagacggggtttcaccgtgttagccaagatggtatcgatctcctgagctcgtgatccgcccgcctcggcctcccaaagtgctgggattacaggcgtgagccaccgcgcccggccgaccataaagtcattctaagggtacacatcagttatggctgttgggtgcctctgc

SEQ ID NO: 1888540 - DNA, 4001 bp, Homo sapiens; identical to SEQ ID NO: 1562766

SEQ ID NO: 1888541 - DNA, 4001 bp, Homo sapiens
ctgtaaccccagctacttaggtggctgaggcaggagaatcacttgagcctgggaggtggaggtggcagcgagccaatatcacgccactgcactccagcctgggtgacagagcaagactctgtctcacaaaaaaaaaaaaaaaaaaaaaaaaaaaaaattagattgagagaaattctatgaaagaaacagaataacgaataactgtgtttgctggtggggtagactgccaatagtatagggcagagaggggtaagtctttggatatggtagcagttgactgagctcagatctgaaggcagaagaaaattagaacagccagcacagagggcctagtgatccagccagagaggctggtaaatgcggaggctgagaagggctggtgcagacaaaccatctgtgtggttggagcttaaaaagcagttacttccggaaagtatagggtgaacgcagtagttctcaacagagggcaattttgcacaccccatgggacatttggcaaagtctagagaaatttttggttgttatgatggtgggggtggggagaaggttgagaaaacttgcactaaaagaatatttcagcccaaatttcagttttagtcattatgttctaaactcatgttctcgccaacttgaatagttttttttttctttcctgcagaaacaaaataagaacaggtttcaagtggctcactctttcatctactctcttgggaaatccccttggggaggttcatgggactccaggagcctttggaaagcaccacaggatacgaaatatctacctaaacaggtgagaaacgatccaaggagccacacccccaactgctcccacagttaccagggcagaaaaaactgagattaggggtagggcacaaaggagaatatatttatgttttatttgcataattacaaattaatgttaaaaagaatgcaaagtcaggtccagggtagggatgaagaggttgcagatgccctcaagtattggaaagctctggccttctggccttatgtcttttttctttcttttctttttttttatttttgagacagggtctccctctgttgcccaggctggagtgcaatggtacgatcttggctcactgcaacctcaaactccccggctcaagcgatcctcctacctcagcctcccgagcagctgggactacaggcgcacgtcaggtggcccagctaatttttgtactttttaaaatttttttgagacggagtctcgctctgtcgcccaggctggagtgcaatggcggaatctcggctcactgcaacctcagcctcctgggctcaagcgattctcgtgcctcagcttcccaagtagctgggactacaggcgcgcgccaccacgcccagctaatttttgtattttttgtagagacgggttttcaacatgttggccaggctggtctcgaattcctgacctcaagtgacgcgcccgcctcagcctcccagagtgctgggatcccaggtggagccaccgcgccgcacttctcgggccttcttctaactcgggtccctgggccccccaggctctcgcttccctcccctacgccgccccgcgcccgcctcagacctctctgggacccgccggcctggcgtcctggcccgcccgagccccacggtccctcgggtcctaacctcggcggggcaggcacctcctcaggaagccccggagcaggctgtcgttgtataggtggcccaggctggcggcccctgaccgaaggtcgcgtcgggtcagtgtgcagcccgtggctgagaggcggctgctgaggggccgggcgggctaggggccggctagccgccgttcgcccctgctttgcatattcatgaagtctagcgaggccggtcgcccaggctagccgtggacgggtcatgaattattcatgaggaaacctctggtcccgcccagaaaggcctcgttgactattcatgagccgaggagcgggtttgggccggaaaaggccgttgacccccggtgggagggaagcgtcgacgagctgaggtgagggctgttgagacgcgaggtctcggcccagagagggcactcgggcgttgttagttctgtctttatgtcaaaaaacaatttttttttcttttcttattacttaaggctttaagttggatttgaaagtatcatatttcgtgagggcctaaagtactgtgaagagaatcgggagggcagggggctgaggaggaaggcaaaagggaggcgatttcccccagaactggacagagagcacccaggtagttttgaaattcagatttttctggacatgaaatcaaacttgctgagcaagcagcagccataatgagccatgatgaggctggcagggcagacgatgtctgtgcccgacattggagggggccgtgtgtggtggagctttggggaagtttatcttacctgggtcagattctccccagccattgaggttttctgccaggatcgatgcctggtacaggccaagaggtgagagaggtggggacaagacaccccgccccccttgacctcagctcccctttcactttagtgaggatttgccaattaatccctatggactttagttccctaaacagagggagagagtcttgaacctcaggattagccaatcgccaaaatgtgtccgagtacgcagggcactggacaggctgtgcagtacatcgtgtactcagctggtagaaatgaggggtggttctggcccctaaaggggtttttaatctcagcaggatcataatctaatttctcctccattggaccatcaatctgttgaggtaggaacagtattttacatctcgtaatcctgcatgttgttgcctggcacattgtagttgcctcgtagatgttgaatgaatgaataattgaaatagcatgaaaaagatattaaaaagtcaaaagagcatgaacaaatactcaattaatatagtggaagccattttctctgaatgagcacaggtaggggaattaccagggccaaatggaatttgttaaaatggtgaataatttattgaagcaagctctgttggaaggtctaagtaattgggcgaactttggcaaaccaagttcccttgcttagcctcactttccttttcttttttcttttttttttgtgagatggagtcgagctctgtgccaggctggagtgcagtgacgcaatctcagctcactgcaacctccacctctcgggttcaagcgattcccctgcctcagcctcccatgtagctgggactacaggtgtgcaccaccacgcccagctaaatttttttatttttttttatttttagtagagacagggtttcaccatgttggccaggatagtctcgatctcttgacctcgtgatcctcccacctcggcctcccagagtgctgggattacaggtgtgagccactgcacctggccccttttctttatagttttatgtttaggtttaaatccatgatccattttgcattaatatttgtatacagtgtgagatttaggttaagtttcttttaattctctgttcttccccccaccctccagatgtccttttgtttcagcatcatttgctgaaaaaaagattcttcctccacagaattggatcttctttaaatcaaaggggttggaagatgtctgtgctcccttccagctttaggaatctattgaacccatttatgttaacgtacacttcttttgagtaaagccattcttaacaacatgcatgtgtaaggaaggtaatatagttacatttcagaatccagctattggatagtgttcacctgatagaaaagggattttcttgtaaaaaacggtttttgaagattgagaaagatgggtagagagccttcataaatcaactatgattatatttgggaaaatgtaataaaactttggcttttgcttcacttggaatggttaaaaaagtggtttaggccttagtaaactaaacagcagctggctaatctttatgtgaatcttggactcacacatagtaggggtaaaataggaagtaattgt

SEQ ID NO: 1888542 - DNA, 4001 bp, Homo sapiens; identical to SEQ ID NO: 1562770

SEQ ID NO: 1888543 - DNA, 4001 bp, Homo sapiens; identical to SEQ ID NO: 1562769

SEQ ID NO: 1888544 - DNA, 4001 bp, Homo sapiens
caaagggccatgtcaaatttcccatcaaatgataaaaaagcacatatttttttttaaatgcggtacagtagcctgccactaaaacaaagccccattttactcctaactgtatttttagaaataaaggaaaagcaaccataaaggtcaacatgtaattttattgttcagtaagattattgcaggaatttttaatgttcttgtcaacataaatttcagtctctgttgtcatgcataatctggtactcttttggtggaagatcagttgtaactagggtgatatttttccagtaaagatggttgaagagctggcctgtaacgaaaggcaactgatgtatcagctgtcgcagtcatttacaaccacaggttgcctgctggtagcaggttagaatgaggagcctcattggctaatacctcaggatatctggtgggaaaaagtaggtggtttcactatcagccccaaaggagggagatatgatgtagtattgagaagctgtggttgtaacaaaattcacaacgtggccatttgcttacatgtcggtgctatgagagtgcatatgaatatttgtcaattgatttaaaatagcatgttgatttgttgtaatttgttctgattgtccaactgaggttgaaatggaagaggagggaaaccacttctaattgggtcaggtgaaccagcaatgccctggctgacagaagatttccttgttagagtcatatttaaatttgtagatgttgaaaatgaactttcttcactagtttcagcagctaagacagaattatgtttatctgtgttagcccctgctctaaagtgtttcttgaaatattcagtgaagtagatacaagagaagtgtttttaatcttaattcttcttttcgttcttattaaaagttggggacagccacgtttgaaattcggatgataatacaactttaactaaaaccaaggagaaggtaattcagtgccattttaaaccaagaggcaagtaacaataacaaacataacccatacaatctcagatttctgttttatcacacaaagttaatatcatcaaataatgaatgaacattgtttactatttttaagaacatgcttgttgagaaaaaaaaacactcaagttttgaagccctctggtgaaaacatgttatacatttaatagtaacatttcactaagtggctttggtatctttatttggagttcactggtaagactgaatgttgttagcaacatttcttaaaacctgaaagtttaatgctcaacctgcactcaataatttcaaaaaaattaagtaatttttaccttaatatttgatataatttttaaaatctgatcttactgcatgtattaacatagttactgatatataaaatgaaattacatatatactcaaagtggtaactgaaatattttgaataccttgcttaaaacagaaatttctttttcttctgccagaaagttggctagaaaagcagatctgtgaaaattctgttgaattttactaaatccataaaggttgagctgtcaaattaagattttcatactgtcagtttgaaatattctgtaaggagcctttatttccaaattttctttcttgaagagttcttcattagtcactatgcaagtttcattcttatcctatgaattagacttgaattggtcactttcagctattttccaaagtttactgggaaaggtcagagaaggaaaatcattatctttatctggctcagagacataaagtataatgtggcctttttatcaaggatccttgtggcaaaacctgaaaatcattgattcagtcattgaccttaagtctgaatccccagggattatgtgttcacacaatggagacccagaggaggcttttgaaccagttgattcatctttaggagaaacatcttgagtttctgcagaaacatgtgccatctcaaataagtaattctttagcgacttttccagcctgcatgtgtttcaagactgcagcttcaaatgctgcttcagtagtctactcaggtaaagtaattgagatcaccacagtggtttccaacctgagtagcaatggcatcacaagaggactttggtcacctagcaacaaacataaaaatttggccaagactgtttactttccagtctcagaaatgtatctggtaaaaataaaatatagaatgattacttacacagtttattctgcaaaagtttcatgcctgcagaatcttttaaattaataaggagggccaggcatggtggctcatgcctgcaatcccagcgctttgggaggccgggacaggcggatcatgaggtcatgagttcgagaccagcctgaccaccatggtgacaccctgtctctactaaaaatacaaaaattagccaggtgtggtccatgtgcctgtagtcccaggtctcgggaggctgaggcagaagaatcgtttgaacccaggaggcggaagctgcagtgagctgagattgtgccactgcactccagcctgggcaacagagcaagactctgtcttaagaaaataataaataaataaataaataaataaataaataaattaattaatatcctcaatccctgaaataaacataattttctccttgacacacacagtcttactagattggtgcgaggagcatagggcctggtaattggacggtgcaaaaaaataaaaataaatattttaaaaactctctcagcttggcatgttggattgaaaactgatgcagtgtaaaacatatatggtaaaaagacatggccatatagacaaaaggtaggttaatggttgtcaggggctggggaatagaaagaactgttaagtagataatggggtttcctgtttgatgatagaaatgttttaataatataattttgaataatgtaattttgtattatgtgaaacataccttaaaaaattaaaataaaatcaaatatgaataaaactgattagatttcagaataaaaagttattcatgtatgtatctattcaaaacattttttattcatatcatagaataaataatactttcatttggtatgtctgtaaatatctgacatgttaattatgtaagattttaaaagcaagtgacctacttataaggagatcccaaagagtgggagatttaaaaatgtaataataacaagaaagtgttttaagtaaagtaaatttgtatgtatgtctaagcagaaaattttattatttggttccaagagccaaatatctatttaaaaaatatttcttaaggaataatctctgtgtcctgcaacgtaaagttatcattataaaacaggagtcaaatttgtgaattaatcttagaattgaataaaatatttcttctctttgaaaaataatcatgccccatttacagtaagaatttttatatgttcatgcttgagaggtggtatattaaaattctaatgccttggctttaagtgttgaatatgtgtggaataaaaaaataatgattttgatatttcttatactgtaggaggcagttctctcatactggaaagaggtgtcattgttagaagcttgtcttggtttaacatagtttaagttttgggggtgtattttgtttagttcaaaattttccatattagcagtaagtaacaaaaatgtccagatcagaaaactctttgtgaaaataaaacaggtgctcctaccagatgtggttcatcaattttgacagaattttcatttaaaaaaggcaaaattaaaatttgtttaattgtttgctttctggggaattttcttgttgctctgtctgaaggaagtacagacttcttttgtgatgggaggggatgaatggctactagacagcagcaaaagatgggccatgggtgcgaagagaagagggagttaatgggagaatcagaaaaatatcaccttaaatgtaggacaatcgaagtcaaattgtggctgagcgttttggggaactaagatgtgtgactctgtagggaggaagaatgccttggtgttttcaagggaagatgactcagctagtgcag

SEQ ID NO: 1888545 - DNA, 4001 bp, Homo sapiens; identical to SEQ ID NO: 1562772

SEQ ID NO: 1888546 - DNA, 4001 bp, Homo sapiens
agagataagaaatgaagagagggagcaggatttctggttgacaaagaggatatttactgagggtttactgggtacagggagaagggctggatggcttgggatgcagagagagacgcctcccctgggatcctgcagctccaggcccctgtgggtggggtgggggctgggaacctatgaacattctgcaggggccaccgtcttctctgcagtgctcccttcatgcatgacctggcagctgtagcttctgcgggacctccactgctcgggcgtcaggctcaggtagctgctggccatgtacttgctgttgctctgtttggagggcgtggtcatctccacgccctgggtgatgggggtaccatctgccttccaggtcaccgtcaagattcccagatagaagtcattcatgagacacaccagtgtggccttgttggcttggagctcctcagaggacggcaggaacagagtgaccgagggggtggccttgggctgacctgtgtggacagaggagggggtgagagatggcagagggagtgtggggtgttgtggagcgcctctctctgtctaaagtctctgggagggttcatggtgtggccgtctggtccacccagggcctctccttccctcctcattccctcctttccactggagccctctggagagcagacagccctgtgccttcctaggaccccttcccaagtcacctttcccaggtgtcctggcccagccctttcctctgcagcctcagtttccccgtgtgcacccagggcaggctgtgctccctccttcctggtttctggagtctgagtttggaatctaggggtctccccaacagcacacaaaactgacctggcagggtgtggggaggcccaagcctggcatggcctggagcttcccatcccctggggcaccaggctgtgacccagcctggcccactcagctctcctggtgaagcgtgggctccacccagacacaccctggggctctgccgtcgcccctgtccccaccagcccaaccacaggacccttcacatcggctgggttcttggggctgctaacacagatgttggggtaccacagcccccatgcccaccccagcagcctctgatgcccctggacttcacctgtcagccgtggagttctctgcactcccgtttactccccgctagtcaccttctgagtctaaggtgcccttcctcaaatgaaggcaggaggccgacctgtgaatggagacaccaggccccagaggtgatagggctccagggacagacacatctctgcactaagagaccctctcctttctcgtgaccgtcctgggagggctgggctctgggacctcacccagtctcacccatccctctatgtccccatgtccttacgacccagcacaggccacagagctgcagcctagacccagagccctctctgtgccctccattggtctccccttggggtgacgcctgtgtccccagggccctgtgtggccctcccaggctggatgggcatccagccctcagcctagaccctggggtcccggggactgtctctaaggccactgcagggccccttatcagaaccggcctctgtccctcactcagacacttgccctgggagaggggaggagcactgaccccgcccaatcccagcccaggtcccgggaccaggctgtgtcccactgttggaacctgaaggcggctgctcccactgtagaggcccttcaagccagttgacctgagactagcccacttcccccagaccccaaggagaaagggagggtttcatgcctaaggcctggaggccagaggggaagaagacccagagaaagaaaacagatttttccagagacaggagagggtgggacaggctgggaagttagagccacgtacctaaaacggtgagctgggtcccgctgccaaacacatgcttcactgaattatgcttggattgaaacccccggggccagcacccggggccagtccaggagccgcgctggagcaggaacctgctgggtgtgaggggcacagggctgcagtgtgtaggctgtgatctaggcacagggtaggggggtggccagtgtcccagtagtgtcccccagtagtgtctctgtgcctgttctctatctgaggcaggtgccgcccacagccttggagtcaccccggcatgtgtccccctctctgaagctgttggtgctgatggcaacgctgggcccagtaggtcccagcaactccctgagtgacacatcccctcaggcagctgtgccgtgtggctgaggagtcctcagctggctcggacctgtccacctcacttggcctcattttaagggcctctgaaatctgccacaagtgtccccagtcaaggaggctgacttcctccctggaccaggacactgggtcattcctgactcaagaggagagtcctctgcttttgtatctacccatggagatgcagctcagtctcactttgttcatgaagccttttctgatcattcattccgtctgtccgtccatccatctgtccatctgtgcatctgtccatctattcatctgtctttgcatccatctatcatctgtccattcatccatccatctacctgtccgtccatccataaatacattctgtctaccaggcactgtttcgtgtgctggggacatggtgtggtcccccaggctctcacccccatctctcccaggtcatggccaacaaggccctcctcatggtcatgtccaaggtccttctgctgtacctggtgtctctgctggatatgacatgggactggcccctctttccagtgactcttttcccctggggtctgagactcccctttcctcttaccctggcatctgtttctccatggcccatgcctggctgctgactccccagcccccacccagacctctttcttggccatcttcacactctgtgacccccactattgcccacatggtgaggctggagtctatctcagctccaaaccctctcagctcctcaatttcctgctgaccatgcccagtgggctacccaacaggagtctcaaactaatcacgtccagaggagatgaccaccttcccccagcccagctcattttctgtcttcatctcatcacaatgaccatgggcagtctcaacccctcagccagaaacctggagtccctggattcagtcacctcgcctcccacactgaaatggcttctgcgtacttagctactgcatctagacattccttttttttttttcctttgagacagagtcttgctctgtcacccaggctggcatgatctcagctcactgcaacctctgcctcccaggttctagatgattctcctgtctcagcctccagcgtagatgggattacaggcatgcaccaccacacccagctaattttgtatttttagtagagatggggtttcaccatgttggccacgatggtctggaactcctgacctcgtgatccacctgcctcgggctcccaaagtgctgggattacaggcataaagccaccatgctcagcctttattttttattttcaaaaaaattttttttcttttttttgagatggagtctcgctcagtcacccaagctggagtgcagtggcaccatgtgggctcactgcaacctccgcctcccgggttcaagcgattctcctgcctcagcctccaagtagctgggactacaggcgtgcaccaccacatccggctaatttttgtatttttagtagagacgggatttcaccatattggtcaggctggtcttgaactcctgacctcattatctccctgcctcagcctcccaaagtgttgggattacaggcgtgagccaccacccccagctttttttttttttttttttttttttgactgagtctctctctgttgcccaggcttgagtgcagtggtgcaatctcggctcactgcaacctctgcctccggagttcctgggttcaagcaattctcatgcctcagcctcccaagtagctgggactacaggcatgcaccaccacacccagcta

SEQ ID NO: 1888547 - DNA, 4001 bp, Homo sapiens
ggccgggtgcggcggctcatgcctgtaatcccaacaatttgagaggctgaggcgggcagatcactcgagcccaggagtttgagaccagcctggacaatataatgggaccccgtttctacaaaaaaaaaaagaagccatgtcagaaagaaacctccccacacttgctgcctgcccaaggctctgcagctgagaataggccctggaaggcttcctaggccctgcccctaggtgaaagggcccatggatatgcgcccggcccttccctccccatccctggctacgacaccctctctgtacagtggggaggggactcctgggcccttataagactggctttttttttttttttgtagctgatcccgcaggaccggctctggtccccttccagcaagggaacccagggagcaacaccaccagtccaggccaagagcacatccccagggtgagtgaggctttactggaggtggggcaggtgagtggagtgttccctgcattcacaggggatcttggatctggttttccttcaggcctctgggcagacagcaccttcctagcagcaggacgggtaggaccctgctgggccagccctgcacatccccacctcggcagccctgcacatccccacctcggcagccctgcacatccccacctcggcagccctgcacatccccatctcggcagccctgcagccagcccagcaagtccttgctggagggtgtgacccacttggacacctgcacccagaaccccatcaaggtcttggtcaggctgagaaagagactgtcacctggccggggacaggccagctctgcacaccagccccaggagcggcccatgtagcctgtggcccagggctgaggctggatgggaggtggctggcagcccacccactgtaataaagccccagccattggcccacagcaatctttgcctcacagtatgactgagccaaggaaagaacccttccttccctgtcctgggcaggggccactgagtccccagccatgtagttcagtcagtcagcagagtcctggcactatgggccctcagtaaaaggggccttcctgcttccctcccgacagaggctgtgggataggagagtacacccagggcagaggaagctcctaagacctgggccaggtgaaggtccgtttttctatccccagagcaagggtcgaggggtgaaccttggctcagtggcccgcactgactcaggaaggggtcaggtgggagtggacagaggaagggccggtgaggatgtctgaagcaggcagagggcagcaacgccttcagcctcccaccctggctctggacctgcgctgggcacattaaggacccaagaggtcaggcctcctttcactgaggaactccttgcctttaggaaatggtgaccgtcatgaaggtttctctaaatcctggagatcatagccccaggaggccactgaaggcggggcaaggcctccaccaagcagaggacaccctgccagccctggctttcccatccctgtcccttgggggtctcttcagcccagggtgccatgcggccaagcatctggggctctggttttcctcatgaagccaccagcctaccctgagccacctcacctgtgaaggacaatctccaaaaacttgctgaggccttctcagggcgcacgctcccaaatgcctgaagcattttcccttggtgaagaggccgtcaggtagagcacctcagttcacagagaagggtcaagaggggccatgtatatagctgagctaccacagctttggtcagcccaacttcctgcttctgaggggcctgggagttcctgagggaggctggggtgccccgggcacccccctcacaggggagcaccatccctcagcaccctgagccagaaggcctgtgctcaagtccaggggaaggacctcacagctgagtagctctctcaggcgcccaccaactccgtgccatgtattcattagctcccagttctggcagtcagaagtccaggttctgtgtggctgggtttttttgctccgggtcccagagggctgaaattgaggcatctaccaggttgcgttcctttctgccggttctggggaagaattggcttccaagctccacttgttggcagaattccgatccttgcggctgtgggactgaggtccccatgtcctcgctggctggctgtaagccaggtcctctcacggctcctagaggccgtccaccttccttgccatggggctccctccatcttcaagtcaacaacagaggatttctcatgtgctgaatcccccacatgcttcaaatccctgacttcctcctcttctaccagcagaaaactactttgaataggctcatgtggttagggcaaggctcacactcaaatactttccctatcttcaggtcagcttgctataagacagaacccaaccatgggcataaaatccctttgagaagccaggcgcagtggctcacgtctgtaatcccagcactttgggaggccgaggcaggcggatcacctgagatcgggagttcgagaccagcctgaccaacatggagaaaccccgtctctactaaaaatacaaaattagccgggcgtggtggcgcatgtctgtaatcccagctacttgggaggctgagacaggagaattgcttgaacccgggaggcggaggttgcagtgaggcgagatcacgccattgcactccagcctgggcaacaagagtgaaactccatctcaagaaataaaaataaaataaataaataaaatccctctgagtcccagttccagaaattatattaatgcaaggcatgttcacggcaggtggtagtgggagaccttgggggccatcttagaattccatctaccacaggcagtagaacctaaggtaactttttaaaatcttaaaacacctatacacattttacatcttatgttaaaatatagccacgtttattttactattaaaccttccctactccaactctttaaaaaaaaaaaaaaaaaaaaaaaaggatgcccctggatgaggcaccacattgatcctgtggcttcgagtatcccggtcagcaacacaaagccgcagccaaggattccagaacaggacggtttctaagacctctggtcctagccaggcccaggaagggagccaggctggacaggcagtgggacccatggctcccagtgcttgaggaccaaaggcaacaggcagacagccttgacaagaagtatcctgaaagacggtcaggccagggtaccccaaggccagatagctcttccctcaacccaccccccaataaataagcacaaaacctggccactgtagtctcagcccccaggaattcccagacaggccacagggagctcccagaaccctggcgacagctacactggccccatattctctttccttattgacctgggagctgcctgtaaggagggcagactcacgtcacaggattgcagagaaggtcccaaagtgacctctcttccttgactgacaggtcccagccctagatcctcagtctgaagctgtggggccctccttcccagtgtggacatggtggggccctcatccttcctcccacccactgggcttgctgtcctgtctatcctgctgtcccatcctgtcctgtcctgggagcccaggctgaggaccggggtgcaggcaggaagggtccatccccatgtgcagagtccagctgggcagctaatcatcggagtagcggttccctgcaggggaggggaagaagaacagggagagaggcatcaggtgaggagcaggcagagtaggccgagggaccccacccctggtgctcacccaggacgttgaatttgcacagtgggcaggtctgctggagcatcagccaggggtccacacagtctcggtgaaactcgtgcttacagggcagcacccggagccactacaggggtgggggaggaagggctcaggtcaccgaagcaggactccacgtgggggtgcctggtcccatgcccctcgcctcagctggggaact

SEQ ID NO: 1888548 - DNA, 4001 bp, Homo sapiens; identical to SEQ ID NO: 1562790

SEQ ID NO: 1888549 - DNA, 4001 bp, Homo sapiens
ctcaaaacctctttctctcatccatattgccttgctttctcattcctttgccatttagtaggtaatgatttctattaagatgatcatcaggatttattgagcagagaggtagatattgacactgactgggaggcatgatccgagtggggagggaattctgtccctgcaccccaattcccccagtcttgcctgctgcttataaagttagctggagtcccagtgtagtgccccatctgtgcagtagggaaattgcccaccttggggctggccaagtaatggaagcttcacaaatacaccatattaaaaaggactttgcacatctggcattagaatatttccagccctggctcagtgcttggcacaggtggctgttcacagatatttttagaagcaaggaaaggaggaggggaggagtatatcataagacatttggcatctcctgcctttgctgagtaaaggggaaggaatttaggatttgtacggtgaatattgccacgtgtttacgagtatttatataatgctaatatttcagttgcagggaaaaacttgtcctgaagatgttaaagctggaagtcagtgatcttctacacctcctggaattttatagctgtgtgctctcaggtttagagtcaggaggggaaggcccagggccatgtgtcatttcttggcagagcttggcttaggactacttttcatccattccctgttcttttccatatttcccagttttcccatttttgtctcaatctgtctgcctgtctgttgcactctacccatctacttatttacctgtcggcttccactgtgctctagaatgttgcccactgtgatcttttgggcaagttaatgtctcagggcccagtttcctcaactggaaaaaaaaaaaaaaaagagtagctgtgaaaataaatagtgatttataagcgctagattttgggggctggagaatccttccttatggggggcagggaggctgtcttgtgaactgtatgacattttgcagctttccgaacctactatgtaccagcagcatctctcccctgatttgtgactccaaaagtgtctccagacattgccaaatgtctccgcggcaggggggcaaattgcccttggctgaaaagtactggcacagagtaagcaattattaaatattgttttaaaaaaaacactgtcattatgactattctgcagttatttaatttatctgaaaagtgttcatttggtgcttactgtatatactgcagagctctgagccgtgagaggcaagtggaaaatgtaagcctgatgttcttgctttctaggagattacgatgcggttcacagtcacacacctgtggatgggcttccgagggggctttgaacgttttgtttcaacctaaatttagcaaaaggacaattgtgaggcttgagaggcatgtctgcatgctcccagaccttctctttgggttcgtggtcctcccctaccctgccccttttgattaccagtgaatgcagcagtggtgacaggtaaatgaccttgttggttggtcctctagttcctgatgaaccctcaactgggagggactgtctgtgaatcagagcagctggctctttgaaaagaaaggcactattgcacagttgctgctgctgacccttgcattcagaataccggccgaggccaatgggcaggtcaccaccctgtcgcctctgtgctcctgcctcccagaccacatcctgggattcttccctcgccccatgcagtagcagaagggtgtcacaaagcgactctgctcagacccaccatcagacctgaccgctggcctttccagagcttccagagccactcagccctgccctcctggctctgcctcccgcggcccccacccttgtgtcttctcttactcacctcacacacacctgctctcctcactgtgcgcactgccctggccccgcttctgggaatgctctttccatggatcccttgtagcccctttacttcctgcaggtctttgtttacacttcaccttgtgagagagggccctttatgaagtcagaatcagaaccctcctcctcccaccccacctttccttcctttatttccttcacaactctgatcactgcctgatgcctccactgtatttgctggctgttgagactgtctcttttctatgttctcccgctggactgtaaactccctgagggcaggtgattggttggtcatgttcagtacacttagaagtgcccagcttgtcccagacactcagtaataattgccgaatgaatgaatggatgaataaatgaatgagccaagggagaagaagttaccatgactgttacaaagttgataaatgcatgcagagcctttgttcaccattttctgggaggaatgggtctcccgtaccatagcctgtgggcatggctgggtggagtttggtctacattatatcaactcttcccttctctatctggagataattctctcctgggtaatgagcctactggagcatacagatgagggcacgaaggtgacccttatagaactgtggctgagagccagggattcccacttccacctccacccccatagcatcatcagtctagtcaagaaagacccgtggtctttgtattatgggacttagtccttcattgtccctgtggctctgcttttcacccctgtctcatgctctcctccttcacccttcccatctgatgtgtgctgaattgttaggagaacagcaaaaatgcattcctttgctgacacttctctacctgtggttgtcttccactctgcgtcatgtgccgtatccgcctgtcaccccggcacactgtcagccacgcagcctctcgttccctgtgtttccttgcacactcgtgctctgctggcctctgtcactctcactgggcgtcctgcctgccttcccaccccctgcacgtgtccctgttggcacttccctattcacactctcctctccaccaagcttcctttgacgcttcctctttcaagctgtgcagccttcttcagctgacagttcagcatcgttccatttctgaagcagggaattggtttggtgggcactagctccaagtttgcctttgtggtatttctagcctccttcattctctttcctgttttggctgcaaccaaaggctgggctcagtgatgaatcgcaattgggtttggtggcccagccgggcccttctcaggttaagggtggtatagggagttgtgtgaatgaatgaggtcccgcagagagaccatcacacatgggtagagggggaaaaaaggggggctcagaatgcctgtgtggatggcagtctcctgaaatacaggagtttttctctctaaggtacaccacaaattttatcttccaacatttcttagtcattttccaaattccatgtcccttttcccttgatttgttgattaacttcatatgagccttacccaaatccgcctgatatcagtgtgtgtgtctgtgtgtaaggtttttggaatcagcaagcacctttttcattcttgtttccactcatcaccttacagtacctcactggacacaatggatttccaaagcatctgtagacatgagctgattctagaatttctttgtacatcacccacatcctggagctgtttcttgggagaaagaaagatggcatgcctccctttgcccctggaccctgaaggctgtgctctttacaccgtgaacctaaatctgggcttggtctgcagccaacctggaaattcactactgcaactccgttttctttttaacgagagcttcatacggttcttttaaactagaaacttctctttcttgtaattgtctctaatggcttccttgttcgaacaagcctttgctagcttctgtctgacccctttggctttgctttctgcctccttttatcctccagcctttcgtatagattccagaggaatcttcctcaaaggctgtgccactccctgttcaaaggctttctgtggctcctcattgcctagaaagcaagtgagtaaggccagatat

SEQ ID NO: 1888550 - DNA, 4001 bp, Homo sapiens
gtgctcacctaggccggcacatcatgggctctctggggacatggaccattttctcctcctcccgaggcaggccaagctccaggaagcagaagaccttccaatgtgggaggagagggtactcaaggggtagcccagtagggctgaaggtcttccccggtgccctgtgcaaacatgggggcaggtgggtggtgcatggcagacctggtgttcctggacatggaggcagcccatggccacagctgtgctgagactcaggccactcagttcatccctctgcatccctctccccctcctccctaaagccctgcaaacctgccttcgtggcccttttcttccctgatgaggctttggaatgagctgctttttttagcctctccaatcaggccggcatcgtgcttggctattgttagcatctcagctcgacgcctccttcagaaagtgatgagatcatcctcccagaggtccacggtcacctttccacaaggctcagcaacgtgcagacctctcctcccatcccctaccctggtcccaggacagggacagtgacagcactgagaagaggagtcagggactgaactaggagcaggaagggaactgggagtgaatgatcaaggagaatctactgtgggctccggacagcgtcctctctgcccgccagcaacccttccttgcctctggggccagcactttgtttttccctcaaggagccagctcaccttctgtgtcatgctgtactgacccccacgccttaccagcccatcatgcacggtgttcccctctggttcagtgattggatcccaagcaggatgtgtaaccatccattctcctctttaaacagaacctgttttgttggagtgaaagtttgcccccttaaaaataggtgttaccaggttcccttgcagctaggagtggccatggacataagaggaagtctgccagtttaatttcccataaaaggggatggtctcaggggcacacacccttcttcctgcctggaatgtggatctgatgcccagagcaggagcagccacattgcaaccatgaggataaaaggtgcaaagactggactttctgacaaagatggtggcacagatgcacacatgtacatttgcctcttcttgaaccctcactaaaatgatggtaaagatcactttacggacattaccctcaagcagaaagagaaaaggggaggaggcccaagcaccaacattttggagactggaaacctggtggatgagccgtaacccactaggtgagcttgagaagctgaaacatggccggccagcagcatgcaaagatgagaagcaacaatgggctgggaggatggagatgccagatatttctggaggggagtgaaggaggattgtttcaaacaacagcagttagtcttcctctcacgggagggacagagacagagacagctatccactcccactgcttacacaactgggagattgcccctccctgagcctggcagaaaccccaagatttattatcaagaaagggtctggcagaggcctctggactgggggatgccactccaaaagcagggcatgtactgagtattggagacccccgcctctttctccttgcagcccccggaaaaccggcagccaggcctcacgtgcagcaggggggagctgggggatcattttggttggggtcagttccactgaccttcctagtggaaatcctcacactctgacccccagtgaccccccggggaagcaatccgccagatcacctgcagtggagaccgcagtcagaaaacgctacccaagggctcagcacttccaatcagcttctttgttttttaaatgaagtagacatttaaatgacgtttatattcagtgaagtgcacagatcttagcacagtttgatgaattttggcaaacttactcccatgtcacacgcctccctcaaggtagaggacatttctgccagctggaaaatctctcaccaggtcaccctcccatctgatccccgtctccatcgcctgtcctccccatcccctgcaggccgtgctgttccgatttctatcagcatagaggagccctgtctgttctagaagttcatatagatgacatcacacagcacatactcttctatatcaggctttgtcacctagtagaatgtttttgagagtcatccatgtattgcaggcctcaggggtttgctcctttctgtggttaaatgatcttccatggtttagaatggaatatttatccactctcctcttgacggacatttgagttcttaatagttcttggctatcacaaataaaagtgctatgaacattcttgtacaagtttttatgtggacatgtgcttgcttttttttttaattgaataaataactagacatagaattgtttggtcacagcaattttgtttaactttacgggaaattgccatattgatttttaaagcaattgtaccatttcacattcttaccaacaatgtatgcattctagttgctccgtatctttgtcaacacttgttagggtctttaaattttagccattctggtggatatgtagtggtatcttgctgtgactaaaatgtgtactcccctcccccaatgactaatggtgttgaagatgatttttatgtacttatttgccatttatgtatcttttttggtgaagtgtttgtttaaatctttgtcccatttttgggaacttttaatttttttttttttttccagacagagttttgctcttgtcacccaggctggagtgcaatggcgtgatctttgctcactgcaacccccacctcccaggttcaagtgattcttctgcctcagcctcctgaatagctgggattacaagcatgcaccaccacgcccagctagatttttgtatttttagtacagaggggatttcactatgttggccaggctggtctagaactcctgacctcaggtgatccgccctcctcaggctcccaaagtgctgggattacaggcgtgagccaccccgcccagccggatttttaaaattattgagttgtaagagttcttttattttttttaacctctgaactttttattggcctcctgctctctaaagggtaccctgcttctgctgccttaatgtctcagaactttggtgtcgttggtctcagacaccactttgccatccactctctggtgggtggtggtctttggaatggtttgcatggagttgctgctgtccagggcatctccaagattgaagtccttgccatcttccagcaggtggcagtaggtggcgatctcagcctccagcttgaccttgatgttcagcagggcctcatactcctgggcctggcactgtccctttgcctgggtctgtgccagctctgaccccaggtgcagcaggatcccgttgagctgctccatctgcaaggtgtagcaggccttcacctccctcacgctgttctccaaactggctttcagatttctcatggagttcaggttgatctccaaggactggactgtacatctcagctctgtgagcgtcatctcagcagctccagccttggcagactgcgtggtgaccactgtggtgctctcctcaatctgctgagacaagtacttgtccagctcctctccgttcttccaagccagctcgtcatattgggcccggatggctgccatgatcttggcgaggtgctgagatttggggatctacctccatggtcaacccagagctagcaatctgggcttgtaggccttttacttcctcttcgtggttcttcttcatgaagagcagctcctccttgagagccttgatctctgtctccagctgcagccgagtgacgttggtgtcatcattgaccttacagagtccatggatgttgctctccacagactggcacatggccagctctgtctcatacttgactctaaagtcatcagcagcaagatgggtgttgttgatctgcagaacaatgcaggcattgtctacagtaattgccaagctctgagccctctggttcctgatggtcttgaagtaatgg

SEQ ID NO: 1888551 - DNA, 4001 bp, Homo sapiens
aagaaagaaagaaagaaagaaagaaagaaagaaagaaagaaagaaagaaagagaaagaaaggaaggaagattaggaaatagaaataaatttgggggacaagaaggaaacacaaagaagaaaaatggggtgtgcaggggcatggaggtgggactgtgctgtcatcaatcgagtcttacccggcgggggcatcagggtaccctgacccatccctcacagagaaggctggaaggagggggtcgggggactgggcagcaggaaagtgggaacggcacgtgcaaagcccagaggcaagaaggaggtcttttcaagaaactgcagagggttccaaatgtaggggtgctgggtgtaaggtggcagccgacggcagccacgccaccagggcccaggctgaagagcatcgcggggctgagtgacggcggctctggagcccgagcgccaccccttggccgtcttcacggtgcaaagacagagagtgagcggtgggggagaagctcctgggacagagggcccccgcctgccctctctgtgtgctggggggagggatgggtgctctcccaccacctgctgggccatctgggggggtcccaggctatgggatggagcacagggcgctagacccctggggccctgggtgagcccccagtctgagatcacaatggagtggtctgggctggagagagggagcccagaggagtcccaagcatgcctggtggtctgcgacggtgtccaggaggaggtgaggtttgggcggagctttggtgacaaccagggtgtagcaaggggagggtgatattcaggatattcagtcccttcggggttccccgggcaggcctctgctgccagctcagcaccaggcccaggctggtggaggccaccagagaccactcagtagaccctccagagtgggggtggggagcccctccggatgctgatagtggatgacaaacagacggagaaggggggcccccaggacagaggggcacagggccgggagacgggttgcagggtctgagccggttctgccctgcctgcctggggactgcccacatcctaatcccctgaacctgtgagaatgaccttatttggagacaggatctaattgcatcctggattttttctggtgggccctaagtcccatgacagtgtccttgtaagagacagaagaggagaagacacagagggaggccacgtgaggatggaggaagaatgagagggacaggaccacaagctaaggaaccggggcccccaggagctgggagaggcaggaaagatccccctgagccctcagaggagcctggctctgccgacaccctgatttcggacctctggcctccagaactgcgatcgaataaatgtctgttgttttaagtcccccaggctgtggtcatctgtgagtccgcagaactgacttggggaccttgggtggcagcagctcccctgcacacggtcccacgggtccagcgctgcccacactctgtccctcccaaaggcagcccgggtgatgagggccgacagggtgctgtggccaaggccgtgtcagcgtgcaacatggagggcccgaggctgctcttgaacaacacccactgcctgaccccaaaggcaccgtcataaggcaggggcccggcagcagcaccagtgtaccctgagctgctgcccaagggcctggcctgggcacacacagaggggccagctgggctcgtggcctctcagggccatttcaggccggcccccatgctggcaaaccacggggaaggcccagagagggtggggccctgtgggatttaggggggatcagagggcacacactcttccaagagccagaaagaaccctggaccctgcgggaaccgcaccctcagcccctcccgggctgcagtaggtctgggggctgggagcacctgggcggggggacggcgtcgcctgccagccacagggtctccagacggctcagatggggagccagccccagtgtcgcttggaaggaggcagttctaggtggtccaggttcccagtgtcatggaaacaacagtggctgtttgttaaagtgacagcgtcattgttttcatcatcatcattacttgctggacgctgagcgccgggagcctcactcacccatcccagggggtcctctccacaccccatcaggaggcggatgggcagggacacaccgctggtgggtggggactggcctgggactctgagggccaacccccagctcctatggcagtgacagtggctcacgagcagaaggccagggagatgaaagggatgggggttcccagggaggccccttcccctccctgagcctcagtttcctcctctgtaaaatggggatgaggctggcccatcccagggcaggcagggctgctgggagctgaccaggcagagggtaagactttgtggacagcatttctccagacatttgggaaggggagtgcagggaactagcaggtcccatgaccagaggaccccgcgctgggttgagtgctctgccatcctgtcttgagattcttagtcattggtgaaggagagcccccattctggttcaccttggctgggccagctcattatttggctggtcctggatgtgggcagccccaggatgcagccctcctcctcaggctgcccccacacacccccggccggggcaggctggccgcctccccgctgggccttcctcccgggaaacttccctgactgccatcccccctcacctgggggcctccctcccacagcctgggcaggggtcagacacagcaggaagggtttgctgatgggctacatggtgatccttggggaacactgaggggcgcaggtgtggcttccccagcccagccctaggagggcccacagctggaattttcatcgtccagaaccgtcctggacggcgcccacgaagggggccaggtgtgaggcaaccccaggaaggacggtggctctccagtctccgcctgcaggcggcctgatgggatctgtggggcactgctgccacctagtggttgatgaagagaaggcagcacacacccacctgggaagaataatgttaattaagttagagagtgagttagagagttgttagttagagagagttagagagttagagagttagggttagggttaggattagggttagggttagggttatggttagggttacctttacggttagggtgagacggggacatccagtcaggataagcatgggggaccaatgcagaagatacaagtttcctggatgcttcagacaacccaactttcttcccttccccaccactgttctccagttaactacttatcagcttaccctgtgcacaaggtaatgaagacggtcatacagccagtgagttgcagggatcgcaggaaccccacgaccaccaggtggacattcaaaaggcaaatcgcatccctgaggaccccacactaaaagccaagctcgagccagctcttccctcctcaggtgaaagctgtgaaagcttgaggctctgttgcaggctgcagggaggaaggggcaccaccctctccctcctgcccttccttccttgtgggtggtcctattcttctgtcctggttttgcaaacgcagcttccaatcccctttcccacggggagcccctcctgtgtagagacaggagcctccctgggcagagaccccagctctgcctccgagatgcccccaggtgaccttcagaagtgaaaatggacctccagccccacctcttcaaggtgcagctggccagtgagttagcgagagaaggaagccaggcagggggcaggggcaccgtgcttaagaggcggcctcggggccaggtgcagtggctcacacctgtaatcccagcactttgagaggccgaggtgggcggatcacctgaggtcaggagtttgaaactagcctgaccgacatagagaagccccgtctgtattaaaaatacaaaatttttttagtagagctgggcgtggtggctcatgcctgtaatcccagctactcgggaggctgaagcaggag

SEQ ID NO: 1888552 - DNA, 4001 bp, Homo sapiens
ctttcttattttttgtagagatgaacatctcactgaattgcccgggctggtcttgaactcctggtggcccagtctggtctcgaactcccaaaggacttttgaacaaaaactctcaaactcattgttcaccatggaaatgcaaaaccaaaatagcaccgagctatcattttatactattagactggcaaaggtttggaggctagatcctgcccagtgttggtggggatggagcagggcggcctgcaagccctgctgtgggattaaagtgtaccactggggagacctcaccacaggcccaccttagacgggagctctgtccctacagtttggtccccagatatctctctaaagaaaccctcattcgggctcagagcaccgtgtttgaggatatgaatgagagtggctcgtcatggcggcaagttggaggtcactggggttccatggtttgggaggcagttgggcaaaatgcagggctgcccacagtggggaccccatggcactggaggcacacgcgcagcaatgtggagggacccagcagatggagccgggtggagaaaacgcgccagctcacatctcagttaaaacacacgtgcacgagcaacagcacacttgctcgtgagactgcctaggagccagtccacggcgcggagagagccggcagcgctgtctcattcactgtctcagtccagcttccagccctgcgccatccttatgcgagagtccctcaggtgtgtggcaacctcagctctgcacacccagccttggacacccacagcgcaaacagggaccctcccagagctgcccccaagccctcccctggcctgtgtgcgggcgtctgagcgggtggaggccagccatgggctctgcttccctgtgagccagggtctgggctgagtctaacctagaggcccagggtgagcgccggggaggtcacatcattcccggagtttggagggatccaacacagctcccctgaagttggctgtgacttgggcctgtcagaagcagcctgagaggagggtcgcaagtgacccagacctgggaaggagggaaaggtttgaattttgcaaaaaaaaaagataactttgcccttttcgcttgatcttggggggacaagatgggggtgacgcctcccgagaccgggagaggaaggccacctggcgaagctgcagtcccagcattatctgtatgttaaattgatgttttaaatcagagttgatatccaagtaattaaagaataactaacaagcacagggactagtgaggggctgggccagattctctgcaacccatatggcttcacctactttccaaacccccggttctgtgaggaccgaaaatgaccatcccagactattccagaaacagcctggggattctgaaagtttcccagagcataggcagtgaaagagagagaagctcagcccttctggaggggacgggtggctcagaacagaaggtggaaagggagagaagctcagcccttccagaggggatgggtggctcagagcagaaggtggggatgcagttctgggggcgccatggccgagcaccacagacccgggacttgcacaacagaagcgggtttcctcacaattctgagccggaaggcggagataaatgcgtgggcacggctgggttccccggacgcctctctccctggcgcagagacgatgtgttgttctccccgggtccgttcctgtgtgggtgtccgcgtccccatcaggacaccagtcagataggaggagggccatccagtgacctcacttcaccttaatcacctctggaaagtccctgtgtccaagcacagtcacgttctgaggtcctgggggtcagggcttcaacttacgaattttgagagcattcaagtcagcccacaacagtggactctgaaataatcttttaggaactggactcctcaaggacgctttagaaaatgccggcctcgttctgttgcaaaggggtaactgaggaagaggggctgaattttcacaggaagacgagcccggtggcaggaagtgacagtgagaaactgcagcataaagcggaagcaaaggccgactgtgactatgtggtcgccagctcgccttccccgtcaaaccttgctggattttgtgtttcattttcattgccaaaaacatcattcaggtcgggtgcagtggttcatgcctgtaaccccagcactttgggaggccgaggtgggaggattacttgagcccaggagttcaagaccagcctggggaacatagcaagaccctgtcccaaaaaaaaaaaaaaaaaaaaaaaaaaaaggccaggtgtggtggcacacgcctgtaatcccagcactctgggagtctgaggcgggcagatcacctgaggtcaggagttcgagaacagcctggccaatatggtgaaaccccgtctctactaaaaatacaaaaattagccagccaatcatggtggtgggtgcctgtaatcccagctacttgggaggctgaggctggagaatcacttgaacccgggaggcagaagttgcagtgagcggaaatcacaccattgcactccagcatgggtgacacagccagactccgtctaaaaaaaatttttaaaaaattagccaggcgtggcggtgcatgcctgcagtcccagatacttgggaggctgaggcaggaggatcactcgagcctgggaggtcaaggctgcagtgagctgtgatcacaccactgcactccagcatgggtgacagagctagatcctgtttcaaaaaaaaaaataaagtcatcattctctcatgtatgtgtatattgtttcatttgttaattaaggtataattttacatacagtaaaactcaccattcttcgtgcagagttctcacaaaagtgtacaattgtgtggcatccaccacaatccctgtatagaagaatcccatcatccccggaatttccctggacccttccatagccccccagtccgtcaccccctgaattgttttctggcaccccgcccccctttctttttgaagtggttgttttgcaggaaacatcaccctctctcattttacaaatactgcagacagattttgaagcccaaagcatcatagaggcagcagatcaggacagggaggattgaggcggggaggctctaccctgactgtaagaagcacttgagagacctgcaaaaagccaacaggagaggcagagactgtgggggccaattggtacaggtcctgccctgcatgacagggccagtggcccccacagtgctgaggataaaatccaactgctcatccaggctgctggagcctcctgccttcaggccaccccactggcctcttgcccactgtgccccactgtccaagctctcgcctgccctgggaggggcccctgcagcttcttgtgcccaggtgcacgtccctctcttttcccatctgggcgcctgctgacattgtaccatgaatttgaacaccaccctgcagatgacctggcctcagtccatgaagtttccctttcgtcttctgcagggcaccggcccctaatgccatctgacggtttccctgctcacaggatcttccatttgttagccccccagagtgcccagcccgagtgaagagcatgcaggaaacaagcccctgtcctcgtggaggctacattccgagaggggaggtaggcaacacacacacaaacgactccgtggtatgtcatgctgcgatgctggctgtggaggaaaatgaagtgaggcctggtgaaagccagaggccatggggctgccgaggaggaacagggacagggtaggatttgcttagagcagggcaggtcgcgtgggactctgcgggccactgaaaggaacttggcttttattcagaggatgttaaagcgtgagtgacatcctctgaccttttataaaagaggcaagagtctagggagcccgggtagaagtgagggcgtctggaggagccacagtgggctcagggagtgagcccacgcgagggcgcagagcaactggacgctccaacagggct

SEQ ID NO: 1888553 - DNA, 4001 bp, Homo sapiens
ggacgtgggtgctattcctatccccattttacagataaggaaactgaggctcagagaataagaacaaacttactatgtagcacttgttatgtgccaggcactggttctgaatattttacataaattaactcattcagcagacacaaaagctctatcacctgggtacttgttaccattctctatttttttttttttttgagacttgatcaggagatcaagaccatcctggctaacacggtgaaaccccgtctctattaaaaatacaaaaaattagccaggcgtggtggcaggtgcctgtagtcccagctacttgggaggctgaggcaggagaatggcgtgaaccccggaggcagagcttgcagtgagccgagacggcgccactgcactccagcctgggcaacagagcgagactccatctcaaaaaaaaaaaaaaaaaaaaaaaaaaaacagatcacagatcacagatcatctcctccagggacaggatgatgcagggcctattgaacccacccccaaccttccctagttataagaaaggggtgacgtgaggagcccacctctgcctgcccggcaggtagagcactgttttgacttcctccacaaacttcacaacaggcctatggggcaagtgtcactatccacattttacagatgaagaaactgaggcccagacaggctcactaacttgccttggcttacccaactggaaagtggcagagctagacgccaaaccccagcgatgccctgaggcttgcgtcctccaggggagggaaaggcacctgagcaggatgaaatgagcagatgcccaccttgcttctggggaggaaagcagggggatggatggaaagaactccaggtaggtcggagagaagccctcactcttctgacctccgtctccaaactccagctcctcttgtctctctactcccaggtgggcctgtgagggaagctgtggccccaggggagggaaagatgctgtttcctggtcctgcatccatccggagcccctctcctaccccaaaggtcctcactggctgttctgaggcaccgacattgtattaaagtgccctatttgtgaaggaataaaatgaagagtgcactgattatccaaagtgactagtgcagccagggcaggggagcgtgtaggacccagcaccttttaaccagctgcctttctggggagctggagagagtgcaggattgtctggtgctgccagggttggtgaaggtagggaaggagcacctcaggcagggaggctgctccctgtgtgacttaactgtgtccaaggtgactcatgccccctatccaggcccagccaggcccccagtttccttccagcttaaacatgcgaatggagggctggggcagaacagaagccatttcagctgcaatgctgggggatgtggaatagagatcaaggtcccccaacctctccagccctgtgcacaaaatcccaggcattctgaggctgactgaggaccccgtggtctcttcctgatttctcagggaactgacctaggtggaaaagcaacacactcactggcctcctgtgttatcttggccccttcttcaccctctctgggcctcacggtcccctgtgcacggtgacagggtggggatggggttaccagatgatctatatggaattttccagcctcatttcagccaatgtgctgcctgagacagtgtgagtttgcagagcccctctccctacctcccaagccattggcaccactcggtgccctccgtgtgcccaaagacccacctcacgccctgcagatgccagttccgggggctctgtgctgagcacaccgcctcagcctgagcagctcagcattggcccgtggactcattcgcagctgctgtccccagagacactgccatctgcggccgccctgggtgctggaggcagagatagggcagagccaatgcaacccacgggagacgagcttctcacacccaggggctctgagtgggccaggagggggcagtcctggactggctcagcaccctggtatctctccctgcccatcagagacccttccccctagcccccactctcaggatggcaggaggtgggacctgtctcagccaatcagcagcctggcagagcaagggctttatcttccgttgccctggcaaccagccttctcttctggatccctggtactgtgcacgtggtacagcagatgacagagcggcaggattgggggagtgcggggagggggaatcacccagcaggctgcaggaccccaagcctggtgggcctagagaggagaggaccgtggctgataactctaaggtttgatggtctgccatttggggagcagggagatgctggggtaaatggcaagcgggtggggacagagaatcagtgaccagtagagctcaagggggtcatatgttatacaaggaaaaaccaagactgagtctgagagttcagacacattggctcaatgtaacatttcctatgcaccagacactgttttcaacgctttgattatattaactcaattaattcttattcatggtcacacagcaagaaagtagcaatgccagggtcagagccctagcctggctttcaggacccttgcaaatggctccccctccccattctgcctcatctaccccacagcacccctggctggtgtacagccagcacaggcattgagcactcccatcttccagctggccccaacatcacttcctgcagtcctcccagctggattggtgttgagaccccattttgggatgaggcagagaggtgatgctgctggccttctccttctcccagagccctcagcttctcagtgactgagctggaattcaaagccaagagctgacgttgggggtggggtccaccttcccaagcatggatcctccccctccccctatgccatagacaaggtatctgccacgtgttgagggctattctcaggagggagagagcagccccctagggcccacggggcgtggctgggaaaaggcttccaggaaccacctccctagggaatccgttcccagaaacctggggatgggcagggggaaagcctctgggtgaggtggcttcaggacctaggtcccccaccacagacacctctgcgccatctaggggctcttcaggtatgacaggtcctttccagcatatgtgggactggggggtgactgtgagttcacagagggtttgttttttttgagacggagtctcgctgtgttcgccaggctggagtgcagtggcgcaatctcggctcactgcaacctctacctcccgggttcaagcgattcccctgcctcagccttccgaggagctgggactacaggtgggcaccaccatgcccggctaattttttgtattttagtagaggcgggtttacgatattggccaggatggtctcgatctactgacctcatgatctgcccacctcggcctcccaaagtgctgggattacaggcgtgagccactgcgcctggccttttgctttgttttttaagacaaggtcttgctctttcactcaggctggagcacagtggtgtgatcatggctcactgcaacctctgcctcctgggctcaggtgatcctcccacctcagcctcccgagtagcttggaccacaaatgcatgccactatgcccagctgatttttgtactttttgtagagacaagattttgccatattgcccaagccggtcttgaacttctggcctcaagctatcctcctgcctcagcctcccaaagtactgggattacaggcgtgagccaccacctggccaaagtgctttttaacattttggggtgggagagcagaggagttgggggaagaatcacaaaggggcaggagtaaactttttggggtgaaggtatgttcaggctcttaatggtgatggtggcttcttaagtatatacatatgtcaaacttatcaaattgtacccttgaaataagtgtagttgattatacgtgtcccttatgcctcaataaatctgtaaagtatgtgatccatgg

SEQ ID NO: 1888554 - DNA, 4001 bp, Homo sapiens
ttgtaaacagcaaattcatcacttacagttatagaggctgggaagtccaagatcaaggcacctgcaggtttggtgtccagtgatggctcgctctctgcttccaagatggtgccttgttgtgtcctcttgaggaaatgaacactgtgtactcacggtgaaagagatggaaaggcataaaagggctagctggttcctttgggcccttttataagggcactaatctattcatgaagttggagtcctcatgatctaatccctccctaaagtgttaaaatcaggtaacttaagttctccaactagctgtttttgatctctgtgaggccagtctgtacactaaccttttttttttttttttttttttttgagacggagtctcgctctgtcacccaggctggagtgcagtggtgtgatctcggctcactgcaacctctgcctcctgggttcaagcaattctcctgcctcagcctcctgagtagatgggattacaggcaagtgccaccacgcctggctaatttttgtatttttagtagagacggggttctaccatgttggtcaggctggtctcgaactcctgacctcgtaatctgcccgccttggcctcctgaagtgttgggattacaggcatgagccaccgcgcccagccccactgaccttctttcatggggagttcatgtaagtttttccaaaggctctgcagggtatcttcagtatagagtgttctgatatgggaaacgagctctagctcaacctccttcactcccaactccaactagctttgccatcagtgttactccctattgctgtttgctccacagcctcttgcctagtggatgtggtctggcattggacagcacaagcaatgacagggaagccccctgaagacccttgcccagaggtctctgagttttctagatttcttcaaagccaggtataaaggcagtctagcaagctcacactgtccaagcagacatccaatcagggaagatgccagcctctcttttttaggcatctgaagtcattatggtaactctctttgagctacaccctgttggctttagtaatagcaccgcaccctccctatttctgcacccaggaagctgcttagggaaactcttacccttcctcccgccccatccctcccccgttgtccagttatgtaagcctgagggtagggtggtggtggttcagaatggcagggctggctcttcagccctctaacaataagctctgggtgctgccatgttgtgctgcctttacagtgtgggatactgaatgcctctgggtactcacctttgtgccctgactcactaattccagggtaacaggaaaaggctcattaaacgtcccgttacacacagctctaataaaaacagcaataataacatcaaaacactcacatagtgcttgccaggcaccagtctctttctctacttatgttaactcatttcctcttcacaacaacccaccccattaagcaggatcagtaacccctttgcacagctgaggaaactgagacatagaggaggtaaactgcccaaggtcacagggacagagagccagagagctgcaatccaatcgagggagtttggctggagtccacgctgcgctgctttccacataggagaggcagagaaaagctgcacctgcaagagcgatggtttcggctgcgtatttggaataacgaagtcagcggtcaggagcaaggagaaggcacacatctcgggcctcatttctgtccccgagcgctcccccacactgcgagatcatggcggtggaggggagtcccgcatcctgacccccggccgccgcgcactggggggccctcaacctctgggttacttgggggcacgcagtagccacccacggggcagaaaagacgggggcggtcaactttctccactccagccgcctggggtcccgccatccctcagccaggacgcttggcagccgcctctaggctaggtggccacgagttgcgtgcgagagcgagggctgcgcatgtgcgaggcgtgcgtggtgcgtgtgtggcgccgcgggcttccgctccgacgtggggatcactagacagcaactgccccccaagttctcgtatcagctgcgggaaggagagaatggttctagtcaaccgagagtggaaggagaccaaatttcagcaaatgcacggacttgagtcctcatgagcagggtggccatggtgcggaagcagctggcacggccccctcaaccccggacccctggggtcctcactgccgacccgcgcattcagtgctgcgcataaataagatttccaattagaaggcctaggtcccagctctgccccacagcgtggctttgggccaggcacgtcatagccctggaactctttcttcccattgttgagatgaagagggtgcacgatatgttcgacgcagcaaggttaaatggaaggaaacggggcggccgcttaatgactggttgcacgcgcttgcgttgggtgctgcagcctggtgccaggaaggtggggcagggaccttgtggtgtaaggagtggcggtgaaagtgcctggggtcagagaggagaggcaggggatgagttctgagtgggaggagggggcagctcaggtttcgtcaagtagatgacctctgaaccagaacttgaaggataagacgggagatggccgagacgagagatggccctaggagcatcctggcacagcaggtgcctgaaagcctgcatagggcatagatgtgtctagagagttctgggaatgatcgctagagcggtgttgggctcgtagggaggcaagaggtgggcttggagcgggaggtgggaaaggcatggggagtgtcttgaaagcccccttcatctgcaggtcctgaaacgctgcagagggtctttaggcgtggaatttacataagatgtgtgtttcagtaaagtgacttacaggaaccagacaggaattgtaattatacaaaggggatttcggaggaaggaagttagtctcagtccagggaataatgagggcctgagctcaggagtgcagtggggagggagaaagaaggattccagagagattttgggcagagtaattgacaggctcccgattagagcagaaactaagatgatgcctaggtttggaaaactgggtgaattgaatcattaagacactgaagtgtccaccaagtgcagaccttgtgccaggcactcagcatccaaagatcaaaaaagacctagtctctgccctcaggtgcttctacttgaatagggcaggtggacacataactaggtaattgtatctataccctgtgatgttgaggattacagctgtccctgcctgacctggacctaggggtgagggcaggggggcttcctagagaagtgggacctgagcttggcagaaatgggagttcacaggcagtgtgagatgggtcccctaggtacagtaggaacgcaagcaggaaggccagggagtttgtgatgtgtttggagaactagaagcagatgctggagtgtaaaaccggagcttgacttttattctctagagggtggggagccattgcagagccttaggcagagaagggcctggtcagatttgggtttagggcagcttgccctggtgcctcgtggagaacggttgtaaaggcgagaagctaggagcgagaggtggctgtaggaagtgctggtgaaagagagtggaagctggagctgacacagggagttcaggaaggagagtgggctgggggatggtggggtggggaagtgcaggatgaggagggagggctgaggtgaggtcagtgctgcacaccaggtgcatgaggcctggggagcatctccatggaggtacctaatggcaatttactagccaagtcatcttgaccagttcacttagccttggcgatttgcctcatattgcagaatgtggatgacaagacctacctcataatgttggagtgattcactcaacgagtatttactgagtatctgttggtgttctgggtgccagggattcagctggatggcct

SEQ ID NO: 1888555 - DNA, 4001 bp, Homo sapiens
tggtggtaagtgtgggtacagaggtcagagcccagctctggccccacctgccagggcctggatgagcccagctcccaagctgcgagctggtgacattgtggggctgggattaaatgggatctgcggctgccaggctgggcttctcaggaatgagctggcactggaggacgagtggattagacgcgaggtcaatatttgtggaattgaattgaatctgtcacttggggcgtgtatgttccaggtaattttgtggtttctgcctctggcaggaaaacccaacacgatgactgcccctcgcaggccacagtcagcccggccccaggagagagacccgtggagccctatgtctcagcaggcaaggtagggggacggggcaggggcagggaggtccccgagtgctggccaggggaggaatctgcagtggttgccggctaaggagggtctgccctggcccctggggcatggaggccccacagccaggccccacccccagctcctgggacctgctggccttttaggagacgggggaggctgggcctgacctctctgcaggtggtgtcactgcagggccacactgcactgtgctggttgttgtccagggtgggcagatagagggatgtggacggtgggagccaggggaagggcagaaggggacactgggccaccctggagaagccaggtcagggctggcccagcaggatgggggctctctgcctctatggccagcattcccagctgagtccccaactctgcagccaggaagccccgtagtgtgaaggatggggacatcgcgatgccctggccctgagcccaccaggtggccccagggccccaccctgcctggctcttcctgcatgggtctggggtgatgggggctcatctgaggcccagtgctgcccacctcgaatccccaaatcccaaattggattagttgtgtttagaaagcagcaaagctgctatatttgagcaaaggctcagcagattaccctgggccaagagggtgtctgcctgtgtgagggggatttgaggaggaaaaactgcactaaacaagtgttcattgaaaagaaacttgggggatcatctgagtcagccgggccctccacctgccccataacaccttctccagcatgggctcctgctgctgctgggacaaccaagcaggagtggacggggtcaggccacaggccactgggcccaaggccaggaaggggcgcccaggactgcccatgggagaagggcgtggtgccgacacgaggtcacctggagtccctgggactggccctccacctcgtgactcagtcgccacccggtggccctctcagaagcccagggcccagcatacaggaagctccatgagtgctcatcatcacacacactccagaggctgagaacatcttggaggcctggggcctgctggccagaccctgtcctgggccctgaacacaggctgggcctggaagggacagtgaggggggccagagcccatgcctgctcagtgcagcaagcccaggcacctggtgggtgggccctgcagccagggaggcccctgcaccccacccttcccagccctgccctgggtaccgtgtgccacatctcagagcccacccatggggccctcccaactccagccaggagggaggatagagaacttttatttcagaagagtgcaaataaacaaatccttccttcccccaccataaagagcccggctggctttaggagagaaggcagaatttttagcctctcctttcctcaaggcacagcaggccgagcctgtgtcactcatggccccttttacaagtaaagaatccagctctgggcagtcaggtctgcccagtggaggtgtttgccctggggggccggctcacctatccgtaggacctggctcctaggggtccagccagtccctggcctcctgttgatacggaaaggaagtgctgagaagggaaaagcgtggtccctttaaatgatacagaggagggacgggaagtgctccgtagagaagggcgtggtccctgcctagggctccacccccacgaacctaggtgaggacaggcatttcctgcccaaatgttgcatttcccaagaccaccctggcctgccatgcctccatcctatgcctataaaaacccaagaccctagcaaggcagagacagaagcctctgtgtggggagaggaacacactggtggaagaagacaagctgctggacatcccgagaatgttgcctgactccaggggaaaaccatctcccctctggctcccccatctgctgagagctacttccactcaataaaaccttgcactcattctccaagcccacgtgtgatccaattttttggtacaccaaggcaagaaaccctgggatacagaaattcctctgtccttgttataaggcaggggtctaattgagctcactctcaccagccacctacagaccgctagactaaaagaccacccggtaacgcactcccactggggtttcaagagctgtaaacattcacccccagacactgccatggggtcagagccccacagcctgcccgtctgtatgctcccctagaggtgtgagcggtggggcactgaagaagcgagccactcccccgctgcatgccctgcgccctgcgcggggtaaccagggaacccttcctgtttcactgtttcactgggtagagatctcccggctggagacagaatggtggggagaggccagatgtgcccagcaggtaggggattctccaggggggaggctgaggctgttaggaaaggaggggctgagggggcgccacagccctccccgctccgcaccacaccccacgttaaacccctgtcctccactcctctcctggggctaaggaggctgagagtagagctcagaggcccacgcccagcacacaggaggcagtgggggctgtggacggggccaacgagccatggggttgctgggctgaagcaccggtgatggcaggcgtgtgagagggaagtgggggtgagccagccctgtgggcctctaggcccagcttctgggtatcctggccccctggaatgacccagggcaggagcctctgacacccgccccaaatgcctgtgaccccgtcctgagtgggggtcctccttctggccgtgaccgccctggagtggcttctcagcattttgtggtcagcactctcagcccctctgccttgcaccgtgtcattttcagcagatcctgagccagagaaggccatcaattattcagctcctgcctctcagcctcctccgttagtacctcttaaagccgggaagataaatctctccgcttgctccgtggcgccgacaggaagcagggcggcaccaggaccgtgacaggccccggctgggccccggtttcccgagccagcacaggcggcctgcaaggcttctctgctattaaatccataattcagcggcaacgcagctggggcctggcacacagggtccctgtgatgaggaggggctgcccctgccggaatgcaccagaggctgccaccagggagagagttacaaggaccacttccgtggacctggcaggtcctagggccccctttaaaattgtgcctggggagagtccctggcgctgctccggaggatcatggagcccgactctactcacaggggagaccacacagcttctgcggggcaagacagctgaggagcatgtcaggcaagcgacgggcatggggggtgggggggagcacagcgtggtctgcatgccctcagccacgcccagggtgaccctggaggcctgcatggaagaccctggaagcgtccttggccacccctggtggaagagacagctccagcctcacctttctaggacagtgccatctgccaccaaggcagctccagagagtgggacagctgtgagaggcgggacctgtccaggctccctgatgggcactcacagcccccttcaccctcagcgaggcacttgccccaatgaaaactgagcagttggacaatctgatgtcttggagggtccagg

SEQ ID NO: 1888556 - DNA, 4001 bp, Homo sapiens
tgtgcctgtccatcacctcccacagggcagggtcagccagcacctggcacggaacagtgtgcactgcagcgtccatgctgaggacggacctcgctctcacaccctccagatggcggcgtgttttgaggacttggatctcagccatccctgaggcaaggggggctttgtcactctgaacgggggaggtttctccctcctcccgcccagctctccaagtgaccctgggcaggtccttccttggggtcgcctctgtaggattgagctggatcctccctgagttccgtctcagagaagctgggttatgcctcaaatttcccctggagctttccagagcccctggatcctgccagtgtcacccccaacagtggccagaaggcggaatgagagtcctgctgtagttcctgggcccgatatttcaggagattctgggcaaaccccacagccctcacctcattcctctcagccccaatggggcatgaatcctcccagctggaccacagagccatcggcagctcagattgctgagccagcccccacggagccagggaggaatccggcagccagttccagccctgaggaggatgaggggcaggctcatggaaggatggaaggatggaagagaaaggagggaaggggagctgggctctggggcttttggcttctgcagccatttggacagaggtgagaaaactcagaggagaacagcgtggtgtggggtcagtggtccactttggggcattgcatggagactgacaggtgtgtaccccaatcctcaacccccttcttcttcagccacagaggtggccaggtgccatgtctaagaactactctgccagctcccttttcagagggtggcagctatagagaaatcagcagagccatgggtggggaaggggtgtctgggcaaagccccctgggggctgaccaggcaggaccagccccctctgccttctggtctcaccttcttcctgctgcccggagcaagaatgcgactgctgcagctggtgaccagcggtgacatggacaatggcccatgtgaaaaaggtcagaacagaaaagatggacacagcctggtcctggtgaccatggagtggccaaatcagtctctgacagctggtcccagacttttctacaaaaagaaaaatgaacctctctgcaattcaagcccttgcattgcacctcaatctaattgcacctgatacagacctgttcctttggagggccttgggacacatggagggggtccatcgcagacaggaccaccgggaggtggagaggctaagatgctagcaaagggcagacctgtaagagagagccctggagggtgggtgacagcaaagctgacagagggggtcttttaggaaaagccgtgggatgctgcatgtcacaggagagcagacggcctgctggatttggagacactcaggtcagggcccgacttaggacaactttgggctgtgaggtaagaacctggggcatagtacttggttatcaaggggagggaaggagcctacagtccctgtgaaaacgcttttgagagaggggaaggagctgggaggctctgacgtaaagatactgaagagcagccttggaagcccacagaaaacgcgagcttttagaaaacaagaaggaaggctggtgcagagggtgggtccggggcaccgcagcgggattggcctctggtcggagggaacttgcggtagggaaggcaggggaggggaagatgtgagtgggtttgtacatgcactgctgtgagatgagagggtttgcattagtcagggttctgcagagaaacagagccaataggatacacgtacataggaagagattcgtaaggagacacttcgtgcaattctggaggctgagaagtcccacgatctgctgtccgcaagccggacacccaggaatgctggcagtgcaagttccaagacctgagggccgggatccaatggagtggacgccagtcagagtctgaatccctgagaaccaggagtaccaacggccagagggaacggatgtctgccttgggtcaggcagagagaatccaaacgccctccacctttttgtcctgttccggcttccacagattggacgaggcccacccaccttggggaggggccagctgctgtgttcagtccgccattgcaaacacgaagctcttccagaaacgccctcacagacaccccggaagtcacgtacccactctgtaggtgccccggggcacaggcaagcggacgagccagttatccctcagagctcctgctgcctcgcccgctttctctcggaaacgtgaagtgtggcctcagctgaaagtgaggtgagcgtgagtgtggacatgtgtcagtgtgcgtgtgcatgggaggagtgtgtgtgcgcttgatgacgatgatggagcccagtgagccaccgtccgtggagtgtcagagcctcctaggatggccacgccgaaggtgcggaaggaggcggctggcccagcgtcagacgtttccagcatccgcgggagtgaaacggaggctggtgggtggttgtgatgtgtttctttaagaatggatcctgcaggttcttcttcctcccggtctccggtgccggaaggaggacaccgcgagtgttgcttgtttgcttacagagagtgtgcagcagcagcagcagcagcccggggccagctttgggaggactaaggatatttcagggttttaagccaggggatgacacagtgggcttaaattcaggaaaaaaaaaaaaatgcttctggtggcaaggacagggagagactgaataagtttggggtaagtggcaaaatcagagaaagaaaaccttccaggaggtctgagcccaggaaagcaaccttaaggatccgagctgacaaagtcatcctggaggtggaggcatcaggcccagctggagagattgtgagggcgaagaacctacaggaccttttgtgaaagaaaagaaacaagctcagttttgagtattttgcattcttcacttggggggaaaaaggagctataaaaattgcaggcaggtgtgcatcatgtcttggtaatttccaaaggattgcttttaatatgataggcacataaaagattttaaaagcaactgctttacgtgtacattatcgactgctcctggagccttatggcaccaaggcagagctttgccattaaccacagctccatggcagcagagttacgccggcaggtagctgagggaacgtgaggacatcagaactggggttcacaggaggcaaaaacctgcagctgcttgtaggaggcctcaggcttcctgcacccgcctctgttatcctgtggattggggcagccagtacagcaaagagccggcccccggagcccacagcctgcagggagacagacaggaaaacagatgatgagacgccctctcatcatagcaggcactattttaccacggcacggcaggaaaagcacttagatttgctggggcatctgttgaaatgaggtagagaagtttccttctgcacagtctcctgagttctttccaggggaagtgacgaaggggtgacgttgttgttgctcagaaatttcttgacagcctgcttggggcagaatgtggggatctgaagggtgcaagcgtgagcacaattcttcatggattgttgtgtgagatgatgagaaaggaactcacccatctttctggagggaggaggagacatgggggcagggggggagccagaggtggcagaaggtgacacaagccccagagtcaccccttctatcatgcccgatgtctgtgaggctgctgaatttccagcctgcttggccgtgagtgggtctgcagagaaaccggtgggagctccggccttcgggtatagctgggggcatgaatgtctgaccatgcccatgagcatgaatgcagagaggcagccagaaagatgggggtttgaacaatgtctcccaaattcagagaggcagaaagaccctggctgacacctgagtttctcgtgttacttcatgaggtgtagatga

SEQ ID NO: 1888557 - DNA, 4001 bp, Homo sapiens
gaaaacaaatgggctcaagccgcaggaagatgagccgttcccaaggcattttccaatccaaaaaatagcggtcgcagctcaggaatgaagttcccagtgaggatgcagcgggagacacagccagccttccctccccaggaaagggccaggccctgcataggagctttcattaaaaaccagggaggctgcagattctcttgaaatgacaacacgctcgtgccacacctcgatagagcttcagtcactctgctgtggagcgtgcgaggctgaccatcctaggccttggggagaaatcatgacagctgatgccagtgcttgttactgggaaaacacagtaagaaacttcatccctaaatgtttatacctactatgtactcacaaaaatttaaaaaaagatttagtatgaaaatgtaaagtatctcattaatctttatcttgatcgtatgttgaactgataatattttggatatattggtttaaataaaatatattaactaaaaaaaaaaaaaaggaaaacttcatcccgccgcctctgagaaaggatcttggggttcattggcaggtaaatgctcccccaaaggaggtccactgtggatgctggaaacgaactgtcagctgacaagcatctgtagctctgaaaacaagggctccacacattgtcccagccagcgccccaccagcccatccccattacctctatgtcttcagccccacgtcaggttctggaagtttccagggggagtggacagtaccctcaggggctcttggggctgagacctcttccatgaatcacgtatggaagcccaggaccaacctcagagaggatcatgtctgagaagtcgtttgaggggaaaaatatccacttaagagagaggttctccagccctttggagcatcacacacgtttgtgggacaaaagacaaatattcctcccaccccaatccccaaccaggctccttgttcatttttctttaaaaaacaacaacaaaaaaaaaatccgcattctccccagcctgaaatagtgctctggaggagctggcctggcccggagtgtcttctccgtaaacacacctggtgaggaagaacaggaaggacggacaaagggaggcctcaggcccagctggcagccagatctgtgcctcccagcgcctccagggcccttgcagtctcgagagatgtggcttggccacttttgcagattcccaggcctggggccactcagttgcctcccccagcccaggtgtctcctcgggacccttgcctgggagggtttgaagccaggcagggaaaagagggcagaaaatggtggtgccggggagctgggccgggccagcaaatcattccgcaaggtggagaactgcaggctgagggcaccgtgggcctgggcccgggacccagcatggaaccccttctcctggagcaccaggggtcacaacagtccctccactccagggatcacgggtgacccacggccgggtgctttggggacgagacaaagacagcgtgttcctcaagcccctgcctaccgctccgtcactggggccatggtctgcgtgccaacaaccttttaggaagcatcttgtgcccaacctcaccaccccgcaaaaaaacctgtgtccaaaacacttggcagtggggcttaaaacgctcaggtgccccgaggaggcgccgggagatgagcccagagcggtggctggcgaaggccccagcaggactggggcgtggaacttgcttgtttacctaagagaaaaacacgacgaaaaaagcttctgggtagaattggaagttctggggctctcggcgccgcggcctccgcgcggttctcttcctcccctccccggcctgcttttcctccttctttccctctttgttgccaacctcggagccgcgactgaaacccagcccagcgtgtccgcgaagcccggaaacttccagctccgcgactgtgcagaaagttggggggcgcggccggggtgacagcagcgcttcgggggcggccgcggcggccacccggacctcggcctcccgcgcctcccgctgccccagccgcgcccggggacctcgggcagcccgcgggccggacgtgaacttgaccctgcgctgtgcccgcctggaccgcggcgcgctcgggacgatctggtaagcgctccccctcccgccctcgcccggcggcgctggggtccgggtcggggtccgggctcgactgcgagggcgtgtcccggggtggcgggcgccggggctcctcggccgctgcaccggagcgcacggccgagcccgcggcccggcccccggcgaagtcagcccccagcctcccaaacaaagactcgcaaagttcggaagagaatctttcccgacattttccctcccctcgggctctgcgctgcggccatcagggctcttaaaagagaaccgagagctctctggttttctcctggtgttttcttccctgcgctttgccccccacctttggctggagggaaggaggagggggcatggatgcccctcgggccctcaggtgttgaccctccgaggccaggctgcccaggggcagcacaggaggtgagggcctgtgggatgagggacccccgacagcacaaggaggcaagcccctcgccgctgcaatgctccggtcctggggctcaggtggaagttgctcctgatccccccacacccccagcaccatcctgagtgacttcccttgaccgtcctgggtgaccatcctgagcaagactccctggccaccaactgtcctgtcggctctgcttggggcaaccacagtgccaagtgagcctggcaggtgctgggtcacaggacagccatggacagggcctggggaggaggagaagctggggccctgtagagcctgttccttggggagcaggtgagggaccctgctgcctcccctattcctgtctgcaacaggcccagcccatacctccagctagcttctctgcatgccactctctccgcctgagacaaggcctctgtccctgtgactggtctgatccctggggggcactcctgggatagaaacctaccccaccagtcggcggtggcaaagccctggaaactcacagacctgtcctgggcctgggcctccacaagcctcccagtttgatcaggtgcccccaaccacagcagggaccatctgtcaggtcttactcccagtggtggccaggtccccagccttccagagagcattgctaacttgcctccatccctgggtgcctacgctcccaaagtcctcctcaggggagcacccaagccgagagggctggccagccagaatctgagtgggtcaccccaccatgtccctggactctctggcagggctgtcacagggcagcctacaggcgtcagttggagcacagagggtgtttgcagtgacggcaggggacagagtgcccagttggctctagcctgttgctgccatgaggataagggctgaggctgttagagcttctgacttcagaagaaatccagatttgtacatgaaatgtccaaaatttgagcacattgcaggacagaggaaacactctggggttgaacccaacccatgcccccaccccgagactgcaactcctgtgtacgcctgaactggttagtgttcaaagaaagcagatttcttagtgaccctggccccagcccaagatttgagcaggagaccccggggatctggggagcagggaggcaggagagtctgtatctcatggacccagcaccacagggagggtcggcctccacaggcatgaactgtccaggtaattaacacttgctcgagcccacttaaagttaaaatctccctaaaatgaggaacctgacctgccccatccccaaaccctctgggggaccttctatacccgcccagggtataatgaaggaaagataggatgcagaaagtgaacctgaacttgaactttcttcatgtcccaggcagtagagtcgcagcataccaaaaatcctgggcttatagggaagttctgcattgaggcaggcctgcc

SEQ ID NO: 1888558 - DNA, 4001 bp, Homo sapiens
tggagatgtcatctgacctcctttcctgggaagctgcgggcctgaagccatcttccaggatttctctctgtagctgtagagctaactaacaccaggcctccgggccaggaactggcagaggattctgagggcattttagcctcaggcaaagcctccctgaccccccatctgcaggacttgcaaatggacactgcttccagccctcctgatgaggacacgattattcttctccactggtgccaaagcaaaataaaattccatttgcttttctgacacattaaacaagaacattaggagttctgcaggggtgaccatattttaatatgcttggaaaccgtggcaggggaggttcattcccttgcctgtttgtacaggagaaacagtgaaagaaatctgagtcaaccaggctgcagggagtagaaggctgagactttttcttttttttttttttaatacaaggtggtgcgtaaaagtaataaagaggtcacagggaaaatctgtatcatgatgaatccagttattgcaaaagagctgtttccttcaatgttcgaaagctgataatacacgtgcacaggcgtctgcttctaatttcagggaagctaagcccaggagcgaccgctttggaggccatctgcatggagctggctgtcacccctggtgcacgcgagtggtggggtctgtaccccggaggccctgccccaccaggcaggacgaaggacaaagcactccttcccttctccagcacactctgtcctttgcaccccctcagggtcgcacaggtcattcctgcttcctggaaagactcatcccttcaaactgctttttaagctcctactcaaccctcaagacccatctcacagagacctttaattacctagggttgagctagtcctgccttcccctgcagacggccccattatgttccaggcagcttcattcacaattgtctcctctttgaatgtggcttccccaggagcagggaccagtttaatttgagtcctgtcccccatgtgtaccgtacagtaggcagaatgtggtgctgaagtaattaatgtctctaaatattgaatccttcccacaaccccagaggagatccaattctgatgtcagtggaataaaatgcagttcaagttcaacttgaattgattcagatggttttcagcacagccacccaccgttcccaggccccggccccttggctggcctcttccgctccaaaccggtggcttcttcctcggggaaggtgcttcaggcagcaggggtgccaggacagaggcctggaagattctgtactacgcagcatgggggccacattctgttgctggaagggagtcacaggcttgtccagctcaagcgcagggtcagtgagagtctatcctcacactgtcagagccagctgggcagcatgccggggcagctgtcctccagacggggactcagaagctttgtgctttaacttcatgacaccggcatccaagctcacagctctgggccccacagtgggcagggaatggaccgcagggttgagcctttgatcacagtgctcgtgcttccccctgtgccgttgcaggcctcagtttccccagctcttttgcctgcacacctgggtcccacatccccagcctgagacaggatctccttgtcaccgtggctctgccacgtctggaggtttcctgaccgcgctcaggcacctctcttggaacctgtttccgcatcagcaaggacaggcgaggccagggaggaggaagaagctaactctcgttaaaagaaaaactttacacaaattaaatctaacagagtttaactgagcaaagaatggttcgggaatcagtcagcctcccgaaccagaagagattcagggagattccggcactgccgtgggaccaaagaagatttatgaacagaaaaagtagggtgacttacggaagacagagcgcagtccagaagcagccacttggctccagcttagggtctgtcttacttgatcagggaaaactcgatgactggcacaagagtaggttacagactatttacacgtccagtttggtacagttcactgtgtacagaaagactttttttttttttttcagaaagagtctcgctctgtcacccaggctggagtgcagtggcgtgatcttggctcactgcaagctccgcctcctgggttcatgccatttaggctgaacttatgtgaggaggcagctttaggctaagcttatcactctgaattctcagtggcatgtcggagtttgcaagaaaggtggatttcccattcatgccaactcctccagcatggctacagatcgcggctcatcaacaactcacacgttcctcccaggtgttagggcaggactcagaactggaggtccgtgcactggctcgtctatgctccagcctagaaatgtccccgaggcatggccagagtcctccaggctggggagcagcggaggccaggccatgccagatctgtcgtctgggtttagcttcgttgcagtgagtgtttacagctgagtggtgctctggtgaccgttgctctacaatgatccctctggcagctccacggaaaacagcaatagttgtccaattcaggagtgagtttccacatccatccctgctaagggagtgcacagtgatggtgactgagaagctcctcagagcaccagttctgaagtcacacacgttgggtttgggactgggatccaacaactccttgttgtgggacagtgtgcagtccttgtctggtgaccccacttcccggtctgcaaaatgggatcctgagacctgcccctcttagggctgggaggacccgaccagcaaagcccacacggcctcagggccaggcaggtcccagagtaaaggacgtgccagcgtaattgttgccctgggtgttgttagtgatatcactgagagctgatattttcctttctccactgccacctccacgaagacagcacacatttgcttaagaaatagcagctagagcttgggctgaactgtgaaacatagcaagtgtgctatatcaatcagagaacacttttccctggcaccagtgatttctcggagaactgtgagcccaggcatcagctgtgattccatgagtgatggagggccaagaagcagaatgacaccaagggaccttttgtaaacacccgcaggagctctctgcatccacgacaggaaaataaagacacaaactcttctctgaaattagggaaaaggaaatagagaaagtagatgaatgctttaaggaaatttttgaagatagaaaactaaaaaactattaatttaaaaataaatgaagtacacaagctctaaataatggcatctttcccccaaactgtcatagaagaaaagctaatgtgttattttaaaggatgactctcagatgaccctttaaattccatttatattctagtgattaaacaaagcgatttattagagttttacagaggcattttctccctgtgtcttacaacgcagaccacatcaaaagcacccatttactgccattatttcaatactgattttattttatgatcttgatttgtgatttataactttgtttttcttgagattcccgtcttcatgttgttggacctgtgtgtaaagcaggaagcagctccctcccttggatgtactaaaatagttactgcttcacatgcgtgatgctcctggctaccttcctgcccctgatacaagccatgccgaggtggggaggggtccagcccacgcaagcagggagggaagcctgtggtctccccattggcagaggaaaggggtgcggacgcaggcacctgtcccaagagggaagaaggcagattcaggatggaattagcaagacatgctccccgactgattgttactttcaagaaagcagccggccgcactgccagctttgataattgactttattctaccattgatggataaattgactgatagatgtcagacagaggcatgaccgaggtgggaccaggtttgtgcagaaagaatgatcggct

SEQ ID NO: 1888559 - DNA, 4001 bp, Homo sapiens
tggtagatagaacccacactgtaggctgcttcacacattccctcaagaagcaagcagcctccagtcttggagctgagacccaaggggaaaggtgtctgtgcaggaaagagctggaggctggagaggcaggcaggggcctggagggagccaagttgcatttaaccagactgcagagaggaggcccgcagcagggagtagcacagactaagaacactggggcgcacctgcccttaaggggcagaggagcagagacacgtggatgggtctccaagctagtctgcaggcagaagggtcttgatttctagcctggtgctccacgtttccccactaaccaggatgctcggccagtgctggggagagccccaggaggtggctaagtgcacatcggaggagtggatggagactccaggtcaccatgtcctgctccagccagagccacggtgaccagttaaagtcacagtctggaatctgaaccttacggactgtgcccaggagagacaatggcctcagagaaaaggaaaagggagctggtgaggtcgtgaccacacctagggcagggcttggctaacctccagccttgtcctcactgctgtgggactgaggcctccaggcagctaccccgctccatcttcccgctccccagattccttgacgctccccagattccttggcattcccctcacacactgctgcgtgccacgtcccccagaccgggttttctgtccctgtgtagatgatgaatggcagtcagagcttagtattcaaaaaagccaatgactcctgtggatgggtctgtctcctcttcaccaacaaagagaatgctggtccgtctcagcactcacaacaaacactatcttggtcgaggatgcaagagtactattttcctcactttttatttcctctgtgttttcacagattccctgcacagggtcttaggtaaggggcatagaaccaggggccacctcaagacctgggaacatggactgaacacagacaaacgggacaggggcagaggtgatgcagggacagtggagaactgaaaggacagtctgaaaggggtgacgggaggaccacagagaacactgaggatcacggataaacatgacaaggccaccatgggtgacccatgggaaacatggtggccctgtagttccactccacccattcctacctgacaaatatccctgagagcagcctcccttctgctcaggttgggccggaccctgacccctgaccctccccaacatggcccttattacactgttgtcacatttgtcccctctgccaaatcacatccatccaccacccaacgcccacttaattctccattgaccaggcctgacctgggagccatgacctgggaagctacacttagccacaggagtgtcatctcctgaagtgacctcaagggatgcaccatctcatccctctgcccccaagttctgctcaaatccctgccgtggccggtggctcactagctccaagcagccgaagctccgtctcacaagcgcggttcctggagctcctggggcccggggcacattccatgcgctgggggctggggcagccgaggctggcggccattctgctagtcgccccgaggcagccctatgcaggcccctgccgccgctaccgatgaccctgaccagtcaccccctcctctcggggcccgggagactcgcctggggttgtaatggaagaaggtaaataaaatgccagcgatcgtgatccgggggctcatcctgcgggccggcccaggtcacgggagaggcgctgtgcccgccagggccaggagggtcgcctgcgctgaggggcgggggccacggccgcagaccacccgggccccgctcagtacccggccatagggggacacggagaagcttcctggggaccatttccgaaagaggaatggacttcctcagcctcggggaccggccatccaggcagggagggccgccgagtcggatcgcgttcccgtagcccacaggctgtgggggcgaccacgcttgcgctcggaagttggggcggcgcgcgctgatggcgtcacgagggcgcgtccagtcgtctggggcggcgcacgcgctctcccgttgctgctggggctggagccgcgctgctcagaccctggctgcctttgccgcctgcaccgccactgactcgacccctcgtccgagattgattgggctgcttggaggcccctcgcggtcactgccaccagcccctgatcttcgggtttcatcgcgagtccccgtccttgcctgcagcccctggattctcgccggcccagccacatcgtccaccctccccgagcctctggcggcgcctcccgggaccagcgggggcccacgctggaggctgcctgggccattctgacgcaccagcctgagggaacattccctggcctcccgcccctcctttcccctgcctagagctggcctgcgtgtcccagaactgggcttctcccgcctcacctgctccccaccgcactccagatcgctgcgggcgcggcttcctcgccctggagcactcttcctctccctccgcattttccctgtaattcacactgcccttcaggccctgcctggccctgtgcatgtggggtgcctgtttccccttcccgaagggcgccctcccatccggttgtctaactgtgtcctcggacccaagctcccagagggcagagcctgggtctgtggctcacgcctgtgtcccctccacagggcctggatgggagaatcgttggtcactgctgaaggaagaaagggaggaagggagatgagagggaaggaaagacaaatgtacttatgactgcgtcttttcctccacttgggactttttgttccaatgtccctagtctcagccatgggaaagaagatggggacccagagcgctccactggcctctcctctgctactgcccaccccatcctgcctgcctggtcagctccagtccagccacttgttgctgcctgtaggctcatgtaaggcacagtgaccttgccacatctccatggaggaggaggcaggtgtaagcacacccctctgagccacctactctgggggcctgctggcaggaacaggagaaggagtcagggttggggttgcgtccccacagaagatagcagtgagcacaggccacacacgacactggcacattctggttgggcctttccttagccggctccattcctcagataggaaaacccagacagagacaaaggacctacctgggacctgtataggtccagtccctccctctgccgcctagtgagagaggactgaagatgaagagtgaggatgaattgagagcaggtggtgtcacatctgccctgtcagtgagttggtcaacagaggtctttagggggctatacctggacagggaccccaaagggaagatggagggtctgcaagggggctgctagctgctgtcagcgtccacccagtctgcaggctgccccctgaccctgcttgatggggacaggtgtgtcatgcatgttgccgtgcaacccaagctcagtgtgtgggtggcacccagggctgcactggctgtcagggtccacaagtggtctgggtcaggatggggcaggaacatccttctctgagttccctgattacccaggaaggctggcggggcagggggtccactcatccagacccgttggccagcccaccaaggtgtgcatctcccttttggctccaaggcccgccttggccgggtgacagctggggaaactgataccagctcgtagctctggactgctgggtggcaaggccctgtggtcgctgggagccaggcttcctcagtcccgcgcgttcgctgctgacaattgagcgaccaaagcagattaacttgggtgttaatccccacctaatggcttcagaatccccggctccaggagctaagccgtcctttctccgagcgcggccgagccctccgcggcttcagccccgcagcggcgccgatgctatctctgcctgcccggccgcggtaccgcgctaatc

SEQ ID NO: 1888560 - DNA, 4001 bp, Homo sapiens
aaagatttgggtcctgccctcatggcacttacaatcgacagggggagctaaacattgaccaattaatggcataaaagtgtccatggagggggtggtcccatgctatgagagtccatcatagtggaatcatcaagtcagggaggtcagggcaggcttcctggaggaggtgacatttgtgctggggcccaaaggatgaggagtgttaattgctctgactcactgtcatccttgcagagtccctctctgatatcctcctaaggtcgcctcccctccccataccctggtccccttcttgactgtctgttgttcatctatatccctgccctggtctggaagccctatgagggcagaggccgggcctgtcttagtcactgctgaattgcgcatgcccggcacttagtaggtgtgccggaccacctgtggtggtctacactgcctatttgtaactatttgctgatcaaaagaataaacaacatgtgcaaaaggctttgtagtaggggaaatcccaggacaggaggatgtgggagtaggaacgggggcaaagggacagaaggtgatgggagatgaggctgtgcctccctaagaacctccctagaaatgcgggtatctcctccagccaagggaaacccttctgcccttcccctgtggcagagactgtggtagggtgtctttcttaccctagaggagagagtgtcgcataaatacgctgccccacccgaagcgctccaggcacagcaccccggacacaaagcaggtgggcactagcaccccctgcccagtactctgccaccagcttccctcctgcgttcattctctcacccagtgctgcggggccacctggagctacagagagggagtgggatccacccccagcagatccgaaggtctcaatccagggcttccctgcatcccagccccaggtctcacctgcactacccccatggctagcaccctttctcctcactgaggcggaggtggaagaagaggagccaggacaaatggggtttgagtccctgggtctgattacgagcgtgggacgggtgccaaattggcctcttcgtccctcagcttcctcacaagtgaggtggagactccccaggcttccccggagccagggacagagtgagcgcttgatgatcccgtctaaaagtctcaaaatgagccccctttggtctcgctctgtcgccccaaatccctctcccgcctcagctgcagtttctccagctcccgaggaaggggggcacccgaattccagccgctgaggctggagtttggagttcgcccaaggagcttccgccctgggatgcggctgagacccgacaggtgggtcccgtccccgccccagatgtgcgcctggcccctcggaggcgcggctccgcctacgcccagacccttcctccccgccagcccgctcagcgcgctctggcaaactttccgcgtccagaacccgcccgcgtctacacctgctcgcggttcaaccgcaagcgcaagtctacacggtctcacctgcccccgggttgctgaagggtgcctcggtcacggggccgcgtctccacaggctcaacagctgcgagtccccgggactgccgacctcagccttggggatccgtcttgaccacccccggattcggaggcgcccgggccggaccacctgtgctggtctccacctcctcggcaaccccgggtcaccggagatgctgcagctcgagggtcccgcctgcaccatccatggctctcgagatccttcagagcgcggacccggccgagaccccgcggagccgctgcgcgtggctggtgcccgcggtcgccccgcagtcccgtatgcggcgaaaccgccggggctgcttacctggcccgcaccctcacgctcccgtccgggctgcgcagccgcttctctcacacattttgcgataacatcgatggcgaaagaaaatgttgtaaatcctcctgcggccacgtggctgtccccccacccccttctccctttctctggccctcaggacaaaaaggccccgcggccggccgctggccacggggctctgggcgggcgaagctggctgcagcggggcgtggtctggggaggggccggaccggggcgggcggggcgtggtcggggcaggggcggggcgcgctggttccggccgccctccccgcggaaaccgggcctgagactagggctcctgttccagctcttgattggtcggtcggccagcactgctgacgtctgattggctgagacaaagaagggactaaggccgtaggggtgggggtttgtggatttcattctttgccttttcgctccggcggtggccgctgctctttcggaccttcctgaactctgcggccttttcctctctgcttccgtggtccctatcataacgctacctgcatttccttgtccttctctaccaaacagcacctggagatagggacatggggttcgtgctgctcaccactgtctccccagggcctagcacacagtacgtgctcaaaacggttagttgaatgaattcgtggaaaatatgcatacaggtgtttagagctatctttaatgttggcaacatccctaggagatattactattctctcccgaggatgaggaaaccgaggtgcagcgaaattcggtcacgtggggatgaatggctgagctgatgctgggacatgcttacattactggatctcggatcctctacacagtgatgccctgtgcagtgtcagagctcagtttcccgtctatcaagagtgttgtgttagagcacaagataggttagaagatgggttattactgccaggtcctgtggctcacgcctataattctagcactttgggaggccagggtgggagaagcgcttgcgcccaggagttcgaaaccagcctgggcaacatggcgaaaccccgtctctacaaaaaaaaaattaagaagttttctgggcatggtggtgtgcacctgtactcccagctacttgggaggctgaggtgggaggatcacttgagcccaggagttggaagctgcagtgttatgattgtaccacttgcactccagcctgggtgacagaaaaaaaaaaaaacccgtctctactaaaaatacaaaaaattagcctggcgtggtggtgggcacctgtagtcccagctagctactcgggaagctgaggcaagagaatggcgtgaacccgggaggcggagcttgcagtaagccgagatggcaccactgcattccagcctgggtgacagagtgagactccatctcaaaacaaaacaaaaacaaaaacaaaaaaacttacttcggccgggcacagtggctcacgcctgtaatcccagcactttgggaagccgaggtgggtggatcacctgaggtcaggagttcgagaccagcctggccaacatcatgaaaccccatctctactaaaaaatacaaaaattagctgagcatgctggtgggcacctgtaatcccagctactcgggaggctggggcaggagaatcacttgaacccaggaggcagaggttgtagtgagctgaggtcatgccactggcactccagcctgggtgataagagcgaaactctgtctcaaaaaaaaaaagtgtcatttaaatgaacatgcttgaacatgctatacccagcactgtgcttggcagtatgaatgacacagcctctgcttccatgttaaattcctggtaacctgctgggctctttcccttcctgggaatccatcccctgaacccccctctgcacccccatcacaggggaagttggaagcactctgctcaaaccatgctgcattgcccactctgacagtttggggcatttggggtggattttcctgtggaagtcatggggagcaccgtgaagcagactgacttcccggctgctgttctctgatggagagggggtccttgggatgcccccccaagtaggtccttttgattgagagatgatgtatgagatgggatgggggagagggcttcctctgacaaaggaaggtgtagaagcttctcccggag

SEQ ID NO: 1888561 - DNA, 4001 bp, Homo sapiens
aggaggggaataagaaagagctggagaaagaacggcagtgaaaagggtgtggttattgagaagtgaccactgtggatgagagggaattcatcctgctgtgaaacactgggagctagtgaggaagacgactttcagagtcatcccaccagggggcaagggacctgggcatttattaatacacgccaacactcaccagtcatcatggagggctgctgctgtggtgttaatttcctggtacttaggcccactactctggcccggggcctggccactgtagaacgccctcaggcaaagagatacaggggctgccctggaggttagccagtgagcactttagcagagacaaggaatgtaggtaggagacattgcccacatcccagcatctgctaggggctgcctgaaagaaaaggaccctagatctgtgtttctgcagcagactctctgatctgccccttaagtctaacagaacaggggagaaaagacctggagcgaggcacagggtagggggtggaggtgcagcagcaggcactcccactatagcatggcaaagatgcgtgagtctcccacaggcggagagaacaccactgaaggaccaagacttgagcaatttccacgtccaaagatcctaatcattacccaaggagacttgagtggcaagaagctgtgggctccccctggcaacgatgggggctaatggggtggtcagggctcccacaagagctcttcacgaggacctctgaagaacccacacaggcaccctgagaaacagctagcatcctgcccattgctcccaacctttcccatccctctcccggcgcaggtctctggggctgggtcaagcctgagcgggagggtgggaaagaggagcattaaatgaaaaaccagattgaagtacttagctgcaaatgaccaaaaatctcaaggatctgcctacgatattgtaagaaagataagagtagagcagaatatgcccccacctggttcagacagttcaatacatccttgataacaaccagctattgagtaccagacacacagcgaggtgttcctcagggctgagctcatctaatcctctcagcaaccttaggggaaggtgttactgtccctactgtacagctgagaagtgtgaggcttagagaagctacacagtttgctcaggatcatacaggcaacgcatagcagagtctaaattcaaactcggaccattttcattctggtgccttgttcatcaactggtaggtaaattatggtatacccatacaatagaatactagtcagtaacaagaagaaatgaatgacagatgcatgacggaacctggatgaatcacaaaaacgttatgctgaatgaaagcaggcagacacagaagactactttctgtaggattccatgtatatgaaattctagaaaaggcaaagcacagtgccagggaacagatcagtagttgccagaagccaaagactggagaagaaatggggcatgggaagctttctggggtggtaaaaatgttctataccatggccagattctgtggctcatgcatgtaatcccagcacctaaaggtgttagcagagccaaggaggctctagccatgtgagggcatgggctggagaggaggacagaactagagaaataaaatgaaatgacaggtggtagagttgagaaagggatggacagggagcaaatcctagagtaaacatctgactgaaaagagacttagagatgaactctaatccaatgcctgcccccacctttaaagttggggaactgagacccaaagagaagattaaagcagcggcagtggtgctgggggggctgtttacctctgtattggtccatttcacacgactctaaataactgcctgagactgggtaatttataaagaaaagagatttaattgactcacagttccacgtggctggggaggcctcagtaaacttaccatcatggcagaacgggaagcagccatatctcacacggcagcaggagaggacgcttgtgaaggaagtgaagggggaggagccccttataaaaccatcagatctcgtgagaactcactcactatcacgagaacggcatggggggaaccgccctcatgatccaatcacctcccacctggttcctccctcaacacctggggagtacaggtcaagatgaggtttgggtggggacacagagcctaaccatctcaacctcctttatttcattctttcaacaaacatttacaaacagcttgttctacatagcagacagtccaagtcaaacagggcagagcccctgctctccgggagtccacagccggaagacggacagccagatgccctggaaatttacacttcatgatgctcaagacgctcaatgtcccagtcccccaggctgagttaccaaagtattgacataagaaaggggactacagatttgaggagcccgcaacttattcaggaagccctcttatgggaaaatgatacgaaattataaatgcaaagttaggtacaaaagcagaaggggtctgtacaggtgagaagtcctgaagcttaagcttctttagcttttacagcaattccttccctgaccacacctgaattcaagggcaaaaacatacttctgaactgggccaacagcgccctctagcggacccacagaggaaggcctcaaggagctctgagctttggacacacccacgcaggcagcgtaaagccaagcaggtaaatttggccatcggcttcctagacactttctcatcagcccatagacctgcccttcctaaccctagaggtgtgcaattattattagaagcttagagctcagcgtccagatggacagttccttgtagttccttgatttggggcaggtaacttaacctttccacgtttgtttcctttactgcaaataagttgtgtcataatgagattaagtaagtacctacttcagaggatggttgtaaaaattaaatgagatgactcacttttatgatgtctctaaaattaattttaaatagactcacttataagtgctttatacaaagggcactttgatgtgtaatttttattattattattattattattattattattgagacagagtctctctgttgcccaggctgagtgcagtggcgcgatctcggcttactgcaacctccatctcccaggttcaagcgattctcctgcctcagcctcccgagtagctgggactacaggcgcctgccaccacgcctggctaatttttgtatttttagtagagacggggtttcaccatgtaagttattttttaaggaaaatgtattcacctggccatattttctgcttcttcatgaactcttctgaagaaattacccttactacacactcacaaaggaccacgcaaggcccagttacacggtgcagggtagagacaaggtgtgtctgtctcatccaccattccacagacccctaaagagtgaggtgggagtttattcatctccccattccccccagcacatccctggctcatggcccatcacaggaaaagtcacttcatggatcaatgtctggagagggtacaatgtcggtgtgagatgaatgaatactaagtgagtactcttcatgttttcttctaactttatattttaatataatttcagatttagagaaaagttgcaagaataatgaaggatgaattatcaggggctcttcttccaaattccccaaaacatgcacattaaactcagggccttctgtgtcctctgcccctttctctctcgatatgcttgagtgtgtgtgcatcatcttctgaaccatctccagttagttgcagatgtggtcctcttttgcccccaaatcttcagtacatagttcctaaaaagaaggacattcccttatataactgcaattcacttatcaaaatcaggaatttggcataaattcaatactattatctaccctgcaaaccttatttagattttaccaacttgtcccaataatgtcatctacccaaaagaaaatccgagatcgtgcatggcat

SEQ ID NO: 1888562 - DNA, 4001 bp, Homo sapiens
tctgttcttcctttctcttctcgctttccctctcctctctcctctctttatctttcttccctctcctcttttctctccctttcttcccccgtctttctcctctcttctctatctccctttttctctttctctttctaaatgactgcttgcctccccccaactgtctttctctttgcctctttctcccttctatttcccttccattttatatgcttttctaaaacataaatacattgaattcagaaggcagcgtgggatttggaaaccaggggtccaaagccctgcttgaccattttgcagctgtgaggtttcaggcaagtgactccagcaggctcgtcatcctccacactggtaattatggagagaataatccctactgtgcttggccattgaattacatcacctgttcagtggcacgcagtaggtgctcagtggttgcaactttcttctttcttctccttgatcacaaagcttcagaggctcaaaaaaatctaccagaactttttcagcctcttaagctcagaataggagcctcgccatattttccatctttcatctctggctttaacccactcaaccctcttccacattccaaacattccatgcactttccggccaccaggcctttgcacatgctgtgtgcccagcctgggttgccctttccccttttgcttgccttagcctgcttccctcagtggagaattgggctcagaggtcaccacagcttcttcatcctctgcagctactaacacaggacaggctgaggaacccaataaggaaagaaggtgtggatagaaccccagagaaattagagagctggtcaggctcatttcaggcagactgaaacctggtctcaatctctggctgagatgacatatttcattcattcaatcaacagttttgggcatctactgtttgcatactcctgccccagctggatgcagagatgcatcaggcaagttcctttctggagcggtcacagcccagtggggaaagagaccctccccagtgcagttactagacagcgtggtaagttctggaatacaggtgggtgaaggttccctggtcgcacaaaagggggctagcagtccacttgaggaagttatggggacttcagaaaatgccccaagagcagagtatttggtgcagcaggaggtgaggttgccacaaagaagctagcttttgtggtagggacattccaggacaggtgacaagtcaggactggaggaggcttgtgagagccaaaggagtccagggccacgagcttttcagtgggactgagcttagctaggaagaggggactagaaggaagccaggtcaggagggtgaaaggggcaagaccaccacgaggagtcacataggttggctagggagccgggacttgaccctgagtgcagccaggagtcccggaaagggttaaagcaagggagacccgtgaccatagaggcagtttagaaatctgactgctctgggccggccctatgatgagagacagtgtggggtccggcccagaatggaggtgacggccgagataggcaggggtggccctggtgcagacaagagcaggggagaggtgaagcggcgaaggaggagcgggtcccatctcgggcctcgcccttccccctttggcggcggctgcctcgggcgtctaaccacctccccctccccagccctttccctccccaccccctccctgccttctggctgcacaatttgtgaagaacattatgtaaatggatttatgcaaatccagcctctccccctgctcgctcgctggactcctgaaccctaattaacttgccaaagcctaatgttgccgtcccctttacaccggcccagcccccccgcccgctccccctaccaggaaatccgtcttcagaagcaagcgccgtgtaatcgctcccttatttgaatgtgcgagctgtcgcccacacccttagcccgcaggagaaggcggcctttcagcccatgacacttgtgcttccgatacggctccaaaataaatgcctctttttcttccccccacccgctcccgccttatttttgcttgcttctagacccagaaacagcctgggtaaagttgatgcaatttctcattatcttcaagtctttcgtccaccactagcatcaccctcccctccccgacctcaaggtcaggaatctaataccctctcccctccatcgctctcaaaatagccgctcaggaaaggagcaagggccggcccttgctgaaggactaagggctcatgcctgcaatcccagcactttgggaggccgagggaggcagatcacccgaggtcaggagttcagaccagcctgggcaacaaagtgcaaccctatctttattaaaacaaacaggaggctaaggcaggagaattgctggaaccggggaggaggaggttgtggtgagccgagatcgcgcccactgcactccagcctaggtggaaaaggaaagaaagaaggaaagaaggaaagaaagggaggcagggagggagggggggggaaagagagagaggaaggaaggaaggaaggaaggaaggaaggaaggaaggaaggaaggaaggaaggaaggaaggaaaagaaagaaagaagaaaagaaagagagggagggagggagggagagaaaggagggagggagagagaggagaaagacatgaaggaaagagagaaagacaggaaggaaggagagcgagaggaaggaaggaaggaagggagggagcagggagggagggagggagggattggtgttttttgaaatcagaacagcaaggatgtattcagctcctgctccctgcaaggcactgtgtgcctaccacctaaatgaaggtatgttgttgacctagaaaagactccaggagcatctcttccagcctgcttgttttttttaaagacagggtcttgctctgtcacccaggctagggtgcagtggtataatcacagttcactgcagccttgaattcctgggctcaaacaatcctccagcctcagcctcctgagtactacaggtgcacacgtgccaccatgcccacctaatatttttaaaatatttttgtagagagctttgtttcccaggctggtatcaaattcctggcttcaggtaatcctcctgctttggcctccagagtagttgggactacaggcatgtgccaccatgcctggctaatttctttaaaaaaatttttagagacagaggtgtcactatgttgctgaggctggtctcaaactcctggcctcaagcgatcctcgttgtctgggcctctcaaagtgttgggattataggaatgacccaccatgccaggcccttgatttttttttttttttttttgtctttgttgagacaagctgtcactctgttgcccaggctggaatgcagtggtgcaatctcaccagcccttgatttttttgattttttttttttttttttgagacagagtctcgtgctattgcccagtgagacaatctcggcttactacaacctctgcctccctgattcacgtggttctcctgctttcacctcccgaatagctgggactacaggcacgcaccaccacgcccagctaatttttgtattttccgcagaggcagggtttcaccatgttggccaagctggacttgaactcccaacctcaggtgatccgcccgcctccgcctcccaaagtcctaggattccaggcgtgagccaccgcgccggcccagccttgattttaaagatagttgaacctatgttccaccaccaatgacgcatccaaggtcaagcagcagggatgggctggaaggcagcctcccagtcccccaccagcctgggcctttctgcttaacatccctcgttccaaacagcacagcctaaagtagctgagctcttctggcagccttgtgcctgctcccttcaagtgcagaacaaagcaaaataaaggctttccctggaaacaggaagaattgtgttgtcagccggttcgtgctgctgcagcaaatctcctggatgtggctccccaaacagagat

SEQ ID NO: 1888563 - DNA, 4001 bp, Homo sapiens
aaacgatgtgtgtatacactggacactcagagcaaacctctttttcttttctttcttcttcttttttttttttttgaaacagttttgctcttgttgcccaggctagagtgcaatggcgcgatctcggctcaccgcaactccgcctcccgggttcaagtgattctcctgcctcagcctccccagtagctcggattataggcatgtgccaccacgcccggctaattttgtattttttttttttttgagacggagtttcgctcttgttgcccaggctgtagtgcaatggcacgatctcggctcacggcaacctccgcctcccaggttcaagcgattctcctgcctcagcctctctagtagctgagattacaggcatgtgccaccacgcccggctaattttgtatttttagtagagacggggtttctccatgttggtcaggctggtctagaactcccgacctcaggtgatccgcctgcctcgacctcccaaagtgctgggattacaggcatgagccactgcgcccggcctagttttgtatttttagtagagatggggtttctccgtgttggtcagactggtctcgaactcccgacctcaggtgatccgcccgcctcagcctcccaaagtgctgggataacaggcgtgagccaccgcgcccggcccctttctctttctctgtggatgttcccagcagctctctcaaaaataaaacgtgccagttcccaaaatccgcccaagaaagctgtggctcagagagggaggcactagcctaaggtgacagtgagtctgggcttagaacacagatctcctggcttcgtgtccagggaactttcttcatgcctctaattcattctctccaacaggagtttggcatgtactatgccctagagcggaggtgtgcaggacaggtgctgctgtccctgtgcacaggttaagaaacagtttaactgaatctcagggaggccaagtgactaagcaccaggacacgaaaccagaaggcagaggtctcgattttgaactcggatcatccgccagggcaacgcccggaagcctcagggcgcgcgtggctgggcgcgagctcggcgcgcagcggtgggaatcccgagcggagttggaagccgggcccgttcatttgcatgctaatacccagaatgcttttcccccgcacaccgcttctcttaatggaagcgctcagtttggaaccgtggaaagtttggaacacatacttcgctgcctctttgcaactgtgggaacttcccgcccgcacacgcggcgcctgcagcctggggctccgcgccaggcggcccaaaggcagccgccagcgcttcctgggaagacaaaccttggtgtacaactctagcgtggtagcatccccgggcgggccggggacaaagcgccgaggcctggcggcagggcccattaccagagcacccggcgtctcacagggctgcgggcgctggggatgctccgggcttggagaggcctgagggtgtccccgactcctccggcacccccacttccctgaggattgctggggcttccgggggtccctgccccgtccatcgccctcatattgtcgcctcccggagctggtgacttcacgctccccggggacaaagctcggcgtgctgtggtttgggggagaagctggacgctggcttcatctctccagctcttccgggcgcgcagcccatcagatcgatcaatgtaccgggtgcagaagcagctccggaggttcggcctgtctccggccaggaccccgggccctctctggtgtttgaagcagggaggcggtcgcaggcgacttctgggaatttcacgcatgaaagcggggctccgaagggtggacgacgcccgctcgacctgcgagtgcgcttcgcaggctggggggcccggatccgcacccctcagttcctgcccccccaccctgctagccgccactctcagcgggcaggggaggggcagtgggagctggtttgctggctcggcgcttcgtttgcattggtccgggggggctgagactgcagcccccggccccgcgggcggggtggggaggcgggggccggacgggggctcaggctgctctagcattggcggatctggggaatggggagggggggcaggaagcggggggagcggactgcggggggggggtgtataaatagggaaggggggacgtgcatcctcgtcttggtgaggggggggcgctcggcacaaagaaagtgtaaagtttgcagcgccaggcggcccgggctaggcatccgggcgcgcacgtgcaaggccggggacgccggggcccccactctgagctcgccgtttcttttttttctgcaagcgagagggggggtgttgttggtatcgccccctccttctcctccccccaggggtgaaagtgcaagaggaagtgcagccgctgccatctttcctccgctccgaacacacggagcccggggccgcacagccgccgctccgccgccgccttctcccggcctgaggaagggcctactctgccgccgccgccgcccgcccgctccagccgccgccgccgccgccaccgccctccaggctccgggacccggcccgcgccaccgcccccgtgcgcgccccgccgccgccgccttcgccttcgccttttgtttcctccgctccggcgcccccgccccggctcgcgctttgcaggggacgcagcgcgcgcccccagcgggcccgggaaaagccgcggcgcgcgcgcgcgcctgcgcggcggacccctccttctcctccccgcgtgcgcgtgcccttcttggctgcgcgccggcgccgcctggcgggcgggaggggaggtggcaggcgcgtttgcaggaggggcgcacctcttcgctcgcgcacccccccggaaggtagaccgggaaggggaggcgggcgggcggagaggagagagtggcgcgcagtccagcgagggcgggggttggctatgtggggggtggtgcaccccgcagtctagacagtctgatccgggctgggggcgtgtacactcggcgcacctgcgagactacagagcctcgggccggcacgtgtggggagtgtggacacgtctgctgcgccccgcttctcgctgctgaggggaagggagggggcgggcaggtgcagcggccgggctagtgggagggggcggcggccatggagcgggtgaacgacgcttcgtgcggcccgtctggctgctacacataccaggtgagcagacacagcacggagatgctgcacaacctgaaccagcagcgcaaaaacggcgggcgcttctgcgacgtgctcttgcgggtaggcgacgagagcttcccagcgcaccgcgccgtgctggccgcctgcagcgagtactttgagtcggtgttcagcgcccagttgggcgacggcggagctgcggacgggggtccggctgatgtagggggcgcgacggcagcaccaggcggcggggccgggggcagccgggagctggagatgcacactatcagctccaaggtatttggggacattctggacttcgcctacacttcccgcatcgtggtgcgcttggagagctttcccgaactcatgacggccgccaagttcctgctgatgaggtcggttatcgagatctgccaggaagtcatcaaacagtccaacgtacagatcctggtaccccctgcccgcgccgatataatgctctttcgcccccctgggacctcggacttgggcttccctttggacatgaccaacggggcagccttggcagccaacagcaatggcatcgccggcagcatgcagccagaggaggaggcagctcgggcggctggtgcagccattgcaggccaagcctctttgcctgtgttacctggggtggaccgcttgcccatggtggctggacccctatccccccaactgctgacttccccattccccagtgtggcatccagtgcccctcccctgactggcaagcgaggccggggccgcccaaggaaggccaacctgctggactcaatgtttgggt

SEQ ID NO: 1888564 - DNA, 4001 bp, Homo sapiens
aagaatgtccaggagattgaagaatcccaccttcaagcagaggtctggaagcagtgctgggatgtcttgtctggattgtgcctggcaatgtaatgaacaggaaataaagagacacgttctttgatgaatctcaggctcttggggttgcacaaccatttcacggggatcaagatgaatcactttgtcctctgttccagcgaggggaggccttcccaacctcagccagccctaggggcacaccaggagcagcagagaatggcttcctagagcccaggcagccccgggatcccagagaatgatgttctgggcctgggaggcagatttggatcatgcctgagaattcaccaagctgagccgcccccatgtaaggccactgggaataatcccaatagtttccacttgtcagcctccagtcagagggagtctgcctctcatggtcaaagttgccaggcctgcagacaaaacactggggcaaggcaggtccccaaagccatcgtggagcaggattggtccaggatgaagctttcactgcccattcatgggaggagaaaaccctggaaaatgaaggcaaggaaaatggccagctgcctctgtttgaaaagggccatcctgcgcgctgagatcagaattctttgattacttcgtttgtattaaaatgtccctttttaccagcctggccaacatggtgaaaccctatctctactaaaaatacaaaaattagctgcgcgtggtggcacacacctgtaatcccagctactcgggatgctgaggcacgagaattgcttgaacctgggagggggaggttgtggtgagctgagatcatgccactgcactccagcctgggcaacagagtgagactctgtctcaaaaaacaaaaaataaaataaagtaaaataaaataaaataaaataaaataaaatgtcttttttttaaagtagaaaatgatgttgatagtaaatgatattttcttttttatttaaaaataaagttgtatttttctttctgtttttaaaaattttttactcatcaatataattgaaaactgtctagaaaccacatctgtagaggtagggaaacagagaagtaagttgtaatcaagaacaacaaggtctccaatctgagctttgtagaacaaactccagcatggggaagaaggcaggaactcagttgtcagaggccacacagggtggcccagctctcagaagcaagggtgggcccagggatgaggacagaggttcaaggaagtataggcacaactgtgaccctgtgaacccctccttccccgggtcagggctggtcctggagctgaggatggagctgagcctccagccgggcagtgggggagggtgtctcagtcacagaaagaggaagacccaggaacaggaggcagacaggtcaccactgagaacaagagaggcctggacaggcagattctgcaagtgtggctcaaggcatgcagctgcctctattccccatttttggctcagatgaccccttcccataagcaaccatgtgtgtgggcatttctctggccttagcagaaccagtggcctagggcaaggcctcttacaagagacaaagtcactgggagtaggggatagggggctggggggtggccaaagagtcacattctggcacgtggagcttgaggtatctcgtctctggaacatacaaggaaagaggttctataggtcattgaattcatagctcttaggtttgggggaagaacacttacttaggaaaacctttaggtaaaacctgagagagcctgcaaacttgaaagcagagcacgtagaccgggatgagaagaggagccctggagacccctgaggacactggtgcctaagggcctggctgaggtgctcgggaggccaggaggggaacagagaagggaaagtcagagcgggaaggagaaagcagagtgtggtgggaggcataaaaatggagagacttttaaggctctaggagtggccatggtgctggtgttgtgtctgagaggtcaaggcaggggtgaatccatctggttatgtgatgtggagctcctctgtgatgctggcggaagaccattctaaagccaggtcataataaatagagagaggagtgaataggaaatgggaatatgaagacagctttttggaaaagcttgattagaaagaggagaaagagatggtatggaagcctaaggtggatacttgattggggtgagggaagggggagtttttttttttaagatgaaagacagttggttatgttttcaggtcctaggaaacataccagaaattaacgagatacaagaaaaacagggagtctattaatggggtgaggaatgtgagagggatagacgctggctcatacttggtggcagtgtaggaaagttgagaaacagtgactgggaaacagggattctctgaagctgggtttattaattccaaattgccaagtgtctgttgttggggacatttctgacattgtgaatgtgtgatcatgtgatcccaggttacatccaatctaaccagcaaacaaatgtctgtcataagaacaaatgattgactgctgcctaacaaaccacctcccaagcttaatggctgaaaacaacaaccatttattatttgtcaccattctgtgggttggctaggctcacctgggtggttcttctgctccacaaagcaggtgaggtcattcatgtggctgcatttagctgggagcttgacgagggtggagtgagagagggcttcactggcttattcccctccacatggcttcccatcctccagggtttctgtctccacatggcctctacagtaggagagcctggactgctttacaccatggctgacttctaagagagcaaaagaagctgcaaggcctcttaaggcctagtctcagaaatcatatagcttcacccccactgccttctactggccaaaggaagtcacaaggaggcccagacccaaggggaggggaaagagattccacatccttataggaggagctgcaaagtcagaaggtggaggagcatgcaggatgagagggactgtggtcaccaagtttggaaacacctgagcagagtacatctcaggagtcactgttctagctgaaacttcattctcaaacatagggaagcatttcagatgcaatttgcagtaaacatatcttatgctttttaaactgctaagtgaatgtgaattagatggaaaaaatcattttaaatgaacattataattatgcttttattacataaatgtgcatttgtggtaaaattacaaacagtgttttacaaaaaggaaaaacggaagtcaattgaaattccactccctaaatgacatgcgcagcaggcatataaccccgcaggctcttggacttacaaacagaaactcaatctgtaattctttcagccagaaatcccttttctgacaaattaattcttaaaagatatatagtcctctttgaataatcattgaaaatcattaagtggaacttgagacgttatgggaaaaggaaaagttgttgagtttaaaccttattttctggatgtctagtatatgtctgggagtatggtaagctttgaggattcaaaactgcacaaaacctacctcacctctgctctcaagctgcttatgggacaataggagagacagacacacaaaaagagaatttcagttaattgcggtgggagctacagcagaggggtgcactgaatgccagaggagaggaaagggaagaggaaggggagggaataggaaggggagggaagaggaaggggagggacgaggaggcaagaggagagagagagcaagtttcttgcctgcacctaaggagagggtcaatacaccagggcaagagggaaaaagggaaaacatgaaggaacacaggcagatggaaaaagaaatttatgaaagaagagtctttgatgctacattatgtcccaggtttggttttgtttttaaaatttccatattcaaatttttttcctttctaaaaacttgttttatttttaagta

SEQ ID NO: 1888565 - DNA, 4001 bp, Homo sapiens
aaaaaagagatttaaataagctgcttgcaaacagttcaccggttatgaagactcaaaaccacagttggcatcagttcattggtggagacgctgtgcctaggcaggtgttctttcaaaagcatcttatctaaattgttgtgattccaaaacaggaatgtcttgcagggctatttcgaaaagtcccgagacagccaaccctttttaaaaatatagatggggtcttgctatatcactcaggctagtcttcaattcctggcctcaggggatcctccaaccttggcctcccaaagtgctgggattacaggggtgagccaccacacccagcttcctgagacagcttttatctcagccatgtaagcatgagcccttccctttcataccctcagggttttactttgggtcaacaaatagtgagtttattttggtatgtgcaactttcaaacacccatcgccataaaagaaaggaccagccttggccaggcacagtggctgatgcctgcaatcccagcactttgggaggccgaggtgggcggatcatgaggtcaggagatcaagaccatcctggctaacacggtgaaaccctgtctctattaaaaacaaaaaaattagccaggcatggtagcgggcacctgtagtcccagctacttgggaggctgaggcgagagaatggcatgaacccgggaggcggagcttgcagtgagccgagatcgcgccactgcactccagcctgggcaagagcgagactccgtctcaaaaaaaaaaataaataaataaaggaccagcctcgactgacagtcggcactccgcaggcatcctccacaatcctctctcctctctgcctcttgccctacaacctggccatgccatgattcctccctacctgtcctcctctgtggacttcatgaccacgctctgtcctatgaggctggaccagggtcatgttcactcacttctctcccctccctgccatttgttccactccccaacttgttctccacgcatcgatctcaatggagcaacagcaatcagatgatgaaaataaataatggtggccagtcttcaaatggatccccttttcaatcccgcactatccatctgctgccttctcatcagccctctgccccagtttctttcccttctcaaactggacaagcaccgtactccgtgaagatgtgtgcagcctgttcccatgccctgaacaccatcccttcaagctcctctggctgctccctgctcaggtctcagaaaaggagagctgggcaaccctcccagggagccgcccgcctgtgtaactttcagtaccagcctgtttgctttcttgagataattagctacaacggccactttaaaacaatggtcttcttattttgttttttgttttcaccctaaactttataaagtcagaaatcgtaagtccttgagcatccacagccactcaaggacgaacctttgctgaatgcctcaagcagagagggggaggctgagtctctgtttcgaaggtgaaaacacaacggtttttatcagccctgttttatgcgacaatcccaggtcgaatctggatcaatgcaatgacttcctttgcatggacctatgttttgttcgtgcattcatctgtgcagctgggaacccgcagctctgttcactggcatggggatgcctcggggaatggcagggcagagccacaaaaagccagcctcaccacgcggcctgttgctcttagccaccatgcccatcatagcctgtggcaggagatgttggggtccccccccccgacccctttcaggaaaacagagtttgtggaggcggagtacttcccaggcctgactgataaaacaattcaaaagactcaaagagattcctcgcctgtcccgtcccttgaagggccttgaacacggggtccttccgcttggctcctagcccgtccctctccccttaccaggaaaggatcctccccatctctgcagaagcctgaccatccccctagagggcctgggaggaagtgggttttgcatacagtccctgttgactctagtgccccctgctggccccagacgcgagttccggcgaggcttcagggtacagctcccccgcagccagaagccgggcctgcagcgcctcagcaccgctccgggacaccccacccgcttcccaggcgtgacctgtcaacaggtctgtattggcgacaaaaggagcagccctgaatgtagggaaagcagggcggagtcctctgcaggctcgggggaggggaggggcgtgaatgcgtggatttctgtggagagtggaaacacggggagtcgaggggagcatgcgcgggcctcagaaagttctgggaaaccgactcccgggagcagggaggaacgcgcgctccagagagtaagttaattgaatcccggggggtggtctcttcagcccggggggttacagaagtaggtaaatccagagattacccagccaaggccaggggcatcttttctagacttgcggggcggggtggggcgagaacttgagctcaggggaccctggaaccggcccctgcaccccgcatcccactgaagaaaagggaggtcgccagaagcacagacccaggacagagtccagacttggacgtctccgtgatcccagaacaccccgtcccacactcccagtcagccccccgcctccccactgcctctccattcgcccaccgcaccccctttttccaccctgcccccaccctactgtctggtgggaaaggccgcagccatcacgtattcacccatccccacccctcaccccccaccttctgactttctttccacatccccaccccctcccccactctctgcctcttttccctccccctccccaaccctttgtttttcttacacatccccacccctcccccaacctctgtcttctctcatccccacccccaccctgtttcccttcccccattcccgccctggcccgccttctgtctcccttcccccatccccacccctcccccccttctgtctcccttcccccatccccacccctcccccgccttgtctaccttccgccatcctcacccctcccccaccctgtctcccttcccccaccccacccctcccccaccctctgtctccgttcctaatccccacgcctccaccactctttgtttcccttcccccatcccgaccccccaccccaccctgtgttccttcctccatccccccccactgtctttcttctcggttccccaccctgtctcccttcccgcatgcccacccctcccccaccctgtctcccttcccccatgcccacccctcccccaccctgtctccctttccccatgcccacccctcccccaccctgtcttccttcccccatgcccacccctcccccaccctgtcttccttcccccattcctaaccctcctcccgcccccccttccccacccccatctcccctccttccccacccccatctcctccccacccccagcctcctctgctctccaacttcctctccccttttcccctcctcctgctcccttctcctctgctcctccccccactgcccctcccccactgcccctcctcctcccagtctttgaaaacaagcccctctcgactctctgggcgacctcactggatctcgtgagattttgccctggaaggactgagaaacggggattggtcagaccaggctgcccagccccccggtccccaccgccgccccccccgccccacgcagcggctagggcgcttagctgagccattgtctcgttctttccttccagcaacttcgcggtgtggtgaactctctgaggaaaaacgtaagttcgagccctgattcctccgcttccccgcagggtgaccttgggcttgtgcccccagcaccacccctgtcccgggtccctgttttctctctggaaatgggttgaagaccaaagaaaataatgtgcgccacttgggtcaccccgggccgcctgccccggaaaattggccccagttgaggagttgtggctgtaaggatgc

SEQ ID NO: 1888566 - DNA, 4001 bp, Homo sapiens
atatggaaacagcacggaagtcaccccctctcatcgtcacatcagggaaaacactgaacagactgaacctcaatgactttacctagatccatcagctaattgagatcacagagcaaaccagcctctctgaagtttgtagagaaaggtgaagacagagaatcatagccacgattagtttacctgagactaaaaccactggtgcctgtaactggtagagccactttaacactaattttgacaaattgccagaggctgagtgtggactagcctgagagttaaaacctcttggggcccagtcttagggggactgcaacaggctcatgtatttcacctgctgaaaccccagcaggttcttgccataaagatcagagaaaagtgttttagaaaggggaggggaaaagaaccattttgaaagatgaccagaaaattctccttaacaaagccgtgacttccaacagtttccccttgtctgacctggaggaagagcgactggcctgctcaagccccctgtagctttcctgtctcatgtaaggagagacaaaaagccgccaaaatttcctttgccttaaagatcagagaaaagtgttttagaaaggggaaagctttaaagtggccctgctgttacaggcgccagcggttttagtctcaggtaaaccagtcttggtcatgattctctgtcttcacctttcggccgggcgtggtggctcatgcctgtaatcccaggactttaggagaccgagatgggcagatcacaaggtcaagagatagagaccatcctggccaagacagtgaaaccccgtctctactaaaaatacagaacttagctgggcatggtggcatgagcctgtagtcccagctactcatgaggctgaggcaggagaatcgcttgaaccagggagtcggagattgcactgagccaagatcgcaccactgcactccagcctggcgacagagtgggactccattccaaaaaaaaaaaaaaaaattacagaatcttccccttaccaccacgtcaatagggttccaggatagtaacagtggattacaacccagacagctgtaagacacaggttcttatataagaagttcataggaaaccccgaagaaaatggggaaaaacacaagaaaactaaagcccctgggatatacaacgacagcaatcattacacgcagtctaactcctggccagattaatataaaacctcacaccaaaagcctaattgcctccgtttttattacctgatgcatcatgtctggcttctaacaaaaaattaaaaggcaagagaaaaacacagaacaaggctcagatataacaaagatttgaaaattatccaaaaaggaacttaaaatatctgtgagtcattgttatgggctctaatgaaaaaagtaaatgacatgtaaatgtaagcagagagatgaaaactttaaaagaatcaaaaggaaatgctagatatcaaatgcctcaagactcatctgcgattccatcctcagccttgtcacccctcggtccccaccccaccatggtgcttgctgtgtgttttcttgaccttgctgttcacctaaccccctggaaggtgctgtcccaacctcacctgtgtcccctttctgggctgcttacctagaccacttggcctgggctggctgtgcccagggggaggctgggaacatcggccggctacgccctgaggtagctcagatgccagtgtcccacggtgaggacacctccgaggccggctccgtgtcatctgctggatggggctgaaccccagttgtccttcatgggaatcttctcctgaaccttgctgtgtgggctgctttctcttccttccaccagagcttcctggatgaagcccagcataaatgtcttgtgcttatccccattctggaggcttccaagcaagcgtaaactctgaaagggcaggggccgtgagtgctgactgcttctctggtcaccgtctcacggcctgccacagacctgtgcaggataaggtggctacatgaataaccaaaggaaggcgtggctgctggagtgaagttgtaatgcacacctacgtgttccaggaagaggaagtttagagttcacaaacacatcttagtgtttagacttacttctgaatgtaaaggcccctagcacaacagaaagggcatttaaggagagaaagcttaggaactctgacacctaggaacttgctctgagatttcaccactcctgtgtcctttcgttaatctgccagatgttcctgatcagccaatgtttggaagaagggtagttactggtctgcagcagggcactggggcaggacgcgaggaggaaggcactgctttgggcccgggcaagggccaactatatgtgaccccaggagctccccttttccaccccaggggccccacctttgtgtccagaggcccctctacctaactgtgtcctgcattcgtgggttcttggtctcactgacttcaagaacgaagccacggacccttgcagtgagtgttacagctcttaaggtggtgcgtctggagtttgttccttctgatgttcggacgtgttcggagtttcttccttctgtgtgggttcgtggtctagctggctcaggagtgaagctacagaccttcgcggtgagtgttacagctcttaagacggcgcatctggagttgttcatccctcccggtgggctcgtggtctcgctggcttcaggagtgaagctgcaaaccttagcggtaagtgttacagctcataaaagcagtgtggacccaaagagttagcaatagcaacatttattgcaaagagcaaaagaacaaagcttctacagcgtgaaaagggatcccagcaggttgccgctgctagcttgggcagcctgcttttattcacttatctggccccacccacatcctgctgattggtagacccgagtggtctgttttgacagggcgctgattggtgcgtttacaatccctgagctagacccaaaggttctccaaggccccaccagaatagctagatacagagtgtggactggtgcattcacaaaccctgagctagacacagggtgctgattggtgcatttacaatcccttagctagacataaaggttctgcaagtccccaccagactcaggagcccagctggcttcatccagtggattccgcaccggggctgcaggtggagctgcctgctagtcccgcgccgtgcgccggcactcctcagcccttgggcggtggatgggactgggcgccgtggagcagggggcggcgctcgtcggggaggcttgggccgcacaggagcccatggagggggtgggaggctcaggcatggcgggctgcaggtcccgagccctgccccgcgggaaggcagctaaggcccggcgagaaatggagcgcagcgccagtgggccggcactgctgggggacccagtacaccctccgcagccactggcccgggtgctaagcgcctcactgcgcggggccggcagggctggccgtctgctccgagtgcgcggcccgccaagcccacgcccacccggaactccagctggcccgcaagggccgcgcgcagcccgggttcccgctcgcgcctctccctccacacctccctgcaagctgagggagccggctccggcctcgaccagcccagaaaggggctcccacagtgcagcggtgggctgaagggctcctcaagtgtcaccaaagtgggagcccaggcagaggaggtgcccagagcgagcgagggctgtgaggactgccagcacgctgtcacctctcctaaccacctggactcaggtcagctcttcctttccctcctgtaaaattcatcatttgcatttacatgttgtttctagtgtttttgcaagaataacatttttatttttatgtggtatatagtaaagtccatcaatcgccccctttatggtgctttccttggatgttttgcatgggaacggcctcctgtcacgaggtcagaaaaacatcgatttccatttccccccagtcctgccgtggtttct

SEQ ID NO: 1888567 - DNA, 4001 bp, Homo sapiens
tcagatgagcggggcctggccgaggacagtgggtgttagggtctagtcgtacccccaacccctagtactccagccctgtaagggttaaaacccagggagctcacgtgacctagtgtaaaccatgaatcattcccattgctcccagtgctgagcctgctgcccaggacagggcagatgctgtgccccgggttgccatggcaactccgcctgtactgaaatacagccctccccagtccttcctgggggacctcagaggctgtctcacctggatcagtgttgccttccagagagggagggagagacagctgaaaaggagagagagaggagagacgcttagagacaagcaagtggaagttgagacacagggagagggaggagagcgaggctgagaaatcaacagagaaacagaccacgagagggagacagactgacagccgaccagaggtcccaagacgctgcctgtaaccttagaggcagaagccgtttcccagcagtgctaaccttcccggggctgccagatcgccgacatacacgcacacacacacagagtgcacacacatgcacacacgtgcagccgcatttcctggtgcgcttgctgtgagggcacaggggtgggtaggctggcaggcacgtgaagttgccatcagccccgagggaccgtgagcgagttgggacttgggggagaaaaaaatgggggcggacgtcagctccctgggcggccgccgccaccgcctccgcctccccgaggcccctcctgcattcctgggcagcgaagcccctcgctaagacgggggctgatgtcatcccgggctgctcagccaggggacccgggggccctggtggctgcctccggaagtgagctagccgcctgccggccgacaggtttggaatctccagccagaggacagaaaacctgcatgggtcaggtgagcggggtctggccgagggcagccgggcagggggcagcagggtgcggcagcttgcccaccggaacctcccagggtgcacctcaggggggctgcctacctgaagggaagtgaggacgagggtgcccaaaggccgccccctccacccccacccccatccccatcccccgcctttcgggaccgtcacgccctggagtgagtgcagccggcttgttcctcaaagctccttgtctcggccgatcagctgggtgagccctggaactggaacctggactgcccagtgtgttgactttataactccgctggggtggactcccagcctggcacttagctgcctcttaattctgagcggcacccgtggatgcagccggctcctggctcagggatgtttacttacccttggtttgcctgaagaaagctgctgtttttaattttttttcctccaagcaagcccaaaacttccatgagcaaaagagtccaaagaggcaagaggacactggcgttttaattgctctctccctccctaacttccttcttccctctcctcctggctggccccatggattacctgggagataaactcacagtggcccagacccacatgacccagtggatgggcaccgtgaggaggtccttccaggaagccctcaatttggtgaccaccacggtgggccacgaacggacgagtgcagagtcggccagccggacccccttcaagcgtacttcctccttccgacacctggcttcccggagtcgggaatccttccgccgcttctctgctcgcagccaacagagattttcttcactgaggaaaaggcatacagattcggaaccgccagatattgtaagcttattatgttttaaaaaatattaaaacaacactgaaagctcctcccctccagtcctcccagggagggggtcccagacatcaaaccggggaagttacttcttccagaatagttgtcagtcaaagcccaggcacttcctgtcccctgtacctgggaaagaggcacgtagcaataattcctctctcctgaagtcagtcaggacatttttgctggagtcgacgtctgtgtggacagggccagcacgtgagttgggctgaatttgccagttgatttatgtttaagtgtgaacaccccaacccccgacacgaaagctcatccttctccctatttttagggtggattagtggcacctgcctcatctcctctcaccctcctaggaagcacaagtggcggtgtcatgtgcacgctgagttgtagcttttgtcgttccaccgagctttcattggattgccaaggaaagggtcttaggagaccgaggtgtggtgggcgagtttgcccgctggccgtgaaccttgggtttggtgtgagtgggccagggagggaggccttgatttcttactcaggcaggctcgggagggcttggattgggacagcagggtggaatgacagctaatgattaaaaccttggcctgtgtcctgctaggcgacagtgcagaaacaatcgtaaggtccttctgatgatttggagaggtgggactgggcccagaaagcgaaagtgcctactgtgggggaagcacagtgagtgagtggcagagccaggtcccgaaccccaggctctgacctccccattcacggctctttgcagtccagctcccagcagatgttctccccagaccctcccaattaattcagggctgcccaggtcactgaccagacctgagcctaaagagagggcctgccattttcacataggagacttctgccacctgactgtgttggcccagtttatgggagcacttgaggacaggcgaagggctaagccagcccctttttctgggttcctcctagccaggagtgctatagtcattaagggacccagcatttagggaggagccctgagctggccctccctacactcgaggtggcagggctcacagctgccctgccaggtgcaggggctcagtatcccctctgctgacccagaggtgtgactcaccccaggtcacgcagcagccagagcaggcagttgcaaatgcaaggcaggagccgagcacttgggcatgacacgtgtctcgttcacaggacgtctccttcacagtgggtctgtgcttctttgtggcccagaacaaattagtggggcttggatttatgagacagattccccaacctctggaaggtgtgacttgccacagggaaagaaggcccctcattcattctgtctccctctgtgtgtatctctgtctctgtgatgtgtctttctgccttgctctgtctctgtttgtttctctgtcactcctgttctctctcagggtatggggttggtgacaggcaggctctgttggcatccctctttccccaccctggggagtggtgtgaccatgggcattggcatgaatcccctaggcgtcttaccctgtgttacaggttggtgccactggcaggagtggcctctccagctggttgaataaatgaagttgggtggtgcagagaaccattccgtgttgcgtcgagatgccaccaagagtgtaaatacatgctaaatacattcaagcttcaggctccttcccatgtagccaccctactgggtggtaggcaccagctggccttggccttgacagcttgaatcagactcctggctgaggagccctgacccattcttaagcctcagtttcttcctgtgtccaatgaggagaaccaaggccttggtatgagattgaagcaagcccccagcacagtgccaggcacacagaatctgcacacttgtgaatgctctctctctgttgcttgcctagatactctgcctgagcaggataaaggcagagttaggataggaacatgtgcagtgttgcagataagtcaacgaaacgcaaggccagggaccccctgcctaggggttgagtcctggctctgccgcttcccagctgtgtgatcttggacagactccttccctctctgtgccttgatttcctcctctgtgaaatggggatgatcgtgcattgatgtgctggtaaatgtgtggtgagcgtggccgttcttagcttgtggtgcttaaaaattagttcttgtg

SEQ ID NO: 1888568 - DNA, 4001 bp, Homo sapiens
tgggggtacctgatttgcagcaaacctcctgcccctggaacagcagtgcagacgatcagcagcagccactacgtcctttgggcagggaggcaggagtgtggcgcactgccagatgagaaattgcatccctagcgcacggcagggctaattagctgctaagggggctttgtcaatgttcactgagaatgtggtcatgacaggcaggtagcgattcctgcttggcctgacttgagtgtggaaggctctctgctgtcagcactggctgcttttggaggtgggtccaccgctgggcacacacaggtatgtgcagtggtactgtctgtgcaggacgtagctgagcctgaaggaagagggacagactggcaggaaacctgacagggagctgagtggagtgaggcagatgtgtgtacataaacacacctgtcatggggaatataaggtggtaaagaactaagaaagataaccagaacagaaaggaaagatgctactgcgtctcccaggaagcagcgtctcaggcaagtcagccaacctctctgggccagggtgctgtgtccaaggtacccagggcagagagtgcattgaaacacttcggagaagtggcctgtgcaggccaccaggtcaggactgtgaagaaaagagccagtgctctcaacgggggcacttttaccccccaggggacatgtggtaacatctggagacatttttggtggtctcatctgaaggagtgctagtggcatttagtaggtggaagctagggatgttgctaaacgtactataatgcacagggcagccccatccccaacagaggattctgcagctccaaagcatcaccattgccaagaccctgagctcaaggaacagactcagacctgcattctctgtgacgtgggatctggggagagttgtgtgcctcctcatctgaaagatggggataatgaaccttagccaggctgggcgtggtggctcatgcctgtaatcccagcagtttgggaggccaaggcaggcagatcacctgaggccgggagttcaagatcagcctgaccaacatagtgaaaccctgtctctactaaaaatacaaaaattagccgggcgtggtggcgcgtgcctgtaatctcagctactcaggaggctgaggccagagaatcacttaaacccaggaggtggaggttgtagcgagctgagatgacgccactgcactccagcctgatcgacagagcaagacattgtctcaaaaaaaaaacaaaacaattacttgcgcttctcatcatacaaccttatgagacccactcccccaatacacaggaaaactgttacctttctaaagggctctttgttgagcttttcttagtttgaaaccttcatgttactaaagcatctagcatggtgactggcatatagtaggtgctcaataaatatgaaaaagagaaaagcaatacagtagtaaacaaaaacaaaacaaaaaaatagcctggccgggtacggtggcctgtaatcccagcactttgggaggccaaggcgggcggatcacaaggtcaggagatcaagaccaacctggctaacatggtgaaaccctgtctctaataaaaatataaaaaaattagccaggcatggtggtgggcacctgtagtcatagctgctcaggaggctgaggcagaagaatggcgtgaacccgggaggcggagcttgcagtgagccaagatcgctgtcactgcactccagcctgggcaacagggtgagactctgtctcagaaaaaaaaaagaaaaaaaaaaaagaaatagcccactttcccctctttggccagtttcttccatatctctgggtctcattttttgcctagcctttctataaagttctacacaggcagagggtagtgatgttaacagaggctatcttgaaagccctcgaggggtcagggataagattaaggacaggtagctaaggagatgggaagttttgccaaatcccaaggggcaggctcccagatccatccagaagtcctgtgcttactgcccttgtggggcagaagcaagcgtggcggccgcaccaggggctcagctcactgggaggttaggtttcccaaagagctgcaccagctgtgaacacttaccctacagaagctgactcagaaagacagcagcttggtggtggtgtggggtgggaggggggtgcagtgaagccagaccccagccccgagagtgctgccttatcctgttcctcctagagcccttccaatgtaaccagccttgcagaagctgctgtgcagggaccaagggcatgatccacccttgaacttgccatccaactgggagggccagatgtacccttgagatttgatgagtaagagactgcttcacaaagtatgtgcaagtgctggaacagagggcaggcgtactcacagctgagaagccaagaggcagaacagagtgggccggtgcctaggcagacaggcaaacatgaagagctgcattttgtgagttcaaaatccttgccatctcggactacagtttctgtctcaagccttttggagcggggggtgccgacaccatcttgtccacactgctataaggacgaggacacaggccagcagggagaggcaccctgcctgggcactcctgccttgtggctggccctcttcccactatgccaacttgcttcctaacatatggtctccccatcatttctaccaagaaagtgtgaaaaacgccatcttggcacatggagaaactgaggcagaaaggaaggcctggctcaaggctgtggtgacttggagattccaatcagggatcctcccagattagatgtcagggcaggggagggacctgggtgtgctttgggcctagaggaggtaaagggacaaagcagggcctgctcttctggcaggggaggcacagatgcccttggctgacttgcttggaggccggtcccttccccaggctgcctccctaatccccagagacacccaccctccacaccagagagtgatctctttgccgcgttgcagtttacacatttcatgtcccataccttcaaggtgtccgcctcgagctgaggtgtaacacccccacatcccacctcccccctctctcccttccctcccctccagaatgagctcatgccacactgcctggtcttggtgcctaaggaaacacttcccagaagcatttcaccttcataaaagctcagggaggtgggccagagtcccttctccacacgccctagaagccagccttgggattaacagagaagaccctggggacaggctcacccttcctttcccttcccctccccactgccagagagattgcatctcctcaatggccgccacatgtggtccccacttcctgcttcctcagaagcaatgcctggctcccacagcccagccagagcagccccttttcttgctctcacatcagctgccttgcagacatctgtacccctcccccaggtgctggtagtgtcctagggttttttagaaggaaagaaagaggatgagagtttggttcagaggtcagagggcaagaaagtccgctgcatggctcttccacagggcttggatcccccatcgccctgccggcagggccggctcacagagtctgcagtttggcaatttctcccaggtccattcacaaactctcctcggccctctccagtcacccaagtggggaaggcagaatggaattgcttactgggcctcccagctcagcctcatggccattaggctgacctgctctggcgaggcacaggctcctaaaaatggcctgactctcgcaggaggcaaaggccagtctggccaaagtgtaacctggaagccctggttggtgaaggggtccgaggaccccgttagagttgagggagaaaaggcaaatgctcctgtcctcagggcccagcctcccacacccccaatcccctctcagccaagctccctccctgccttgggctgtaaaccaaagtttactgactgagggaaggagcagtcccaggtaaaggccctgtaaggacc

SEQ ID NO: 1888569 - DNA, 4001 bp, Homo sapiens
agaaatgcactctgatgttcgtttttaacgatcttgctacttctggctgctgggcacaggtcggggtggaggatggccagagctgaagcaggcaggccagttaagaggatgctacagtgattcaggcaaggggcaaaatggctgcatagaaaggcagagaagtggctctggcctacacagagaccacaggaaggggtctactcaatgtgtcctgcccatgacagcagtaagccccttcccagaaccctctcccatgttctcacctcccctgcccccagctgcgtaccttggttccttttgattccttctctccaccaaagtccttcctcctcttgcatccagtcgtcagcacgggtcgtgagtccccagctctatctggttctgcggctgacccagtggggaattaggtcctcagggaaaggggagcggaggagcagagtccctcatggggtctagtccaatcgagttacttttataaaagacagccagaccattcacgctgcaaagattcacctccggctgtttttcagcctgtagcttattgtgctaagagtgtctgttcccttctcagccttgagtcgctttacaaaagccacccttctattacctaggcctgggtgatgctagggtccaggacagcatggagcgttgtaagcgaaggaaaaggcaagaagccgcacagcgggaaaagagatttgcaacaggactcttaattacaaatcaatgagagaaacggagataacctcatggaaaaatggaccaatggcccgaataggcatttcacaaaagaggacaatcaaatggcccataaagttatgaaaaagtgctcagcttcatcatcagggaaatgcgaattaaaatcacagtgattagcaatttacacacccaccagagggactaaagcgcaaaagctacaacccagccaggcttggccaggaggcagcagcccaggcggaactttcatctctggtggatggcagcgtaaacccgtgcaagcactttgggaactcgaatggtatctaggaaagaggaacacacatttgccctatgactgagcgattcattcctaggtttacactcaacaggagtgagtacatatgcccaagaaaagacgtgtgaaagaatgctcataccagctttcttcatcatcttgccaaacgggaaacgacccaaatgtccatcaacggttgaatgcataaatccattgtggtgtatttcacagcaatgaaaatgatccaaccgctgctccgatccacatgaatgaatcatgacacgttgctgagggaaagacgccagtctcaagcgaggacgtcgggcagaattcggttcatgtggagcccaaagcaggttggaagtcaggacagcagttcccctcgcagccctcgagggagaggctggcaggactgcaaagggcctcatggagcagtggccatgttcttcatcttcatcaggaggccatgccatgggtgtgttcactttgtgaaatatctattgttttgataggcatgctttctgtgtgtgtgtgtatacacgtatatattcacttcagttataattaacttcacaaataataaaacactgcagaaggtatttagagtaaaaggaatgaccactccctaccccacatgacttaggtatgtgaccttccatacctttttctatgcgattctatggcttagttgggtgtgtaaaaagaaaaaaagaaacacacacacacacaaccccatccgcagtaacaaccccagacattgccaaatgtcccctgggggtagggttgccagagtaaatacaggacgtacaaatgagatcctaccatatcttatggggttcttatggggtttttgctatctttcatttaatacaggggttctcacccttgttacaactgacattttaggctggataatttttttttttttttttggcctcagctgtcctatgcattgtgaaatgtttaaaagcacccccggtgccttcccaccagatgctggtagcacctaaccatccccagtgacaaccaaaactgcctccagacattgccaaatgtcccctgggggtaaggttgccacagtaaatacaggacatctagttaacatgcacggtctgaaattcagcttgaactggctgccctgcatttttatttccttaacctggcaacctacctagggagcaaaattacccctggttgagaacagatgacatctctcgtcgctggttccttttcaggacgggaggataccccctctttcttttcggcgctctgctgtgttccatgatggggacaagccatagcctgtcagtctgtcccttgggatggaccaggtgcttgctagccagtgggaggttttctgccgcaagtgacagaaatccctgctcagtctcacgtgggccacaagcccatccacagtgctgcctggcagggagcagggtgagcactggccgtttgcctgttctgctcttccccacctcgagtcagcctcataggtcggcctcagcatccaggctggccgggcccgaggccacctgcgggccctccctgatgtctcattggctgagactggtcacagcccacacctgacctgtcactggcagagggtgcgctcgccctgagacccatcaggagcacctgccgtggtggcgaggtggaggtggtgctggcgtcctaggcttcctctcattgtcaagtcccttctcagacctcacctctgcagcggggccatccctgagcacccatcgattgtggccttgtctccccacccaaagggctcccttcccaagtgttgccaggagccccagcagacatcttctacactcaagtatcagctcctggagggcccaactcctggtgactgctgtggtctcaggccttctgagtgcagtccgtggccgggggagcctctccactcacaccgagtgaactcagcaagagaggttgcctttgtgctccgcagagtgcagtccagtcccatatccacagccatgaaacccaaatgctcccagaaccatacgtcttttcttctacctatttgccagcaaacctgacccaaattgacgtgagagtgttcagcgtcttttgtttctcccacttgctgtgatatgtgtgcagcttgctgaagaaataatgtgtttcatcagggggttgtcttgggctgagttccccaaaagcaaagcctgagacaggacttgagtgcaggtgtttttttggaaggtgacaccagaatccaggagggagcaaccggggagagtgagacgggggttgggagaagataatacaagggtcgttacggaggtcactgcagagggcactgcaggagggggcggtcaacttctctaggacctcctgagcaatgtggggtgcttctctgaaggactagaggctgctgggcgcttacccacctgcccctgggctctaccagctgagggttacccgaagggccttcactccccagaattccccagttgcacttgaggtgggctgaacaccccagagggtctacagcatggggcagccccagaccccggggaagagtaacacaggatggggcatatgcgccaagttaccttccgaaaatctgaaacatgtttgaccccaagggattcagggtcctagaggtggaatttcagggttagagggggcaccttggggggagtcttgtatgtagtttgaaagttttgaaacatcaagagccctctgaaatggctgtctacgtttcacactcctggccaggcgtgaacgtctttcctctacacctgcgcacccacctcaggtacgtcagctaaatagtaatagtcacggcagacacttatgtgtgctctgcatggggcactgttctaaacactgatccctcacaatgactctgtggggtagtactgggtttgacactcattttttaggtgaggaaactgaggcacagaggattacacactttgtccacgttcccacagctggtaagtccagagcaggagggatgtgaaccacagcactacactgtctctaacaa

SEQ ID NO: 1888570 - DNA, 4001 bp, Homo sapiens
cactcgatgtgttcagcaatctaagtgggtcgtcgcctcattttgtacatgaaaaaccagcccaagttactgcccaaggtcacacggccattccctctgtcccttcctccctgactcatgccatgcttgtgtgaggggctgctgcgtgcctggctgggacctagtggaataagagagaaagcccttgctcccgtggagcaggcgagaggcgacacggatacaggctgagagtgagtgacccatggaggaaacaacagggagacgggcagggggcggtggggtgggggccagggaagggctctttccagagggggcatctgtgctaagacctgagggacaagaaggaactagccccgcaaacaacacaatcgggtgcttttccctttgatgtctgagcagcctggagtcgctccagacaggcccggctgcccccactgccactggcaggaacatcccgacacgggcatcgtggggagcctgctctgcagctccgctcctggctctgctgccagctcccagctcatgagagaatgagacgaccagaccaggacggtacaactcctagtgaggatggctcacgggtgctgcggcgccctcagaccacctgcccccgtcctgggacaacgggatttctgagggccaggacctccgtcaagccagcaacctagctgggttttgggagagactgatgtcttttttttttttcttgagacagggtctcgctctgtcgcccaggctctggagtgcagtggtgctatcttggctcactgcaagctccgcctcccaggttcacgctattctcctgcctcagcctccagagtagctgggactacaggtgcccaccaccacatccggctaactttttttatttttagtagagacagggtttcaccgtgttagccaggatggtctcgatctcctgacctcatgatctgcctgccttggcctctgaaagtgctgggattacaggcctgagccaccgcgcccggccgagactgatgtctttaaggaatgagtgggcaggaggtgggggatgggcttctctggttccatctgatcctgcctcagtgctttccccacggaggctatgggaggcagacaggctggagagggccactttggcccaccttgtgtcagacgccacctggggacgtggacggtggcagtgacccaccagggctgcacagcttcgcctcgctgtgccattcactttccttaccttgactcctggccccttaagtcctcaaacccattcccgagcttcccctcttagatgaaacagtgtccctctcaccttcatttccctccaggagacaggctcaagtgcagtaagtaacaccaaggctggggacaggggacataaagtcaacagtgcagcgcccggccccacacgcttagggcagagcaggtgctgggagagacctggggcccagagttgcatggtggccacttgtgaccaggactgtgcctgaacctgtctgtgcctcagttactcaccatgtctctctctctctctcgggtggcagggctgacaccaaagctccaggagtgttcaggggccatggtggtcctcaggacccctggcggctcggctggggaagctgagaaggacagatcctggaaggaagctccgcaggcacagcccctgcccagcagagtggagggggggacatccgggaccctctgaccacaccagacagagagtggctttgttcctaagcagatgcactgtttcggtttctgttgcagaggctcttcttagagggatgagttcttacgtcccagaaagcaggatgaagtgctctatggactggtatttatagaagatccttccccaaagcaaaacccagtaaagcaaactagctggcaagagggcaaggcctccgccctggtgacctgagcaccgggtggccacagcaccactcacacaccaagaccctaggctcactctcagcagagtggagttggcaccacaaccctgccactggccatgggccagagggcttggcctgcagcagggaaaactgtcacccccttcagatgtgcatgaacacatctgggtccgagagtgggcctgggaggtaacaggcaagccatgtttccccggggctgtgggggcggcagcatggaatgcagccagaaggcctgggttcaaatcccagccctgccacttagcagcctggcgagccgagttcttgaacctccagggcagtgaagaggggaggcgtccacttcccagggccactgcgagttacaggaaacatgagcaacagcgctattaatatcacaatgtgtaatgccaccatttattacttctttactacattaaaaaagtgaccctgtttctagagaccaaacagcaccacagaggcattcttggaagagaattccttttgttcccaagcctttgtgactgactttaaatcctctcacctgcagaacagagatggcttcaaagtggggagtgagggagtgagcgaggaccctgggctgagacctgtttttcttccatttctgctgtggcttcccacagctccctggttccacaccaggccctgctctgccgcaggaaaatggattcccaggccacagagctgtcaggcctttgacttcgcagagaccaagcaccccagaggctgtgcgacagcggctagtccctggtgggccggtctggggcatggggggcagggagactgggagatggggagggcgtggagaatccggggggtcctggatactgacaaaatggctcaggtctgagctctggctgccccactgattgtgtggcttggccaaggtgcaagtctctcggcctgcttcctctgaaacaggagtggcaatcctggccgacagccctggtggcaccccctccccactgaaggcagagaacatgtgggaaatagtctaactcaggccctgggctgggctggcccgacccttctcctatgcctcccagggtactgtgtctcaaagaacctcttccctcctggaaccattttccactcctctttctttcaaacaagtcccccagcctgactcacaacccctgcttgctaccctcagccggcagaggcccctcatcagtggtaaagacagttcatctcagctgcctgccagcctatggtcttcacagcaccagaaggaaaatgcaaggcaggcaccagctcaccctggctcaggcctgacgacagcggcccctgcctcagcccaccggggccagtcctcacctctcccgcacgcctggctctggggaagcccaggccgccatcctctggcagttccaggtctcttagaccacttccccctggctcctttccacctggcctgccccttctgtggccatcccaggccccagatgctgccctggtcctcctgaacgtttacaacagatgacacaaccaaggcaggtccaggggtggggcccagggacagatgcggacaccagcctgggttccactctggatgcaggagcacagggctgagaggctggagaagtggagggctactgtcccgaggtgagggaggtgatggtgggaggaggggtgggcttgggacagcagggtctgctgggcctgcaacactcagggttcacagggcgcctcttcctgctctgtaggaggctgctggggaggctcgggcggcttgcaggcccactgcggtttctatacctggccctctgctctgagaaagggcgatggtcctggctgaggccatctgggaggaagtggccttcagcttcccgggtggtgacaaggtatgaaccacaggtccagtctgcactcacacactctactgcccggagagccatgggacagagtctgctgtgggcagaggatggggcacctgctggccgttgtggcacaggcagatgttaggaaaaggctggaccctgtcctgccccatgccaggccctgcttgggctgcattctccggctgccctacggtgctgtcaccacgctctgctcgccatggtccacgctccagaggcggtaaaactcagc

SEQ ID NO: 1888571 - DNA, 4001 bp, Homo sapiens
tgatcccagctacctgaaaggctgaggcaggagaatcgcttgaaccagggaggtggaggttgtagtgagccaagattgcgccactgtataccagccttggtgatagagtgaaactccatctcaaaaaaaaagaaaatggggaggggtggcgtgggtcacactggcagagtctctagctgagtgtgcaccgtggggcctctctgccctggcctccactgaccagtgctcatgtaccactcccatctggaatggagttagtccccccagcctgcaggtgccttgtgtgaagcgtttccagccaggcagtctcacctcacttaccctgggctggttctgtgtcacctcatgcatgttgcctttggagtcattgccatatttgacctggtgacctgtataaaatgtcagcttccgaggggagaccactgtccacaataacaacaaggttgtacacataggcaggctggccttggggagcatttgctgggctgcgagagccacctggcaggcaggtgggctggagccaggtgggaggtgggcgggagccagcaggagtcgcgagggtggggccccctcaggccgcttctctgggtgatgtcatatttgccacacagcagcctggtggccctgcctgttgcctttgaaagagagcctgccgtgatcctggctgtttctgtctccaggtatgatgaagaattggcccagggtgacggggctgaccgggagctgagaagccgtcagggtcagtctctggggcccagagcaggccgatcgagagactcggggagagcggtcctcaccacctggaagtgagtcccacctggaccttatcaaaactactcactccacctgggcccctgctgaagccctattttgaaatttcccttttgtagagcttttttcctttcctaagccctgtaaataaacgaaggcacttctttggaaggttatggagtctgtttgactagtgctaaaggaaacaattcatgcggatgtataaaactcgctcttttttttttaatttttaacctaagcagaattttcatattaaaaactcacttttttgacagaaagtaacagcttcaagcatgtaatttgatgtgtcacaaggtttaaacattaaaaaaactttacactaaattaaaaacaaaacaaatcttatagactcgtcctgccacgagagaggaatgtatttaactgacggctcttttagttgcgtttctttttacttgactgcgattttttttttttttcccgagacagagttttgctctgtcgcccaggctggagtgcactggcacaatcttggctcactgcaacctctgcctcctgggtagtatttctcccacctcaggctcccaagtagctgggattacaggcgtgtgccaccacacctggctaatttttgtatttttagtagagatggggttttgaccatgttgggcaggctggtctcaaactcctgacctcaggtgatctgcccacctcggcctcccaaaatgctgggattacagaggtgagccaccacgcccagcttacttgactgtgattttgaagaaaacaggcaactagaaatattcctcggtaatttatctttacaaaggcctttgtctaggtgctcccaggaagacctgttttcttttcttttcttctcttttctttttttttttcttttcagacaggatctcgccctgtcacccaggctggagtgccgtggtgccattgtggctcaacttcctgggctcaagtgatccgctcacctcagcctcccgagtaactgggaccacacaggcacacaccaccacccccagctactttttaaagttttttttgtagagacagagtttcaccatgttggccaggctgttctcgaactcctgggctcaagcgatactcctgcctaagcttcccaaagtgttgggattacaggcatgagccaccacgcctggcttcaaaaagacctgtttctaccacttcggttttgtggatgagtctgttgtaaatggaactagatgagcacagacaggtccggctgtgtgccttttatgacgtcagcagctgggtttgctacagggaagcgccgtgggcagccaggagctgtgggaggagcgatggctgcgggacaggctgcgcgagcgtggttgttcccatgcagtctcccggtagcccggtgacttacaggagtgtatggagaggacctgagttggtgggtagatggacagatgcatttgagtaataactcatgagttacagtgctgttcttaggaagggtctttttttttttttttttttttgaggtggagtttcactcttgacacccaggctggagtgcaatggcacaatctaggctcactgcaacctccacctcctgggttcaggcgattctcatggctcagcctcccaaagaggtgggcttacaggcgcctgccaccacgcccaactaatttttgtatttttagtggagacggggtttcaccatgttggccaggctggtctcgaactcctgacctcaggtgatcctcccgcctccgcctcccaaagtgctgaaattacaggcgtgagccactgcgcccggccaggaagggccttttactcatggtcgtattaacacgtatttgctgaagtttcactcgctgtcttgagtttatctttaaagcttgccacctgtttttgttgcaatgctagtaacaggagtttgttctcccaaatggcaccaagggtatgtccttcagataagggtcttaactgacttgcccaggctctctcagtgcccatgcatggacgtgtgtcaagtgtacatgccatattgtgtgtgtgtatatgagtacatatatttaatgatgtttcactgccaattagggaaaaataggtcttttcaacacaaatggtacttggctggactccaaataaactacaattggtgggcttttcagccattccttcttcgtgatcttattggtatgtgtgttgtgtgtgttccctggtgtttaagttttgttttgttttgttttgtttttgagacagagtctcgctctgtcgcccagcaggctggagtgcagtggcgcaacctcagctcactgcaatctctgcctcccgggttgaagtgattctcgtgcctcagcttcccaagtagctgggattacaggtgtacaccaccatgcccggctaatttttgtatttttagtagagatggggcttcaccatgttggctaggctggtctcaaactcccagccttaggtgatccgcctgcctcagccttccagagtgctgggaatacaggtgtgagccactgcgcccagccgtggggtttagttttaatgtgtttgctgttgatggcgggtgtgggatggagatccccgagtcagacttggccttgtggcctggctctgctgtttattagctgtttcccaagcctgtccctggggtcgttgcacctttgtttcccactgtataaaatggggagttctgtggccgggcgcagtggctcatgcctgtaatcccagcactttgggaggccgaggagggtggatcatctgaggtcaggagttcgagaccagcttggccaacatggtgaaacctcatctctactaaaaatacaaaaattagcctggaggctgaggcaggagaatcgcttgaacccaggaggcggaggttgcggagagccgagatggcgccattacactcaagcctgggcaataagagcgaaactccgtctcaaaaaaaaaaagggggggagttctgtttgcctcagaaacaaccagtaccaccgcacagggaccctgcccgcacgccttgctggctctggcgagccctcttacctcccaggagggggtgtcctctgcacagctggcggctccacctcggctcctacacgcagaagtgaaagacaccccgttaactgttcccagctcttccaccggtttttacaacccggttctcagttacattgtgttgtttttgcctccctctgggagaagggtggagtccctggttgggaacgttg

SEQ ID NO: 1888572 - DNA, 4001 bp, Homo sapiens
ttaccaaagtgcaacgctactggggagcagaactcaagagtccaggcagaaaacagccattggtggcccctgctatgagtcgatgttccctgggaggctaaggcatgggctaatggaatgatgataacacagagacctttaactgagcatggactctgagccagggactggctctgtcatcgaagagagattacacacatgatctctcttcatactcacaacaatcccttaaggtaggagtgaggtccttttttttttttttttgagatggagttttattcttgttgcccaggcaggagtgcaatggcacaatcttggctcactgcaacctctgcctcccgggttcaagcgattctcctgcctcagcctcccgagtagctgggattacaggtgcgtgccaccacccctggctaattttcgtattattagtagaggcggagtttcactgtgttggccaggctggtctcaaactcctgacctcaggtgatctgcccgcctctgcctcccaaattgctgggattatcaccatgcccggctagttttgtacttttagtggagatggggtttctccatgttggtcaggctggtctcaaactcccgacctcaggtgatccgcccgcctcggcctcccaaagtgctgggattacaggcgtgagccaccgcgcccggctggggtggggtcctgtttacagatcaacattctgaggtgaaatattcaggctaagaccacaaaggtgttaagtggcacaggtgggatggcggccccagagctcctgccctcaccaccatgccagctttccaaaagtggtgtgtgtgggggaggtggagatggtgcaggttctaaattgtatatttaccagggattggctgtgcagactgacctccacggaactggaaaaggcaggtttggctgaaacggactcttatttaagaggcagatttaggggcgaggcctgactaacccctgcggctccactgcatacagctccctcacactgcatggtgttatcacgctgcaagctgttacctaggggagatgagcccgcagcagcagcttcaaaggtcatgaaatcagggagcccacaggccccacaagggtgcagaggccaatagggcaggcaagctttctgccttgttttcatggggctgggaatgggatgtttccattattggtgaacctcagattgtttttgagccccaactgctctagtcatttccttctcccttaaacccctaaaggcagcactctaccttctgccttccagagttgctgcatcgacatccatccccagccttggatgagtcctggggtgagctggtgtgctctctcctgagactgtctacgcagggccactgactgcattccttccttggtgtctctgtctactgtggtgggctgtaaccctcaccatcatccctttggagcctttgttttcatccaggtgcccacacctctaaatgcccctttattttactctctgctagacacatcttcctattacgtcccattctgctttaaaaacctttgagaagcccgctgggcggatgccacttgcccaatctcgttccctcgtctctcctcccaggcaggtgttttcagggaacttctccatccgctggaatcgggtcgtccctgagatggctcgcgaccccagggctgggtacatggatatttaggactataggtctggggctgctgcccgagccctttttgccaacatggcctgactcctccactggtttttagtgccttagggagaggcggatggccccatgggaagggcgctggacggagggtggaggcgaagctgcccactgcctgcctcagagctgagaaggccaggtgcaaagcccgccctgtagcttgagcccatcgcttgggggcaccgaagccatctaggtactaacgccctgcggtacagccggtgggattcccagcgacttccttaggagtccgcgctccatgggagtccccccgcaccgggtcgcctcgccctggcggctgcccgcgcctcctcccgcttcctccaggccacagggctcccgacccgactgtgacgcactgcacccccgccccttctcttcccgttgatccagcgcgccgcgctttctcctcctctggtctcgctgcttcctctccccctcgaatccagtcctggtttccccgccgccagcctccctccctcccggcgggactcgctccccgccccgccccgccccgcccccgcctcgcctgtcttcaccgcggtccgctcggttcaccgcctgccccctctccctgccgcccggcccggctcgcccagtccagtggctccagtccggatctcgccgccgcccggcccaggtgcgagtccccactgctggggaggcggcgggccccggctcccctcggccgcctagcccgcctcgcccgcccggggttggcggggagggaacagctgggcggccccagagcccctcggaggacaatgcgcccggcgctcggccaccctcgctcggtctcctccgcgtccggttccttcccgccgcccccggcagccgcccggctgcagcccctcttcctccgcgggggctccttccgcggccggagaggctccggcgacagcagcaccagcaccagcaccagccgcgggggaggcggcggcagacgcggcgggggcggcggctccccgagcagcagcacgggcgccgagcgcgaggacgacgacgagagcctcagcgtcagcaagccgctggtgcccaacgccgcgctcctggggccgccggctcaggtgggcgcccccgccggccccgcgcctgtcgccttctcctcctcagcggccacctcctcctccacctccacgcccacctcctcctgcagcatgacagccgcggacttcggcgggggcgccgcggccggggccgtcgggggccccgggagccgctcggcggggggcgcgggcggcaccgggaccggcagcggcgcctcctgctgcccgtgttgctgctgctgcggctgcccagaccgccccggccgcagaggtcggcgccgcggctgcgcccccagtcccaggtgccgctggggctaccaggcgctgtccgtggtgctgctgctggcgcagggcggcctgctggacctgtacctcatcgccgtcaccgacctgtactggtgctcctggatcgccactgacctggtggtggtggtgggctgggccatcttcttcgccaagaacagccggggccgtcggggcggcgcagccagcggcgcgcacaaccaccacctgcaccaccaccacgccgcgccgcccctgcatctgcccgccccctcggccgctaccgctggggccaaggcacgcggagcccgcgggggcgccggcggcgcggggggcggcctgggggcggccgcggcagcgggcgagttcgccttcgcctacctggcctggcttatctactccatcgccttcactcccaaggtggtgctgatcctgggcacgtccatcctagacctcatcgagctacgcgcgcccttcggcaccacgggcttccgtctcaccatggcgctgtcggtgcccctgctctacagcttggtgcgggccatcagcgaggcgggcgcgcccccgggatcggcaggacccctgctgctgcagccccagcggcaccgcgcggccggatgcttcctgggcacgtgcttggacctgctcgacagcttcacgctggtggagctgatgctggagggccgcgtgccgctgcccgcgcacctgcgctacctgcttatcgccgtctacttcctcaccctcgcctcgccggtgctctggctctacgagctcaacgccgcggccgcagcggctgcatcctggggccaggcctccgggcctggcagctgcagccgccttctgcgcctgctgggcggctgcctggtggacgtgcccttgctggcgctgcgctgcctcctggtggtcagctaccagcagcccctctccatcttcatgctcaagaacctcttcttcctcggctgccggggc

SEQ ID NO: 1888573 - DNA, 4001 bp, Homo sapiens
ctgggcaatttacttaacttcttggtatcccttttcctcatttgtgaaactttataacaattccctccacagaggtattgctctccattgaaaaccaaagcaccacccttggcccacagaagcccctaccgctcccactgtttcctggacccctcactctccttccgggaggaggctgggaagcctccccaaggagcagggatggatctgtcctcaaaccttccctaaatctgctctgtgccaggccctgagctagctccaagacttaaccctacacccaaagagttcccaaacagacaggcagaagcaaccattagaatcaagtgtctggccaggcacggtgtctcatgcctataatcccagcactgggagcctgaggcaggaggatcacttgagcccaggagttctagaccagcctggacaacatagtgagaccctgtctctacaaaaaaaaaaattttaattaactgggtgtagtggcgtgtgcctgtagtctcagcaactaggaaggctgaggcaggaggatcgcttgagcccaggagttggaggcttcagtgagcagtgatcatgccactgcactccagcctgggtgacggtgtaagaccctgtctcaaaaacaaaaaaaatcaagtgtcattgcactgggagcccatattagccaagttaggggtggccatataacctagactcatggtatggggtgggtggttaagaacggcttcctggagaaggtgatatttaagggaagtctttcaggagctgacctgaaggtgaattttgtttatttttatttattttatttattttttattttttgtttatttttttttgagatggagtctcgctctgttgcccaggctggagtgcattggcacgatctcaggtcgctgcaagctccgcctcctgggttcaagcaattctcctgcctcagcctcccgagtagctgggactacaggcacccgccaccacgcctagctaatttttttctttttttttttttttttttttgtatttttagtagagacggggtttcaccgtagccaggatggtctcgatctcctgacctcgtgatccgcccacctcagcctcccaaagtgctgggattacaggcgtgagccaccgagcccggccctgaaggtgaaatttttaaaggaaaaaggaacattcaggccaaggagactatctatgcaaaggccaggagcaaaaggcttagggcacttggggaataggagctagttgagcttccaaggttgggtacaaggtacagtttttcccaagtcgttggagctccagttgctcctgggggtcacagccttatctgaagttggcagacaacttcaaaactgtgacaccacagctcacaattcattcatccccacactgcagaccagtggctcctcaaaggtcccaagacctgtggttgcttccagatcacaaggcctcctccctaagacagggacccagccaacctgggtcaccccattactattctgggcaattggccacgaccattctggatcctgccctcccggggcgtgctgcagtgacagcctaccagcctctagcccagtgcttccctaccctatcctagctcacggtagaatccctggaattaaaccaactaaccaacaaaccaaaaaatgcccagtcttcacccaaaacacttacatgaggatctgtcctgctacacatcggtgatttcaaaagcatttgtcaagacattgaactgtacatttaagatctatgcattttactatatgtaaatgatatctgaaaataagttcccaggggactctaacgcagtgtgaagaactactggtctagaccgagggctccagcacccaagaagacaccatgtgcctcgtaccccatcgtacacacacgtttcttgggacttcgctctgaactggagcgtccacgattcagggggcaatgagattcgacccaaaggcagttcatttaacatctgtttttctcccagcaaccagctcgcctaagcttctgattggctggagggcacggggcctttcgcttcgcgttttgtttgtagattcttattggttaagaagagcgtcagtctcccaccgcgtaagagtgtagtcggcgttgaaactcggcggcgactggtccagcagaaccagggacggggagaaggatcaagctagctcttcattggtcccttcccctcggtgttggccacgaatccgcccctctctccaagttccgttagctcgcggcttcgctcctctcccagactctcgcccccattggctgcaggccacgccgtcgccccgccccccggtccttccagcgcgccaattggcggctgcgtggaacgtgccagggagagcgcgccgtgcccgcggagagagcgcggcgcgggaggccggcggccggccggctgcatggcgcgctgcgagaggctgcgcggagcggccctgcgcgacgtgctgggccgggcgcagggggtcctgttcgactgtgacggggtgctgtggaacggcgagcgcgccgtgccgggcgccccggagctgctggagcggctggcgcgggccggcaaggcggctctgtttgtgagcaacaacagccggcgcgcgcggcccgagctggccctgcgcttcgcgcgcctcggcttcggggggctgcgcgccgagcagctcttcagctccgcgctgtgcgccgcgcgcctgctgcgccagcgcctgcccgggcctccggacgcgccgggcgccgtgttcgtgctgggcggcgaggggctgcgcgccgagctgcgcgccgcggggctgcgcctggccggggacccgagcgcgggggacggcgcggccccgcgcgtgcgcgccgtgcttgtgggctacgacgagcacttctccttcgccaagctgagggaggcgtgcgcgcacctgcgcgaccccgagtgcctactcgtggccaccgaccgtgacccatggcacccgctgagcgacggcagccggacccctggtgagcgcgggaatggcggggaaactgagatgggggcgacctgcgcattcgcctccacgcctaagggtgaggggcggggaagaggcgtctccaggtggcaggtggggaacaggagagtgcgagggaggcccagggtgctttggtgtggggggcggttgatccctgtagccgtcatcctgtgaggcgcagcagtgtggtccctgttggacagatgaggaaactgaggccctttgtaacttagggagttgggcggaattctgccctacccaccatcggggtggggttggagaggaagcctgggaggattgtccccctgtgtgagggttgaaacaccattcccagaggcagggtgtaggcaggtgtgtggggagcaaaggcggtggagtttgacctcagttccaggtccagctccagcttcacagctgtgtaatcgtgttcagttacataacctccaagcatctctgcctgggtgagaaatggcagtgctcagcatgcccggtgacggtgatcagggtgagtgcctggcacatagtaggtgttcagatgatgtaagttgtagccagagtcccccatgttacagagaacttaatgaaacagctttgtgtgtgttcttctttggtttccaaattactctggagatggaagttattgtcccatttctcaagtaaagagactgaggcagccggatgcagtggcaacagcctgtagtcccagctactcgagaggctgaggcgggaggattgcttgagcctaggaggtcaaggctgtagcgtgctatcattgcatctgtgaaaagccactgtacttcagcatgggcaacatagtgagaccttatctctaaaagaagaggaaagaaactgagactaagagaagggaagtgagctgcccaagaacagatatagtgagcccctccacctcctgtgtccccacacacctgcctccatcctgcctctgggaattggtgtttcagccctcacaagtagggacagtcctcgcaggcttcccctccaaccctccaaccg

SEQ ID NO: 1888574 - DNA, 4001 bp, Homo sapiens
actcaaacagatactatgtccgtattcttctaataccttgctactcaaagtatgttccaaggtctggcagcctttgtatcacctggaagcctattaggaatgcagaatctcagacgccacctcagacctgcggaatcacaatctgttttaaaaagattatttgccgggtgcagtggctcacagctgtaatcccaacactttgggaggccagggtgggcagattgcttgatgtcagaagtttgagaccagcctaggcaacatggtgaaacctcatctctacaaaaaatgcaaaaattaggcaggcatggtgatacacacctgtagtcccagatacttagggggctgaagtgggaggctcacttgaatttgggaggtcaaggctgcagtgaaccgtgtttgcaccacggtattccagctgggccacaaagtgagaccctatctcaaaaaaaagattgtcacatgcatattaaagttgagaagttcagttccaaaagatattttatttttatttcccaagatgctatgagatgtgttggatttatatgtgggatttatatgatgtctaattagtatggaagaatagggtaaaacaggaaacaaaaaagaaaacctgctcctggtatagttctctgtgttagataaacgttcacaatttgacaacttttttttttttttgccatttttcttcatttttcaaagaaagaacaaataggcttatttttggcattctagaatgtttaactgggaaggatcttagacatgacctgataacaaaccttggttttacaggtgaacagacggggggctaagaatgttaagtgacttacccaagatcatatagcgtggactccctgtgacctgattttcaaactactgatctttggaactcctgtgctacccctctgtgttgctgaaggccatctattcttagttggttctattgatgttggttgaaaccatcccgaacatacctgtggctaggcacagtggctcacgtctgtaatcccagcactttgggaggttgaggggggcggatcacttcaggtcaggagttggagtccagcctggccaacatgatgaaaccccatctctgctaaaaatacaaaaattagcaaggcatggtggtgcacacctgtgactctagctactcgggaggcggaggcaggagaattgcttgaaccctggaggcagaggttgcagtgaattgagaccacaccactgcactccagcctgggtgacagagtgagaccctgcctcaaaacaaaacaaaacaaccatcctgcacaattatgagtgagagtaaatccaacacatctcacagcatcttgggaaaatgataaggctcactttcttctttcccttcagtgtgaactcatgtaataacttcagagaaaggcatttccctgctgtctggaagttgaactccttctacaaactggtggagcttgctgcccagtcctgtgccctccgagctgaggggaaggcgtggggattttctgttctactgaaatggcaggattatgtcatagcagtggttttgagtgtttagaggtagtgttattttaattatttttctaactctggtttaaataaaaacttacaaatcaggaaagaactggctatctgtatgttaaaaaaattaagagagggctgggtgcagtgtctcacgcctgtaatcccaacactttgggaggccgaggtgggtggatcacgaagtcaggagatcgagaccatcctggccaaccaacatggtgaaaccccgtctctactaaaaatacaaaaattagctgggcgtggtggcgtgcgcctgtaatcccagctacgcaggaggctgaggcaggagaatcgcttgaacctgggaggcggaggttgcagtgaaccgagattgtgccagtgcactccagcctggccaacagaacaagactccgtcttaaaaaaaaaaaaaggagagagagagagggaacattgactcttaccttgtaccatcccaaaaattcatttgaggccgggtgtggtggctcatgcctgtaatcccagccctttgtgaggtcaaggtgggtggatcgcttgcgatcaggagttggagaccagcctggccaacatggtaaaaccctatctatactaaaatacaaaaattggccaggcgtggtagcgggcacacatagtcccagctacttgggaagctgaggcaggagaattgcttgaacccaggaggcagaggttgcagtgagccaagattgcacccctgcattccagcctgggtgacagagtgagactctgtctcataattaattaattaattaattaattcaggctgtgggatactgctcagcaacttttaaaaaggggcaaactttaaacgttttagaaataaaacaccctgaatgactcttgagaattactctgagtgaaaaaagccaatcctaaaatgttacctattgtatgattctatttatataacattcttgaaatgacaaaattatagatatgaagcacagattggttcttcatattgtcagggcctgtggatggtgtggggctgaaagtagatgtggctataaaaggtcaacatgagggatcctcagggtgatggaaatgtgtatgttgactaacagtgccagtattctggttgtaatattgtactgtagttttgcaagatgttatcattggagggaactgagtaaaggatacatgagctctttgtattatttattatgtgaatctataattatctcagaatgaaaagtttatacatgagctgtttattatttcttattatgtgaatctataattatctcagaatgaaaagtttaaaaactacaatttggcagcttttcaaaaagttaaacatagatcctgtgacctagcaattctacttctagatatatatcctagaaaactgaaaacatttgtctgtgtatttttacacagacaaatgttcatagcagctttttcaaaatagctaaaaagtggaaacaacccacatgtctttcagttgatgaataaacaaaatatggtatatccatacaatggaatattattcactcataaaaagaaatcactgttgatatatgttataaaatgaatgaaccttggccttgtgtggtggcttatgcctataatcccagtactttgggaggccaaggcaggtggatcgcttgagcccaggagtttgagaccagcctgggcaacatggcgaaacctatgtctactaaaaatacagaaaaattagccaggctggtggcatgtgcctatagtctcagctactcgggaggctgaggcacaacagtcgcttgaacctgggagatggaggttgcagtgaacggggatcaagccacttgcactctagcctgggtgacagaacgagactcgtcttaaaaaaaaaaatgatgaaccttaaaaacattttccaaatgaaaggacatagacataaaaggccacatattgtgtgattccatttaaatgaaatgtccagaacaggaaatggagagtgactgctgatggatacagggtttatttttggggcaatgaaaatgttctggaattagttgcgataaactatggaattatgcactttgaatggttgaattttatagtatgtgaattgtatctcaattttttaaattgtgtgaggaaaaaaattcaggtttctctagagtgacagcagatcagtgattgcctggggctggaagtggaaggagaaattgaatacaaagggacacaagaaaaccctagggatgaaaatatatctctttattgtcgtggttatacaggcatatgcaattgtcagaacgctttgaattgtacactaggtgaagtttattgtgtctgaattgaagttcaataaagttagtttttaaaacttataataaaattatctctagttgttgtaagcttaaaatgacctttaggttaaaattatcttatctcttattaattataaggccaacaactattgcaaaaattacctcatagagtctgacttccgttgctagtttcta

SEQ ID NO: 1888575 - DNA, 4001 bp, Homo sapiens
ggagttccacagtctggtgggaactcgggcacagacagagatagtgcagctgtagtgtgggagctccgtctggaagagggcaaggagggcttcctggagggggtgtcaaagaataggtagcatgagtagaaggagtagattctctctccctctgaacctggttaattccttcctgaccttcagatcccggctcaaacatcacctcctccaggaagccttccctgatctcacccacctggaattcactgtaacagatggaagggccctgcccctcttcttccaggccccactagcctgagctccaggaggcagggaccacatgagcttcagcccctggagacccccctagcatccagcaggaggcagcataccgattatgggtgcaggctccgtcactgcctaacagcatggcaaggagcttagcctctctgggcctctgtttcctctcctgtaagatggggttacaagagggccaccccctaggcctattgtgagacttcatgggtaacagaggttgaggctggaggataaggcaagtgtctgaaacacgttagcgatgtttatttactagactagtgcctggctcagagcatgggctctgtagacactggtagaatacatgcacggtgccttgctcacttcatttatttatgatcttcctccctccctggtctgtgggccctgcgagagcagggccggtgcattctcggtgcccagcacagccggcctgtcatcagtgctgcgggagggacaggaggggtacctgcagtgaggcacaggccacgccccctgcacgccgactgggttaatcctctacggctcagggtcctgcaggtgaccaaggtggagctgggatttgaagccgagcctctgactcccaaagccagacgggtctaggttgttctgctcattccaagccgggccaccgcctgtatcaggttctcctgcaatgttgacgtcagaagcctcttcatttacttgggggccattacattagcagtgaggataacattactaaggtgcaccaagggcgggccgtgttcccttagcctggctttgtttaagcctcccagtaatctggggagaaaaagtaggagaaggaccggaatcttccatgcagtgggcacccgccacccaccagtctccatgaagatgccccatcacccccaggatctcattggaggctcacaaagcggtttgtctgactactactggaagcctggaagcactcacaataccagggcttggaaagcagccgacagaatcatgcatgtgcatgtacacacatgcatgtgtgtgagtgtgtgtgcacacatgagcacatatgtgcatgtgtctgtgtgtgtgcatatgtgcgtgtatgtgcgcagacaccaccagcctccctttgcaggggtgcagtactggaggaccgagaggggccacacatgcatgcggctggtgggggctgagctgagcatttctgtcactttctccttctggtgactgttcccctccccagaacaggagtctggctccaggtacagctaggcccaccttgcttctcactggggactgggactagtcagccttggagtaacatgacaggctccagggttccagttcctcgccatcctggccccgcagagagacttcaactccaggaggattctggacttttctgacaaccccggagacagcaccttccttccacagccccaagaacagaaaaaaaaaatagcgcagacaaaaaaaatagttcagagagccagtttccccagcaggattctaaagggaagtttcatggccaccaccggggaagggagttccttcctccaggactggcctgaggccctttcccctgccctccctgctcccaccacctccctctcactccctgccgccctctgcctcttgtatctcctcagctacccctttccttcctacccgcccttccccaggagtgggtgacagtcctggtggctgtgtcctctgggcttgctgggcccaccttctccttgtggtcctggtcctgaccctgcagccacccaggcaaaggaggccgcctcgccctgtctgtcatctaagggccctctgggtggtcacgtcaccctgtcacctgcctccagaccgaggccacacagtgcagggtcatgtttcagttctcatctcccagcgaaattatctcaatttcttggagcctgctccagaattgcttttctctaaaccctcattaccgagaacacagtcttagatgctatgtacttctcaggcgtcctcaaagaagcccctgaattacatgcgagctgcccctggcaggtccccactcagggcggccactttgctgtcaacagcagagctggcgagaggaggtgcctggtggctcagggaccagaacgtgcggctctcagataaattgagttttgcaactgaactgtctaattcctcgaggaaattgtcaaaccatgtccacggaaatcctggtaaatcttagaagtggctgctagaggctaaaagtcagagacaccaaaggttattaggaaaattactcctcctggtgctgggggtgttggggagaggcacagtttgaagcaagggctgatggctgcggaggaggcatggctgggggagggcaggggctggaggctgtggcctgttctgtggggccattgtggctggcatttcccagggtgtggctcccaggcctgtccatcacacctgcccccccagtgctgctggtcccatttgctctccctcctatggtaattcagaacaaatagagctgaacccagcaggttcctcccgatgccaaccctgctggcatatcatctctgccactcaggaggcaagatctccaggcatgtggaggtgctggggcctggaccccagggtgcagaactgaccgttaacaagaaagaaccgccaggaggggacaccaaggcatgaggatccgggagtccccaggatgggaggagggaggtgctgggccctgggatggagagagactgaccccccacccactcccatctcagcaatgtctacgcgcccgcatcatgctcaggggtccccagactaaggaagccccgcccacactcctcgcattgtgcctctgcctctctcagccgggcctctgggagtgttgtctacactccccgtccaccctacctcacccatagggaaggcttcgcttccgtcactcactgaggtggctatggccaaggttgaaggccacagtgactcctggacccctggagacccatctcatccccttgtcccctcagcagtgtttgccctctttggcccagagcccccaccacgccctctgagggccgtggccagctctaaagccctgagagggttgcagagtgctggggtctggggggcccctggccatgtccttgaggctgctcagagccccagtctctgcccctgcacagcgggaagctgagctggggaggctgtgagagcagattttcatggagaggcacgagggaggaagatggggcggcccccgccctggccccaggctcattctcctgggggctccctctgcagctccccagggccttgcacacttggcctcaggccactcaatgcagctgagtctcacaggcccctctgggatggtggtgctggaagtcagggtgctggggcagcagggagggggctcggggccagacagctgactcttgatgggggccgcaaggcctctgccccgatagcacatgcctggcctggccctgggctcgtggtgcacagagccacctgatgtgccctggccgcagatgcaacctctgcccttgggagcgtctgctgacctgacgccagacagttccatccccagggcctgtcaccaggtgtgcagggctccaggagggacagaggccagctcgggctcctgcagttctcaccaggaccactcccacacagagcactgtcctaggagtccactgtaagcccgctcccaggcccctgggacttgggcctgctctcctgggcgacccttcctcctgcccttgagg

SEQ ID NO: 1888576 - DNA, 4001 bp, Homo sapiens
tcgtagaggcaggttttcgccatgctgcccaggctggtcttgaactcctggactcaagcaattcgctcacctcggcctcccaaagtgctgggaatacaggcatgagccaccgcacctggcctttctttctttctttctttctttcttttttgagactgagtcttgctttgttgcccaggctggagtgcaatggtgcgatctcagctcactgcaacctccgcctcccaggttaaagcaattctccggcctcagcctcctgagtagctgggattacaggcgtgggccaccacacccagctaatttttgtatttttagtagagatggggtttcaccatgattagccaggctggtctcaaactcctaacctcaagtaattcacctgcctcagtctcccaaagtgatggggttacaggcatgagccaccacacctgggccaactcccaggttcaaaccatcctcccacctcagcctgtggagtagctgggactataggtatgccaccaagcccagctaattttttcatttttatttttttgtagactcactatattgcccaggctggtcttgaaccctggggctcacatgatcctctccgcctcagcttcccaaattgctggggttagaggtgtgagccaccgcgccctgcctacgggtcttttgaatgctgcatcctatagctatttttttccttcaacccagaagccaaagcataattccctaaattcttcagagctgtcttggtgagctcaggtggtctgcaaaccgctgtttccagaaggctggcatgggggcctgtgtcttcctccttgcagccctgtccaggcccctcctcttcttggctcccaccctctaggcagttactggttatctactccgtccttcccggacttgactgttgggcatctcgagggcttcccccttgttagtcttctcttcctcagaccccttagcctgaaagtgtgttcccccagggctttccttggcgggcgggcgagcgggcggaggctgtcctcttggggcccccaccctggccatcccatgcggccgtccctcctccacacggtcctgcttccatcttagggagggcagagctcagtgatcctgcgcctccctcagggactctgggacacaggttacttagggccgagagcccaggaagccctgagagggcaaatgcaacggctccgaagagccatacggagaagggcggcgcagccggccgttgggccccatgccccgccttctgcaaccccacgccacccaaccccaccacacgccaccctccgccccgcagctgccccggcccacagcccccagtctctgcagtcgctgaatgcgcccccctcccctccccgccatccgtggacgccagaagccatgggcactggaggatgtcagggaaaggtcaagttcttccttgggatccgagagcgaggacggagctcccggaagcaccaggggccacgagagttgggccgccctccacacccgccccgcgcaaggtccgccaccctctacccccatcccaagctgggatcctccctgcccttcacccccttccgtgcgatgtccaccttccccggagtcggcgctggagatgccctacctcggctgccgcgggcggggaccgaaggtgcagctcggcctggcgatgcggggacatgagtaaaggtctggaggacacggagctggccagggtccgggttgcacgccccgcggccacaccggagtccacgctgcagcgggggtccgagcccgttttcagggtccagggacgtggcggcctggccctcagccccgcctcagggctgtgcccccgactgcgcccggctctgtccccacctccccagccccaggtaagggcgcgcgagaagggacgcggagagcgccggtcaggaagcccggactgagcgcgggggctgggatctgggatccaaacgccgtggccgcgggcccgcgcccgggcagacccgggctccgctctcacgtcacgcggtacatgggctacagttccttgtccgagggcttccgggagctggagccgcacagaatgaaggggttcactggtagtggttcccaacttcgttgcatattaaacccccctggagaacttaaactccagtgcccagtcctatgcaatcagatcctgggtctccactgtgcagcgcccgtggagagccagcgatgtggagggtcgagatcacccagttctttggggacagggtctcactgccaccaaggctggagtccagtggtgcaatcacggctcacagcagtctcgacctccagggctcaagcgatcctccagcctcagcctcccaagcagctgggagcacaggcgcataccacgcgtggcttttttgagacgaggtcttgccatgtttcccaggctggtctcgaacttctgggctcaagcgaccctcccgtctcaggccttccaaagttctgggattacaggcgtgagtcactgcccctggccccatccagctccttcagcctgaattaccagtatttcccctcctccaggaagccaagaatgcttcctaaacccgcctgggctccatagcgcccctcatcctcagcacactagttaccacctaagctgccccagctttccagtgcggggccctgagctccagctctggttgctaccggaatagtcctgcttgctgcccttgaagaaccagggtgtacactaagactgcaagagcagagtccagccataatagcgggttggggagtcaccgacttggcagagaagacacctccagaattaccagcctggaggtgtcaagtttttgttgcagggtaaggtttcaagactggctgggccagctgtactgttaacccagcagggaggcaagcagaggcccccactaggtcccatgtccaagagtttccctcacctcaaaggaacccagtccagcattgctggccaagatatacctgttcaaacaagttattttttagttatttattaaaaattgagatgctggccaggtggtggctcatgcctgtaatcccagcactttgggaggccaaggtgggcggatcccctgaggtcaggagttcaagagcagcctggtcaacatggtgaaacctgctctctactaaaaacacaaaaagtagctaggcatggtggcgcaagcctgtagtcccagctactggggaggctgaggcaggagaatcgcttaaacctgggaggtggaggttgcagtgagccgagaatacaccactgcagaagacactgtctcaaaaaaaaaaaaaaaaaaaattgagatcctactatgtctcaataggtgtcactatgtcgaccgtgctggagtgcagtggctattcgcaggcacagtcataactcactgcagtctggaactcctaggctcaagcaatcctccagcctcagcctccagagtagctgggactataagaacgcaccaccgcaccaggctctaaaggtagttttcaaagatgtctctggagtattgtttcttccagaatgatgtgacagttttgatatttcaagacagacttctctcaaattcagcagaaacctgaaagtaggaaccagggacattttagcctcatagttctatatatatatatatatatatatcctgggccaggcacagagggtcatgcctgtaatcccagcttctgaggaggccaaggtgggaggattgcctgggcccaggagttggaggctgcagtgagctatcatcttaccactgcactccagcctgagcaagacactgtcttaaataaatttttaacttttttttttttgagatggagtctcactctgtcacccatggggctggagtgcagtggtgtgatcttggctcactgcaacctctgcctcccgggttcaagcaattctcctgcctcagcctcccgagtagctgggattacaggcgcccgccaccatgcccagctaatttttttatttttagtagagacggggtttcaccatcttggccaggctggtcttgaactcctgacct

SEQ ID NO: 1888577 - DNA, 4001 bp, Homo sapiens
ggttttagcggcctgggcatgcggtttctctgcctacttggacctgagcagcctccctctgcccaatgtcactgcacactccctgcatgccccagccctgactcgggtgagtggaccatgcagacggcgagaggccatgcaggccaagccaggatagagcgaaccctggcggggccaggtggtccccgtgtgtttgcagcctggatgtgatgcccacatctctgggccaggcacagctctccactgtcggcggctggtgggattagatgtgaccaaggccgctcccgggccggctctactctgtggggggcaggtgcggctctgggggtcctgttgggcctgagcacgtcccgataacctggctgctgcccactgcccaagcgccagagcactcggccaccaatgagagctgtgcttccctggtcctgggttaaaaatatccccgtaagtgacaagactttgagaatttcgtctctccagtcactcacatggggggcgaggacagctcttggctccgcgtctcgcccggctgcatctgatggctccctgggctgaagctgcatctcatgaaacagacgagaagtcattcacagcccgacagcacaggcacagaaatttgctgttttataccaagttgggcggcctgtcatctagaagcttctgtcctgacctcctcagcgaagaggaagtcatggaaccagctgctgagcctcctgacctcggcctggcctctcctggcagctgtgggccccaggatgaaagcgggcaccacgtcactcacgagacagaagctgtcgttctcagagcctcccaggtgagtggccgggcgcctacctgaagctggacgagcccacagtggctgaggccagtggggacccaaggggccggtccggccttcccggaccaccaaggaaggtgggcgctgcttccctcgcagtgcagatggtctcggccgtcactctgctgtccctctcctggctgtgagctcagcttcagtgtccccacctgtgaaatggggagacccccaatccttctgggcgggtgccttgcctctgccctcgcatgagtctcccctttctgagctgggattccatctctcctgggaatcaggtgctgcctggctgagaacccggtagccaggcacaatcacgccgtcaccaccccagccctcaaccagaccctgcctgctcgccgcgctcggccgccatcttcctgtggacgccacttaccctccggcgtcgccatcggctgcaaattgccttgtttttcatctttggcagggctcaaaatttgatcatgaaagggaattttcttttttctttcttaattagtacttggtaatatcaccaagctgtgagtttatggctttgtagatcttgtgtgtttgacactaattactcacaaaggcttttaaagctgcatttcaactctgcaaccaccatgccagtaattaagctagaggaagcggcaacagatttcatttttcacagacacccttcccacctgtgctcccgctccgtgtggccgcagcccccgtggccctgtggaaacccagcagctccttgcggctccggccctggaggcctgaggtggccttgcctccaggagcccgggctcagccgtcacagccgggcaggtacaatcaggacgagctccctgtgagactggggacccaggcccagtcccaacccaggtgaaggtcccttccttctgccccagagacgactaacgagcagctcccctggctgccccagagccccccacaggggccgtggcttctgacccttcagactcagctgttcccaggggccctgcttctgccccgcccgcccccacggctgcactcaagcctgcgctgtgcacaccgaggccagctgagtaccggataggacctgggctgaggctgcccagctcacagggaagcagaagccgagagaccaagaagaaaacatcccccaactggctgacagtcgccctcctcgaccccagatgccactaagaacaacgcaaagttctggcgcgcagggagggaagtccgtgttgacttgggggcgggtctgcagcaggaaggctgggcacaccctccactggctgctcactaactcccctgctggcagaaccttccgctgcacaagcagaggagaaaggaaggcgtggaagagagcaggtggcccacgggctgggaggggcagggagaggaaaggcggcaaggttcccagcaaaagagaagacgccactccgagaaccccgggaggtataagggaaccctgtttagtaacgctgcatgtgcaacagataacacgtagttcacgtgcacagatgtgtgcaaacatctatgatgtaaccgagcggggctgtgcagagcaactgttacagtctgaactgtgtcccccaaatttagatactaacctaatccccatgtgactgtatttggaaataggacctttaaggagggaagtcaagtctgatgaaggtcataagggtgggtcctgatccagcaggggcaccagagctctccaagtgcacaggagaaaggccacacaggaatacaaggggcggccgtccacaagccgggaggagagtcctccccaggggccaactccggtgacccttgatctcagatttcagcctccagaactgtgtgagacacacatctgcggtctcagcccccgctgtggggctctgtgacggcagccccagccagaccagcagagtggtggacacggccaggtcttattttggtgaactagccccttggctccacagatctctgtaacgtgcttatgtgggaggatggtaggggcacggcagccccacctaggaagcaaggtctccacaaccatgggtcatgttaaaccagctccttctctggaggctaagggcctcacgtggtcaactgcagcccaaggtcctgagccccctgtctggtccaacaccaggtgctttgtctctcttctccttcgcacaggtggtcaccctgctggacgctgcccctttccccactgtcctcacccaccgagaccaggtcctaccacaataaaaggactctggttagggctttatggagtcaccagcctttcagagacacatgctacaatacttgaatgattgcagctaaattgattacgataccttggatttgcttcagaataatccaggaagggggaagagggtgggatgggctcacagggacttctcgatgctgttttccatatttttatatatatgcttaaaactttccatggcaaaaagtgaaaataaacacaaacagaaaccaaaccaaaagctaaaagatgacaactcatcctaaccaggccagggtgacctcctctcaaaacccaggctctggaaggacatctcgctcttacccccagaaggtgacatccttggccccagagcccctgccagggctgcccggtctttacccctctgcccaaggccacacgcacaggatgtcaacagtatttgtagaattagcgaggcagcatgggaaggtgcggttccatctccaggccccccgccctggtcctcctcccactgggtcttaactccccgaggggccacaacgcttcaatgcgtgaggtgccgtgtgcctctccacccaggaaagtgtgcacaagcacactccgtgctgcctataattctgggaacgacaggggtctatgaagcccacccaagttcctggaatacagacccctgccctgagctcgcagcggaacccccatgctgctgctcctcctcacatgtggatctgggacgtcatgctgggcaactgagaccaggtctgccttcatgttgtaaacaactagaaaaatgaacaaaatacacacagtaactgttcacagacactgggctgtctaaagacagagaaacaaatgaagtgaacctctgaacaccccttgctctacccagtggtctcttccaggcttggcgccgtggggtacagctcaagctcagcatgatggtcctgctgagaggaagggaggatctgtggagggcgg

SEQ ID NO: 1888578 - DNA, 4001 bp, Homo sapiens; identical to SEQ ID NO: 1562684

SEQ ID NO: 1888579 - DNA, 4001 bp, Homo sapiens; identical to SEQ ID NO: 1562685

SEQ ID NO: 1888580 - DNA, 4001 bp, Homo sapiens
tattcttcacagaagtaaaataagcatagtgtgttttgagtgttaagacacaaatgcaatttctcctttaccttactccaagcttgtttgtatggagaagttaagatcatcccatctctatgttatgccacaatgcttctctgtagcacacaacttggctctgaaattttgaaagtcaaaatactaatctactatgtgtctctgataaattgcctgaacgttacctgattttgaagtgctgcactcctaagactttttcttggaatgagttaaacgttttattccaagaatcctctactgagctagaaagcagagctgtgcatctctgtttcagtaaaaggaggtcaatacagggaactgtggtttctgagaatgcaagatctgcactaagaaaaggattagccacagtgctacccaagagaaccagctaccaggaggaaagagggtctgtaaactgcaagatgatgacttcacttgatttccactgaggaaagctggtggctcagacttaaacttctccttcctagatggtaaacatctatggaaggttctatgaattataatgagttagtaaaacataatgcactgaatattagactatgtcagcagatcctgtaaccaaaacttactgaaaatataactatagtgggaggcaatggaaaagagactaaaggcttgaatggagaaaaaaagaaattaagtgtgtcttgtaagcctggtgtctgatcatgtcttagaggaagtaaggtataagctgaccagagactcctttgtgacacaaaaggtgaagttacagacattccactaaatttaatttttattatgacataagacaactggtaatatgcaacatgattgaaaaaaacttctcattcaattcgattgggccttgacataagaatagacataaacaagctaagaattgacaatctaaaaataagcctgcacttttacagtcaattgattttatacaagcttaacaaaagaacaaaatgggaaaagaatagtcttttcaacaaatggtgctgggacaactgggtatccataagcaaaaaataaataaagttcgaccaaatatcttatttaataattaactcaaaataaaatagttaactgtaaaagctaaaactataaaactgtcagaagaaaacactggcataaatctttgtgacagcatttgccagtgttttcttagctatgactccaaagtaaaaatggattcaatagacttcaaaattgaaaactgctgtgcctcagaagacagtatgaagaagtgaaaaggtaagacgccaagtagaagaaagtatttgaaaagcgtgtatctgataagtgacttacatatataggaaatataaataactcttgtaattaataaataacaagataagccaattttaaaaaatgggcaaagattttgaatagatatatctgcaaagaagatataaagatggataagcacattaatagatgcttaatgtaattagtcattaggaaaatgtaaatcaaaaccacatgtggtatcacttcacaccacaggataaaatctttgttcaagaaaaaagagtgttaggaaaaatgtaaagaaattaaaacccttatctaatgctgctgggaatgtaaagtgatgcagccactttggaaaacaaactggcagctccttaaagggttaagcatgaagttaccatatgacacagaaattccagtcataagtatatactccagaaaaataaaaacatacacaagcacaaaaactcatacataaatgtttacagcagcattattaatagtagtcaaaaggtggaaagaaccagaaagtctgtcacctttgggtgggagagaacccaaaggtccatcacctggcgaatggataaacaaaatgtttgatgtatccatacaatggaatattactcagcaataagaagaaattaagtacagataccgtattaggaggagacagcaaaatgcctaggcagatacggaagggtccctggagaatctccaaccagccccacaagtgtttacaccagatgttatgtgcagataagggaacctggacttgtcttgcctggacatgcccacagcagaccggaggcccacatgcagtggggggatggggtggagtcaccaggaattcacgccttatgcagaggaggagcctggccgcttcagctcatgtgatcctggtattcaattgtgaggtggaaacctctttgcaggacccctctctttgctgagagctgtcctttcacataataaattctgccctcctcaatgtgtctgcatgcttaatttttcctggtcacgagagaagaacccagatgtagctgaactaaggagcaaaaacccggcatcaatacctgctacagcacagatgcagcatgaaaaattatgctaagtgaaataagccagtcccagcagaccacttgctttttatttcagaggcttataggcaaatctatacaaagaaggtgggtggttccctagggctgagggaggaagggaaaactagtgaagatggctaaatgctgtggggtttgtttttagggtgatgaaaatgttctaaaattaattgtaatgatgacggcataactctctgaaaatactaaagttaatgaattctatactttaaatgagtgaattgcatggtgtgttcattatttctcaataaacctgttaccccccaccccaaattaatttggtactagagatctggagataggtactgcttggtttcaaatcactggccagggttcaaggtctaaaggaatcaacaacatgtcctttttatagaaaaagagatttatattttacaagctatccttttcattagtatcaagtctgtaaaattaaatgaaaaatctttctttcactgcttaaagcactgacagatttatatagaggaataagaccttgttttctttggccccaatttctatctaaagggtctgggaaacacacccttcaaactatcaaatctcatcagatgggttttattaacacttataatgtggcttcctttctaatctgattctggtgcagcatcacagagagaagaagctgaaggaaatcaaaatattttaccctcaaatatatttttgatgtattttgaaatagctgctgcagggccaagagattgaaatggccctcattaaggtagcccaccttctaggtcttcccagatctggggaagattaactaagagcctgaggcatttaagtttgaaaagatatatttaccctctattttctcaacatattttggcagaatttggatttttccattatcaatattttccaaaatgcatgatttttaataccaaaactgatttaaaattaccctacgttggaatataaattattctattataaagatacatgcatttgcatgttcactgcagcactattcacaatagtaaagacatggaatcaacccagatggacattatcagtgataatgggataaagaaaatatggtatatatacaccatggaatactatggagccataaaaatgaatgagatcatgctctttgcagggatatggatgaacccgaagctgatatcttcagcaaacgaatgcaggaagaaaaaaccaaacactgcatcttctcacttataagtgggagctgaacgataagaacacatggactcggggaggggaacaacaaacactggggcctgttggggtcaggagggagagcatcaagatcaataactaatgcccacagggcttaatatctaggtgatggattgataggtgcagcaaaccatcatggaacacgtttacctatataagaaacttgttggccagactagtcttgaactcctgacctcatgatcttcctgccttggcctcccaaagtgctgggattacaggtgtggccaccatgcctggtggctatttctctttttaaattctctcaggactcctaaaatctcaaaactttgacctagattccctaatctacatttccagctctgaccattttcttgaggtctcttc

SEQ ID NO: 1888581 - DNA, 4001 bp, Homo sapiens
atgctcacccccagctgccagagggggtagttcccaaagaggggcaggccctcagagtgagctcctgtcctgagatgggcaagggaatattcctgggacactgcagaactgttaccaagccaggcacagatggggccaggcccctcggcctctaagacaaggccggcccatggatggagcacgatggccctgaccttgggcacagacccgacgattgagtgagatggagacacaggcttggcttgtccccaagaagaaagaggcacagaagcagctacagagtttcttgcttccctgtttgggttgctgctggctcaggtaccacagctggcaacagaaacagaggtcaaggcccagagggagggaggggtcgggtctgctttgtccagggctggctggccccaggagggccccgaagctgtggcagaagcaggtaccagatggtcagtgtagcactgtggctagcacccaaaactggacatgggctgggagcagcctgagatgcagggcagaggacagcaagccacgagtctgaatggcccctgttctggaggcagtgctgggaggtggaggctggagggggtgtctcgcagagcctggtctgctgagacataggctgggacaggctgctgggtgtactgtccctgggaagtgcaaggtggcgagtcaggaaggccccaggagcagggttggggcaggagccagtgagcagggcaggaccctcatctggaggggctgggggaggtctccagtctgggatgggggtgttcccggcaccagcccagtgtttctggtgcagcagccacgtcattatggttggaatgtgaccccattagccctggggcggggctgttcaacatcctgaggataattgatcagagggaggaggggctgcaccgcttcctagcaggttgagttaattatcagcctgcattagcacttgacctgtggcatgtgtcaactcattactgctaattgcagggactcagtgacctctccgaacttctgtcacccctgtcacggcccctgccctgtggaggcctgtggaatgggaagtggggaggggaaggagaagggggcggagtcagccggagcctcctggccaggcctggagtcaccctgtcctgccacagctctcatgggtttagagtgggccctggggcagagggtttgcaaggataggggtgggtggctctgccgagggcggtgttctgagtaggtctcattccccagtctgcccagcctggccccaccccagctctgctgccctgttactttgtccccctgtgttcaccctccacttcctgccggggacactccaaggcctgccaaggttggagcaggggtgggactcagccattcaacaaacgcttccttggttatgcagggctgggcattggggtggggggctgacctggaccctccaagacatcagattgtccaactgctcagttttcattggggcaagtgcctcgctgagggtgaagggggctgtgagtgcccatcagggagcctggacaggtcccgcctctcacagctgtcccactctctggagctgccttggtggcagatggcactgtcctagaaaggtgaggctggagctgtctcttccaccaggggtggccaaggacgcttccagggtcttccatgcaggcctccagggtcaccctgggcgtggctgagggcatgcagaccacgctgtgctcccccccaccccccatgcccgtcgcttgcctgacatgctcctcagctgtcttgccccgcagaagctgtgtggtctcccctgtgagtagagtcgggctccatgatcctccggagcagcgccagggactctccccaggcacaattttaaagggggccctaggacctgccaggtccacggaagtggtccttgtaactctctccctggtggcagcctctggtgcattccggcaggggcagcccctcctcatcacagggaccctgtgtgccaggccccagctgcgttgccgctgaattatggatttaatagcagagaagccttgcaggccgcctgtgctggctcgggaaaccggggcccagccggggcctgtcacggtcctggtgccgccctgcttcctgtcggcgccacggagcaagcggagagatttatcttcccggctttaagaggtactaacggaggaggctgagaggcaggagctgaataattgatggccttctctggctcaggatctgctgaaaatgacacggtgcaaggcagaggggctgagagtgctgaccacaaaatgctgagaagccactccagggcggtcacggccagaaggaggacccccactcaggacggggtcacaggcatttggggcgggtgtcagaggctcctgccctgggtcattccagggggccaggatacccagaagctgggcctagaggcccacagggctggctcacccccacttccctctcacacgcctgccatcaccggtgcttcagcccagcaaccccatggctcgttggccccgtccacagcccccactgcctcctgtgtgctgggcgtgggcctctgagctctactctcagcctccttagccccaggagaggagtggaggacaggggtttaacgtggggtgtggtgcggagcggggagggctgtggcgccccctcagcccctcctttcctaacagcctcagcctcccccctggagaatcccctacctgctgggcacatctggcctctccccaccattctgtctccagccgggagatctctacccagtgaaacagtgaaacaggaagggttccctggttaccccgcgcagggcgcagggcatgcagcgggggagtggctcgcttcttcagtgccccaccgctcacacctctaggggagcatacagacgggcaggctgtggggctctgaccccatggcagtgtctgggggtgaatgtttacagctcttgaaaccccagtgggagtgcgttaccgggtggtcttttagtctagcggtctgtaggtggctggtgagagtgagctcaattagacccctgccttataacaaggacagaggaatttctgtatcccagggtttcttgccttggtgtaccaaaaaattggatcacacgtgggcttggagaatgagtgcaaggttttattgagtggaagtagctctcagcagatgggggagccagaggggagatggttttcccctggagtcaggcaacattctcgggatgtccagcagcttgtcttcttccaccagtgtgttcctctccccacacagaggcttctgtctctgccttgctagggtcttgggtttttataggcataggatggaggcatggcaggccagggtggtcttgggaaatgcaacatttgggcaggaaatgcctgtcctcacctaggttcgtgggggtggagccctaggcagggaccacgcccttctctacggagcacttcccgtccctcctctgtatcatttaaagggaccacgcttttcccttctcagcacttcctttccgtatcaacaggaggccagggactggctggacccctaggagccaggtcctacggataggtgagccggccccccagggcaaacacctccactgggcagacctgactgcccagagctggattctttacttgtaaaaggggccatgagtgacacaggctcggcctgctgtgccttgaggaaaggagaggctaaaaattctgccttctctcctaaagccagccgggctctttatggtgggggaaggaaggatttgtttatttgcactcttctgaaataaaagttctctatcctccctcctggctggagttgggagggccccatgggtgggctctgagatgtggcacacggtacccagggcagggctgggaagggtggggtgcaggggcctccctggctgcagggcccacccaccaggtgcctgggcttgctgcactgagcaggcatgggctctggcccccctcactgtcccttccaggcccagcctgtgttcagggcccaggacagggtctggccag

SEQ ID NO: 1888582 - DNA, 4001 bp, Homo sapiens
aaaaagaatgaaatggaacttcagtgaatgaaaaatctaaccagggatctcttattagtcctaccgatttgtctggagaagttgtggattcttgtatcatcacatcatctacacctcatgaagtaacacgagaaactcaggtgtcagccagggtctttctgcctctctgaatttgggagacattgttcaaacccccatctttctggctgcctctctgcattcatgctcatgggcatggtcagacattcatgcccccagctatacccgaaggccggagctcccaccggtttctctgcagacccactcacggccaagcaggctggaaattcagcagcctcacagacatcgggcatgatagaaggggtgactctggggcttgtgtcaccttctgccacctctggctccccccctgcccccatgtctcctcctccctccagaaagatgggtgagttcctttctcatcatctcacacaacaatccatgaagaattgtgctcacgcttgcacccttcagatccccacattctgccccaagcaggctgtcaagaaatttctgagcaacaacaacgtcaccccttcgtcacttcccctggaaagaactcaggagactgtgcagaaggaaacttctctacctcatttcaacagatgccccagcaaatctaagtgcttttcctgccgtgccgtggtaaaatagtgcctgctatgatgagagggcgtctcatcatctgttttcctgtctgtctccctgcaggctgtgggctccgggggccggctctttgctgtactggctgccccaatccacaggataacagaggcgggtgcaggaagcctgaggcctcctacaagcagctgcaggtttttgcctcctgtgaaccccagttctgatgtcctcacgttccctcagctacctgccggcgtaactctgctgccatggagctgtggttaatggcaaagctctgccttggtgccataaggctccaggagcagtcgataatgtacacgtaaagcagttgcttttaaaatcttttatgtgcctatcatattaaaagcaatcctttggaaattaccaagacatgatgcacacctgcctgcaatttttatagctcctttttccccccaagtgaagaatgcaaaatactcaaaactgagcttgtttcttttctttcacaaaaggtcctgtaggttcttcgccctcacaatctctccagctgggcctgatgcctccacctccaggatgactttgtcagctcggatccttaaggttgctttcctgggctcagacctcctggaaggttttctttctctgattttgccacttaccccaaacttattcagtctctccctgtccttgccaccagaagcatttttttttttttcctgaatttaagcccactgtgtcatcccctggcttaaaaccctgaaatatccttagtcctcccaaagctggccccgggctgctgctgctgctgctgcacactctctgtaagcaaacaagcaacactcgcggtgtcctccttccggcaccggagaccgggaggaagaagaacctgcaggatccattcttaaagaaacacatcacaaccacccaccagcctccgtttcactcccgcggatgctggaaacgtctgacgctgggccagccgcctccttccgcaccttcggcgtggccatcctaggaggctctgacactccacggacggtggctcactgggctccatcatcgtcatcaagcgcacacacactcctcccatgcacacgcacactgacacatgtccacactcacgctcacctcactttcagctgaggccacacttcacgtttccgagagaaagcgggcgaggcagcaggagctctgagggataactggctcgtccgcttgcctgtgccccggggcacctacagagtgggtacgtgacttccggggtgtctgtgagggcgtttctggaagagcttcgtgtttgcaatggcggactgaacacagcagctggcccctccccaaggtgggtgggcctcgtccaatctgtggaagccggaacaggacaaaaaggtggagggcgtttggattctctctgcctgacccaaggcagacatccgttccctctggccgttggtactcctggttctcagggattcagactctgactggcgtccactccattggatcccggccctcaggtcttggaacttgcactgccagcattcctgggtgtccggcttgcggacagcagatcgtgggacttctcagcctccagaattgcacgaagtgtctccttacgaatctcttcctatgtacgtgtatcctattggctctgtttctctgcagaaccctgactaatgcaaaccctctcatctcacagcagtgcatgtacaaacccactcacatcttcccctcccctgccttccctaccgcaagttccctccgaccagaggccaatcccgctgcggtgccccggacccaccctctgcaccagccttccttcttgttttctaaaagctcgcgttttctgtgggcttccaaggctgctcttcagtatctttacgtcagagcctcccagctccttcccctctctcaaaagcgttttcacagggactgtaggctccttccctccccttgataaccaagtactatgccccaggttcttacctcacagcccaaagttgtcctaagtcgggccctgacctgagtgtctccaaatccagcaggccgtctgctctcctgtgacatgcagcatcccacggcttttcctaaaagaccccctctgtcagctttgctgtcacccaccctccagggctctctcttacaggtctgccctttgctagcatcttagcctctccacctcccggtggtcctgtctgcgatggaccccctccatgtgtcccaaggccctccaaaggaacaggtctgtatcaggtgcaattagattgaggtgcaatgcaagggcttgaattgcagagaggttcatttttctttttgtagaaaagtctgggaccagctgtcagagactgatttggccactccatggtcaccaggaccaggctgtgtccatcttttctgttctgacctttttcacatgggccattgtccatgtcaccgctggtcaccagctgcagcagtcgcattcttgctccgggcagcaggaagaaggtgagaccagaaggcagagggggctggtcctgcctggtcagcccccagggggctttgcccagacaccccttccccacccatggctctgctgatttctctatagctgccaccctctgaaaagggagctggcagagtagttcttagacatggcacctggccacctctgtggctgaagaagaagggggttgaggattggggtacacacctgtcagtctccatgcaatgccccaaagtggaccactgaccccacaccacgctgttctcctctgagttttctcacctctgtccaaatggctgcagaagccaaaagccccagagcccagctccccttccctcctttctcttccatccttccatccttccatgagcctgcccctcatcctcctcagggctggaactggctgccggattcctccctggctccgtgggggctggctcagcaatctgagctgccgatggctctgtggtccagctgggaggattcatgccccattggggctgagaggaatgaggtgagggctgtggggtttgcccagaatctcctgaaatatcgggcccaggaactacagcaggactctcattccgccttctggccactgttgggggtgacactggcaggatccaggggctctggaaagctccaggggaaatttgaggcataacccagcttctctgagacggaactcagggaggatccagctcaatcctacagaggcgaccccaaggaaggacctgcccagggtcacttggagagctgggcgggaggagggagaaacctcccccgttcagagtgacaaagccccccttgcctcagggatggctgagatccaagtcctcaaaacacgccgccatctgga

SEQ ID NO: 1888583 - DNA, 4001 bp, Homo sapiens
tgagacacccatgagggcagcaaccctatgtcttgtatctcctaatgcctagtggatagcgcagcacacagtaggtgcttaatgaatgtttctgggttatgcagtgattactctgaacccagctgccactcacaatctctttggaactaggttgggtgttatggagcatcctgtgttggtgctgggagaggtggaggctctggggctgccgctgttttcaggacccctgctattcctgggcagacagggccgacacccagaaatcatccaggagcagtaccaggtgggctctagggtgtggagacagctgggcaggtcccttgggtgcaggagagagggaggggaaattgctgcagttacctagtgccccaaggagattgtcgcctgggcacctgagagaccccaggacacagtccccacggcccgttccagttagaggctctttgtcaacagatgcccctggagtccggcagggcagattaatacatgaatgagtgggtgaaggtgtgagtgctgcctgctataacttggctgggttctgccaccctggggaaggggagtgccaggatctgtgagcctcaagcaggtcccacccaagggagctgctccggaggctctgggtggccaggcccgtcgctgggcgggaggagagccaggcacatgctcggttttggggctggccctcccatcccatcacgggcacaacttgggcgggcagcctggaggagcaggtgggctcgctgagtcgggaggaggagggctccccttcagcccggaagaagcgtgcctccccatggggactgcgcctgcacgtggccagcaggcagagtccactccttggtcagcacttcacagcaaatgcattcccagcagctgaggctcccatgccggcgtgcgctgacggcattgtcagtcctcatgttgtgcctgcccgtcccagggcaaggtggcctgagtccactgcaaagtccttgattaattcagcaaacacatgctgtgctgagcactggatggctcttggaggtccccgagtgaccatcggacactgccctatcctcttggagcttgtgggggaaagaatcccctttctcaaacggggtgtgtggacgcccctgtttttctcacctggctgggcagcccgcggctgtgggatgagagatacggatgatgtggactgctgagcaagggatgtgcatccagcgagctttggggaatcctaaaaggatcaagagtgcgtgagggcatggcctggcgagtcctcctcctacttcccatctgtgagggtccgcaggatggggggctcacctccattcctccaggtgcccagcactcatgttccacactcaaatgcccctctgcagttctggaaaggctcactaggccatccgctgtttcaggagggttgattcccgaagtcaccggctctggtcacttccaggaggctccaccctctcgtgcggggaggacgattgcggatggccacaagctgttactaccgactgtcttgactccgttcagcaaggattgaaaatagccagttggccagactcaatctttgtcttgttttaaaagagtttgtttttccagactctgtccaagtctgttttaatccacccaaagaggagctaagtttgataaataaaagaagattaaaaatggtagagaaaaatgtgtttccccccagctcccaagagagtactgccaaaattgaagtgtagaaacaaaaatagaaatgatcaaaacgtctgatggtatctatattttcaaatgaaaaggcagagggagtctttcagcccaaccacttacgggaagatgcggcgggcctgggagctcacctcggctcccctgcgcctagtgggagtcaggactggaagctcctcttcctctgctggtgggcctcacgccgtggatcgagggggtccctgagttgttcatggaggggaatgttgctttggaacaatcaggggagctcttggggcttcaggggcctcttgggatccagcctttccccaggtgtttgcattcctttgtagaaggggaagtgaggatacctttgtttgtgatgtcacatcagccccaagcctggagcccccatactgggtgagagatgggggagacgggcaccagccatggttgctgggccagagctgaagcagctgggagactcttcactgtgcaatagtgacagtaatggggagagccgctcgtgttcaggggtgctgccttatgtaccggcccttggttctccactttagggacattatctgatttcatggcaacctcgtaagccagtgactcagagtggggtcccagtggcattggcacagccttgggagcgtgttaggaatgtccatctctggccccactcagacctgcggagtccgagactctggggtgggtctcagtgtctccgtctctctccagaggactctgagtttgacgactgccgctgcatttcacacgtggagaaggttggaaatgtcaccgttaactattgagcccagcatcccatggctaaccggtgatagcgccagagtggaaatagggcggtcttcactgagaacctaccctcgagccctggccctgtcctccagccccagtcctgccctgttgtgtgatgtgttcttcctgcctgcgtcttcggaggtcccaggagtgaggaaggtgaccctgggacctcccccgagtgaacatggcagctggtgctgcaggtgcacaggcccagcttcaggcgcaggaggcccgggggtgcctgatggggatctggccccgtggggctttgtccagtttctctgtggccagctgcacacatgtgggtgttgacacccattaggattgctctttctcttaagtgagtgtagcgaggaggatggctggaaatgccatgtgcagctgcagtcccgaagctgcccgcctctctgggtcatcatctccctgccctcctgctccctcgccccgccgactgtggagatgactcgtcctgccatgccttttagcatgagcttgtgtttccaaccagtatatattttttgagattgggtgcctgtctctggaacaaaccagaaactcgggcctcacagtgctgttcgggaccctgggtcagcagtggtggctttgaccgtgggtctgtgggtcagctacagtggggtcagactggaccccaggctccaggctctggggcaggggagtggactgggggagctttgctgctctcggcaggctgggctccaggtggtgggttgggttcagggctgcatttcacaggggcaggcccagcctcagaaccacatcactgccagcccctccaggtcatgaaaatcccactggctaaagcaggccacatggccaagcgcagcatcagcgcaggtgagagcgtgcatgagagttttcccaacagtcgcctaacaaccgaagtctcttatctcctggcccctttaatccagttccctatactacctggcatacagcaggtgcttattaaatgcttggcccactgctggactaaagtcatttggtttcactgaactcattgtctttttgggaattatatcacaagaagccttcacacccatgctggaagagccttttggccaaagagaagttctttatagcgatcagattgacctaaagaagagttttcccacataaaatgtgaattcattggcatgaaatgacacagtttcatcatacattgtctcctgagtagaaataggaagagtaaacacataccacacctttctcaaagggaatgagcctcgcttccagccaaaggcaggattcatgatcccatttctctgccttgattctctttagacagtcaccaaaaaattaattgccaagtagtctgcagtgtgtagacacagagggcttccagcccaggcctgatgttgatacctgctcatcagcgtgtttgaattacctggaccatcaataaatgcccggaacaatatgagcttcagggacatggaatccattcgccaccaggcagctggtggtcagca

SEQ ID NO: 1888584 - DNA, 4001 bp, Homo sapiens
cacctccagctccagtccagccccagcctcctggaggccagccagccccaggcaccaaaacacattcaaccttggggggccattactcaccacttctaccttgaccccacaagcacccaccctgccgtatccccctggcccatccactgcccctggctctgcagctgccacctacacagctagtgccatggccactatttggcccaacgtacattctggtaagatgagagggacaacatttttatccatttttccatggatcaggagctctttctgtttatgaggctgtgttcagctatgtgacagagacaatcagccttacccataatgctggagtccagaggtggacagagggtttctattgacaaacctgcatctggataatgaggctcaaatctctgaaggtccatcctccctgtcctaggtgacaaacacagtggctctgcctcagagtccatggcaccagttgccatggtaactcccaatgtctctactgccccttgtgcaggagaaggtgacctcagggtctggggcacaacaagagctttacaaggggaattctgcatgcacaggttgcggagttcctactccctgatgtcccacaaccctccccgccacctggactgttgaaaagctccaatggtaaggtatgagaggagaaaacacaagatagtttctgtggtctctgagaaaatcacccatgggggtccctgtggtcctgagtgggatcagctataggaaagtcacatccatgaaatcaacatcccccaacttccccagagcaggcatggtgtttttccagcaatggtggagcctcgccttcaccctctcacgctccacagagaggtttgctggcctcaggccctcatttccccccatccatacccccaacctcctgacatgaacactgaaggtgcaggtacctacctgtgagtgactctggccacatcttcgctggaactcccctgggacctgtgtcctcactcatttcacaccttagtgcctcatccctgggtcacggggagcctcaggcagccccaagcacagatgatcggggttggagggaggtgactggagagggacaaggaggtttctgctctgatccctcaaagacagtagtccatgctgtagcgactgtctacctgcttgaatggtctccggcctctggccgaaaagaaaactaggaaaggctcatttctcttcttccaaaaaataataataataaaaaagtcaactccacaggctctgagttttgctcatctagataaccgggcaacaccgcagtgtatcaggaggtttttgtttttgttttcagcattcctgagacttcagaaacattctatggagaattgagaagagagtattttttgagccagaaagtgctttcctgtgaagtttgtatatgtgagttattttaatatctaaacattgtcagagaacaagactctgagcaggctgaggttttatcccgcctccccacctgtgtgtcagtgtgcgaaggactgctgtgctcaatcacacagtaattagtcagcctcgtcctcagactggagcttagatatgagcaaaagccctttattggaccagccttccatcaatccagaggagcagctcgggaccctggagccctggtcatgaagtacattttggtagtggctcaggagataccagggagggctccctggcttatgctggtaccagtatatccaatagaaatcagcatggacgccagtgctcaggatgcagggaagtgcggctggtgcttccagagatgcagagagggagggcggctgagtcagcacaggctgggagagggaacctgcagacacaggtggatatggctgctggctcacttaccagcatgaagttgctggaagatctgagccagaggggactgctgaagcctgggggacctgccctggacgtgggaggcctgtccttacctgggaagtgagagaggagcagcaggaggacaggagccatggtggacacagcccttctgaggtccagagctggagtgggctgctccaggcctctcttatcccttccactgacctcacagaggaggagttacagatgccaatgtgtccccacattgcctgcctctactttaccccatgtatttattcaagtcctaggggctggtggacaggggaagtccgacaggccagacctgggaagaagtgggtgctggaaccacacccagggagggcacagcttccaggtcagcctcagtgagtgcaggctccatcacccagccctgcggaatttgtggggtaggagggggttggcacagttgtggctgcccactgcacagaccctgagatccacagtgtctcctgctgctctctcgccagactgcattccctcagtagaagtcatgtgagtggtgtcggcctgagagcctagtgagtgtcagtctagaagtatctatggccacgccctgggccatggcccaagttgctgatactaaaagaaagacagcatttttcaatacgtttttcttgcattactagaaggacatgggcaaaatatcacctccacccaatgaaaggaggctgcggggaggctgcagagggctctgggagcaaagtcctgggcagctccttccacagaggccagggaaagaggtgattgtgacttgggtctcactgggctgtggggtcctgctctggaacaaatactcacacattactagctttggaaagatagggctttggaaaaaaaaaagagacattttcaatgcaatgatatgctgaggggatgacagaatacatcattgatgagaagattgaacaagtgaagtgtaagtgtcaagtcaggtaaggacatttgaatccagactgtagaggtccttgtgtgtcagtgaggggtttggtttgattcattatctgggattgtttcgggttgtgaactggaggcagaatagatgaaactgacagtttaaaaagacatcctttggtgtcaggttcaacaaagagcctgaaggcagccaaacaggagagggggtatcaggagggttgatggctgatcccagggatctggaggaggaaggagaaagaacccaggagaaaccacagggtaactgtgtccctagaggaacggtgagagagggatagggataaagctgagtgttgtcgatgggttgaccaggtgggttttattgttgttaactgtcttgcagagagagagagagagagaggagagagagagaagagcccaactgtgcactttctcaagagaaaacctgtatcaataatcaataataaaatgtacctagatcacctccctactcattgctggaacttttacctagtgtcctttatgaaagaaatacctagtgtctttatgtaagaaactatttcaacatttcttcaaattatctcccatattacttgctgagttttgtaattattttcctatagatatgtttgaagtttatcatttttagtgagactagaataataaacattctgcactacttttaaaattatataagcaatatatttgatcttattaagtataaacttgatgattttattattcattctaataaatttttaacaatgttttaatgttattcatatatagttgcctttaaaatgttaacacatttatgtaaactttttgtgctcttgtaatatccttggcctcttatttctcaggaacaaatttctaccacagagaagaaatattagaagttatatcaaaaatggagtatgttgtgaattttaaaaaccttttaaaatatggctttttaaccattttttaaatttttatttatttttttattatactttaagttctgggatacatgtgcagaacgtgcaggtttgttacataggtatacacgtgccatggtggtttgctgcacccatcaacccatcatctacattaggtatttctcttaatgttatccctcccctagcccccaacccccgtcaggccccagtgtgtgatgttcccctccctgtgtccatgtgttctcattgttcaactcc

SEQ ID NO: 1888585 - DNA, 4001 bp, Homo sapiens
tgcttgggttcccatcttggctcttttgcttaggggctcataagcttgggcacattcatctccgtctttttctgcccagcaaaagatgatagtaaatcaatcatgccatatgtctgtggtgatggctgaatgattcgatgtaggtaaagtatacagcataagtgctcatgaggcttaattatcagtgaaatgtcttgctttagatttcacagcttaataaggctcagagactcattcaagtccaggattctgaactcccaacccattgctctatgaaatacacctgcttggcctaaacccaaccactttatcataattcagacccagttttgaaagaagcagataaagttgtcaaaagtgctgtgtctgcctgagtgcacactcagtgccctccatgataaataatgggaagaaccgttattgatatttgatggcattacaaacttcaaatgacagctatagaaatgttaaaaaaaaaagtctgtgagctacacaacctggtgacaagacaagaacacaatataccacctaatcattagtctcatgtatcaccctggttgcaactcccttgacaaaggataccactatctgccacaacgacccagtggcctggctggcacagacaggggcagagcaaagggcaagagatccctaatcccatcactatgacgatagggcatcatagacagttcagggtgaaggcacaatccacattgtgaggtccaactgctgccatgtagacaggcgtgcttttacatatacaggaaggtcattgaagataagtgttttatatccacgatcaacatatgagatgaccatgaaatgaacaccagtgtactgggtggagcagcttatctattcagtcttctgcactaaaacctgtgaaagaatatcatgttgccttatttactaacaaatacaagtgcctctaaacttagtttccaactcacagaactgatgagcacttagctcctagagagagctctggatgatgggtcgggagaactaagtcacacaatacatcaaaacagcattaacaagtaaacaggttttcaaagctttctacatgcaaacttacacaattatccctttaatttttatcttcatatatatgtatatgatctatttgtttctgagtataaataaaactgtatgttcttagttaacagtctctaccaattcattctatttatctttctgtgttgaaatactgcatttcattgggaaacaaaaaaaaaaaaaaatttgactaagactactctggaaaggtgagtaggttgggtgattgactgtaattgacaattctatgattttggataactcccaaagcataaaaataaatgttttttatttcacacacagacaatacgcattcttattacatttaaaattgatatgtgaatggacatgacttactacaaatttattaaactaaatacacatttcacaacaaaagaagagaggaaggaaaaacatgtcaaaaacaaagataggtacattttattgtgtgaaaagcctcaaacccatctgtactactgtggcttttctccaaactttttgaaagtaatgatttcataggttcttaattaggttaaaaactacattaaaatagactttgccatattctcctcaagggaataacttaatttggggcgggagcattgaagggtgcaggatgtaaaaggaaatgatacatattttttaaatgaagaaaaagttcaaaagcaccctgcttgatacaagaatcaaatatataaaatgaggaataaaacataaccacaaaacttatttataactgcatatggaaaatacagaggataattttttaaataacatattttgaaagtattaactagtaatttgaaaagacagcatttgacaggccagtatgaacatacctcgaatgcaggaaaagtggatccccataagaaaaatcaaaatcaggaaaaatgaaagcacaaaggttcaatctgctctgaccttcgaaaaactcagcacagacagtggcacttaagactgagggcaggagatccctaatcccatcaccacggtgatggggcatcacagacattcccgggtgaaggcacaatccacactgtgaggtccaactgctgccatgcagacaggtgtgcttttacatgtacaggaaggtcattgaagataagtgttttatttcaaaaactgaatcccaagcctacacattattattctgtgtttcttaaaataagttatgagatgggaaatagggtacccctaaatatagccaatagtgagaatttcaaattgaagaggggcacaactgattattctgaaaacaagcagagattccattcttttttttctttttcaacttttatgttagattcagggtgtacacgtgcaggttagttacctgggtatattgtgtggtgctgaggtttggggtatgaatgatctcaacacccaggtactgaacatggtactcagcagtttttcaaccttttccttcctccctccctctcttagcagtcctagtgtctattgtcaccatcttcgtgtccatgggtactcagcgtttagcacctacttataagaacatgaggcgtttgttttctgttacattagttcacttagtggcttctagctctagccattttcccgcaaagaacataatttcattcttttgtagctgcatagtattccatggtctatatgtaccacatttttatccagtccactgttgacgggcacctaggttgatcccatgtctttgctatcgtgaatagtgttgcaataaacatacgagtgcgtatgtctttttggtggaatgatttgttttcttttggatacatactcagtaatgggattgctgggctgaatgttagttctgttttatgttctttgagaaatctccaaactgctttccacagtggctgaactaacttacattcccaccaacagtgtataagcatttcgttttctccttatccttgccagtatctgctatttttttttacttttaaaaaaatagtctttctgactggtgtgagataatatctcattgtggttttgatttgcatttctctcatgattagtgatgataagcattttttcacgtttgttggctgcatgtatgtcttcttttgagaagtgtttatttgcccctttttaaatggggctgtttttgcttgtggaattaagttcctcatagattctggatattagacctttgttgtacgcatagtttgtgaataattccccccatcctgtaggttgtctgcttactctgctgatggtctcctttgctgtgtggcagctctttagtttaactaggtctcacttgccaagttttgttgcaatttcttttaaagacttagtcatgaattatttcccataggccatgtcaagaatggtacttctgaagtttttcttccaggattattgtagtttgaggtcttaaatttaaatctttaatccaacctgcgtaaatttttgtatatggtgaaaaataggtgtccagtttttttctttttttcttttttttttttgagagggagtcttgctcatcgccaggctggagcgtagtggccatttcgactcacagcaacctccgcttcctgggttcaagtgattctcctgcctcagcttcccgagtagctgggattacaggcacgttccaccatgtccagctaatttttgtaattttagtagagacgggttttcaccatcttggccaggctggtctttttttttttttttttttttttttgagacggagtctcgctctgtctgggtgcccaggctggagtgcagtggcgcgatctcggctcaccgcaagctctgcctcccaggttcaagccattttcctgcctcagcctctcgagtagctgggactacaggcgcccgccagaacgcccttctaattttttgtatttttagtagagacggtatttagtaacatggtatttcaccgtgttagccaagatggtctcgatctcctgacctcgtgatccacccacctc

SEQ ID NO: 1888586 - DNA, 4001 bp, Homo sapiens
ccagtggaccactgcaaccgccatttactttctccgctgcaagcaccataggctgattcaggaagataaactgaggctcaaggaatttcgaagtggaacaatacaccaaagccttaaacctgaaatgactatccttttctggggggtgggggggaaagaaaaagaaaaaaaagtttctggggctctcagggtggcccagatgccagggtcccagaagtggccttttctagctcctgtaactaaacctggcggaaaactccccgcctgctcaccccatccgcccaagaatgcgccttcccgtcttcggtggccctacccagaatcccaaaatgtggattccaacccaggccctgaacgtcttctcaaatccccgggacttacgttgcggcgcgcgccccgctgtcgggtcttgcccctcgggcggtaccgcccaggcagccctaaatccagcctcccaggcccccagcagcgccctccgcccctccaccatcccgtccggctcgcagtcggggccaaatcgagagacaagagggctgtgcctgaaactgagcggtttcaccacttggcacctcctggcagaaacttccctttaaaaaaagaaaagaaaaaaaaaaaaagcagcagcacttttgggctagcatttcaatccttcctgccctttagagttcccagttctgcttccagctgcctttgggtgttccactacaattgagttgtaaagatattctttaagtgtttatagaacattaagacttaagaaaaatctttaaaattagaggagggaaaaaaaagccaccttatcgcacacatccaggaaacgcagccccgtgcatccctgctcagggataagcaggcgccccaggactcccggggacagatttttgggcacccgagggagtcacccggcgcacctcggggtccgcggagaggcccagcccctcccgcggtcccttagacgcgccctccgcctggcccgtgtggaccgtcccggccattgtttacgggggaagcctgtcccgacgcattgttttggccatttccaacttcccccggcccttcccggggtatcgcgggggaccctacgccaacgtcccccctccgcccgcgccccaagggccgactgggcaaattgggagacccgccccgcggggcgacccaacttttcggaacagccccccaccgcccacccccgcagacccccggacccccgctcccggcggagattcagggaaccccgcaccccaagcccttctgaatcgtgcggcgtgagtgtgacggccaagagcggatgcagcccgggatcgcccgcaccttcccgccagcggaagcgcaggagccggctggggagggggcgccctagaaagagcagctagaaagctgagacggggaactgaggtcatcctggggggggacaagacaacgagagccgggcgcctcgggggcggcgcgggagcctccgcaggaccaggcgggcgccccggctggcgcgggcggggggcgcccccctttacctgtggctccggcccctcggccatttcctcgcgcggcggctgccgggactgagctgactccactcgggccggccgggtttgaaagaggaggagcgggcgcggaggggagggggcggggagggcggagggagggaggcctcgcgcagttttctcggccttttgtgcggacacctcccggattccgcgcccgcacccggccccccaaaagacacggggagccgcaagcgaggggtgcagccatctgccgaggcgcctagtgccttcgcgcctccaagacccccaacaaaaaaggagcgtcccgcacccccacccccgcccggaggatttaggggccgggctcacctcgggcgcggggctaagtgcaggcgcggggggggtccctagagccgccagggcgcggcgcgtccggcgctgggggactgttgggtcagaaagtgttcagggagcagctgctgcgccctccctcggcccgccgctcggagacgccccgccccgccccaccccgcccccgcgcccacgtgactagcataggcccgcccccgctccgccccccgccacagactccgcctccgggacgcgagcgagcggcgagcgcgcgcactcccagttatcgctcggcgactcccgcgcacgcacgcgccgtgccaccctccccgcgccccccgccccatacccctactcccgccatccgatttaacgtggcgggcgagcgccgcggcggtagccgtgacaggtacccggcggggggggcggggggggccgcgagggtgtgcgcaggcgcagacccgggtcccgtccccgccgccccctcctctgcaaggtgtgcccgggcgaggggaggggcccgcggcccgaactcctgggtcaccccgaattacaaacaaaaccttaacgccgttgctcgcgggttagaaggcagctgtgcgcgaaaaacacctcagattttcttcaagcgtgaggaaggtcgagaagataaagtttttaaatgagtatcttcagaaagctatttaattgttctgatttttttttttctgaaaggactgggcttgcgctattctaacttgagatttctaaacttagactaggttccaagaatctacttggttttgatagaaatccatttggaggaaaccggggacaaaaaaaaacaaaaaaccgctaccctttcccctcctccctacgcacaactcatttaaatcgtttcccaactgttttttttttcttactgaaaaaaaggacaaaaaaaatcctgattcctaaggcctgtgatatttccccattttaagtaagcctcgaggaaccacagacataacaaacatatccacaatttttctaccccaaaatgcaaactaatgcaaatgtgaaatggatctatgcaagtcgctaccaacaaaatagccaaatatttgtttttttactggccttcggcatatccaaaatgaaaaaactttaaaacacatcaagaaaagcatttaaaatatctatttcctaaatcaaaagaaagaacgcactacagaaacgatccggagctggtgagcaatgcaatcttaataaataggaaaaggaatttgagaagacagctcagcaaaggggaagaatttgccaagtgtcatgttttgctgtcattttatatataactactaaccccccatatggtctggttagtcttttttaaaaaggaagccaatcaattactcacaattaattagcagtgccggtagattcttaggccagcactaaaaaactaaattgggtgaattttttttcactcaagtccactgatattgatcacttttagtattaggagtccttttctgacaaaagatgaatacctatctttaaaatatattttttaatcttattgtcacattctaaaacacagtccaaaaacacttcataaacaagaaacttcatttaactttatgaaaacaaatgactatgagccttgctacacaacaaagaaactatgaacaagtgcaaccaggttgagcctttaagtgtagcctcattctacatgttaatggataacctttgaactctgagaacttgaatgctgtaaacacaatagcactgacagttaaaaattccagtgtcaaaatcgagcaaaaagaaaagtccaaacttttcagggggaatagggaaacaatcaaatattttgacaaataatcgtttcagtaagaacaaggagattcctggctctcagaccttgttgctactgaattattttctgagcaaaaacggttgtgcttgttttccccctgtgccctccaaagctaccactttgttcacattatagcatcatgatttgttactgtttcgctgcctccctcaaaaaaaaaaaagtgccttattatgttgtagcttttaaaattgaaagatgattatattcactgatctatccgctaagagttttatttatatgtgatcctccttatgtttgagcaaagaattacaaagaaccttgtcctggagtcgtgccaacgaaactgg

SEQ ID NO: 1888587 - DNA, 4001 bp, Homo sapiens
gcagggttgggagctgcccttgtctcctccacaggcaggaagcttgtcctccctctccagcacctcagctgcccctgccacccccacccctctcagccctgaccctgtggtccagaaaggcctctggaggccagctgtgggtggcagggcctctggcttacaccagcgggcagcagggagtgtagtcacctgctcactcgtgtctggtgctctttgtggctataggaagcagaggacaggtgctgggaggagggctggcctgaggggaaactgaggcctgggactgcggggtcagggcttggtctctgccactgagtttgcacctggcttcccctcatgcctggccatttggttccggctcttgaaatagatcctctgcccacctggtagctggccggccatgggccgtgccacgccacctgcctgctgcagcccagcccggtcaccccgaaacgctgacaaaagccagctgctctcccagcagtcgctcggcaggcagacacccggaggcgtgacgcctgccctcgtctggcaccgaggctgccaggagggcgctgacgcagctctccccactcccactcccaggggctccgcagctcctttctggaatggcttcccgatgaggtaatgcagctcggagcacaggaggaggccactgggaaacgctgctggccaggccccagctccccgggaagatggctgccgtggcctccctgccctgcctgcccgacgccaccgcacaagggcctggcaggctgagaacaggagccggacttcaggccggaggcttggcggcctcactctggagtggccagggggacccagacatttactcatctcccggccgaggtggtgcaggcctcagcctgggcctgcagcctcactctgatccttagaggcccctgccctgagaacacgccgcccccgggcacacgcggagaaacagaggccgtgcccagggttatagcaggaatcaaggtctgttctcgccctgcagccctgggggcaagggcaggcctccctccacacgcatcgcatcgggtctgggaacagcaccatgagcttgctccgacctgccaagcggctttttcctggaacatgagtcttttccgggcacggagcagagcactcaggccaccggccctcctatgctgggagcagggggagatgccggctggccgagcaaggaggcccctggggctgtccacccggtgtccctctcagggcccctcttggccccatgaaaaggcggcacccccaccccttgcctctcctagcgctgccaggctcccctgcaggtgtgacctgcctcgcagaagctgctgagaggcaggaactgagcagggaagtgtcccaaggggtgactcacttccctcacccacgtttccccctctccctgccaggccctgcgctgggcgggccctagggccacagggaccagcatggcccggcagccccggacctcccaggtggaaggaaggacccggagaactggaaacatccttgcatagcagcccccgagttggaggcagccactcggcacctggcacctggcccaggggggcctcctgcggactcacgtgggctctgggaggtggaggagggtcacttcccccaggggagagcggagaaggctggcaggaccctgctgtgggtgtgactgggaccgtgctgggccctgcgttggccagcagtgtcccgagcgggcctccgcgccggcaggcccagctgggcctatttctgactcgaatttgttgcgaaacgtcggcaaatcccctgccctggctgggcctcaatttccccatctgcagacaggaggcgggcgagagggccccctggacttcagggcccgtgggtctgacggccagggctgcagctgaatctccgagttggagatgcctggtggggtgcagcacaccctgcgtgcacagatgagggccgggctggctccaggcgtgcgggaggcagcagtggagctgggatcggagtctggactcctctgctggcctcgagtgaccccgggggccttcttgtcccccctccttgcaggaagcacaggcaccagctcctgaaagcagaacagctcccctctgctgccccctggtggctgcagtgacacatggtggcccagtccagagccagggcacccccagggtcaccgacaccctcaaagtcatgagctcccctggggccatgggtgtcgtagggctggggccaccctctctgggagccctgggtgagagtgtcacttgtgatatttcattgaatcttcacccctcccacacacaagagagggatgatcatgtttgccgcttcacagctgggttgtcagtttcagggggcagagcctgcaggaagctggggccggagaggtttgaagtcagatattccagtggaaagtgctcccctcccctccagtcaacagccacctggggcttcaggctctaggaggggaggagtgggtggggaaggtcgaggcttattattcttcggggtgtgggggtggtcactaaaatgggacctggtggccgggcacagtggctcacgcctgtaatcccagcactttgggaggccgaggcgggcggattacctgaggtcaggagttcttgaccagcctggccaacgtggtgaaaccttgtctctactaaaaatacaaaacttagctgggcatggtggcacacacctgtaatcccagctactcaggaggctgaggcaggagaattgcttgagcccaggagatggaggttgcagtgagctgagatcatgccactgcactccagcctggccgacagagctggactgtctcaaaaaaaaaaaaaaaaaaagaaagaaagaaagacgggacctggcttcctaactgagggaaactgaagagaagggcccagttcacgggaataaggtgccagtttgggatgcccctacagggccctaggtgcaggggacagggctgagggagcgggggaggcgccaagatgtcaaggccggcagccgttctcctggggcagagggccagtgcccatgcccgcaccttgggtccccagggcagccaggtggagccataccacctcctcgggcttcacctgcaagcccaggccctgtgctcactgagcccccacgcccgccaggccacttccagaggctgtgcacaccctctgcccagatccaggagaggggctttcacacaaggagggagaggctcagaaccctggcaacctacccaaggcatggcacatggggctacacgggtggattggaagctgggttggccacctgaacccctggggtcctggcatttccaatgtcaccatcagaagggtggatggaggccgggcgtggtggctcatgcctgtaatcccagcattttgggaggccgaggcaggcggatcacctgaggtcaggagttcgaggccagcctggccaacatggtgaaaccccgtctctcctaaaaacacaaaaattagccaagcatggtggcaggtgcctgtagtctcagctacttgggagaatgaggcagaagaatcgcttgaactcgggaggcggaggttgcagtgagctgagatcacaccactgcactccaacctgtgcgacagggcaagactctgtctcaaaaaaaaaaaaaaaaagaaaaaagtaaaagaaaaaagaatggaggacggaagggccacaccatgcaggtgctggggtcctggcgtttcattttcaatgtcaccatcagaatggaggatgggaggccgccccgcgaatggagggcgggagagccatgccatgcaggtgctgcctgcttgggttcctgtgctgggactgcctctctcatctatcaccttgcacctccatcgctgtgacacccttcacccgccgggcccccacaaaacatgcttgggctctgcagccagactccatcctcccccaccaaccgtccgactcctagagccctctcctggacccccagcacagcgcgtgcgtgacggaaccctgcagagccacttcctgttagaatcaga

SEQ ID NO: 1888588 - DNA, 4001 bp, Homo sapiens
aaccttggttcaaaagacaagtgttaacatgaagtcaaaaatgctgacgaaacactttaaaacacaaaatccggggccatcgccgtgtctgagtgtgtctggcctcactcaccatgaagctgcaagtactgtacacagctaaacaaaacaccactcacaattccatcatctcaatgtttaaaaaataaggcaaatctcagtattttccccctaaaaatcctgactttgtcagtcaacgggaaacaacacatctgcccaaggccccccgatgaggtcccccatgggagtcacaacggggggatgatgttcctgctgggggccctctgggtgtcagagctaaaggggtgtgtgattttttttttcttttttgaggcggagtctcactctgtcgcccaggctggagtgcagtggcacgatcttggctcactgcaagctccacctcccgggttcacgccattctcctgcctcagcctcccgagtagctgggactacaggcgcccgccaccatgcctggctaattttttgtatttttagtagagacggagtttcaccgtgttagccaggatggtctcaatctcctgacctcgtgatccgcctgcctcggcctcccaaagtgctgggattacaggcatgagccatgacacccggccatgtgaatttttttatccaaaaagaaccccgttttcctgcctacctacctcatccttaaaaaatttttaaatctatttccaaaggaaattatgtaaatttgtaaatagagcatttctgtagaatttttttggaaacgatgtctcactctgtcaccaaggatggagtgcaatggactccatggctcactgcaaccttgacctcctgggctcaagtgatcctcctgcctcagcctcctgagtggctgggaggcatgttttgaagggaatggctggactgcgggattttccacccgcttcgtacgcttcccgtctgttctcaatgagcacgaccgacttttcaatacaggggctgaatcagcctccacccgcttcatacacttgctgtctgttctcaatgagcatgactgactgaaacagaggggctaaatcaagctcagaagggaatgcacagattgggcgggtgcactgctgccctccacagactcaagtcagacaccggctccgtctctcctggactggaatgtaccgtgacctccaagggaagctctgtgtttctcattttaacctcggtcattttaaggcaggaactgtggccagttgggggtgtcatactcatttctggcaagggaacaaataaatttaaaaacctacaggagaaggccttgagccacacgctgagctgccctggggctccacatgctccccatactcatcacagagtgggctcagaccctgcacactcaggccccgaagatgtctcaagagggaattaaaagtcccgtcctggcccccgagaacccctcaggagcagcgactccatccctactccaacctgagtgggtgaaggcaagggaagcccacccagctcgcatcagcagtggacggacggagcccagcacccctgccagcattcagcccacaggcccggagaggggtctgccaacgcgtgtgacccgtctccagagagcagccacgagcctggcgacccacaccccacagcccggcccccagcacactccagaccccaggtgcagggtgagcctgctccaggctgaacagacgcagcccagggcctgggtggggaggcttttagtagttactggttggccgagcaacggccacttgggggaagacgatgaccagtgcggccttcacaagactgcccagaggtgccagcctgagggccctagcacgagatcacccgcagctgtgccagcaccaacacagccaagccatgcacagaccactcagcagccacgacggccccggctccgtgtgcatggagtggggccaggaaggggattaaaacacaaggcaagtccttaattctcagaaagaggagaatgataaaatgcccctcttaattttcctaagcattcagtgagtgcgcgtatgacgcaagaacacacagaggttctgcgtgtcacccatgaaaatgtgacagcacccgggaagacgtgggcagcacagacaaacccagcccaaccgagacaccacccagcaggaggcctggcgggggtgggacagctgcaaggcttgctaacaggcggtctgggggctgcggcagtgcggggtcacccaggaagccaagaagccagaccaggacacagacacatcccgggaggctctgcagccaccgcctggagtccccagaacctcgggggagctgcaaggtggcctgcgctgcccggaccctcccagcctccacctggaccaccagaaaataatctaagacagctatggttctgagatctctcaatctcggccctgccaactcccgccctgggaggctcttccagccagctgggagatgtccaccatgacccgcacctcagcacccctgcaaggacctcagcccagaacattctgaagcccaggccagccttgaggtggggcccaacgtggggaacccagggcctaaggtctgcagagatgggtgcccggtccatgaggcatttgcaaacagcaggcactgaggccgagcccaagcctctaaatcatgtaaatagcaaggggcaactttcagcaactttttcagcacgaggtttttttttaacgctgaaagtaaagctggtgactgtgagaaatacgttaaaagaggcggcggctgccaggaaagagccgctgccccatcaacacaggagctgcacggaattcccacagcggccagggtccacccaccctcaagggccttcccagtgacctcctaggaggccaaagactgaacacagaaatgtccctctctgcccccaaaggagatggcgcaaaggtgtcccacagcccagccaagcgcagtccccggaagcctgcccgtcaccaggtacgtccacagcacacctgaaactgtcccgggaggtccccaaagggtcttctgagagactgaaggccacagcggctgagacaccgcccctccccacagggaagagaagccccagggcccacctggggaggcggaggcctgcaggtctgactgatgggccgtagtctcctctggtctcaggctcccagcccccaacccatgtggacaccacaaatcctccaggccacaggtgtaagaacaccaggccctgatcagtggctgccgagacacctgagggcacggagccatgggaacgcaaccccacaacacgggatacaagcccgcccctgcccgcccctgccgctggcacccaagctgccacctcggcttctccggctcatgggaagcttggccgtatgaagcaggtgggctgagcctgcaccctgaagaccagagccctgagggccccacgcagtgacaaaggagagcccactatctcctgttttcagtttcacttttaccatcgttaaaagaagagcagttttggtgcatttttcaacctctcaacaaaaacacacacggaagaagattccaacagcaccctgctcttgctgggacctgctccgtgacaatgcagccggggacggtcagagaccgacccaaggcccatgttgctgggacctgctccgtgacaatgcagccgggacggtccgagacagacccaaggcccaggccagatgcctgcacaagacttgctccgtgacaatgcagccggggacggtcagagacagacccaaggcctatgttgctgggacccgctccgtgacaatgcagctgggacggtcagagacagacccaaggcccaggccagacgcctgcacgagacctgctcttgctgggacctgctccgtgacaatgcagccggggacggtcagagacagacccaaggcccatgttgctgggacccgctccgtgacaatgcagctgggatggtcagagacagaaccaaggcccaggccagacgcctgcacgagacctgctcttgctgggac

SEQ ID NO: 1888589 - DNA, 4001 bp, Homo sapiens; identical to SEQ ID NO: 1562807

SEQ ID NO: 1888590 - DNA, 4001 bp, Homo sapiens; identical to SEQ ID NO: 1562813

SEQ ID NO: 1888591 - DNA, 4001 bp, Homo sapiens; identical to SEQ ID NO: 1562819

SEQ ID NO: 1888592 - DNA, 4001 bp, Homo sapiens; identical to SEQ ID NO: 1562826

SEQ ID NO: 1888593 - DNA, 4001 bp, Homo sapiens
tctccattccaggctttgtgtgtaagaggcagtcagagccctcgggccctcctgaaatgtgcatatgcaccactagccccggctgggacatccgccctctgctccctgataaggtccctctctgcctggactggggactgaggatccgagatggaaaagccccagcccagcgcccctgccttcctggagtcagagaggcctgggttctgcttgtggtgcggccttcaccaatcaccccctcctcagggcctccatctccctgctggtgtggagtgagggatgaattcacagcagggcttgccaggcttttttttttttttttttttttaactgtagaagctttccttccaacaaaatcttgcgaggagctcagtgtctgaaattgaaaagctgggagcatcttcttgattgtgttttttgggggcgagtccctgggctttgttttctctcccccttcactccacctctctctcaggtcctggggcacctggaggggagttccagggacctggctgggaaagagctgtcctcagtgcccatgggaccagtccatgggatgtgtctgtacatctgtgtatcgggccctgaggcccacctttagcccacctcccctcccgaggtctccttctgccaatcacctgcctaatgcccctgcaccctggtgtcaggcagccccccagagctgcatccctccctcctgtagttaaccaatgctctatgagcctctctcagccaagaccttggcatcagctcaccactgccccgcccctggccctccccttcatcacgggccgtctctcaggcttggcgccctgggatgctcccttgctccagctctgtgactgtccccatgagggtcctccctcagtgcagccccatctctccagcggtgctggcacgatggacccggttgactccctgcctcctgccctctccgttcagtctaaactgcacagtctaacgtaggaaccactagagcatgcagctattaaaattcaaattaaattaagctgggtatggtggtgtgagacttgtcccaactactcacgaggctgagatgggaggattgcttgagtccaggaattcacatacagcctgggtaacataggtctcgtctctaaaaaacaaaaacaaaaacattatggaatgagcctctggggatgaggagctgatgtcctgaatggaccagtgaccagtgcaggaggggtggagtcctagcaggggtagatcccagctttgggaaccaactttcccaggcacttgccggccactccgtgggaaagtcctcaggcagcctgcagggagctgggatcagctgatggggatgggtttggaggggagagagtggtgcacagggactggaggtgggggaggggtggggttgccatggaaagggctcttgggatgggtcttgggctgagcctttggcaaggcctccaccctggagctgagccagcagagagtggggctgactccatgaggcccagactctcgtgggtattctggtggcctgggcaccctgtctttcctgaaccctgcctgcctaatctaagaactgctccccttgtagctctgtctctcctctgttggcctagtttcttcatccatgggtgggcacagcagaagctgtctcacctgctccatggtgaacgggatttgcaaggatttgactctggccatccagggaagatggagtctttgaccaggcctggcccctgaagcagacttcttccttctgagcctgctggggaagcagaattcctcgatgctgggtgtcatggtctaccaggccctccctcgcccaggccacttgtgttgagcctggagcagaacccccagatctgtagtccgcctgtcagcttggggagtctccgtttccgtctgtttcattcccatcagctgtgtgtggctgagcaagtcacttaacctcttgaggcctccatgtcctcatctgcaaaatggagacacacatatctgcgtccccgatgaccaccagtagctgggatgatacgtcgactgcagagtgaccactttgtgtaggcgtccctgtggatggttgtcagtcaaaggagtgagtcagatgatgagaggggaggacagcagagcagcagttgtttcttcagtctcgccgggactccaggatcggccatgttctgcagccaccgcctctacctgtctccccatgtgggatcctgaaacctcaagctgcatttagtttcagagtccggggaggtgctcactgtcttctgactcctgagatgccgactccctctgccataccccagggaaggaaccagtagcagaagctccagggaaactgatgaaggtcaacagaaggaagaacttctagcagcccaaagggattggaatgggcggcccgtgggagtggacatgcagaggcactggcctggggtgaagccttggaccaaattcttacttgcaggccctctggacccaggagaggagtctgcaggcctcggctgggccggattccgcagattctggcctaggtcctgaatgcctggtgagttactgagaaaggccctacaggctgagggtgccagtcagggtgaagcagccccgcaattggcccacctccttttgtaccttaacaaaggtgtctttgttacctttcttaaaggaaataaagccggtcaggagcaaggcctggcatattcagggggtcatctgtatttggtcgtccagcgggaaacccaaatggaaggaaagaaaaaaaaaaaaaaccatgcatttatagaacctctgccaatggccaggctccatgcagaatgctttgacaccgtggctcagccaggtctcccacaggactgcaaaacagagggtgacatctttcttttagatcggagaagactgaggaccagagaagctaagtaacttgccaaagggcacacagcaagtaagtcatggcactgggattcaaaccaaatcctccagacttccagtaacagtggagccggcgtgtcctgagcatctgttgtgtgcttaggcatggtccctagctttttgcggggattaactcactcaactctcacaacaaccctgtgagacagaaacggttatacctccgtatcgtggagggggaaactgaggcacggggaggcagagtgacttgccaaggccacaagcagtgttcggatctggccattgtggccactggcctaccttgtgccccaggagctgctgtacatggcagggattgctgcaaagatgtgcctcctgccttctttttggaggtggcagagcccttaggtcacatggggcaggaccaggccgggtggaaggtgagcacagggagacgggcttcagcgcgaagccctttcgtacagttgaactaactcctggagaggtagtgcgggtccaccccaaggtgtaccagggctgggggcagtggatgggctacttcctgcccagaagtagagactgaggttgtttctggcatcctccaaaatgcccctcatggacattacagggatgccctgagtgcccactgggtgttgggcctgctttactgctggacatgtgacagctggccccttctcccagttggaggagtgcccagtggctgtcccccagctgaagacgccagacatcaggtgttgaggggcaggcggagaaggggccagagggtggtggacaggggaaccggctgttaagacatgagccgtctgaaccacggaggtgggtggcaggggccagggtgaggccagccaagggcaccctggggactgagctaggactctggccagcacgggcaagctcaggaccacggagagctccacaggagccgcccttcaccaagcgacagctgtcagtgtgagtctgcacctgggaggctgctacctgcctggccagctcccaccatcacagccagtggcctccagagagcacctcccttctccctggccagaagcccctggctgggctccacctgagtcctgactatgaggtcatggctgggtcatggagtttgggctcatcag

SEQ ID NO: 1888594 - DNA, 4001 bp, Homo sapiens
tgggggactgtgaagacttcaccactcttccctgttaaggagtagggttaaggcttaaaatgagtagatttcagaacagttctcaatggcaaggatcactaaatagtaaaataggcgggcatgggggacatggaaggtgtttacataaaatgctttcaacatgaaattaaccaaacttagagtgggatcaattcaatgccacacaaagctaggagctggcaaagtgtccggaaatggtttgcccaggctgctggatgattctgcctagaaagttgaggggcgaggtgggggcactcttccctcaaccaagcatctgcccacctgcaggatgaggatgaggaggtctgagtaaacatcagatacccagccccaccccaaacctgctgactcatcctccttgccacgtggctcagacatctgcttactggaagcaacgcccctaaagtctgagaaccaccgtcctcaggtttccctgtctgtcaagtggaattactcatccctgccctgcgtctacccccgcctccctccctgggccatcgcggggctcccagatgctcccaaatgggaatgcgctttgcaaagcactgagtccagagcaagtgttttgctttgagtcgtgctcagtcccagcctggccccgagaaaaaacaaagccgttccctcaagttctctcgcagtcctccctctcatacttcctcccctcccgccgcagcaggtgggggcgttttccccgcggcggcactgcagtggggtgtgcgcgccaacaatcccaggcgccgggcagcctcggatccggagcctgggatgagggtggggaatccagggcgcgccccccaggcctcctcctgcacaatcccagaaacaatttctctaccccagggccctccgctggaagaggggaaaggtctggcccctttcttcccaaatccccagcctctccagggagtgtcctggagccgaggagaggtagagagaatcgagctggtgggttgcgggatctcctcagaccctttaggagatgcaacatgggctttagagtcctacatatctggattcacaatcactggctgtgtgaccttggaggtgtcgataaccctctctgaatctccatttcttcatctttaaaatggggttgtttcttaccacctcgtgggactgttgtgataacgcttgcaaagcaccaagcacgtccctgcgtagagtaacctctccataaactgatgtcactgttgttttcaacgagggtgggttacctaccagccctctccatccttttggagccaaatttgacgccggacatctgggaagtgaaggaatggcaggctcggggggttgggtcgggggcgggctgagtatgagggaaggggagctcaaggaccctgccccaccgccccacccccacctccagttccgagaccctctggctctgcccgtggcttggccagttaattgctaacctggtggaccgagaaggtccgcgggtccacctcccaaattgtgtcttgtgtcgtcggaaggaaagggtctttgttccccctcataatcatgattgcaagatccccattcgcactggactcctaaagcatcctccccttgcctgacctcaccccccatcccagccagagtcttggctgtgtttgagaattacaggctgtaaagcctcttcatccatccaatgcgggacacttcaggcggcgttgcatccctgaacccagccctgggactctgggacctaccctcgaccccagccttggggaattaggctgttccccgttaggggacaaggacacttgggaaggaaggcttctaggatggggcgacgtcttacctcgggtccgcggtcctgcggcgctagtgcagagggctctttgtgccccggctcacagcgcagaactgggggagcccctgcaagcgcctcccatctcaaactcctccccgcactcgtccgcagcctccctccctctggtcccgcgagcgcagccggcgtcgtctttgtagctgctgcagcgcccatgaaattttaatgcgggagcggctggcgggcggaggcgccccacccccggccctcacctccaccctcctcccgcctccttgcgcccctacaacctcacacccaacccctccttacccgcgcccagagtcctggccaggaaagcggggtgcaaccggtcttggagggagcactccgcagcccccgccgcacaaaggggctagctggccggtgcgctcagcctcccgcatccccacccgcggcgctgtcatggcaacgcttgcccgtccacattaggccgcagagagctcagggctggagaggcgcgggggctgcgcgcgaccgcggaccaggggcgcagaagcctgaaccccggagtaagaggacagaagacgcttgttctggcatagcgccaagggcttaaccaggaagacctcgggtgtatgcctctttatgcacatggttatggtggagtccagatttgaacccataactgttaacttcatgcgtgtacagcatttggcctaacaacatttataggtttaatcttgaattttttattattatttattcttattgttttagagatgggacctcactctgtcaccccggctgaagtgcagcggcacaatcatagctcaccgcacccccccgaactcctgggttcaagcagtcctcctgcccccgcctcagccttcggagtagctgggactacaggcgcgagccaccgcgcccggattagtcttttatttaactgccctcttcttagtacctactattttctagagtagggatgctaggaagtggtcctgaagtagtggttctagagttgcagcatccacattgcttgagaacgtgttagaaatccaattcgaggccaggcgcggcggctcacccctgtaatcccagcactttgggaggccaaggcgggtggatcacctgaggtcaagagttcaagaccagcctggccaacatggtgaaaccccatctctactaaaaaattagccgggtgtggtggcgggtgcctgtaatcccagctactcgtgaggctgaggcactagaatcactcgaacccgggaggcggaggttgcagtgagccgaggtcgcgccactgtactctagcccgggtgacaagagccagaccccatctcaaaaaaaaaaaaaagaaaaagaaaagaggccgggcacggtggctggctcacacctgtaatcccagcactttgggaggccgaggcagacagatcacctgaagtcaggagttcgagaccagcctgaccaacatggagaaaccccgtctctactaaaactacaaaattagccaagcgtggtggcacatgcctgtaataccagctactctggagggtgatgcaggagaatcgcttgaaccgggtaggcagaggttgcggtgagtcgagatcataccattgcactccagcctgggcaacaagagcgaaactccatctgaaaaaaaaaaagaaaagaaaagaaaagaaaaatacaattcaggctgggtgtggtggctcacgcctgcctgtaaccccagaactttgggaagcctgggggacaagcttgcttgagcccaggagttccagaccagcctgggcaacaaagcgaaaccttatttccacaaaaaatacaaaaaaattagccaggcctggcggtgtgtgcctgtagtcccagctgcagtgagccctggggaaagaaaggaaggcccagacatctatgtttcagtaagcccaccaaggaattctgatgcacactcaagctggagaaccactgtgctagaacattccagcgaccttcagaaccagactattccgggtttacatttcagttctgcccatgcctctgaccaaatgtgaccttaggcaagctccacacccttcctcagttacttgtccataaagtagagataataatggaatccacatcatcaggctaaatgaaggaagtgtgattagcacagttgctggcacctagtaagggctcacgacatatttatattattaaa

SEQ ID NO: 1888595 - DNA, 4001 bp, Homo sapiens
atccttagcagcatcaagtctttgcagttaaacaaagaggagtttcaggaataggaggtgtgagcttcctgctttgagtgaaatggagcaaggcagccactagaggatggcaggcaggcacttccgggtgtagactaccccatccaaggtccctgccagcagccaaggcatgttctcaaagctctttctaagacatcttttctctcttgtgccctctgcagctcaggcctctggatcacccttcacccccactgccaactacaattggttagctctgagtccacagttgccagagaaaagggctctcagcaccagactagcattcaacgacccaagcaacctgcctctaaggtctgtaagccagcctttgacctgtccctaaactgatccaatcctccaggccctgccttgaactgtcttctcctgcagactctgactaccagactgagtcagcaaaaccttgaactagtgccaccttttacctgcacctggaatcccttgcgtatgctccctgcccctctactcccaaaggacgttccctcagtctaaagagatcaaaagtcccttccagaaaaactcccgtttcctcggtgcagctaaattgcacagaagagtttatgctagaagagctaaaagttagaacaggaagctcagataatttatactactaacatgtaaatgactgacggagttataacccttctgaatactctgatctaaagctttatgtcctagaacttccaaaacacaaagtccccaaaatgaagactctaggccctggcctggggaagggtgactctatacaaaatggcatatgctctgtagacaccagacaggtattttaaggtttataagagctgcatctacttgtgcaaactactgtagctataaggctatatttttttaagaactgaaaccaaatgcagactatgaggagtgaagatatgcccaatggccaaaaccttgcaagactggctatacttctgaccccaccttggtgggtaccactgctccatcaggcctggtccacaccagagccctggcacctcctttagaaaactaccatctttaccgacttctgattgttctgactcagagcagccaccacgcccaaaattgttagctatgcttttccctgtgttagtcaagttcaaacctgtgttagccaagttcaaacctgtgttagccaagttcaaagctgtgttagccccttcccagccatgccgacatccaagctgttaacagtaacgaggaatgttagacctgttgttagtcagaaaaaaatccacaaaccattagtttctgctgaaaggaacagaccaggaaggcaggagttagtcaaggtgaaggaaaggttaattaagaaccggtcagggccaggccaggagcctggaacccccagacagggccaggttggttgttagtggtcagcccctggggcagtcagggtgaggcagggattagctgggtgagagcaagagttagcgcaagggagccagagattagcccaaagaaaccaaggtgcctactggaggtgaggcatgaaatcacccccaggtgtggccccggcttagcggctggcgggctctgggggaggctggctgaggcagtgacgtccgtgggaacagagagccagagatgcattcctggccggcctgagcatctgcgggaaccctgtgagcccctgaggttcacttcttgctccccacttctctctcctgcaaactccgagcccggggtaaagctgcttcccctccccacaccccttttcaacccgacaactaacgccctctagcttccgggaatgggacggatctttcccaaggacttccggtcacggccccacgtctacttacggtgggggaaaccggcctctctcggctccagagaggggagacggctctctagctgacttcctgtgtgggaaagagtcctctcactgacttccggtgtcagaaatgtccctctttccggccttcaaatatgagaaatgtttctctggccgacttcctgtgtactaaatactccactcagtggtttttagcgtaggaaagacccgcttcattgacttccggtgtaagaaaggctccgctttctgacttccggtgtgggacacgcccctctgctaatttccggtgaggggcacgccccctcctgccttcctcgtgggatacgcccccctcgtgacttcctgtgcaggacagcttctatccccgtcacttaacaatggagaggattcttccccagcttccttccagaggacacaaaagctcagagctccacagtctagagtctagaccaacaggcctccacactcacgtcccagagatttccctggtcccacctactcccagtggcaaccagacttctgcacataggagagatgtcatactcagagtccagcctcccacatccacaggaccacctcttcctcctctgagtcttgttaatagggccatcccctgccttagacctggcccagtggactctgatcttacagccaatatggggcagcaaagtgggacatctgtctacagggccagtagccccaggtcatctgcttgccaaaaggagggggaccagcccccggggggagcccagagctcggcagggctggggttagtaagaagagaaaacagggttagtaggggctgggttagtaagtcagagcacagcaccagcggacagggcacctcagcagacacacacaggagtcgctaagagaaaaggaagaacgcacgcaggtccgttagtttgttaagggatgatcggggtgcagttgaggcaccccaggggttagacgggttagtaatcgaacaaaagagctgcctacagaaaagaaagctgagacggaggaagaatgtggggaagtgacatggattcaaagccaagtgtcttgccccaggcagaaggatctgtgtgcagaacacccagagaggccagggcctaggcagcagacgtgttcaaccaggtttgaggggccttcctccatcctcatactttttttttttttaggtgtctgccatgtgctgagacccttatattgacgggaatcctcactgcaacctgtaaggtatcagaactcgcattctaccactgaggaaactgaggttgagagaagtgaggtgacttactcaaactcactcaacaggaagtggcagagttggtgagtcttatttgcattctctgtcctggaacgtgggtctgcacaaagatcccagcccataggcagagccttctggagccttggctgcccccatatcccagccccttgaaaggcccatgagctgcacagttagtaggatctggctgcgggggggtggttagtagggcatgctcgggcctggttagtgggttagttggttggcagaaggccaggcacctcgtcacacgccacagcgtcccggctgagccctgggttagtaggttaatcacaccatgcaacactgccccggcccctccagctgcagcttcagaggcctcccgcccccaccagccagggagtggggcctgaccagggcagggggtctaactctaagccccccagccccatcaaaatcaaccctaaccacatggaccctgcccaaaagcatgttgcttccctatttattggctgtgggtctcagagcaccccctgcaaatatttcagctcccctgaaaatggaccctacttgtcctagacagaaaccccctgcctggttctggtcagccccttcccagagggctggatcctgttacactctgacagacacacgcacacccgcatctctccgcaaaagatctgacaaccgtgcttagtagacatctcttccatcaccgactgtcaggcctctagtttctccaactattggcctgccctcccaccattagaaaaaaaaaaaacgcatcaagctggcctggctcctggaaccaagttgagactcccccacgcccacccggtctgcttccttttcagccaatgctacaaagcacctaagtgtaccctaattatgccatcttct

SEQ ID NO: 1888596 - DNA, 4001 bp, Homo sapiens
aggtcatgggtccttggactccaggaacaaagggggtgtctgtgggtcagggacctatccgcttgccctgcccaaagtgttcctaagtcccctgggactaataaccggcctgcctgctggggaggtcagctgctacatcccaccttcaagccacacctgcccccattgacccccatcccatggccagctccatttcctccaaagcacaggctccactgcccaccaggtggtgggtctcttcctcaaacccctgtttgactgccccaggacctgcagggtcagccttggaaatgcatttccaagtaacgccacaaactctgaggtacaggacagacaggtgtggggtccatctgcctgttctccatcactctggtggtactatgtcatctgctgagaaagacccccggcctacagggtgaccctcactctcctcagggccactgtttgcaacagacagacagcctggcaggccttgaacctcattttgtaggttcaaggcctgtcccccatctgtccactataagcctcacacacaccattcttctgggataccttccctgaggccacctggtcaacacccacaggcccctttgcttcagcccaggtcctgttagctgaggtttccatttctggacatagctccacccagttctgtgatccgttgggctggtggcaccaggggcccctcggtacttgtccattctggacagcccagcaatgtaggcttttcccaagacttcccaccctgcatgtgtcccacctcatcccctccaggaattttgctttgttgcagagactccctccccaccaccccccaccgccagcctccagaccccactcccttctgggagcccgattccagcaagatcaggatcaggctcccactctgctccttctactggcctcagtttttcccatctgtgaaatgaagggattcatcagaagtccttcccacatactcaatcacggaggcatgacagggacatctcacatcctcagaggcacggttaatccaaggaatgccatgggaagggaggagacagcaggtggcctgtgcctgcactcaggtcttgataaattgtgaaatctctccctcaccccttcctcggagggcactattgttcctgatgtgccagccttgatggcagtggatagggaggcagggacagagacaatgaggaagtgtggttaggtatctacttagaagtctccagatggagccgggaagtgctaggaggccagtgaggccagtctgtgcagcagggcaaacgagtggtatcctgctgggatgcaactcaaatgccttcactgggaactgctcccccaccagccccacactgaagggctggctctaccactcacaggagctggcagggcaggcaatgagacaaccctactgcctctaatgcagtagataaaattaatgcagggccaaccctcatatcagagtggtttttcagttacctggacaagtgccaagggaggggcccctggggccaccagcccaaagaccacagaactgagtggagctctctatgtgcaggagacacacacagagatcaactgatccttggagcttgggagatttccaggatttctgggccactgacactgtttctataaagccctctttggccatctcagttcctttccaggctaagcagtgaaagccaagtcttagttctccaggcctgggccttcctgagtaatttacaggactggtgtgagggacaatgtcaacccaccagccaactgcccagatttcccctcctggcgagtgaggccaagccacttcatttctatgtttgaagcccatgtaaaagaaacagagattgtcagtttcagaaaccgactctgtcccttcagtcctggaacctcaggcctcatctggtgactatggggtctcaacttacagtttagctctcaaaacagccagacagagcaccaaattgaaaggctacaaatgagaagtatcgtccccaccgccccagtgacttggcttcttgcgtacctagttctcttctcagtttaataggtaatagatttatatggctcaaattcaaagcatgcccaggggctccagagagaaggctccctcctgttgcctccctccacagggtaatcctttctcaaattcactagatcactgcatccagacagggagacactggatccctcgttcatcatggctgcgttcttacccctccctaactccttcccaaacatagctacatcccttccactgttatataaccctccaattttggccggtcagggagatggattcaagacttatctcccattctccttggctgcagcacctgaataaagcccttcctcccggcagtgattggctgtgcagcatgcaatgggacccagacaaaacccctggtgtttcagtaacacattcagactatggaacagattaaccccggctccctagaatttgttttctgaagaacaaacaaacaaggcaataatgtcttatgaaaagacatcagtaaccttaagcctgtaaaccccatccatctgtagggcaccccatctcacagcaaagcatgggtgacagctgtgtgctgagaagagtcggaaaaggagccatgcttccaagaatgtctccctcataacatgatgagatgagtccttagtgaattgccaaccaaaacaaaaaacacagctgctaaaaaagaaggttcctcctttggaatccttgtactaccatatcaaaatattgagaaggagcatctcttgtattgacagtaaggatgctgatgactattagtgaataaaaagccagaatgaaggacatgaacttacacacatttaacatttcggcacaggtcaagtaactacaataacctatatacaagacaaacaagacaaagtatatttagaatacatgcgatgagtattgatgcagaaatggacatttctcagaataagatatgactttacagataccatacagagaatatgatttcatgcagatggagaagatgtggtgggagttgtgggagagcaatagaaaatacatttcctggctgggtgcagtagctcacatctgtaatcccagcactttgggatgccaaggccaggagttcaagaccagcctgagcaacgtggtgagaccctggtctatataaaatatatttttaaaaagtttcctgtacctagaaacaaatccaagatgtactctacagagaacctctacagagaaaactaacaccctgaacgttattggagaactaaataaatgaagagactgaccatgtctctgtgttgggaacaggccccccaaaatctggccataaactggccccaaaaccggccataaacaatatctctgcagcactgtgacatgttcatgatggccataacacccatgctggaaggttgtcggtttaccagaatgagggcaaggaacacctggcccacccagggcggaaaactgcttaaaggcattcttaaactacaaacaatagcatgagtgatctgtgccttaaggacatgttcctgctgcagataactagcccaacccatccctttattttagcccatccctttgtttcccataaggtatacttttagttaatctaatatctatcaatgctaatgactggcttgctgttaataaatacgtgggtaaatctctgtttggggctctcagctctgaaggctgtgagacccctgatttcccacttcacacctctatatttctgtgtgtgtgtctttaattcctctagcgccgctgggttagggtctccccgatcgagttggtctcagcatctctgtactggaggcaatattgtgctcgtaacagttctgtctggttgatgattcagcacagtcccaatcaaaattctaacagatttttctatgggaattgacaacctaattctaacatttatatgagactctaaatgaccaagaagagtcaaaacattttcttgtagaaggcaaggtgtgaggatttgctttttcaatgttaagacacatgatca

SEQ ID NO: 1888597 - DNA, 4001 bp, Homo sapiens
gatgacagtgaggaaggcacgtggtccatgccagcagagcatggcagaacttcccaacctgtctgtgacggccacgcctgtccccaggagccatttcccacagagactgctgagtggcattttaaatatgctaatctgattgtgtcactcccttgcttaaaacccctcagaggcctccctgggggctctgggaacaactcctgtattctggaaggtcactgagcgaggacagggagcaggcacgggtgctcaggagagagtgcagactgtgcctgggcaggactaaggggcatggtaacacccagatacagacaaccggagtccaggggacaggggcacaggaaggccccgggggtaggctgcacgaggtggcgactgtgtcaccaaagagcacgtggttctgggaggctgcacagagccaggagggccaggcctcaccctgagggcgagctggcccaaggcagcgcaagggagggaagccctcctctctcccgccacaccccgtgtgtgcggagccatcagatcacccatccgctttcttccttaagcaggctgaaaagccttagaaaggtgggaaatcccctgaaactgaccaactgctgcacatctgcgctccaagcactctgccaaggagacgcctgagcccaccaggacgggacccccagaggcagccatttctgcctgtccccagctctacccctcagctcctggagggctgcctggcacatggcacccactctctaagtgctgctgaatgaacaaatgaatgaatgaataaatgaatgaatgactggtctggatcaagaagagactgaagggcacggggaccctagggcacggagtggggggtcacctccaccgtcgtcctcccggaagaactcctcgctgtcgttggccgagtgcgacttcttcatctcagcgatccggttccggggcaccttcctcttgagggatggggagaagaaggcaggccggttgttccgttctggggtggggggtgtgctgaaggaggtcacctgggaacaagcagccaaagtcaccagagtagcagaacagccccctccccgggggtcccaacgcccctcctatcccaccctcaaacaacctgacacagctcccagggaagaggccgctggcccaggaggacccaggcccagccggcccgtgctaggtggggcctagagactggaagatgcgttccagcccaggggccagcaggacacctggccaccagtgctacccgaggaggggccaggctgctgccgcaaatggcagaaagacccccctcctctgggcctcaaacagtgggtagggggtgttcaagcacaaagtaacaacagctgctgacgctgagtgagcactggccccacacacagaccctctgagcctccagctccgtgagacaggggctagcgtcagcccatctgacacatggggaaactaaggcagggaccgagaccctggcttgcctgtggtcaccaagcaggacggcagcagccctgtcttctgtcccccagggccacgctcctcatcctacttctcagggctgacgtggccccatccctctcattcccagcacccttcacaggaaatactgtgctaagtagctctatgcctctgtcttctccccacttctaatcacgtttggttctgttcaccaaacattcacacccactcagggccaggcaggcacagcactaaggacagacaggcacattgcaggtccctgccctcaaggagctcacagtctgctggggtgacagactcagagagtgacaaccatagacagcatgctggctgtggagacagagaaagagaagcacaggatacatgaagcacagaggcaaaagggatccacagcctgggaaatcagggaaggcttcctggaggagatgccgctggagctgggtcttgaaggacgagtaggagttcgccaggtgaagaagggggggaagggcgttccagccagagggaacttggcccatctcctccctcctccccatgccaacaataatctgaggagcaggatgagctgggactgagacttcgggagccccgtcagcctcctcgtcacggctccgacatccaccaaagtcctggcagctgctgggctccagacggtgttcccacaagccggggaaggtttttaaaagataaaagaaacaaacagcagcaaccacaatacacagagtcagcatgtgtcacgcactggctccagacgaccccgccagagaaggagacaggtaatagcaggcgcacaggcggcagtccccaggggccagccctgctgctgaccctgtgtgaccctagcacatccctcctcctgaatcccagggctgcccagctgctaaggcaccagggactttcacacccctcacagccactcccgctggacagatgggaaaaccaaggctcaggcaggtctagtgacctgtagtcactcagccctcaggctgtggctggaggtggcacccgggtttgtccagcccagagctcgggccacatcttcgtaaggactttcacacacacattttgtcagagtcccagggcataatttaggaccagggagaagaaccaggccctttatctcggaaacaaactcagaaatataaaccacctcattccaaagacaagagaggcccctgcctggaattctcacccatctttgcaaaaaatagcacttgctgtctttggcttgcaaaacacattcattgcagaagatacctcccccccaaaaaaagatatacagaagagaaagaaaaccaacatctgaccacccggagatatgcatgattcagatctttctcgaactaaaagtataacaaacgcacactccctcatctcaggcatgcctgcggtaatgcatcgtttacattcccacgcctctgctttccaagtaggtcaacagcaactactgcagctgccacctgggaatcctcctgagggccaagccccggattcctcaaagcctcccaaatactgaaggagcaggtatcctcgtgccctgtttctagatgagaaaactgaggcttggagaggaaaagagacacacccaaggttatgagagcagcagagcaggattctggctgtgggtggcgtctctcctggacaatggctgggcaagactgcccctggacctgtgccaagggcacccccctgcccagcacacctgtactcttccaagaactacagctctgggcagtccctctggaagaaccaggtagagcaaagcagccagtgggctggagaccttctcctgcctgtgccccaccaaaggcttctgggaacaaagctgctgctgacctcagcctcccgccctggggaaggagagtggcctaggcagagcagggccccaagcccagtgctatcccaagagaccttgtgacctggggcaagctggcaagtctggtttccggctgtgcgaggcaggaacgcctctcctgcagcagaacctcctacaaaccgcggggcaaagagctgggtggcctaggcctctgcatgcgctggctgaccctcagtcaccatcatccccatctgactcaccggggaaggccggccacgtgcccacgctcacccagcaggtccacccaggcaggcgccagggccgggcctgggtccccagccagtctcttctgcccactggctctgtggactcagcctggctttgtggcatctcagggaggcagaaagagctctggcccagcaccagcctgcggtgtgaccttggccaggcacagccctccaggtctgcaaggcaggaacgcctcccctgcggcagtgcctcctacaaaccgctaggcaaagagaagggctgggtggtccgggcctccgcacgctcggcacctcggcctgcgcactggtggttggggatgacaacacctatgtccccagggggccgtgagcacgggggagacggtggaaagtgaacttgacggatgggagcccccgcccccagctgtgcagcccttacccgctcgtgcatgggcgaagctgggctggag

SEQ ID NO: 1888598 - DNA, 4001 bp, Homo sapiens
cataatcaatgttacaagccttaggtagaggaactcgcaagattcctacttctcaatttttgcaggttaacttaaattcatttcacatctttcttataaaagcaacgaattcaaagcattagctctgtcttcccattttcaccctctgaaatgaagcctatttagaaacatgctctcgaagttctctacaaactcaaagggtacatttaactccattatgcactctcactggcagatggagggatgacgctgagcctgctctcagggagttaaagagatgctccgtagtaaaggggaacatcttgtggactgtcagatggccagccattcttcatcttcattatcccagcaaagaaaaggtccttacccatcaggataacaccattaaactaactgtaagaaaagaatgaagggatgatggaagaagtctccctgaacttctcctgacaaaggagctagtccacaactgaatgaactggtcgtaaagcttttaaacgaaaatcttgatctccaagtatgtttaaaagtgtaaaaagacaaagacacacacaaacaccaaacctaatgcacattttaaacttttgtacaatcagttcacgtttgtagttcatgattggaactctttcaacttctaaccttgatttccaggtacgtaactccacaaaattgtttatcttatttcccctaaaatgagaaagtgactgcaaactgcaaagaacatgcccctgttctcccaacctaaaaacccagagtttcagacattttggtctcacaccaaagaactgggagatgtgaaatgaactgcgctccatattgattcttaaagcaaataagaagaaaaaggaaaaaaaagctaagaatggtaggtaagataaaagaattgttaaacttcacctctaacctgaaatcttggacctcgcacacacaaaatcaagatttttttacaccctattcctcaacagaaaatattctgcaaaggagagaaaatttcgaagagtggaaagtagaggaaacacagtaagtacagtaaagagaaaggattcgaaattcatttgccaagaacaaaaaaaatgaaacttaaattgcataggagctcttacacacaaatgcattggcatttcccaaattaaattgcatgagagcaacaatacaggccatttctatatagcacccacttacgagctctaattccagaacacacaccgatatgacatagtgttgcaatcaatgtattaggaggcaaagaaaatggttgggctactggacgtcttcgaccagctcattcaaatacctttaaaattaattaaggggcagggaactagagagagaggaagaaaaaaaaaatggaagaataaaggcgcaccgagtagaaaagattaaagggaacgtggaaggccggggctgccgaaactaacctgtgccatcgctggcggacgccgagagggccggagatgagagtttaggccgcttggctgaaggcggccccggttccaccacattctcggccatttttaattctttcggagatacaagcgaggaaaaccagaatcctcaggaaatctcttcttcggcccggggtccccgcgccgcacccaggggtgggctggggggctccgacggcacccgagggggtgggggaagttcctttttctcttcgccgggtcgcagtggctggagagggatgcggactcgatagaaaaggtaagggcaagtgcgaggggccgggcctgggcccaagcccggaggagggcacaagagcacaaattcgccgagcgcgtccgctgcggcgaattcccgagaactcgcggctctagaggcgcagtccccggcccgccacggccggcccctgcccagccgaggtctctcggagctccgccgccgccatcaacctcttcctcctcggcgctgtcctcctccttctcatcgccacaaggaggcgggggcgaaaaggggggagaggaggaggcgacaagagacactcacctcctcccggtgccccctcccgggcctgcgcccccaccctccgaaccctcctcctgccgccgcgctccgcgccgccgccgccgcaccggcccctaatggccgcagagaactcgcccgagccgagagccaggctggcgccgccgcctcacatcgcgcggcggccggcggaggcgcggcaaggacgccgggagcggagctggccggaccagagggccgagggggccgggccgagcagcgccgcccgcacgcccgcgccgacgcggagcccaccgaggaggccccgctccggcggcggcgcaggcggcccctcctcgcgccgcgctcccctccttcgccttcctttcccgcggaaaataaataaatacggccgctgctacggcccccaccgccggcggccaggtgctgggagcgcccgccccccggggctccgttcggggccgcccgcggcggcgggagaagacgccgcggggcgcggggttatgtaatggtcccccctaggcgtcgacgccggcccggctgctggaccgcggtgggggtgtgtgcggacgggagggggctgggggtcgcctcagcccgtgcgccccgggccccctgccactgtctcggcccctgccgcctctctccgacccgactcccctccgcactctctggctcccgcagttagcactcagcccggcgtcctgcttgcccactctcgcccgctctctctcgccctctctcccccccagcctagcacacaaacaagatggcggctgttgtttcttccctctgccgaatcctccttacaggctagcggtagcggcggcggccggaaatgagccaagggggggtggaaaaggggagtggccgggcctccggaggggggcggggcctaggcccgagccgctcacacaatgggggaagtggagccgggggcggggcctgtcccaatcacgggatccgccctaggccccaacgcggttagcgcttccgcaaactcccccggcgtcaccctgtggctccctttaaaggggaggattttaagagtggggaggattttaaggggggaggggcgggggcggactcagaatctattttcagtcggtggatagttacgagggaaggttcctgcctttggtctctgcgtaagggaccagtgggaaccgggacgacggaaccccggagctgctccgaggaaggcgccaagtcgccactcaggtggccaaatgggagcgcccgtagggcggccctgctcttcggcccttgggtggcgggtcccccaaaaccccggtcgaattcaccaggcagggtgtacccactgccggctgttccgggccagatacccagtgcgtcctcacttctccattgccctcccaaagggagcagttcacatccaaaaagcacgttgattacgagttgttttcattttctctgaattttccttttcctttttatgtattatttatttatttattttacaacgagcattattactctgaccagaaaacaaaatcacagcagtggaaagatgtttcggcaccagacccaaattcatttcttgccctccacgtgtgtccatacgcccttaccaggtagcactctcaccgcagaagccttcaagtattttcctaaacatggctgggacctgaagacatttctagggtttgtcttttttttttttctcgtccgctcccaatagaacaagttagtaaaagaccacgtctagccattgccttatctaatgtaattatgggaaaaacaaaaatgtggtaaaggtaatgtaaggatggaaaaaagcaaaaatgtaatggtgagaggaaatgctggaatataaagtctagtgtgtgggactccacagttttgcagctgaggtcggagacgtgctttcaggttcctacacatcaccctgtgtttggccatgggtaaattggtactggaggaggtggcaggggtgtaagtgaccccgaaagaaaccccgaaaccagtatctactgatacggttaaaagctttttctcggccaggcacggtggctcacgcc

SEQ ID NO: 1888599 - DNA, 4001 bp, Homo sapiens
ctgggggtgggaccagctgtagcacagccgggacatcagtcagctcaggatcctctcggacaccagccatgtccccgtcaggcggtcacgtcacagaccacagttatgaggcagaacaggaggccacagctcagtgcaccaaggccagaaatagctccaggcgggggtggcgggcctatgtcatccccacaccacagagggtcagggcacccctcccacgcctgctccccactcctggccctccaccactgactcactccccccgccccccacccatctgtcccccgatcctcgcttgcttctcacatgtacacccacccgccatccatcctcaggcccacagacacgtgcaggggcagccagaattcccatggtgtttcctgtgcccttccagggctccaggtgctgcggcaggagattggcagcagcttctggtgggggcagtctgcccttgaggggtcctgagtctcctagggaagtgagtaccagcccctgatgccctggccctggcccctgctccttgttgatcttggctgcaggggcagggtaggcagaccaggtcaataacaggcaaggacacctgccatggtgagaggtcactggacccagactgaagcagctccaggcctagctagctacatgctgtgggggaaactgaggcccagtgtgggcagagccttcaggactggcctcctgagtgtgcctagtgcttcctcagccccctcggctccactctttgccctggccggcagggctcgtccctgccccgtgatgctgggctcaccagagacaacgagatgtaggtaggtccagggccagcaggccaggccagaggctgggcccttcaatccagcaaattctcttggagggggtgtcaagtttattgacccattttacaaatgaggaacataagaactggtgtgggtataatcaatagcaaacacaatccaaggtcaaatccaaccatatgctacttacaagaaacatgcctaaaagtacacaaaatcttgcaattaaagatattatcagaaaaataataacaagtaaagcaggagaagccacagccccagggctagcgggcttcccagtctcatggccccaggggtgcgaaaaggtcttgctgggcagtaaaggctcagccacccccgctcctaacctgagctccacagtcctgtttccagccagcagggcacctgagagggtacacctttcaagtcacagacactgaagctagcagaggatggcctggcccaggtgagagctggcagccctggatggcaccctcaccccaaggacacatcaacgtgggccacaccgtgcaggatcatccactcgcttggccctccctccgtaccttggcaaggtgtgaagtggcccctgtcccaggtgctgtgctgagtgccgcccatacaagaccaggccgaggagccgggtcccaggcactcacggtccagggccagctgaccacgggcagccaccctgctgcatggcaggtgccctatgggagagttaggagccacagaggcctgagccagccccaggcagcatgaggatgttggcaggagcccaggagcccactaccagccaaagggtcttggcagagccccaagtgggcaggatccttggcctagcacctaggcctcgaggattcatctttggtcaatgctgggctgcctgcgtggagggctccagaaccttgccccatccagcccatacacccctcactggaggtgcaccctcctcggctcccaccccagtgagccccacactgggggcccctggaggctctgcccagtggaggcctcgcccagcccagggcacagccagtgcccccttgccccacaggaggcttgagcccacctgctcctccatgctccaccaggagccaacaaacacctgctgcctaattatctggagaatcctgtctccaccaagggctcatcttggtcctgcagctaattcaatccagcagccagagcaagctgagtccccagaggacactaatgagcaagtgaccggtggccggcctgctcccaccctggggacgcactctgagccaggtctgggcccagcactgccatacacctgcctcccatgcccatctgcctgcctgaccctgcccgctacctggtgcctagccctgcagggcccacatccactcccatgggctagcatccagacctaagccccagccctcccacactcccccaggaccctggatctgctgcatgcacaaggctgaccactgcctgtgagcccagagtgtcggccttgacagggcaggaggaagtacaagagcacatgctcagggtgcacgagccaggagcacagactcagtgcatgcaatgggacccctgggggtgcacacgataggcgtgcataccggaaacacacaataagagcccccagggctggtcagggctcaggcagagtccactgagcagtagagggttgctgggatgcgagcccctcccaggagccagggcccggctggagggtctgcatgccgctgcggcagaggaagatgtgtaggcacatccccatgtgttctcttgccctcagcatttgtaaaacatgatcaaccaggcaggcgagcggcctctgtccgagcagaatttattctgctgtgaaaagacacgtgtgggtcctgaggctcttgccggcttgttctcagcagccttggatcagcctcagtcagcagaacagcagctggacaggctcccattggagccatcccagggactgcccagcccttcacattagaaactgagctgggggcagcagctggcccacggcacataagcagtgcctgctaagaccacagagaagctcagccaggcagggccagtgggatccagcactccccaggggatgaggaatctaagaggcaggagaggatcctcctcagcctgggatgttcccattggaattcccccagccaaggccagagctccgtgtccgggggccagagtggaacccttgtcagagccgacaggccttggcctcctattctactggcacctggcaaactggcccaagggctggctgctgcttctgtaaaggatgtgctattggcagccagccacacctatgtgttcacgcattgtccatggctgctttcccgcaacaacagcagagctgagttgttatgacacactgtgtggcccacaaagctggaattatttagtatcacaccattcacacaaacagtttgccgacctggtttgtgagcaagccgagtgtgggtgctgccaccttcaccctcacaatggccccagcagttcactcagacccccactaatgaaaaggaaaccaagggtcagagaagaccacggtcctgctgaagtcacatagccaggtgaacagagcccagcaacctcagtgcaggctcagctctgtggagacctgggcaaggtcagcatctcacggaggcctagggtgaggggttctaggcaagaaagagactcagaaatactgaaatactctgcaggtcaaaacagaaatgatcatttttctaaagaggctgtcaggagtctcacagtcaaatatgcataaaataggacaacctaacacaaataagttgggaggggtggctcacacctcagcctcctgagtagctgggattacacacacacacatgcatgcacacacacacacacacatacacacaaagagaacaaaatggttgtaaggagagggggacagcagaggaagtgctgaatgacacagtccggcttcggaggaaaggacttgggtggcacttcagaggagacaaatccagtgcaggtagttttgaagagggcagccgtttaactgaggtagggggtctctggggacagggcccctccatgccagtccacccaccttggaaccctgcagaggctgggccgaggcctctccctgcaccttgtatcagggactctggccaggtcacaccaaggtggcttatgacccattaacatcaagctgcctccctgggctggacagggcctggaaagagg

SEQ ID NO: 1888600 - DNA, 4001 bp, Homo sapiens
ctggggtctcacctgtgagcctgagtccccgtgcatctcttcagtccctctaccgagccccacatctccaccaggaccctcataggtgcctccaagccaccaactccgactcccccaacacctgcaccacatcgatgacagagcctcacagtgcaactctgggcgcctctcaagtgctctccccactaccctcaactcaaagttgaggaagtgccacgtcgaccagggcacttccaccctgcccagctgaagtgcacacaccatgctgtggcccagaagccatgttgttaaacaaaaatcaggtaacaccacttgcttctggtggcttcctgtgacacttggtccaggactagaacctggatcacaactatcacctgccatctcactgtgtacccaccttgcccttggtctccacaccctccagctgatggtcatgctggctcctggcatataccaacatcccctcctgaccccctcagaagtcccctcccattcctctgcacagtgcctgctgctctgtggtttccatagcacacaccaggatccgcatctgggtcatgcatcaggacgtcctcccatcctgtgtttccctcctcagatatttctgtcctgtcctcaaacatgcctccacccagcccactacctggcaccagagctctctcaaagcatttctgctaaggaagcaaccacccctccactgccctggaacacccactgcttctgacccacacacgtacttttgagcactgttttaatcttggtcatcatcggctgcacacttgtctctccatcggacggatggtcgctgtctccgccatatttttcctctgttcgcctctttttgggggcacaaaggccttcttccagcagagcatccacatcgttgtcaaagtcatcctgcaaaacacgctgttcagacaccagagcccctggcgctcatgctcctgcaacaggagagctcaacagcattcctgagaacagacacagaaaggaggtgctctcagggggcctagatgtgcccttagggtgcatgatcatctgaaaaacaaacaggatgaagctaccagctgacaccaacacacctggtccaggggcacacactgccaaggagcgtaactcagcagcacctgctgccccacgcgctagatcagggatgcagggcctacccatgggccaaacttttcattaggaaactttaaaaatctggactccttacatctttctcttctccacattaacattattccacctcagaggggattttggtttttgttttttttttttttaatttccctgctttcaaaagatgctgcaattcccaaatctctctttgggttttgctaagagccctctagaggaggggctgccaacatacctcgtaggggaaattcaaggcctcttcatccactctgtctctctgaacgattgctttagccgtgaacccgcctgctccttcttcatctagctccaaattgtcagtaaaatcttctaactcatcgagcactgcatactccactctcttttcctgatccagctcattctcctcatccttcttatcagcactctcaccccctatgcctaccccgtcaccaacactcccgccaaagggacaagcatgcacgtccccactgacagggctaaggagcagaccgcactccgcccgcacgtcgcgctctgctcctgtgtacagcaccttcctgtccttactcctgcagctctcggtaaagctcacgctaatctttacatccttaagcaacttaaggtcaggggagaacttccggaccgcaggtgcgtgccgggcggtgcgcgggctgtggccactacagttcgggtctatgaggaggcggcccttagagaaggatcctttggagagaagagaagctccgtagaagttgaaggggtcctcagcagggagttcggactgtccatcaccaccagagccaacgtccattacctctgcaccactggacgtttgcaggggaggtggtggagactgctcacggggcagcgcttggaaggggcgagctcggctctccatcaccgcttctcctgcgggcccacacgggagcggagaggggctctcatctgtctccatattaaaagcgcttaagactagtttacaagaccagagttttacaagccctcacataaatctacacagctaacatgcacaagtccgctgagacccgggcgcgtcctgccgcgctgtgcgctggcggcttagtcaagctggccacattgctcttttcattaatgtagacagcttttagaaccactgcctcaattattggaaatcacaatgcactcagcttaagtgactggcgactaagcgagtctgtcttcatgccggagtggcacctttcttcttctacctgcaaagaaatttaaaaatatcgtcacaaaatgacagaaaccttccaattccctggtaccaagttaaaagccaagcactattaacagcatagtaaagggcttcaaaataatattccctaagaggactttttaggcatcaaaacaaactaaccttacttttattcttcagaacctgaattataacttaagtccaaagttaaatattttgttaatgcccactttaattcctacttcagaaacacaaaaactatataatcataaggctcaaaaaatattttaaaaatttacactaaactccaccacagcattcttctaactcagataagcaagcatgcagtgggaggcaccctttctggaacacacagaaggcgcgtggcctccctcaggccaccagagcacagcaatccactcacctgcaagggctgggtcagtcagagggcgagcgcgagaccctcagctcaactctgcggcactaggggcctcagaggcatggccaggcgctctgctacccagggaccccagggctctcctgggcccacagggtagcacgtggacggggacagtgatgcagcgtgctgaggtcaccagaggtggcagcatagttctgttcccgatggaggagaggggtgggtggctgtggggaagggacctgccaggatttggggtggggagccacaagagacagctggagccgaggcacagagaggcctgggtgccacctgcagcccgttccgccctggggacaataaggagccactgaaggtgaagcgactctcatgccacaagtaggttcctacttgagaggggagacccacagctgtgccaggcagaagcaactgcatccaaggcacggggacagtcctccaggccagaggacaaaggtgtgaaagaggccctggcaatgggccaagaacagtgtcacagaactgaccgcacttgttgacccaacggaggtggatagcagagaaaagagggaactaaagacaaggaaggacacccaaattccagcatgcaggcaggagcctggcgaggagaacagaggggacctccaggcaggctctgaaggtgccgaggccacaactctggagccatgactggtccagatacggaaggccaggacgcactgaggaggtagtcgccaaacccacaggaggaaggccacccagagatgagggttaaggatgcaactctaggaagccttactacagaggaagcatgaagaaagggacaacatgaagcagggaagatgggtctgagggggcagccagaaaaccctgcatcagagcagaaggaacacatgcagacacacgcacatgcacactcccacaacgtgcacaggaacacgcatgcatgcacatgcgtgcataccagtaaagatgcacacatgcaaaccgcactgcatgacctaacatcctcccaagattcccggaaagaacaggagatgcagacatcacacatttaacaagggacaaggcatggtggatgtacttcgaaggggacacaacatgaaaaccagagactagtttaggtttaatcaatacatttaacaactatccactggccatctactccgaggaacgcactatatggacaagagacaaggtcacagggcctggacacactggcag

SEQ ID NO: 1888601 - DNA, 4001 bp, Homo sapiens
cccaccaccacacccggctaatttttgtgtgtgtgtgtgtgtgtttttagtagagatggggtttcaccatcttggccaggctggtcttgaactcctgaccttggacccacctgtctcagcctcccaaagtgatgggattacaggcgtgagccactgcgcccagcctaattttgtatatttagtagagatggggtttctccatgttggtcaggctggtctcaaactcccgaacttaggtgatccacctgcctcggcctcccaaagtgctgggattacaggcatgagccactgcgcctggccagagattttttaaatgacagttgtctctgcctcaggggctcccagtctaatggacacttctgccacagggagaacattttgatttaggccgggtgcggtggctcatgcctgtaatcccagcactttgggaggcccagaagggcagatcatgaggtcaggagttcgagactagcctggccaacatagtgaatccccgtttctactaaaaatacaaaaattactgggtgtggtagcacctgtagtcccagctattcgggaggccgaggcaggagaatcgcttaaacccgggaggcggagtttgcagtgagccaagatcgtgccactgcactccagcctgggcgacagagcaagactccatctaaaaaaaaaaaaatttgatttaacaagctgttctggaggaatattcaatgctgtgaagcccagagaaggcttccattgggagggagccagtgagcagagccctgagttcagtctccccgcagcaagagcaggagacagctgcatgggggtctccagccagtgggtacagaatctgtacaggactgaggggtggccacctccagccatggcccctggtgcctagaggaagggaggatggatctaagtcagatgaccctaggatcaaggaaccccaagggatcaggactaggaagccaaggagcatgtgtcattgcccctgttcctcccacgggtgccagggcttctctccccagggtaggggtaaagcagtttcccaatgcgcccagctagggatgaggggaactcccaaaagcccatctggaaacctagtcctcctctaaagaagatttgaatgactgtgactgggcacgtagaaaccttttgcaccgtgtcaggtcttgatggtagaggtggtcatccaagcatgcctggggtcaggctccttggaagttcagctccaaccctgtattccagctgggacggttggaatgttagacacctcagtccctcctgcaggttcagggcacacctctctgtaagagaacaaactggcatggttggtagacatcatttgcaggctttgtatcccaagtccacccatccatctcacatagtaccactccagctgagtccactcaactgatcagtcaactggtcagtccatagtaccactccagctgacgtcctggggtgaaggctgcctcctgaaaggcctgccttacccccttacccaactgccacccagaagaacattctctccagagcctggccctgttcaagcttccagcaaggactgggcccaagccaggcctagaatgatcttccatgcaaaagactgggcgtgtatttcccctaagaccctgaccaggcctggagttccagtcttaccccagggacccaatgtggaaagaccttcaaacaagagcttttcagaagctggggaggtctgctcctgcacctgtccagccatgacaggatggagagtttagggatgattctccagctctgcacccacctgatcctctgatggagggtccagtccagcttcacatctgtgcctaatcagtggaaacacttaccctctgggcacctcaaccttctcaactggaaagtggagtgaggcagcaagctccctttccccctcccagggtagcaggctggacctgaccgatgccctttcatcattgcactgcttcccagcggcctatagtagtgcaacagggaaagagtgtcgggcaggcctgccagtgcctcccccagggtggtctgcagggatctgagacctggaatgcaggctggctggggcggggcctctgcccggggggaaagggtgccctctgaccccagaggcccaggcctgtctagaatctcaagtttccatggagaagggagcgaattgggtaggggggaggggagggcctgcaagcccaaggggccctgcctggggagtgggaggtgagggttatagggagggagatccccaaggctggtcccagatgctttgacaatatcattgcactgcttctcagagcacagtagtgcaacctcgtcagagcacctgcggccagcaggggggaccccaccacccccaatacacgcagggcgggaagctcaaccatggatgggtgggtggggcagagcccccgtccagtccatccgggcagggaaggagaccgcagcggggtgcgtccctggggtcttcagaacccaggacacccaggcctttcccagaacgctccggattgaggtggaggagaaaccccagactagggggttgttccaatcccggagcaggagctgacgggccacgcaggggagggggcgcacacacaaagacgaacccgcactcagccgcagtccaaagccggctagcgcccggagcggggtgggtacagcccgacgaccctgcgccctgactcggcccgcggctccaggagaaaaagggcggccccaccccgggacgacgcgccccttctagctgacgactccatccctggccccttgccctgcactagatacactctggattcttttctaacatattcttctgcctggaggcccagagtggagcagaggatgggggctccccgcccttctagagttccctgctccaaagagggcccccgggatcccggccgcgcccctccgcctgacccgccgagtagggccgcccagcccagcccaggatcccctcctcagacacagctgactcacgcagacatcccttccgcccagggcccggtcaggacgcggagggttagacggaagaggatcccggccatcgtctgcccccgggtccccgtccagacgaccctgcacctcgtggcggcccctcgcctgccggctccatctttaacccgctgacagtcggaggggccgggcccccgactccttagcatagcgctgcgctcattggccggcgctggcgcggggattcgcctcctgcatgcctgttggctgagacgggagagatttcaaaatagcctccgggttccgattggcccggcgccggccgagtctcgggctccgtggttttaacaatgagttctacaaacactttttccccattcataacttatcaaaaggaactttgcccgccttttctcagctccaatctctgcgagttttctagcgacaccgacaagagcgcttggaagcccggtgaggggcgccaggcgcgagcccacagtgggggaggccgagaccctgtggaaattcccgaacccccgccaagcctgctgtgaacgcggccgcgggctgctttgttatgcatgctgaggttgctctctgcgcctcctggatgggatatttggacgtggtgggcttacaaactggggtagcccccctcccaactcaaccaccccggatcgcccggcaggacgcgagtgaggctttcctgaaaacccccgggtatggctgggctatggagaccgggtcctgggccccgtggtcttttggatctgtgggagatatggggaacggaagtgtaagctttggtttcttcgtgattgtgatccactttgcggagaagcattcattaagcgcctacccttcgctgatgactaggaagtatattgatcaccgggctgttgaacggctcctagagggaagggaggagctgtgcttagacaactgtgcccctgcaacccctcctgctttattatcggtccaatggctgagagcaaatgtttttgaggcaggcagaggtggttttgaatctttatgaacccctgttgccttct

SEQ ID NO: 1888602 - DNA, 4001 bp, Homo sapiens
gctggccaccactctgcataggatgggaagctaaagggtgtgttgttgcaagggggccctgtgggaagcagactgtggggctggaagtgggttgggtccccttgccgggtgccctggaagcgcccacagggggccatcatccgagggtgggcaggctactaggggcaatccttttggtaaaaacaactcaagatgctggatgaaatatgaaaacatcttaaaaattgccaggagctgatgagctcatgcagcatttggccaacagttcggagagcgtggcccacagaggacagcagaacacagtggccaatcctgcctgagagcgtttgcccactgaacacactggggctcatactctggtggcctcgggggcgaaggagacagaagacaaggtccagtcacccccacaggatgaagaacctaacagaagactctcctctaagttaggctgggactccaaagagcgatgcttagggagagatgaactacagccgcagccacccccaggggttatggggacattgcacataagtgaagggaagtttctgagaagctgtggcacagccagccgtccaggtccacactgggggtacaaggacccacaagccaagcacagttttaaggggttccagcactcgtagtgcccctgtgcctgaagttctctctggagaaagataccttcatcctatacttcaaagaagtctcaaaatcatttttcaaagaccagaagcagtacatagtcagaaagaaccacataatgaaagaagcaccatgagcaagaaccagcagaaagataaccgtacatgcatcatcaaccaaccatgctctgatggcagaaagaaaacagacagctcagaaacatctgcagggcaaaggaagtgatgaagagcaaactgggtttacaaagcagcaaaaggaactcggtttttttttgttgttgttgttttgtttttgctcctgttgcccaggctggctggcataatctcggctcaccgcaacctccgccccccgagttcaagcaattctcctgcctcagcctcccgagtagctgggattacaggcatgcgccaccacgcccagctaattttgtatttttagtggagacggggtttctccatgttggtcaggctggtctccaactcctgacctcaggtgatccacccacctcggcctcccaaagtgttaggattacaggcatgagccaccatgcctggccaaaagaactcttaggaagctattttagaaatgaaagcttcagtgactgcacattaaagctcagctgtgggtttaagagcaatcaggtgcagctgatgatgcagaaccatcccgaatgcagtgcaggaagatggggaacacgctgggctttgggagtgcacccaaggtgccactgatggggtgggcccagcactcaccatgtggccagaagacacaagtccctttactctggaggagctggtctttcctgcacatgagaacccctggctgcagtcactggagaagccctgccagctggtctctactggaatcccactggcctggagcccagggctgcccaaggcctgctcaccagggacatgctcctctggggtgttagagaaggccgttggtctcaatcaacttcagccgacctcagccctccctgggctgcacgcccagctgctggcaaggccatggatgagggcagttctggccactgatacacgtaggacagacaggcagaaaggcacccccagttcagctgcaggaccccaccatcctagctggccagggtgcaggggcagcagaccagccctccaggcaccagtggcagggagggctccatggtccaagggaaggccataaacagatctccggacagcctggcactggaggtgtgggcgcagagccaagggctgtggcctcgacgaagacgcggtcattgggagggaaggaccagaggaaagccagcccctggggaggggaccatcaggaactgcctttctctccaatccctcgccccctgctcgagccaggcccactgcccaccggcccccaacccagctctagccagcaggtctccccctccccctgccagcttcacctcccccgacctgtgaccttgcctttgcctgggcccctgtgtgctccctaagccaagccctgcaggttccctaggtcctacaaggtccccacacaggcccaccacagcattccaacaccctctcatgcctgctgacttgccaggctctgggagggagccatggatatagtccttgtccttttggtcaccatatcttgatctgggcgcagggcatgtgggcacacgggtggccaggaccacttcccacaacttccacaggtcccatcacaccaggtgaggctgggctcctcagggcatctcttgtgccacacagagctcgccctcaaggttgcccgaattggccaactctacaggagggttggtgtcccagggagaatcgtgcctggctttccaggtgaggctccgccctgcctgtccccacccctgccctgggctcagcacttgggccaagcccaaccaactctcagcatgtccttggcagtccaagaaggccagagtggtcaaagccatgcagggttggccctgaggcccaggcggccagaaccagaccacaaagagcagctggaggaagaggcaggcaggagggtctggggtccagtcagcagccttgccctgggtctcagaggccacagcccagaagcatctgaacatctgcaggaagccacgcccagtctctgcatcctgcacaggaccccgcctgccccaaggggctaagaccaccagggcagcctgcacacaaccaccaggcttgcagaagcagtcagatggccacacgcccatcctctccaggcggaaaatgcttacccctctccattctgtcaactggcctcacggccaccgggatagcagttgggcaagtaggttacagggcgggtggggcaggtgacgcaaaacctggctgccagggcgggtccaaccccaaccggaaggaggctgggccagggcaccacaggtgggaagatgctgatgagctcctccctgtgctgtgtgctctgcagctgtgatctcatctcaagagtcccaggtcacatggcagggatgggcaaggtgagcctggaggggctcatggtggggcacctgctggttgggctagaggtgaagaagcagtgagctggccaccccgagcaggcacacgtgggatgctgggatcaagtgggcctgctggaccctgcacccacggcctggcagcccctgagagagtcaggatggcctcggcactggatctgttcatttgtagctctgctctgcccagccacgctgtggacactcctggaagtcagcatgctgccttctgctctctcatagcaggatctgctgatccccgccagggtgcaagaggtccctgggcaagctggtgatgggcagccagcttcctcctggccatggtggtcactgtgttcacatgtggtcctactagaaacatcatcttgaaagcaactggcatgacacaggcacatggccaggcctcaccaggcccacagggatggaagagcccagatatgtagcccaggctgacaacaggaggccgtgtgggcagcagtcgagaggagccatacttcaagactgaaagcagagcctgtgaggtgggcaaatgtcctgccaccgacctacgacaccagcacagcgcagcagggcaacgtggcatggtggtgaggttcctgagccaggacaagaaaagaagcgttgttctcatggctatttgaggaagcacatcacctccactctgtcgcccaggtgcagtcgtgtgatcatagctcactgcagcctcgaactcctgggctcaagccatcctcccacctcagcctcccaagtagctaagattacagctgcataccaccacacccggctaattttttttttttgagacagagtctcgatctgtcacctaggctggagtgcagcggcgcgatctcagctcact

SEQ ID NO: 1888603 - DNA, 4001 bp, Homo sapiens
tctctgcctcaggggctcccagtctaatggacacttctgccacagggagaacattttgatttaggccgggtgcggtggctcatgcctgtaatcccagcactttgggaggcccagaagggcagatcatgaggtcaggagttcgagactagcctggccaacatagtgaatccccgtttctactaaaaatacaaaaattactgggtgtggtagcacctgtagtcccagctattcgggaggccgaggcaggagaatcgcttaaacccgggaggcggagtttgcagtgagccaagatcgtgccactgcactccagcctgggcgacagagcaagactccatctaaaaaaaaaaaaatttgatttaacaagctgttctggaggaatattcaatgctgtgaagcccagagaaggcttccattgggagggagccagtgagcagagccctgagttcagtctccccgcagcaagagcaggagacagctgcatgggggtctccagccagtgggtacagaatctgtacaggactgaggggtggccacctccagccatggcccctggtgcctagaggaagggaggatggatctaagtcagatgaccctaggatcaaggaaccccaagggatcaggactaggaagccaaggagcatgtgtcattgcccctgttcctcccacgggtgccagggcttctctccccagggtaggggtaaagcagtttcccaatgcgcccagctagggatgaggggaactcccaaaagcccatctggaaacctagtcctcctctaaagaagatttgaatgactgtgactgggcacgtagaaaccttttgcaccgtgtcaggtcttgatggtagaggtggtcatccaagcatgcctggggtcaggctccttggaagttcagctccaaccctgtattccagctgggacggttggaatgttagacacctcagtccctcctgcaggttcagggcacacctctctgtaagagaacaaactggcatggttggtagacatcatttgcaggctttgtatcccaagtccacccatccatctcacatagtaccactccagctgagtccactcaactgatcagtcaactggtcagtccatagtaccactccagctgacgtcctggggtgaaggctgcctcctgaaaggcctgccttacccccttacccaactgccacccagaagaacattctctccagagcctggccctgttcaagcttccagcaaggactgggcccaagccaggcctagaatgatcttccatgcaaaagactgggcgtgtatttcccctaagaccctgaccaggcctggagttccagtcttaccccagggacccaatgtggaaagaccttcaaacaagagcttttcagaagctggggaggtctgctcctgcacctgtccagccatgacaggatggagagtttagggatgattctccagctctgcacccacctgatcctctgatggagggtccagtccagcttcacatctgtgcctaatcagtggaaacacttaccctctgggcacctcaaccttctcaactggaaagtggagtgaggcagcaagctccctttccccctcccagggtagcaggctggacctgaccgatgccctttcatcattgcactgcttcccagcggcctatagtagtgcaacagggaaagagtgtcgggcaggcctgccagtgcctcccccagggtggtctgcagggatctgagacctggaatgcaggctggctggggcggggcctctgcccggggggaaagggtgccctctgaccccagaggcccaggcctgtctagaatctcaagtttccatggagaagggagcgaattgggtaggggggaggggagggcctgcaagcccaaggggccctgcctggggagtgggaggtgagggttatagggagggagatccccaaggctggtcccagatgctttgacaatatcattgcactgcttctcagagcacagtagtgcaacctcgtcagagcacctgcggccagcaggggggaccccaccacccccaatacacgcagggcgggaagctcaaccatggatgggtgggtggggcagagcccccgtccagtccatccgggcagggaaggagaccgcagcggggtgcgtccctggggtcttcagaacccaggacacccaggcctttcccagaacgctccggattgaggtggaggagaaaccccagactagggggttgttccaatcccggagcaggagctgacgggccacgcaggggagggggcgcacacacaaagacgaacccgcactcagccgcagtccaaagccggctagcgcccggagcggggtgggtacagcccgacgaccctgcgccctgactcggcccgcggctccaggagaaaaagggcggccccaccccgggacgacgcgccccttctagctgacgactccatccctggccccttgccctgcactagatacactctggattcttttctaacatattcttctgcctggaggcccagagtggagcagaggatgggggctccccgcccttctagagttccctgctccaaagagggcccccgggatcccggccgcgcccctccgcctgacccgccgagtagggccgcccagcccagcccaggatcccctcctcagacacagctgactcacgcagacatcccttccgcccagggcccggtcaggacgcggagggttagacggaagaggatcccggccatcgtctgcccccgggtccccgtccagacgaccctgcacctcgtggcggcccctcgcctgccggctccatctttaacccgctgacagtcggaggggccgggcccccgactccttagcatagcgctgcgctcattggccggcgctggcgcggggattcgcctcctgcatgcctgttggctgagacgggagagatttcaaaatagcctccgggttccgattggcccggcgccggccgagtctcgggctccgtggttttaacaatgagttctacaaacactttttccccattcataacttatcaaaaggaactttgcccgccttttctcagctccaatctctgcgagttttctagcgacaccgacaagagcgcttggaagcccggtgaggggcgccaggcgcgagcccacagtgggggaggccgagaccctgtggaaattcccgaacccccgccaagcctgctgtgaacgcggccgcgggctgctttgttatgcatgctgaggttgctctctgcgcctcctggatgggatatttggacgtggtgggcttacaaactggggtagcccccctcccaactcaaccaccccggatcgcccggcaggacgcgagtgaggctttcctgaaaacccccgggtatggctgggctatggagaccgggtcctgggccccgtggtcttttggatctgtgggagatatggggaacggaagtgtaagctttggtttcttcgtgattgtgatccactttgcggagaagcattcattaagcgcctacccttcgctgatgactaggaagtatattgatcaccgggctgttgaacggctcctagagggaagggaggagctgtgcttagacaactgtgcccctgcaacccctcctgctttattatcggtccaatggctgagagcaaatgtttttgaggcaggcagaggtggttttgaatctttatgaacccctgttgccttcttgcaaaattgagatggcaatcaaacctgccccatagggctggctgttgccagcagcaaatgagatgctgtgtaaattgttggcccagcacctggcatttagtaagtgttcactgaaagtgagttctgctgccactacagtttttatttttggccttgtcctgcattctgcctggaacaatcttatctgctcccacagcatgggctttggttgcccagggattcccacttgtgcactgttgggttcctcttggtcaacactcctcacctcactgcttacctatgtgtggtaacggaggtgggggaatagacagagagggaggag

SEQ ID NO: 1888604 - DNA, 4001 bp, Homo sapiens
gccgaggcgggtggatcacctgaggtcaggagtttgagaccagcctgaccaatatggtgaaatcccgtctctactaaaaatacaaaaattagccgggcatgatggcgtgcacctgtaacccagctactcgggaggctgaggcagaagaattgcttgaacccagaaggcagaggttgcagtgagccaagatcaggccactgcactccagcctggtcaacagagcaagactctgtctcaaaattaattaattaattaatttaattaaacaatttcacaaatttcaaatgaatgaacacttttttttttttggagacagggtctcactctgtcaagcaggctagagtgcagtagcacgatcatggcccactacagcctcaaactcctgggctcaagtgatcctcctgcctcagcttcccaaagtgctgggattacaggtaaggaccactgtgactggcctatttttaaaatttctcagttttaattctaacacagaatatagggataaaagcctacttaatcaaacgctttttggttcctcaataatttttatatataaagggatctagagaccaaaaagtttgagaagtgctgctttgaggaaaaaaaacaaaacctgtttgtttgtttgtttttttaagacggagtctcactctgtcacccaggctggagtgcaatggcgtgatcttgcctcattacatcctccgcctcccaggctcaagcgattctcctgcctcagcctcccgagtagctgggactacaggcatgcaccacctcatccggctaatttttgtatttttagtagagatgaggtttcaccatgttagcctggctggtctcaaactcctgaccttaggcgatccacccgcctcagcctcccaaagtgctggcattacaggcgtgagaaacttcgcctggccacctgtattttttctttgaaaaataaaagcatttacatagctgtttgtctccatcatgtgtattaattataacttttttttttttgagacatagtctggctctgtcatccaggctggagtgcagtggcacaatcttggctcactgcaaccttcgtctcctgggttcaagtgattctcctgcctcagcctcccaagtagctgggattacaggtgaccgccaccacacctggctaatttttgtatttttagtagagaccgggttcctccgtgctggtcaagctggtctcgaacttctgacctcaggtgatccgcccgccttggtctcccaaagtgctgggattacaggcgtgaaccaccgtgcctggccttattataacttttaacaaagtaactgacttccattttacagagaaccgcaggctgacagttgagagctgtctccagacacatgtttagcagacgcctgtgggcacacacaccatagccttcacagccactcgcgcccttctatgcttcctcaacatgaaaacatactttttttttttttttgaaaagcaaccatttattagaaccaatacaagagtatgaaaagagggaaaagaggagggtagaagagggggagagaatgaggtctgtatcagatgtcagttatggaaacacataaatgcttactctttttaaacactgacatttacaaggtgaacatatatatagaccacttataatttaaaaaaaaaaaaaatcaaaagcagacatgtttggctgaaataaaaccaggaaacacaaccaaaactcccccataaacctaaaagtccatggagaattcaatttctcatttccattcagaaatctggctacagagtgatttgtttgctacttgggacagtacagcgtgctgaaagaaacccagctactgagtctcttagatcccatcctgtaggaagtggtgggaaagccagcggaccatgggcaagtcaactcctggctacttggcagggcgtcagactgtgctctctccattccccaggactccacagaaccgtctggtactgctagtgctgggtgaacagtgagagcacagtccacaaaacacagagaaccagaatgtgactgcaagcagccaggaccttgtgctttttcatggattacaaatctagggccaaggagagggaaaggagaaagagccctattgggaagaggcgttggctgtgcccctacactgagatggaaagagtaaggctcttgagcccacacctgggcaagtagaaatagtgtccaaacttttctcaaaccagagggaaaaaaggtcaaggttaggttaagactgcagacactaagagatcacagatgctgaatacagtgaatcggatgaagctttaaggatcaatgcccaattctgagtgttacacacatttctaggaaaaataattccaatgtagctttttgttggggggtggaaataaggtggtcacatttattgaatcagctgtccctatgaggaaggagaggcccgggtacagataccacaaaggggtacagtgacccagctgtcctgggatcggttggggagtggtaagcaatgacataaatcaaaaccattgagggttgctttgatcctgagacagtctgagtctgcttcaaacccatggggaatggaactttcatccccaacctgcagagagaaataagcggtagcatctctgcctcacgattccctaatccaatgctcctgcatctgaaatgacctccctctgtgaatgcaagacacagaaaatcccaagtgccttccccaacaacatcctaagtaagtctggactagtaagattccaacattcatgaaaacactgtcaacatctgaactagcagatctgatgaggggtgggggtagagaatttgccgagtcagtaagtagttccagtcttggagacagctcagtgaggaccaaagcctgtgtgtccggctcaagacatcctccacagaggacccaagacatcctccacagaggacccaagacatcctccacagaggaccctgcggtattctattaactttgacttacaatgcctcacaacaacgcccctgtgaggtaggtcagtatgatcacccccatttgacagatggggaactgaggcattgaaagaagtgacttgccaaggtcatgactgcaggccaagatacggcctctttttagagctgaaaaaaacccaggtatacctagtaaccaatgttttactattctgtcttaccgagtaagtatgtcgatatccaaagaatacctactcaactccatttagtatcagtccaaggttttaagttacctaagctttattttggtacagtacactttcagaataatgaacacatttatttgaacacaaacttatatttttcataatcttaaacattatgtaacagtaatattagctgatttgataagtaaacccgtagaagtttaggggaggaagccaagtagaacaaaaggtacacctgtattatagctaatgctgataaactgaagaaaaggggggaaggatagcattaggagatatacctaatgacgagttaatgggtgcagcacaccaacatggcacatgtatatatatgtaacaaacctgcacgttgtgcacatgtaccctaaaacttaaagtataataataaaaagaaactgaagaaaagacatagctttttaaaacccaaattattagtctcatttgccaaagatttacatcaattacgtgaacttagatgattattgttattattattattggagacagggtctggctctgttccgcaggccggactgcagtggtgcagtcacagctcactacagcctcaacctcccgggctcaggcgatcctcccccctcagcctccagagccgggactacaggcacaaccaccatgcccggctaatcttttattttttgtagagtcaaggtcttgccatgttgcccaggctggtatcgagctcctggactcaagacatcctcctgcctcagcctcccaaattgctaggattacaggtgtgagccactgcacctggcctgaacttaagattcttaaaatattccagtttgtttct

SEQ ID NO: 1888605 - DNA, 4001 bp, Homo sapiens
ggagctgcccaggagagcggaggctttccggaatcccggctccaccacgaacttcaaggcgccagcgtcccaccgcgagtcctgacacgagggctgccttcaaccggcaagcccatctcccgctggttaccaggggactccaccccggacgacaaatcacagtcagaaccaacgtgtctctcccaccctcggactgcggctccttcccaccggcgggcctgggggtgggcccagacccagcctgggggtggggggttggggagaaggcgggtcccagcggaaactcccggccgcgccttcccgagccatgcgctcgggccgggacccagccgccttcgccccggggaagggagagggcgtgttaccacggcaatgcctggagggccgaggggcgcactcgctgaggggcttcgaaggggccgggggagggagggggcgcccgcagggaggggctgacacagggctgactccgatttaggaatatcctaccacttctccatcaacaaatctcccatcactgccgtcccacggcctcgctcgcgcccacagacccactcacaattccttgatcagcaccatcttcccggaaccccctcacagctgccgccgataccaccgccgccgccgccgctaccgcctctcacagcgcctgcgcggccccgcctccctgcccccccgagccaccatcgcgcctgcgtgcttacacccttccgccgcgaccagtcgcgtcagcgcgcgagggggcctagctccgcccagtttcgtgccccaccccgggcacacgaggcctccactgcggttgcgcagcctgccgaagagcgtgcggcttctactgcggctgcgcaagctcgacgcgcgcactcttgtctgcttacgagggctcctcccttcagctttggtccctcggggcgtctgggcagcctacgctttccggtgagttttccagttggttctttggaagccgttttgcggtgactggttttctgctctctctcactgctccgagtcagggcccacctccttgaccgacacctcacctccatagtccacataaaagactcctgacaggttctggaggcagccgacgccagcttctgttcccctccccagcccttggcagctcaggttccgcgggaggacgttcacctgcttcgcggtctcgtggaggtccaccgcggcggagaatcctaaacctcacctgtgactcggcaggatgagcggccagcactcccgacggaggccctctgggagaaaagaggcccttggcctcgagacccaggaaagcgggctgttcaggagttggttcgcgcagttacaccgaaagcgccgtgggcctcaaagccgcagcccggaggtcgctggcttgctctgtgtcagacacggttctaggcagtggggatgcatctagaagcagacacagtccctgttctcaagaagctcacagtctagaggagacaactcacttggaaagaaagcagggagaatttggggtggtggggaagtgctatgctatgaatacagtggagtactgggagaagcagaggactcaagacaagggctgtcttaggaggcggtgtttgagcctagcctgttaggatgtgagaggggcattccagttggagggaaatatgacccgaggatggagtaagcctagggtgttcaaggatcagctagagggcagatgtggccagaacatcctaagtgagggtgggaaatgagctgggaccaactggattactaggccatagtaaagaatttgtcttctaagaaccatgagaacctgttgaaaggctattaagacgattaaaatatcacgaaaacatttttgtataaacatctggtgtatctgatagtggaatacatctgtggagttagggctgcctccaaaaaaataacggaaatggactgactcagtgactcccagggactgccttaggagaaagtttctggaatgtcagaacttccagaaactttctcctaaggcagtccctggagtcaccgagtttctcttatgtgtgactagtgctagttattgtgagggcagagatttaaggaaatacacgctctttcttgcaagagttgagaagcttagaatccgctttgttgattggacattggattttatgccaagtactgtgctaagtaatggagatattttatctcatttcacccttagaacattatgagatgtattttagcatgttttaggagggggaataaaatgagattcagggagctatgttaagtgacttgtactagcttgtttgcagagccaggtttcaagtccagattttaaaaacttcaaggtctggtccatttatttcactaatttcctagatgaaagtgaagttggggcgtgcagaccatctttatgacaaataattattctcaattatggaaaggagactaaagtcaaattctagaagatatttagaaaaattaagagattgagtactataaatctgtatgcttagggagtgttctttaaagtctaaggaggcaatattaaaattaattgccaaatttatgtggtatggagtcattgtatgttataatctctccccacatgttatgcttgttgaaaaatataactttttaaacgttgcagataaatttatggttgacatgctttatcattaagaaacatgaggacattttacgtaatttctctaatttttgaagtctcccacaagtgttcactagttcttttgtctgcataacacaattcttctcatagatagtactcagatgtttgcgaaataaacgagacagtatgctggatggagcatacctccaaacccgtatacaatatagacggtgcctcgctttcctattgtttaaaaaaattatttgatgatgatacttgttcaagtatagtaaggcagactttattcaggaccttcgaaataagtatacggaccactgtaatgggattttgtagtgggggaaagagattgggctcaactctgaacatagcatgggcaagtaagaatttatagccaaggagcaagatagttaggggtagggcgatcagtggatggaaaattattaagaggatatacatcagggagattctggcttaagtaacctaacataattcttgctgaagacgtgatcagacatcatctggggaatggtggaggatgaagaacagataccaaggattggggaggttcttgttaaaactagattttttaactgttgcacagataagcctaggcttgactaaagtttggttgggagtgtatctttgtcacaatcaaaagattcatattaaaatactcaattgagaaacaaggatagataaagtaaccggtttagatgtatttattgacggaaagattaggttgctggaaaacatgaaatctatataataaaataatcctacattacatctatttacaggataaaaatggcagaatgaaagaattatgagtggaactagagaataggaaagacatgaaccaacgcccaaaatgagaaagaaggacatataaagaaaaagacaaatacaagtgaaaaaaatagactaatggattaacgtccctgtcgtgtgacattttctggtatgacagctgaagatgttgaaccgtatggtgcagttttgcaaatagtgtatgaagtgggttgtaagttttaccagtaattgtctatagatacaaaaaggagccaacctctttttttttcttttagtgtgatgttccttgttctatcttcgaactctcaaaggtagcctttacacagatgttcaaactaattctaccagtgtcatatgtctaccaatctcattacttcccttgtatgtacttctagagcaaagagctcattacagtaagaatgatggtaaattttactgaggcaaacaaagatttctgaacgcgagcagtgtgtgtgaaatgcttatgcactagctgatagcataactctggtcaaagaaatttggtcacttaaatattataattgaatttagcccctaaagtagctgttcttaacctggaatc

SEQ ID NO: 1888606 - DNA, 4001 bp, Homo sapiens
cagctagtgcataagcatttcacacacactgctcgcgttcagaaatctttgtttgcctcagtaaaatttaccatcattcttactgtaatgagctctttgctctagaagtacatacaagggaagtaatgagattggtagacatatgacactggtagaattagtttgaacatctgtgtaaaggctacctttgagagttcgaagatagaacaaggaacatcacactaaaagaaaaaaaaagaggttggctcctttttgtatctatagacaattactggtaaaacttacaacccacttcatacactatttgcaaaactgcaccatacggttcaacatcttcagctgtcataccagaaaatgtcacacgacagggacgttaatccattagtctatttttttcacttgtatttgtctttttctttatatgtccttctttctcattttgggcgttggttcatgtctttcctattctctagttccactcataattctttcattctgccatttttatcctgtaaatagatgtaatgtaggattattttattatatagatttcatgttttccagcaacctaatctttccgtcaataaatacatctaaaccggttactttatctatccttgtttctcaattgagtattttaatatgaatcttttgattgtgacaaagatacactcccaaccaaactttagtcaagcctaggcttatctgtgcaacagttaaaaaatctagttttaacaagaacctccccaatccttggtatctgttcttcatcctccaccattccccagatgatgtctgatcacgtcttcagcaagaattatgttaggttacttaagccagaatctccctgatgtatatcctcttaataattttccatccactgatcgccctacccctaactatcttgctccttggctataaattcttacttgcccatgctatgttcagagttgagcccaatctctttcccccactacaaaatcccattacagtggtccgtatacttatttcgaaggtcctgaataaagtctgccttactatacttgaacaagtatcatcatcaaataatttttttaaacaataggaaagcgaggcaccgtctatattgtatacgggtttggaggtatgctccatccagcatactgtctcgtttatttcgcaaacatctgagtactatctatgagaagaattgtgttatgcagacaaaagaactagtgaacacttgtgggagacttcaaaaattagagaaattacgtaaaatgtcctcatgtttcttaatgataaagcatgtcaaccataaatttatctgcaacgtttaaaaagttatatttttcaacaagcataacatgtggggagagattataacatacaatgactccataccacataaatttggcaattaattttaatattgcctccttagactttaaagaacactccctaagcatacagatttatagtactcaatctcttaatttttctaaatatcttctagaatttgactttagtctcctttccataattgagaataattatttgtcataaagatggtctgcacgccccaacttcactttcatctaggaaattagtgaaataaatggaccagaccttgaagtttttaaaatctggacttgaaacctggctctgcaaacaagctagtacaagtcacttaacatagctccctgaatctcattttattccccctcctaaaacatgctaaaatacatctcataatgttctaagggtgaaatgagataaaatatctccattacttagcacagtacttggcataaaatccaatgtccaatcaacaaagcggattctaagcttctcaactcttgcaagaaagagcgtgtatttccttaaatctctgccctcacaataactagcactagtcacacataagagaaactcggtgactccagggactgccttaggagaaagtttctggaagttctgacattccagaaactttctcctaaggcagtccctgggagtcactgagtcagtccatttccgttatttttttggaggcagccctaactccacagatgtattccactatcagatacaccagatgtttatacaaaaatgttttcgtgatattttaatcgtcttaatagcctttcaacaggttctcatggttcttagaagacaaattctttactatggcctagtaatccagttggtcccagctcatttcccaccctcacttaggatgttctggccacatctgccctctagctgatccttgaacaccctaggcttactccatcctcgggtcatatttccctccaactggaatgcccctctcacatcctaacaggctaggctcaaacaccgcctcctaagacagcccttgtcttgagtcctctgcttctcccagtactccactgtattcatagcatagcacttccccaccaccccaaattctccctgctttctttccaagtgagttgtctcctctagactgtgagcttcttgagaacagggactgtgtctgcttctagatgcatccccactgcctagaaccgtgtctgacacagagcaagccagcgacctccgggctgcggctttgaggcccacggcgctttcggtgtaactgcgcgaaccaactcctgaacagcccgctttcctgggtctcgaggccaagggcctcttttctcccagagggcctccgtcgggagtgctggccgctcatcctgccgagtcacaggtgaggtttaggattctccgccgcggtggacctccacgagaccgcgaagcaggtgaacgtcctcccgcggaacctgagctgccaagggctggggaggggaacagaagctggcgtcggctgcctccagaacctgtcaggagtcttttatgtggactatggaggtgaggtgtcggtcaaggaggtgggccctgactcggagcagtgagagagagcagaaaaccagtcaccgcaaaacggcttccaaagaaccaactggaaaactcaccggaaagcgtaggctgcccagacgccccgagggaccaaagctgaagggaggagccctcgtaagcagacaagagtgcgcgcgtcgagcttgcgcagccgcagtagaagccgcacgctcttcggcaggctgcgcaaccgcagtggaggcctcgtgtgcccggggtggggcacgaaactgggcggagctaggccccctcgcgcgctgacgcgactggtcgcggcggaagggtgtaagcacgcaggcgcgatggtggctcgggggggcagggaggcggggccgcgcaggcgctgtgagaggcggtagcggcggcggcggcggtggtatcggcggcagctgtgagggggttccgggaagatggtgctgatcaaggaattgtgagtgggtctgtgggcgcgagcgaggccgtgggacggcagtgatgggagatttgttgatggagaagtggtaggatattcctaaatcggagtcagccctgtgtcagcccctccctgcgggcgccccctccctcccccggccccttcgaagcccctcagcgagtgcgcccctcggccctccaggcattgccgtggtaacacgccctctcccttccccggggcgaaggcggctgggtcccggcccgagcgcatggctcgggaaggcgcggccgggagtttccgctgggacccgccttctccccaaccccccacccccaggctgggtctgggcccacccccaggcccgccggtgggaaggagccgcagtccgagggtgggagagacacgttggttctgactgtgatttgtcgtccggggtggagtcccctggtaaccagcgggagatgggcttgccggttgaaggcagccctcgtgtcaggactcgcggtgggacgctggcgccttgaagttcgtggtggagccgggattccggaaagcctccgctctcctgggcagctccgctgacttgacgggagagccttttctctttttggtttccgcatgttttaagatgaggtgacatcccgggccccacctactttcttag

SEQ ID NO: 1888607 - DNA, 4001 bp, Homo sapiens
tctcagagtatgcaatctggtttcctgagtggtcaccgacaagctggatttttgcaacccacagtatggaagggttagtgactcacaggttaaacaatgagcagtgggaaatgggaagtggatggaaaccaggccaggaaatgctcttcatttatcccccctgcagatctctccaaggtatctttgcaaaccttccagagaagtccatgagcccagagaacatgagtggcctctgtgagccttacagtttgctgcaaagcagtggcgaggtcttgaagcctcatgttactttgcatcctccccttgctttccttcctcttttgcctccccagcaccaaggctcatctcgcggctccactgagtgcccgatctaccagcagtagaaaccaacacggaaccctccttgatatggcccatccttgggaagagccagacagccactaactatatcagaccccttccaccttggagggatacacaatttatccttcatgaaacggaagtgctttttggtaatgaggttgccttccctgcctgtagtgcctccagcagcaccatggtccaaagttactgaatgcctcgtgtgctggcctggacttccattcgatacagccttatacaaagtggcccatttcagcctagcagctgtgccagtgactcctggccataaattcactggaatcacaggaacccagctgcactagggggcagcgagcctgacaaaacaatggaatggcctactggcttagcggggacaccgagggagaaatacccctcaggtttgagcctctgtcctccaggatgccttgagctgacaactgatatctggtgccatgtcccccacagctacagcagacaggtccaggagtggccctgctcaccatcacgcatggttgccctttgcaaggtgtgtgcttcccatcctcacacacttgggatcagctgggttagaggatctagtcctggggtaagggaggaatgtgaaacaaagattccactgatctggacactgccacaaccacttggccacctacggctcctcatgccagtgaccaacaaagaggggagtgactctactgccaggggagtgactctactgccaggggagtgactctaccgccaggggtcactgatcctaattgccatgaggaattaggtgagtggcccatttggaaatgggaggagaatgtctggaataaaacccagaggactccttgggatatctcttatttttatttatttatttattttttgagacagagtttcactcttgttgcccaggctggagtgcaatggcgctatctcggctttctgcaacctccgcctcccaggttcaagtgattctcctgtctcagcctcccgagtagctgggactataggcacccgtcaccacgcccagctaatttttgtatttttagtagagatggggtttcaccatgttagtgaggctggtcttgaacccctgacctcaggtgatctttccaccttggcctcccaaagtgctgggattacaggcatgagccactgtgcctagcaccggtatctcttaacatttccatgattggtaacggctgataatgagcaaggccaacaacacatgcagaccactcagcgcaaacatcacagaccagccagagtgctggcggagagtggagagggtctagggtgggtagtgcaggagggaaatgatgagtaacaatgagcacaccaggaccggccacagcagcagcagatgaccttgtttcacaaccttcttgctttattcttcctggtaaccccagtgggccagcaccaggaaatggcttctgtcactgatgggatttgtaccttcctgctcagggaaggaatgaggatgtttttgttctccaaggaaaacggagattcccacattgaagtaggagagctgatatcatgggagggcacgagcagacctgagtagcgcaaggtgtggactgtattggacacaaaccttgtgcgccttctcagattccctcgaccacctccttctttgtctctctcgatgatgcctcatccaggtcacgccgtacctccacttctgggcttgtatgaaatgccaccgtggaaaataggatatgaaaagaacaggtcagatgaatctccccccactcttccctccacggatggctctgaggtgtattttcttcttgtgtaagttctggaaaagtccatgtgccaggcaagcatgcttgctgagcgacccaccgtgtctctgtagctcgctgtgaagtctcatccagcaagggaatgagctgggtggtcactttgatctctcctctgccacttgccattgctccttcactgccctgggattgcacctcccaaagtgtcagctctttatttttcatttatttatttatttatttgagatggagtctcactctgccgcccaggctggagtgcagtggcgcgatctcggctcactgcaacctccacctcctgggttcaagcgattctcctccctcagcctcccgagtagctgggactataggcgcccgccaccacgcctggctaattttttgcatctttagtaaagacagggtttcacagtgttagtcaggatggtctcgatctcctgacctcgtgatccacctgcctcggccacccaaagtgctgggattacaggcgtgaggcaccgcgcccggccagcattagctctttaatccctgccttgggctatgttttccagaagcccttccccaaaaatgtccatgggaaaaaaaaaaaaaattatatatatatatatatatatatatatatatatagagagagagagagagagagagagagagagagagagagagagagagagagagagagagacagggcagcgaatctgaatccagatgcacagaaagaccaaaagctaccactctggagcaaagtacttagtcttatatggaacttccattcaatgcaagctcaaggtgaccctgattcactgtgaaattcccatccaaccttctgcattctaattcagcaagcacttcctgtgggctactatataaaggaactgtgctagaaactggggagggagtagatacaaaaataaatacgacacatctttctggcctcaatggtctagcttgggaaggacacaggcctgtaaatgacaagccactgtttgttaacaataagtggggggaaataaattcaaaataagggaggtgctcactccatgaaaattcactagctacatcctcgtaattgaccagtttttctgcatgtatgttatacttttatactttataaaaattggctttaaaagcaaactccaggctgggtgcggtggctcgcgcctgtaatcccaggacttcgggaggccgaggtcgtcaaatcacttgaagtcaggagtttgagactagcctgggaaacatggtgaaatcccgtctctactaaaaatacaaaaattagtcaggcatggtggcatgcgcctgtagtcccagctacttggaaggctgagacacgagaatcgcttgaacctgggaggcagaggttgcagtgagccgagcgagattgtgccactgcactccagcctgggtgacagagggagactccatctcaaaaaaaaaccccaaaaaacaaaaaaacccagaaatttattatctcacacttctggaggctagaaacccataatcaacgtgttgaagtccacaagagctgaagtccacgagagcctggctaatttttgtatttttagtagagacagggtttcactatgtgtgccaggctggtctcaaactcctgaccttgtgatccacctgcctcggcctctcaaagtactgggattacaggcattagccaccatgaccagctgatttcctacctttttaaggctatctccctgttgtgtatacatatatacacacacatatatacacacacatatatatatatattttgagatagaatctctctctgtcacccaggctggagtgcaatggcacaatcttggctcacagcaatctctgcctcctgggttc

SEQ ID NO: 1888608 - DNA, 4001 bp, Homo sapiens
tatgtctgcatgtatttgtgtgtggctgggagaatacgtgtacatatatgtgtgtgcctgtgtagtgtgctagtgcatgcatgtgtatatttatgtatgtgtgtgtatgagtatgtatgtatttaatgtgagagtgtgtgtacatagacgtatgtgaatgcatgtgtgtacatggtgcacatgtaaacatgtgtgttcttgctgcacatctctgagcaacacaaggcagtttcatctggaggcacagctgaggcagtctccttgctggccagccttccctggggaatcctcactctagcaggaccgtagccccgtcagcatccctggcttacgatggctgggttagattgggtggggaactgcatccgtgtcacaaaagagctagaggatgggggcttagagcaataggctcagatttctcttcctggatttgtggctcagtcctcctcagcagagccacggccttcccagggagaaccagcccttgaatgggggccctggggtgagggtgttgacagccaaccaccctggtgatggctcttcagacctgaggggcatgactgtcccctcatctcagcagggcactgtacattgtcttctctccagcctgcctgggccaggtgtcccatctgccctgaggtccagcccagctctggccattactgggtgagtttataaatggcacccctgccccattccactcagagtgtgattcgggcgacggtgtcacctctggggaaacgtcagctcatttctagctcaagaagcggatctgcaccccggccttctagcatctccaggacgttgatcatgcttggctgcctaggcctccaggccagcaagataccccagctgcctccacaagcaggcagagacttcaccccagctcgccccagtccacgcaactcaccagttcacattttcatgcggtattacatgaaaagcactttttgttttattacacagaatttatcaaaatgattttaatgtgaaatagctcatgcaaaaattatgacagactggacttgccacgatttgcttacacctgcccccccaccaaccccattgatgtgattttgttctcttgcctcaagttccagaaagacccctctggacctagcactggacaggatgattgcagagggtccaaggagaggcagggaagtcaactagaggctcctacaggaaggaggcctggggcagagcacatccaacgtcctcaccccattacgcttgcactgtccttaatttctccccctcctagagataagggaacatcccaaagaccaagaccagctgaggttttggtctcacattcattcagtgagctcttcacactgggttcagcccacaggcgtcatctggtgaatggatgttgacaactgggtgagtgcaggaaaaggggaggccaaggaccatgagcctgaggcccttcatttagagaagactcagcgaggacccgatcagatacgggatatcggcatgaggtaagagagaatctatcctctatagcaaagctagcatcaggggcaaaagtaagagtggggcaggtttgggttccaataaggaagaccttttggttaagaggcatttccatggttgattccactggaaacagctgattggagctgtggttgccttgtcacattctggttcctgacactgttttctttttctgtttgtttgagacagggtctcactctgctctccaggctgcagtgcagtggtgtgattacagtacactgcaaccccctcctccgagtctcaagcaatcttcccacctcagtctcttaagtagatgggattacaggttcatgccaccatacctggctaaaatttttttggcatttttttgtagagacaggctcctcctatgttgcccaggctggtctccaactcctgggctcaagagatccacctgtatcagcctcccaaagtgttgggattatgggcatgtaaaaataagaggcaatcctagcctcttatttttcttcatatccctggacacctctgacacactgtgcatttgcttgtttatggacttctgtctatctttcctaataaaggacatctttttttcactactgaaacctcaatcatgctaactctgctgcatacactgaagggcctcaaaaattgcattctgaataaacagatggatggatgaatggatggatggatgaaggatagatgaatgtggttggatggatggattgatggattgatgggtggatggatagatgggtggatggatagataggtggaaggatgaatgaatggatagatgggtggttgaatggatggatatggatagattggtgggtgggtggatgaatggaaggatggatgcatggatggatggatggatggatagatatgattggcctggataacctccaaggtgccttccagtgatgcagtttgtctccttcctgcattttcgaccaggctttctgactttggatgacttgatgtggccgcttagtcttgttttgtctctgtttccccatatccagccttttggttcaatgcttactccttttcactagttgtcaccctgaacaagggatcttccctccatgtcatggtgcaattgagcaaaagggagctaattgagaccagtgtttgccaacctcccctcacatggtaacaggtggttgaaacaattattatttgtctaaatacatttgagaaaacagcaccttagatcccactcttgaggattcaaaatgttcattagtatttccaaagctctaaaatgccctgtggtcaattaggttgacctgtctaaaggatgattccctaaattagttgatgatgggacccttgcgttgtcagtaccgaaaagcatgatgtcatgagcaacagctaagacagtgctagactaaaacctgaggtcctctccctatcagaagactgctcccctacctcgggccttcatttataaaacaaggatgagaatgctgatttcaccatggagacaaagcaagtaagggtgaacgtgtcaggcctttagcatgatgtctagcatatatgaagaactcaacaagtggtacacgattgattattagctatcattttcattgtggtaaaaaacaaaatgtagcatttacaattagtgacacctatagcacatgcacagtcttgcacaaccaagaccactctctaattccaggacattcacaaaatccccaaaagaaaccccacatccactagcaatcattctccattccctctcctgccagccaccactaagctactcttgtctgggtagatttgttactctggacttttcatatcaatgggatcatccgataaatcatcttttgtgtctggcgactttcactcagcatcacgttttctagattcatctgggttgcagcaggtgccggtgcttccttacttgatgtggctgaggaatggtccattgtatagatggaccacacattgtttatccagccatcggctgatggacagctgggctgtttccacctactggctattaggaataatgctgcgatgaatatttacgcacaaagttttgtttagttaccatttccatgtcacatggattgtgcgttcgatggaggatatagagcattttatcccagacctactagctgccctcccggctccaaagccgttcaattctgcaccacagctgcagatttttcacacacgatgcataaaaaggcctcaaacccagagacacacccagaagtggcagcggggctgtgatccctctttgggtgtgacctgcgacgtgcaggtggatttcccaccctccccatttcctgctgcctgggttcccatttgtccttgcttcatgtttgccagagaacacggttgaagcacagactcattgcaggactttgcagaggagacccgaggagacactccatcatccgctgcggcagatgaaaaggaactaatttccttcttgtgttctaataaagcataaggttcacagtatctctcctatttgtccaggagaacaaagg

SEQ ID NO: 1888609 - DNA, 4001 bp, Homo sapiens
gagacaggtgactggcccatccctgaggcaaggatcctagcacctaccaggcctctccccagaccaacactcagcagctctgggaggaagtggagagccccagagtctggtgaactccgcaggacgtgagggaacagctcaggggagaaccagttccttccatggccccaggaggtgggagacaagccctccccattctgcaggtgagaaagcaaggctctgacagggacagcagcttgtatagggaatacagcacaggcaggtggcaggggcagaaataaaacccttgtgggttgaaggcgcaggttcttccaccccatgggagtcccaccatggctggctaggaggctgagatacccacaaggtaccaaggaaaagcctgaagtggcagcagagcctgtcgatggggctgggggaaggaggaggaggagtgggagagggagacaggtgtctcagaagacagaaccacagagtgccttagtgcttggggactaggcctactgacccggctttgccacttactagctacatgaccctggcataggacttagtctctctgagcctcagtttcttcattcaaaaaaatgtaaatggcaccatcacagggctgttgtatcatatgagaaggtactgcatgtgggccatgcatactctctgcctacgacctatggggctgggctgcccacccggctcgcagtggcacacctgcacgacaccgagcagtgaggagtccttgttgagatgggccgcaagcagccctccggtcctgatgaactccctcaggctgagcctcatctcacccagccctggctttcctccttcccaggacactgggcctgaggaagaccctgccctgtccctgcacaaggccttgatccttgcctacactgttttctggctgttgtgtgcttcaaggggatgtggaaaaggatccctctcctcaaaacctggcacttctaagctgtgcatgctgcagaagcacctgtgggcatggaggcagcaggcctatgtctggattctgccctccgagggccatcaggctgcatggcgttgtcttctaggctcactttcctaccacagagctgctaccaaggaaccccagtccaaagggtggctgcaagcctctcattccccaaactgagcctgtactgtttggttctctcatgaagacaaatacggaagagactaatggaaagcccaaaagagaaggtgaaatgtggctcaccatctgcctttggtcttggcagcccagggcatttgggcacccccaccagcttttttttaaagatggagtctcgctctgttgcccaggctggagtgcagtggtgcaatctcgactcactgcaacctctacctcctgggttcaagtgattcttctgcctcagcctcctgagtagctgggattacagatacatgccaccacacctggcttatttttgtatttttagtacaaacggggtttcaccatgttggtcaggctggtctcgaactcctgacctcaggtgatctgcccacctcagcttcccaaagtgctgggattacaggtgtgagccaccgcgtccagccagtttgggccttttctgcacattgcctgtccctgtaggggctgccacgctgtcctgggttcatcccagtgcccaggtccactgacaatatctagcttgaagtactagcctagccagctaagaccaagccccagggagtggctgagaatctgaatctccaggactctcccggtccctcccactctggagctaaggacatgttccccgtagaccaggtgatgctccactttcagctgggtgccctcctgtttcctgggatggctgtgacttgggccccaacagtggcagcagtgccctctatcaggatcccctcccccacctgatagggccttcagtcagggcagtctctcgagggccaggcaggcctctgtgatgcactgtggaaacattgcatgggtaccaccagaacatgcaatgcaactacaatgcaccacagctgcccgccaggaggtatgcggccagccaaggaggtgcccagggtggtcttcagctctgtttgtgtgcccgagggggcaggaacccactccaaggctgcctgcagaggcctgggaagtcacgcaaaccgctggagcaaatgcaggtgaacccctggccagctggggtgcacctgggcttacagaggctatgggccagcaggacctgggactctgggagcctaagaaaggtgcaggtagaaacacacttgcctcagaggctgaaaagggatgaaaaaggagtccacctaggccaataagccgtaacttttttgaaagggggctgctgtcctggtttctctgtctttcggatggccccacccgcagggtcagcatgaggtgagtgggagtgttctcgtaaaccagtgcagagcacctcccccaggggccaactcagctcccactcacgtggttgagggcagggtcagaggtggccccactgacgttgaggctgctccataggtggccactggccctctcgcaatggcagaaggaactctgctgcccatctgctttcccagggagtgaggcatgcatggctctgcaggcatggaagatggccttcaccagggggctcctgcagcagtgacagggagtcgagaggcaggtcactatgtgtcacctgcgtgacaggcagaggggcccaagccagtgactgccacgccccacactgatatgacatgtgcatctgttgactccaatgctgccactatggcaccatgccaccagctccagatctgaaatgccagccctgagctagggttagcgccccaccctttagcaccttcattcaatgctggaagtcagagacacaggcttcaccatcacgtctgctgctaagaagccacccaagatagtcattccaacgtgtgcctcagtttccttacctataaagtggccacaataaggtgttgtacccgttctttaagggaccacccccccagagatgtggtattaaactctctggagatacttagttagcttctttctgtagaggagactgggagtggaaggggaggctagggatgggggagggttctcatagcatcctagtccctgaaaagcagagggacccaggggtaagtgaatccagcaggcagcagtgcctgcaggggtgtcttggctgtccatggaagctctgctgctctggagcgaggtgactttggacaacttacctgctgagtctcagtgtcctcaggcacatcgactgggggagacacacatacaggtggaatgctataccgggctgggtgcttacctagtcagagtgcttacaaatggggctacttcaatgaaattagggtgtcacatctacttcagggaacaaaggacttcaagcctgtgtatactcactcttctcagctccttcctgtgcgccggttaagggtctgcttgataggaaatgctacagccttggctctaaggataggacctcgtggggcctttctgtcttggagcattttacagtttctcttagaatactcagatccaattagaaacagccggggagtcagcaggcagggctgcccatcactagtgccgaatgcccccaagacgcagacatgaatctccaaagaggaatgtcaaaagctctccggttatgccatgtgctaaaggctattttagttacaggacaaagttgccagggttgatggtgggggtggaggtggctggaaggaaagtggataaaatgctagcacacaggggcaagatgctccagtgcacatgagttttgggggcaacagtggcctctctgcactgattgtgaaccaccagtgcctgcctccaccacaaagcttctgaagatgctgggggccacactgctctcgtctcttcttttcagcctgtggcgccatgaaggctgcagggaggaggacccggacacagtgctgacagctgctgggacaactgtcgtgttgtgcagagcaggacacttgcacagaggacctgctggcccaacttg

SEQ ID NO: 1888610 - DNA, 4001 bp, Homo sapiens
ttgcttctggtggcttcctgtgacacttggtccaggactagaacctggatcacaactatcacctgccatctcactgtgtacccaccttgcccttggtctccacaccctccagctgatggtcatgctggctcctggcatataccaacatcccctcctgaccccctcagaagtcccctcccattcctctgcacagtgcctgctgctctgtggtttccatagcacacaccaggatccgcatctgggtcatgcatcaggacgtcctcccatcctgtgtttccctcctcagatatttctgtcctgtcctcaaacatgcctccacccagcccactacctggcaccagagctctctcaaagcatttctgctaaggaagcaaccacccctccactgccctggaacacccactgcttctgacccacacacgtacttttgagcactgttttaatcttggtcatcatcggctgcacacttgtctctccatcggacggatggtcgctgtctccgccatatttttcctctgttcgcctctttttgggggcacaaaggccttcttccagcagagcatccacatcgttgtcaaagtcatcctgcaaaacacgctgttcagacaccagagcccctggcgctcatgctcctgcaacaggagagctcaacagcattcctgagaacagacacagaaaggaggtgctctcagggggcctagatgtgcccttagggtgcatgatcatctgaaaaacaaacaggatgaagctaccagctgacaccaacacacctggtccaggggcacacactgccaaggagcgtaactcagcagcacctgctgccccacgcgctagatcagggatgcagggcctacccatgggccaaacttttcattaggaaactttaaaaatctggactccttacatctttctcttctccacattaacattattccacctcagaggggattttggtttttgttttttttttttttaatttccctgctttcaaaagatgctgcaattcccaaatctctctttgggttttgctaagagccctctagaggaggggctgccaacatacctcgtaggggaaattcaaggcctcttcatccactctgtctctctgaacgattgctttagccgtgaacccgcctgctccttcttcatctagctccaaattgtcagtaaaatcttctaactcatcgagcactgcatactccactctcttttcctgatccagctcattctcctcatccttcttatcagcactctcaccccctatgcctaccccgtcaccaacactcccgccaaagggacaagcatgcacgtccccactgacagggctaaggagcagaccgcactccgcccgcacgtcgcgctctgctcctgtgtacagcaccttcctgtccttactcctgcagctctcggtaaagctcacgctaatctttacatccttaagcaacttaaggtcaggggagaacttccggaccgcaggtgcgtgccgggcggtgcgcgggctgtggccactacagttcgggtctatgaggaggcggcccttagagaaggatcctttggagagaagagaagctccgtagaagttgaaggggtcctcagcagggagttcggactgtccatcaccaccagagccaacgtccattacctctgcaccactggacgtttgcaggggaggtggtggagactgctcacggggcagcgcttggaaggggcgagctcggctctccatcaccgcttctcctgcgggcccacacgggagcggagaggggctctcatctgtctccatattaaaagcgcttaagactagtttacaagaccagagttttacaagccctcacataaatctacacagctaacatgcacaagtccgctgagacccgggcgcgtcctgccgcgctgtgcgctggcggcttagtcaagctggccacattgctcttttcattaatgtagacagcttttagaaccactgcctcaattattggaaatcacaatgcactcagcttaagtgactggcgactaagcgagtctgtcttcatgccggagtggcacctttcttcttctacctgcaaagaaatttaaaaatatcgtcacaaaatgacagaaaccttccaattccctggtaccaagttaaaagccaagcactattaacagcatagtaaagggcttcaaaataatattccctaagaggactttttaggcatcaaaacaaactaaccttacttttattcttcagaacctgaattataacttaagtccaaagttaaatattttgttaatgcccactttaattcctacttcagaaacacaaaaactatataatcataaggctcaaaaaatattttaaaaatttacactaaactccaccacagcattcttctaactcagataagcaagcatgcagtgggaggcaccctttctggaacacacagaaggcgcgtggcctccctcaggccaccagagcacagcaatccactcacctgcaagggctgggtcagtcagagggcgagcgcgagaccctcagctcaactctgcggcactaggggcctcagaggcatggccaggcgctctgctacccagggaccccagggctctcctgggcccacagggtagcacgtggacggggacagtgatgcagcgtgctgaggtcaccagaggtggcagcatagttctgttcccgatggaggagaggggtgggtggctgtggggaagggacctgccaggatttggggtggggagccacaagagacagctggagccgaggcacagagaggcctgggtgccacctgcagcccgttccgccctggggacaataaggagccactgaaggtgaagcgactctcatgccacaagtaggttcctacttgagaggggagacccacagctgtgccaggcagaagcaactgcatccaaggcacggggacagtcctccaggccagaggacaaaggtgtgaaagaggccctggcaatgggccaagaacagtgtcacagaactgaccgcacttgttgacccaacggaggtggatagcagagaaaagagggaactaaagacaaggaaggacacccaaattccagcatgcaggcaggagcctggcgaggagaacagaggggacctccaggcaggctctgaaggtgccgaggccacaactctggagccatgactggtccagatacggaaggccaggacgcactgaggaggtagtcgccaaacccacaggaggaaggccacccagagatgagggttaaggatgcaactctaggaagccttactacagaggaagcatgaagaaagggacaacatgaagcagggaagatgggtctgagggggcagccagaaaaccctgcatcagagcagaaggaacacatgcagacacacgcacatgcacactcccacaacgtgcacaggaacacgcatgcatgcacatgcgtgcataccagtaaagatgcacacatgcaaaccgcactgcatgacctaacatcctcccaagattcccggaaagaacaggagatgcagacatcacacatttaacaagggacaaggcatggtggatgtacttcgaaggggacacaacatgaaaaccagagactagtttaggtttaatcaatacatttaacaactatccactggccatctactccgaggaacgcactatatggacaagagacaaggtcacagggcctggacacactggcaggtcaatgaccactgcactgtcaccccatttcctggattctaagatgtcctaacatttctgaatctaatgggaatttcacaccgtatgttcccaaagatgtgtccatcaaaggtgctgaggatccaggaaacacagcacagagctaacaactgactataaagtgctgaagacgctcaagaggctgtgggcagcaaccaggcaggcatgaggaacactaagtggggtgaggtcagtctcctggcaaccaagaaagaccattagagaaaacagaccgaggggtcaatgcgcccagtgccacagattacaaggaag

SEQ ID NO: 1888611 - DNA, 4001 bp, Homo sapiens
acatcctaaaggcaactatttacacctactccgtgatctgacgccacagtgaagagaaaatgaacagacgtgaaattcccagcggcttgcccggcacacagtaggtgctcacacgaggcagctggcaacgactgctaaccaccaagttggttctggaaaagcaagccacggccagacacgtggccattcacacacccaccgggagcttctgttccattagggtttgtcacaaacactgctggtatctgtaacggcaaaacgacgggccaccggttctagatgagagaactgagtcctgctttctttatagtattgtttccaggcatcatactcccagcattctaaccatgtgcccgaggctatacaaggatggattctgccccaaaagcagcagcaaagttgctctcatcagccacgccagatgtgggggaagctggccttgtagcacccctgtgcaccccaatctccagaacaccccttccttccccttcaatcggctctgctccttttaaatggaggaaataaaatgtgcctggcagatggccgccccatgacctcctgagcattttgcaaatgtctctcttttgggggagaacatgttgcgataatttagccaggctagggtcactctggccagatgataagttttgtaacttaaacattttctgcccattgcacaaggaatgggtgctcattcaacaaagttctggaaaattgagagagagagaacgtggcagcaaatactgacaaccctgtgccaggcctggctcgcaggggctcccgtgtgcgtgtggacgtgggccgcctccacctgcccacagaggcttctcccattgtgaacggccacacgagagtccggcaggtcatgttatcacaactcctcaattcaaacgcccaaccccaggagcacggctggtgcgtcgagctttccacatttaaagaggcactgcatgaacatctctgcaataaatctctcctctgtcctccaggtgggatcccaggttgaagcccaggaatgtttttatgcctgaggcagccaattccacacctgaaccctcagaaccctctagagatccactacatgtcagaagtgggggtcagagagactgtgggaagctgaggctcagagccggggaggggctggcccaagatcacacggccgagtgggacccaggccctgctcactggtcagccgtgagcttcccaagacgcacttgaaaggccttccccgagctgcctcgggccctctggacaaagatgccaggccccaggaggatgtgtggcatctacacacttgttcattgcacccgagaaggtggaacgtggaaagacgaggccatggtagcttcgacggttccttccggagggaccagatgggccaaggacccagctgccatgaggtggccggagagaaggcccagcagcgtgagggcttcctggaggaagagggcccagcagcatatgagggcttcctggaggaagagggcccagcagcatatgagggcttcttggaggaagagggcccagtagcgtgtgagggcttcctggaagaagagggcccaacagtgtgtgagggcctcctggaggaagagggcccagcagcctgtgagggcttcctggaggaagagggcccagcagcgtgtgagggcttcctggaggaagaggatgttcatgagctacgatgcagaggagggactgtgcaggaaatctgtaaactgaacctaaattctctgacctaaattaacagaatgcaccaccacccaccggtgacacctgacgggtcaatgggtccctgccctccatacccagcagtctgagaagaaaaggctccatgacccttctgggccacctctgtttgttaatattccccagtgaaacccccaagcagtagccttggcttccctgtagcctggcgcacacagccgtccttaccccacagcaggcaggatggtcccccaccacgggctgcaccagcctgcctgctgagtgcaaagatgccgtttttgatgacgtgtggcttcacaacctctcggatgagtcctgaagtggaacttacttagtggaggtggaaaaataaacttgccggggcaatgccacagcttggtggcttctgacgtggcactgagcacaggcaggcaggtcatggctttctcttctgattcattcactcataaaatatttcccagaggaacacttccctggccccagacaggctactaccaggccccaggccccacagcagggcaatgggtgagtggagagcaaggagggcttccaggaggaggtgacactaggccatagtctacagaggtcgaagatggggccacggagggggtcagggctggctgttgagggtctcaagagtcccctgaaggggagactggaattcagccaagagaagtacaggcaccctgaaaggcaggagacagggcaggatgggcagaggcctgcttcgcgaccacagccaccaccattccacccgcatcccttgttctaaggagggacaagggcctccccagcccttcccaccagaggccactgaacctggccgtggtagagagaaaggcctagggtttgggccggtggccaggctggctcagactccaccgtttagagggccacgtgaggctcgaccttccagacctgggcttcctggcctgtaagacagggccggtgatccgtcagggttctgtgaggtggccccaatgacagatgtcagtgcccagcacatggaggagctgtgtcccgtgctgcgtcacctgcccagggactgccgagggcctagacccaggagataaggcggagctcgggtgctgggcccacctggtggcctctgttttccccatggcggctctccagggtgcagggcactgggagggagggggcagggagccgccaggagccgcctgcccggccgtaaatcaccagccacgcttaataatcatgtgggtacttaagctcctccgtcttctcttcccctttccctggggaaatttccttcatttcctaccttatcccagtctccccgaatatctaaatcaagccctggccaggaccgcggcggccgctctgtgccgacgccctcggcctactttcatcgggatggtggggtggggggcgcaaaggcagggggtgcaaaggccgtggccacccagatgcggccactcgaaccaaggtttcattccttcccaggacagaaaactgaaaatgccaccaagcccgccctttgagccacagtgacaatgtcccctatcactgggaccagtcagcaaagccaggttgcctcgggcaggaggcaggggcagaagctgagtggggaattgactcggcctcttgactgagatggaggaagaggaaacgccaactctcaggctacctgggccaccagggcagggtggctgtcacccaagagcctgccagcagcccctccaggtgggcctgaccacagtcagcctggccctgctctcccatcatggagctgggctctctgggacgtgtggtctgccttgatcatgacaaggatgcggggtgggcgcagttccggtgctgtctcctgccatttatccagctttgatcccgcctctcgtctcgtctaactctcaccctgaccaggagatcaaggttactagccgcattttacagatgaggataccgaggctgggggaggctaagcaagctgcccaccccactgggccattcactccctgctgccaagaaggtcttccacctcccgggctctgttcatctgtgagctggaaacgtgttcccaggccatcaccagcacccacagggcccaggggaggccaacgcgcaccaccaccccaggcagcaggagctggaaggtcccacggggagagccatgctggccactggcaggccaggcaaaaggccccagtaccatcaccacctccccgctgaagcctcccaactcccaagagctggaggaggaagacaccaccaggacgtagtctgggctggggccaccttgctgccgaccctaa

SEQ ID NO: 1888612 - DNA, 4001 bp, Homo sapiens
actaaggccgggggggtcctgggtatacccctcactccaggccctgcagggaagcagcaactccccgactccatttacgggcaaggcagtccatctggaccttggtaaaggcaccaccttggccaggttcccaagccacagccccatttcaggcaccccagcgggctccctcatgactcacccatcttcccgtcctccacaaagaggatgtgcagtgggtacaaggtgctgaagtagaagacatcgatgttgttcttcacggccacctaggcacaagggggtccccagtcagtctctggggcttgacgccacctctgaggccccaggaagagtgtcactgagcagattctctcccagggccttccctggtaaacacaccccttcgttccccaacctgggcctccccaacacatctgcagctaagagcatgactccgcagacacgaccttctactgaccccagtggggcccggctggtaggtgagtaaggactggggtgcctgccctgcccggaacccacctggaggttgttcagaggctccatcttcatgaccgagcccaccgtgctgagaggcagggagatctccactgtctggttggggctgagtggcgcgtggacctggaggggggcggcgggggccaggccaaagctggggagagagaagccccacagggatggcagggggagtaggtgctgatgcgggacaggtgagctcctccgactcgggagctggggctgtggttggcagggagcctctcaccgtgccagccttcccatgttctggaccctggacagaaggatgggctgtgggtcccctcccccagatggccatctggacagaaagaaagagccccaggccaattgctctgctctgccccagcctggctgcaggcctgaagcccagctctgttcctctcctctgggccaggcactggtgggcccaggtaggcaggccttgccctgtcctgccctcaaggagctctgtctaatgccaggggcctggagtataagctgcttctaccttgaaaactctgggaccacccaagtctctgctgccaatcctcaactcccagaagggatctgaccatcccaagcaagacgctagattttactctcttggccagaacttgccaggtcacacagtggccacagagagattcaggaaagctctgcttctctgcaaagcagcacagtgacaaattaggaagatcctcatgggtgtgagacacgccagcagcaggctcttggaaggtaagtcacagggcatgggactgggggcacaaaccgagggctcggtatacctgggctgcggattcaatattatacctgctcctagcctcataaaaacagagccaggtacacctcttcctatcctctagatgaggacaccgtctcagggaggagcaggcctgtgtcagaccccatagggtgagggcgctgctgagaatcagagtttgggctgtctgaccccagcctgtgctctgcccaagaagccatcagcctgcctgggacacagagggagaccatttggggaaccccaggtccgcttggtggctcagcacactaggctttcctgggagctccactactgctcgctatgtgagctgtccaaggagcccaggtgtcattacctactaaaaaggggtgatggcagtgactttgctgggccatcaagtggctcaagtgagacaatactcccaaagccggtgccacagggcctgggtgcccaggaagcattcagcacacagtaagtttgctagaggcaaccattggaaccacctctcggagcctggtgcacttctgtggcctccagggtcacatgagggtaagtggtagagccacccctagccccggtctgcccaagggtcaggacctactggcccccaggcttccttggggaagcagccccttcagtcaacttcttagaggctcagtttgctcatcatgagcgtgctcaggaagaagaatcatcaggaggggctgccaggggtccccagggagtcctagcctcactggctgggtccatgacgcaaccttcccactgacacccagtgtagcggacccggtggggaggggcctgaagcagctaccgctcccagaggccccatctgacactttaatcctctgccacaatggggaggctggtaggcaggcccactccccaccagccttctgagagctggtccctaagatgggcccctcctatgtggggtgtttgccagaggtgggcttctcagctggagcagggcgtttctgtctgtaaaacactcctttggactgtggaggcaaaaataaggggggccaggtgtggtggcgtgcacctgtagtcccagagacccaggaggctgaggcaggaggattgcttgagcccaagggttcaagaccaacctgggcaatacactgaggccatctcaaaaaaaataaaaactaaaaagaaagacgtcctttcccactctgcctggtactttggagtccatatgaagaggccacttgggggtaaaaatcccactgcttggctgagcacggtcactcacacctataatcccagcactttgggaggccgaggtgggcggattgcctgagctcaggagttcgagaccagcctgggcaagatggtgaaaccccatctctactaaaaatacaaaaaattagccaggcgtggtggtgtgcacctgtagtcccagttactcgggaggctgaggcggaagaattgcttgaacccaggaggtggaggccgcagtgagccgagatggcgctgctgcactccagcctgtgtgacagagtgagactctgtctccaaaagaaaaaacaaacaaacaaaacccagtgcttcagagagttttggcctgagcggtggtggggaacatccttcagaaaaggggcactgccctcccctctacagcccccacccctgcctgcagtccccagaacagactccgagtgggttctctcacaggcctcctcttgagaggtgcgctggcctcagggagctctcacctgttgcggttgaactggatggcaaagtcggtcatgacctgcaaggccttgttggtcagctgcaggtccatggagatggagcccacctggcgggtgaaggtgcctgagatctccagccccttagccttcatggctgggagccagacctgcagggaagagggtgcggagggggcgggtaggtgcctcttcctgcagcccaaactcaacagcccacctgagggtgctttttctctctctctcctgcaggggcctcccagatccagcacccccacctttactgctaggggatgaacaggtgtgtactgggaacagaacaatcccatgtaccatctagggccaccgccatgacaggctgcctctcggagcagctcagggtggggaggcacttcagcgctccagggctgacgttgagtcctcagagggcaatggagggatcacttgggaagtagggctgagggaggccatgagctggcaatggagggatcacttgggaagtagggctgagggatgccatgagctaaggacagagctcagtgcccaatggcatcctgggcctcggccagaatctgggccttcctggccatcaccgcctgtcctcccttgcaggaggcagggctggcctttggctgtagaaactggtctgaccaaggacagtacctaagaggacccctcgcctggcaggccttctgctgcttggctgcccttgtcattcaagtctcagctcaagaaccacctcctcctggaaccctgcccccaggttccctcgccccagtgatgttatggcagataaatatgagcttgtgtctgtctctcctgtactcagagagctcgctgagggaaaggctctgtttttctgtctttaccaccttggctcagagcctggtgtgaaaccagtgtttggggagtgtttgctgagcaaacaggatgagttagagccctgccatggaagacatccaccagcggcatcctgtgggctcacaaacgcctctcaggcggttactctc

SEQ ID NO: 1888613 - DNA, 4001 bp, Homo sapiens
cgggggcaatcaccgcagcctcctccttgtcctctccgcgggctcccggcccagcccctaaggccgccaagcctgaggcctggctgcccagcgaggggagggcggctcctgggcaccttcttcccgtcgtccctcgcggctgcacgcgacgactctagccccacccccttcccaccatcttttctgctcgcgctgggacttccgctcagggcctcagacgccgggacctgctgttcacgccggggcgggccgctggctgtgtccgcctgagctgaggtctatggcccagagggttgctgaccccgccatcctccctgtgtccagcccactgtctgctgccctgtgtccccacccgtcctgacccctaggctgccaggtggggacatggccatggtgtcattgcatccccctgctgaccccgcctgggccctgaccttgaccctgacctcctagaggcagtcacagggagagggctgcagggctggtggtagtggtgccatcctggcccccttcatgaccctgcctggccgctaatgctgaccctgacccccgccccccaggctgctgggctcacggtcctcacgtcatcagcttctgtcacggcccacctgccccaccaccctctccccatgactgccaccaggaggccaccctcatggggccatcagcccctccagcagctcagtccccgaagcctggccccaggcacccgattgctttcctgctggcctctctctagctttaggccccaagaggcccaggccaagcgcggtttattacaaaatccctggcagtgtagctggtacgattttatttattgattggaggaatgaatgagctggtgaatccagcactgtttataaaaacgaggtgtagggaaaagcttaagtgtctaaccatcaaagagtgaaacagaatgcgatggagtctttaaaaagttacattgaaagtttttttaatagttgtggaaaatgctcattataaaatgttaggtttaaatgtcatgtagtctatgacaaacatgtctcaggtttcatgcaacagaaacagctctgggcagcactgtcatgaaagaccagagggtactgttctgtgacctttgcagagaacggtgcccagcactctgtgcccagtcaatgttgggtttattttagcactaattataaaaatggaggacttttttctatacatatgctttgacatttttctccagaattctcttcatttgttttacttaacagtataaaatatttttattaaaaataatttttttaaggatctcgccggatcttaagaacataaacccaggccttagtaaacgtatctctcacactctgcaaggtttggggtcccctgtggtagcctccttgtcataagaccttgagtaggtcccgtgagctcaccctcaggaaagaggtcacagaggagatgaaaaggctagggggaagcaagccctggctgctctgcagaaggaaacacgaggttcactctatgatgcttaggtgagcaggcaaactcatgggcatgacacggagggctctactcaatacgcaccagcattttcaaaagagaaagggatgtagtttagcaatgacagcctgctctgaagagacatcagcaaagtggcagcaaccggattctgtagatgaaaaccctgccttgggttggagcctgagctggacaattgtcccctattaggatgcttctaccaatgaggaacaaacaatgcagactcataatggcctgaacaataaggaaagtgtgtccattagattttattgtgtaacaaaccatcccaaaacttagtggcttaaaataaccacaatttatcatttctcgtgaatccaggtttcctaggtgaatcttcttgcctgggctcaggtatgtggctgtgtttagctggcaggttggctgggaactgttctttgaggatgaaagacccatggagaggaaggttctcagccagcagaaccttctcctcaatgggtctttcatcctcagagaagctagataagacttctttatggaagcatctaagacagcaggagtaggggccttttaaggccaaggctcagaaccatacagtgttattcccaccacattctaggagtcaaagcaagtcgccagctgagatttgagggtggggagaagaccccaattcttgataggaggagcagcaaagaatatatgaccgtatttaatctaccacagaaagtcagcatctcaaaagacaggaaattcagaagtaaggtgtaaggtggatttccggtggctgatcaagcagtgcaaggatgcgaaccaaggtccaggtcctctcctgtcctctgcatcttccatgtgggtttcatcctcaggctgggagaaagatagccttaacagttccaggcatcacatccagatgcaaaacattcagaaattcaggaaggactgtctcttcttgtagatatctcctaggagtgacgaaacttctctgaatccctagagtggagctcctgccatatctcaccagtcagagctaggtcacatgcccgtttctccccattggcaaggggaactagagtcacttggatcattgcaccccatcgctgcaccgagctgcgaggttggcttcccctgaggcactggctgtgtggatagctaaacaaagtcaggatccgttggaaaggagggtgcgggaatggaaactcagtgggagggtaaccagcagcgtccacctgtatgaacctttattgggagcttttgtttaatcccacgtgagcaaaatcacaccattggctcaggctctcgaccttacaggcagaagataagatctgtagggatagttcaaatcagatggacattgtaatcttccaaataaacgccacacgtatctgagagcgaaaagttctgattttcctgctcagatccccatttagcttcaagagttgtaaaacgtgatttaatctgacagcctctaccatctccagctctgagaatgccccagggcgctggcctgccttccaacattatctgtgattgatgctgagataattgtctccccagtcacatttcggcaacagagtgaaatgatttgcagtgtggaggccaaggttcttttggctcaaattgtggcatgttggagacccgtcatcaacatggctgtagctatgagtgtgaacgtggagctcggtcaccacacagtcaccttcacgttagcaagaaagcaggtttcaatcatggaaccaacaagaggtattttcaagttttgtggttcataaacctcagggtagagcacaatggatgcagatcaaccaagatacggtgcccaaaagaactggaaacacgtccacacaaaactggcacgccaatgttcctagcagcacccttcacaacaaacagctaacagatggaaacaactcaggtacacatccaaggatggatggacagcaaaatgtcacaaattcatacagtagcatcttatcagcagtaaaaaggaatgaattggtgaggcaatgcacaccacacatgaacctcaaaaaattatgcgaaataaaagaagccagtcaccaaaggtcacatactctgtgattccattcatatgaaatgtccagaacaaagacatttatggagacagaaagtagcttactgttttcctagagctgagactgggaacctggggtgaggtagagtagggagagtgattgctaaagggcatggggcttctttccagagtgatgaacataccctaaagtttacctgtggtgagagttgcacgtatccgtgaataaactgaaaatgattgattcatatactttaaaatgttgaattatatggtgtgtgaactacatctcaataaagcttataaaatagcaaggataggccgggcacagtggctcacgcctgtaatcccagcactttgggaggccaaggcaggtggattacaaggtcaggagatagagaccatcctggctaacacggtgaaaccccgtctctactaaaaaaaaatacaaaaaattagccgg

SEQ ID NO: 1888614 - DNA, 4001 bp, Homo sapiens
ccgggcacgatggctcacgcctgtaatcccagcactttgggaggccgaggtggacggatcatgaggtcaggagatcgagaccatcctggctaatatggtgaaaccctgtctctactaaaaatacaaaaaaattagccaggcgtggtggcgggcgcctgtagtcccagctactcaggaggctgaggcaggagaatggcgtgaacccgggaggcagagtttgcagtgagccgagattgcaccactgcaccccaacctgggcgacagagcgagactccgtctcaaaaaaaaaaacaaaacaaaaaggtcaaggctggctgggcgcggtggctcatgcctgtaatcccagcactttgggaggccaaggcgggcagatcacctgaggtcgggagtttgagaccagcctggccaacatggagaaacctcatctctactaaaagtacaaaattagctgagtgtggtagtgcatgcctgtaatcccagctactcgggaggctgaggcaggagaatcgcttgaacctgggaggaggagcctacggtgagccgagattgcaccattgcactccagcctgggcaacaagagtgaaactccatctcaaaaaaaaaaaaaaaaagtcaaggcctttggcgcaacaactgtgctgggaaacagagactcctgcacaggcgcatgtggcctgtgccgtcttggccacaacagcaaaaaccaaagtatccaaatgcccaggtggaaaaccttaccatgttgaaaactttattgtggagtctctaaagagagagaaacttaccaaatattaatatgatggtcaagacatgaatttgtatgtatagaatgattacaattatgtagaaaaatacaccacacactcgaggcctggggttactggacacgggtcatttcttccctgactacatcatggattccggtccagaacttccagattgtctacaaaatgcctatcttcatttttttcacaaaaaaaaatttaaacaaacacaaacaccccacccccctcctccaggtgctcttatgaagatcaaatgaggtattgatgtgacggctctgggtctcagtttcctcgtctgttaaatgcatatgagaattatctaaggttccttcctgcccttctctggggaccacaggccaggaggagaaccttgcatacaacccctcatttttcagaagaaaaaactgagaactcaggggaaacttcctaccggctggcggggccagctgggacagagagatgcccaaggtttgcatgtctgagccccagaggggtttcacccaccctcggggttttcacctgctgagctaaccctggctgtagcaaaagatggggtgggagatgggggtgtccaggagaagatggggtgggggagatggggtggccaggagaagatggggtggccaggagaagatggggtgggagatggggtggccaggagaagatggggtgggagatggggtgtcaagagaagatggggtgggagatggggtggccaggagaagatggggtgggagctggggtggccaggaaaagatggggtggggcagatggggtggccaggagcagctcagactcccccaactccagatggaaggggagtggatggctgggcccatgtgggcctgaccccaccaaacctctcccacacctactgcttgtcacttgacctcaccctgtcacctggctccctgggggcaggggcatctgagatgggttcatggagcaaatagccaggcagagacctggatgtgagtggccactgtcttccaagctgggcacacaacaggtccttgggacaggaagcactgagtccagaggcctggcaagggacaggaggggcaggagaagcaggggtctacaggtggctctggtggcagctcagggggaggcaggcagaaaacatctgatgcacagaacagaacatgcccagggcccaagagtgggaaaacagcacccagaactccaccttctgactcctagtccagtgctcccttccaaagatgctaagctgcaacaagttccaaggaagctgcccagggcgaagtccaggtcaggaggttctgaccctgtgcaggagggcaggtaggaggcggctgactgagtgcacagtgtcgtccaggagtggaaagagatggtcttgtccccagaccccagagcaaggaacaccattgtaagaggagggagcagcttccactgtgacggtgggtgaccagggggctggcacaggatggccaaataagcccagcactggggggccagtgcttcaggggaacaagccagagagagaagggagttcaagggacctcatgtccacctggttcaaggtcacacgcctgccctggcctctacacaaaggagcctcctgtaggtcccagcccttccatgtttatggctaaatgtgctgtgtcttggagcagctggaaccccaggtggaccctgagagagctacctgccagcatgttccttcagctcgagtttggagtccagccctggaggctgcgcacctcctcccaaatgcaggcttgtggctctggaagctgccactggggtcaaaatggcatcttaggttctggcagattgggccaatctcagggttgaccctggggtacagatacctgagaatcagcaaaatccagctcaatcttttctcctttgttatttcttaaaataatcttgtactaaatcccaaagcaagcgaacccatgaattgattattcactgctgccatttgcatcagtttaaaagcaggacggctctgagggcaggtattaaagaaatagaggccaggcccggcgcctcctgcctataatcccagcccttcggggaggactgcctgaggccaggagtttgagactggcctgggcaacataccgagaccctgtctttaaaaaaaaaaaaaggccagccacggtggctcacgcctgtaatcctagcactttgggaggctgaggcgggcggatcacgaggtcaggagatcgagaccatcctggctaatacggtgacaccccgtctctactaaaaatacaaaaaaaattagccgggcgtgatggcgggcgcctatagtcccagctactcaggaggctcaggcaggagaatggtgtgaacccaggaggcggagcttgaagtgagccgaaattgcgtcactgcactccagcctaggcgacagagcgagactctgtctcaaaaaaaaaaaaaaaaaaaaaattagctgggcaaggtggagcacctgtagtcccacctactcaggaggctgaagcagaaagattgcttgagcccaggctgcaattagctggggacccatcgttgcactccagcctgcgtgatacagcaagaccctgtctcaaaaaaaaccaaaacacaaaacaaggccgggcatggtggctcatgcctgtaatcccagcactttgggaggccgagcagggcggatcacgaggtcaggagatcgagaccatcctggccaacatggtgaaatcccgtctctactaaaaatacaaaaattagctggctgtggtggtgcgtgcctgtaatcccagctattcgggaggctgaggcaggagaatcacttgaaccaaggagtcggaggttacagtgaggcgagatcgcgccactgtactccagcctggcgacagagcaagactcgtctcaaaaaaaaaaaaaaaaaaaaaaaaaaaaaatcaaacaaacacaaaaaaccacccaactacaaattaggcatcctcccacttggtcttttttcagattcattttggcttaatggtgccttccccattttaaaagcggtcttttactcatagtgccccagccttttgaaggcacaggaacaggagctgggctaccaccttcaagggctgtcaaagatggtgaggtctgaagccaaaggcaagcacaccaaactccatgggggctgaatgctgtggtctgtagtgtctgtgcttctgcagagttagcctggtcccagaaagagggcatgtgcatgctggagtgaagagctga

SEQ ID NO: 1888615 - DNA, 4001 bp, Homo sapiens
ggaatggagtaggctggcactgaaaggggcttcttgaatatgacccccagttcccacgcagtcattttgaagagtgctgctgtctgttccttcccaccaggggcagagtttgctggtggagtgtgaccactagctggggcattccctggttacacggctcccatccatggcaagtgggccagtgactacggcagggccctgctggagccaaccttaaagccagtggcgggggaggtggggcgtcaggttgctgacttctgacccagagaaggcctgctaattgagggtctggaggtgcttgttgctgtctctaagacatgcttggcgcattgtgggcaaggctgaagaagccatgcccagccccagaacacgcagaaacccatgatttcccttcactcaaaacaactatctgggccaggtgcagtggctgaaatcccagcactttgggaggccaaggcgcgcggatcacgaggtcaggagatcgagaccatgctggctaacatggtgaaaccccgtctctactaaaaatacaaaaaattagccaggtgtggtggtgggcgcctgtagtccccagctactcgggaggctgaggcaggagaatggcgtgaacccaggaggtggagcttgcactctgcaagcgccactgcactccagcctgagagacagagcgagactccggctcaaaaaaaaaaaaaaaagaactatctgcccttcctaagcttagctcctcgccacccctgcccacacatggccctgaagcccagctgtccctgaaggccatgcctgtggtggtggagggccaagcacttccctggaggaagcccgcacctcctgcactgggtggtgacccctgggctagggcctgctgccccctgcccagtgcaggagggtggagggtcactccttaggtggtcccagtggggctggtgggcaggggctgcacctgggccactggggtgacacttgtctaagtgctccttgtagagaaggcctctgtgtacagcagcactgacgaagatgcggacaaagcgggggaaggacacccctgcctttgtgaaggcctagccgaggcgtctctgctgtggctcgcccagaagccctgctactccttggcattgagtggataggactggctgcaggaaggctgtgacggtgccagctgtggtcaaggctggagcagaaacagcggctgataaggagctggtttccctgccagccagggcagagctggttgcaggctggtgtgaagtggggagccaggcaggtacagggaggagcgggctggacaccaagctggcagaaaaggccagtcaggtgaccagagctggaagatccaccagaagcatttaagggggccagccaggcaggagaacaaagggaagacgaaatggatgctcaggtccacgcctgaccttgctggatgttttctgccagggtggaaaccaagccctggggagggcctgcaggagaaccaatggcctgagaaggtgcatgatgtcatttcagctgtgctcagctgaaggcagtttcaaagatgaaaatctgataagaaaaaagatccttcctgtgctccctcctgctcatgttagaataaaatcaactgcctctctgtagcccagtgggccccaccaccctctcagcatcctgcccccttccctgtgtgaagagcatctttcccagctgctgtgcgggagccagggcacctctctcccgccctgcctctgagactttgcacatgctgttcctagtgcctgaaatggccttcctatcacccagcacctggtccagctctgagtaccctccgcagagttgcatgctccctcctctgtgtccacagagcctggtgccccctccaggacagcacttagcccttcacagcggtggtcctggtgcatgtcactctcccatgagactgcaggccctagaggacaagttccttgtgtgcttttccctgtcccccggagcctgctccccagaggaaggacagcgcaacagcatacctcagccaggctggtgaccagggcaggcgccagggttctccagtatggccagcagtgttgcctgctggggcctctgtggatgggcgtgtctggctgcaagtcccatcacactcattagcttgcctttgcagggtagcctcggcagcacccctaactccatggcaacagctgctggtcccagggtacctgggcttaaaagtacagactctgcccagactaaagaaagatacagctaacagccagggcagccctaaggacctagcaggctacagcctggacctggatttgtgggtgtggagaggttatccctgggctctctggaggcccattgacaaagttccaaaagacaccagaatgacctctaaggagctgagtggggtcagtgggaagatcccataatctagaactttccttagctataagaatcctggctgcccacagctcagccctgggggtcacagtgggcaaaaggctgaagaaaacatcaagcagactgttcctcttacaagcctgtacggggccagttctcccgcaggtcccggcaaggggtcagaccctggtggacacactcaggccacgtgcctatgctgctgaaagtaccccctgaaaatgcacggtgcacagggaagggcagagccccagctctggggcaaggctgacagaacctgcttaatcttctctggaaattaacggtggctatggaacaacagaaaaagacttgacttgaaagtccctgaggatttatcaggaaacttccctgctcctggagggcttactatgcggtacacagtgcagggaggggggcggggggtggagacactgtgttttggaaccagacagccctaggctcctaacctagtgctgccaaatattagctccttgacctggggcaaatgagcctgcccctctctgtgcctcagtttccccctctgatcagactatgtaagattctggcatacagtgggtcattaggctccccctcccccacccagcatggcctgtggggagcgcagtctgtcaactgaccacagggctcccaggccatgctggactgacttaggggatactaagggcgtgcttactaagcagggtccgtgtgcccttcctcatggtgtgccaccataaaaccgggttccagaaccccgagagccacccgaactgcaggggaccagggcagggccaggccactcactctttccgttggtcagccagtgagctgccccgtgtcagcgcaaacatgtcaaactcatcttccagtcgaccagaggcctccagagactgcaggccagctctcacactgctggagcccaggtctgcagggacagaaaggccacgtgaaagacccatccacaagcttgtgtgtgagctgctgctgagctacctgctgccagacccagggcttggtgctggggaagtggcacgtgtgggtgggggaatgcgcgaggcaggccacctgctgctggctgtggggccttgggcaagcggcttcctcttcccagctttagtttactcacccctcttggggctgctgtgagcgttagagaacagtcaaaacgctatccattgattctgctggggaagtggctgggcaggaggacagtaatcagatgggtagtcgattttttcaaaaagtatagcattagtgatgcaaaatggggtgctaatgatttcctagggcttggcatgaagcagacagtaaattatattaaaacctatcacagtgataacagtgacaatggccaactactcagccagagtgcaacctgggcctggcatggtctaagcgcttctcatacacgagctccctactcctgttaaagaggaggaaagagaggctcaggaggtttaaggaacttgcccaagctcacgcagatgattgaagccatggagaattcagtgtagagggccaatcctaggatggtaggatttctgagatccaaggcggctcaggacttgtggggctgccaggggcagtgaccccgagtgccccaccttgcagca

SEQ ID NO: 1888616 - DNA, 4001 bp, Homo sapiens
tgggtttagacatgattcaagtggttttgttattgtcttgatccatcatggtcacatagtggctttgtttgatgttgatgttctgtgaagtttttatgttcaataagagaacacaccaaggtctatttgtgagtgccagaccatctcctggatgtcaggggctgtttttctcttagcgcttggtttcaaatccaggtttgtgtgactggaaacatcccttgtattacttcttgatcacaggaacttgcaaaggtggctggcagactaggactttcatctatgagcttatttcatctactattttttatttttttttctgagatggagtttcactcttgtcgcccaggctggagtgcaatggcacgatcttggctcactataacctctgtctcctgggttcaggcaattctccagcctcagcctcccaagtagccgggattacaggtgcccgccaccacgcctggctaatttttgtatttttagtagagatgagtttcaccatgttggccaggctggtctcgaactcctaacctcaggtgatctgcctgcctcgacctcccaaagtgctggtattataggcgtgagccaccgcgccggcctttatctactatgttcacctcctactcaggtccgatccctaaccgttcctgggataactgtaggtacttaataaatgcttgttgaatgaatgaagatggctgtcaagaactccaatgactgcttgagtgcaaatcacaagctccatcacctatcagtatgtgatttgatacaatatgtattaacagctaatccacaatccatattcaaatttcattacttgtcccaatattgtccattacaactattccaccaccaccactaccccagtccagggtcctatttagaatcacacaccacattttgttgtcatgcttctttagtctcctttaaactggaacagttcctcagcttttctctgtttttcatgacaatgagttattttgtagacagtgtccttcatttggggttctctagcacttcctcatgagatgtgtacggtgcacttttgacagaaataccacagatgtgttctcagtgcattttattaggaggcccttgatctgacccattaactagtggtgttaactttgatcactttgatctgtttgttctgctaggttaaacctctgtaacatcaccattttccctttgtaatcaatagctaatttatgggagacacttttgctgttgtaaacatcccgtttctctagttttaccacacattattgatttcctaattccaccatgtttattagctagcattctactaaaaggaagactttcccttcacccattaatatgctcacttctttatgtttgtaaagactcatggattactattttattcaattagttatactctattactatcactccatattttgattctgaaattgccctgacttggccagtaagatctccttaaagacagctcctgtgttctttgacacattcccatgattcttattaccatcatccttatattctggtgtaacaagatgttccaagtttatctggtactttccggaatgagttagttctttctctctctcttttttttttttttttttgacggagtctcactctgacgcccaggctagagtgcagtggtgcgatctcagctcactgcaacctccgcctcccgggttcaagcgattatcctgcctcagcctcccgagtagctgggattacaggtgtgcgccaccacgaccggctactttttgtattttgagtacagaggggtttcaccattttggccaggctggtctcgaactcctgacctcaagtgatccatccgccgcggcctcccaaactgctggaattacaggtgggagccaccgcgcccggccggaatcagtttttttcttttaggagccccgaacccaaagctctttgaaaagctgccgaagctccaaggttcctccgcttcctgcccgcaggcggaaccttagagcttcagccatggaaattaacctcttccggttggggccggaagtccctccgagaggggcggctccgcgtcatgtgactggagtccgcgtaggaggggtcggaggtcttacccaacagattgacgcggcgttagtattggccgtgtacccgaaaaactgattgactgggctggcgttaactgtgcggaggcaggtatgtgaggggctggggttggggcgggggcgccaaagtttagggacgggggcgggagacccgggtccgccttcccaggacacacgggcttgaacatctgagcccaggggcccagagacagcaagaccggtcgtgtctgtccccgaaaagaggacgagctggcgttgtggttctgcgtcccatgaatacagattggggaaactgaggccttgcgaaagagaagggctcccacaagctctcctttcgaggcatgggcactgattcccattctatcccccgtgcgagaccgcctctatcatctgggagtgcatttcacgagtttgccctgagtggagaagcagaggccggggagcgcggtgaacagagttgggctgaaagtaagagacctggattcgagacttcgccaccgacagacaattgtgcgttctgggccaaatctcttccctgtgctgggcctcagttttctcgtctctaaaacggggcagtgtttttcaaaatatggttcttacaccatctgctttgtaattctctgagatgccggctttacagcgcgggactcaattcagacttctggtttagaatctgaacttatgcgtaggggggtcctgtatatactaatgtttgaagctcattgattttaagtgctttcctgctgtgagcactagatatccattcttcgctttgaggcagctggtgccagttcaggaactttgaaagaactggaatggttagctcagtaaagagagcactggaagggaattaactttttaaaaattgaaaatactgttacggcaaagagggcttccacttcatctttaggctaaaagaggcagaactaggactaacaggtgaattctacaggaaggcaagatttttgcttaatagaagaacttaaatggaagaatcgtcagaggtgaccaccgatggagtgaatggattgcctccgtgcctcctttcgagggaggtatataggtattagatgaaggtcctttccaacttgaaagtctgtgattccaaggagttgttctgcatctttctggtgctgactctgctctcaaggcaaatgtgacttttttcttctcttttgacacttccatcactttagcctacatctcctgtaaataaggccaatgcatctgaccttacataatctcttcctggttgtcctgtgcaccatccttcttttcaaggactttggaatgacccaatatctgatagaggcaccttaaatgtttattgaatgaataagtaaactgggtcccaccccatgggttagtagcttttttctaagaacaagttggaaatgcctctgaagattttatgtttgaccaggagaagccagtgaactctgaatcacaaaattgaggactctcagttgaaagcaccccttgaggttgttcagaccagccttctcttccctggaacataatccctgcttgaatcctctcttcagcaatatgtgtatagatgtgagagaatttttgcagtctgttggctagctttccatgcatcatataaaaacagtcctcttatagacttgacttgccagttcacacacatgacaagttccagcttttttttttttttttttgagtatttagtagagatggggtttcaccatgttggccaggctggtctcgaactcctgacctcaagtgatccgcctgcctcagcctcccaaagtgctgggatttcaggtgtaagccactgtgcctggcctctagcatacctttggttttctaatcaaacattattatgtccttattttgtgcattacaaagctctgcctaaatcactttttcaacacctgctagaat

SEQ ID NO: 1888617 - DNA, 4001 bp, Homo sapiens
gctgattttacattgtacagatggggaaactgaggcccagagagggaagaaggttgccaaggcaacacagggcctccacagccattgggtcttgaccccagctcttggggtccagaggcccagctccagctgcctgtttggccgtgccaggttccaggtttctacatcggtctctcccatcaaaccctcagctcctcaaagccaaggtctggtctctctcacctcccagtcccagctcctggcccagtgccctgcacagaggacacattcacagaagttcccagcagctggagaggctcagggcagacgccaggaagggcattccagcagctggggacagatggcaggaatgggcagtcaacttctctgaaggcttctcagaagagagcagaggccaggctgccagaggcagtgctggacactggccccagcttcctggtttccagaaaggatggagttgggagcgaaggaagattccaaccccgggagctgccttgctggcctgggtccgagaccctctgcttgcaccagaaacagggaggggcaagagcccctgttgggacaggccatggaatgccatcctcctcccccagagctcagaccctctgcctccaggaagccactcctgcccgctccagcctccctggtcttttcctccttggaactctgacagcaactcggctcagggaaggtgagccgaggctgagcatggcctcaggggctcccaataggaactggagactggcctgtcctccaggctgttcagtaaggaggcagagcacatctgaaggtgtctcctcctctgagggaaagtcatagggaaaagaattccaaccaaggtgcccaaggtgtgtcctggaagaggacctctcagtggggctgcagcagtgcctagaccgccagcaggcagagggaggacagcgctccaggggaaggtggagcaggcccaaaggcccaggcaaggagaggaggcaggagcaggccaacctgcagctgcacttgcagcctaggggcaatagagcagagtggtcagaggctgggctgggaccaaccacaggtcccagtccacaccctgtcatcattcgctgggcgagctcaggcctgtcactgaatcgctttgtgcctcagtttcctccctaaaatgagaataatagcatctactcagagggttgttgggaggatgaagtccgatgacaggagccctcacagctgagccggcacctggggaggccctagagtgtcgccttcgctgttaaggggcatggcagaggaggcccacccatgacagaggagcttgtcatcccaagcaggaatgccacctggtctgacattaggattcaaaaggcaaatgataaactcctgactgtgaggccgtggtggctgctcggttaatacttgtgcacttgacctgaggtgagcatcctccacacctcccagtgctggcctaatagctaaatgatttcctctgactcacatttattgagcagtcactatgctaggtaggggagatgtgtgtgtgtattcttatttaattctctcatcacttggggatatcaagggtgcataagattatcaacatcgtacatatgcaaaagccgagtcctgagaggttaatagcgtgatctgcctaaggccccttgggtactagtggcaggatttcttgacttcaagtcactttccactacatccgagactgaggatgacacagccttatccaaaggtggaggtggcctagaaaatgctcaggggagctcccacagccaccccagcgcactcagactcggctgaagacccacagggtagcttctgtctgtcactatgctgccctcgaccactaacctgtgcccgtcggccctccaccttcccagtgcataggccctcccctgccacaccccaaagctctccggataccccagtataacctgcctggctggtgggtccagtacccaagacccctcctccatccctggtgattttggctctggaagggggtcattcacagcctcagggatccagagactctgtgaagacctcccagggaactttatgcttgtacctcagccccagaaattcagaatcaaccagtctggggtgggatctaggctccagtatgtttttttgttgttgttgttgtttgtttttatgagacagagtcttactctgtcacccaggctgcagtgcagtggtgcgatctcggctcactgcaacctctgcctcttgagttcaagtgattctcctgcctcaggctcccacgtagctgggattacaggtgcgtgccaccatgcccagttaatttttgtatttttagtagacatggggtttcaccatgttggccaggctggtctcgaactcctgccctcaggtgatctgcccgcctcggcctcccaaagtgctgggcttacaggaatgagtcaccacgcctggctcagtatgtttttctttttttctttttttttttttttttgagacagagtttcgctctttttgcccaggctggagtgcaatggtgcaatctcagctcactgcaacctccacctcccgggttcaagtgattctcctgcctcagcctcccaagtagctgggattacaggcgcctgccaccatgcccagctaatttttttttttttttttttttagtagagacaaggtttcaccatgttggccaggatggtctcaatctctcgacctcatgatctgcccaccttggcctcccaaagtgctgggattacaggtgtgagccaccacacccaaccaaggcccagtatgtttttcttaactccacaagtgattgtaaattcaacaagaattagagccagtcctaggcaactgattagaaatgcagaacctcaggccccaccccaacctgaagaatcccagtgcgccttcccatttgagaagcactgccctacgccaaaccccgtatccgcaagccaggccctgtgaaaggcccccgcagggaaactggaggtaggagggcacacagtccagatagaattaaagagtggaggccaggaccccccaggtcgcatccacacagcactcagaggtgctaaacgctttccctgtgttccctcatcccatctcagccctgtcctctgaaagtcaggaagacagtctcatgcctgtgtggggaaactgaggctggggcagagcctcaacttgaccagaccatccctcactcctgcatggcccctggttctgcagccagcagatttcctgaccttcatctcagtgtatccttcagggcaggcagggagggagggtgaccatcgccccacgtgacaggtgagggaccagggacccagtgggggaacacaggcggagccttccataaagccggaccagctccctcaggaagaggacttgggagctggggggtgaagggtcactgctgaccggaggcagctctgccaggcagtgtcatcagtgggcttcacgtttgactgacaggtattcctttcctctcctcctctctggggcccatcttctgagtaaatccgggacctgccttaacaaaagccaggctgagtcccaggaaaaccctgttgctccggaaaggcctccttgggccatggaaggaagcctggatttccaccattacactcagaccgcagacccctctctgctgcagaataaacaccctgagagaaggcaggtcatagagcctaccagacaccacaccttgccatggacggtgacaaaccctcacttcaggacagagaggtgatggggggtggggtaaggaggtcacaagcatccctggagaagggtcaagaatgagggggtaaagggacccctgccacccccagcagggaaaggaggagaaggtgacactggccctcctgttgtcctgctggggcagaggcccaggtgtcttcagccaggatccctcccctctccaagctccctgctcttcaggaatgactatgggtccttcacccttgcctgctggagagcactgggttcccagggcctgggatgggatggaggggatcccagtt

SEQ ID NO: 1888618 - DNA, 4001 bp, Homo sapiens
ctcccaattcatacaagtgtgagcggggtgactgctatgtgcctaaaaaattataggtgctgaagcttccagcagacataagccaactaagctttttgcccacaagaagcaagtacagaaagacaatgtattaatctccagcggccaccgtaacacgttaccacagaccggaagacctgacaccagaggtcctgtgtccggcgacgggcagggccttgctctcgctgaaggctgtgggcaggatctttcttcctctcacagctcctggtggctgcaggcctttcttggcatgtggctgcaccactccaatctctgtctccgtcatcacgcctccttctaggaggctgattttccaaattttcctcttcgtgtaacgacaccagtccttggatttaggaaccaccctaatccagaatgaatgcatcttcacttcatcacatctgcaaatgctctatttccaaagaaggtcccattcacaggcactgggggtcaggacttggacgtatcttttgggggatggaatttaacccacactcgacggtcattatgggtaaaagccgtcctgctacgcacccagccctgcatgcggaaaatccctttagcctccagagcaaacccatgagcaacgcagcactgcagccccacttcacagacgggaggttccaggactcacccaacgctggggcccacagtgggcaggtgggtcggggtcctaacccccagtccccggggaccccagagctcagagcggccctgaagacatcctcaggctgctgtgtggcttcgggagggtgcgatttggaggtgaggatgcccccatccccaccatgcatctctcctccccctccccaagcatggccccttactgctcctagagataaccgatctctgtcattttctggccataaattccttgtttttcttttcagtttcactgccacgtctacatccctgaaaagcaaagcacagtttagtctctgtgaactttatacaaatggaagcatatttcattacccttttgctgcctgccttcctccactcagcatcacaggtttggggattcatcctgcttttcgtagatctggggttccttccttcctgtcactgaacttacgacagtccattgattcgttttgctgctgaagtggctttggcttgctcccattgggggctgaaatgagacctgctgctgaggccgctgtgctgtgggtcccgcaggatgggggtgagatgctggggtgcaccccaggtcgggggggtcccatccgcaccatgagcacagccctctcctccctagaaaaggtcagactggttcccaatggggctgcatcgggcttaactcaattttcccctctgcactttatagaacgcttacacattcgaacatgtattgtttaaataattagattattttggaatggtgtaagccagtgggagagagacagcagcgtggtctcgtgttggaaagcttgggcctggcatccaggcagacagccaccgtcccgtccctgcaggactctgggcctggggtcctcaccggggattcaatgaaccgcttccattacagggctcagccgggcctggtgtgagttcagtactgggtgcaggcttgctatgattgctgttgttatcaaaacaaaaccactttcatttgggaaaaatattaaagccacgacaaagggcggatggacagaggcctgtacacagggctccacgttctgcatagggtcccaggcatgcaccttttccccagcacagtggcgcacgtcggagccaccgccttgggctccagaactgtgtgtcttgctctgtcccaacccccagtgtgtgtgaattctgcctgcacggggccagcctcttaagagagaactgtgccctctcatctcagtgacccagagccagcctaggacagaagccacccagtgaattaagctgctcaagccacatcgtcccagccaggtccacgtgtcagaaaccaactgtgaagactgggacccagtttcagctcaggactcagtgaagagcccgtgctcctgggtccccgccatctccatggcagcaacgttggcgactgtggcccctctttcacaaacccactgttggggctgaactgcacccctaaagtccacgtgtggaagccctaacctccaatgcctcagaaagaggctgtattcagagagaaggcctttatagaagtgacgaggttaaaaggaagttatcgggcaggccctaatccaacaggacccgggaagaagagtcattatagaagagaagagaacgcagacaggcacagagggacgcccaagagaggactcagggagaagacgccaccttaaacccgaggagaggcctcaggaggaaccggccctggccacacacctcgatctggaacttccagcctgcagagcctgcgagaaccaatgtctgttgtgtttgccgccggtgtgggttgtgatgctttgtttcaggagtctgggccggcccgcaaacctgcactgcgtctccttcaagctcagtctaactctcagtaaactcattctgctttggctcaaaaaggttgatttttttcctattttcttctttcttttgctcctcaaatcccagtgggtccctgcagctactcggtcactcaggccaatgtggggctttgccaccagcccctgtcccctcgggtgaaggtgtgagctgcaccggctacgtgaaagctctggggtgtaaagacccagtccccgcacagtccgggcagcctggctgcagaaccgccggtgctccgcgccgctgcagggctccgtgagaccagggcacctctcgaaacctgtttctccttctcaaacacagggatctgagggaggcctgcttggaagggtgtcatagggtttaagtgaaatgagcaacaagtccagccacgctgtgcgtgccagcagggccaggcaggcaggacgggatctcctctgttgccttagaggcgagaagggaaggcggtgggtaccgtggccccggctgtgcgtcttgcagggctcgacagcaagggctgaatggggccagcccggactcgcgggatcagtgggaactatggagccaggctctctgctgacgtttggttaaatttcaagtaagttgctcagagttttgcaaagtccaaggtcacacgaaaataaaggcaaatggtccattttatgattttacatcagttactcacacgtgggaagcaggcacctcgccgcggaaatggatggattaatctcccgtgtgtaggttcctggctcagggagcggctccctttatctgtctttcatgggctttgcgtccctggtgggctggtgtccctggcaatgtctcagggaccaggcttccaggacattcaacaagcacgtgttagccccacgccctgccgccatgccggtcccagctctgcctgcctccccacttctgccctcgcctccccaaaggccgacgaccccacagcagccaggggagctgcatcttctgggtcacagcatgtccttctctgctcagaccgtgcagtggccctgctcctggaagaacagcagagtccctcagggcctgaaccctccagagtctccactcccatcgctctctgaccctacctcctgccactcctccctagggccctgcatccctccacttccctctcctcctgtgcctggagcatgaagaaggcccactgccgaggcctctgcagctgcggccacctccttccccagctgcacgggctgcggccacctccttccccagctgcactcagggctcttcctcgcctccttcaggtctttgcttaaacacccataacctgtgtggccttccctggcctcccactggaaacagaatccttgatccagcacccccaaacccagcactccaccctgacacccctcctggcccgtttcacttttccccatggtgcctcttgcgtctaacatagtttacacggtaacttcaggaaagggcttgtttgggtctgtgtaatgagtgctacatcc

SEQ ID NO: 1888619 - DNA, 4001 bp, Homo sapiens
agttcagggcatctgaaatgccctccccacagccctctccacactccacaaggctgacagggatctttccagaaaagtttttgttgttttttgttgttttgaaagctggaatacggccggacgcagtggctcacgcctgtaatcccagcactttgggaggccgaggcgggcggatcacgaagtcaggatattgagaccatcctggccaatgtggtgaaaccccatctctactaaactacaaaaaactagccgggtgtggcagcgcgcgcctgtagtcccagctactcaggaggctaaggcagggtaatcgcttgaacccaagaggtggaggttgcagtgagccgtgatcgtgccactgcactccagcctggtgacagagcaagactccatctaaaatatatatatatattttttcttttgccatgttgcccaggctggtctcgaactctcctggcctcaagcgctcctcctgccgtagcctcccaaagtgcaagggttacaggcatgagcccctgagcccagctccagaagacaggtctaacctcatcctcacctgcccaaagtcctgtgtgccctgactcccattgttcctggaacattctctgccctttcacacctcaggcttctgctagtgctggttccttccaatccgtgtccagggtccagcggccctacctagccaggcatgggggctgtgcccctcgtgctcctagtccggctgctaacagcagtgtccagtttctgggagagctgcaggtgagcgagcaccaggtggggaggccgtgagggtgggtgtcccaagcccagtggaggatcacagagccactcagtgtcgctgaccaccagggagggatggggcagtgtgtcactgatgtgaggctccttaagcatcagtctgtgaagggccaccagtgccccacgccccccagggaagcgaggacagccccacccgctgtctagcctcactcggggcactcagggtcctcgccagtggggctgggttgggggaatgcacaagatggggcctcaggaggaagatctgcaggagacacatgctttctttgcacgagcagtggcttgcttgggggagagcaggctgggcccagagcggcccttccccaccccatctccttggtcctgtgccgtttctgccctggtgtctggtctggggtgtgcaccccacttctgccacccattttgcacctgcacaggcagctggctccccagttcccaacaggccacccagccaggcccctggcccagctccccacccatctccacccaccacagggcctcctcagtcccccacactcccagacctcaggtggtgcctccagagcgagctgtgtccacacagggctctactggaatgcctggctctttggagaggctgaggctgactgaatgggctctgggcagcagctggcacggatgccatcctggttggggctcacctccaagagaagcgtgtccggcaggtaccggtccttccagtggtcgaggaagaccatgtccagtgtgtccacatcatacttcttcttcagctgggggatgatgtcctgggacgctccaaccacaagggtgacctggaacagcgcctgtcagtgcccacgtcctcacagacaggaggccatccctacacacctatacaacagcgcctgtcagtgcccacgcccacacagacaggaggccatctttacacacccatacaagcattcatcagttttctttagggttctgggatgacaaggccccactctgtccctgcccctcctggtgccaccttggcagtttacccagagctgtgagaccctcactgagctgctgggggggtctttcctcagccccaggctgggaagcactgaggggcctggtgatagtgggttttcagtgaacgtggtgtgaacacctggtggggaggacaaagtgcgcatgccctccctgcccacagccggccctttttccaggtctgacaacgggtcaggcatgcacaccttgtccttcacgccagcgaaatccaccatccgctgggtgatggcggcacagtcggggttgatctcgatggtgatgagcctcgcccctggtgacagcaggcgggccatgcgcacagctgagtagccacagtaggcccccagctccagcagcacggagggctggtgctcctgaatcacggcgtccacgatcttgcctgtgcagggttggggacggaggagaggtgagcacaggtggagagaggggaacttggatccccaggcacggccccccacctctcccaaagagcaggagcccctcccaaatgcctggccgctggccctcctctgcccaccctccctacccgctggaggggtatttcacctccctggtgtccccagcccccaggacctggtccccactgtgagcgcgcttggagctcccatggtcccttagcctctatgctcacgctggtccctatcttttccacccttcctggctggccccagtgtgtcctaacacagagctgccctctctgaatcaccgaaccgcccaccttggggccctggggcggcactagttccctgagtcactccgtgagcccggtaacacatcctgtgccccaggctgaagttcaagcgggaggcgggcccaggagaacctgtctgactggtccccaggcaggtcccatggtggccagaacagagttcaaggggaactgcaccaccgtcagaccctgtgagtgtgggggcctgttgtcctggggcagcaggcagcagggcctgcaggggtcatcagggaccctggcaccctgggactccagaggagccccccagccctatctgggcatatcccagggttcccagccccctggaaatggggtgataacagcttctcctgtaagggctttgatgcctggtcctgggtccctgtcccagagctgagcacctgctggcccggaccccacctttcttgtcgcccacgttcatggcccactccttctgctcgcagtaggtgtcaatggcctccagcacgctctgtgcgttcccgggctccgcatgctgcagcacgtggttcaggatgcgctgctccttggtgtcacccatgagcaggttgtggatgggctgcaggatgaactcgttccagccgataaggcacaggccccagccccagtgcctcagaagcagcagcagcaccaccagcagcaccaggcccagcaacacagctgccaacagcagaggcggggcctccggcatctgcagggcgggaggggaggggcgccagtgctctgtgctcctcctgcagcacccacacgcccctttgcttggagtgccaccatcgcccccttgtgtttgcagaggggcaaggttcagaaatgccagccttgtgcctcagttgcctgacgtgtcagcgccagggagccagccttctcgtgccctctggtgccctcgggtagacagagcaggtgtgtgcctctggcagtcctgtgtggagcctgcagggtcacactccctggccctgggtgcttccccaggcagcccagggatcctctaaaaccacacaaaatacagaagcagacacggactcaggctgttgtctcccagctggcttagaggacacccaggggtagggaagccccatggcccggagttgggggtagtcacgggtggccaaaggagaggctgtatggtgcagccccttggcctcatgtggtgagcccgtgctggtcacccatgctctggacgccccagggattcatgtggccttttcattgagtgtccaagtaaggacactggcagtccccaggccaggcacaccaggacagacccactcaccactccccttgggaacagcaacgtggcatgtcccagatgagaaaggccagccctgccgcccacaacagtgtacctcgtggggcacagtgatggcaagtgaccccacttgaaacctgtttgaaatcctcctggtgtgaccctccaggcaggtagcctgggaaccagacagaagcctggtgaggggacccagcaggc

SEQ ID NO: 1888620 - DNA, 4001 bp, Homo sapiens
ctcccaggaagacacaacaggtgtgcagacacaggttcggctagggtggagcccaccaacactcagccagaacatgcaccgtggaaagaatcctgctgctgtggtctgcttctgactgaaatcaactgctttatctgctatctatcataacaaagataaataaaaaatgagatgtagtcatgaagcgggagtgcctaccctgggtcaggccctctgtcaagcaatgcaaagacagagaaaaataagccgaggtccctgcgcctccagaaagaaacgcacgctggtcaggggaaacagacaaagggcaaataaatagaaacacagtctcggaaacgcacaggggacagagactgacttcctttctacctgtaatgtcaagcttttcactttttctgcaattgttacaagtaaaatactatcttttatgagtaacttttgttggttggctcacttaaaccataaagtgaagtaaaaacatatgactaaataggaagtttttaaaaatcagaaaacctgggagtcagaaggctcttaaaggcgaatatggtccattcacctgcttcagttaagaccacaactacttcatcccagtcagatgtgttttttttaaaagccagattatactttaatctatttaagtatagtttcagcccaactgcactgaaatcaaccttttctgttttagccaacattttaaaaaatctaacacaatggtctaattttttaaaattttaattaaaggcccatttagaaaagtaaccaacttttgatattccctgaggtggaacttaaaacagattttaatgtaactgctaacaaggactaagcaaaaactgggaagaagtgtatgataaaaaaatagataaataaagagcaaaggcttgcataaaatgttccagtcactggattataatgcttcgttacatttgatttttaccttttcgagattatacctatgatactgtattacaatttaaccagttatcacctagtcttccataaaggttggtgagaaatgaaaattaagtaaacacagtattacataagtgcttagaaaagtttaactgtgaaaacaatgaacagatttaaaaatattcatttgttcatccctaaaagtttacagagcactcactgtgggcccggaactgtgccaggggccctggagagaatgaggagcaaacagacatggagcttacatgctaggcttgtagtgttttagatggtaatacagtctctgctcaaaatcaccaatataaaaacattaaagtcccagctacttgggaggctgaggctggggaatcgcctgaacctgggaggtggaggttgcagtgagccgaaatcacgccactgcattccaacctggcgacagagcaagactccgtctcaaaaaaataaaataaaataaaatactgaggtcacccttgaaaacataagccaacaatgaaaattcaacttctttcccaaaaggaaaacaacaataatgaaacagaataagctacctgaaagaaagcttcctctttcattactctttatcaaattactgtctctcacatatgtccttttatttccaggcttatcaccaccctccaaccaggcctccactgctgtagcaaccttttaactggctcaggaatccactccgcacactggggctcttatcagtgaggatgggctggttcgtgctgcagtaacaaacaatccacaaaaatctaagaggcttaaaatgaaagtttctttctttctcatgccacttaacagctgtgtggccttgggtacactactgaaccattctggccctcagtctcctcatctgcaacatgggagaggtatcatcattaaatgaggtaagagacgaatactcagaactgtgcctaggacacaggacacactcaataagcaactactattgctgtaatcgttgttattcttgacaccacaaatcttgatcagaagccttcctagcttctgatcaaggcttctgatcaagatttggggtatcagaaataatgggatatgactacaccctatcatctagccatctgtctcccacagtagatcatgagctacttgagaacaaggactgcctctgactccactgttgaactgcagaggttcacagaaagtggcacatggtaagcactcagaaagtgcttgctgcactaaagggaacgatgttgaataataatcactggtacgtgaataaaccccacatgtgctggacatacacagagtcccatattaatgagggcacactctcagatgcatctggcccgcaggaaacctgactaaaagcacatgatgaagatagggaatgtcatctgtaggtgggaaagatggctttacaggcccagaaccaagccacagttgagctaggccaccagtacatgggctactgctcccagggaagtctaagcaaacgaaggaggatgttccacgttgtggaattagcacaaatctatctccacgtggggaaagaatgtaattcaagattccccctgttcctccttcctttcttagggccatcattcccctgccccatgctctcctggcacactggcacacaacagccagcatggaaaaaactttctgaggggatagaggtgctctctgtaccttgactggggtgataattacacaggtgcagacatctgtcaaaacttatcagccattcattaaaaatctgtgtttagctgtatgtaaattagaaagagagagaagcaagcgatggacagtgctgactgttatatggtcccttagctcatgccggcagctgaggtgtgaccccatcccaccccatcccctacaaaactagagctttatgaagggcagggtggctgggagggaggagctgatgcagcttggtaaactggcctctggaggacattatgaaaccttgctcatcctcgtgcagcctcagctccctcaggaggcctttcctcctgcttcatggcacaagaagagtacggaaccctcaccctgatcagactgctctagaatcttttttgtttgtttgtttgacacggagtcttgctctgcccaggctggagtgcagtgatgctatctcggctcactgcaacctctgcctcccgagttcaggtgattctcccgcctcagcctcccgagtagctgggattacaggcatgcgccaccacgcccggctactttttgtatttttagtagagacagggtttcaccatgttagccaggctggtcttgaactcctgacctcaggtgatccgcccacctcagcctcccaaagtgttgggattacaggtgtgaaccaccatgcccggactctagaatcttttactatttatcattgtccctctaagcttcaagttacttgagggtgaggaccttttcttccccttccttctctccagcacctcgcataatgcttggcacacagtgtgctcttaatcaatatttgtttctctggcagtaagtttctaaagttatctttaaagatatgagatatactgcctttaaataagaatggtacttctaagtaagaataatgtctaaattacattaaatcttgttaactctaaagatttaaatctcttcttttttggagaggtatgactcctactgtcatgatttatgactccataaaagccatgtatttactgggcagaataaacggtaagcttggtatgcataacacagcactagaattcttgctataaagattactgatgcctcaggctgttataaacgagatgtcacatgaagctatgcatcaagagcttgccctgaagacaaaaacatcgcatactgctctatcaagtccacgttcagttacagctcctggcgctccgcagtggctatgtgtatgcacatgtgcgtgtgcaaacacatggccagtgtgtttaaatgaacacctggcaacccaaaaacaacatcttaaagatagctgtcagagcatgaaacattgcactaaccaggaacttccatggttgtggattagcagaataacacatcaaagcaaccttgaatta

SEQ ID NO: 1888621 - DNA, 4001 bp, Homo sapiens
tttggcaaccccatctctagggacggccagtcagcagggaaggttttggtcagctggagggtagggagggaagtggggtgagccaggcatcacctcctccaggaagctgcctctgactgcagggctgggtccagggatccttagggttccccagcccttgggctgctccactgtgatgttgaccccaacacatggccactgtgtgtccctggcagctccccgaccaggccttgagctctgcagggccaaaccctgctccaactacacagtatgggggctgggaggagaggctggctcctcgggacgttcacagtctgttcagacacagacaggggctgcggtggccagagatgggtctgagccgtggactgaggggtgggggagcggtggtgagcaggagagtcctggtggaggtgagcacaggcatgagggaggggtgctgggaggcagtgcaggcaagggtgtcagcagagatctgctccggagacagagggggctgctctgagactctgaggcctggcagtgggagtggggagggatggaaatggtgtttagaggacagaagtggccagatgtggctgctgactaattatggggtgaagaaggggatttggacagtgcccatgtgtcacccactctggccccagaggatgatgggagaagggaccatggggcacgtcactcatctccagctgcaaactcctacgcagctgtcaagacccagctcagatggtccctgctttaggaagccctccctgcccttgggcccctcctccacgtccctttgcccttggcccacagggtggcagcagctccgggagggtaggcaggcctgggctctgaggtgtttgccgtgcaggactggcacagatgggtgtcagggtaggggtgccggtctgcccagacgtggccatgcagggctggggttgcctgcagaaccaaggcaggccaggagggcacaggggggaatctgggccaagattgtggcctgggtcaacaggaggggcgaggatgggcacttgggtgggggaggtgtgggcccagctgtatcagcccctccccaccaggggctctcggtgctgggccaggcatgaacaagcccaccccacatgcccagggcgggatcactgggcccagcctacggcagctgctagacgagggcctgaggcctcccaggagaatgggtgcacttttgggatggcagtctgtcagaggaattacgggtgccctggaaactgtcctgagggaggacggaaggacaggcacgtccagactttggtcaaggcacttaaggcacggaggtggcctcaggagccaggacttggcagtgctctgagctgctgacctggggccttggtggctgccccgtggggacctctccaccgggcctgggtcccggtgttcagcccgcctggctcaaaggcagcacgagagggcagagaacgggctgggcctgggatcctgagcccagggtacagcacggagccaactgaggactctggaggcaccgggaggcgtgagcagacaagtctcatgacctggaacagctcgtggccaggggcctccacactgtcccgcagcagacgcgccccagagcccagtccctgggcttccagaatgaaaggggccagttccaagttcatggtcagaacagctttattgaatctagctcccagatgcccacccagcttcggctcaggccccctgcaggtcactgaggtggggggcagccctcccgtggggtcgtgtcactgaggtagggggcggccctcccatggggtcgtgtcactgggctcctcagggaaggcagtaggttgtatagttatcttccgaggggcaacatcactgccctgaaaccacacaacctactacctcaccccgccaggcccggccttgcactgcgggagggcccgccgccccccgcccagcaccagcccctgcctggcggtcctcagtcaccagagcaggagggctgggcaggcgcagggcaggagggacaggggagatggcaccccaggaaggggcagctgctgctggctggtcttgggaagtccctggctctctgggcctcagtttccccaggtacagaggagccactgtctgccttcagattgtgccatgtgggacccagtgtatgcagagctgttcctctcacttcctgctcaggaaaggtgccttggcctcccttcctccacaggcagaggccctgccactgagctggccaggctggggcacgtgctgggaacctggggtgatgggcaacgccaatactcgcagccctgtgacctccaaacgtctcggccacccctggccccacggtgccttctcctggtgctcagtggagggtacggctcagggccacccatgagcctgggcctgatggcggggggagtgttggggagtgttgggagacagaggtcagacaaacagctgcgtggatcgcctctctcagtgcggctggggcagagggtggggtcggctcagctctcctctgccctcgatgctccacactgcatctccttccatcctcatttgcctccattttacagaggaggaaactgagacccagagagatcaggggcctgtccaaggtcacacagcaagtggcacctaggcctgtcagacttctcagtgtaggcggcccctgcccccgactgctgccaaggctgcccccaaacctggccctgcccgctcccagccagggttccagacgctctgtccaccgcagatattacagccacttcaggaaagacagtagattgtatagttatcccatagcagggcagagccccaaactatacaacctactacctcaccccaaagggcagtcggtcttggtgccgatgggactccgtggcttccagaggcacctcctggggacgcgggaggaaagagggctgaggagaacaggggctcgaggctcggcaggccacacgcaccaagggcacagggattctggcgggcaggcgcggtgggcgcagggggctgggacgccgaaaccctgggagtggggacattgtggccagcaccagcagggacgggagcctgcaggaaaccaccaaccagagagggacgaggaagagagaaaggaggagggagggaaagccctggcggcattttgcgacgctgtcacaggcagccggctccctctcatctggacaggagtggccataatgtccccaaggaactctgcactggagaccctaggaggagggctgtcatctgtcgaaggccagcaagacacaggcatgcgagtgcccaccctgctcggccccctccctccccgcacagcgccaccagaagcagcactcgtggcccccaggctggctgagtagcggcttcacgggcgtgccgtctcctcccactgggcaggcaggcatccctccccaggggccctggttctggccctgctgtgcaggctggcctgagctgaccgcactgcaggaggtggcgggaaggttctttccttccttgagggaagtggcctctaggggagagcagctgggggggtagtcacagaccctcaggtccacccagggtccagtgcctgtccctgcgggtgctggcacactcagtgccctagcttgggacgcacagggctgggacagagtgtagcatgaggatgacactgagagggcctcggggctcccctagcaggggaacgtggcgagagacgggcctccctaagccccgcctatcctgggcctggtgcagggtcagcctcaacaaatgctaattgtggctaccaccttcctggggaaaagctgagggggcagatacgactgtcaacccctcttaaacaggtgaggagaccgaggcccagagaggcaacgtgacctggatgtcacacagccaagggggcagcagagtgaggtccaaatgtcctgctccctgccaagcttttttttttttttttttttttttttttgagatggagtctcactctgtcccccaggctggagtgcagtggcgcgatctcggctcactgcaagctccgcctc

SEQ ID NO: 1888622 - DNA, 4001 bp, Homo sapiens
aggccaaattttatatggtggcatcccatacattttattttgcctgtttacttcttcagacaaatactctacgagctacactttattcctgccaaacaaaaatattttgttgcctgtggtctaatttctaccttgctcatatagctctcccttggcaggcattgcccttgccccccctgccaatccccacccacaatcctttcaaggtccatctccagcatgaagccttttatgaataagcccaagtctgaactattactttatcttcattcccatattagatggaagacatcactatttagtacttcctactgttttttgtttgtttgtttgctttgttttgttttttgagatggagtcttgctctgtcgcccaggctggagtgcaaatggcgccatctcggctcactgcaaccttcgcctcccgagttaaagcgattctcctgcctcagcctcctgagtagctgggattacagacacctgccaccatgtctggctaatttttgtatttttagcagagacagggtttcgccatgttgaccaggctgatctcgaactcctaacctcaggcgatcctcccaccgcagcctcccaaagtgctaggattacaggcgtgagccaccatgcctggctcctacgggtattttgccagcagctgacttacactccataaaagatgaagttggcaatattcaggcacccacagacctcatttataaataaccacttcctgcattattccaagggcaagatactacaaggtgtagtactgaacacacagtaggtgcttaataaatgtctgctaaataaatgacatctagtgggttaaccttcctgatcgggtgtgtgttagtgtcctcataaatcatttcaccctctctgtagtcaccaatattaacagaccttccacccagctctgggaactcaggcacccgctcccctgtatggaaaactgcaaagatggggaggcagcacccacttggggtgctctacataaggcttaaactcaaggtcttcatctccagagaaggaatgattttcatggttaacctaaagtcacgttatcccaaagaataatatccaaattgctcttcattcagtttgtacctgggctgcattgcttttgatagtaccacttaaccctctcaggcacgccaatcctcttaaaaaattccttaattagcaacatgatagttagaactttaatatccattggtgagaaaaaaacagaataatcagcagctactgagacttcattttgctttttaaaagaaattcattagctgccatatcaatgatcaaaacagtagtaagggtaagcgatgttgcttagcctctcaacggtgttgagttttgctttcaggctgtgccttcccagcttctgtgtgaagagggaaccatgaacatcaatatagttggagataaagagtgtggactgaactcaggctgcctggttccggttcctagccctgccaccttctagctgcgtagccgtgaaaaaaattgcttaacctatctctgccttggtatctaactcttacagctgctgtgacttcacatgctggaatgacttcatacatgttaagttcttagaacagaagctggaactctaagcactgtacatatgatagtcactgcctatcctaacccgaaagcccctgatagacagcaagcttatccatgaggttttctttggaggtcatccagcacaaccattaggccattctcgaactctgcctctctaagtgtggtctgaggactatctgtttcagaaacccctgagattcttgctaaaagcacaggctcctgggcttcattcaacctagaagttagttattagtgggaggatgctttcccctacttctccggtttctagaaggagggatttcttgacaccttgagccgatcttttctcttccccatgggtgtgaaaggagttaactgactggtgacagttatctgactggtgacagataactccttccacatccatggggaagagaaaggtgagtttcagaggcaaccaagttgatgtggcctagcctcttcctctgtcccttcttccaggagccagcatgccaacagatagcctgcatcgaatctgttctttcacgctgttaaattttatagagcagacctcctctgtgaggctgtggttgtctagtacttcttgggatagctgagcaattccaactctgggttttggtgctaggaagagccattgtagatactgaaggactctaaagttgagtcctccaatttcacctttatcagtaaaataaggtgacatctggctctccctcctttatctctaagttggttcaatattggcaggggcgggggtggtgcatatggggaaataatatattaattccctcactccacaatatttctgcataagaattctggccacggggtctagtaatttgcattgaaataaaccaactccccaggtaattcagatgcacattaaagtttgagaattactgattggagtttggaagctccgttactgctttagtcaagggtaaatttcacctgcagggtgactggcacataataaactcacatggtgtctacattcacctcataaaccagtagaattcattggtagtctccaatgccatacttcctgagtacagtaaagtggtgaagaaaatgaacaccagagccagacgcctgggctcaaatcctggctcttccacttactagctatgtgaccctggacaaggtacttagcctctctgtgcttgcttcttcattcacttgtaaaatagagatagtaagtaacatacctaattttttttttcctctaagcacaagttaatttgtgaaaatgatgctgtgttttgtgcttattcaaacattaccactaaaagcgtcgatgaaatagtaaagcgttcagtaagcatttgctcttatggaagcacccagaactccctggtcctacactctgctccatctgcctggacctccagctcagccatctcctcctgtccttagctgacatggcccttagtttgctgagacgttggttcagcttagtatcgattgagggtttgagttgtgtcagacaccacacaaaatactaaggaatgaaagacaaaaaaaacatagttcttgccctgggggcagctagaagaggagacagataaacaattttgaagcagcatgatattagcagtgacagggcgatattagcaagatgggggaataataagtagggagtaattgattctgtgggggtaagtgggtgatacctgctagacaagttggatgtctcccttcccaccgagtcacctaccacatcccttccagcactgcagccaggcctccccaaaagcttttccaataagggttctgtcgggtaacacccttctaggagagaagtcccctctgctaccaggtgacagcatggatgatacaggtgatctgtgacagttccagcaatcccagcccatcatccaggtggcatctaaatcctggtctccagaggcccaagtctacagctgtaaccttgatggtgcaaacacatcttcagcttgccatcgtgtgaagaggtaaaatcccaggggattccttgggggagatgacacaggtggctacagggtgctggcttgctcagcattctgcactgcctgtctcgtcttcttgggagttattgtaataaaacactgtgactcacagaaaacgctttgtcattgttttccaagctgggcctgtggttatgattaagtgcgctgttctccatcttccttagtctaggcacaagttaacttatgaaaatgaagctgtcttctttgcttattcatacatcactactaacagtcagacaagagcgaacaagcttgcttttctgctggggccctggtgttggtgtcaccagccagcagatggatggctctacgcagggaactctcctctcttcttccttctgcaggttttggctcaaggcccggctcctgctgctcgggaggtgagaaccaaggagcagagaactac

SEQ ID NO: 1888623 - DNA, 4001 bp, Homo sapiens
gggatttgggggttcctcttttttgtgaacaattctgaactgacacctggatttctttctttttctctttttctttctctctctctctctctctctttctttttaacttatttatttttagagatgaggtctcactacattgcccaggctggtctcaaactcctggcctcaagtgttttgcctgcctcagcctctcaaagtgctatgattacaggcgtgagccaccacgcccagcctggcacctggatttcttaagaatgcatcatcatctacatttcaggctacttactaaaaaaaaaagatggtttattcattctgggctatatctctcctgtaaatatctaaagtatactttttaatttggtcaacacaatccacatatgaagttgggcttacagatagagtaagaatgaaacactgggtaaatctggtcaagacttggtccccccagcgtgtgcaatcttatgggaataatagataagaacatacataaatacagaagcatattttcatgccttttaagcataaaacaatgatgtttgggttggtataccaaccaaatcaccaaatgtgactgactgtttctaaaatgttgattcatcctagcagggtgaaaactagtggtgggggtaaaaaagacaatgctagtccaaaatcagtttccagaggggtcccgacgtggctgagtcacagcagcaccactgaaatcaatgtatagcctctcctgatttagaacactgcattatagaacagaaagattattttaaagccagacacggtggctcacacctgcaatcccagcactttaggaggtgggagaatggcttgagctcaggagattgaggctgcagtgagctgtgatcatcccacagcactccagcctgggaaacacagtgagacttagtctcaaaacaaataaaaatttaaaaaaatttttaaaaaccacctaagatgttttctgtggtttgagctaataaaattctaaagattaaaagccacttacaatggctttcatatttaaaaatgttattcacctcatcagagttaatgtaagtcttttccctgacataacaatcaagctaactcatacatacacagacagataggcaagttacacaaatggcctcatggatgacactctcgagtgtttagggataaaatataggtttacgtcccaagtatagtatatattacataagtaacttcaaatctctatgtctcaatttcctcatttgtaattttgagaccggtatttgtcaaggttgctatgagaagttagaatcaaattatggaaagtagctgggcatggtggctcacacctgcaatcccagcactttgggaggctgaggtgggtggatcacttgaggtcaggagttcgagaccagcctggccaacacggtgagacctcatctctactaaaaatacaaaaatgagccaggagtggtggcacacacctgtagtcccaggtactctggaggatgtggcaggagaatcacttgaacctgggaggcagaggttgcagtaagccgagatcgtgccaccgcactccagcctgggtgacagagcgagactctgtataaaaaaaaaataccctctctattaaaaatacaaaaagattagccgggtgtggtggcagacacctgtagtcccagctactcggaaggctgaggcaggagaatggcgtgaacccaggaggcggagcttgcagtgagccgagatcacgccactgcactccagcctgggcgacagagcgagactgagtttcaaaaacaaaaacaaaaaattatggttggcacctagcatcataccaggcacacaggtggcactcaacaattgttggtttctacatgtcctttatagctatagtatctgttagtagtagaaaccactgttaattttagggccctaaaaggagtaatgtcttctcaagttccttccaaaagagcaattgctatttagtaaaaaataaacaccaactgctctttcagaaggagcttcagaaaggtagaagggtcaacagtatagaatacttacaaagaactggaatcaattaagaatgcaaaaacagtcagtagatgtatagagcactcttgacataagtaactccatcttagaaaaagactcctatctttcatttcaaaaagcactttgacaacagggaccagatgtttttccagataaagacacaaccaagcatgctcttccactatcagtccttaccagaagactctgtgaccataaaaagaacaggacttaaaaaactcaaaatggtcttaacagacactgtcttgctgtcacttgttataaaagcctgatatctgtgtccaaaggctctgcccacatcaaggattctttcttacaagaccaacacactgccatgatgaaaccaggatacttgtctatatcactctccccggactggttaggtaaccctttttcctcacccttttctcttgatgttcaatgttactttgttgcagaatgtttaatctacatcatttatgtattaattaggtatactattatatatgatttacaatattgactgactacctagtgaatgagaagtactaataaaaattgcctccttgagaactccatgtaacttgtcttttataactgaaataacacaataaaagtctgacattgtgaaaagacacaaatgtgtgtgtacctggttatccatgaccttaaaccattcacaatagtagattaagctgttaggaagtcagagttgacctttggaagaacagttccagtggtcaaagtaggatgaggaaaggcagtacgtgcagaatatatatatatatatatatatatatatatatatattgttgttgttgttgttgttttgttttgttttggttttttttgtttttgagacggagtcttgctctgtcgtccaggctggagtgcagtggcgcaatcttggctcactgcaagctccacctcccgggttcatgccgttctcctgcctcagcctcccgagtagctgggactacaggcgcctgcctccatgcccggctaatattttgtatttttagtagagatggggtttcaccgtgttagtcaggatggtctcgatctcctgacctcgtgatctgcccgcctcagcctcccaaagtgctgggattacaggtgtgagccaccacacccggcccagaatattctttaaataagcttagcacaaagggaaagagaacaggcagaggctgaagaagctaccagattccagatcagattggtatagttttctgatgggacagacctgaccatgtttgagggctgaacagaagcagatactaggttaaagctataggaaagagatgaaaattactggagcaaagtcctggaagaaaactggccatgggctggaggggaggacaaagattgaaggtagcagacactgaatatgtctatttttcctctgagaccagcagaatgtagaaaacacgagtacaactgtaattggaaaaaactgaaaaaactcatcccaagtaggttctattttatctagagagtaaaaggtaagatcatctgcaacaagtgaagggaatgggtggagatggccatgaggcaagagaacatttcaattcccttaaatttctaaaactaggtataagtgctgtatttgcaagaatatacttgagacagaaatgaataattatggtcttactacaacgttccattatgctagatgctccacaaatataatcacatttacttcccacaagaacccagttaagtgaggcattgttattgtccctgttttatagttcgattgatgatggcattcatagttaagctttactacagaaccttttttttcagctattatgccatatttgcttcttaaaaaattaagttatacaatactatgtatgacgatataatttcattaatcgtttttgattcaggcataaacaaagttagaaaagtaattccaggccaggcgcagtggctcacgcctgtaatcccagcactttgggaggccaaggcag

SEQ ID NO: 1888624 - DNA, 4001 bp, Homo sapiens
aggcggagcttgcggtgagccgagatcgcgccactgcactccagcctggccgacagagcaagactctgcctcaaaaaaaaaaaaaaaagtctgcagttgggagtttccatagcacattaattcagtgactcaataaaatcatcaaatgtctaggttctcgtgtaatcctggatggtggctgtgtaggctgtccttgctcttaggtcatacaagctgaagaattttcggtgaactgtgttagcatctgtaacatactctcagatggttcagttaaaaaatgtaaacaagctgggcacagtggttcatgcctgtaatctcagcgttttggaaggctgatgcaggaagatcgcctgagcccaggaatcgtgggctgtagtgtgctaagattggcatcaatatggtgacctcctgggagaggcaaccacaagtttgcctaaggaggactgtactggccctggtcggaaacagagcaggtcaaaactcccacgatgatcagcagtgggatcctgcctgtgaatagccactgcactccagcctgggcaacatagtgagaccctgtctctaaaacaaaacaaaacaaaacaaaacaaaacaaaagggaaaccccatttctgcaaattttttttttgagatggagtctcactctgttgcccaggctggagtgcagtggcgtgatctcagctcactgcaacctccacctcccgggttcatgccattctcctgcctcagctggaattacaggcgcccgagtagctgggattacaggcgcccaccaccacgcccggctaatttttttttttttttgtatttatagtagagacggggtttcaccgtgttagccaggatggtctcgatctcctgacctcgtaatccacccgcctcagccccccaaagtgctgggattacaggcgtgagccaccgcgcccggccaaaattttttaaaaaattagctgggtgtggtggcatatgcctgtgctcctagctactcaggaggctgaggcaggaggatcacgtgaacccagcagttagaggctgcaatgagccgtgactgcaccactacagtctagactcagcaatagagtgagaccatctctaaaacagtaacaaaaagtaaacatatataaagagcagttaagcaaactgggcaaatattaacaactggtaaatctaggtgaaggatgtagcggtattcattgttatccttgcaccttttatattaatttggaacttttctaaattacaagttggggaaaaacaaacccagtaagttcttgccgtctttctgctctgctacctgcaacagggtcacctgagttaaatgctcagccatacctcctgatcacagaatggctgcaacggctcccaggaccacacccaaagccaggaaaagtgactccctcctctatgtcctttaaaagtgaggcaaacagccaggcgcggtggctcacgcctataatcccagcactttgggaggccgaggccagtggattgcctgagctcaggagttcgagaccagcctgggcaacacggtgaaaccacatctctactaaaatgcaacaaaaattagccgggcatggcagggtgcgcctgtagccccagctactcaggaggccgagacaggagaatcgcttgaacctgggaggtggaggttgcagtgagccaagatcgcaccactgcactccagcctgggtgacagagagtgactctgtctcaaaaaaaaaaaaaaaaaaagaagaggaaaaaaaaaagaatgaggcaaacattccagacctctcttcatgtttcattggtcagaagattagccaatcactgacccagaggaatcaaattactgcgattggtttacactcaagctttaaactcattaagactcagtgcttagagacggggcaagatggctcacgcctgtaatcccagcactttgggaggccaagttggggaacacttgaggtcaggaatttgagaccagcctgaccaacatggtgaaaccccacctctactcaaaatacaaaaattagccacgcgtggtggcattagctgggtgtggtggcaggcgtctgtcatcccagctacttgggagcctgaggcaggagaatcacttgaacttgggaggcgaaggttgcagtgagccaagaccgcaccactgcactctagcctgggtgacggagggagaaactatcttaaaaaaaaaaaaaaattctgtgcttaggctgggtgtggtggctcacgcctgtaatcccagcactttgggaggctgaggcaagactgtgtggaggcaaccatttccttactggtggaaggggaagggaaaggggggtagggtcacatggaccaatagctgtgtcccatccagatgggctatgacccaagccaggccaatgagaatctgccctaggatgttggttggggattcagaactgagaaggatatacctggagggtgctagaccacctcagggagcagaccgaaaccccctaagccttagccatgttgagctttttttttttgagacggagtcttgctttgctgctcagcctggagtacagtggcgtgatctcagctcactgcaacttcaagcgattctcctgcctcccaagtagctgggactataggcacaccgcaccacacctggctaattttttttttcttcccgagacattgtcttactctgtcacccaggctggagtgcagtggcgtgatctcggctcactgcaagctctgcctcctgggtacacgccgttttcctgcctcagcctcctgagtagctgggattataggcgcctgccaccacgctcggctaattttttgtatttttagtagagacagggtttcaccgtgttagctaggatggtctcgatctcctgaccttgtgatccacccaccttggcctcccaaagtgctggtattacaagcgtgagtcaccgcgcctggctataaagcactcttgactcaaagtatcgctacacacagaagacactcaggaacaggaatgggtcatttcatgcagagaacaatgtggtgggccaggtccagggagagcacactccagcagggggtcctcctccctccccaaacatagactcaaacacaggtgaacactcccacgcgcactttattaagtacggaaggacaggtcacaacaggggtggaggtggcggggaaggcccagcccccacccaccatcactggcacacaataaataaataagtaaatagccaagtgggcacgggagagaggtggtactgaaaacactgaccgcacagggggacacgaaagccccccttcgagctgtggccatcaacgctgtacgggtaccatgaccaggaaagggtggggcttggccacagaagccccagagcatcacaagtctttgtaaaggagaggtgtctttaggacgtggaccactcttatttactgactgaaacctggacccctagctggtcccgtgagacccagattatcaaggggccactgtctctcaggcttctggactgttctactgaggatctaaaagaccactgggtcactatcacttggggtcctgatgggtccacccagggacctaggacatgcgagggtcatcgtcacttaggcttccgattggtccactcgggctccaggacgtgaaagggtcactattacttaggaacctaaactggtaccccacaggacccaacattgatgagtcactatcacttagcctttggattggtccacccaggacaataagggttgtggttccctagacctctggttgacaaggacccaagggccaggacctgaggggcagagagagctctagaagccccagggaagggggagaagactaagtactcagggatagagggaatcttcagcaggcaccagggcccagatttcaaggaggggaggtgacagggaagaaataaggccacctggctgggtcaggccaagatgaatccataggggaccagcttctggggcagcaaagagtgcccagccactgctgggagggggttgca

SEQ ID NO: 1888625 - DNA, 4001 bp, Homo sapiens
tgttgccacgtaaggactagcagagaggcttgtgcatgcctggcagtttttttttttttttttaaagagacagggtctccttctgtctcaaaggctggagtgcagtggagtgatcactgttcactgcagccttgaaactcctggtctcaaatgatctgtctgccccagcctgccaagtagctgggactacaggcaagtgccaccatgcccagttaattttttatttttgtggagacggggtctcactatgttgcccaggccagtctgagtttaatcctcccacctcagcctcccaaagtgctaggattataggcatgagctactgcacctggctggcagttttatatacagtcgcccctcggtatcataagggactgattacagaatatccctcgaataccagtatacatcaagtcccttatataaaatgatgtaatatttgcataaaacctacacgtatcctcccatatactttaaatcagtgctagatcaattatactacctaatacaatctaaatgctatgtaggtagttgttacactgtattgtttagagaacaatcacaggacaaaaaagctctgttcatgttcagtacagatgcaaccacccattttttcccgaatatttttgatccactgtcggctgaatccccgcatgcagaacccaagaagacggacagccaacaatatattttgaccctcatgacaggcttggagggtaggcactattattattagccacgttttacagaaggggaaactgaggcttagagaggtgaagtgctttgttggagatcacacagatgataagtggctgagtttgatctggaactcaggtctatctgatgccggaacccaagctcttaactacctcttccaaatctcgaccccaccccatacacagatggggaagctatgtgccccaggtcagacagctgctcagagtagtgcccggctcagactcctggaccatctcccagtcttgcccctgacacctggcacagcccctgctcaggacttcctgcccagaaacacagagggcccctgcctggtaaacaaggcaaacaggaaagggccagcgtgatcttgtagggaccagtgcttcctgagccctcacccccacccaccatgggatcccgtctctactcctctgtccagaagctgtcagaggtaggggactgagcataggggcaggaatcctccacacctggctgattcctagcaatgcagccctgggttgggggtcagtggggaggtgttatctaactactttgtgcctcactttcctcatctgtgaaatggggaggccattaacacttgtgaagactaaataaataaacttgcagtggctcatgcctgtaatcccagcactttgggaggccaaggtgggcggatcacctggggtcaggagttcaagaccagcatggccaacatggtgaaaccccgtctctgccaaaaatacagaaattagccaggcgtggtggtgaatgcctgtaatcccagctacttgggaggctgaagcacaagaattgcttgaacccaggaggaggaggttgcagtgagccaagatggcgccactgcactccagcctgggtgacacagcaagactctgtctcacaataaataaactcacataaagcactcagaacagagctttgttactacctgactgttattccttccctttagggtagtggttaaactttggtgtgcttctgaatagcccaaaactttaaaaggcagatttcctggggcctgccctcaaatattctgatttggaagaggcaaggtggagctgagggaatttgcattttaacgtggagctgagggaatttgcattttaacaagcgctgccccttgctccctctctgtgaaacaccgcttaaggcactgaactcagcgttctagtaggctggtgcaaaagtaatgcagtttttgccactgaaagtaataccaaagaccgcaattacttttgcaccagctaactattcactggctgcccacctgggccaggctcaggaatgcaatcatcgtggagtgcaggggtcaggagtgtagacctaaagttggacagacccaggcgatcttggtgtggccactcaccagtggccttgagccagtgacttcttgtctctgagcctcactcacctgttataacgtttaacatttccaaaataagtctgaaaacggcacctaccttgtggagctgttgtgaagctggcaaagagtgtgagctcagaggcatcagctacaattctgtaccattatttattaggacggacacagtcctgcccataatgagtgtcacggccattgagccggcagacaatcaacccagtgggatggatgcccagacagactggggtgtgcaggaggcggtgggaacacgttcagggcacgctggagcacccagtgtcacgtcctgcccagaagacctaataacacccaacagacaggcaccacaacaaagtggcatcgactcccactgcaggcctcccacggcaaccctgtgggggagacagcccctctctggctggatcatgaataagaaatccagaggcggaatgggctgctcacactctgctcacactcacacagcaggtgcagggcagcatgaggactcaaacccaggtctaatgggttcttccaccattttgtgccatggatctcttcaaccatctggtgaaatctatgggccccttcccagaataatgcttttaaatggaatacaataaaatatacaggatgaaaaggaaaccaacatagtaaactttggctaagaatgtgattacaaaaattgctgtgaaatattatctgtaacctatctgctcctttattaaagcaatcaataacaagatctagtagcagacagaataatcactgtcatctgcaagcagacacatctgtggcacctaaaatgtgatataaaaatatgggccaggagcagtggctcatgtctataatcccagcaccttgggaggccgaggtgggcggatcacctgaggtcaggagttcaagaccagcctggccaacatggtgaaaccccgtctctactaaaatacaaaaaaattagccaggcgtggtggcagccacctgtaatcccagctacttgggaggctgaagcaggtgaatcacttgaatctgggaggcagaggttgcagtgagccgagatcgcgtcattgcaccctagcctgggcgacaagagcgaaactccatctcaaaaaaaaagtgtggtttctactggtgatgcgagtgctgccactactactgtgatttatcacctatgttgtcacctggaggaaatgttaaactagggtcaataaagatgtaattttcccctcatccaaattcctaggcccccgaatgcagcctggaaccccaattaagaatcgctgccagcatctggctccgttatggacacaaaatctatggctgttagggccagggagccatggtcctgcctcaggagtctagattcaccttccttcccattcctgcccgtttcctcgccccaccatcaaacacaagagcagtagggatttgcaccagaaacacttgatggcatattgtggagcatggtttgcatgttctgattttattttaagaagtaaaagtggccaggagcagcggctcatgcctgtgatcccagctgctcacaaagctgaggcaggaagacagcttgagcccaggaatttgagacccagcctgcggctatcaacatagcaagccccaaatataagtaggtaggagatggcaactgttataaaagaaccatggctcctctccacgctggcatcacacactggcatgtgaccttggctactaagttagcagtgtgaaggccaacagggaccaaagtgggggtgaccctggcagaggcactgtacacatggccctgagggaaagcaaacatccgcagtggatgaggggaggcacaggcaggtggtcagagtcccatgctgccagccagactgggcgtgcacctgcatctaccccagaccct

SEQ ID NO: 1888626 - DNA, 4001 bp, Homo sapiens
ccccttacctgccccacaggctccgcaggctggatcggctgcttccaactgaggctccagggtctgggtccccgctttgcggtgcaaccattgggcgcagcaggccatgggcgaccatggccagacccagcagcagcaggggccagcgctgcctgggaccagggcccagctcctcaggggtctcacaacccacttggcctgtcttgggtctcattggccttcaggttcaggggcacctctggcccgacttgcagcatgggctccctggaggacggtgccctggtccctctcgccagcagggctgttacagtacaccccagtccattggctctgtcctctccctggactggctctggtccctgtccctagcccaggcccttccagggtccatggctgtcacccctggggatctctcccagaggggcatctaccaactgccctgaagcggtcacaatccagggctcaactgcctcccaccacagccggctgcctggccccgcccctgggtggtgcacacctgacccacttgtcttccccacttcccaaagggcagcctgggtctgtggagcatctccctagggcctagagagctgcccagcaggagtccccaagggcttgagctcagggggttggggctggggctggagctgtggcttcttttctgatcagtcttccaggctgggtgcctgtacactgcactccagccagttgggaccagccctttcttggctgggttggttaagcctggctggctatcctgtggccctttcctgagtcaggcaagagccctgcagggagtgattctatatccttcaggcaaggaagagtggtgaagtcataaatgtggagtctatctagacctaggttacctctgggcctcagtttccttatctgtaaaatggggagagttcctctgcagcatgaagcttatgagagttaaagaaaccatgtgtttgctaagcactcagtgggtgttgaataaattctggttctttttttgttcttctcttactttgggattcacaactacttgtggggtgtccttggggccagtgtctctgttttacaggtgagaaaattaccatccagagaagatgaatgcagggtccaatatcattccttaagtagggagcaagctgcgctaggatctaggaaggggctcgtcccctgtatttctattcgtctgtccacctggaatactcgtgcctggctccattcggcagtggtggaggaggagagggctggcaggtgctttaagttggggtcctttttgactataatatgggaatatgatgcataatacaataataatgcattacattattattgctttacaagcactaatcctgggagctaagatcatctactgtcctccacatttgaagatgaggaaatgctgctcaggctgattccctactcttttaatgtcacagggccaagaggcagtaggtctggagtcggaatctgaggcctggtccttgcatgacactagggcgtgctttgctgatgatgacatggctctctgggtctaggtggtaacacactgcttggtgcatgggaaaacccagagcttggcacaaaggagtggctcaattaaacatggactaaatctggttgaataaacctcttttgcttcatgtgaccccttgtgtcatttgcactcctttacgccccattcatcgctcccatcttttctgttgccctgagagcctagtataaaaatgtttgaggagatcttcaggaccccatactctggtgagaaaggcccctgctctgcccccttacattacagaactgcaatgagggtctgccctcttgctttccagtttctttttctgccacaaaatctttaaaaatatctgctcaagttcagatctgcagccctctaggactctcaatgttttgttttagcaactctcagaggagcctcctaggacttcctaaagtgaatttcctgggaggctcctttgagaattgcttggttcacattttgtgtcagatactccttaacttccttgatacatttggtgacaatcaagccagacatttttgtgggctatggtaacagacaaatagcctgagacttcatttcattgataaagttgatggttgttgggagacagtggtctactatggatctctgcatttctgcatgtctctcgggcaaaggcactgattgtggattatcttttcaagagtgtttgtggagtgaacaacctcggaaggtacagagaatgcctctctttggagcaaaacacagatatatgcttactgtcaagtatgaaatatttgggatccctgagctctggcatgcagatgtcacctggccctctttgcatcaccttgtggaactggtgcaagacaatgctgataccttggcaactgctattgctgtgaaaaacagattattcgttgtctctgacccaggagtcttgtatcttctgccagcatccatggcactgtggcaggcttactttttagtctgcaaataggatgaagtctcagactcttaacagttcttgaaggtgatgataatgaggaggaggaggaagaaagagatgaagttgaggatggtgatcatgacttaatggttcgactcatcgaatcggttttcaaagatctccaggctggatctttatacacattgcttgggtaacttttgaggaccaggtgctgggggctggattatacaaataatcaccacacatccctgtccttcaaaataggcaaggcactgagcagtaacagggtgtaggtgccctaacagacatcattcagggcacaagggagggccctgggaaacccctggtccagcacagcttctccactggggagcttggcctattcctgcctctgatcttgggctccttggatattcggggctggggcagggtctgccctgggagtctaggctgaagctgctcccttccagcccctctgtgggtatgacactcacccactgctcaggacccagaagctgtggttcctttcagggacagtcccaggtcttggggataaaaaggggctgtccctaaatgtagcatccccagctgctgcccctacccccacccttgcacctgccatggcctctggatagacatcgtcaccgcagaccacatccttccatggtggctgcagtcggaaatccgagtctgtctggggaccctggaggactggactaggcctccccagcaggtgcagctgcagctctggccacccaggcctatcccctgccctgagatgtgcaagggctggatccaggcctgggcagaagcagccaagtccagctgtcctgtttggcagaccccctgctgagggtctgtggtgcctctgcagagctctctgggtcccgccctggcccttctctcccaaagcagagggatgtaccccatccagttgcttctgccctgctccatgtctgagggtatcccccaccttggccttctgctggtcagtcccctgcccagtctccatcccccaggtcccagaaactccacctgcaggcactgcagactcctctcccccaggtccaggggtccccagctccccactccccaccatccctaaattcaagctggctggtctttcttgtctcatcttgagcttctcactcttgggatctgggggagtctgaggcacaggatgacaaagtattggctggggatatgacaaaggttctggatctctgagtccccagagttagaagctggctctgcagctcctgatccccctctgaggagtcctcaggaaccccaaagaccccagctcctctggtgatcctgggttgcagcctccaccccagctctcctccaggaaatggaagagatccctgctccctttgtagatgtcacagagtggacttgccaacctggcagggaggtcttctagctacttctaccagtgtggaaacacagtctcagagagggagagtttcttgcccaaggcacacagcgacttggtgtaaagactgtgtcttgggacttactaatagcaatcaaaga

SEQ ID NO: 1888627 - DNA, 4001 bp, Homo sapiens
ggtgggggttagcatgactggtgggaaagacagagaagagagcacaatgtatggagtaaggtggccttattttgaagtcaaggaggacaggattggtgagagaggataggccagatcatggaggaacaaaaaacttaggaaggcctagcacagtggctcatgcctgtaatcccagcactttgggaggccaaggtgggcagattacttgaggtcaggagttcgagacgagcctggccaacatggtgaaactctgcctctattaagaattagctgggcctggtggtaggtgtccgtaatcccagctacttgggaggctgaggcaggagaattgcctgaacccaggaggcagatgctacagtgagccaagatcacaccactatactccagcctgggcggcagagtgagacttcgtctcaaaagaaaaaaaaaaaactgaagaaagaattgtgggtttgatattgtatgtggtagggtgttacgttggtcagtttttaaggatagtctacaagaccatacggtctaatggaaagagagagctagactgagaggtataatggcatttctgtcacttattaggtatttatctttgggtaggtcaatagttattcattcaacaagtatttagtattactatgtaccattgcacacactgggaatataaagatgaaacaatagacattctgcctttaacaaagttttagaaaaatagaaggtaactatatagaaaatgaaataatgaccataagcaagaaggccacaatgaggaacaagcatgggcatatgccagatattttttcagaggcagaccgtagataaacagatcctactagtgggtcaattaagttattgtattttgtagattatacagctacttaaaatcataggaggccaggtatggtggcttatgcctgtaatctcagcattttgataagccaaggtcggaggagagtatgagcccaggagtttgagaccagcctgggcaacatggcgaaacccgtctctacaaaaaaacttacaaattagtcaggtgtggtgatgcacacctgtggtcccagccactcaggaggctgaggcaggagtattgcttgagcccaggaagtcaaggctgtagggagccctgtttgcaccactgcactgcagcctgggtgacaaagtgagaccccatctcaatctgcctgcctgcctatctatctgtctgtctgtctatctatctatctatctatctatctatctatctatctatctatctatctatctatctaccattaatcatctatccatctattatatgtatgtacatacatacatacatacatatatatatatacatattagatagctcctgagatgtcctagatattcttttgggcagaaaagcaagttgcaggtctgtacataaagtattatctcatgtgagttggaaaaaaatgtatatgcatagaaaagtttagggagtgtatgaaaaagaggagtaggactggtggtgatgggaagaacgacttttaatttttattttatatccttctatctccttgcatttttaccacaatatattttaactttgtaattacaaaactagttaaacaaaaaaagcatcccaccacaatcaacctttacccacgactttatctctggactcaaaacatcctgatattaaaatcttcatgttaagatactttgagtctgacctggcttcttttgcttattcaacttttgttctgataatcctagttgtatctcctagataaaactagatagacaaatagctgttctgtcgactctgagtttcacttctattattttttttcccgaaaattttatattgtggtaaaatacacgtaaaataaaatttaccatcttaactatttttaagtgtatacgtatttgtttttatttagcactttctcagtgaatatgtttccctggctccccattctctctccgcaggacagccaacatttcctaaaagcacaaccttggaaatgatagttatagccaaccctggagtgtttgagaccagaggacagtccagaataggagacaaggcacataccaaagatcagagccagatattaggtcagctgtcaaggtgttcttgaaggcaagagccaggcattgactccgatttctgggtagtcagagacaaggaataaaaaaaacttgggtaaggactcagcccagaagactgaggacaaaggcaagatagctgcattgttaatgtggagtgacagtagtaacaagaaagaaagcagactgctgatatatgctttctgcgaaaattaagaactggtcttgggatgtgggtggctttgacctgaaggaggggggtcggtggcactttgattctgttttgaagggttgaagaccaaggcagtttctgcctgcttctatgcaccttcctcaggccttctttttctttctttaattttttttttctttgaaaccgggtctcactctgtcacccaggctggagtgcagtcgtgccatcttggctcacagtaacttctgcctctggggatcaagtgatcctcccacttcagcatcctgagtatctggaaccacaggtgtgcaccaccatgcctgggtaattttttgtattttgttgggtagagactgggtttcaccatgtttcccaggctggtctcgaactcctgagctcaagcgatccacctgcctcagcctcccaaagtgctgggattacaggcatgagccactatgcctggcccaggctttcttttagaaaaaaaggagattaggatctttggagtaggaatgaaaaactctcaaactcaaacacttaatactaccattacccctctgtcaacacacacacgtccacacacccacccctgcagctaggagacattttgggctctggatgttatgttcaataatcttttattgggatgcatgatgcattcatgatctgataaaactagagcacattgatattggtattattattttggtaaattttttttttttttttgagatggagtctcgctctgtcacccaggctggagtgcagtgacatgatcttggctcactgaaagctctgcctcccgggttcaagccattctcctgtctcagcctcccgagtagctgggactacaggcgcccgccaccacgcccggctaattttttgtatttttagtagagatggggtttcaccgtgttagccaggatggtctcaatctcctgacctcgtgatccacccacctcggcctcccaaagtgctgggattacaggcgtgagccaccatgcccagcctattttggtaaatatttttatattacctttcagaaaccaattttaaaaaagattaggcctcatattcaggaacatatcttagatgtttttgtctttaccacattctgatttgtttaagaactttaattcaggagagattatctaggaagttgttgaaaagtaggcttagatacatttgggatttttcaaattgacccatttcagagtggtttgtagatataaatttgaaatgaagtacatactaccttcaaggtaaaatatactttcttaagttttgaacttctgtttggatgaatttattactttatctgttttattttatttttgtatctgtagaaatcctcagatgttgctctcatattcatttaaatgtattgtgttattattttggattgtactctaagctttttgaagtcaaactttaaaacagattttcatatcaaattaaggtaaaaacacagcaaacatattttatacctagtaaatccaaataagttgactgagattttagaaaaaataagagttccataaaataagcagcatttcacttagcgttctaagttagaaaataaaatggaaaaaagatacacatttataatatgcaaaaattacttaaaaataattaaataaagaccacgtataattttagataatgaaaatggcaaaacttcatttagagttataaaagggaattgaataaatggacatatattctgcccaagactatttct

SEQ ID NO: 1888628 - DNA, 4001 bp, Homo sapiens
gctgtctggttccaaaacacagtgtctccaccccccgcccccctccctgcactgtgtaccgcatagtaagccctccaggagcagggaagtttcctgataaatcctcagggactttcaagtcaagtctttttctgttgttccatagccaccgttaatttccagagaagattaagcaggttctgtcagccttgccccagagctggggctctgcccttccctgtgcaccgtgcattttcagggggtactttcagcagcataggcacgtggcctgagtgtgtccaccagggtctgaccccttgccgggacctgcgggagaactggccccgtacaggcttgtaagaggaacagtctgcttgatgttttcttcagccttttgcccactgtgacccccagggctgagctgtgggcagccaggattcttatagctaaggaaagttctagattatgggatcttcccactgaccccactcagctccttagaggtcattctggtgtcttttggaactttgtcaatgggcctccagagagcccagggataacctctccacacccacaaatccaggtccaggctgtagcctgctaggtccttagggctgccctggctgttagctgtatctttctttagtctgggcagagtctgtacttttaagcccaggtaccctgggaccagcagctgttgccatggagttaggggtgctgccgaggctaccctgcaaaggcaagctaatgagtgtgatgggacttgcagccagacacgcccatccacagaggccccagcaggcaacactgctggccatactggagaaccctggcgcctgccctggtcaccagcctggctgaggtatgctgttgcgctgtccttcctctggggagcaggctccgggggacagggaaaagcacacaaggaacttgtcctctagggcctgcagtctcatgggagagtgacatgcaccaggaccaccgctgtgaagggctaagtgctgtcctggagggggcaccaggctctgtggacacagaggagggagcatgcaactctgcggagggtactcagagctggaccaggtgctgggtgataggaaggccatttcaggcactaggaacagcatgtgcaaagtctcagaggcagggcgggagagaggtgccctggctcccgcacagcagctgggaaagatgctcttcacacagggaagggggcaggatgctgagagggtggtggggcccactgggctacagagaggcagttgattttattctaacatgagcaggagggagcacaggaaggatcttttttcttatcagattttcatctttgaaactgccttcagctgagcacagctgaaatgacatcatgcaccttctcaggccattggttctcctgcaggccctccccagggcttggtttccaccctggcagaaaacatccagcaaggtcaggcgtggacctgagcatccatttcgtcttccctttgttctcctgcctggctggcccccttaaatgcttctggtggatcttccagctctggtcacctgactggccttttctgccagcttggtgtccagcccgctcctccctgtacctgcctggctccccacttcacaccagcctgcaaccagctctgccctggctggcagggaaaccagctccttatcagccgctgtttctgctccagccttgaccacagctggcaccgtcacagccttcctgcagccagtcctatccactcaatgccaaggagtagcagggcttctgggcgagccacagcagagacgcctcggctaggccttcacaaaggcaggggtgtccttcccccgctttgtccgcatcttcgtcagtgctgctgtacacagaggccttctctacaaggagcacttagacaagtgtcaccccagtggcccaggtgcagcccctgcccaccagccccactgggaccacctaaggagtgaccctccaccctcctgcactgggcagggggcagcaggccctagcccaggggtcaccacccagtgcaggaggtgcgggcttcctccagggaagtgcttggccctccaccaccacaggcatggccttcagggacagctgggcttcagggccatgtgtgggcaggggtggcgaggagctaagcttaggaagggcagatagttcttttttttttttttttgagccggagtctcgctctgtctctcaggctggagtgcagtggcgcttgcagagtgcaagctccacctcctgggttcacgccattctcctgcctcagcctcccgagtagctggggactacaggcgcccaccaccacacctggctaattttttgtatttttagtagagacggggtttcaccatgttagccagcatggtctcgatctcctgacctcgtgatccgcgcgccttggcctcccaaagtgctgggatttcagccactgcacctggcccagatagttgttttgagtgaagggaaatcatgggtttctgcgtgttctggggctgggcatggcttcttcagccttgcccacaatgcgccaagcatgtcttagagacagcaacaagcacctccagaccctcaattagcaggccttctctgggtcagaagtcagcaacctgacgccccacctcccccgccactggctttaaggttggctccagcagggccctgccgtagtcactggcccacttgccatggatgggagccgtgtaaccagggaatgccccagctagtggtcacactccaccagcaaactctgcccctggtgggaaggaacagacagcagcactcttcaaaatgactgcgtgggaactgggggtcatattcaagaagcccctttcagtgccagcctactccattcctcagaaagcaagctggtattgcaagagttaaatgtgatgcagtcccagttcctgaagcctacagttagaccagccccgcttcactagcgtgtcaggtggccttgttcctaacaggaatcgcaggcctttccctttgtgaccagaattctgtggcttacttctttgcctcaaagctgcactgagccagtgctgaagtcctgtctgccggcagttcagggcgagaataacagggctctttccctgcaacagggctgggtccccaacacctgccctgggcacccccactgcggcagctgggaaagacaccatagccgcctctcctccttagccagcttctcctctcactcaggttattctcttgctccccaggagacttaacctcacacacaacatacccttccttgcctctcctcatctgcccagcaactgtggggtcagcctctgccgctcccagcccatcagccttgcgtgccctcccagttcctgcctccccaccctgcctagctggctggcaccccccagaggacatttagaagagctgtaaccaagccacctcccatgctgctgagacaaggtgggggcagagtcatctttgtgctggtgagccagtgcaagacaagatggcacctcacccagcagtttatagatgtgttttcagcagcagaatggaatcccccattcaaatacgacctcatacacaaccacagtctataaaataggaaacaagatctgctcaagaaagggtctgctgggaattctccatgagcctacgggcactggagctatttatcagtctcctgagtttggccaatcctggtcatagccattggtggtcttggtctcagtctttggccagcaacaccctccctaacctctccagcctttgctgctgtctgtcatgtaggtcacttgtcagatcctaatttccagaggcaggaaatgagaccctttttaccatttccaggcaggcctggaggatgggagccgtcaatctgtgccccccagcccgctccgttcttgcatcagccatcggtaagggcagcatccaatggcttggtggtctctctttcagggtaaaatacgaagccccccaagcaacagacggcctggctggagccctggacgcccggcagcagagcactggcgcggtaagcagaggg

SEQ ID NO: 1888629 - DNA, 4001 bp, Homo sapiens
gcccaggagttcgagaccagcctgggaaacatggcaaaaccccatctctacaaaaaatacaaaacttagctgggtgtggtggtacacttgtggtcccagctacttgggaggctgaggcaggaggatcactagagcccaggaggttgtggctgcagtaagctgtgatcatgccgctgcattccagcctgggcacaggaatgagaccctgtctaaaaaaaccctgaggggagtaaccatgtcttatgagtcaccatattctcgaaagggcctgccatatagtaggtataaacatatgtaaacggcccaggtacagtggctcacgcctgtaatcccagcactttgggaggccgaggcgagcggatcacctgaggtcaggagttcgagaccagcctggccaacgtggcgaaaccccgtctctactaaaaatacaaaaattagctgggagtggtgctgggcgcctgtaatcccagctactcgggagtgtgaggcaggagaatcacttgaacccaggaggtgagggttgcagtgagccaagatcgagccactgtactccagcctagacaacaaggtgaaactccatctcaaaaacagtatgtaaacgttggtaaaaagaatagagatgttgagtctttttaccaaagatttcattagaggaattccccacggcatccagcgccttctacaacagtcccagcctagaggaaacagatccctccagcaccttctcccagcccagcacaccaccaatcaggctgatctctgtctaaagtctcttctcaactggagtgctgctatgaggctttactggtggatttaaaaaaacaaaaaaaaacaaaaaaaaaacccacaggtttttttgttgttgtttttggttttttataatttttgacacagggtctcactttgtcacctaggccggagtacagcacaatcatggttcactacagccttgacctcctgggctcaagcaatcctcctggcctcagcctcctgaggagctgggactgttggcacatgccaccacacctaactaatattttaattttgtatagaaaaggggtctcattatattgtccagactggtctggaactgctgggctcaagtgatcctcccaccttggcctcccaaagtgctaggattacaggggtgaaccaccgcacctggcccccagcaagtctttctgaaagtgggtaatatgagctcttgaggaacaggaggaagcatgggatgtagccctctctagcagtctggctagaggccgaattagcattcgtgaaacagcagcagctcagggcaggggaatggagataaactgggaaataaagacggaaagggcctttggtggaaggagggatattcttctgggcttccaaaaggaaattgctgcaaactactttcctgccttccccattccgcaatcagaattaacggcctcctccacagcattttgttcaaatccgcctgctatcacagctgactgcacacacatctggctccctaccatggaataccctcctagtgggcaaggacaactttcagctcctggaaaaccatcagcagagtcttgaacacaggaattggacagtctgtatttgctgaacttaagtatttacttcacaacaattactactttaacacctcttttctgaagcctataagtatttgtggcaacggagaaaaggaggcagaatcctcaggctgtcaacatgcccttcatgcaacctacaacgagcagctgtgcactccagccacacccactttctccagagtgccacagtttccgtcttatcattccgcccgtcttatcattccgcggcagcaaaccagctgcccgtctgctcctctgcctcagcctcgcccagatgcggctgtgctggcccgtcaccctcagttcctgctcaactgcaccctcacttccgactaagtgccaggtcctgcactttcgctgggcctgccccggcccccaccagtgccctgcacacttggaggtgtctgtgatcatctgtctattggtcccctccagacactgtggactgcaggagggcagtatttacttcacccactgcagtactgtgctggcaaatgcttaacagactggtctccaaaaacatgtgcatgtatttatatggacacatttattttcaattttactgatataaaagatatgcagcacacaatggtaataacatatacaatacagtaataaatatatatcataaaatacacaattatacacttaataaagcacataggaataaaatctgtaatactcttcattgtaaattccactgagccacctgattctcccagaatgctttcctagatttttttttttttttaatttggtccaactcttacatctgtgactattgactctaaggaataaaacaaaagtgaaagaaagaagataaagatcaatcatgatataagcaacttctctgctgaactggacactagtttcaaataccagaagaatatttactcaattttcttgtactattcacaatataatggttacagacacaaaatactaagtttaaactgcaatgttaaattttttttcatcactttctcaatgaacaaaacaataaacccagccctaatgtgttgtgtttgcgagtgtccatggtgtaaatgctcccaccaaggctaatgtccagcccccaacatgacatgtgagcgcagacacagttgggaacagatgcgcatgcacagcactacctggtgtctccaccacagacacagcaggtgtgatggcacaggcgatgctaaggtcaacaggaagtgatgagttttgagtatttattacctttgcctttattataattcatttaattataatggcggcagttaacaaccaacttgcaaaattccttaagagatgggtgaggtagcccacacctgctgaggtacaaggatcgcttgagcccaggagttggagaccagccttggtaacatagtgagaccttgcctctacaaaaaaattaacgaaattagcagggagtagtggtgcttgcctgtagccccagctacttaggaggctgaggtgagagaatcgcctgagcctgggaagtcgaggttacagtgagccgagactgcaccactgcactccagcctgggcaacagagcaagaccttgtctcaaaaaataaaaaaaaaaaaattaataagaggctaagagctggctctggtaggccacggctcactactgaattcccagcattcagtacacgaaaggtggtgacggcacttgtggaaacacagcacagccccgcagtggcttcactcctgaagtctgtgctccaaagggaatgcaggctttcccacagccgggcactggagaaactgcacgtgcaacacgttatcttttcaaaaacgggggaaaatgccattttaaaaactcagcatacgctgaaatataaaatgttttcttggccaggcacggtggctcatgcctgtaatcccagcactttgggagaggtgggtggatcacgaggaaaggagttcaagaccagcctggccaagatggtgaaacgccatctctactaaaaatacaaaaattaggcaggcgcagtgtcaggcacctgtaatcccagctacttgggaagctgaggcaggagaatcgcttgaaccaaggaggcagaaattgcagtgagccaagattgtaccactgtactccagcctgggcgacagagtaagacttcatctcaaaaaaattcataacataacataacataacataacataacataacaaacataacataacataaaaataaaataaaataaaataaaaaagtaaaataaagtaaaataaaataaaataaaataaaataaaaaagttttaatacattctccctgaggtacttcttccacagaaacacttaggtagcagggaagcgcattttaaatccttcaacagtctgactgggtttagcaccctgggtggcgttagtcacagggtattccttaaagcttgtgagctcggctcctcatctggaa

SEQ ID NO: 1888630 - DNA, 4001 bp, Homo sapiens
ccaggcagccacctggccacagacagacagtggcggctacatacacccccgcccctgcacccgtggccaggctggggtatccgcgcgccaggcggaatgcaggggcgccctgggcccgcacacctccccatgtccgacacgccgctgctgctagagcctgctccgccgcgcccccgtccccggacacctgcgccttcgcctgttcttgggcctgagcccgtcccagtccccgtccccgcaggatctgctgcaacccacctgctgctgccgcagccgctgcctccgctctgagcactgagcccgcccagttcgccggcgccgagcgcagggcccgcccccatcccaggccccccgcgcggccccacccgctgccacacacccagatatttcaccctgcccactctgcccgacctcgcaaggtcgttaccggagctcaccggggtctagggaagccctgtgactgtgactcagtcacagatggagaaggtcagaccgccggctgactgactagcctaggtcagttcggggaggttaagggccacgtctgaaagtccgcagcccaccttctttctactgcagcggacacccttcttgatccctcaccccagtacatgaaccccacccagctgggccccagacaggccccacagcaccgtcatgtgagcttcaggcacagtgagttagatgaagacatgggtctggcagagtggcctggggcggtccctgacctctactcttacaatggaagagactgcagccttttgagagagttctgcgaattgagggaatgcattctggctgttttgagcctgcagctaccacgtcctgcaaggaagcaagcagcttctgggaccagcctgcagccctcctgtgggggagtagagctcctcagaccccagtggcagcccttcctagcctaggcacctctggcaggccgggagggccctatgggaccccaatagcagatccccacttgtgtttatcagcgacagccactgtgtcctgagtactgcattccagtgccccacgccccaggcaggcagctatgcaacaatacacctggctaattttttaattttaatttttttagagactgggtctcactatgctgcccgggctggtctcgaactcttggcctcccaaaaggctgtgattacattcatgaaccatggctcctggcctccccagaacgctatactagacatgtgttcaggcttacatgtggtttgtggaatggaatcttaggagcatctgcagcctatccagcctattgggctggtgacaggatgatggactcccagacaagatggtgccaatttggaacattctgcctcggccagaatgccaataccttctaatatttggctggtattgtcttgaggaacttctcagatggctcccacttccggtgggatggtagcttccttaccccatccctgtgttgcctgagcagacgtcccttgtcctgaaatgtcaccacaaaagtctaggcacttcaggccagagggttaggcagatttgtaatgggagctccccaaaggccttaccaatgactgccttattgctggtgtccagtgttttggagtgttgactttttatctacctggagaaggtgtgacaccacaccctctgccacaggcaccaacatacaacggatatgtgagactaagcagggctgatgcagtaaattgtacatttccagagatatttccctcactactgagtgagacagctacacagagcaaccccacagtgatgcagtgaagacaaaccaccaggaaacaaaaactttctaactcattctgcaaggccaggattaccctgacactaaactcaacaaagacatcacaagaaaagaaaaccacagaccaaaatcccttatgaatatagatgtagaaatccccagcaaaacacagtggactcttgaacaacacaggtttactaatacatagatatttttcaaccaaatgtcgatcaaaaatacagtatttggctaggcccagtggctcacaccggtaatcccatcactttgggaggctgaggtgagaggatcacttgaacccaggagtctgaggctgcagtgagctatgatcctgtcactgcacttcagcctaggtggcaaagcaagaccctgtctccaaaactactaaataaataaattaaaataagtggtgggtgcctgtaatcgcagctacttgggaggctgaggcaggagaatcgcttgaacccgggaggcagaggttgcaatgagctgagatggcgccattgcactccagcgtgggtgacagagcaagactctgtctcaaaaaaaaataaaaaacaaaaaacaaaaaattcatatggaaatgcaagggatccagaatagccaaaatacttgggtattttgcctgggtaacatagggagacctcacctctacggaaaggtaaaaaaattatatgggcatggtggcatgtgcctgtggtctcagctactgggagtcgggggtggtgttgaggtggaaggatttcttgagcctgggaggttgaggttgcagtgaggcatgtttgtgccactgcactccagcttgggtgatagtcagaccctgtctcaaaaaaaaaagaaaaaagtaaagaaagaaattaaaggcaacataaataaatggaaagacatcccatgttcatagactgtaagactttaaatataaaatggcagtattccccaaactggtctacagattcaggggttgcatagattgagtgcaattcctattgaaatcccaactacctgttttgcaaaaatcatcaaaattcatgtggaaatgcaagggatccagaatagtcaaaatacttttgaaaaagttttggaggacttacaattcctgatttctaaactgattgcaaaatgactgtaatcaagattgtggtggtgacataagagtagacacatagatgaacggaatagaattgacagtccacaaataaacagttacatttatcgtcaagtgattttttaaaaatagactttattagctgggaatggtggtacacgcctgtagtctcagttactcagaaggctgagttgggaggatggcttgagcctaggaggctcaaggctgcagtgagcttgatcatacctgtgaatagcctcttcactccagcctgggcaacatagcaagaccctgtatctaaaaaaaaaaaaagttgagttttcagagcagttttatgttcacagcaatattgagcagaaagtacagttcccatatacttctgctcccacacacgtgtagccccctctcccactactgacatccagcaccaaaggggcatatttgttacaatcgattaacctacattgacacatcattatcacccaaggtctatagtttacattagggttcattcttccggttgtacattctatgggtttggacaaatgtgtaatgacacatagacacaccattattgtatcacacacagtagtttcattgccctaaaaaccctctgtgctctgcctgtccctccctgctaacacctggcaaccaccgatctttttcctgtctccatagtctagtcttacttttgcagaatcttatatagttgggattatagagtatattgccttttcaggcttctttcccttaataatatgcatttgagattcctctatgacttttcatggctgaatagctcgttttaattttattttttatttttgagacagagtctcactctgtcgcccaggctggagtgaagtggagtgatcttggctcactgtagcctctgccttcaggattcaaacgattctcatgtctcagcctcccgaatggctggggactgcaggcgtgcactgtcacaccaggctaaattttgtatttttagtagaaatggggttttcccatgttggccaggttagtctcaaactcatttcctcaagtgatacacctgcttcaacctccccaatgtgctgggattacaagcgtgagccacccaaccaggcctgtgctatttctaaaatgcaggag

SEQ ID NO: 1888631 - DNA, 4001 bp, Homo sapiens
tgcctaggatgtctcagcaaagaataaaaaatagtgcatgcatgggatggtcttttacatggaggacaaggacaggggccttcactccactctctcctttatccttgagatgatctacatctgccaaagaggttaggaactgcggaagtctcccagccagagggaggcttccacagccagagggaggcttccacagccagagggaggcttccacagttcctaacctctttggcagatgtagcctgaatgcagcctggcctgacagcttggctgcaacctcgtgattaaccaggagcgagaatgaccaaactaagctactcccaattctaggtgcatccaagtcacaaggtcacagacatgtgttctcttagtgtgctaagttttgtgagtgtttttttatgcatcaatagacaatacactttggtttttgaaataaattttagtgtttatatttcaggtacacaacatgatgttatatagtagttactttgtaaatatatatagtaaactagttactttgttttaaatataatctgtataatcgaagtttaaggagcctaaactatatatgataatagctgtatttaacaactggctcagaaaatttaaatattggacccagctaatgtccgaatgtgttctaaatcaattctcaccattagattattagggattccaggtacaaaagtattgacagccatgaaaattagaaatgctcgatgtccatgaggaagggaggtggactcaggttaactctttcctgtggagccattttggaatcccccatcctatgggaagaccgtccacttgtgaggagtttccaggacagggcctcagcgatgtgaggggaggagaattctgcgagagcactgagcctgtcactcaaaatctccccagctcagcaacctgaggaatttcggcaaagagcaggagcaataaaaagaaaaacagcagcatcctctttgttcttaatccctcaaaaacatcttcaagtcttcttaaagtggtcactttaagctaggagggccatcttcattagagcgtggtggacacagagtggaacaagatgcaattcctggaaactggaagccatccccctgatggcttctgtccagattgatctgcatagtgtgacagatgggggatgcatttagaatgaggatgttcctgaaaacaggagggactgcaccaagcagtaaactccttgtccctacgtccctgcattgaagagctaggaatagttgcacgttaagggaccagagcacacaagcaaaaggaagttgccacagtcctgaacgagaaatcacgagcaggtttccttttagacctcatggtgggaaaggagaggagctgagagaggagaattgtcaaggccatcctgcaggaaacccttatacagcgtgaggaagcatctgcagagcaagaagggggcctgagagcccagggcaggttttgatcttacttcctcattgacttaaaacactgtggaaattgttgctgcctgcatatgagctgcagtaataatcagcctcatcctcagcctggagcccagagacggtcagggaggccgtgttgccagacttggagccagagaagcgatcagggacccctgagggccgcttactgacctcataaatcatgagtttgggggctttgcctgggtgctgttggtaccaggagacatagttataaccaccaacgtcactgctggttccagtgcaggagatggtgactgactgtccaggagacccggacgcggagggaggctgagtcagggcagactgggcccaggaccctggaaagggagaaacacagtctagtgagtcagtgctgggcccaggtgagcctgaggagcaggagaccaaggatcagcccagaggtccctgtggccccttccctggaggcatcacctgtgccctgagtgaggagggtgaggaggagcagagcccaggccatggtggtgacgtcctgagagcgctgcctcctgagaccccagcactgggcctgcccccagccctgtcttatcccctctgcctcagagaagggcgggacctccatgcaaatctgcatcctgagctcctcttctcaccccaccctcacttgggcctgggcttagagacttctgcttcccttgacagcggggctcagccaaggagactaaagtccctgattgtctattctgatgacaggaagttgatttctttgcacgtgatttgctcaggagagaaaaatctgctgaagcccctcacctgagtgagctcttggccctcagtgtctctgctgtgtggtgcctgtgtctctgtgaccctccaggcctgggcacacctcgaagtaacctctttctggcactcattgccaggttctctctattctcaggaaatggggctgcccaaccccactggaagcctctgctgggtggcgttggtccctggtctgcccagcggcagcctcgtcccatccccactcccatgctttgtcctgaagcatctgcaccatcaaatccctggagcacatcagccaccccaggcagtgcacccacatccacacgggcacatgtgggtgggaccctgtgaagggaacaaggagcaccaaccagggccacagtcctgagcctgagtccgctgctcccaatcctgcccctcccactcatgagcaggtgacttgtccttcccagcctctggttctcagcctgataaatggagaccacagagtccgttctgcatacaggtgatccatggggatatgagccagcagggaaaagggaaagtttgctaacaggcctttctatgtgcaccagagtgatgttatcttgaaaggtttattgaaagatttacttccattttactgtgatttatgtgtcaggtcacagagatgcacgtttccggctttcttactttcccccatctgagcacatcctcaggacaacctaaagctgacctctctcaacccttcgacactgaagacacacagacattcaataaagacatttttagtttttcctccaaatgcgtttaatctttcttcatctttccccattgcctatgatgcaactcttttaatgttccatattaaaataactattaagggattcaggttctatttaaatattgtaacatacactatcctgtcttcccatctagattgagctataaaaccatgacaagtgcatggagcagctatttgagcaccaggaaaggaaatggtacgcagcagtttgggatggccccagcagatgaaatacaacagagtcagtgtgagactgctggatttcctcactgtcccctggctgggactccagacagccccaaacctgaaggggcacaaacctgaaaacaaaaagaagtccagaaagccctcttgttcaggatcgaacttgggaaagaaaacttatttggctcaaagtgaaggctcagtcccctgcacaagcaggtggttcacacctgtgttctcatctctcttataccagcgcctctccctgggttcacactgatgtcctatggatggagacggggcttcctgcaccaggtcactccacagcccctgtaacctgaagccctgcagaccagccttgttcaatcacaatgtgatgtgagcctcatgggaatcccactgtctagtcatcatgttataaatacaaagagaagaagtcaatgagtttaaataatgtattttatttacctagcatatcaaaaagagtatcattttcatatataatctaagtacaattatttatgatatatatcatatactttgcatggctattgttattattttttgaagaatctttatgtggagattgtgtggctgatggagatgtgaatgggtttcctgttgacaagggtgggttgtggtggctttttaagtgtcaactttgataggctggaggaggggtggaaagaatgattttttacacaggatgtggagggtggaggtaggcagtgtccatacttaagctcaccctgtgggtgcatctgtggtccctgcatggggtaaggctgctc

SEQ ID NO: 1888632 - DNA, 4001 bp, Homo sapiens
tctctatcacttgtagtcacagggtgaccttgagcaagctagttaacccagctgggcctcaggtctatcatctgcaaaacaaggctgagttgttctgccagccccgagttattgcaaatgatttacacagaagctctttgtgagctggttacacagataatcttatattctccttcaaagcaggtcgttcccaaatgatttgcctaaatttggtatttcctaagcagattttccccctccaatggctaatggaaagcaatgtctttgtcatcggagatatggtcaaaaattgcaattcagatacatgacaattccttgctttcatacagcactttatggtcaatacaacgcttccaaattcttatttcatcttcgtgacatcactaaaatatggctagagtcatagccagtcctggaagaaatccccaaagtccccattcttaatctctcagtgcctgggtttccatgtcacccatgcattgtagaagacaatatggtagatataccagaggagaagtttgagtcgggctgacccggattctaataccagcaacagccacttgctatgtgacctggaataagacaatttctctgagcctcagtttcctcttcagtaaagtgggaacaatttctatgtctcaaagagttcttgtgaggacagatgatcatgtatcagcagtgtttggggcacagcaaaggcagcataacagctaaacatccattaccttacttaactcatcccattttacagatgagaaaactagggctgaggccgggccagtggctcatgcctgttatgccagtactttgggaggccgaggtgggtggatcacctgagatcagaagttcgagaccagcctggcaaacatggtgaaaccccatctttactaaaattacaataattagccgggcttggtagtgggcgcctgtaaccccagctactcgggaggctgaggcaggagaatcgcttgaacccggggggcggaggttgcagtgaaccaagatggcgccactgcactccagcctgggcaacagagcgagactccgtctccaaaaagataataataataaataaataaaaataaaaaaatttaaaaagaaaactaaggttgaaagggtctatcatttgccctaaggtctaactgtggtaaaggagtccaagtccgtgcatttaaacaagctggtacgacttggctgcaggctctggcctcccctctccatgataataaaagtgttccccagtacctcattttattattcaccaataagcgttccgagtcatgggaagtttccattcagaaattacccagtgagagaagactggggtgactggctcagagcaggaagactttctaaaaaaaccatcatcaccatcgttactgaaaggagactcaagggtcagtgtggccctcagcgcagacgtcgggggaccccggctgagggtcgggggcgaccaaagcgcggccactggtcctctgaggccccgcccctcgcccgggctgccccgccccgggcccccgcgccgctcgcgccgctcaccgtgcacctccttgcccgtgggcccgagccgccggtggggcctggcagcgcgcctcagccggccagcgggtatcttgcagcgcagctcgtcgcgcggctccgcatcctgctgccacaggacgtgcaagtagcgcagcggcgactgggccccgccggacgcccggcccgagaggcccgcgccgccgccgcccagcgcagacccgaagtcagcgaaggagaagaggccctcagcgtcagtcagcggctccggcgccaccgcgcactcgccctccgagctcgagtggcctgagcgcggctcgtcgtccgcgtccccggcggcggctgccatggcaacggctccgcgcgggcctggccgcctgagcctcgttcccgaccgaccaacggacctacttccctccgccctgagtcgtgctgtcagcgagctggcgggcgggcagggcccgcaaccacggcaaccgagcgggggcgggctcaggccgagacagagcggcgaaccaatgactacccttccagcttaaaccggtcccaaaaccaatcggaaagggagggcacagtacaagcaggataattggacagggtttccggcaacgtgactgacagacattgtaaccaattacaaacttgaagtgaccttggctttcgctgtacgtcgctaccggagccagtaaaacagcatttcagacgctttttttttgcgacggagtctcgctctgccgccaggctcgcgatctcggctcactgcaacctccgcctccttgaagcaattctcctgcctcagcctcccgagtagctgggactacaggcgcgcgccaccacgcccagctaatttttgtatttttagtagagacggggtttcaccatgttggccaggatggtctcgatctcttgatctcgagatgtgccggcctcggcctcccaaagtgctgggattacaggcgtgagccaccgcgcccggcctttttttttctttttcctctccatttcccagtctaatgagaaaacaagcagataccttagcaaatcagattaagatgatttgcaggcactcacaaaggaaaatgaagaagccacgccatccatgtagatatagatgttgtaaatcaatgaacgcaaaaaaaaaaaaaaaaaagaacttcccacaaatgcataatgtacgtgggaaagggaaaatgtgttgaaatttggagataccactacaaactgtgagtaatagtgtctaaatgcaatggatttcctttagtcagagttctctaggtaaccccgacgtagatgactgatctacaaagatttgtaatacaaagtgattacattagagcaatagtttagttcgacagccagtcactgagccaggtaactgctaggtcctggacacaggatcagacttggtgcccctgagatgctcacaatccaatgggagaagaccaggaaacaaataagtgttcctcaagcaacatttcatgggtgcacgttttcataaaacttctcacaatcccgtaccccacaagcacttctataaagtagacaagaaggaccatccctattttataggtgaggagttgaaaagcagagggaagagactcattcacagttgcccagctctcaccggaccaggtcttgtgtcctggcaaaagttctttccatatataaaccctcccactcaacccagttaaaatgtaatctttccgcacggtgggtcacgcctgtaatcccagcactttgggaggccaaaatgggcagatgacaaggtcgggagttcaagacaagcctggccaacatgatgaaacctcgtttctactaaaaatacaaaaattagctgggtgtggtggcgcacgcctgtaatcccagctattcaggacactgaggcaggagagtagcttgaacctgggaggcagaggttgcggtgagctgagatcgcaccatggcactccagcctgggtgacagagcgagactccatctcagaaagaaacaaaaacaaaaaaaaggcctggcgctgtggctcacgcctgtaatcccagcattttgggaggctgaggcaggcagatcacgaggtcaggagattgagaccattctggctaacatggtgaaaccccgtctctactaaaaatacaaaaaaattagcctggtgtggtggtgggcacctttagtcccagctactcaggaggctgaggcaggagaatggcgtgaacccaggaggcagagcttgcggtgagccgagatcgcaccactgcactccagtctgggcgacagagaaagactccatctcaaaaagaaaaaaaaaagtaatctttctcttacaattggaaaagcacttccagaattttcagtgtttgcagtcgccattgtgaggtttatcattgtactatatggaaaaaaatgctatgtttatttgtactctcctcgtctgccccataatggatacagtgctgagacaggatctctcactgtcactcaggctggagtg

SEQ ID NO: 1888633 - DNA, 4001 bp, Homo sapiens
aggagagtagcttgaacctgggaggcagaggttgcggtgagctgagatcgcaccatggcactccagcctgggtgacagagcgagactccatctcagaaagaaacaaaaacaaaaaaaaggcctggcgctgtggctcacgcctgtaatcccagcattttgggaggctgaggcaggcagatcacgaggtcaggagattgagaccattctggctaacatggtgaaaccccgtctctactaaaaatacaaaaaaattagcctggtgtggtggtgggcacctttagtcccagctactcaggaggctgaggcaggagaatggcgtgaacccaggaggcagagcttgcggtgagccgagatcgcaccactgcactccagtctgggcgacagagaaagactccatctcaaaaagaaaaaaaaaagtaatctttctcttacaattggaaaagcacttccagaattttcagtgtttgcagtcgccattgtgaggtttatcattgtactatatggaaaaaaatgctatgtttatttgtactctcctcgtctgccccataatggatacagtgctgagacaggatctctcactgtcactcaggctggagtgcagtggtgtgatcacagctcactgcactcaagctttcctcccacctcagcctcctgagtagctggggccacagatgtgtaccaccgtgcctggctaattatttttttgattttttgtagacatggtctcacttttttgttcaggctggtcttgaactcctcgcctcaagggatcctcctgcctccacatcccaaaatgctgagattacaggagtgagccacagtgcctgggccccaatttttttttaagatggggtctcactatattgcccaggctgatcttgagctcctgagctcaagtgatcctcccaccttggcctcccaaagtgctggcatgagccaccacatccagccccatgaaaatcttctgacttcacaactccttctcaaatgtcatgaacattttgagaattgttgtcaaattggagcaacctgtatcaaattcctgtcatatatggactataagatttcaggtaatttcttttcttttttttttttttgagacggagtctcgctctgtcgcccaggctggagtgcagtggcaggatctcggctcactgcaagctccgcctcccgggttcacgccattctcctgcctcagcctcccaagtagctgggactacaggcgcccgccactacgcccggctaattttttgtatttttagtagagacggggtttcaccattttagccgggatggtctcgatctcctgacctcatgatccacccgcctcggcctcccaaagtgctgggattacaggcgtgagccaccgcgcccggccaatttcttttcttttttctttttttttttgaggcagttttgctcttgttgcccaggctggagtgcagtggtgcaatcttggctcaccacaacctccgcctcctaggttcaagtgattctcctgcctcagcctcccgagtagctgggactacaggcatatgccaccatgcccggctaattttatatttttagtagagacggggtttcactatgttggccaggctggtctcgaactcctgacctcaggtgatccatctgccttggcctcccaaagtgctgggattacaggtgtgaaccactgtgccaggcctcggagaagggttattatttaaactagaaactaaatgtctcccaaagttagctcggttcgagccaggaatgattaagggcagtctgaagattaaatggaagatgagggttggttagatcagatctctttcactgtcattattttctcactgttacaatttttgcaaaggtggtttcagcaataaaaatatttcacaaattttacaaaagcaaaggaccatgaggacattgttggggaccctccctgaaccaaggaagagactgtgactcttccttggttcagggaaggtcctgaaccaaatcgagggtcggtaaagcttaagctccattatttccaaatttgtgtcacctctggtgacagcacaaggaagaaacacaaaacaagaacgcagcatagggagttggggctgggcattgcaattctcaataggatgttgagtggatggcatcagagcagacacctgaaggtgccatgcagataccgatggggaagggaatgggagtgggggtgccactgcattcgattctagacttggataacagtgagtgcaaaatcccagaggtggagcgtgcctcagtgggaaaagcaaggagggcggcgtgacaaagggacccagagagtcctggtcacacagcaaatcagtggcggagtagggactggaactcggatttccactaggtgttgtgtatgggcagatggctaaactaaggcctctccttgactcatacaccggtttttattggtttgctttataaccccatctctaccttgagggtttcccctggcctcgaacccggtgtactcaagagctgcccatgtcccaggcttcgcgacacagctggcctcatctttgcctgctccaactttaatgtccaaagttgggtggctcctgttctccattccctcttactgcatgggaccaaatctcaatttttttttttctttttttttttagacggagtcttgctctgtcgcccaggctggagtgcagtggcgcgatctcggctcactacagcctctgcctctcaggttccaccgattctcctgcttcagcctcctgagtagctgggattacaggcggacgctaccactcccggctaatttttgtatttttaatagagacggggtttcgccatttcggccaggctggtctcgaactcctgatctcagatcatccacccgcctcggcctcccaaagtgtagggattacaggcgtgagccatcgcgcccggccaaatctcaatttttatccccagtaagtttagtcttgtgaagtccgaacgtttgaataatttactcgctgcaggcaaaccgcctacaactaaatccatcaggcccccgtatccgaatcttccttcacgcgagaagccggccatcttttgtgtagcattctttctggttcctctaactttgcctctcctttacgccaaatacgtgtccttatatctgaatctacaccactattatagattcaccttctttgagaagtccctatttgaagagaggaaaattcaggctacttgtaaccctcttattctttttagacggagttttccctcttgttgcccaggctagagtgcaatggcgcgatctcggctcaccgcaacctccgcctcccgggttcaagcgactctcctgcctcagcctcccgagtagctggaattacaggcatgcgccaccactcccggctaattttgtatttttagtagagacggggtttctccatattggtcaggctggtctcaaacccccggcctcagcctcaggtgatccgcccgcctcggcctcccaaactggtggggttacaggtgtgagccacggaacgcggctcctcttccttctggatatggctgtctcagatggccagaggcctcggaaaggcttccggtttcccggcaggcccgagtggggctgaacttccggcctcaggacgcaggcgcgggccgctcatttcgctctttccggcggtgctcgcaagcgaggcagccatgtcttatcccgctgatgattatgagtctgaggtaaggtggccgtaagggcgcggtgggctccacgacggggtgatctctgggaccactggatgtgggtcccggcgcgaggcagcttccgggtcgcggccagctccggccgacctcccgcccggccctcaggctgctcccacagttcccggtccctagacaaccctggctctgcccgcccacttcgcgtgttcgattggcttgtccttcccctttctaagaccggagactaaggcctgttagacgtttctgtgtttctgcacctgagtttttttggtctaggctccgtctggtca

SEQ ID NO: 1888634 - DNA, 4001 bp, Homo sapiens
gaagggaatgcccttcacccggttagatggggctctgcagaggctgtggggggaaaaggggggcgctaaggtcagccgataggctaatcaggggctcctgtgggagctgggggcttggtagcaggcctagcccccacccaggcccctgcagacactcactccacaaagttgcccatggctgcccgggggttgcatgagacgtacagcagccgcctgaggttcttagctctccggatggccaggatcaccttggaatctgaggaggcaaacaccagctgggtccccacagccagagagtgcataacatggtgagccaccccatgtgtcctcgttcccgtgccacctccttaagcaaaagccactcacgcaagccagcacggggtgggtccaggatggccacgaggtgctgggaggccagtctgctcaccagggtgggcaccaggtcctcggccctcccgcagtggaactccacattactcaactctgaagagatggcaccgtggcctgtcagagggccacatgccctcccagcagggccagccctggggaacccctagccaaagagcttgctcacttgctctacctgtcgggcagcccccaagccctggctgtggctgaggcttgcagcaggggtggcggctgcccccatccccacccccacccacggccttgccactcaccattgtcctgggcgttcacccgggcgtcctccacagcctctgggcatagctcgaccccaatgaccctctttaccttctgaaacaggaaagcgtggtgtcgccccacccagggaggggagtacatggggccctgtgggcagcaaagaggagctgggcctggggcatgatggagtcagctgtggtgactttgagctggggtcaatgggggtcttggggtggggagagggtgccctcagcagggcaggagggctcacccgggccagggccaggccaatggtgccggtgccacagcacacgtccagcaccatgctccccgcatccaattgggcccagtcctggatgactgtgtagagcacctcggctgcgggtgtgttcacctgggggcaggcggtgcccaggatgtcagtggctcctctcctgtggtgccactggtgccccgacgcccacattcctggtccctccatcctgccgggacctccggcgcccactccccaccttggtgcccaacgtcttccctgaccccaccttggaccagccttgctgatgccctcatccagcccctggctttaaaagccaagcccgtgctaagcacagcctcctccttgccccacttggttgagggctcatgaggccccgcaggccaataggctgtaccttccctgccccagcaagggggctttgcctcccacaactcacaccggggcccctggaatcacccaactgcagctcccacccccacacctagccctccaggaggtcctgccaggcctgtctccaaaaacggccgctccaggtccccacagccttcctgcagcagtgagcaaacagtgaaacagtatttcccagcccagaggccaccatggcctccctcctgccgagcccagagcagtgccctgtggtaatgcactgagggccactcctcatcctccctgtgacaagggccactgccgtgtgtacctctaggttatcccgagtcaaatcagtgatgaccaacctctttcttacttcaccctcccctgtggctcacctgcctggatactcccccaaatctcaccgcctgagcccactgttcccatcacgtcctgatggtgcgtcaggcctccctcaacatgtccccatgcccaccagggactcatggctacctggaagaaggcgtgtggagagatccggaaggtcagccctagcaggtcctcgtggatgcaccggtccccagccacatgctccaggggcaggccctcctggctaggagtctttctgtgggcgaaggtgcaggtccttcagtgtcacagtccctgcagggacctgccccgccccactcgggctccttaccgctgtccctcctccacgaagtagaggcaggtcactccactggccctgcctggccctgctgtgaagtgctgcgctagggaggtcttcagctctgccagctcctcagggctcagcttctggagtaagtggtgaaaagttcccatcaggctgtgctgaggcccacctaggctaggcaccctcccccagcagggcccccgttgagacctgggggtggaagtaggcaatggccatggcctggtggcggcggctggtgcgcacagtcagctgcttccagtggcctgtgtacgtctctgggtcgtatgccgagtatggagtggacctgtgggaatcacgagctggcccaagtgcccacaactgggcaagcagtccccctgctctctcctctggccacaccttccttcatctggctgaaatggcaggcactccagaattcccggggcaggatcaccaccctctgctcccacaccgcataggacttcccgggagccccgtcacaggtcctcaccggatgaactcctggaaggccttcaccacctgcttggtggcttcggggatgtgcacggtgtcaaacggggctgccacagcacacgtcccgcccttgtacttgccgagccgacagcccacggtgttatcctccccatccaccccgacgccaaccagaaactcacacttattacgatactcagtctgcagggagagagagctgcaccttaccctggctgcccagcgcttgggcctggaaaccctgatttccccacaggggctggcagtcaaacaagaggaacagctgacaactatgtgatgttaccagaagaaaacacaaagcagggagatcaacaggaagggtgagcaaaagcaaagtttttcaaaacccaggataggggtttgtggccaccgaagtctagtctgacctgctggggtgatggcctgaccccctccagcgggcagcaggccttgttgtgcttgtgcctctgctcgagcagccagggcagcaaggcacggttggtgctcccgatttccctgtaagaggagcagatcggtggttggactccacctactgcccccgacccatgccaggccactccccaaatgtccaggctcctgacccctcctttgggatgtcattgtgcccactgtgacgtgggtgtcttgctggctagctcccaaaggggccgccagatcctgtgctgggcctcccaactggtgcatggacaggctgaggaagcacaggccgggcagagccctggccaagaggggcgtcttgcgcccacactcacttggcaagtttctgcagcacctgctcgcactccagctgcttccgctcaagctgctcagcatagggcactgtccatagaggggtcaccacgtcggccactcgtgttactggtggctcactctcaccctcctgtcgcctcctcctggccatggggtcggccttgggccgggccaggcgcacactgagtgggcggcctttccagagggcaccatgcaaaacgcgcagggccttgtccctctctgcagcgctgcggaatgtcacaaaggcgcagggtggttgcccaaagagtttggttttgtggggctgcagaccaaagcggcccaggaagcgccggacgtcgctgaagctggcgtggcgaggcacgttctgcagctccagtttaaagatctcagaggtaaacaagtcatccctgatgtagctgtagagcccgggctgaggccccggccctgtagccgccccagcgccctctttctccacctcctccagggctgccggggctgcagggggcaccgagacggtagggcagctcagggcactgctgctctcctggccacagctctccatgggcttcgggccctgtgtggggacagatggggtgctagggtgaggactaggccctgggggcctggccccccaagcttccttatgggacacccagacctccgtcggtgcactctgcactcagccctgcccctcccccagtctaccctcccgac

SEQ ID NO: 1888635 - DNA, 4001 bp, Homo sapiens
taaggccaaggtttctccactccaaaggcataccatttccccaaaggcagctctagaaagaaattcagcggctgtaagccacctatgggcagagaattcccatttactttccagtgggaagccagaggtcagcagagcacattgatgtgtgcaagatcaccagtgtgtacagggcagagcaggacttaggaccccagagtctcagttcctggggcagggtgagccagggctggcaatgcacttacatgccactccgcacccacacagatgacaccttctcctggtagccatgggcgtggaagctgggtacatcgtcatctatgatttccatcttcttcccggtgaagttggggttttcatagaggatgatcttgtgctcttggctgtcctattggcagaggatggggggaagtgagtatgggtgagggggcccagggttggccttcccaccccatgctcatgccccagagttgggatcagcatgtcccacacatcactctcttcccaatgcacccactacgtgtctatgaccactgctgttggatcacagccgtttgttaagtttctactgggccattttcatgtaacagacactctgcaacactttggggaatgtttgattctgaaatgtcattttttcctcctcaagtttctcttttataaatggtggctacgatctacctacccacccacatatgaacacccacacatacacacacacgcacacccacacaagcgtgcacacatacaggcacacacgcacacttgcacacacacacgcgcgcgcacacgtgcacacccacacatgtacacacacatgcacacccacacatgtgtgcacacacgtgcacacttgcacacacacacgtgcacacacatgcacacccacacatgtacacacacacatgcacaggctaactgtgcctctaataggcacctgagatactttgatttttcttcatttctacatctcttcccatcctcctgtccctatgacattttccttagttatctcatctcatcctttacacataaaacccttatccctcagacataaaatcctcttatgccatttagcagatgaggaaagtgcggcacagagaggtcaaatgacgtgctcaaggccacacagctgggagcagcacagccaacttgggaacccaggtctgtggggtgcaaagtccagtgttctccaaccttccagtaggtcctgggaggagctagactgggcttggagggtttgagagtgtaactgagcagtgatgggccctgtccccttcctgagagttgacactctcacacactagtaagaatcaggatctcagaagcactgaaaactcacactggcacgagtcttgaagaagagctaaaccaccttctcctccagccccaaactcataatttcttgtagtatttctgatggctattggttattgagcaatgacgggagttgcccaacccttgggcgcggggggcgggcaccaaccacctaaaatagaatgtgaatagtgccctctggagcatttcatagtcttgtgattggagccttctggagttgcagtgtgacaaccctcaagctaataagcacattggaacctcaggacagtagataccaatatgcccattttacagatgaagaaactgaggctcagggaagtaaaatgacttttgcaaggtcacccagtgaggaggttcctcaccaatcagaaggggcacaatgctagaggggcgggctccttcctggtcccaggacctcctgctccaaggtggcagagagagaaagtaggatgatggcagggggctcaccactttgatgggcctcaggctgctgagtctgtcctctggctgctggtccaccagtcccagtgggcgtactcgcccttctcaaacacaaactgctcgcccttgcagttggcctgttcatagctcacccagctgccatggagtcagagagaaagggggcaggtcagttccactccaagcttcctatggcagaatcctggctactgatgttgacccctagggttcactcttgcccagcccggcaagatgtaatagccccacccaaaccttagcacagcaaatccaagtgcaaaatcccctcagttatctagaactcagtgctatgctgcctttacccacctggaacacagttaagaaataagaaggcagtctaaataacggcccagcaacaaataccaatatatagacgccatgcactaaagccaatagtatgctggtaagttaatagccaactctcaaaaaacaaaacgaaaattaacactcttgatttgcagcgtttgccaatttccatggtgtaaatgctcccactgtggcagatttcaagctatcaatacgacacggctgcaagtgaagttaggaagagagatgcacagtcagccttcaccactgagaactgactctagaacatctctgggcccaaagcccctctctttggatctgtttcttctcttgttcctgttgttagactctgcccaaactctgtttttgtagatccacattagaagaaaaatagtacattaaagaggaagggatggctttcaggtcgggcatggctaatagaagaaagcagaaaatagaagaaagaaggcacaaatctcaaaatgattagcattctgggaccaaccagtgcagaggcgaacatttcagcaatgtgcaataatggcttttcagaggaatgatctaagtcattaacaaaagaggagatcatgtttattatcctcttttggaaaagtagtcttgatccagcaattctacttcaggcaatggttccttacaaaacagttgtcaaggggctgggcactgtggcttatgcctataatcccagcactctgggaagctgaggtgggcagatcacctgagatcaggagttcgagaccagtgaaactctatctctactaaaaatacaaaaaattggtcaggcatggtggctcatgcctttaatcccagcactttgagaggccgaggcgggcaaatcacgaggtcaggacttcaagaccagcctggccaacatggtgaaaccccgtctctactaaaatacacaaaaattagctaggcatagtggcaggcacctgtaatcccagctactcaggaggctgaggcagaagaatcacttgaacctgggaggcggaggttgcagtgagccaagatcacgccactgcactccagtctgggcaacagagtgagacactgtctcaaaaaataaaaaataaaaataaagaaaaagaagacgttcaagtgaccaactgacatgaaaaaatgcactacctcactaatcatcagtgaaatgcaactcacaaacacaatgagataccatctcacgctggtcagaatggccatttttccaaaagcaaaacaacatgctggcgaggcaggaaaggaaagggaacgctcctaccttggggaacgtgaaaacaggttcacactgtggaaagcagtgtagagattctcaaagaacttaaaacagaactaccatcagacccagcaattccactacttagtatctacccaaaagacaataaatccttctatcaaaaagacacatgctctcgtgcattcatggtcgtgccattcacaagaacaaagatgtggaagcatcctagatgaccagcaacagtggatttgattttttaatgtggcgcatacacaccaaaaaatactacgcagccataagtaaaacacacaatcatgtcctaagcagcatggatagacctggggattattatgtttagcaaaccaaggcaagaacagaaaaccaaatactgcatgttctcacttatgagtgggagctaaacagtgaatacactcgaacataaagatggaaacaatagacactggggactatcagatggaaaaaaggaggcagaaagggagtgtgggcggaagaaccacctgacgggcactttgctcactgcctgggtgacggggtcagtggccacaagcctcagtgtcatcaaaggttcacatgtaactaagctgca

SEQ ID NO: 1888636 - DNA, 4001 bp, Homo sapiens
cataaacacaacttcacagtttgggtaatactctggagagagtaacaataaagagaacacaaatacgttgaacttaaagcccacatggccaaatttaaaagcaaactggctataaaacaaacccactgcagcttctgattaacgaaactgaaatgttttgaaatgcttaactattagcccaatcctttataataagaggaacacactgaattttagctatcttttcaaaaagcgtgaaaagggaaggttagatttgtaaagaagatactgacataaaataaaagctattattttttaaaagaaaggcctacttcgatctcactctggctttacttcttgggccttatctaacttgtggctttgaaatctctttgaaaagaactccacagaacaatgcgttcacacattcaaatttcaccttggtacagctgctttcaatttccagcttagaccacatctgaacaaagagcctggtgcctctgcctgtgccataggcactgaggggggtccctccttggggaaagctagcattccaacagtaatggtgttacagctcaggacagagataccttactagggttctgtatttactgcttcaattttcaccccaggttttctaaggagaggcccttgaggagtttgctacaaggccagtggtgagcataccctctgtcaaaggcaacaaaaagcttttagacggctgagaaattgagcccactaaagcagcagcttccaaacatgaacaggtcttattatggggaagatctgctttccttatcacctacaagttggcacaaggaaggaagattatgtgacttcactgcacctcctcctccatttctcctcagaaaagaacatacagtgttaagaatccaaagagaagctctggcactctcacgacaggatggatgaggaatatggcttgccacttatttcaaattgggaactaagtctcagttgggcaagggctacactcacaaggagaaagtatggggaacaaagcaccatacacctcacctgggcattcgcagcctcctcctttggctcggtttgccacagcagctgcataggagcgtgcatccaagatcaaaagcttctgcggttggatggctaaactctctgctcctgaagcatttgacagagaagaatctagggacacagagggagagggcatactaaatgagcctgtctctcccagaactgtgcagaattagacccacaagcacatcttatggcacaaaaaaggctcaataaaatgaaatcccctaaccaaaacccttgatacataggatttttctctttttttctatgtggccttcttatgaaagatgagaaggatttattctccaaaactgactcccagagtacacatggggttcacacagcccagtctcttatacttcatttctgtatctgttgtcctttcatgaagcctggcatttcctgccatggtctgcagatactgcaagtcctctattacataaacactccatttttgtcacaatggcaagaaagacaacaaacacactaatatcttgattcaggtttgaaacaaagggtcttctgattctctgccaagacccatgactcctcaatcaatcccatcaagtgaagctctgcacattcacttctataaaagtaaatctatgtcttgtaaggaagaggccatttcaagaaaaggttcttagatgctataaaaatcattgccatgggtccagggagcaccttaccgaactccacgtcagaaaggtctcccccattgggaaagtctcgagaagtgttcctagttgacagcttgctgccactcgatcgggagtcagaggcacaagctttggctactgactgtaccagatgctcatcatctgcatttcgccagccccaccagctaacctctggctgtccacagcgggcaatgacagctccattgctctggtgcctgtgtgaggaacaagagacaacaactgtacccattcagatgctctctgtactcacacaaaatagattttaagtgccttaatgaacagtctaattctaggtaagtgttgggtcagcttcaagtcctctcagtattaaagagggtagaaatcttacacaaccaacaagaacaaacaacaaaacctgtgtgtctttctcaattaccataacatcacggagatccctgtaaagttacccaaaaaaatgactaacaggggtcaggcatggaggctcactctgcaatcccagcactttgagaggctgaggcaggaggatcacttgagcccaggagttcaagaccagcctgagcaacatagcaagaccccatctttacaaaaaagtttttacaaattagccaggcatggtagcacatgcctgtagtcgcagctactcaggaggctgaggtggaaggatcccttgaacccagaaggctgaagttgcagaaagctatgattgtgccactgcactccagcactccagcttgggtgacagagcaagaccccatttccaaaaaacaaaaaagaattaatgtgtactcttagtgaaaataaatcaatattcgtaacttaaatctataggtactacactaattctgctacccaatagtgaaatctgctaccttcttaatgctgaaccaagagcccgcctctgggaataaaacatttacctggcccacagtgaactgctttacaaaatctcctgagatttcatgagtcacagactgctcttataataggcagatagctcaatgagccagctacccttcctagggctcttaagaaagagaagaagagcatcaacctcagaaaaccatactctgacatatccttttccaataagacagaccagaaatcacagtctactttaaggtgctattaaaacccagacttttcctagttaggcaattttaactgataaaaagttagaaaaattctattacttggcagtaaagaggaataaagttctgatacaggctaggacactgatgaacctcaaatatgttatgacaagtgaaagaagtcagtcacaaaaggcaacttattgtacgacaattaacatgaagtatccagaataggcgaatctataaagatggaagtagatttctgcatgtagtgactattataaactcgtagttacttaagggagcttgcctaattctaagttggggttacttaaaacgagtatgtttctatataaaactgaagcactctatgttttactagcaggggcttcatccattggacatcttaattattcagggctagggtggctgggtgccctgtgaatgggttttttgggacgatgaaaatgtactgtaatttgtttttactcctaaaactcacaaataagttaaatttggcactaatcaaattccactgaaatcaccagtttgcttgtagtttttaaagcctccctccctgggagacaagtagctgtaagtacttgtgtattgccaacatgctcaactggctcacgtgctgaatggggccaaaatagaaataaaacctcaatgattctttataaaatgtctcctagcaaataacaggcaaccactgagctgaatgactccaaaccctgcacaagaggctggttgggcctttcctgaacatcctcctcttcttcaatgcttcccagcagtgcccaagaggagcagtagatggcgctcttcagcctggatcttgggttttaggggacactgcattatagtagctattagatttcaactggactattgcaataaacaattatgttttctgcagtcttctaaaatgcttcagactacatgaaagataattcaaacactacagttaaaaatcactaaaggaatgcatttctatcactaacagaaccaggcaaagtataaaaattatgatgtccaacagataaagccctccctactaaaacacagaatgcttcaattttatataggaacagaattgtcttaagtaacctcaacttagatttaggcaagctcccttaagtaactaggagtttagaataatcaccacatgcacaaaggaaaaagc

SEQ ID NO: 1888637 - DNA, 4001 bp, Homo sapiens
ctttagaggtggaacagagaatcctgttcaaaccccacaagctcccccaaccacccaacctgtggaagggatgagggccccatcaggagggagggaaacagccccaggctcaggagacagagagctggttgtggcccagatttgggcaggactgcaggggggccagagttttttccaggacagctggggttgggcggggccaggggcacgtacttggtctcgttgtccagctgctcctccagctgtgcaatcttggcctcgagggcggtgatggaggccttgtacttggacttgacagtgccctccatctcctgcagcttgaccttaagctccttgttctggcgttccagctgctgccgagcattctcgttcttctgggcgtggctgcgctccaggttcaggtcggtgttgatctggtcgatctgcagaagaagggccagtgaccttggggagggctggggccctggctggagggcatgagcagggccagaggaaggtggcagcaggatcccaccaaacccttggggtccagagtcttgggtctcccagaaaagggaagattagaaacttctgaacacccaacacagaagccagagggggacctttcaggtccaggtgcctggacattttcccctaagcgcctggggagcagctggcacttggcctgtgcttctgccggctgggtccaaggccagctctgccgtggtggctccagccagagcccagagtgggagaagtcctggcacccacctgcaggttggccttcttcagccggtcgttgatcagctccgtgttgccctgctcctcctccagctcctcctccagctgggcgatgcgggcctccagacgccgcttctcctctaacgccagggctctgcggggtgggcgggagaagtgaggggcctaccctggggacacacctggtcccccccaactctgccccctcactcagctcaccctttgccgctgctgttggcgatctcgtcagccagctcatcccgctcctgctgggcctggcgcttggcacgctccgcggctgccagttcctgccacaaagacccagagtgtgacctaaaggcagccacagccccacaagaccatccttcccagccccaggcaccctcccctcaagcccttccccaggcccacctccccacgaagcccttcctccagaaaccctctagctcacagggctggtgcccccctgaagatatagcttaaacaccatatgtttataaaactcttacatttaagtgctaggaatcaagccaggtgccagggtatggcgataagtaagaagtgtcctggcctaaccagggagaccacgtggacagagtcactcagggcggcccctccctgttctgggtaagccagagcttggagtcagctctggaggccacaggcagatggctacaccctggacgcactcgcagccggcacatcacgctgcagggcaccctccagacctgggaaacacttcaggacgggctcaggtgcgacgggcagggcggccgaggggacgctcagaccccttctcaccaggcagcattcacagcaggaggtggtggtggccacaaagcctcatctcatgtgagggatgccagtttcacacacacacacactctgatcatacgagggagccccgctatgaaacggaaccctggagggaatccttatgtaacctgagagccatccccagccaattcctggagcccagtaggactccagccctgtcctcagctgaaagccccacgctgccacctgctggccgcagggcagcggtgccgctctccattgcagccccacccacctcctgcaactggatcatctcggcctccatgctcttcagcttcttctcgttctctttggcctgggccaggatctcctcacgagaggcgcgggtgtcatccagctcgcgcatgcagtccttcatctgggcctggggtggggacagaggcttggcaccccacccagctccttggccctccaccccaaccctcatgggtcacctcgccaacagggctcatggctggtgctccactcaatgctgtatttaaccaactaaccgtggtgacagggcaaaaaggcaactaaagacaatcatctgtgtatcccaccccgtaatgcacactttgacagtgttcgtcaccgtggacgtgagcccaagctgagcttcattttctactttctgtcccctcctgtgggccggaagccagtgcccatggtgccacccctaatgcgcacctgccactcaaaaccagtgcccagcctgccggtccatccccaccacaggcaggaaacacctttccttttgttattctcctgttacttcttttaacactaaagacctttgtcaaatagcctttttttccttttgcagataaatccgaaattgagattccccaaatcaaagagagtgactggctgtgtgcagcccgaccacaccagtaaaaaaatgccaccagcaatcagagcatctatgcccacaaccttgaccacaatgaagttttaaagtttttgtgggttttttttttacacttaacattttttttttggccgggcgcagtggctcatgcttgtaatcccagcactttgggaggccgaggcgggtggatcacaaggtcaggagattgagaccatcctggctaacatggtgaaaccccgtctctactaaaaatacaaaaattagccgggcgtggcggcgtgcgcctgtagtcccagctgctggggaggctgaggcaggagaatggcgtgaacccgggaggcggagcttgcagcaagccgagatcatgccactgcactccagcctgagcgacagagcgagactccgtctcaaacaaacaaacaaaaaaaaatttgttaaactaaggttattcttgttacatgatatggcgtatcagagctgtttttacgtgttaattattctttaattattagtgaggtgaagatttccaagtatgtgtcccacactccgggctgcttcttggaaccatcgccccagagcccagaaggctgaagggtgtcaggacccgggtgattctggaagtctgcattaagtgagaccttcttgaactccacccatgtctaggcttgtacttgtttgcttctgtgttttatgtacccagtcatacaccgttttgcaagtttgctgttggactatcatgtttccactcacctctgagcctctgagtctctgtcagtgagatggggctggaagcacccaggaccttcccaggaggtgccaccctgccaggttcccgccctgggccgagccctggcaccttcatatgtagttggctcagtcgggtgccgcccaccctcacctgggccccgcccacccttacctgcagcttccgcagctgtttgatggcttcgtcccggttcttgttggccgagtcgatgtgcgcctccaggtccttcaggtccatctccagcttcttccgggcggccactgccatcgagcgctgcttcctctcgtcctccagctctgcctccatctcccgcacctgggggaaggaacatcaacaacttgggaagctggacccactgggagaccctgccctagctctgaactcaggagcctcaggccagttctgcaggatccatggggcctcgggaaaccagtggggattactgaccataagaactctaagaaagtgagtcactgaaccccgagacaggaggctagaaagaaggaatatgggaggggaggcgtggtcaaggggccctaacacaatccaggtggaaggagagaacagaagcctgcgtgaagccaaggcagccttgggcacccatggggtagcaggaggccatgcacacctgtctgaccagctgcttcttcttctcctcgctctgctcgtcccggccctgcaggtcccgctcgaactgggccttcatggcctgcaggttgacctccaaccgcagcttggcatcttcggtggcctgcagctcgtcctccagctcttccagctgcgtcttcatctcctccacctgctgctcta

SEQ ID NO: 1888638 - DNA, 4001 bp, Homo sapiens
gaagatgacactatcacctccaagaccccacatctcatgagagtgagtgggaaatcactgaggatgtggaaggaggggaaatgaccccaaggaagtcagaagacctgggttgtgtgcatcccttagaccaaaggttccaagtgtgcacaggcctcaggaaggcaggagctccacttgttaaaaaagggtcaggtgtttctggaaatgactcaagagactatgcccaaaccctaagaaaacagaaccaatagtggtgaccgggacattttattcaagagaagtcaaaagccaggcccagacagctgaatagcaggggactccccaaaagaggagaatgggaagaggaagacaggaggaaaaacaccccttctgtcccatttcccttgcactctatcccctaagggttaacccccaattcccctcctccccagcccaaaccccatctccctttaatcacatctgatactgagcagcccagcagggaacaaagagaccatttagagaaatggggccgagaaagtgacccccgcactctggggcggctgcctggatgccagcacaaaggcggcatttcagagctgaaatttcagcacccaacttgattaaaggattccacaggcttggaggagggtggatgggagtgtgaagtccactgctccctgaattaacccttctccagggcagcggacacccctcccaccaatgcagatcctcaccattcactccccacatcccatcccagggccaggctgcacctaggcctggaggccctgcctcctgcagaggttagggaagcccagctcctcctctttgaaggggagctggcagtggaatggaggttaaggctggcatattcagggagccagtttaccctctatccctgttcatgtcaatatacaccctccccctgaccccctctaggagggaggagccagtgtgactggtcttacctcaggttgggtaagcagggtggagaaaggaagaggacccattagaacctcaggcagaggaagggggaactccagctctgacttaatgtaacacctggaacccaggagcaccaccaccccagcaccatgtccccaaggcctcaggggatcaccagccccaaataggagggaaaggatatcttatagaggctaggaagaaggcatgggtgtggcacaccaaagaggtgggccacagaggacagcgtgtgggcagagtcctgaggaggagtggggacagagccatgggggcaggggtaggcaggtgctcggtccttgctccagctgctgacttgcccagcagggctctgcctggggagggtgggagatcagcacacccccacgcttcctgctggggcactgctcctgaaaggggatccgagcccacgataagaggctcgaagcaggtccttaggaaacaatgggtggcttgatgagacctgctctgtgatactcctgagaagggagaagcccctgcagccagtccccactggaaaggaaattgggggtttccgtggcaaccagctccctgggcacaaagacttgtctgtctgcttggaaggcagctgaggtgtctcccctgcagcagcctttgctctggggaacagggagatggagggaaggatgtgggggatccaaaggggctaagggcccctggtgcttcttaaggagctgacagtcacagggccactggaataggtgcatgctccacgcagcatggcggtaacggggaagcaacaggtggtgacattgcagataagcagaggggaagggggttggaaagttgaatattttattatttacacatataaagtgagaatgaaaattgggcatggggcaagggcaggaagatgactccagctcagtcggtgatgatgagctcgtccaccccccagtcttcatagctcccatctggcaggtaacggcgaatgatgatggggatctttcgggccctgtggcaggggagaagtcacaagtacatgagggctggtgaccccagctctgccgcagaaggaacagattgtgtgcaaaacacaagcaaagagaagtcttaggagcagcctcttggggctgatgagtgtactttgtaagaaagcaattacaagaaaaagaaagtttttatatcagacaagagggggaagaatgacagaatattggtaaggcctcctgcagcaggaacagggaaattccaacagccagaagacgtccatgtctcatcagtgccctcccactttccctgcctcctcttctctcttcctcctacttcctggtgagctgttcctaaggatctgtaggaataagcatcaacttctccagccaggcaagtgggagcaaagggtgcaacagagagcccaacagatgcctcccagagatttggagaagtgaaccatgatttgagtgacttacttgagttccttcatggcaatgagcagaggatctgtctccccctccagctccaccatcacaggggcacacatcctgtagggatagggacaggtgttagggagactacaaacccagggagaagggcccaacaggcagtgagggtggaacggcatcctggtccccacctagaaacgtcatcttctaggtaggcaggcacagtagggagtggtgtgtaggggcactgccagagatcttccctggcagaggcctatcacagactccggagtccagcggccacagcagaatgtcctggtggaaagggagacatgtgcaaaggcacaccattctaactgctccaaccccagagccttgcctcagtgcccagtgcacctcatttcaatttctattttctctctctactttttggagacaaggtttcactcccattgcccagactggagtgcaatggggagatcgtggctcactgcaacctccacctcccaggctcaagcaattctcctgcttgggactacaggcatacaccaccagctatgctaatttttttattttttgtatagatgggtgaaattaacatttcgccatgttgcccaggctggtctcgaactcctgggctcaagcaatccgcctgcctcagccttccagattgctgggatgaaaggcatgagccaccatgcccggcatcatttccattctctatagacacaacacctcagtagaggccctgcccttcctgcccagccctccccacccttcacctgaggccagcagtcagggggctcacctgcttacaacactgtcatgactccccttggctatcaggccagagtgcagtctggtccctgtttgccttcctagcacagtcccgtgctactttcctgtatttactccacattccagccataccaaactatttctggttccctagatgcgccatgttgtttcccttttgtgtgctcttacaagctcttcctctccctaaaaacctgcgagaggttcagatgtctccaccctggaaatcgtgtgctgactcttcagtacctggactcattttgcatatacttttcttggcaccaatctcattgaactgtaactacttgtttggaaactttccacattagaccatgagctcctagtggcccagaaccacatgtgattcaccacggaggcccagcccccagcataacacttggcccacagtggggactctaccaccaagcaaagggatgccaattctaggcccatctcctctaggaagccacccctgatgattccagctcaggttcacaccaacaaatccagaattaacaggagagcatgctaaaaaatacaggttcctgggtccttccccagacccccggaatagaatctctagtgaagcggcctgagagcctgcatttgcaaaactgcccagatgattctgataatcagctagtctgagagctaccagcttactaattttattactaaatatttcgatttatattactcccaaaagcctgaaaatttcccaagggcagagatgaagtatttaactttccctatatcctctcttaataagtatttaaactttcccaaaatataaagctttaaagaatgtggcaaaatacc

SEQ ID NO: 1888639 - DNA, 4001 bp, Homo sapiens
aacatggggcaccccacagcccagcacagggtgggcagttgagcagaaggcccctggggtgggggtgggggagcagtctcactgggaccctccacccaggcctcctctacccaccaggaacattgtggccaggcccattgacacacccgaacctggttcataccccactctctcaccacacacccgccaggccagggtctaactataactgactgaacaccccgataccctccaccaaaccccaccctcatgtcctctgcacgtccttggcactgcccggaacacactcccaccccatgtgcctggcaaactcctccctgtccttcaaaacccccagccaccctctgaggcagcatggactccctcccccacccccccgcacgtctctgtttccaccaagccaggatgcaagtatggccatttccactggcaaggcctccctgggtgggggctgcagagatcctcctgggaccaccgaggaatgacctcctgactagtgtgggttgctgcatcctcagggcctggctccctgcctccacctcccagaggcaccccaggaggcagctgctcttctccctgggtgcagcacggggtagtgcggtgggccacaagccacatgaagtagcctgtggcactggggaggctggcacccagctgggcctcccccgtttcccccgtgggcaaaactaccagccccacgggaaacttgtcaggtcacccagcagccaaagcccttcctcagagcccctctcttcccccaggatgcccagccccataaatacaggattatccactatgtacaaaaacattttaattgaaatacctgtataaaaaaatatgatctccagacatctcacttttgaactgaaagaacccccatctgcgatgcctgcacacaccgcattcacacaaacacaggtactgaataaattaaacgctcaggctctggccccaccccagctttcagagcccacaagcagactgtacaaagtcaataatttaaaacccaaaccctgggcacagtgcctggaagtgtcagggtcacccactccccttaagttagccactatacatgttcatcttctgacaggcggggccgggacagacgccaggcacaggaatcagggcctggggtccctggaccacagccaccccctcccctgcctccccactgtcccctggggcttgggagaggcagactgctcagaggaaataacctcaacaaataaattaaacaataaatagccccggtgggccgagggcacctccagggggtcacaccataaataacagagttggcggcgggtacggctcgcgtgggcgggcgggcgcggaggccaggacttgcattgtgtgtgcaggacgtgcccagacgcacaccgcaggactgagggcgggaggtgggcttgggaccctgcgccggcggaaagagctccgggtgggcaggcagatgggaaggccgcctccggacacagcagcacagaggggcgtctggggttcaagtatccacccagggcaggcgggacctcgaccggagcgtctttggacagacagagcttgagaaaaccaagtcccgcgggaccagcgttcaaaaggcactcaaagcgaaggtcaccaggggtcagaggtcactgcttccgcaggaggagacggcccacgcaggagaaagtcagggtctgggggcgtcccaggtctggccaaggcaggtggtcccctagctcccagtcaggtgcagctcctcacaagctctcgctgctggacgtggtgctggccacgtcatcagggtcgagggtgcacagccgcaggtcacagctctccgggacgcccccgtcagcccccagcatccagggatgggccgcaatctgatccagcgacggccgctctgagggccgcagggacaggcaccaccggatcagctgctggcactctgtgcggagcggagaggtcagggagggcccaagcagggcgaggcccccacccccgcctcgagccaccacgcacctggagagaccctcctccggaagagcaggcggcctcggaggatctcctcgtcctgctcgaaggggatgtccccacacaccatatcgtagagaagcacgcccagcgaccacacggtggccgagcgcccgtggtagcggtggtagcggatccactccggggggctgtacactcgggtgcctaaggggacacagggcttagcacgcccaccacagaggcagagccgctcaacagacggcgaggtccctgctggttaactccctggcctcagtaacaggaagcagagccaggcctcaaaatcctgctcgtcatcaccctggaaaaaccccggcaggcgatgggggggctgggggaggggccggccgtccccctccgccggccgcgggggaggagcaggtcacatgagtaagagctcggctttcacaacaaacagatgcgctgtgaggctacctgggtgggggggggacagcgcgggtcccttaccgcccggcgcgcctgcctgcgggaacggggggaggggagagagggagggaggagggaggggcgggcggggagccccggcttccccaagctccgcaatgcggggatttctgccgccgcgcccccgcgctccgcacgcacgcagctcccgcccccacgcaggggaggccccgccactccaaccgcgccgcgggggcctccaggctcccggcgcagacccagcccggctgcgccctgcgtcacgcacggagactcctccgctaccgcccccagccgggggtctctcgggccggaaggatgtcacgcgcctcccacaccggggcaagaggccccgtaccccccaacgcgatggaggaagcaatattgagcgcgcccctagcccccacccagcacgatcccgctcttgatccctcgctcagccctccccagggtagcgcgtgggcctctgctccccacgagagcagacccagggcgcgcggccgcccaacagtcatcagcccctccatgtgccgcccctgcaggcgttaacccgccggcaaggcccccggaacgttccctgccccgcgcccgcgctcaccgtcgaagtcggtgtagaccgtgtccttgagcagcgcacccgaaccgaagtcgatgagcttgagctctccggagcgcaggtccacaagcagattttcgtccttaatgtcgcggtgcacgaccccgcagctgtggcagtggcgcacggcggccagcacctgcgcgaagaagcggcgcgccagcggctcgtccagggcgccgcgctccgtgataaagtcgaagaggtcctgcgccggctcgggccgctccagcaccagcaggaagccgtcgggccgctcgaaccagtccagcaggcggatgacgccgcgcgcgccgcccgccgcgcccaccttgcgcagcagcaccacctccaggggcacggtcgcgccgccctgggggacacggcggtcagcaaaagccccgcgcccgccccccgccgccgccgccgcccgtgccccaacttaccaggctgccccactcggtcacccgctccttcaccacgtgcttcacagccacctgcggagacgcgggggtcaggccgggccaagcgaggcgcaaggcgcgcgagaaacccgggcccgcccggcggtccgactcaccgggagcccgtcggcgatgcggctacccgcgtagaccgtgccgaagccgccgctacccagcacggcgcccacctggtacgccttctcgaagctctccttgtccgccttggctgcagggaggcgcgggcggggttggtgcggcccggggcgcccccggtccccgccctggccccggccccggccccgccggccccgcgcgtacctggctgcaggatcttcaccgggaggtggtccacgccgccgggcccgcagaggtgcgccagggagccgaacttggagagcagcatcgcgggcgacggcctccccggagccccgagccccaggcgccgaagccgcggccgatccgggcgagcggcgcgccggggacac

SEQ ID NO: 1888640 - DNA, 4001 bp, Homo sapiens
aacacagatgacacctttaggaaggcagagaccaccttctcggggtcagacgtgtcagtctgaggacaaaagagacaatggttggcctgtggcacgtggtggagaggtacctgggctctgacgctagctaggagaggcctgggcagtacaaaggcccctggcgggcaagaacaggtcctgccttaccccatgctgtcccttcagagtctggcttggatttggcctgcagcaagcacatatgcagcatagagagggaatgaatgagtgaatgaacaaggatgaaaaatcatcccagccgggtgtggcggctcatgcctgtaaccccagcactttgggaggctgaggtgggaggatggcttgaggcgaaaagtctgagaccagcctaggcaacatagcaagaccccatgtcaacaaaaaggaaaaaaattagccaaggttggtggtgtgtgcctatagtctcagctacttgggaggctgaggcaggaggactgcttgagcccaggaggtcgaggttgcactgagccatgattgcaccactgcactccagccggagtcacaaagcaaaacattgtctcagaaaaaaaaaaaaaaaaatcatttcagggatccagtggtccccatcttgtaattgaacttgaagaaataatctagcatgtagacaatactcacatgcagaaacgtttacctcaacctcacaacagggaaaagtggaaaaaacgtcagaaacagtgcctggcttttaagtgctacatccacacattgcaataaaaatcctgagaagagttttatgggcacaagaaagtgatgaatggtgctacaccaaagtgataggccacagaaaggcttacaacatctgatttatcatgttaaaagaaacaaagaatacaggcaaaacctaacaaagcaattggccgaaatgttaagccaactctgagagtgggcccattttatttctctgtaacctccgagcctccgctttcttatctacaaaataagggctggccgggcacggtggctcatgcctgtaaccctagcactttgggaggccgaggtgggtggatcatgaggtcaggagtttgagaccagcctggccaacgtggtgaaacctcgtctctactaaaaaatacaaaaattagctgggcgcgggaggctgaggcaggagaattgcttgaacccaggaggcagagtctgcagtgagccgagatcgtgccactgcactccagcctgggcgacagagtgagactccatctcaaaaaaataaataaataaataaataataaaataaagtaagggcagcagagtctacatttcatgttgccaagagggttaaataaaatcatgcccaaatgcagtgcctggcagaaaatggatgccccgaagatcatctatgaatgaatgaatgagccaaccaacaagtgaggctggagtgagggcacccatcctgcaataggcacgtcacttccaaaggagccctgggcaacagagttgttctcgaagcagctgggctgacggaacacgcagagagaagccaaggagggggtgggcacatgcaaggctcttaaggaaattccctaaccccagtcagcatgggaactggcgggctgtactttctgtaggctgagtggggagggaacatttgcaacccctggaggcttataaataccctggacatttgcgcgtgttgtaacagtggcaggccaagcctccctgcccccagctgacagcgtcgcacccccaggtctctgagctgttcgtcccttttctctaacagctccagaagccacagcacgtacagcgtgggggtcgaggggtggttattacctgctgggctatcagcacggagctcttgggccctaggcgcagcagcttctctggagagggaaaagccaggaaggtggagacgtctgcaggaggtggggaggacagcacgggagctggctcctgggaagtaggggcacagaggctctggagaattccggaccccagactccccgacacagctgtgcccatccccacacccagcacatccacccttcactccagcccatctaggctcaaagtctagaattcttcctcccactcagctgcatttcccatctatcaatatcacccagagatgctggccctggatggctcttggtccaggagcctttggggtgagggggaagctacctccctgggactcaaaaaacctgctacggccaagtggatcctcgtcatgacatgcagtgccccagaaatgactacggaggcacatgggggctaaagtgggtccccgtagaactacagtccagcctgggtaagccctgctagcaccagaggtgcccagaggaaaaactgaattgaggcgaacctagccatttgtttaattgattccataaaccagagaagcagcccaattcagcgtaagcatggggagtccttgtccagagccaagttctccaggagctttacttaggaacctgacagggaatgcaaatgaatgaactggaggtgtggcagccctgatgcagccccgggccagacaagggacaccaagtgcccaagccaggtcatggcccagccaccatcccaggaatgggggagtggttcctaagggtcaccaagacaatcctctggtgggtggggaaaaaaaaaatcagaatttctatttatgcttatttgtttattctttcagaaacccttatgcatatcttataatatacataatgcagcagcactgctacctgtaaatagacatttatattggggtaaatagaaatataggtaactatggctgggcccggtggctcaatgcctgtaatcccagcactttgggaggtcgaggagggtggatcacctgaggtcagaagttcaagaccagcctggccaatatggcgaaaccccggctctactaaagatacaaaaattagccaggcgtggtggcaagcatctgtaatcccagctgtttgggaggctgaggcataagaatcacttgaacccgggaggcagaggttgcagtgagccgagatcacaccactgcactccagcctgggtgacaagagtgagactccatctcaaaaaaaaaaaaaagaaatataggtaactatcattacactgggaccattttcctttttttactcaatatcatgcaatcaaaaaaaaatgtttgtggctactgtgcttaaggagacaccccctaccccattgtgaaagtgcctcgggatttcacgttctcaggaccagggctctgattgtggcagatgatagaaactcaccccagtgttagggtccagaatcttccgtgagggcgtggctgacttctctccctgccctcgctgctgaggctcttcttcctcctcctcctcctcttcttcctcctcttcctcatcttcctcctcctcttcttctgcttcctcttcttcctcttctccttcctcctcctcctcctcgtcctcgtcatcactgcagaaagagctggctgaagcagatcctctctacccagcagcccaggttggctctaaggcctggctccatgagcccagagacctcacctcagccaggagggagagagcctggtggggtgggagcacctgctcccagggcaggggcaggtggatcaccagggaaatccatgctgtggacacaaaaaaataagatcggcccggcgcggtggctcatgcctgtaatcccagcactttgggaggccgaggtgggtggatcatgaggtcaggagatcgagaccatcctggctaacgtggtgaaaccccgtctctactaaaaatacaaaaaattagccgggtgtggtggcgggcgcctgtggtcccagctactcaggaggctgaggcaggagaatggcgtgaaccctggaggcggagctggcagtgagccgaaattgtgccactgcactctagcctgggcaacagagcgagactccatcccccacaaaaaaacaaaaaaaaaaaacaaaaaaaaatcagatcttgtccctgtcctcaaggagccccaggtttcatggagag

SEQ ID NO: 1888641 - DNA, 4001 bp, Homo sapiens
gcctcatgggcctccctcttgaaaagaccctcactctgtttggaaaagatcccttagcagccataatcaggaaagagactctagagcgagcccagggcttccccaaagcggattttctgtcctgttttcagctggaaattgaagtccttgggggcctcgaagatgagcacgatggtggagcccaggttgaactcgcccaggtgctcgcccttacgcatggggacgccctctctattggtgtgcgtcacgaagctgaagtcattgtaggagcccttgctgtgccttgggctgtttgtgtgcaggtcctgtggtgataggctgggggtcagtggggcccaggccaccaagtgcacagtgtcacccccacatgtgtttggagtcccactccctctgttgcttgtccccaccaccacccaacccagctccaaaagggaggtggggatggcatctcagggccaggtgggcctgctctagccagatctcacacacagccttgacacctgctgtgaactgggcccagggaggacagggaacagtggggcccagtggtctccatgcatggtgctgggagagcagcacccgtgggagccaaggccgttggtcacaaactgacacccaaaaaggcagcccctgggggcagggtgggcagcagacctgcgagtgctgacccctcatgctgtaaccaacatgagccaccccgagctcaacactccctttctgttccctcctcactctcacctttgaccatggttcctagcagaagccaggtgccaggcaaggaggttaattccctccatctcttccagccacttccagccagcagtgcaaggagggagggaagcctcagctggctggcaggtggagcggccattctcaggacagctgctcagcagagccaggcctgaccagagctgtggcctccctagaattcagtcccaacgcatccgccgcacagcagacaaggcaggtagacccaagaggtctggcccttgggctttggcagggcctagatcctgcttacccggtcaaagtagatgcgaatggagcccacgttggtggcccccacagctgtcagtgagaagaagccatgtttccagtcccccgtcaggaccacccgctcgttatggcagaagagctctttgatccagcgagccatgccagggttcactgacatcagggagcctgcagaggcagggaatgccgctactccccgtccagagcccggtgtgtccaccccatggcagccaagacccaaagggactcatggcctgttgccccgatgtcactccaaatgctgagctgactgggccccacggtcccctgcccacaaccagcctgcataaagcagtcaactcctggcctcaatgaccctgatctggagcctggtcccccaacaccaagaagctgagagcctctatatgaagcccacagaggcagctccccccacgctggccccgggctgacctgggaagtggcgccggtgggacacagtccagtcggtgggggagtggaagcagtggtagtccccaggggccaggtagatgacacagtgatagagctcattcccttcccgggtgaccagctggttcttgaaggagtcacacgacgcggctgtggagtaggagcagacgtgggggccaccaacacagtgagcacccagcacggagcccgagtgtggtctgcacatggattctcagggaggccccacatgccagcctcagttccttccccagcattcccctccctcccggtccagccacacagcagcagggctgcctagccccgcctgtgcagtgacccacctggtgggaagggcaggtcctctgtgcacatacgcgggcccaggaacgactccagggagtaggtgaccccctttacctgctccacctcacagttcttcacctgcccaaagttgaggatccttccatccgatgggctaatctggaagggcaggagaggcttgctgccagggagagcagggtctcctccccccaggagacagcccccacctccccttgtcatcctgccccttccagatacgctggagaccaggggggctgtgctggggaggcaggaaaaagtcctgtttcctgcaggaggaaagggtcaggcctcaccacgctgtgcaggccacagacaggccgggcctgcggcttcagcttgcgccggaagaactcgctgaggttgcggtagtgatgcaggtcctccacagcggcctctttcatgttcaccccaaacgtccagatgtacaggctgtagacgggcctgcgcagccagtgtggcagctccacctgattgaggcgaccccaggcccgtgacagcaagcgcgttggcactgacttgtacaaagccacctgcaggccacagggcaaggggctgagttgaccacactgccccagctccagagagcccaagtagtgtcattagcccagctctcacttcaggggagaatctgcaccccacggaggacaccagggcccaggtgccccacgctgcttttgtgatgtggctgtttctcactgggaaccagactgcacctgccacacggagtgctggatttacatacaactccagtggatttcatcatttcatgcaaaagtcaaatagcaactgctccagtcccagaacgggagacgcccagcagtcttacttcttaaagtgggggtcggaaacggatctgatcctaaccacagtgtgtgaccctagccacggtgaccccaatatcacagtgtgtggagaggtggtgggcatcttgcccgtggtcactgcccatatcccagaccaccaaaggaggaggctcccaagtgcatggaacaagtctacagcccaaagtgtgtccctctgtcttaacaggaagaaggaggataccctgagcaccaacagggattttcagatgcaggtctgcgatgtcactgtcacctgggcctgagctgcagacacagggtctgcagcccccacaggtccagccagcactcttgagggcctggatgcagccagtctgagaagcccagccctgctgagccccaccttggccccacggcaggacttgtgttcaacgttctactgtgactgagccaggccataaagccatctgcacctggggttcctcccaggaggcaaagagaagtcatcccctcaggcccctctgttctctcttccttcagggaagcctggagcacctaagacagacgatggcctggggacaagcactgggtcccactagatggtcccagagctctccggcagggccaggtacccaggaaggggcagcctcttaaacttcaggtgctgctgccactgtagaagctgcctgtaattggtggctgctgcttctctaaacacaaccaagacaccaactccccaaggtgtaaaactgatttcattccaactttcaacacctctccaaggtaaggtaagctcccagagagctgctcttatcccttccagctgatgcccagtcacacagaagggctatgtgagcccaggcccttcccaggcacaggtgggagcctgggctaatgtccagggtgcctcagtgcccctgagctctgatgacacccatgtgactgtcaaaggcccaggaacagggtttcctccttggggtcaacctgcctgggaagccaagggcaagagcaagccctctagggaccaggagaggacaagccagttcccttgcccattcctggggcatgcctctgggttccttaagggtgtcctcaccctaagggacccaaacaggatccatccatcctgaaccacccctttggcatcccggaattaatttggcttctgttcaaaatcacctataagctcttttttgcttgaacacagaaaaatcagagacagacaccattttctgaatccccagactgggttccttccagaaccagagccccaaatggcagacatgaggcaggctaggggagtgggcagggcacgacatgccctcgcagtcacccgcggcccaggtagtggccttctcaaaagctgccttggccttg

SEQ ID NO: 1888642 - DNA, 4001 bp, Homo sapiens
ggagggtaggcaggcctgggctctgaggtgtttgccgtgcaggactggcacagatgggtgtcagggtaggggtgccggtctgcccagacgtggccatgcagggctggggttgcctgcagaaccaaggcaggccaggagggcacaggggggaatctgggccaagattgtggcctgggtcaacaggaggggcgaggatgggcacttgggtgggggaggtgtgggcccagctgtatcagcccctccccaccaggggctctcggtgctgggccaggcatgaacaagcccaccccacatgcccagggcgggatcactgggcccagcctacggcagctgctagacgagggcctgaggcctcccaggagaatgggtgcacttttgggatggcagtctgtcagaggaattacgggtgccctggaaactgtcctgagggaggacggaaggacaggcacgtccagactttggtcaaggcacttaaggcacggaggtggcctcaggagccaggacttggcagtgctctgagctgctgacctggggccttggtggctgccccgtggggacctctccaccgggcctgggtcccggtgttcagcccgcctggctcaaaggcagcacgagagggcagagaacgggctgggcctgggatcctgagcccagggtacagcacggagccaactgaggactctggaggcaccgggaggcgtgagcagacaagtctcatgacctggaacagctcgtggccaggggcctccacactgtcccgcagcagacgcgccccagagcccagtccctgggcttccagaatgaaaggggccagttccaagttcatggtcagaacagctttattgaatctagctcccagatgcccacccagcttcggctcaggccccctgcaggtcactgaggtggggggcagccctcccgtggggtcgtgtcactgaggtagggggcggccctcccatggggtcgtgtcactgggctcctcagggaaggcagtaggttgtatagttatcttccgaggggcaacatcactgccctgaaaccacacaacctactacctcaccccgccaggcccggccttgcactgcgggagggcccgccgccccccgcccagcaccagcccctgcctggcggtcctcagtcaccagagcaggagggctgggcaggcgcagggcaggagggacaggggagatggcaccccaggaaggggcagctgctgctggctggtcttgggaagtccctggctctctgggcctcagtttccccaggtacagaggagccactgtctgccttcagattgtgccatgtgggacccagtgtatgcagagctgttcctctcacttcctgctcaggaaaggtgccttggcctcccttcctccacaggcagaggccctgccactgagctggccaggctggggcacgtgctgggaacctggggtgatgggcaacgccaatactcgcagccctgtgacctccaaacgtctcggccacccctggccccacggtgccttctcctggtgctcagtggagggtacggctcagggccacccatgagcctgggcctgatggcggggggagtgttggggagtgttgggagacagaggtcagacaaacagctgcgtggatcgcctctctcagtgcggctggggcagagggtggggtcggctcagctctcctctgccctcgatgctccacactgcatctccttccatcctcatttgcctccattttacagaggaggaaactgagacccagagagatcaggggcctgtccaaggtcacacagcaagtggcacctaggcctgtcagacttctcagtgtaggcggcccctgcccccgactgctgccaaggctgcccccaaacctggccctgcccgctcccagccagggttccagacgctctgtccaccgcagatattacagccacttcaggaaagacagtagattgtatagttatcccatagcagggcagagccccaaactatacaacctactacctcaccccaaagggcagtcggtcttggtgccgatgggactccgtggcttccagaggcacctcctggggacgcgggaggaaagagggctgaggagaacaggggctcgaggctcggcaggccacacgcaccaagggcacagggattctggcgggcaggcgcggtgggcgcagggggctgggacgccgaaaccctgggagtggggacattgtggccagcaccagcagggacgggagcctgcaggaaaccaccaaccagagagggacgaggaagagagaaaggaggagggagggaaagccctggcggcattttgcgacgctgtcacaggcagccggctccctctcatctggacaggagtggccataatgtccccaaggaactctgcactggagaccctaggaggagggctgtcatctgtcgaaggccagcaagacacaggcatgcgagtgcccaccctgctcggccccctccctccccgcacagcgccaccagaagcagcactcgtggcccccaggctggctgagtagcggcttcacgggcgtgccgtctcctcccactgggcaggcaggcatccctccccaggggccctggttctggccctgctgtgcaggctggcctgagctgaccgcactgcaggaggtggcgggaaggttctttccttccttgagggaagtggcctctaggggagagcagctgggggggtagtcacagaccctcaggtccacccagggtccagtgcctgtccctgcgggtgctggcacactcagtgccctagcttgggacgcacagggctgggacagagtgtagcatgaggatgacactgagagggcctcggggctcccctagcaggggaacgtggcgagagacgggcctccctaagccccgcctatcctgggcctggtgcagggtcagcctcaacaaatgctaattgtggctaccaccttcctggggaaaagctgagggggcagatacgactgtcaacccctcttaaacaggtgaggagaccgaggcccagagaggcaacgtgacctggatgtcacacagccaagggggcagcagagtgaggtccaaatgtcctgctccctgccaagcttttttttttttttttttttttttttttgagatggagtctcactctgtcccccaggctggagtgcagtggcgcgatctcggctcactgcaagctccgcctcctgggttcacgccattctcctgcctcagcctcccgagtagctgggactacaggcgcccgccactacgcccggctgattttttgtatttttagtagacagggggtttcaccgtgttagccaggatggtgttgatctcctgacctcgtgatccgcccgcctcagcctcccaaagtgctgggattacaggcatgagccactgcgcccggcctgcttcctgccaagttaaacggcatgctagctctcagctccccatgcccaagtggacttgaaaggtctaccccagccctccttccacagcccatcctgagcaggctgcctactccaggcaggccccaggctgggctggaccatttaatcctcacagccctggtaaggctgagatcacggatcccacttcatagtggagaaactgaggctcagggggtgctgaatctctagctctaggtgtctttgctctcagaagttggtcggggagggggtctgcttgctctctgggcacgtgtcctactccctcccgaggggcactggagcaaatcccaggtccttagccagcaaggagaccgctgaggctcacacctggtgccgcccacccagaactggagactgagatgctgactcacccaggagtggggaccaggagggccccgatgcagcccgaccctcctctgtcccagcatcatctcgcctggggtcgcgaagaccccgtgttccctcaaggcctcagaacaaaagcggtatgagagggtctgggggtcctgctcccctgctccaattctgggtcccctggctggtgggcaggaccaagatgtccctaagg

SEQ ID NO: 1888643 - DNA, 4001 bp, Homo sapiens
tggaagctacggtgaccccactgcgagatgggaaacaggtttggtgagcagagtgaccaatctaggcctgtcacccccagaacttccacaggctgccctcatcctatattttgggcgagttttggcaaccccatctctagggacggccagtcagcagggaaggttttggtcagctggagggtagggagggaagtggggtgagccaggcatcacctcctccaggaagctgcctctgactgcagggctgggtccagggatccttagggttccccagcccttgggctgctccactgtgatgttgaccccaacacatggccactgtgtgtccctggcagctccccgaccaggccttgagctctgcagggccaaaccctgctccaactacacagtatgggggctgggaggagaggctggctcctcgggacgttcacagtctgttcagacacagacaggggctgcggtggccagagatgggtctgagccgtggactgaggggtgggggagcggtggtgagcaggagagtcctggtggaggtgagcacaggcatgagggaggggtgctgggaggcagtgcaggcaagggtgtcagcagagatctgctccggagacagagggggctgctctgagactctgaggcctggcagtgggagtggggagggatggaaatggtgtttagaggacagaagtggccagatgtggctgctgactaattatggggtgaagaaggggatttggacagtgcccatgtgtcacccactctggccccagaggatgatgggagaagggaccatggggcacgtcactcatctccagctgcaaactcctacgcagctgtcaagacccagctcagatggtccctgctttaggaagccctccctgcccttgggcccctcctccacgtccctttgcccttggcccacagggtggcagcagctccgggagggtaggcaggcctgggctctgaggtgtttgccgtgcaggactggcacagatgggtgtcagggtaggggtgccggtctgcccagacgtggccatgcagggctggggttgcctgcagaaccaaggcaggccaggagggcacaggggggaatctgggccaagattgtggcctgggtcaacaggaggggcgaggatgggcacttgggtgggggaggtgtgggcccagctgtatcagcccctccccaccaggggctctcggtgctgggccaggcatgaacaagcccaccccacatgcccagggcgggatcactgggcccagcctacggcagctgctagacgagggcctgaggcctcccaggagaatgggtgcacttttgggatggcagtctgtcagaggaattacgggtgccctggaaactgtcctgagggaggacggaaggacaggcacgtccagactttggtcaaggcacttaaggcacggaggtggcctcaggagccaggacttggcagtgctctgagctgctgacctggggccttggtggctgccccgtggggacctctccaccgggcctgggtcccggtgttcagcccgcctggctcaaaggcagcacgagagggcagagaacgggctgggcctgggatcctgagcccagggtacagcacggagccaactgaggactctggaggcaccgggaggcgtgagcagacaagtctcatgacctggaacagctcgtggccaggggcctccacactgtcccgcagcagacgcgccccagagcccagtccctgggcttccagaatgaaaggggccagttccaagttcatggtcagaacagctttattgaatctagctcccagatgcccacccagcttcggctcaggccccctgcaggtcactgaggtggggggcagccctcccgtggggtcgtgtcactgaggtagggggcggccctcccatggggtcgtgtcactgggctcctcagggaaggcagtaggttgtatagttatcttccgaggggcaacatcactgccctgaaaccacacaacctactacctcaccccgccaggcccggccttgcactgcgggagggcccgccgccccccgcccagcaccagcccctgcctggcggtcctcagtcaccagagcaggagggctgggcaggcgcagggcaggagggacaggggagatggcaccccaggaaggggcagctgctgctggctggtcttgggaagtccctggctctctgggcctcagtttccccaggtacagaggagccactgtctgccttcagattgtgccatgtgggacccagtgtatgcagagctgttcctctcacttcctgctcaggaaaggtgccttggcctcccttcctccacaggcagaggccctgccactgagctggccaggctggggcacgtgctgggaacctggggtgatgggcaacgccaatactcgcagccctgtgacctccaaacgtctcggccacccctggccccacggtgccttctcctggtgctcagtggagggtacggctcagggccacccatgagcctgggcctgatggcggggggagtgttggggagtgttgggagacagaggtcagacaaacagctgcgtggatcgcctctctcagtgcggctggggcagagggtggggtcggctcagctctcctctgccctcgatgctccacactgcatctccttccatcctcatttgcctccattttacagaggaggaaactgagacccagagagatcaggggcctgtccaaggtcacacagcaagtggcacctaggcctgtcagacttctcagtgtaggcggcccctgcccccgactgctgccaaggctgcccccaaacctggccctgcccgctcccagccagggttccagacgctctgtccaccgcagatattacagccacttcaggaaagacagtagattgtatagttatcccatagcagggcagagccccaaactatacaacctactacctcaccccaaagggcagtcggtcttggtgccgatgggactccgtggcttccagaggcacctcctggggacgcgggaggaaagagggctgaggagaacaggggctcgaggctcggcaggccacacgcaccaagggcacagggattctggcgggcaggcgcggtgggcgcagggggctgggacgccgaaaccctgggagtggggacattgtggccagcaccagcagggacgggagcctgcaggaaaccaccaaccagagagggacgaggaagagagaaaggaggagggagggaaagccctggcggcattttgcgacgctgtcacaggcagccggctccctctcatctggacaggagtggccataatgtccccaaggaactctgcactggagaccctaggaggagggctgtcatctgtcgaaggccagcaagacacaggcatgcgagtgcccaccctgctcggccccctccctccccgcacagcgccaccagaagcagcactcgtggcccccaggctggctgagtagcggcttcacgggcgtgccgtctcctcccactgggcaggcaggcatccctccccaggggccctggttctggccctgctgtgcaggctggcctgagctgaccgcactgcaggaggtggcgggaaggttctttccttccttgagggaagtggcctctaggggagagcagctgggggggtagtcacagaccctcaggtccacccagggtccagtgcctgtccctgcgggtgctggcacactcagtgccctagcttgggacgcacagggctgggacagagtgtagcatgaggatgacactgagagggcctcggggctcccctagcaggggaacgtggcgagagacgggcctccctaagccccgcctatcctgggcctggtgcagggtcagcctcaacaaatgctaattgtggctaccaccttcctggggaaaagctgagggggcagatacgactgtcaacccctcttaaacaggtgaggagaccgaggcccagagaggcaacgtgacctggatgtcacacagccaagggggcagcagagtgaggtccaaat

SEQ ID NO: 1888644 - DNA, 4001 bp, Homo sapiens
gcaggtccgagggctggacgcaggggccctgcagctgcagccctggaggtcagctgtgggaaggagcgggggctgcggggctgccacctctggaaggcttcctggcatcctaggatgctccggctaacttctcagccccgcctggtactggcctctgtctggtctccgtctggtgcccgtgtttgctgaggacatgcagcctgcctctcagtgaggccgccatgcctgtgggccaggcgcaggcagtgcagggcttagaccttgggtctagggctccagcccctctggccaaggccccggtgctccaccaggtctgctggatcccgtcactcgacggcattctcaggcctcttcccgtggccgtcctggggcctggcacatgatgagttccataacctctctgagccagtgctctgcagaatgaagtgggctcagaactgctctgaaacacgagaaaacccgtggactcagggccatgagcgccacagcgctcagagatgattggtcatccatgaacgtgaaccatgccgacagatggggtggggtctccagaaggttcttgtgccccgtgacctgatgtggtccccgtctgcccatgcagggctggtgtcttgtgagcccatcctggtctggcacacggcatctgggtgtacagtctcatacgttcccacctctgggccgtaggaacaccaagaacgaggatgaccacagctccctccttgccaccgcctgctgccacactgcgtgcagtctcacacctgccagcacaccagcctgggcacagagcccgagagtggcagggtgccctggagccccatacagcccaaaccagcatgcgctgaatgctggccactcagccagagaggactcagggcctcagagccagagtgacccatgaccccaggacaattccggctctccccggggcaaaagaactccaagccgacggaatggtccttcctagtgctgggtgtctggagagaaccagacaaggccagcatccaagagaggctgaagatctgaagataaacagggatcctgtgtggttctgtgcaggcacagtcgtggggaggacctgggttagggagaaggctctggtacctgctggccccgtgactctggggagatccctcggcctctctgaaccttggcctcctcatatagaaaaccgttagcacccacacgtcactagactggaacttccacccagacagggacgctgtctgtcctgcttactccacattctggcctgagaacagcactgctacgtgctggctccaaatggatgtggcagggaaatggaactggcagattaaatttaaaaatggatgtttatcaaaatggatggaaagcacctggcctggggtctggcacttagtatgtgctcaacaaagctcaacaccccttgccatgtggggctgagtctaacatccaacatgcactggcactgccctgggggtgccaaatgcggcccccagctttctcccctggaccaaggcaggggatctccaccacccagggttccccgctgctcctgccctgctggcccccgtcgccctggcagacggaaatgctgcagcggcctcatctttccctccacggctcctggccgaggctgtggccgccgtgggccggcgtggccccagagagcccatttgcaagctgcttccatagcgcagatgcctcgggcagagcccagtgggtttgagtcatttgagtccatcacaggagagacctcacccctgctgctggagacccagtatggaggcccgagccccctgcggctcacccaccaggtgctgggagtctccacaggtgcaggcattgggcaacttactatctcaagctgaaggcgccgtctccacgccgcccaggcttccaaatgcggccacacggactttgaagggcgtccgctgcagggtcacaggcgccagtgtctgctcgtctggacctcgaagcaccaggcccaggaggagtcctcctctcatcgagttgaaagaagccgcacaggcgggaggcctggcagggtgggatccctccacccacgtctgggccggaagcgtgggcacacccactccaggaatcctagggcggggtcaggctcccaggaaatggggccagaggttcccttgcaggcactggcgcaacccggctgccttcccggtccccacctcctgtggattccttctggggttttgccggaatggctggcccagcccacaccctgaatccagccctcattgaagctcggaaacccagagactcataccagccgatgccaggacccttctccaggaccacccgaaactgccactcacccggtgccaccctggcatctgggtgagtgctgggtaatgccatcctgttaaggtcatgggaaggcagtgggtagggtttgaaatgggctgagacaggcccaccacagagcctgggcctcccgtcccctcttactaggccaaggcaagggaaacaccaacgaaccaggggctccccagaccaggatctcatgcagtgcctccaaccatctactgaggcggaggctggaagccccattttaaagacagaagctgggaccttgtagtaagaaccgtttttatcacggtctcttttgtctgaaggtgtgctgggcgttacgccgtctcatcaaaccccaggccctgctatgttccctattaggaaataaggccactaaacctccccgtgccctggcacgcaggtgcacgtgtgtgcatgtgggcagacaaacagacctgcccgggaaggcctggccagctggccgcttcttggagaaaggccgctagcacgctgaccggccgacagaggccttctgggccactccctccctcggcccgccttcccggtcctgttctgggcctgcccacgccgccatttcctctccggggcccgcaggcctcacttccactcctcccagtctgcaaatggccggcgcccagaaccgcctgtccacataaggaggcagcagcgcgtctggccaaggcccagcatgcaggccactcagccagagcctccctcagcagtgctgagcacctacgagaagcccacgcctggatgcccagtccacccgctgccagctttggctagccctggactggggaaaaccacccttcttcccacgggcatccctggggtggtggagagcccatggcacagtcatccccaggtgtggtctgaggactgtgtggcccactccgaccaatgcacctccaaacaccagctcacctctttggaaactgccgacctaccaggaacctcacgcaatggagaaataagaggacacctatgcacacgtgcaaacattacacgcacacacctctgcacctctgcgtaccaacatgctgtccacacccggggcaccacgcacacgcgtgccgcaacacgcgtcggtgaatgctatggcagcacatgggctttgaaggatggcagggctgggttcaagccctggcccaacacttatcagctggttgaatcttggggaacccacttagcctctcagaggttcgctgcttcccctggtggaatggaggtaatgaaaatgcccccttgcaggcatagtctgagccttagaaataaggcaaggaagcaatagcatttatggggtgctcaccatgaacccagctttccatgtgttcagaaagttgacacttactgcctccattttacagataaggaaatgaggccggagaggtgaaatgacttgcccttgatcaacacggcctggaaacaaagacgaccccatctgaaccgagaccttgggtcccagagccggtgcttttctgaaagcaggagccccggtacacagcgggcacctgtgaacagcagcagagagtgctgttgctactattaccaccatcgccatgcccaccgctgcttagaggctctgcggcccagaggctggggccttttcactttgcctcatctttcagagcgcccagaccagggccatattcctcttgctaaggaggcgggagtcaataggctaa

SEQ ID NO: 1888645 - DNA, 4001 bp, Homo sapiens
atgaaaagcaaggctcccttctcccacccaatccctgaattctccctggagagtatccctcctaagtgcacgcacttccactctgttccatttctgcctgttaaaactacttagtgcagcttagtgtagtggaacctgcttcagaataacccatatgggtcttctttattctcatgaaccacagagcatttcatgtgttggatatattgtctcctacttacggacatttggggttgtttctgtttttgtttgttttgtgacggactcttgctctgtcacccaggctggagtgcagtggcacagtctcggctcattgcaaccttcacctcctgggttccagcgattctcccctctcagcctcccaagtagctgggactacaggtgcgtgccaccatgcccagctaatttttgtattttttggtaaagacagggtttcaccatgttggccaggctggtctcaaactcctgatctcaagtgatttgcccgccttggctgggattacaggcatgagccactgcacccggccagtcaccattttcatccggtaacttgcaatgcaccaggccttaccagggccactgttgggttcagcggacatttccttcttcaagctggcaaggcctcagacaagtcactgcccattttggctcctgttcctcctctaaaataacggagttgggtgatggcagaggctttccagcttattcagcctcaggagtacctaaaatttatccagaagcccatatggaaagccaggagtcctggagctgctctggttgaagctaggatgggggcccagagctccctgctgttcttgacccccaaatctttgcttccaagattcactggcccctacctgctacctgtaggccttcacctgcttacttgtgtccgatgtagggattatgggcttactcagcagccatcctcatggcctaaacatttggccaatttcagtgtccccgaagggtgaaggaggtctgggcttccatggggcctgaactgcaggtaccttcagcacttcctggggttctggacatgtcaacagctgcccaccaaggcctggaagataaggagggctcacaccactagtgcaaacttggatcaatgagaagggaaggatgcgacagacgtatccctcctcttttcttgtcccctctggattctgttgagatgcttccagggattctccgaggccccttcctgctccagtaactgcaggttactggggaagctgtggccagctctaatcccctacttttttttttttttttttttgagacagtctcgctctgtagcccaggctggagtgcagtggcgccatcttgcctcattgcaacctctgcctccagggttcaagcgattctcctgcctcagcctctctagtagctggaattacaggcgcgcgccaccacgcccggctaattttcgtatttttagtagagatggggtttcgccatgttggccaggctggtctagaactcccagtctcgagagatccatctgcctcagcctcccaaagggctgggattacagacgtgagccacagcgcccggcctaatcccctactttgatttactgtccctccccacatcatttcttcccttattgaaagctctgggtcctccccaatgccccaccatgtaaaccaatctgtcctgctgggtttggggcaccgcggtgggcaggggagaacccgtttgtcagaaggttcagagtttctgagttcctcatgcttaatcatcagcggccacagcacaacagtggccgagggtgggttgtaaattctcacctggcctagaggacgcagccacgaccccagcgcttggccatctctgtagaggattcgcgggtggaccatgcttagtctaacagggtatggttattaacgcccgttatgaacggttcataaccagccaacggttatgaactgtggagggcttccgcaatcccgccacacgctcgaggcggaagcgacaagacgcctgcgtggttttgctggcgcgccgcacgtgcccgtaccgtgacctgcgcatgcgctttggaagcctcgcgagcttcctgcggcactcagggtttggtgcaggtgcctgtggcctttgggggtttcctcgcgtcttttaggtagatgcttccagggattctccgaggcctcttcctactccagtaactgcaggtttctggggaagccgtggccagctctaatcccctactttttttttttttttttttttgagacagtttcgctctgtcgcccaggctggagtgcagtggcgccatctcgcctcactgcaacctccgcctccagggttcaagcgattctcctgcctcagcgtctctagtagctccttacagggagagcaatggcccactcacacccgaaacagagaagcgaggattttttttttttcctgcaagctgctgcgcattaattaagtcaaagtgcagaagaaatcttttctaccccggctttccaactttccgggggtcattagggaaaaacattcgttgaacagatgtccttagggtcggcgcttttatctctgaaaggaagaacacttggaaaggaagctgcgtgtttttcctcttgcccggaagagccagcctgtatgtctcccttttgacccgaggccaagcgcctgaagcctcttggacttagttaacattagtccgttttctatgcgtttgtccttggcttggtttatggtgtttgttgaaaggtaaatgttttaaagttttggggattcctatcatgcttagggaaatcaatccccttctctcttctccccttcccccgatattctcttacattttgttgcaatgtttattatttattttttactagacaacctatagtccttatggaatatattttagtataagctgtaaggcaagagtcaagcgtctcccgcccccaggtggaaattaacttattccagccccacttattaaatgagcctcttactaaatgagccaacaggtgtggacctgttgagtttgagatcccgcttagacgccagtggagacatctgtggtcagttgcacaagtgagtctgatgtgaggggtgaggttctggctgaaactataattttgggcgtcatcagcatctaaatagatcagtctccctcacttgttaaaaaatgcttttccagtcttagaatgtattctctcacatgaaatatttaatcgcattatccagttcgttcccatccctgcctaaaagaaagtgttccattgggatttaaattataattgcattaaatttaaatggaagttttgggagcattgacatttttgtgatattaatcctcccccagaggataaaaaatggctttccatttactcaagacttcttttaggtcctccaataagattttataaattctttatacgggttctataactttctggttaaaattattcctaagtgttttatggtttttgtctattgtgatggaatacttttttccatctgtattactcattgattattaatatgtagaaaagctaatgatttaatataattcactttctgtcttaggaattctggtagttttaataagcctgttttttatagatacaaatttgccagtataccaatttattttgtcagtttgctttagttagaacctctgaaacaatgttgaataatgatcccgggctgtttctgatatgcgtggaaatccgcatgtgagagttgagcggtgagagtttcggcaagtggcttttaaaatgttggggtttcctttagtttgtcttgcggctgctgggactcaccggtagttgccagtcctgcctgagttgggcgccagggggcagcagtcacacagaatgaaacgtgggctgtgccccctggaaactggctgaattttgtcaaatgcctttacaccttctataaaaaaaaaaaaaacatagagttttctcctttatgctgctgtttttattttcaattagacattgagtagctatgaaagaatgctgtataaaatatttgtaaag

SEQ ID NO: 1888646 - DNA, 4001 bp, Homo sapiens
gtgggttgtttagaggtcttttttttcttttccttttgagacagggtctcactctgtcgcccagactggagtccagcggcgcaatcttggctcaccgcaacctccacctcgcgggctcaagcgatcctcctgcctcagcctcccgagtagctgagattacaggtgcccaccaccatgccggctaatttttgtatttttagtagagacgggggtttcaccatgttggccaggctggtctcgaactcctgacatcaggtgatacacctgccttggcctcccaaagtgttgggattacaggagtgagccactgcgccccattttttttttgaatgttgaacacaatgaatttatcatgatagtgggtacttctgaaggaggcaggggtatacacaaggttagaatcatacaggtagatatcatggtataggtgctgcgagagtcagaaaactgactctggcaccagctgcctgggcttcaaccccaatgctgtaaagtaacttagtctctttgtgcctcagttttctcatctataaaatgagtatatcagccgggggcagtggctcacacctgtaatcccagcactttgggaggctgaggtgggtggatcacctgaagtcaggagtttgagaccagcctggccaacatagcaaaaccccgtctctactaaaatacaagcattagccatgcatggtggtgcgcacctgtaatcccagcgattcggaaagctgaggcaggagaatggcttgaacatgagaggcggaggttgcagtgagccgagattgcaccattgcagtccagcctaggtgagtctcactctgtctcaaaaaaaaaaaaaaaaaagggtatatcaacacaatctcactggtgtgttgtgaagcctagccaagttaatgtacctagagaactagagaacagtggctactaaggacatctaaggacactttatacaaaccttaactgtgttacaacttcttaagtcagtactgaggttcaaaagcttccattttattattatgctttataatttatatatgttacgtgctttcttttgtatagctcacttgaatatatatatacattttagaagataataaggaagaaaaaaagtatatctggttttttaacccttcgaaatgggaaagtttggagtagatgctcagccccggcccctggcccttccccaatactcacaggctcctgtcaactacaccttcagaaaaagacggagcctcttaggcagcagtcaggcaggtgggggcgatctgtcaggtgacctagactctgggccatctcagtttcctcacctgtaaaatggggatgctgaggtacctacctgacctatgagagcggagaacactgagatatcttgcccatggcctgccctgtggttagctgtcgttttttccttgacacttgtaggctcctcttcatgtttacataacctcagtgggaaaacgccagcgaagagagacactcagaatggacgatctaaagttccttccagcttccaaattctgggctggttttcagagatccagggctcgggatgcgaatgtccctgtctacgatggggctgccgttacagccttcctcccggggctctggagacgcgccagctctttgacacctctcctgcgctaaggaagagttggtttacagaaaagtaagtatatcctggccctgcagaaagccgccaggcggcaggacaagccccaccgcagcccaggcgccattatctgcctcagcagttacctcggggtcccgccacgaggaggttcttcaaggcctgcgcgcccacggacactaccaaggagcgcggcgggcagccggatagcaggacgctgagggaaaccccgcagtcgctcggcgtccccggcgccagctcacgacccagcgacctcctgcggcccgagcgtcccctggcggcaacgccggctcgttagagcgagcgacagatggtgtagtccaaaggccaagcggcgtttctgtagatgagcatgcgcagcacccaccgttcgctcagccagagagaggcttcccagccaatccgagagcctcagagtcatcctcccgcccacccagcatacaggcggggcgttcctccttagccaatgggaaaagacattcgcccgcggtccgcacgcgctgcttgcaaaggggtggggttgtggagtggatgctttggcaagatggcggggagcggcgtccgccaagctacttctaccgccagcaccttcgtgaagcccattttcagtcgggacatgaacgaggccaagcggagggtgcgcgagctctaccgcgcctggtatcgggaggtgccgaacactggtgagaggtagcggcttacgtggggacccggaggccgccgctcaaggtcgtagccggcccggccggggtttctcatgggcccagctgaggtcaccaacttgggcagaggcgactgcgggtgcttcaggggaagagggtcacccgagcctaccatgggccggacctggcggcggcgcggtggtcagaccggccgtgcctagcattcgtacgtgctatcggagctttggtctcttttgtccttcgcaattggcgggaggacgatgactgtcagtgacacactcactttgtgggtgaggcagcggaggcaccgagaggtgaagtgatgtgcccagggcccaggccgagccactgttgtacccagaacccaaagtctagagttgcagagtgtaattatagatgcccgttggatttttttgtttgtgacagagtctcgctgtgtcgctcaggctggagtgcagtggtgcgatctcggctcactgcaagctccgcctcccggattcacgtcattctcctgcctcagcctcagcctcccgaatagctgggattacaggcgcccgccaccacgccggccatttttttttgtatttttagtagagacgggatttcaccgtgttagccagaatggtctcgatctcctgacctcgtgatccgcccgtctcggcctcccaaagtgcgagaaagaggtgtttttgagtgagctggagcacggtgccactcctcagggctgtcgagtccctgcttgtgtgtgtgaaaaggcggtagaatgtggtggttaggagcacggacttttcttcaggcgctgccctcaactagctgtgtgaccttgggccagttatttcatctattcctcagtttcttcatctttaaaatgggaataataattccttcttcagaaggttactgtattaagttaaaatatctagagtgcttagaacaggacttgatgcatatttaactcattaaatattagctgctgccgttgtttttgttgttatttttgttatttatagggctttccttagcagcagcttccaagcagaacccggttctttgacatatgagaactgtgtctgctccacagagtccctgtcttcaagctgacttttggaaaaattgctactgaccagaacttaaacccacgcgatactagagaaggagaaacttgagtgatctgctggttcagggactgcaaattcagatgccttcaggggcaggcagataaaagatgtgtgtggggagtgactgtagcagtgtgtgtgtgtgtgtgtgtgtgtgtgtttcggggtggtgcattcaaattcagcagtttgaaaacataatgtttgcctggcagaatacttctaggagtacccagaaccctctctggttgcaggaggaaggtgctgggggaaggaggaccacattcaaaaagggtggcttgtgaagggtaaatcagtggccaagtagaagacagaacccaggtatcctgactctgaggatccagctctttctaaaccgacccctcccaagaccttccctcaaattctgttttgggaagaaagtcccaaagtcagaagggtcttgagaggaggaaaagaaggcagagggctacaggagcctagaaagcaagggaagaggagagaaaagaaggggtcaaggagtatgcatccctatggggaagatcagtgatctgt

SEQ ID NO: 1888647 - DNA, 4001 bp, Homo sapiens
caagtgtggtcagagcagaagctgaggccgaggaggcgctgagagcgagcgaggaccaccagcacgttgacacctctcaacctcaccacaggactggccacctctctgggccctcagggatgctgctgtctggacccctgaccagtgacgagttcgcactcagggccaggctggcgctggaggaggacacttgtttggctccaaccctaggtaccatcctcccagtagggatcaggcagggcccacaggcctgccctagggacaggagtcaaccttggacccataaggcactggggcgggcagagaaggaggaggtggcatgggcagctgagagccagagaccctgaccctagtccttgctctgccattaccccgtgtgaccccgggcccacccttccccacccttccccacccttccccaccccgggcttctgtttcccttctgccaacgagaaggctgcttcacctgccccgagtcctgtcttcctgctctgccttctggggctgtggcccttgctggcctggagccccaaccaagggcagggactgctgtcctccacgtctgtcctcaccgacataatgggctgggctgggcacacaggcagtgcccaagagtttctaatgagcatatgattacctgagtcctgggcagaccttcttagggaacagcctgggacagagaaccacagacactctgaggagccacctgaggcctcttttgccagaggaccctacagcctccctggcagcagttccgccagcatttctgtaaatgccctcatgccagggtgcggcccggctgtcagcacgagagggacgttggtctgtcccctggcaccgagtcagtcagaagggtggccagggcccccttgggcccctccagagacaatccactgtggtcacacggctcggtggcaggaagtgctgttcctgcagctgtggggacagggagtgtggatgaagccaggctgggtttgtctgaagacggaggccccgaaaggtggcagcctggcctatagcagcagcaactcttggatttattggaaagattttcttcacggttctgagtcttgggggtgttagaggctcagaaccagtccagccagagctctgtcatgggcacgtagacccggtcccagggcctttgctctttgctgtcctcagaggcctctgcaaagtagaaacaggcagccttgtgagtcccctcctgggagcaaccaaccctccctctgagatgccccggggccaggtcagctgtggtgaaaggtagggatgcagccagctcaggggagtggcccagagttcctgcccacccaaggaggctcccaggaaggtcaaggcacctgactcctgggctgcttccctcccctcccctccccaggtcaggaaggtgggaaagggctggggtgtctgtgaccctggcagtcactgagaagcagggtggaagcagccccctgcagcacgctgggtcagtggtcttaccagatggatacgcagcaacttccttttgaacctttttattttcctggcaggaagaagagggatccagcagtgagatcaggcaggttctgtgttgcacagacagggaaacaggctctgtccacacaaagtcggtggggccaggatgaggcccagtctgttcacacatggctgctgcctctcagctctgcacagacgtcctcgctcccctgggatggcagcttggcctgctggtcttggggttgagccagcctccagcactgcctccctgccctgctgcctcccactctgcagtgctccatggctgctcagttggacccacgctggagacgttcagtcgaagccccgggctgtccttacctcccagtctggggtacctgccacctcctgctcagcaggaatggggctaggtgcttcctcccctggggacttcacctgctctccctcctgggataagacggcagcctcctccttgggggcagcagcattcagtcctccaggtctcctgggggtcgtgacctgcaggaggaataagagggcagactgggcagaaaggccttcagagcacctcatcctcctgttctcacactggggtgtcacagtcctgggaagttcttccttttcagttgagctgtggtaaccttgtgagtttcctggagggggcctgccactacccttgggactccctgccgtgtgtctgggtctaactgagctctgaaaggagagagccccagccctgggccttccaggggaagccttacctcagaggttggcttcttcctactcttgactttgcgtctctgcagagggaggtgggaggggtgacacaaccctgacacccacactatgagtgatgagtagtcctgccccgactggcccatcctttccaggtgcagtcccccttactgtgtctgccaagggtgccagcacagccgccccactccaggggaagaggagtgccagcccttacccacctgagtgggcacagtgtagcatttattcattagcccccacactggcctgaccatctcccctgtgggctgcatgacaaggagagagaacaggctgaggtgagagctactgtcaacacctaaacctaaaaaatctataattgggctgggcagggtggctcacgcctgtaatcccagcactttgggaggccgagatgggtggatcacctgaggtcagatgttcgagaccagcctggccaacatggtgaaaccccgtctctactaaaaatacaaaaaattagctgggcgtggtggtgggtgcctgtaatcccagctactcaggaggctgaggcaggagaattgcttgaacctgggaggcagaggttgcagtgagccgagatcacaccattgcactccagtctgggtgataagtatgaaacgccatctccaaaacaaaagaaaagcctaattccccaagaactgtcagtctttcacctgtctgctagctcccagggagaccccacttgccagggctgtctacatttgtcctgagatctcttctggtgagaacagcactttcctcaggaaagtttgttgaaagtcatcagatccatgattgaaaatcgaagctgcctgtggtgatggataacagctggggttaaaaagcagcagctggggcatgagcggtccacagtgagtttttgttgtttttgtttttttgggtgggggatggggtcttgctaggtctcaaactcctggcctcaagtcatcctcccattacagccttctgagtcactgacactacaggtgtgagccaccatgtccagcttgtagtggttttgaacagctcttgccccttcttgggaatctaggtgccctgcacgtgggtaaggctgtctgcagctgtgcccatattcaggaaggccggcaaggccctgagccctcacacgtgactgacctgaggtgctgtgcagacagcaggtgacggctaagggaaagttgagcactgcctagccgagcactgaagccacgcccggcacacagagagagacccactcggcaaagacttcgcttccaggcacctaaggaactctctgaccagtcattagctgaccactgccgtaactgaagagcggcttcagtggccacagctcgcagggaatggagacattaatgcttagtcagaattagttcagaaaagtcacccagcaaagaaacagctccaacaggcaacaacaacaacacatccttggcagggaagagaatctgacttccggagttgccacattatcgcccgtgaaatgtccaggttttaacaaattatgagacatggaaaggaaaccgaaaggacgacccagacacgggaaaagtcaccaatgggaccagcccgatgctgcaattgctagacaaagacgttcagtcagctcatttaaatatgttcaaagacctaaaacatgctgcatctgaggctgcaccggctggaacctgctgatctcggaagctaagcatggtcaggcctggctagtacttcaaagggagaaaccacgtgtaggcctggtgcagtggctcaca

SEQ ID NO: 1888648 - DNA, 4001 bp, Homo sapiens
ttggctctagaggtacaaaaatgaatcagacctaagtcctatactttaggagcacactgtctaatgaggagacactttcatgaaaatacaatgccataaaaaacttctaactcagcctgggagccctggaaggctccccagagcacacatttgactaaggttttcaaagaagtccaactaggagaagaaacagcaatccaggcagagagaatcctcaggaaggactcggaggcattcaaaggcaggatgtattcagtgaacactgagaggtcagcgggcatagaaggtgtgagggactgtcaggacagaaggctgagtaaacggaccagggcaagatgtctatgaagggccctgagagccaatatataagaaaacggttattaaacaaaatgttagtactagggctgtcacagcaaactaccatagacctagtggctaaataacagaaatttcttttctcacagttctggtggccagaagtccaagatcaaagtgtcagcagggtggttccttctaaggcctccctcctcggcttgccgacgcctcctcacatggtcttccctctgtccacgcatctacatccaaattcactcttcttaagaagacaggattcatactgggttagcgctcaccctaatgactttattttaacgtaattacctttttaaggaccctgtctccaaatgcaatcccattctgaggtacagggattaggacttcaaaagatgaattttggggggacacaacccagactctagcaaacaactaccacatgcataacacaagttaagtttaaaacattcacctctagagaagtgattccttttggacaacttttatacttttacccaatgaactcccaggcttttaaagatttcatctgccaaactgcatttattagcttacaacttcatcattttttttatttttttaaatcaaagacaaaatgtcaatcaaatttcatcagcaggaaacatctagaatgatcatactgagttgaaaaaaatgccaaccaagagaaaaagctgacattctaattaaaatgtgaaaacccgttgtgggataaacatgtgaccagtgataaactttctgaagaagacctcctgaagcgcacacacctacagctgcatcctgtgcgtgtctgtattacagctctcagcataccgtattgaaattctgtttctatgactggagcccgtcccacactctgaatttcctatagatagggaccatgtctcactcatttttacatctctagcagtgtccctgtgataagctgtaatgaagccattactacctcttcgtaatccccagagaccagaggagcccaaagctgaaaaacactgctcgaggatcttaaatgtaaatgggaagatcacacatgtgtacatatactcgtgttcatgtacacacaaactcctactttaaatgccaagacaatgcacatgaagagggctcagaagaatgataccggtggtgccagaggattctgaggaggagctgatcaaaagctggagcactcagggaagacttactggagaaggtgagatgggctttggaagataaagtagaatttggataaacaaagaagagggagaaggcattccagtgaaaaaaatgacatgagaaaattcagggacggaaaggaaacatttcatgcttttcagcaattaaagatttttttttttttttttttttgagacagagtctcgctttatcacccaggctggcatggcctagggataggcccaattgtagtaggttaaataatgaccacccaaagatatcaagtcttaatcccaggaatttggaaatgttaccttatttgaaaaagaggtctctgcaaatgtgacttgatcaaggatctgcagatgagaacacactgaattagctgggtgggtcctaaatgccatcacagtgtcttttcaagacagaggcaaaggaaggtaaggagacatggagaagatgatgtgaaggtgggggcagagactggagtttcgcagccacacgctcaggaatgctggggcagccaccagaagctggaagaggcaaggaaactactatagggcaaagtataaaaaaacaccaatttattattttatcattttgaatcttattagtttggcttttctttgagggggatgaagcctcactctgttgcccaagctggaatgcactggcgcgatctcagctcactgcaacctccacctcctgggttcaagtgattctcctgcttcagcctcccaagtagctgggattataggcgcccgccaccacgcccagctaatttttgtatttttagtagagatggggtttcaccattttggccaggctggtctcgaactcctgacctcaggtgatctgcccgccttggcctcccaaaatgctgggattacaggcgtgagccaccgcactcagcttttattgtcttgaatttcttaaccagggcattctttccccataccaggatacttgggaaatgtaattattaatgtttctaatgtggtattattttgctatacaaaggtcctgggctcaaatacatttgtgaaaatattaaatagttcaaacagctttatgtcataacttcttggctcctatgatgatgtgcttgtgaagctctaagactggggagatacgacaccccgagcctatttaaccatggaatacttttacttcagagcatttctcagcactggcattccattggctattttttgataaatgctgaactgcagcaaagaaaggaatcgtcttgaagagatttcactcagaccaggaagcagcctaataatgaaacgtccatgacccactgaacagaacacttcagtagtaaccaaaatctttcgtctctaggctcctcatctctttcacctggacagggatggattcatatggcaaaatattcttttccaaacccagtttatctggtttttattaacaacaccttcttctgatggctattttttttttttttggagcaacagagtctcactctattgcccaagctggagtcaatggtgcgatcacagctctctgcagcctccaactcctgggctcagacaatcttcccaccttagcctccctagtagctagaactacaggcatgtgctaccatgtgcagctatttttttttatttttgcagagatggcgttttgcttagttgcctaagctggtttcaaacatctagcctcaagcaatcctgctgccttggcctcccaaaggaattattttcttaaatttgtttttatcattagttaagccagatagatttccctaatcaactggactttatttagtggctactgaggctgctctaacaagttaccacaaacttggtggcttaaaacaagagaaatttattctctcacagctctggagggtaaagttgaaaatccagcagggccacgctccctccaaaggctctagggagaatctttcctcgcttcttccagtgtctggtgactccaggtgttccttggcttatggctgcatacctccattctcttgctgtcttcccatggctgcctgctcttcctcccttaagaacacctgtccctgcatttagtgtccacctggaaaatccaggatcatctcaagttccttaattacatctataaagaccctttttccaaataaggttacattcaccagttgagtgggttaggatgctgacatatcttttgagggccactaactattcaacccactacaaccctgaaagaggtattagtgtcggtctgccaccaagctcatctctgggtaattacaaaagtttagacctgcaaagttgagggccagatcgcagccagtaaactcatctggtagtacctttctgcttcaccatgaaccatccccatcacctcgctcaaccaaacagcagaagtcattatttccattttacagacagacaaactgaggttccatgaatgtgagtaaaacctccaagggcacagaactaatcagtgacagaactggaattcagacttgagtctttatg

SEQ ID NO: 1888649 - DNA, 4001 bp, Homo sapiens
tgcttcagcctcccaagtagctgagattacaggcatgtgccaccacgccccgctaatttttgtatttttagtagagatgaggtttcaccatgttggtcgggctggtctcccactcctgacctcaggtgatgcacccgcctcggcctcccaaagtgctgggattacaggcgtgagccacagcgcccgacctgtgtgtcattctttaactctcgtcttcccttcaaaacctaacaatatcttaagatcaaaagcattcttcatttaggtttcgctttaaagataatatagatctttgccaaagtcagtaaacaaagatgaacaatccttgtgtcaggcctctgagcccaagccaagccatcgcatcccctgtgacttgtacgtatacgcccagatggcctgaagtaactgaagaatcacaaaagaagtgaaaaggccctgccccaccttaactgatgacattccaccatcgtgatttgttcctgcccaaccttaactaagtgattaaccctgtgaatttccttctcctggctcagaagctcccccactgagcaccttgtgaccccccacccctgcccaccagagaacaaccccctttgactgtaattttccattaccttcccaaatcctataaaacggccccacccctatctcccttcgctgactgtctttttggactcagcccgcctgcacccaggtgaaataaacagccatgttgctcacacaaatcctgtttggtggtctcttcacacggacgcgcatgaaaccttggtcgtgggccctcgtggtagagcccatgtcccccaagatttctttggctgtgttaccttagatttgaacaagcactgtacctaaggcgggcgccttcctcctcccgctttcaggaatgccctgctctgccattcttttgctttctcacttctctaatacacttgctttcactttagtccgtggactcgccccgaattctttcctacgcgacatccaagaagcctctcgctgggtctgagtggagacctctttctggtaataaacggactagggagattcgactttgaaggtgaaaacaaaaaccaccatccagtttataagaaggcgctcgaggccgggaacggtggctcaggcctgtaatcccagcactttgggaggctgaggtggtggggcggggggagggaatcacctgaggtcacgagttcgagaccagcctgaccaatatggtgaaaacccgtctctactaaaaatataaacattagccgggcgtggtggcgcacgactgtaatcccaactactcgggaggctgaggcaggagaatcgcttgaatccgggaggcagaggttgcagtaggccaagatcgtgccacttcactccagcctgggcgaacaagttaaactctccatctcaaaaaaaaaaaaaaaaaaagggcggcactggaaacagctgggagtgacagggccagggatgagggatcgcaagctgctggtgagaaaggagctcagaggctgcctggcctacgggccaggagacctcagcgcaaaaagcgcaggactcgttcccctgctctacagctgagtgcccaggacggatctcactggctgaaaaaaacagaagagaaggcacccaatgcaaaatcaaatgtcagcgaacgaggggtcctttaacaggcggcccacacggcccctcctggcgccgagacccagcccctccgggccaccccggccaggtacgaccagcagggtcacctgcgcgcgtcccccgagacggggcctcctgatgtgaagcgaccccagtggcacctcacacgattcccgagggttgcgggcggcctctcctcagccctgcagctcccacacgcggacaccgcgggcctcggccatgtccactgaccgaccttcctcgccggaactcctcgcgcatcgccggcccctcagcggcgactagcgcgcgaacatcctggaagacgcgttgccggccccacgtgagccgacgccccaaagcgcggctgctggcgccggctacgagatcaaggtcggcgcgtgcgcgcttgcgcgagaccggcattctcagccccgcgccggtttccagggagctgggcgcatgcgccgcgtaaggggcccggccggcggaaggaggtgctactgccggaagcgccggcgcgcttgcgcagtagctgaacgcgggcgtttctttcctccctttttttcgaattggttttgggggtagattcgagttacaaaatggccgcccggagcgtgttcggcgcggttcccccagctgtctctggctgaaccggcgctctcgcctccctgccgaacacagcgtgaggagcccccccagggatatggtgtttgagtctctgggcttgccgagcactaagtcctctgagttccgcagcgcagcaccggaagcggccgagcgcgctcagcccggcgacccctgcgggctccagacccctgcgccgctgcgccccgggtttcgccgcaaccaagacccagcgagtgcagcggcggccgccgaggaggtgaggagcggcggcgggcgcgggaggagaagaggctgagggcgggagcctggtgctgagagcccagggccgggagggcgggagcgggctcgggcctgggaggggagtgcgagtgcagggctggggactggaccctggggagggaggtgcgggttcagcgccgggggacgggcccctggggaggggtgcggggccgggggaccagaccctggggaggggcttaaggggctggaggacgggaccctgggaagtggggtacagggctagaggtcgggactctagggagggagcctgggtcgggcgcacgggccgggcggggcgcgcggtgggggagcgacgggtggagggtggggtgggatgacagcggcgacgcagccccggctgtttttgaagcggggcccgggccccaccgggctgcggcgtccgactcgagtgagactctcccctgcggccccgccggaggtagggggctggcagggctgtcctggcgtggtcttctccgtttccttcctagcgattcctctcgagcttcctctccccctggccgcccctcgtctctcttctcttgggcgcattacctctctggcctgtcttactgcgttcccgggttattcatcacccatttgctcggttccattaagaaccagcttggagattaggtatttctgtctccttacttggcccccttgttgttttcctccaacaaggcacttcactattaagtgtagccaaatctgtgttttcgttttaaggtgatgttgacaagttgagctttccaagggcagagctacaccagatgccagagaccacataactatatcaggcacaaataatgtttttttccagtttacctagactttcagtctcccaccacgttgcttcatacctagaaatcatgtctaatttggttttttacccacaaacgcaaacgttttttaaattcccttttattgattgtttgattgagactgggtcttgctttgtcaccaggcctcagtgtagtggtagctcactgtgtagcctgaagctcctgggctcaagtgattctcctgcctcagctttccaagtagctgggaccacaggcgtgcgccactacgctcggctaattttttatttctattcatctaatctatgtccatctttattttcgtagagaccaagttggtttccaactcctggcttcaagagatccttccgcctcccttaagttcttcataacagtagctagacataagactccaggtgccaggccttgttctgaatattttacagagggttttttctcccccccacttctagcataaaagtaaaatgtattgtctgaagtgtcatgctttgaaataaaatagggatttggtaaaatatttgtaaaaatctggtttgtaatccaagttattcttcttccatgctacaacttttacgttttggagggaaaatgatagtttatagcctttgcttctaataaaacttgtttctttaataattt

SEQ ID NO: 1888650 - DNA, 4001 bp, Homo sapiens
tactcccctaacatctaggacagatgggagcctaatttagaatcggcaattttagccaacattagggacatctaatccaaactctcctcacccacaggaaactgaggcccaaagtgggaggagaatttggccaggtcaaaggtcaggggcaggatcacaaattctcaacgcatcctactcttgctggccttgtcacttttgatggccgtgggggcaccaacatctacatattagttgctctacaattgcgattttctttataaagaagtcaagcccttcctttgctttagaaacatcaggtttgcaaaggaaggctgggaacaagctgaggccttggcaccgcaaatcctccgccttatcggcaaattaattcgggaccctgggcgcagtcagcctggcattgcagcttcttaatgccgcagcagaaggcagctggagcgtccgttttacaggtgaggtaggtgggcctccctcctcgcgttttccgcggtggaaactgaggctctgagaggacccaagtcgttcctccacggacacctggaacccatgggcgggggctgccagggacccaggcgggaccagctaggtcttgggctgcccccggcccagagggctcttggcgggcaggagccgcccccacgcccgaccccactaaacaggtcaccgagaggagaccgggtcctcgcccgcggacctcccgggccgcaagaggcgcgattctggagttggaggctccagggaactccagaaatcccagagagattccgggccaccaactcccccagaaagttggctcgcgtccacccccaagacggccctgaggcgcaggccaagatggcactgggcgggtggcgcgcggcgcccagcggccgcagaggagaaccccgtgcgaccctgccgcgaggtgggggtcttcgcgatccctacccggcgcgcgccagcctcgacgccgccgcacgcgggtgggcacgcgcgcgcccggccccgcccccagcgccccgcccccgccgcgcgccccgccccgccgcgcgccctcccgcccgcccgcgcgccgcggcccggagcctccccattggccgcgcgccgtcacctgacgctctgttatttcctgtgtgttgggagaatggagagaaaaaaccccgagcccagccgctttcggcccctgcgaggcggccgcggcctccgccaggggagcccgccctgaggcgcgcctgaccggggagcgagcgcgcgggccggagcgagcctcgaggggccgcggccccggcccgccccgccgccggcccgggcgcccgagctggaggcggcggagccacccccacccccaccccgcgcagcgccgcccgccgtcgccaccgctccctccccgcccgcccccggcggaggccgagggactgggcggggggctcctgcaggtaaccgcctcccgggcctgaggggcagggagagggttgggcctgaaggactggggccgggccggggtgtccggcctcgggggctgggagcagaggtcccggccggacccaacctgggagtgcggagcctcctggactccgagtcagggcttggggtgctgaggggagtgttgctgcccggcccgacccaagagtgcgggcaggggcccgggccaggcctggcatcagagggctaaggtgtcttgggccggcccggggttccggcggggcttgggtgccggtgctggcccgagggtgcggagggaaggtctacctgctggtcgcgcgaggccttgggtgcaaaggcggcgggtgtgagcgggcggcgtccgggagtcagcgccgcctgcttcggggcccctggcagccccgggggcaccggccgcgctcgcctcttggctacgggctggaggcgaggccagcggggctgggccgggatgtgggcgggagggcgccgcgctggggcgcccaggagagcaggggcccgtttactgccatgtgaacacctgaagccatgtggacgcggctgcttctcgcctgttgggggcggagggcaggtaccggcgggttgggcgcaaggtcccggcgcaggacacacttcctgtgtggggcggcctctcctcccgcgccgcggggaacagggcggggtgtgcaagccggggtctctgggcgagggagcgctcgtttggggacctgaggctttcgtccctttttcgggggaaagtggtggtttgaaggagcgtggccaatcgggccgatccctctcaggctacggcgggaggtgcactgtcctctggacgccggaatgggagtggaatttagtgagttggggggcggtgccgaggagcggccgtcttcctctgcttgtgggtgggattattgtctgtttttgtggttgcggataccaatacggtctgctggtctgtattcaatcctttagtttgaccttaggggtcaggtcaaaattaggatttcccccttttcctttttgcttttttttcctcgaagattagatgtctctggtaactgctgtaaaatggatggaattttcgagctattatctaacaggctgatctttgaatgataattggacccttatgttaacagcctcagtgaagagtgaagagttttatacagcatcttccgtggggtggcagttaggtggatggggaagctacactgaattccgacctgggagaccaggaatctgcttacagctttgacgccaaataaactgcagcccagggcaagttactttccctggtaattttctcatctgttaagtgaggactcccgggtcagacggtacaggggtttgtggttttgcttttttatctctcattttgtgctctgttttagccataggcaacttttctgagaaatgcagactgtaccttagctggcttttaaaagcctgtctttaagcttccagcctctgccttcaacagagcataaaagttggtcagggtacgctcttttttgaaatcccacttgctgttctgtgcttcagatcagaaagtgtattattctgacctaggtggaatgcaccttaacatattttttgtctttgtgaaagaagttatcagaaaatgtttcagagaatatttgtctacttggaaaatgtgtggataacatgtgattgggtctgtgtatgttggctcagaggagttccaagatctttctacgcaggggattttggaggatccagattttattaaagttcttcaaaggacatttgacatttggctaactgttgaaatttccagccagtttcagcattctcagagtagggggatgaagtagaatgccataacatctcctgtgaaatggtatgctagtggaattaactgtcacctcagggtgcactgattatctgcatccccaactttctccttactggtagccagtgctccgcagatgctgaagaaccgcaattagtttcactgattttatggtgtgtgaaggccttaggctgtgcttttgactggtaagtatttctataccaacctcagaatttgtcttaaatttctagaactgtgctgctgggccggatatgagcccaatatgttacaatatgtctttctcagatcactttttatttttatatattatttaatttttaaaattaaatccccttttatttacttatttattttgacacagtgttgttctgttgtccaggctggagtgcagtggcacgatctcagctcactgcagcctctacctcccagtttcaggtgattctcctgcgtcagcctcccgagtagctgggattagaggcatacactaccacacccggctaatttttgtattttaagtagagacaacatttcgccatgttagccaggctggtcttgaactcctgacctcaggtgatccgcctgccttgacttcccaaagtgctgggattacaggtgtgaaccactgcgcctgggctagatcactttttgattcagtctctttgaacagtttccaaaaggatcccagcataggggcagagtgcttataattattgacttcggagacagtttggtagtaattttcttg

SEQ ID NO: 1888651 - DNA, 4001 bp, Homo sapiens
agccacctgggaaggataaagggaaacacgggtggccacctggggctgatggaggaatgaggggcccgctgggagtatcctgggcaaactcacctctgggcatctgccctgatcttgggctggcgtcacaaggaagttggtcaccaagaagaacacgttctctccctaggaggcaagtctcaaagttggcctggctgggcttgcattgactggaaaggccagaagccggcagcctggtttatgagggaagggatgttggccccatgaaatcattaaccctgtccccacgtaaggcagattgaagcagagatgggaggctggcagcagttctggccatttctgagaccatgaagcctcatgcccatgtccatctcttgagacaagtttctttctcatttgttcaaccaaaatatcttttattttctttcttctttatttttttttttgagacagagtctcactgtcacccagactggagtgcagtggcatgaactcggttcactgcaacctctgcctcctgggttcaaaggattctcctgcctcagcctcctgagtagctgggattacaggcgcacagagtttcactttactcgtccaggctggagtgcagtggtgtcatcaacccttactgcatcctgtaactcctgggctcaagagatcttcctgcctcagcctcccaagtagctgggactataggctgtaactaccatgcctggcgtcaaccagaatattacgacagcctgctgcttctagtactgaagatccaggggagagctgggccctgcacctgccaggatggagaggaggtgagtctcccatcccacacacagcagcactggcatggcagggcacaggtgagaagacagaaagctctgcctgtggtcaaagggtggccaaggatgttggaaggggaggctgaccctccagtgctgcccatgagaacactgaatttggggaatgcatgcccaggaacggaaggtgagggctgtgcagagggtgctgagagtggcagccattgggattaggagggatgggtggccactatcattggcggggggcctcctgagggtagaaacaggggctgcaggctctcatgatgcctggtgtgaaagttcagcttggctgctgtgtggtgtgcaccaagcagtagggaggaggcgagaggggcatctaagggccttctaggaggccatagtctcatgcaggcatggcatgggcagtagtgaaaaatgttggaagggacaggaaggggttgaggctgagtcatgggtctggctgaggcactagtggatgtcacagccatcatgactagtggatgtcacagaggccatgccaggagagggaaataattgatctttggacatatgagtgtgcacctggaagacagctgtgctctgggcaggtgttcactggggctacatacaccctgggaatcagaggagcagaggtgggtggaagttaaggctgtggataagctgggtggagggaagaggaaaatgcagctgagaagggtggaggaggagcacctgaccgaggtgccccaggtcagggagcagggctacaggaagttccacgccctggccccaccacacccctcccacaccactctcaagctcaagccattagtctcaaacactcccttcttttctgttggcagccttcggaaatgcagtttctctggcctggtttctcaacccatccctttttctaccagaaacctcctacacatccctgaaagtcctgttcaggtgccactcctctgtgaagcccttcctgagaacctgcagccacctttggcatcacatgcttctctctcgcacacactggctgcatggcgggtgttcaagctgtcagtggggaaaggacttgcgcccccgtcagcaacatcagggcccccacctgaggtggcttcacgaagtcggccacatcccacagccggtttccaagctccttgatctgagtcacggaaacccctttgagtttggttgtgatggaaatctggggttccaggtcccgctcctggtagccttttttggcgaggagcgcccacctgggaaggagaagatgggcagtgtggtgtccccccagcgtgtagtgacggggcagagctgggccctacatgctcagttctctccccacaccctacaggctcccagtccagcatcctctctggccccacttcccactgtagactccctgaacgagacagaagctccagccatgcatcagagagccagtgccctcagacaatcaccttcactagccagcacccacccccagcctcagtagacccagctccgagcttatagactcccctgaccggagatatagctggtggtctctctgggggcctagtgctccagctctcacagatgttaaggacaatgtcttgtgccccctgggtggggccgtggggagggactgggaagcaggcaggtggacacacaggacaaacacacagcttgttcttgctctcctgtcttgtattgcctacctcccaccccgtcccattatggccccttcccctccagcccctaaacagcccaaccctcaacttcaacccagcaggaccaagccccacccccgacctcttcccttgcccctccagcctggccaaaagctcttctctcttaccctaccacatagacgacgatcccaaactgcagcagcctctgcagggcgcccccccaccagttcctggtcatcacatacttctccgttttataatccagaagcccctagtctgctgtggcccctggggagcccatgctgccagctcctgctagctgcgggcacatgagtcagcatggcagctgcagccgcagctgaacaggaggcaaagcagggcccgagccaggccacgccagccgctgttaaagggacacttccactaaagcaggatccagcctccaacacccagccttcagcccctaaccccagctgccctgcacctcccaccctccctacattctctttgctgggccctggtggcacacagaaaacagcagctctgtccctgccctctggcctcacttcctccggtgggagtggacgtggtgagaggatggggaaggacagctgttatcagtgctgtgagaagacggcctgagggcagcaacagccccgggggggctctgagtaaagcttcaggaataagtgacttctgagctgacgcttgcagattctgaagttcaacaagcagacaaagatggggatggaggttcccaggggagcgaacagcgtatgcaaaggccagcgcatgcaagagaactgagagccacagagtgagagggtgacctggctctgcgaagttccccaggccctcctgaaaagccattcccaagtgcagtgaagaaaacacaagctctggagtcaggcatgtttcccattccatgaaaggggggcgatgctggaaccgcctaggggaggcagggggataaacgcagcaaggcgcccaatccggtgcatggtctgtggcgcatgcagtgtatcagcccgggcgaggagcctcagcacaagccggccacagtttctacggcaaccgacaacaccgggttgccggggcgaccgccgcgggagagcgcgtcgctattggctgtggggggtgcctgttgctggacggcacattcggttggtcagcgcagccgcagactccgcccacaatcccgggccgcgctctgggcgcggggtcaagctgtctccgactcagtgtctgagactgcgagagggtcgtaaccatgaggggttcctgtgagaggtctggggaggatgaagagcagaaagaagaggctatggtggcctgtgggcgtctttcaggggtccccgaggccgagcagggtcccgaggccaattgggactccgacctggagacggaaggtgctcgggggagggggcaggcccgactcctcccctttgggggtcttctcccgcaggggttgggggaggcgggctggggctaaggccagcagggaacgtacccgcctgcggggcgcctccagccc

SEQ ID NO: 1888652 - DNA, 4001 bp, Homo sapiens; identical to SEQ ID NO: 1562880

SEQ ID NO: 1888653 - DNA, 4001 bp, Homo sapiens
tgagaggatgaaagggaagatttggccaaaatttcccagtcataaggagtaagtctatttccatgagcaatggaatctaataatgttcttatataaggggagttggatccatattgtttaactccttcctttatatcttttaacattttcatggtgaaaggttcacatctagtctcagctcgggcaggcgctcctacttgagtctcttccccggcctgtaccagttgtaaaattaccaggaaccgccatgcctcaagatcgccctgttttctggcttcatcaatgactgcatgcagtgcaccaccctgtccactacgtgatgctgtaggattaagtctcacagtgggcggctgaggatacagcgccgcgtcctgtgttgctggtgaattagacgccatcgctgtgggttgctggtatggtgccgtgctatttggcacaggacacaccgcttgaggtctgtattgaacctctgaaggaggccgatactgaagctcggttggcagccggtattgataaactaccagcggttgggtcttattttctaccggctgatattgtggatactgtatctgagttggcattgccgggatagagactctgtccctttctacttgattttctcttggggtttgtgcttgtctaacctgcgtttgaggttgtaatgttacaggcatctgaaccacgggaggaggagttgatggcgatcgtggtttaggctctgatggccccaatgattctggacctccttcccccaattttgatgattcagggtatattatctcctgtaattgactgtagtcaacattttgcgttgactgagccattacagactctgctacatatttacaatgtgaactttccgttccttgctgggattctgtccctgcctcttcttcacaatctgttacacagcttttaggggcatcagaaactgaaacaatatcttctcctgtttgaaatggttctaaagttgctttaataatggcccaatcattccatactgtaagtgggatgattttaccttccctatttgcttgttttaattctttgccaattttttcccaatcttttagatctaaagttccctgttctggaaaccatgggcagaattgttctattgtttgaaatagcgtaattagattttctgtagaagctctaactccccctcttcttaaaagaattttaataaagctgagataagaggcatatttactttcagtttgccccatcgttaccctgggttcctctaagcacacaagcttaccgcaaggctgaccgtggacgtacttgggactctctcgtcaacttgtcctcaatgaccacactgtagagtaccttcaccctagagaaaggcacccacattgggcatcagatgaagggggccagcccctccacacctgtgggtatttctcgtcaggagggatgagagactgaggaaagaaataagacacagagacaaagtatagagaaagaacaatgggcccaggggaccagcgctcagcgtacggaggatgtgcaccggccatggtctctgagttcccttggtatctacagattactattttcactatctcagcaaggggaatgcggtgggagaacagggcgatagtggggagaaggtcagcaggaaaacatgtgaacaaaggaatctgtgtcacaagttcaaggggaggttctgtgcccagatgtgcacataggccagatttatgcttctctccacccaaacatctcagtgtagcaaagagtaacagagcagcattgccgctagcatatctcacctccagccacagggtggttttcttctctcagaatagaaggaatgtactatcgggttttacaccaagacattccattcccaaggacatgcaggagacggaggccttcctcttatctcaactgcaagaggccttccccttttactaatcctcctcagcacagaccctttacgggtgtcgggctgggggacggtcaggtctttcccttcccacgaggccgtatctcaggctgtctcagtggggggaagccttggacaatacccaggctttctcgggcagaggtccctgtggctttccgcagtgcatcgtgcccctgattaatggagaatggagaatggcgatgacttttaccaagcatactgcctgtaaacacattgttaacaaggcacatcctgtacagcccttgatcccttaaaccttgattccatacagcacatgtttctttgagcacagggttggggctacagttacaggttaacagcaggtcaaggcaaaataatttttcttagtacagctcaaaatggagtttatgtcttccttttctacatagacacagtaacagtgtgatctctctttcttttccctacacaaacagccgcgtggcccagccaggtccatccccttggcaaagtcccgctgggtcccgggtgctggggtcctgccctgttcggctgtggtgaaaacgcctccttctctctgggtccccagagaaaacccctgctctctccactctgcagcctcaattacaaagacgaacacacatacgccccacagatgtgcacacacacacacatacacacacagcaggagctgcgggaggaagccaggcagccagcggggacccgggagggtggaaacaccacaagaaccaggggctggttttcttttattgtattaaatagttaggcagacagtaggagaaatacacaaggaaaggccaggtgccccgaacccaagtccagcgcctaaaatcctgccattcatttccaagtctctcgtgggccctctccctccttctctctgctcctctttggggcacacctgtgctctatggtctgcatggaggggaccctaccctgaaggggtggcctgcccctccacacctctgggtgtttctcatcaggtggaatgagagactttacttttagtttgccccattaaccctggcttcttccgagcgcccaagcttaccacaaggctcactgtagacgtactcgggaatctctcgttgacttgtcctcaatgaccacactcgagagtcccttcaccctagagaaaagcatccacgttgggcaccagatggagtggcctgcgcctccacagctgtgggcatttctcctcaggtggaacgagagacttgagaaaagaaagacaacagagacaaagtatagagaaagaaaagtgggcccaggggaccggcgctcagcatatggaggacccgcgccgcaccggtctctgagttccctcagtatttattgatcattatctctaccatctcggagagggggatgtggcaggacaatagggtaatagtggggagagggccagcaggaaaacatgtgaacaaatgtctctgcatcataaacaaggtaaagaaaaaagtgctgtgcttttgatgtgcatatacataaacatctcaatgccttaaagagcagtattgccgccagcatgtcccacctccagccctaaggcagttttctcctatctcagtagatggcatatacaatcaggctttacaccaagacattccattgcccagggatgagcaggagacagatgccttcctcttatctcaactgcaaagaggccttccttcctcttttactaatcctcagcacagaccctttacgggtgtcgggccaggggacagtcaggtctttcccttcccaagaggccatatttcagactgtcacatggggagaaaccttggacaacacctggctttcctaggcagaggtccctgcggccttccgcagtgtttgtgtccctgcttacttgagattagggagtggtgatgactcttaacaagcttgctgccttcaagcatttgtttaacaaagcacatcctgcacagccctgaatccattaaaccttgagtcaacacagcacctgtttctgtgagcacagggttggggctagggttacagattaacagcatctcaaagcagaagaatttttcttagtacagaacaaaatggagtctcttatgtctatttctttctacat

SEQ ID NO: 1888654 - DNA, 4001 bp, Homo sapiens
ggaggactgctcccacagttccctcaaattgaaatcacctgtccatttgactgcctcctacaagacaacaacagaccataccccagtcatgtaggtgtgcaccagcctcagcccaatcctgggccgtcagctgctcagaggggtgtgtgaacgcagctggtgccagtgcagggaaagtgcggtgagtggagtctgctcagctgcctcgggtgcgtgtttatgcttctcagctcaggccagaggagaagcagagccaggcatgcaccggcctccaatgaccgtgcaacacagtcaaggccagggctcaggggggtctaactgcttttccgtccctacctctggcaccctcagggctgcccacgttgcacccctgtcctgcctgcctccaccatgagcagctgcactgttgagggttacctgggggaacaagctggctggcggtcaggtacttcttatctgagaacatggcggtccaaaatttaatcatgatgcttatgtcttcacgcagccgcttctctccttgagtaggaaactttgggggacagcttcaaacaaccataagaggacaacggctgagtgtctggagtcagggactagaggccagtcacacaaagcagtgagaaggtgatgcagacaatttcttaatgacaaaaggtcagcccaaagccagtcattagcaaggatgatctggcccattcccatgggaaggtgtggtggctcgggagccctcttatgccctcctccctcactgcccacagcagcccctacagctttccactgaagctgcacttgtggcagatcagggcaaggaagctgcactcacacaacagcacagcctatgggtgcagagccccaggcagtgggtgtttgcaattcttcgtgcaataagccttcacattaacagggaaattaaatggacgcacttaatctcctaaatcagttgaactgagggaaaatttgcctacatctcgctgggaggctagctctaagtacacgggacacatgcacagggctgaagggtatttaaatccacagggccagggatactgaaggaggaggttggtgagcacaactgggcaactgtgtattcctgtgagtgacttcctgggggtctggggcgatggagcacttggaggggctgggccgtccctggatgccgcacagcacatcttgggggagtacctgaagtagtcaaaggcagtggagtagatcttctcgcgaagcacattgcggatggttgcatttggaaccacatcggcatgcaggagggacagccccagggtcagcagcctgtgagggagccccggacccggtcagagcaggagcctggcctggggccaagttcaccttatggactctcttccctgcccttccaggagcagctcactgaaatgtgttccccgtctacagaagtaccgtgatacacagacgccccatgacacactgtacacaccaggggccctgtgctccccaggaagagggccctcacttgaagcggggcccgatggccgccacatgccggttcatgctccccttggccccaccgatgttcagggacatggagcgctgcagcaggctggagaagatctccacttggtcagagctgcagtacttggcgatctcaaaccgctgcaccaggaactgagcgaaaagaggaagacgctgtggtggtggggctgagccgggctaaccctggggccggcagagacagctgaggaggggttctgggctgactggccgagcttgccgaaggccttgggctcggctacccccaccccaggaacagtcctggccccccaggtggagcaccccacagccttggtcggggaacaggcacgtacgtcgatccagatgtagtggggggtcacttcggggggacagggtttgggttgacttgcttccgaggcagccagggggtctgcttcctttatctcagcagaaaacaggccaaatttctgctccactgtcatgtgccagcccctgccatctcccgcatgaactacaggtacagaaggaatgttagctcctctgtgaaacacaaaaaggggctactgtcaagttttctctaattaaaaaaaggaacacgtgctcactgaataagatttagaaaccaagaaaagtatgaagaaaaaaatgaagatcgcctatagtcccacatcccagggtcatctgtgtcagtgcttggtgtattttctccagcctctcgaggctgcattctgttcaacccggttcaccgtgtggacattgcaggtgtgaggtggcagcacccgggatgtacctgatgccctgacaggcactgggtaggtgactcttctctataaccctgataaccctctgtggctgtgagcgggaagacccctctgtgggctgctgagctggcaagggcagaagagggttctggatccagggcctggctcctcctctccaccccacacagaccctacccgataccttcatcccgctaaccagattaggaaggcccatggagccgaggcgagcctgcagccaccatggccaggcctgggagcccagggtcaggctgctcccatggcccagtcatgctcagccaggtccccattccgtgggggggcatgaggggtgcccagagggagcagcatggtgcccgggagacacctgggtgctgcagagagtaagaggtgcagctcacacatggaaagcccccatgatttctgggtgtttttacaaggagaccaacaaacagcatttggcatctggccaaagaggattctatccctctgttgtcccagcagcaccagcttctacaagggctccaagcgcctgtgcagaggtggcaacgaggcctagtgagtagaacacacaccgcggctccctccccagtacccatcccctcccttcttcctcatgaggtggatcagggtggccacgtggccagtcacagggctctcagccagggtccctgctggctgaggcggccactgttctccccggccactctaatgagccagggagagtgaactgggcaaggccctgggaacacatgccagggtgagcttcataaggtcaaggcagctggcctctgccctttgcactctgtccttgtcttccttcctgctgggaggcacagaagccatctggaggctgtgagggtggagacaaaggccacataagcccaggatggccaggagccgacaggagcctggggcggggctctgtctgctgcttccctctaagctgcccatggggtgaggactcctgggggacgaggcactacagcctgctttgtgtttcctgcagaccgattagtcttatggaagcagacaagggagcaaaaaaatggcggtgggggggaccccagaactgccacggacaagaagccatcgaagagacacactcccatctatttgttaaacaaccacatcctggtggctgcctctgtgccagggcctcgtggactctgggcatggtgctctgaatgaagacaaacatgaccacacagtctatggtggggaccacagacaacaagaaataagctacacacactgagaaacactaagaaacagcagtgcgagtgagcgtgtggccaggtggccagggagagccctggcaaggaggggacatctgagatgagccctggaggagacgcaggagtgaggcgcaaggcacggccatctgagaagagggaatgcatgacgcggcctatggtgggagcagcccaggagggcagcttcaaaagtgaaactgatgggatgtgctgagaatcatccgtgggaagtgcaagcaggaccccagcatggccacagcacagcaagcgaggggaagagagaggatggaagtcaggtgggaagggggcttgcaggtcacagaaacaagcccaccttcgagtctgtaggggggctctgattcccccctggcttgcgccaaccgcatgtggagaaggggaagatgcctggggttggggagcaggaggccaggccagggggcagcagctgggatgctgggacttgtcagatcctggataa

SEQ ID NO: 1888655 - DNA, 4001 bp, Homo sapiens
gccaactgaccagagaagctgggccacaggcactctactacaacctccctcccccagcccgacactggcctgccgacccacctgagagctctgacctcccaaggcaggcagctggggagcctcttcccagccttccaagtctactgctcgtcctgtgggacccagagatcttcacagtctcaatggcacaagacggaacgttcacttccaggcaacaatcctgggccacaggactcagttcagcccccaagtatcagactcccggccctgttcttggtgttcagagcccactaaaccagcagtcttgccacacagctttgtctccagaggccagctcatctgctttttttcacactactccagcaaccctgctccaccaagcacgcacactctccttgacacagggctccagaccaaccacatggcctgtgctcctgaaaatgcctgcctgaaggcccagggagtccagacactggcagatgagaatggacgaaaagaagccaagccagaagccaggaagcaataaatgctagacccagaaaggccttaggtttgagtgacccagctccatccctccatcctggatccttggaggacagccccaagttcagcctaggagctcccaaggcccctccactacctgccagctctccgacagcacaagagacacagcaatcccacatcagtcaacaacccaccgccacaggattcctaggggcaaggctctgcccctccccccagcacatatgtcagaggggtggcttccctgggttacacccctcctgctgttgggggagtggggggtcggggaacacagctttccagatgtgcttggcaactcctactagaaaagactaggggtgcgggggacaggagaagacatggataaataactttaacaccgctccaacccatccggctcagcactgggctcccttacacaggcagtcccaggcagttctgggtggggccgttgggagcattatctggcctcattccctcctctcagcaagtcactgccccccagggagaggcattcccccccccccccaaccacgcacacacccaggcctgtgtgaatatgaaccatcttggaagataaacagagagtgacaagctggggcccctcagccccctccctcagccagccggtcccttccccctgaaagccgaccccctcccccaagcccatctctcttcctgccaagcggctgcctacaggagaggtctgggggcagggcagcgagcccaccagccgcagagcccggccctctgggagcggcccctccaggcccgcccctgcccctgccgtggccagtcttcccgcggggaggaggcaagagaggagaccgcagacggtgcaggaccgcagtcctggaaatcgcaaaatcctctagcgagggggcggccgcgggcgcagggccgtttgcataatgggagccctcccgcctgtcaggcagcgcagctcgcccgacgctgttcggattagattgctaatgaaaaggcacaaagagccggcgcccgctcgcccgccgacccccgctccgcagacccgcgccgcctgggcctggcgcggcccggtgggctttgtgccccgggtgccccaccgcccgcgcccctccgggcatctggcccacaaagcccgggcctgccaggggtcccgcgtgcgccccagcccaggcccgccagacgctagcgcgtcccccacgcgcgcagtcccacgtcgcccgggcgcgcgcgcgtccacgcccctctccccggggacgcgcccagcccgcggccccggcccccgcccgctccccgcgacccccgccccacaaggccgcccctcacctcgtgtgcgtcggcggcggcgctccgcccgccggccggccggccctaccagcggcccttgtcctcagcgcccggctcgcgccgcacgcgcccgccccgtccgcctgccgccagcccggctcggctccccgcctagcgcgccccgagcgccgctcacagccgcccgcccagcgccatcttggaagcttgtgacgtcggcgccgcccgctcacccctgacccacatctgaatgggcgagcggcggggcggggacagggggcagcagctgggggcgtggcctgtgaacaggggcggggcctgcgggggcggggccgggccggacagcggtcccagcactaggcggggcgggctgccggggtccggcgccgtgggggaggggtgcgcgggaggagccggggacccagaccccggacatctaaccggactccgacctcaagcgccagggcaggaccgcgacctcgcccctgaaatacccggaccgcataccggcccccgggacagggaccctggccccccccgacaggctgacgcccaccccctcaaactctggtggacttacccccttttagccctaccctgacccctaggagccccgaattagggacctctatcggcctacgcgccccctccccgacccctttgcgacccctgctcgacgctccctgcggttgcccgaggctcaaaggcgcagccagcagtgactgcaagctcgggggtctgggctcctggggaagcccgggctggttgggtgcaaaagagaaggggcgcccctcccgtgaccccagcgcccctcgggcccccgcgggcgcacccccgcgaaccctacctgctccgagggcgcggaggacccagcacgctgcgctcagccagccccttccggtggccgcagcccctcgcaggccccaggggtcaagcgcctgcccgagccggcccaccaggacccgggctcccggccgccatgcagatagccttcccaggggctgggctggcctgagccgccactgcttctctagggagctagttaatggacctctctctactttgaacaccaaacaaaggaacacaccactatcgaggtcgcccaagtccaagaggagcccaggtctgccttacagggaagttgtgccccagctccagtcaagatcaaaaaccagtttcaataacccttcgccaagctgatgatgcaacctttctttcctaatggatgtataggtttaatgtcatcctaacaacatttcttagacttcacaaaattctaagttcacctggaaaaataaatagccgaaaacagctatggttttccccccttgggaacaaaagcaggcatgagggtagacttgccctaacagatatcaaaacaaattgtaaagctaccgcaggcatttcagtgtggtacagaacaggaaatagaatagaaagcctagaaacatcctagaaatggtaagaacacaatagatgaaaaaggaaatatcaaacatctgtggaaaaaaaagagctatcaaacatccctgaagaagaacaagaatattccacaaatagagcctagcagaggactcactatttgaaggaacgactgaaaaaaaaagtcaaccattctactaacccaagacatataaattaaaactataggccgggcgcggtggctcacgcctgtaatcccagcactttgggaggccaaggcgggcggatcacgaggtcaggagatcgagaccatcctggctaacacggtgacaccccgtctgtactaaaaatacaaaaaattagccaggcgaggtggcgggcgcttgtagtcccagctactcgggaggctgaggcaggagaatggcgtgaaccccggggggcggagcctgcagtgagccgagatcgtgccactgcactccaacctgggcgacagcgagactccgtctcaaaaaaataaataaataaataaaataaaactataagaagctgggttttctcctaaacaaattaaaaatcagtttcaagtgataaccttcaaacacaaggtctgataggtaatcactctcatatacttttggaagcacataaatcacctcaaaattcctggacatgagtttggcggtatgagccaaaagttgtttttttggggttcttttgtctttttttgttttttggagactcggagtctcactctgttgcccaggctg

SEQ ID NO: 1888656 - DNA, 4001 bp, Homo sapiens
gagttggtgctcagctcacaccacagctttccaaagccacgctgtcttggagggtgatcacacagcttgcctcggagggctgctgtcaggatgggttgcatgagataagtgcctctaaaaggctgagcaccgtgcctgcctggcacacaatgaatgcttaatcaatacagggtagtatcatcatccttgctgtcaccagcacttccccagcttaacgtttcacaaatgctttttttttttgagacggagtcttgctctgttgcccaggctggagtgcagtggtgtgatctcggctcactgcaagctctgcctcccgggtttatgccattctcccgcctcagcctcccgagtagctgggactacaggcacctgccaccatgcctggttaatttttttgtgtttttagtagagaccgagtttcaccgtgttagccaggatggtcttgatctcctgacttcgtgatccgcccgcctcagcctcccaaagtgctgggattacaggtgtgagccaccgcgcccggatttttttttttttttttttttttgagaggaagtcttgacttgttgcccaggctggagtgcagtgacacgatcttggctcactgcaacctctacctcccaggttcaagtgattctcctgcctcagcctcccaagtagctgggattacgggagtctgccaccacacccggctaattttttatatttttaatagagatggggtttcaccatgttggccaggctggtcttgaactcctgacctcaggtgatccacccatctcggcctcccaaagcgctgggattacaagcatgagccaccgcacccggcccacagacacttttgaagcctctggcccttgctgtctgctaattctcatgtcgtcagaattgccactatcatttaatgggctgctttttcaattcaaactcgtgaaaatattacgaataattatctctgcactttgtcctgcctttcctttccatttccctggccaagactaatgtcacttttgaataaaatgaacaaatataattctttgtataaaactaggggaaacccagggatacagaacaggaaggctggtttatatgccaataactcatctgtaaattcatgtaaatgtaattctgtgcattatagctaatgcacctaaagtcaattcttaatgtctaaggatgagcaaatgtgtaactcttcattgtgtagaggggtatagagcttagcttgccatgtcctgggtacatttccagtagtcatttagttagtaccagtgattcccactcaagtgtcccgtaaggaggtaccatgggaaataagagcagcctcttggcattctgggtagggagcctgagccaaactctaaagctgtctttataaagggaggtcatgtgatggccagaaattgcctttgcttcatggtgcacttggtggggagtcaggtgtggggtgctgggtttcacatcatcccattttcttttctgccttcagacctgcaatgcttcttttgccacccgagaccgtctgcgctcccacctggcctgtcatgaagacaaggtgccctgccaggtgtgtgggaagtacttgcgggcagcatacatggcagaccacctgaagaagcacagcgaggggcccagcaacttctgcagtatctgtaaccgaggtaatctgcccactgtttcctcacttccagaggatgggcctgagcgtgtatgggaggcctaggggtgtctcaatcaccctgcctcagactccactctttgcacagccaccccctacttcccactgaatgataaacaccttcatcacccaactagctatttgctacctcttccttcccaagaagcttggggtgcttagaatgggaagtcccaggagaccagcaggtcaaaacagaaggagagaggttcttcccaagcttgggcccataactctcacctgctactcagatggcaggatggatgcattttgcagacaccactgaaccactgaggttggtgggggagttagtaggtcccaaagtgagagaaaaagaggttggtccggcttgagagcttttgctggttgattcactggcatatgaaattcagcagccagggaaggaggttgagtctggagataaacaaggagcagacactttgtagcacaagtagtcagaagagagcccaaactcaggtagattgtggccttgagagaggaaagtggaaggtgctctgagcagggcagcatgcttgaggacaaggtgggcctaagtagtgtctaactctgtggcagtggtgttgtgttgggtgaagtcaagcctgtccccaaggttctgccgggtctagttggctgttggaagtgctagatgtttgtgttttgcaagcacagcatcagtggaggcttgcactgtgtctgtgctaaaggaggttggagcagctatctgtgaacgtgaggatgcttctgcatggtgtgctttgctttggccagtggggagcactgggatgtccttatctcctggggcattcttgcttgtcccaatgcttccgaaagcctgcttagtgggtgcagcactgaaccaggagtcaagagacccagggtttagtcccagcctctcactaggtggcctcgagttctcccattccctctctaagcttgagtttcttcatctctcaaatggggttaagaatagccccctttcccacctcacagggctgttatgaggatcccaggagacaaggtaggtgaaaggagccgcacacttgggagactctatccttgcactttgtaacaatgttgggaaagacatgcttgttgacactctgggttggaccaggcacaacactcctgcaggccttggcggaatcgttgggtgcctgtgctgtgttcatgtgccgaggtccacggtggaaggagattgctgagtagctgggtgttcttggtgtcctggaactgggtccctccttgcagcttcatacctggggtttgtaccaccaggacacctgctgtgaaagcagggaagtagtagtgaaggtctcttaagctgtctgttctgttttctgacatgtcattagagcccattgctgacaggagcttcctccaggttgcaagcggtgggcttgcgcatgcagggagagttatcaggctgtggctgactgtcttgactggggcttccccagccctagaaataatgtcgtttcttgtcttgcttcatcctaacctggcttcctgacagctcccccggataactcaaaacctgctgtaacaagctgttagcaggcattttgtcaagttttcaatatggaagttcccagtctgagaactggggtcagagaccagaggttgaaaactgctgagtggagaagggtgctcatgataaaactcagaaagcccagaccagatggtggagtagggcagaaactggacaggagacccagggctacagcccttgaagcccagctcaggaggagagaaaaactgagagcagcagggacagtgggaaagttggcccagtaaggaagcagctgatgtggcaaagccaacaactattgtacatcaggatttattttccaagggctagtaaagagaacttgggcaacagccataagctacatgaccggaatggagaatccagaagagtaaaccagagtctactttttctcagaaaagccaagactgggtctggatcacaggccaaacatctctgggttccagagccagagcgggaagtccctttcctgcaagaagactaaagaaggtgctggtccaacccatgctgggtactcagaaagaagagaaaacaattgcagtttttatcagaagagaaggagcaggattctactcctggactcattccttgggcagaaataggaagagacaaaaaaaaaaaaaaaaaaaaaggaagaggataaagttctttctgagcaccaaaaacattgagacattggaatcaaaatgcagagagctctgtgtcctcctttgccctgctgccaccaagcctgtacctacaggaggggttgcacgaata

SEQ ID NO: 1888657 - DNA, 4001 bp, Homo sapiens; identical to SEQ ID NO: 1562906

SEQ ID NO: 1888658 - DNA, 4001 bp, Homo sapiens; identical to SEQ ID NO: 1562915

SEQ ID NO: 1888659 - DNA, 4001 bp, Homo sapiens; identical to SEQ ID NO: 1562916

SEQ ID NO: 1888660 - DNA, 4001 bp, Homo sapiens
gtcttcagcagtgacccggtaccccatctctaagggaggtggcagcatcaaaggctcccctcgcctgcgtggcagcaggggaaacttgcatctacggggcctagaggcctgggatctgggggagccacccctgggggcgagtgtctgccctggtgctgtatctgccgtcttttcacactggatgtgacccgaagagacagcctgaggtccgtcctcactcagtgtgtttcaggaactgagggtcagctggcagtgggatgaggctggcccctcttccgctttcgttccgggaggcctcccgtagagctgtaggggctcgagatggcatttcatttggggcacgagctggtccgggaggtctgggatctctggttctgacctctgggcacctgctgcagctgtggctgaggcccagaaatgtgaagggcctccatccactccagtagtgaccccaacgtggggttcagtgtggaggggggaggggctgctgtggcagctgcaggagcagaagtgccacgccttgttcttctcatgcctgcatccatgcttgcagctgggaagggggcaggaatcagcgaggtgacctgggctgagtcctgggaatcagaagaggtggcaggaaggggatctgaggaggagaacagggggcctggtggtctgtgcttcttcccagacacgggagctgtagaggggacctctgcagcagatgctaagggggccagtaggcccaggcagtcttgggacttgtgtgtctcctgctgtgcatccatactggatgctttagaaacagcaggcagaccagaagcccctgttgcaagtgaggacaaagtgtgggaaggccatgagggtctgcagtccgagatggccttgtcctcaacctgcagtgcactgttgatgcgctggaatgccgcctccttctcccggtccaggtcttcaacagtgacccggtaccccagctctaagggaggtggcagcatcaaaggctcccctcgcctgcgtggcagcaggggaaacttgtgtgtactgggcctagaggcctcggatgtggaggagtcattcctgagggtgagtgtctgccctggtgctatatctgctgccttttcacactgggtgtgacctgaagagacagcctgaggcctgtcctcactcactgtctttgaggaactgagggtcagctggcagtgggatgaggctggccccctcctccgctttagccccggcaagcctcccgtggagctgtaggagctggagatggcatttcggttggtgcaggagctcgtccaggaggtctgggatgtctggttatatctgatttctgacctctgggcatggaggtctgtctgcagaggcccgggcctgggcacaaagggagagaggcctccattgtcccgcaggggccgaaatgcagacggtgcatccccggtgacctcggggacccttctctgatcaccaggattctcttggactctagggtccttgtcctgctcaggcatccctgccccgctctccttgagggccctcaacactatcttccctggacacaagtctggggacagccgggtgttgtggaccccaaaggggtgactcccggctcctgggccccacagagagtccatgttctcagtgcagtggctgagctggaggacgccctggaactcggagcacacagcactggcttgctgtggtacctgtgcaatcaaattgaaggcaggatcccaggaaggaacgcagggcttgcaggatcaccgaaaaccttcttagagttgtcttgacaccactgatgtcaagtgtccgggtgcttgtaggatggcctgccactcagtccacgggcaggagcaacggggagatcccacaagcaaagtgaactgggggatgggctgaacgggctccaggcaactgagccctactggcaggtcctcggcctgggcccgaacaggaaggaggggcacagagtgcccaggtaaccgctcctgggagcagtggggaaccgtcggttgcttgaactctcgagagctgggctctgagcgtcctcgtccagccgccaactccgccaaaggctaagccagcagtttcttctgttgccgggcaacgcgccttttaaacctgagggagcgggcgcgtgagcacatcacggcgcccgtgacagagcgagcttaacggattaataagcgcagccaggtacccgcgcgaggcacttgctggcaatggcgggaggcggacgtggggggtcatgcaataggtactggaaggagagaggcgggcacaaaggtcgcgggaggaacaggtgcccacaatggtggcagatctgcccgtggatcactgaagattcctgctctcctgctgaggtggagattgcagtgagctgagatcgcaccattgcactccagcctgggcaacaagtgcaaaactcagtctccagataaagaaaagaaaaagaaaaaaaagaggccgggcgtggtggcttatgcctataatcctagcactttgggaggtcggggcagacggatcacgagatcaggagttggagaccagcctggccaacatagtgaaaccccgtctctagtaaaaatacaaatttagtcagacatggtggcacgcgcctgtagtcccagctgctccggcggctgagacaggagaatcacttgaacccgggggcgggcggggaagggattgtgatgcgccgagatcgcgccactgcactccagccctgggcaacagagccagactcttttttttttttttttttttttgagacggagtctccctctgtcgcccaggctggattccagtggcctgatctcggctcaccgcaagctccgcctaccgggttcacgccattctcctgcctcagcctctggagtagctcggactacaggcgcccgccatcacacccggctaattttttgcatttttagtagagacagggtttcaccgtgttagccaggatggtctcgatctcctgacctcgtgatcagcccgcctcggcctcccaaagtgccgggattaaaggcgtgagccaccgcgccgggccgagactctgtcttaaaaaaaaaaggccgggcgcggtggcactttgggaggcggaggcgggtggatcacgatgtcaggagttggagaccagcctggccaacatagcgaaaccccgtctctactaaaactacaaaaaattagccgggcgtcgtggcgggcgcttgtagtcccagctactctggaggctgaggcaggaggatggcgtgaactcgggaggtggagcttgcagtgacccgagatctcaccacagcactccagcctgggtgacagtgcgaacctccatctcaaaaaaaagagagagagagagagacagagagaaaaagtttattgatttaatgaacttttatgcctgtgttcttcaatttgcttaggaaacaaccacacttgagagctgggaatgtggccctgattgtggacatgaaatatgtggtttcttgcaaaaactagacactgaataattacgatttagttgagctagaaatccatttgatttcttccatatgtttccaaaattttcattctttttttttttttttttttttgagatggagttttgctcttgtcccccaggctggagtgcaatggcgccatctcagcacctgctggcaatggcgggaggctggggacgctggcggcataggtactggaaggagaggcgcgcgcacaaaagacttgagaagacctggcgcgcacaatggctgcagatccgccagtggatcactgaagattcctgctctcctgctgaggcggggattgcagtgagctgagatcacaccattgcactccaacctgggcaacaagagcgaaacctcgtcacacacacacacacacacacacacacacacacacacacacacacacaaaagaaaaagaaaaaatagtggccaggcgtggaggctcacgcatcccagcactttgggaggtcggggcgggcggatcacgagatcaggagttggagaccagcctggcca

SEQ ID NO: 1888661 - DNA, 4001 bp, Homo sapiens
cagcaggggaaacttgcatctacggggcctagaggcctgggatatgggggagccacccctgggagcgagtgtctgccctggtgctgtatctgccgtcttttcacactgggtgtgacccgaagagacagcctgaggtccgtcctcactcactgtgtttgaggaactgagggtcagctggcagtgggatgaggctggcccctcttccactttcgttccgggaggcctcccgtagagctgtaggggctcgagatggcatttcatttggggcacgagctggtccgggaggtctgcgatctctggttctgacctctgggcacctgctgcagctgtggctgaggcccagaaatgtgaagggcctccatccactccagtagtgaccccaacgtggggttcaatgcggaggggggaggggctgctgcggcagctgcaggagcagaagtgccacgccttgttcttctcatgcccgcatccatgcttgcagctgggaagggggcaggaatcagcgaggtgacctgggctgagtcctgggaatgggaagaggtggcaggaaggggatctgaggaggagaacagggggcctggtggtctgtgcttcttcccagacatgggagctgtagaggggacctctgcagcagatgctaagggggccagtaggcccaggcagtcttgggacttgtgtgtctcctgctgtgcatccatactgggtgctttagaaacggcaggcagaccagaagcccctgttgcaagtgaggacaaagtgtgggaaggccgtgagggtctgcagtccgagatggccttgtcctcaacttgcagtgcactgttgatgcgctggaatgccgcctccttctcccggtcaaggtcttcaacagtgacccggtaccccagctctaagggaggtggcagcatcaaaggctcccctcgcctgcatggcagcaggggaaacttgtgtgtactgggcctagaggcctcggatgtggaggagtcattcctgagggtgagtgtctgccctggtgctatatctgctgccttttcacactgggtgtgacctgaagagacagcctgaggcctgtcctcactcactgtctttgaggaactgagggtcagctggcagtgggatgaggctggccccctcctccgctttagccccggcaagcctcccgtggagctgtaggagctggagatggcatttcggttggtgcaggagctcgtccaggaggtctgggatgtctggttatatctgatttctgacctctgggcatggaggtctgtctgcagaggcccgggcccgggcacaaagggagagaggcctccattgtcccgcaggggccgaaatgcagacggtgcatccccggtgacctccgggacccttctctgatcaccaggattctcttggactctagggtccttgtcctgctcaggcatccctgccccgctctccttgagggccctcaacactatcttccctggacacaagtctggggacagccgggtgttgtggaccccaaaggggtgactcccggctcctgggccccacagagagtccatgttctcagtgcagtggctgagctggaggacgccctggaactcggagcacacagcactggcttgctgtggtacctgtgcaatcaaattgaaggcaggatcccaggaaggaacgcagcgcttgcaggatcaccgaaaaccttcttagagttgtcttgacaccactgatgtcaagtgtctgggtacttgtaggatggcctgccactcagtgcacgggcaggagcaacggggagatcccacaggcaaagtgaactgggggatgggctgaacgggctccaggcaactgagccctactggcaggtcctcggcctgggcccgaacaggaaggaggggcacagagtgcccaggtaaccgctcctgggagcagtggggaaccgtcggttgcttgaactctcgagagctgggctctgagcgtcctcgtccagccgccaactcggccaacggctaagccagcagtttcttctgttgccgggcaacgcgccttttaaacctgagggagcgggcgcgtgagcacatcacggcgcccgtgacagagcgagcttaacggattaataagcgcagccaggtacccgcgcgaggcacttgctggcaatggcgggaggcggacgtggggggtcatgcaataggtactggaaggagagaggcgggcacaaaggtcgcgggaggaacaggtgcccacaatggcggcagatctgcccgtggatcactgaagattcctgctctcctgctgaggtggagattgcagtgagctgagatcgcaccattgcactccagcctgggcaacagagtcagactctctcttttttttttttttttttttttttttgagatggagtctccctctgtcgcccaggctggattccagtggcctgatctctgggctcaccgcaagctccgcctaccgggttcacgccattctcctgcctcagcctctggagtagttgggactacaggcgcccgccaccacacccggctaattttttgtatttttagtagagacggggtttcaccgtgttagccaggatgatctccatctcctgacgtcatgatccgccctcccaaagtgctggcattacaggcctcggcctcccaaagtgctgggattacaggcgtgagccaccgcgcccggtgttgaaactcccttgaggcattttcttcggccttcgggtccatcctctgtctcctccttgacctcctcatctcctcctcgccactgccttggggaccttggccaggctcatggcatccagcagccactcaatgtcaatacctccatgttcatctctcagcccgcccttgcccgtgaacccatgcttatttatttattttttttatacgtgcacccatgctcttcaggtctgatgaagtatccaaaatcaagctcctgaccatcctcaaacctgccccttctgcagggtttacctcgctagtcggcgccatccttgattcttctctttctcccacccaggccatcatctcttgcctggttgatacccacagcctcccctttgggctttatccttatccccgtcatagctgccagagggaccctgtgaaaacactccccagcctgctcattcttctgccctaagcctgcatggcacagagcaaaagccagttgttatgggacctaggaggtcctgtgggatgggccccagcctgcatcttcatcctcttctccccaccccactccattcactctctgcctatcgctcaccagcctataccacctgcctcagggcctttgcactgaccatttaggccacattccaggctcttttcacacgttgcctcctctgagaagccctccctgaccactctgcccatacctcatgcctcttgattccccttacctggcttgtggtttcagcactttccctgtgtgtgtttgtttttcttggcatgagggcaggacctaagtgtctgttccctgttgattccccagttccaggcatgcagtgcaaattctagaaatattttttgcatgaaggaatgagtgattgaatgcagcaagggtctggaggctgaggaccaggcagacagacattcagagttgctggaatgcgacagagacagggagtcagactggtcatgcaagatcctgggcctgcccttgggtcctggggagccacggaaggttgtgggtgccagagggttgtggtcagagccacagtcaggggccttctgagacctgtgtcccctccccaccctccctccccacctcctcaggccagctctggggtctcggcaggtggtccacaacatgacctctgagttcttcgctgcccagctccgggcccagatctctgacgacaccactcacccgatctcctactacaagcccgagttctacacgccggttgatgggggcactgctcacctgtctgtcgtcgcagaggacggcagtgctgtgtccgccaccagcaccatcaacctctagtaggggctgctgggccgcct

SEQ ID NO: 1888662 - DNA, 4001 bp, Homo sapiens
ctacggggcctagaggactgggatctgggggagccacccctggggccgagtgtctgccctggtgctgtatctgccgtcttttcacactgggtgtgacccgaagagacagcctcaggtccgtcctcactcactgtgtttgaggaactgagggtcagctggcagtgggatgaggctggcgcctcttccgctttcgtcccgggaggtctcccgtagagctgcaggagctcgagatggcatttcgtttggggcacgagctggtccgggaggtctgggatctctggttctgacctctgggcacctgctgcagctgtggctgaggcccagaaatgtgaagggcctccatccactccaatagtgaccccaatgtgcggttcaatgtggaggggggaggggctgctgcggcagctgcaggagcagaagtgccaggccttgttcttctcatgcccgcatccatgcttgcagctgggaagggggcaggaatcagcgaggtgacctgggctgagtcctgggagtgggaagaggtggcaggaaggggatctgaggaggagaacagggggcctggtggtctgtgcttctccccagacatgggagctgtagaggggacctctgtagcagatgctaggggggccactaggcccaggcagtcttgggacttgtgtctctcctgctgtgcatccatactgggtgctttagaaacggcaggcagaccagaagcccctgttgcaagtgaggacaaagtgtgggaaggccgtgagggtctgcagtctgagatggccttgtcctcaacctgcagtgcactcttgatgcactggaatgccgcctccttctcccagtccaggtcttcagcagtgacccggtaccccagctctacgggaggtggcagcatcaaaggctcccctcgcctgtgtggcagcaggggaaacttgcgtgtactgggcctagaggcctcggatctggaggagtcattcctgagggcgagtgtctgccctggtgctttctctgccaccttttcacactgggtgtgacccgaagagacagcctgaggcctgtcctcactcactgtctttgaggaactgagggtcagctggcagtgggatgaggctggccccctcctccgctttagccccggcaagcctcccgtggagctgtaggagctggagatggcatttcggttggtgcacgagctcgtccaggaggtctgggatgactggtcatatctgatttctgacctctgggcatggaggtctgtctgcagaggcccgggcccgggcacaaagggagagaggcctccattgtcccgcaggggccgaaatgcagacggtgcatccccggtgacctcggggacccttctctgatcaccaggattctcttggactctagggtccttgtcctgctcaggcatccctgccccgctctccttgagggccctcaacactatcttccctggacacaagtctggggacagccggctgttgtggaccccaaaggggtgactcccagctcctgggccccacagagagtccatgttctcagtgcagtggctgagctggaggacgccctggaactcggagcacacagcactggcttgctgtggtacctgtgcaatcaaattgaaggcaggatcccagaaaggaaggcagggcttgcaggatcacggaaaaccttcttagagttgtcttgacaccacggatgtcaagtgtccgggtgcttgtaggatggcctgccactcagtccacgggcaggagcaacggggagatcccacaggcaaagtgaactgggggatgggctgaacgggctccaggcaactgagccctactggcaggtcctcggcctgggcccgaacaggaaggaggggcacagagtgcccaggtaaccgctcctgggagcagtggggaaccgtcggttgcttgaactctcgagagctgggctctgagcgtcctcgtccagccgccaactcggccaacggctaagccagcagtttcttctgttgccgggcaacgcgccttttaaacctgagggagcgggcgcgtgagcacatcacggcgcccgtgacagagcgagcttaacggattaataagcgcagccaggtacccgcgcgaggcacttgctggcaatggcgggaggcggacgtggggggtcatgcaataggtactggaaggagagaggcgggcacaaaggtcgcgggaggaacaggtgcccacaatggcggcagatctgcccgtggatcactgaagattcctgctctcctgctgaggtggagattgcagtgagctgagatcgcaccattgcactccagcctgggcaacaagtgcaaaactcagtcttcaaataaaaaaaagaaaaagaaaaacaaaaggccgggcgtggcggcttatgcctataatcctagcactttgggaggtcggggcggacggatcacgagatcaggagttggagaccagcctggccaacatagtgaaaccccctttctagtaaaaatacaaatttagtcagacatggtggcacgcgcctgtagtcccagctactccggcggctgagactggagaatcacttgaacccgggggctgggaagggattgcgatgcgccgagatcgcgccactgcactccaacctgggcaacagagtcagagtcttttttttttttctttttttttttttgagacggagtctccctctgtcgcccaggctggattccagtggcctgatctctgggctcaccgcaagctccgcctaccgggttcacgccattctcctgcctcagcctcgggagtagctcggactacaggcgcccgccaccacacccggctgcttttttgtatttttagtagagacggggtttcaccgtgttagccaggatggcctcgacctcctgacctcgtgatccgcccgcctcggcctcccaaagtgctgggattaaaggcgtgagccaccgcgcccggccgagactctgtcttaaaaaaaaaaaggccggggctgtggcactttgggaggcggaggcgggtggatcacgaggtcaggagttggagaccagcctggccaacatagcgaaaccccgtctctactaaaactacaaaaaattagccgggcgtggtggcgggcgcctgtagtcccagctactctggaggctgaggcaggagaatggcgtgaactcgggaggcggagcttgcagtcacccgagatctcaccactgcactccagcctgggtgacagtgcgaacctccgtctcaaaaaaaaaaaaaaaaaaagagagagagagacacagagaaaaatgtttattgacttaatgcacttttatgcctgtgttcttcaatttgcttaggaaagacctacacttgagagctgggactgtggccgattgtggacatgaaatatatggtttcttgcaaaaactagacactgaataattacgatttagttgagctagaaatccatttggtttcttccatatttttccaaaattttcatccttttttttttaattttgagacggagtttcgctgttgtctcccaggctggagtgcaatggcgcgatctcagcacctgctggcaatggcgggaggctaggggacgctggcttgataggtactggaaggagaggcgcgcgcacaaaagacttgggaagacctggcgcgcacaatggctgcagatccgccagtggatcactgaagattcctgctctcctgctgaggcggggattgcagtgaactgagatcgcaccattgcactctagcctgggcaacaagagggaaactccatctcacacacacacacaccaaaaaaaaaaaaaaaaaaaaaaaaacacacaaagaaaagaaaaagtagtggccaggcgtggcggctcacacatcccagcactttgggagattggggcgggcggatcacgagatcaggagttggagaccagcctggccaacatagtgaaaccctgtctctactaaaatacaaaaattaaccagacatggtggcacgcggctgtagtcccagctactggtgtggctgag

SEQ ID NO: 1888663 - DNA, 4001 bp, Homo sapiens
cagcaggggaaacttgcatctacagggcctagaggcctgggatctgggggagccacccctgggggcgagtgtctgccctggtgctgtatctgccatcttttcacactgggtgtgacccgaagagacagcctgaggtccgtcctcactcactgtgtttcaggaactgagggtcagctggcagtgggatgaggctggcccccttctccgctttcgttccgggaggcctcccgtagagcggtaggggctcgagatggcatttcgtttggggcacgagctggtccgggaggtctgggatctctggttctgacctctgggcacctgctgcagctgtggctgaggcccagaaatgtgaagggcctccatccactccagtagtgaccccaacgtggggttcaatgtggaggggggaggggctgctgcggcagctgcaggagcagaagtgccacaccttgttcttctcatgcccgcatccatgcttgcagctgggaagggggcaggaatcagcgaggtgacctgggctgagtcctgggaatgggaagaggtggcaggaaggggatctgaggaggagaacagggggcctggtggtctgtgcttcttcccagacatgggagctgtagaggggacccctgcagcagatgctaagggggccagtaggcccaggcagtcttgggacttgtgtgtctcctgctgtgcatccatactgggtgctttagaaacggcaggcagaccagaagcccctgttgcaagtgaggacaaagtgtgggaaggccgtgagggtctgcagtccgagatggccttgtcctcaacctgcagtgcactgttgatgcgctggaatgccgcctccttctcccggtccaggtcttcaacagtgacccggtaccccagctctaagggaggtggcagcatcaaaggctcccctcgcctgcgtggcagcaggggaaacttgtgtgtactgggcctagaggcctcggatgtggaggagtcattcctgagggcgagtgtctaccctggtgctatatctgctgccttttcacactgggtgtgacctgaagagacagcctgaggcctgtcctcactcactgtctttgaggaactgagggtcagctggcagtgggatgaggctggccccctcctccgctttagccccggcaagcctcccgtggagctgtaggagctggagatggcatttcggttggtgcaggagctcgtccaggaggtctgggatgtctggttatatctgatttctgacctctgggcatggaggtctgtctgcagaggcccgggcccgggcacaaagggagagaggcctctattgtcccgcaggggccgaaatgcagacggtgcatccccggtgacctcggggacccttctctgatcaccaggattctcttggactctagggtccttgtcctgctcaggcatccctgccccgctctccttgagggccctcaacactatcttccctggacacaagtctggggacagccggctgttgtggaccccaaaggggtgactcccggctcctgggccccacagagagtccatgttctcagtgcagtggctgagctggaggacgccctggaactcggagcacgcagcactggcttgctgtggtacctgtgcaatcaaattgaaggcaggatcccaggaaggaaggcagggcttgcaggatcacggaaaaccttcttagagttgtcttgacaccactgatgtcaagtgtccgggtgcttgtaggatggcctgccactcagtccacgggcaggagcaacggggagatcccacaagcaaagtgaactgggggatgggctgaacgggctccaggcaactgagccctactggcaggtcctcggcctgggcccgaacaggaaggaggggcacagagtgcccaggtaaccgctcctgggagcagtggggaaccgtcggttgcttgaactctcgagagctgggctctgagcgtcctcgtccagccgccaactcggccaacggctaagccagcagtttcttctgttgccgggcaacgcgccttttaaacctgagggagcgggcgcgtgagcacatcacggcgcccgtgacagagcgagcttaacggattaataagcgcagccaggtacccgcgcgaggcacttgctggcaatggcgggaggcggacgtggggggtcatgcaataggtacgggaaggagagaggcgggcacaaaggttgcgggagaaacaggtgcccacaatggcggcagatctgcccgtggatcactgaagattcctgctctcctgctgaggtggagattgcagtgagctgagatcgcaccattgcactccagcctgggcaacaagagcaaaactcagtctccagataaagaaaagaaaaagaaaaaaaagaggccgggcgtggtggcttatgcctataatcctagcactttgggaggtcggggcagacggatcacgagatcaggagttggagaccagcctggccaacatagtgaaaccccgtctctagtaaaaatacaaatttagtcagacatggtggcacgcgcctgtagtcccagctactccggcggctgagactggagaatcacttgaacccgggggcggggaagggattgcgatgcgccgagatcgcgccactgcactccagcctgggcaacagagccagactctttttttttttttttgagacggagtctccctctgtcgcccaggctggattccagtggcctgatctcggctcaccgcaagctccgcctaccgggttcacgccattctcctgcctcagcctcgggagtagctcggactacaggcgcccgccaccacacccggctaattttttgtatttttagtagagacggggtttgaccgtgttagccaggatggtctcgacctcctgacctcgtgatcagcccgcctcggcctcccaaagtgctgggattaaaggcgtgagccaccgcgccgggccgagactctgtcttaaaaaaaaaaggcctgggctgtggcactttgggagtcggaggcgggcggatcacgatgtcacgagttggagaccagcctggccaacatagcgaaaccccgtctctactaaaactacaaaaaattagccgggcgtcgtggcgggcgcttgtagtcccagctactctggaggctgaggcaggaggatggcgtgaactcgggaggcggagcttgcagtgacccgagatctcaccacagcactccagcctgggtgacagtgccaacctccgtctcaaaaaaaaaaaaaaaaagagagagagagacagagagaaaaaggtttattgatttaatgtacttttatgcctgtgttcttcaatttgcttaggaaagacccacacttgagagctgggactgtgtccctgattgtggacatgaaatatgtggtttcttgccaaaactagacactgaataattacgatttagttgagctagaaatccatttggtttcttccatattttcccaaaattttcatcctttttttttttttgacatggagtttcgctcttgtcccccaggctggagtgcaatggcgcgatctcagcacctgctggcaatggcgggaggctaggggacgctggcggcataggtactggaaggagaggcgcgcgcacaaaagacttgggaagacctggcgcgcacaatggctgcagatccgccagtggatcactgaagattcctgctctcctgttgaggcggggattgcagtgagctgagatcacaccattgcactccaacctgggcaacaagagcgaaacttcgtcacacacacacacacacacacacacacacacacacacacacacacacacgaaagaaagaaagaaaaattagtggccaggcgtggaggctcacgcatcccagcactttgggaggtcggggcgggcggatcacgagatcaggagttggagaccagcctggccaacagagtgaaaccccgtctctagtaaaaatacagatttaatcagacatggtggcacgcgcctgtagtcccagctactccgg

SEQ ID NO: 1888664 - DNA, 4001 bp, Homo sapiens
ggtcttcagcagtgacccggtaccccatctctaagggaggtggcagcatcaaaggctcccctcgcctgcgtggcagcaggggaaacttgcatatacggggcctagaggcctgggatctgggggagccacccctggaggcgagtgtctgccctggtgctgtatctgccgtcttttcacactgggtgtgacccgaagagacagcctgaggtccgtcctcactcactgtgtttgaggaactgagggtcagctggcagtgggatgaggctggcccctcttccgcttttgttccgggaggcctcccgtagagctgtaggggctcgagatggcatttcatttggggcacgagctggtccaggaggtctgggatctctggttctgacctctgggcacctgctgcagctgtggctgaggcccagaaatgtgaagggcctccatccactccagtagtgaccccaacgtggggttcaatgtggagcggggaggggctgctgcggcagctgcaggagcagaagtgccatgccttgttcttctcatgcccgcatccatgcttgcagctgggaagggggcaggaatcagcgaggtgacctgggctgagtcctgggaatcagaagaggtggcaggaaggggatctgaggaggagaacagggggcctggtggtctgtgcttcttcccagacatgggagctgtagaggggacccctgcagcagatgctaaggggtccagtaggcccaggcagtcttgggacttgtgtgtctcctgctgtgcatccatactgggtgctttagaaacggcaggcagaccagaagcccctgttgcaagtgaggacaaagtgtgggaaggccgtgagggtctgcagtccgagatggccttgtcctcaacctgcagtgcactgttgatgcgctggaaggccgcctccttctcccggtccaggtcttcaacagtgacccggtaccccagctctaagggaggtggcagcatcaaaggctcccctcgcctgcgtggcagcaggggaaacttgtgtgtactgggcctagaggcctcggatgtggaggagtcattcctgagggtgagtgtctgccctggtgctatatctgctgccttttcacactgggtgtgacctgaagagacagcctgaggcctgtcctcactcactgtctttgaggaactgagggtcagctggcagtgggatgaggctggccccctcctccgctttagccccggcaagcctcccgtggagctgtaggagctggagatggcatttcggttggtgcaggagctcgtccaggaggtctgggatgtcgggttatatctgatttctgacctctgggcatggaggtctgtctgcagaggcccgggcccgggcacaaagggagagaggcctccattgtcccgcaggggccgaaatgcagacggtgcatccccggtgacctcggggacccttctctgatcaccaggattctcttggactctagggtccttgtcctgctcaggcatccctgccccgctctccttgagggccctcaacactatcttccctggacacaagtctggggacagccgggtgttgtggaccccaaaggggtgactcccggctcctgggccccacagagagtccatgttctcagtgcagtggctgagctggaggacgccctggaactcggagcacacagcactggcttgctgtggtacctgtgcaatcaaattgaaggcaggatcccaggaaggaacgcagggcttgcaggatcacggaaaaccttcttagagttgtcttgacaccactgatgtcaagtgtccgggtgcttgtaggatggcctgccactcagtccacgggcaggagcaacggggagatcccacaggcaaagtgaactgggggatgggctgaacgggctccaggcaactgagccctactggcaggtcctcggcctgggcccgaacaggaaggaggggcacagagtgcccaggtaaccgctcctgggagcagtggggaaccgtcggttgcttgaactctcgagagctgggctctgagcgtcctcgtccagccgccaactccgccaaaggctaagccagcagtttcttctgttgccgggcaacgcgccttttaaacctgagggagtgggcgcgtgagcacatcacggcgcccgtgacagagcgagcttaacggattaataagcgcagccaggtacccgcgcgaggcacttgctggcaatggcgggaggcggacgtggggggtcatgcaataggtactggaaggagagaggcgggcacaaaggttgcgggaggaacaggtgcccacaatggtggcagatctgcccgtggatcactgaagattcctgctctcctgctgaggtggagattgcagtgagctgagatcgcaccattgcactccagcctgggcaacaagtgcaaaactcagtctccagataaaaaaaagaaaaagaaaaaaaagaggccgggcgtggtggcttatgcctataatcctagcactttgggaggtcggggcagacggatcacgagatcaggagttggagaccagcctggccaacatagtgaaaccccgtctctagtaaaaatacaaatttagtcagacatggtggcacgcgcctgtagtcccagctgctccggcggctgagacaggagaatcacttgaacccgggggcgggcggggaagggattgtgatgcgccgagatcgcgccactgcactccagcctgggcaacagagccagactctctctctttttttttttttttttttgagatggagtctccctctatcgcccaggctggattccagtggcctgatctcagctcaccgcaagctccgcctaccgggttcacgccattctcctgcctcagcctctggagtagttgggactgcaggcgcccgccaccacacccggctaatgttttgtatttttagtagagacggggtttcaccgtgttagccaggatgatctccatctcctgacgtcgtgatccccctcccaaagtgctgggattacaggcgtgagccaccgcgcccggtgttgaaactcccttgaggcattttcttcggccttcgggtccatcctctgtctcctccttgacctcctcatctcctcctcgccactgccttggggaccttggccaggctcatggcatccagcagccactcaatgtcaatacctccatgttcatctctcagcccgcccttgcccgtgaacccatgcttatttatttatttttttatacgtgcacccatgctcttcaggtctgatgaagtatccagaatcaagctcctgaccatccccaaacctgccctttctgcagggtttacctcgctagtcggcaccatccttgattcttctctttctcccacccaggccatcatctcttgcctggttgatacccacagcctcccctttgggctttatccttatccccgtcatagctgccagagggaccctgtgaaaacactccccagcctgctcattcctctgccctaagcctgcatggcacagagcaaaagccagttgttatgggacctaggaggtcttgtgggatgggccccagcctgcatcttcatcctcttctccccaccccactccattcactctttgcctatcgctcaccagcctataccacctgcctcagggcctttgcactgaccatttaggccacattccaggctcttttcacacgttgcctcctctgagaagccctccctgaccactctgcccatacctcatgcctcttgattccccttacctggcttgtggtttcagcactttccctgtgtgtgtttgtttttcttggcatgagggcaggacctaagtgtctgttccctgttgattccccagtgccaggcatgcagtgcaaactctagaaatattttttgcatgaaggaatgagtgattgaatgcagcaagggtctggaggctgaggaccaggcagacagacattcagagttgctggaacgcgacagagacagggagtcagactggtcttgcaagatcctgggcct

SEQ ID NO: 1888665 - DNA, 4001 bp, Homo sapiens
agccattgaagagaaatctcagaatctcaggtaggttagttggactcaacagagccaagccttgtccatgaagcatcactaggcatgtgtaaaagtagggctttgtgcttgcttcggcggcacatatcctaaaattagaacaatacggagaaagttagcgtggcttctgcataaggaggcagcacagatctttgaagcattccatattttgtgcagtcactggaaggtcatttgactatttgctgactagctctaaggaaacagtgtgaatcaaagcgaaatgggtgccacccaaatattgaaattgtgatttgcgctgcaaaaatagtcatgtaagatggtctatgagatgacttagagctgaataacatgtttggtgcaaaatatattgttagtatgtatgtcgaaaatgacagaatgtcagcttgctacttcttcatggaaactaaaaaaaataaaagtagacttttggtctcccatgtcagccggaattgaacatcaatataaagcatcattgtaaccaacatctgcgggctcagagtttgagtctgtagagaaggctcattggtccaaaccaggtcttaacatccattggtttttctgcccttggtgtgattgatcaactccgtaatagtggacaatcacattatctactttaatgagatatttaggaatacatttagttacaaactatgacatagttgagatgccctgaaatataagccataaagagtaggacaactaagaggcaaaattcggacttaataacattttctgaaaactacaacatttgcatattagaacctatgaacaaaatacgcattgggttttatttgtgattccaagataattttagtcataaagtttaggaagagattattccattgctttactatttctctcagcatttaaaaaatgtgatctcattaaatttttatcggaacctagggaaataaggcagcaaagtcctcactttgttgaagaagacattgagcctaagagaagcaagttgtccaagaacaaatagctgttcattatggagctaggacttatgcagagttgggacactttctattatgtcaggttaatgcaacctaatttactgggtcacatgccctcgatttatgagtatttcaccctacatttttttcttctttaattagaagcttaaagagaagtttgcagaatgtactcataagtggatgggataatactgttaagttctgttattctgatattgtttgaaatactgttaagaatttcacatttggtaagtattttttatatcagtattaaaatagtaatttggtttattacaattttatacatagaatttgccagttactttctgactacaaagaaaaacagatactaaaagtctcttctgaaaacagcaatccaggtaagacttataacagtgaattactttaggttagttttccccaacctttttggcaccagggaccggttttgtggaagacaatctttccatgggctggggaaaggtggggatggtttcagaattattcaatcatgttacatttattgtgctattttatattattattacattgtaatatataatgaaataattatacaacttaccataatgtagaatcagtggaagctctgagcttatttttctgcaactagatggtcttatctgggggcaaagtgagacaatgatagatcatctggcattagattctcatacgaagcacacaacctagatccttcggataggcagttcacaacagggttcgtgctccaatgagtttctaatgttatcactgatctgagtggaggcagagttcaggctgtaatatgagccatggggtgtggctgtaagtacaggtgaagcttccttggcttgcctagtgctcacctcctcctgtgtggtgtggttcataatagtccgtggactggtatgagtctgtggcctgggagttgaggacccctgctctgggtggttctaccatagataaaaaactaaaagtaaggaatttttgatcacaaaagaacactgaagcacaggtcatgttacatatgcttgtcccaataaggtctcactattactgacttcattcctcctcatttgaagttggaaagagatatattgacttttttggaacaagatgtgttcttctacctgctggttaattgtcatgataacagtaattttgttagaacaagatgctctgctaccatttgccaaaagagtgtcataataaatatgcaaattgcccaactctaggctcagcagattatcataaaagtagaaaaatgtttcacactcacaaaaatgctagtatgctacctgattgtagacacctaatacactgtatagtccaaactgtatgaggacacctttaatttagccatctatttatcaaagagcttctgtaagttaggttttataagttgcaggagacaaaaatggaatagatgtagttttcatctttaaggtgctcataatagagctgtctccatttcatttctgtgctttttcaacagaatttacaaagaaaacatttccattttcacttgtccacttaacagataactatcaaatgtcttttagatactagccattttttctaatgctacagagcacaaacaattaaaagtagagacaggagcttgttattatcattgtcattttcattatttgactactttattcagtgcttactgtgtgctagatgcccactggaagcttataattatgatttattatatattgattatgtgccagacatatgtgatgaggaatgaaaattttggaaaaaagtaggtatgatttaaggtaagcatgcagagagagaagaatttttctaggtaaagaagcagaagaataatgtttggcagaaggaacatgcaacgaggttgtgtgtttgccagaaggaacatctaatgagattgcctgtttggcagaaagagcagcaagtgcaaaagacaagatgcttgagtgaactttgcagggattctgagcaattcacttttgctaataccaaaagtgtgagatacgagaggttgggaatgaggtgaatacttagctaaggcaagttcatgatagacattttaatactacagaaatgagtaggttttaccccatgggccatgggaagtttaccaggtagaatgctttggactgcaaatactagatgagcggtggctaaaacagtaggaaccagagttgttttgtttgttcattgatatcctaggatcccacttgtccctctttcagctgtgctgttggcagtgttttattcacgtaactgggagaaaacttagaagcatgcaagggcttcctgtaatatttcattggctaggtcagagtacctgctcattcccaaaccaggcactgggaaggaaaatacatgattagcttagaataaacatttctctttctgaggctgaggagggggattgggataataaatatcccaatagacttgtgtttcttctgcaagaaagaataaggaatggctattgatagggagccaacaatgtgtgctgcaggggctcattggagaaatttgagcaggggagtcacaagattaaatttgagtattaaggcttctggttatggtgtaaaatgggttagaaagctttttctgtaaaggactaggtgggaaatattttagactatgtggtctctgtcatgtcttcttaaccctgctgttgtctgctgttgtagtgtgaaagccaccagaattatatgtaagcaaacaggcatgactgagctcctataaaactttactcacaatgccataatgcagattggatttagtctgtagcctatagtttgctgggattgatggaaggttctttactatgtaaagaaaccaggagacaaaggaagcttttgcagtagtcagctatggtttccttgtcatacatccttggagtagcatcaatgtattacaaggttttcacctgtccatagtgaaataaataaagttaggaatctcaattactcgttttaatatgttggcctt

SEQ ID NO: 1888666 - DNA, 4001 bp, Homo sapiens
ggaaaaaatggcaaaatatcccgttcacagtttcatacgagcaacacactgaaataggattttggaaatttatattagattaaaatgaattttagtactaaagtgaatcttacccgcttattttcactttctgaaaatgtggctattagaaggtgttaaatgacagatgtggcttgcatttgtggctcgcgttgttttgtgtgagctcgtgggtttgggggtgctgggaccttgaaggctgctttctcctagggagacaatggcactccctacccatcattgtcaggaataccaggcccttgcagccacactgtctcctgaccctggccttgcattccccgttttgagaattgggacttacacacgcaggtgtctaggaatcctttgtcaaacactggcatgcacacgagtatgcctgcacacccacgtgcacatacacggacacgcacagacatacacagccctggctcctgtccaccgcaggctggagcaacctgtcccagctagccttcgtggaagccagattcacagggcacccagatgccctccaaaccccccctggacccagacatctgaccctttgtcctgggacagacaggaccaacccaggccacacccgccttccatgggccggggcacttttggcttcctggttcccttcctccataaatactaaaaattctattttatgactacatcagactaaaggccaataaaaccaggtcgaattcattgtcgtatattcattatttttatagtcattttttcttctgattttaaaagaaattaaaatgaaaacatttcatgggccctaggctctatgcctcgtgggcttgtgggcccagaccatccctctgagctcccatgcccaaacccatgcccctgagtctcacccagcgaggagcacagggggcttgcctgccgtttgtccagtgaccagatagataccttctgaactcattccttaagtcctgccctcagtaaacagtgtgtgaatccctcaccagatgccagaaaacgttccacattatttttaaaacagaagtcagtcaggaggaaggcctgggatgccagtgtggttgaaggccccaagtcagtgggagctaagaccctcacccggtacagggctggggtctccaaccggggacctggacaccatgtttaacacccaagagcaggccagcaaacaggcgtgctgctctgggtagcgactggtaccgtgaggtgcagcctccgagagcaccaggccccttctgcctcccaccctccacccctgctgcaggtgctgcggggcccccggttctggatggaggtgcagaggaggctgggctttccggcgtcccccagaaccggcatcggctgctctggcctttcccttcccagggagccacggcgccaggcctgggcccaaaccctgctcaggaaggacgggccggtgcaggagatggttaaaattctgcatcctttttgcatccgcctccagaggaagcgctgctttctccccccaccaccccccccccaacccccccaccccgcgaagcaggaggaggggggaaaaaagctgagagcagcaatttgcaggccttgggatgtttttctccttgacagccccgggccccgcctcgctccggcccttcctccgactgtgcggctggccctgtggccgcggctcggtgtctgccgctcctgcccgggcccctgcacacgcgtcctcccctcggcggggaggccggctaggggcaggcgggcagcgatgcctgcgtcggccacagctgcctggcactgccctcctttgtgcctgcctcctctgccagcctccgctccaacctccccccccaaccccgcaacgaggcctgctcctgggcccggccgcagggcccgttgcccacagagcgcccaccctgcgcccacccggggtgccctcaccttctgggcccctggctcctggcctcgggtcctgctggtgcccaggtcgcccggccccgtcctccgtgctccgcgtttgccccaccctgctgcccgagctcggcggcgagcctggcacggtgccaggctgcctgggagcccagcccgggcagggcgaactttccagcgagggtgtgtatgggggggagctgcggggtgagggtggtgcctggggagggagagggccccaggtgcccggcggccggcccccggcccccagcccccagcccctggccggcctgcgggggcctcccctgcctcccgtccccagagtcccacagaggcgcagacaacacgagcgcttgagtcccagcagccatgtgcaggagccggcaaacaaacaaaagcccttatttatttatttagttcacactcccagataaggaggcgccttttgtgcacataatttcacacacatcagaacggaggcgatgccacggtactccccacagcccgagagccccggacagccgcccggccctcatgaataattgcatcgcctcggcctgggcatttccatatttaaattgggcagcagcgtatgattaattaagaaggaaaaaggcaaaaaggaagaaaagcagtgggggtggggagccggacactctgggcagcgcaatgtgccaaggtgcccgcggcagcttaactcctcccatgccagggcccagggggaggccacagcaggggctgggaggggaggctcccaagaccctcagcctggagggcggcatgtccttgcctgctgtcctgtgtcgagtgccaccccagcctcacatgctgcctggggaaggttctcttcctcctgttcgtattccgggcagctcaccattgctcaggtcaaaatgtgccatgccagtgctggggaaagagacacaccgaggccccccagtggggcacttccagcgggaactgacctgtcttttgccctgcacagcttcaccctacatccctgccacatgcaagctgcaacgctgccctgcctggggaggctctgcggcccatccccactctcacaagcctcctcctccaaagggctggctcttctggccctgaaagcagccggcctgttccgggagtggggcaggaaggcctgccacccttctagaaagatttttggctaagtgagtgccaggaaagactatattcctaaggcaagaagtggccccggatttagagtctggccatcaccaaggtttggccttattgtttgccatttgtgtggcctgaggcaggttatctggcctctctgggcctcggtctgcctggttgcaaaatgggaatgatatgaatgcccactattcctgccctgtggggtcccggcgagcaagagcagctcctggttggcagagagcctgcccgagttcccagactcgttgtccttgtggtgggctgaggtctgagccagaacaagtccagatagacccaggaccatgcagccctgcccctgctgaggccccaggacactggtcagaaatttgctgagaaaataatctgaattcttgtggccaagagtgtcctagggccaccaggcctggcttggttgtggggggcccatctgcccttgagcgtatgcaggggtgtgtggagtgggagggctctggggcaggaccagctgcccagcaagagcctcctaggggtcctctggggtctgggcagcattattatcaccccctcctttacagctgggggaactcaggcatagagagttcaggagcatacctgagatcacaccaaagtgggggccctgggatttaaactcagagcaccccaaatcccatcccaaggcttttcttttctctttttgagatggggtcttgctctgttgcccctgctggagtgcagtggcgtgatcaccgctcactgcagcctcaacctcccaggctcaagttatcctcctgcctcagccacccaagttgctgggacttacaggcgtgtgccaccatgcccagctaatgtttttttttttaacctttgttgctcaggttggtctcaaactcctgggctcatgcaatcttcctgcctcggcctcccaatgt

SEQ ID NO: 1888667 - DNA, 4001 bp, Homo sapiens
ggtggcttctgccctgacacccatgatctctactcatccacctacccatacctgactgtgtctctgctgaaatatggaggacagattcaccctgcctaagtcatgtttggaaccctcttcctccttccttgtccatgtccactcatctcatttcattccctaattcaccatcaaacagcaatcagtctcctcaagtcttactgtaatctataaaatctatattggtgatcatcagttttttgacttgaaggatcatatgttctgtagatttttttttcagaatgctctggacaattaattttctttaggccagatcacactgcctcctccatgagaattggcagcttcacctatcaaccacatacccaatgcattaaattattgacctttgtatttactgcccttattctctacgatcagtcagttatgacgaacaactttctttttttttttattttttgagatggagtctcgctctgccgcctaggctggaggtgcagtggcatgatctctgctcattgcaagctccgcctcctgggttcatgccattctcctgcctcagtctaccgagtagctaggactacaggcacccgccaccatgtccggctaatttttttgtatgttttttagtagagacagggtttcacgtgttagccaggatggtctcgatctcctgacctcgtgatccacccgtctcggcctcccaaagtgctgggattacaggtgtgagccaccgcgctcagccaacaaacaactttcaaatacctttctcttcactccaaaatttaccattgttttgcttaaggtttcacctcccatgtaggatggaaaacattctttcatctaaggcccccctcttcctcctggccttggagcctcctaatgtccaggaccggcacctctgtcatcacattgtcagctgcagagataccctacctgctgtcagaaccatgcacaattaatttgcttacaaacatggaaaacaaaggcctggaatcatgctctatatactgagttgagcaatacaagatggaagcagaaacatatttaacatcgaccatttgcattgtcttaattatcattcattttttcatgcatcaaggtggtagaaagggggtcatggtgtctgccttcagagaccctccactctaaatgaagaaaagtccaatgaagcaaacacgtgacataaagtaaaataattgctactgtgaataagagttgggtattgccacaaagcatacctatgagaatttgaactagtcagggaagttgcctcatgaaaagttttgattttgggggaagaagagaattaaagaaaccaaagtcaagagatatttgggcctttgaagtagaggagaggcatggggttggcttctgtccattttctgatcaactttttttccttttcacagtggatatgaccttggatgccgacacagccaacaacttcctcctcatttctgacgacctcaggagcgtccgaagtgggtgcatcacacagaatcggcaagaccttgccgagagatttgacgtgtccatttgcatcctgggctcccctcgctttacctgtggccgccactactgggaggtggacgtgggaacaagcacagaatgggacctgggagtctgcagagaatctgttcaccgcaaagggaggatccatctgaccacagagcgtggattctggactgtgagtttgagggatggaagccgcctctctgccagcacggtgccgctgactttcctcttcgtagaccgcaagttacagcgagtggggatttttctggatatgggcatgcagaacgtttccttttttgatgctgaaggtggttcccatgtctatacattcaggagtgtctctgctgaggagccactgcacttgttttttgctcctccaagtccacctaatggtgataagagtgtcttgagtatctgtcctgtgataaacccgggcactactgatgctccagtccatcctggggaggccaaataagcccccactgcaaaaaaacaaaaaacaggttaagaaaattacttgggtgggcagacttaggaacgctctactcggtaaaagcgttatacaaagtcataggagaaaaatatgggacaattcatgattatacttaatctaatttgattagtttataaattgagtcctaagtattaattattgccaccatccaactcattgagtcttatggttcacatcttgtttcctatagaaatattctgtattctgggatcaatttccaaatgcttttttatttctgtaagttcaaattaatgtattatagaagttatgagttaaataaacattggaatatcacctaatggattatgtgactttctttcctcagcctcctgagtagctgggattacaggcaactgccaccacgcctagctaattttttgtatttttagtagagacaggatttcaccatgttggccaggctggtctcgaacccttgacctcatgattcacccacctcagcctcccaaagtgccgggattacaggcatgagccactgcacccagccggattatgtgattttctaaatgataggagtacgatagattttattcatagtaaatgcgtgagcgtgtgtatgtgtgtgcgtgtgtgtgtgtgtatttggacagagagctggataaatgcctatgtcctaaccagaactgaaaaaacaagttgttgccatcattgctcagtataggtaacattttcctggatgtgcattcatctacattaacaacgataattccccccaattaattattataattattaattataattgttaacaattaataaacctctgcaggctaacaaagcaaaaaaaaaaaaaaacaaacaaaccacacattactcatattagaaatgaaagaggggccacgtctaccaaactgttgagcattaaaaggataatcagggactgttatgaatgactctattcccacagtttgataacacagtctctcaattccttgagagacataatcttcccaaggtcacactagaaacagacaatctgaacagcctctgcctattaagtgaattgacattaagaacattccaaaaagacaacaccagaaccaaatgatttctcttatgaaatccaccaaattcttatgaatcctaacatattttcacaatataatccaaaaattgtgctcctaggtatgtactcagctgaaatgaaaagttatgtccacacaaagcctgcacaggaatgtttacagcagctttatctataaccacccaaactagaagcaagatgttcaagaggtgaatgaaaaaaaaaatcatccataaaacacagtattattctgtgatttaaaggagttctccaacaaggcatagaaaagacaatggcatatatcagaaagactgtgagggcatgccttcactggatgagacacacagaaaggcggcagagcagggtgactttatgttaattagtgaagtaagttcatctgaaaaagctacataatactgggttggtgcaaaactagttgcggtttctggcatttaaagaatgggaaaaccgcaattacttttgcgtcaacctaatacatgactccaactacatgacattctggaaaaggcaaaaccaaggggacggtaaaaatatcaatagttggtaaggtttctggagaaagaggacagagattcacaagtaaagaagagggaagttttggagcggggagagtattcctcctgagatcaaaatggtaaacataacatcataaatatttcaaaattcatagaaatgtgtaacaggaagaaagaacactatgtgaatgacagactttagttactaatgtatccctttggcctttctcttcaaggatccctgaggagacagagccccagtgccctcaggcatccatgcttagaatgaagccacaccccacccctggtatccagaatggtccggttccaaacgtccctgggagaactgtgagcagaaggtcctgtgcggcagaaccccaggccggagggg

SEQ ID NO: 1888668 - DNA, 4001 bp, Homo sapiens
aaatactgaaatacatgttaaaatatccactgtaaatcaaagatcttccttttagtcttcccttcctatcccttgtgtttgcaatcattgcatgagggggcctagtttcagccaggtctagttcacctagccatatgaggtctagtttcagcccaagctacccacagtgaaggaaggcagagtgaggagatgaccccatgtgagcaccgaggctctttaacccagctgtacaggagagttgccacaagggtgacacctgaggctaattgtgaagtggtatcctgtgttctgtgattcttgtgccttagccacctgagtagctggaattacaggtgtgcaccaccacgcccagctaattttgcatttttagtagagatggggtttctccatgttggtcaggctggtcttgaactcctgacctcaggtgatctgcctgcctcggcctcccaaagtgctgggattacaggcatgagccaccgcgcccagctgccttatttattcttaacacatgtaagtgcctctaactttcgattgtttccaagtcatggaacgaacaacctccttagaaagaactctgaaggataggtcaggagaactaagtcacacaatccatcagaaacagtattaacagtttttcaaagttacactttatatgcaaacttgtacaattatcatcttattatttttaaatgtatctttacatatatgtatgtgacctacgtgtttcctggtgtgagtaaatctgtatgttcttggttaatagtgtttaccgattcatttcacttctctatctttgtatgttgaaatatgaactactctctggatgagaaaaaatgattacacttgattatatttacctttggaaaggtaagtggtttgggtgattgactataattgttatctctatcattttggataaaccccaatcataaaaataagtgtgttttgtttcacacactgacacatagacaatacacattcttacttcttttcaaaaagttaatatgtgaatataaatgacatattccaaatttactaaactgaatacacatttcatgaaaaaggagagaggaaagacatactaaaaacaggccagggcctggtgtggtggctcacgcctgtaacaccaccactttgggaggccgaggcaggtggatcacctgaggtcaggagttcaagaccagcctggccaacatggtaaaaccttgtctctacaaaaatacaaaaattagccgggcatgatggtgggtgcctgaaatcccagctattcgggaggctgaggcgagagaatcatttgaacccgggaggcggaggttgtagtgagccgagatcgcaccgttgcactccagcctgggcgacagagtgagactccatctcaaaaacaaacaaacaaacaaaaaaacaacaacaaaagacaaagatggacacacttcgttgtgttaaaagcctcaaagacatctgcatcattctagctttgctcctaatttttaaaattaatgattttaataggttcttaattaggtaaaaactgcattaaaacatactttgccatatttttcccagaaggatacctaattgggtggtttgaggggtgccagatgtaacaggaaataagacatgtcttttaaataaaggaaaagctcaaaggcatcctgcttgatactagaatcaaatatataaattgaggaataaaacataaccgggaaacacatttataactgcatatgaaaaatacagaggagaattttttaataaaatatatttttaaatattaactagtacatttgagaggacagcattcaacaggccaatgtgaacatacctttaatgcaggaactcaggttccccataagaaagaccagaatctgtgaaaatgacagcaagcatgttcaacctgctatgaactttgaaaaactcagcacagacagtggcagttaggaccgagggcaagatatacccaatcacataaccatggtgataggagcatcatcaacgtctcagggtaaagtcacaatgtgtattgtgaggtccgctttctgctgcaccaacaagagtgctttcacacgcacaggagggtcattaaagattaggccttttacggcagggagtggtggctcacacctgtaatcccagcactttgggaggccgaggtgggtggatcacgaggtcaggagatagagaccatcctggctaacatggtgaaaccccgtctgtactaaaaacacaaaaaattagccgggcgtggtggcgggagcccccagctactcgggaggctgacgcaggagaatggcgtgaacccgggaggcggagcttgcagtgagccgacatagcgccactgcactccagcctgggcgacagagcgagactccgtaaaaaaataaaataaaataaaataaaataaaagattaggcgttttacttaaaaaaaaaacaacaaaacccaagctcattaattactattctgtgcttattaaaataagttttaggaggagaaattgtgtaccccaaaatacactcaatggcaagaatttcaaactgagcaggggcaaaaccgatatgttagtaacaaccagaagttccattctcgattcgaaattccattgccaaatatttctaccattcctgagtcatctaatatttctagaaccaataagcaaactgttcagaattaaagacagcataaatggatattgttataaaagtcatgtttcttaaaaagtgacattttttaaagtcacattttaaaagtcatatttccctaaaaagtcatatttctaccattcctgagtgatctaatgtttctagaagcaataaactgttcagaattagaaaaaagtgttacttgatattataaaaatcatatttctctcacaatataattatgaaacttatttttccacttatctctatatattactatgcacttatttatctcccaaactttgtgaattcacagaggaatttgtctaccattgtgtatgtaaacggctggccattcactgagtatttaaaggaaaaaaaaatcactatattttcaccagtgcatcttctcggtggggtgaacactttgggtgaatacatataattttttatttgagacagggtctcactctgtcactcaggctggagtgcagtggcttgatcatggctcactgcagccttgacctcccaggctcaggtgatcctcccaactcagcctcccatgtagctgggactacaggttcttgccgccatgctcagctaatattttgtagagatggggtttttccatggtgcccaggctggtcttcaactcttggattcaagcaatccacccacctcgacctcccaaagtattgggattagaggcgtgaaccaccatgcccagcctaatacatataattaaagtgtttctgaatgcagaattttagataactttcaaaatgtataactacgtgtgtattctggctgatacataacacccaattgcaaatacttttatgatatgcccaagaaaacaagctgttgaaagtgacctgccctaaaataaatagaacaaatgaaaattttagggttaagatgagagagttgctatgtttcaaagagaataggtacccttcatgatataaatattacagtacaaatgtctatcattgctaagtacaaatttctagaacaaataaataggtcacaaatgatgtatacaatctgcattaatatagatgatgctatattttgtccagtgattataaaacagagggtgtaatggggtaggtgctgaaagaataggtcattctgtgttgttataaacagaaaatttcaatggcttccagattgaacaaatatatgtatatacacaaattatacacacacacacacgatactatagttatatgtgtatgtgtttgtatactcagaaatgcagcaaactaaaaaaaaactttaacaatccccacagattcatgcttctgaatgctcaaatggaggagaaaatttaaaaagaagtggaaaatatagtgagaa

SEQ ID NO: 1888669 - DNA, 4001 bp, Homo sapiens
gatgaccccatgtgagcaccgaggctctttaacccagctgtacaggagagttgccacaagggtgacacctgaggctaattgtgaagtggtatcctgtgttctgtgattcttgtgccttagccacctgagtagctggaattacaggtgtgcaccaccacgcccagctaattttgcatttttagtagagatggggtttctccatgttggtcaggctggtcttgaactcctgacctcaggtgatctgcctgcctcggcctcccaaagtgctgggattacaggcatgagccaccgcgcccagctgccttatttattcttaacacatgtaagtgcctctaactttcgattgtttccaagtcatggaacgaacaacctccttagaaagaactctgaaggataggtcaggagaactaagtcacacaatccatcagaaacagtattaacagtttttcaaagttacactttatatgcaaacttgtacaattatcatcttattatttttaaatgtatctttacatatatgtatgtgacctacgtgtttcctggtgtgagtaaatctgtatgttcttggttaatagtgtttaccgattcatttcacttctctatctttgtatgttgaaatatgaactactctctggatgagaaaaaatgattacacttgattatatttacctttggaaaggtaagtggtttgggtgattgactataattgttatctctatcattttggataaaccccaatcataaaaataagtgtgttttgtttcacacactgacacatagacaatacacattcttacttcttttcaaaaagttaatatgtgaatataaatgacatattccaaatttactaaactgaatacacatttcatgaaaaaggagagaggaaagacatactaaaaacaggccagggcctggtgtggtggctcacgcctgtaacaccaccactttgggaggccgaggcaggtggatcacctgaggtcaggagttcaagaccagcctggccaacatggtaaaaccttgtctctacaaaaatacaaaaattagccgggcatgatggtgggtgcctgaaatcccagctattcgggaggctgaggcgagagaatcatttgaacccgggaggcggaggttgtagtgagccgagatcgcaccgttgcactccagcctgggcgacagagtgagactccatctcaaaaacaaacaaacaaacaaaaaaacaacaacaaaagacaaagatggacacacttcgttgtgttaaaagcctcaaagacatctgcatcattctagctttgctcctaatttttaaaattaatgattttaataggttcttaattaggtaaaaactgcattaaaacatactttgccatatttttcccagaaggatacctaattgggtggtttgaggggtgccagatgtaacaggaaataagacatgtcttttaaataaaggaaaagctcaaaggcatcctgcttgatactagaatcaaatatataaattgaggaataaaacataaccgggaaacacatttataactgcatatgaaaaatacagaggagaattttttaataaaatatatttttaaatattaactagtacatttgagaggacagcattcaacaggccaatgtgaacatacctttaatgcaggaactcaggttccccataagaaagaccagaatctgtgaaaatgacagcaagcatgttcaacctgctatgaactttgaaaaactcagcacagacagtggcagttaggaccgagggcaagatatacccaatcacataaccatggtgataggagcatcatcaacgtctcagggtaaagtcacaatgtgtattgtgaggtccgctttctgctgcaccaacaagagtgctttcacacgcacaggagggtcattaaagattaggccttttacggcagggagtggtggctcacacctgtaatcccagcactttgggaggccgaggtgggtggatcacgaggtcaggagatagagaccatcctggctaacatggtgaaaccccgtctgtactaaaaacacaaaaaattagccgggcgtggtggcgggagcccccagctactcgggaggctgacgcaggagaatggcgtgaacccgggaggcggagcttgcagtgagccgacatagcgccactgcactccagcctgggcgacagagcgagactccgtaaaaaaataaaataaaataaaataaaataaaagattaggcgttttacttaaaaaaaaaacaacaaaacccaagctcattaattactattctgtgcttattaaaataagttttaggaggagaaattgtgtaccccaaaatacactcaatggcaagaatttcaaactgagcaggggcaaaaccgatatgttagtaacaaccagaagttccattctcgattcgaaattccattgccaaatatttctaccattcctgagtcatctaatatttctagaaccaataagcaaactgttcagaattaaagacagcataaatggatattgttataaaagtcatgtttcttaaaaagtgacattttttaaagtcacattttaaaagtcatatttccctaaaaagtcatatttctaccattcctgagtgatctaatgtttctagaagcaataaactgttcagaattagaaaaaagtgttacttgatattataaaaatcatatttctctcacaatataattatgaaacttatttttccacttatctctatatattactatgcacttatttatctcccaaactttgtgaattcacagaggaatttgtctaccattgtgtatgtaaacggctggccattcactgagtatttaaaggaaaaaaaaatcactatattttcaccagtgcatcttctcggtggggtgaacactttgggtgaatacatataattttttatttgagacagggtctcactctgtcactcaggctggagtgcagtggcttgatcatggctcactgcagccttgacctcccaggctcaggtgatcctcccaactcagcctcccatgtagctgggactacaggttcttgccgccatgctcagctaatattttgtagagatggggtttttccatggtgcccaggctggtcttcaactcttggattcaagcaatccacccacctcgacctcccaaagtattgggattagaggcgtgaaccaccatgcccagcctaatacatataattaaagtgtttctgaatgcagaattttagataactttcaaaatgtataactacgtgtgtattctggctgatacataacacccaattgcaaatacttttatgatatgcccaagaaaacaagctgttgaaagtgacctgccctaaaataaatagaacaaatgaaaattttagggttaagatgagagagttgctatgtttcaaagagaataggtacccttcatgatataaatattacagtacaaatgtctatcattgctaagtacaaatttctagaacaaataaataggtcacaaatgatgtatacaatctgcattaatatagatgatgctatattttgtccagtgattataaaacagagggtgtaatggggtaggtgctgaaagaataggtcattctgtgttgttataaacagaaaatttcaatggcttccagattgaacaaatatatgtatatacacaaattatacacacacacacacgatactatagttatatgtgtatgtgtttgtatactcagaaatgcagcaaactaaaaaaaaactttaacaatccccacagattcatgcttctgaatgctcaaatggaggagaaaatttaaaaagaagtggaaaatatagtgagaaaatctactcatcctattggaggagctgatatctattttaagtttagagaggcaggcttaaataagtaaatgtttaggatttgaaatttaattgtacaagtatttttttcgttgaatttcctcccaactttgtaaaatcatcagatcaaaaacacatcatttgattagggtgcagttttatagtaccta

SEQ ID NO: 1888670 - DNA, 4001 bp, Homo sapiens; identical to SEQ ID NO: 1562963

SEQ ID NO: 1888671 - DNA, 4001 bp, Homo sapiens
tggagtgcagtgacatgatcttggctccctgcagcctctgcctcccaggttcaagcggttctattgcctcagtctccggaatacctggggattacaggcgtgcaccaccacaccggctaatttgtttgtatttttagtagagatggggtttcaccatgttggtcagactggtctgaaactcctgacctcaggtgacccaccctcctcggcctcccaaagtgctgggatcacaggtgtgagccaccatgcctggccaacacctttaaaataacagttgtaacgggccctttacgctgcagaattcacaggcagtatcacctacctatacgaagaattttaaaaatcaacacagctctaaatgagttgtaaaagaacaagaaaggaggccgggtgctgtgtctcatgcttgtaatcccagcactttgggaggccgaagcaggtggatcacctgaggtcaggagttcgagaccagcctggccaacattgtgaaacccccgtctctactaaaaatacaaaaattagccgggcgtggtggcgtgcgcctgtaatcccagctactcgggtggctgagacaggagaatcgcttgaacccgggaggcggaggctgtggtgagctgagattgtgccactgcactccagcctgggcgacagagcgagacaccgtctcaaaaataaaaataaaattgtcctccgcatctgccctacactgcccagctgaccccactggccagcctgtcctcctcccacctcttgcgcgttcctcctggcacgcctggaagggaggaaaggcttaatggtcccgttctatgggtgaggaaaagaggtctgggaaggagcccggcgtggtggggcgggcctgtaatcccagctactcaggaggctgaggcaggaggattgcaggatcgctcttacccagtttctttctttctttcttttttttttttttttgaaacggagtcttgctctgtcgcctaggctggagtgcaatggcgcgatctcggctcaccgcaacctccgcctcccgagttcaagcgattcttctgcctcaggctcctgagtaggtgggatttcaggccgtgccaccgcgcccggctaatttttttctttctttttttttttttcagtagagacggggtttctccgtgttggccaggctggtctcgacctcctgacttcaggtgatccacccgcctcagcctcccaaagtgctgagattacagacatgagccaccgctcctggcctcttacccagtttctgcacggagctcctgatgcctgatggccaagaggacataaccccacctgttctaagggcatggagtgtatttttagagtgattggacaaaatatgtgccgaacacctacgtcaggtctggcgcatgctggaggctggggttatatcaatgcaaaagccattccctgtatttaacacgtaaatgaattagtctctttaactctcccaacgccctataaattatttgctccattttacatattaaacgctgtcacgaactgagctgctgtgtgaggccggggccggacttatctttctgaagcacagagaagcggttatacgcagaagtttgggagaactgggtaaggccgcacacatggaaattgccagtttcgtgggtcccaacgtcaatactgtgggcaaccttagaccggctcaaagcgcagctggggacggtgatgaagtgcagagcgtccacagccagcgacaagactgccaagcaactggcagcctgagtaacggagaaaacaacgaaaaaaacgcattcaccacctaccaacaagaaacaaaaaacacgaccaccccacagtcagtctactttttaggcgtgaataaggtcgggcagatcgcaactcccaggcatcccgcaaagtaggcgggtcaccttgagggcgacctttacccgctcaaaaattcgtctcacattagcagtgaggattcgggcgtcaccccgaatcgttattttccttactcataagtttaaggcataaggacgtttttagtttatttcctaggtaatgaattctattctcattaggcgtatgatgactatcgtagttgactgttgaggtcatgatccagttccattgaagtttgtctcacttgttaataatgtattttgttgcttttcatttaattttttccctcgaggaaaataaataattcataatgtgccgaacttccgtatgcagatgagcagccagcaccgcgaaggctcacggggaacgtccccgccccttccggttcttgcctgctttgagctggctgtcgcgagagttggtccgcggacgccggaagtagttcgtcgctccctagcggccgaaggggcgggctcgcggggtctcgactgctttcggcttgctcggcggagcaagatggcggacatctccctggacgaactcatcaggaagcgcggggcggcggcgaaaggacggtgagaggcctttcctttcttcggggtttagggtcctcggcctagtggagctcgaggcgggggaggtagcgatccgggagcgacgcggaggaccgggtgcgcccgcccccgaccacagccgcgctcctcattggccggctgccgccgtccccgccgtggccccgaccgcccgcccactggccgaggcgcagtccctctggcggccctgggaggccgacggggccgcggcggggacagggtgccgcctcgtggacctgaggggctgccccctggggcccccgcgttccggggtcctggggtctcggcggcgcagcctccttgcctgtgtggactggcatttgggccccgctccgtgatctcggcgctgcctggtctccacccatcttagagttgagacaaccgaagtttagtagcggggaagtgacttgctccgaccgccgaagctgaggcgcaagcccaaatccccctgcacgcggcccctgttaacactcgcctctctttgtgcggcgttttaagttttctgagccctttcatatacacgatgcctcatttaatcttttacagtcctgttgtctgctagctattcatgttacccaccttttactgatggggaacttgaggctggaagtggtagagtgacttgcccgaggccacggagaactgagcggcgggctgagcgcgatttaattgctggctgagttggcctcctacatgggcttgaaaaactggtgtgttgggcaggagattggttatttccttagggagaagaaagtgcttgagctggctgaggagccatggaggtgatttgcagtcatgtctcccaaacttcccctagacccttaaatgttgttagtcatttcaagccttcgtgagctgagttcatctgtatgaagaagtgagaactttgcccaatagtttcccaacacacattaagtttaaatgtctttgtaaatagccaggatgtaaatatgttagatattgttttctcagacatttgttctctcagcagatgtttatttttatttttatgttttttttgagacggggtgttgctctgtcgcccaggctggagtgcagtggtgccatctcggctcactgcaacctccgcctccccggttccagcgattctcctgcctcagcctcccaagtagcagggactacaggtgtgcaccaccacgcccggctaatttttgtatttttagtagagatggaagtttcactgtgttggtcaggctggtttcgaactcctgacctcaggtgatcctcccgcctcggcctcctaaagtgctgggattacaggcgtgagccaccggcccggccattccgcagatgtttattaataccacccgtatgcctgtggttaggtttttctcttgatgtctgaaatgtatccctcacctccttccccatcctggacacttgtatcaactacaactgccaccaccacctcataattcgcagccagcacttacctggcttgtggttcgtaacgggcacacattagtatttgtttcctcaactactgactgtgaaagctctctcagatctccatct

SEQ ID NO: 1888672 - DNA, 4001 bp, Homo sapiens
aactactctcagttaagaagagttaacaaaattctcattttcacttccgtattccagttttcgttgttgactttacatgcttagcatacataggtgtgatgcttaagtgaacagatgtacaaacttcacaggcctgtaagagcagaaggcagagtagcaagctagttacacactgacattaaccacaccagcaacattatttgtgccagggcgcacttttgaccaaatacaatggctaaaacatagctcacctgtccatagaggataaagagccattttcttcactgagaaatgggcttagaaacaagacaactcttgggttgtaaaagtggcagggagtcactgtaaacatctaggtaaacagtatttactgttcttgaaaagtaagacttcttaaatcagttccatggtgtcaaggagtgtaagacctcccatttgaaaccatatggaaaatgatgcatttgtgcaatttctgcagtgaatgttcacaccttcaaaagatttccaatgaatgcccaagaggttaaaaattattgcttccaactgagcatgtttctcaaaatatggcccaaggtccacgtggacatttagggaaaaatgagagaaaacttcctcactgtttacagcactaaatgtgttaccttccagcatgatcctaagatgcttaaggtggtatcccagcacaagaagatcccctacttaagtggggaagagagaaaccatgagctaagtcaatacagtttgggccaggcatgctggctgacacctgtaatctcaaaacattgggaggccgagaccagctatcacttgagtcaggagttcatgagcagcctggccaacatggtgaaaccacgtctctactaaaaataaaaaaactagctgggcctggtggtggacacctgaaatcccaggtactattcaggaggctgaggcacaagaactgcctgaacccaggagacagaggttgtagtgagccgagatcatgccacagcactacagcatgggtgacagagcaagactctgtctcaaaaaaaaaaaaaaaaaaaatgctgagtgcagtggctcacacctgtaatcccagcactttgggaggccaaggcgggcggatcacgaggtcacgagatcgagaccatcctggctaacacagtgaaaccctgtctctactgaaaatacaaaaaaatggccgggcacagtggctcaagcctgtaatcccagcactttgggaggctgaggcgggcggatcatgaggtcaggagatcgagaccatcctggctaacatggtgaaaccccgtctctatcaaaaatacaaaaaaattagccgggcgtggtggcaggtgcctgtagtcccagctactcgggaggctgaggcaggagaatagcgtgaacccgggaggcggagcttgcagtgagctgagatcgcaccactgcaccccagcctgggtgacacagagagactgtttcaaaaaaaaaaaaaaaaaaagtttgctctctttacaactgtccacataatatatcctgtgtgcccagtttagtgccacacatagacagatgactcttgtccccacccctacagctcttccagtctctcgaaagaaatttttttttttttttggagatggaatctcactctgtcaccaaggcgatctcagctcactgcaacctctgcctccagcgttcaagcaattctgctgcctcagcctcctgagtaggtgggattacaggctcatgccgccatgcccggctaatgtttttcttgtattttagtagagatgcggtttcatcatgttggccaggctgcctgagctcaggtaatccgtttgcctcggcctcccaaagtgttaggattacgggtgtgagccaccatgcctggacaagagaagagtcttttttttttttaaatatggaacacttcatgaatttgcgtgtcatccttgcgcaggggccatgctaatcttctctgtattgttgcaattttagtatatgtgctgccgaagcaagcatgaaaagagttcttaaacttgccatctcatcaagagcccttaacattattcgtggaaatacccctttgggatattttcaaagaaaacgttcaactatggctaaagacagaatacttgggaagtggccactctaactaggagtgcttccttcttatgagtatttcaagaaaggatgtgatattacccttttggaaaggtgtttttttttttttttttttaatctatccttttggagttttttttttgagacaggttctcactctcaggctggagtgcagtggcatgatcatagctcactgcagcctcaaaactcatggactcaagtgatctttcttgcctcagcctcccaagcagctaagactacaggtgcatgccaccacatccagctaatttaaaaaattttttgtagagatgaggtcttgctgtgttgcccaggctggtctgaactcttaggctcaagtgatcatcttgcctcagcctcctaaagtgctgggattacaagtgtgagccactgtgcctagcctggaaagtcttaacccataggaacttactgatcacgaatgaattcattaagattaccatatggcgaatataagagttaatacctgagacttcactttttgcacaggttactaaaacctgactaggcaagaacaagctgctaattgcccaagagccacacacccaaggaagcataaacatattttcttagttgcagcagccttccttaaagaaaatgtgtcaaggctcccaaaacctattggggaattactagtatgaacacccacttttggtgatcactattaaagtggaaagcaaatgaatctcaacaaaagcccaaaagaacaatggttaaaatccttatccatttctttctgcagaaatcctatgcagaaacaactatgcattctgatggaccttctgacattatgtagaatttcacataagtcacatttatggaagggggattaaaagggaaatattcctgggcgggcgtggtggctcacgcctgtaatcccagcactttgggagggtgagacgggcagatcacctgaggtcagaagtttgagaccagcctaacatggagaaaccccatctatactaaaaatacaaaaaattagccgggcatggtggcgtgcgcctgtagtcccagctactcgggaggctaaggcaggagaatcgcttgaacccgggaggcagaggttgtggtgagccaagatcacgccattgcactccagcctgggcaacaggaacaaaactccctctgaaaacaaaacaaaaccgaacaggcaggggccgggtgcagtggctcacgtctgtaaccccagcactttaggagaccaaggtgggcagatcacttgaggtcaggagtttgagaccatcctggccaacatggcgaaatcgtctctactaaaaaaaagaaaatcagctgggcatggtggcacacacctgtaatcccaactactcaggaggctgaggcaggagaatcacttcaacctgggaggtggaggttgcagtgagccaagatcgtgcaagactctgtctcaacaataacaaaaaaggaacgggtaggaaaaagcagtcagaagctattctctatggtcttgccagccagcctgctctaacaacttccagtaagataggttttctggacagttgacacattaagattgaataatttttttttcctttgagacagagtctcactctgttgcccatgctggagtgcaatggtgcagtcatagctcactgcaagctcaacttcccaagctcaagtgatcctcccacgttagcctcttgagtatctgggaccacaggtgcacaccaccacctctggcaattttttttttttttaacgagatggggtctcactatattgcccagtctggtcgtgaactcctggactcaattcatcctcccaccttgtcctcccaatgacttttcataccataattctaccttctccaacataaataggtatccttaaattagtttaagaag

SEQ ID NO: 1888673 - DNA, 4001 bp, Homo sapiens
ccccttcctgctactcagcaattaccaaccatggctgggtcatctgagggagtgataagattatttcatgtgcattacccacaggtctcccctgtcaagctggataggctctgggggtgtcaccctgaactcaattctgaatgggtgctttttaaggcatccattagtttaagctcccccattcacagggactgactaacataattccaagctcccctttgcagttatcagtaggctacaaagagcaaagggtccaggaacgtgttaagaagttgtcccctggccctccgctatcccagccacttctgaccacaaggctgttctcagaaggaaggcagtagagaatggttctacactgtccgattcgggcgctgtacccagcgctcactctgagcctcatcaacgaacagctgggcctgaaaccacttctcccccaggtttgcacagcaactcaagccaccgcaaagctcacctttgtagcctttgcccttggtcaccccgatgacgtcgatcatctcatcctgcccaaacacttggttcacaggtacctgctgctcaagcctctcgcgggcccagtccagcttctcggccacagtgcctccgttcacctggatctccatcaggtgggccttcttctggcgcagaggaagcaggcgcatctaggagaaggtagacacagctcagctccagctgccagcgctcctcccacagcagaggaactgcagctccatgcggcctgattgatgtcaagcacacggcaaaaagccagtaactctgaacaagtcactgaacctcaccaagaggaaggaactttcatttttgccaacagcaacaacttaactttggatactggtgcctgagttactgtcaggatgagcggacaagacccacaccacaggcaaacaaccagatcccagcccctaccagcccaatgttcctgtggctgtcctttgggtcagttccttttggggtactgcagtggttttacctcagccacctacacttgccctagtgacaagcctgcttttgagagagcacaagctctaagtaagaaaatgcatcaccgggagcggtggctcacacctgtaatcccagcactttgggaggccgaggcaggtggatcacctgaggtcaggagttcaaaaccagcctgaccaacatggagaaaccccgtctctactaaaaatacaaaattagtagggcgtggtggcgcatgcctgtaatcccagctactcaggaggctgaggcaggagaatagcttgaacctagaaagtggaggttgcagtgagctgagatagggctattgcactctagcctgggcaacaagaacgaaattctgtctctaaaaaaaaaaaaatgcatttaagcataaagctttcactcaaggacagcctggcaatgtcctgacaaaatttcaacggtggacatgcactctcatccgtggtggccctcaccacatggggttgcactcagcacttgagatcagccaggataaccagtaacaggacagcaagaggcacccactctaaccaagtcaataaaaagcctgctcagctcatcaactaggtttccaggagagcagccagtacctcacaaccgactttcaggcaggcatttcagtgttactggtgagtcaccagttgaattttaaaggggaatggttcccttgctaagggccagtaaggacacagtgccctctgctggcaagggagaagcctacccataagcgtgcgggcacgggacccccatgatcacataggtcacttctactaagtggcaggccaagccaccccggggcactgggctcacctgggtgtgggcaatgacacggatgacttggcagtacttcttcatgctgctgaagtccttctccagctgcttcttgccatcctcatcctgccatttcttgcagtacttggtaaaggccttcttcttagatttatgccttcaggagcagagcagagttggggaggggaccaggtgcaggccttcatcacccctccgaggggtgagcggaaggcacactggcaccgcgtggggatggagctcattgccggcttctaaggagccttttccaccagcaagcggagcctggatggagctcatcgggcagagccgagcggagctgagcagaggtccacaaggttaatttaagttacacgcattcaaacaaaattcttgctccgggacaaacctttctgccctggggaagcccactcagtgatgaaggaaatgggacattccacccagggccagaggcccttgccacccctataggggtttaattattctgctacctctcctggtttctagttggactcctcaaccaactgggtcctcagccaccacccactagcctggactcagaatgagggtgttagcttccggctgaaaccagatggctggccaagtctgatcccaggtatttttctgttcgagaggcaaactaaacccaagacagcagctccctgcctgctacagagctgagaaaccatgcacacgctgctccctgctctccagctcccaagctcccaagctagggactgcatggcctcctcccttaccaattcttatagaaacgcctcttgcattcatcactgatgtgctcagcaaagacagtcttgaaggtccggaggcctcgaggggtttccacgtagcccacaatgcccacaaccaccatgggtggtgtctctacaatggtcacagcctccaccacctccttcttgttcacctctgcaaaaaaaaagcagtagtcagacttggcaggagcccaagcaaggggtgtaatgttttctaggaaaatgcaaagtgcccatttaggccggaagggcaactgggccccacacctgcagtacggactcacagggctgtccttactgcctatctctcattcaaagcacatttatgttattcaaacaaaaaatatcaggaccctagacagccaaatacctgtccagcttcaattctcttctacagaaacctctggaggcagacaagattgctatttatctggaaaattcagtgccctaacaatagctctgagctcagagattagtcagtatcaactgcctaacattaatgtctccatggctcagcaaccagtgctgttagacatctctaagtagaacacacacaggtaagtggccattattcaagctttcaggtgaaaaaaacatgaatgaggcagttcttatgccagcctcagcagctccaaccccccacactagtgttaacttctctttgctaaggttcctggcaaatttactatgctctgaaatcaataccccacaccgcacctaaagcaaacagtgctgaccatctgtagccttggaatattagttttcaagttaagcattcccattctgctgtcgcagcagttctgacaacgtgtaactcctgcttaaaaaaaaaagtctgccctctgctaacagcttgactccatctctacaatttccctccccctccactcctattcccccaacttttaggatgtctgtacatactggatcccggcctgtcgacttcccgcacgatgtgagtcatgccagccttgtatcccaggaaggctgtgaggtggaccggcttggacgggtcatccttagggaagctcttcaccttcccacgatgcctgctgctgcgcttccgaggcaggaagccgagggacccatgtctgggagcggagaactttctgtgagactaggtgggaaaaaaatcaccgtcagcacccaaaccaaagcagtgcccccttctctagttcccagctgcttaagttccaaatctcagcaatactgaagaatcctgaccagacacccagcaagccgaataaaaaggtcattatctcttccaggctcgcacgtgtcaagaatgcttttgtattcgacaaaatttaagctgaatcttatttcaaatcctctcaacctgtaagaaaacgacccattttttttatctaaccacacaaaaatacactaagtagtggcactaaaaactgcttaacaggcagc

SEQ ID NO: 1888674 - DNA, 4001 bp, Homo sapiens
ctgttgaaatctatattcctttacatgtatacccagtaatgggattgctgaatctcagcagaatttttttttttttttgagacggaatctcgctctgttgtccaggctggagtgcagtggcacaatcttggctcactgcaagctctgcctcctgggttcacgccattctcctgcctcagcctcctgagtagctgtgattacaggcatgcaccaccatgtccggctaatttttgtatttttagtagagatggggtttcaccttgttagccaggatggtctcgatctcctgacctcatgatccgcccacctcggcctcccaaagtgctgggattacaggcgtgagccaccgcgcccggccagaatttttattgtagaaatcaacagactcatgctaaaattcatatggaaatacaaaggacctaaacccgtcaaaacagctttaagaaaacacagatgttggaagatgtatactacctgatttccagacttattataaacccatttgcagtaagatggtgtggtactggtgtcaagataaacaaatacatgaaaggaacaaaatagctcaaaagcagagccagacatatatgaacgactgattttcttcagaggtacaaaggcatttcaatggaaaaaggagaatcttttcaacatatagtgctggagcaattggacatcatataccaaagaattttcagccgggcacgatggctcatgcctataatcctcagcactctgggaggctgagatgggcagatcacctgaggtcaggatttcaagaccagcctggccaacatggtgaaaccccatctctactaaaaatacaaaaaaattagccaggcgtggtagtgagtgcctgtaatcacagctactcaggaggttgaggcaggagaatcacttgaacctgggaggcagaggttgcagtgagctgagatcatgccactgcactccagcctgggcaacaagagtgaaactatgtctcaggaaaaaaaaaaaaaaaatttcaatccaagttcataccaaatacaaaaattaactcaaaatggatcataaacctaagtgaaaaacctaaaattctaacatttctagaataaaacataaaagaacatttttgtgaccttgggttaagcaaaaatctcttagaccatacaccaaaagcatgatccatgatttcaagatacatgataaccacacaaaaatcaattgtatttctgtatactaggaatcaacaattgagtatcagaatatgaaatacttataaataattctgataaataaataaataaataattctgacaacatatgtgaaaaacctgcacactcaaaactataaaacattgctgagacaactgaggaagtcctaaataaatgaatagatataccaaataatatgtaacaataaagaatacagtgattagttgtactccctcaaagtttaaaactgctgagctccaaaagacaccgtttagagaattaaaaagcaagctctgacttggagaagacatttacaatgcatacagctgacaaagaacttacattcagcacgtaaaaagaactctcaaaactctataaaaagatgacaacagaagtttttaaataggcaaaagatttgaacagacacttccccaaagaagatatatggatgacaatgagcacatgaaatatgcttcacatcaccagtcattaagcaaatgcaaattaaaaccacaatgaaatattatcacacacctatcagaatgactaaaattaaaaagactgaccagggtggtggagccaagatggcccaataggaacagctccggtctacagctcccagcgtgagcgacgcagaagacgggtgatttctgcatttccatctgagggttcatctcactagggagtgccagacagggggcgcaggacagtgggtgcagcgcaccgtgcacgagctgaagcagggcgaggcattgcctcactcgggaagcgcaaggggtcagggagttccctttccgagtcaaagaaaggggcgacagacggcacctggaaaatcgggtcactcccaccctaatactgcgcttttccaacgggcttaaaaaacggcacaccgggagattatatcctgcatgtggctcggagggtcctacgcccacggagtctcgctgattgctagcacagcagtctgagatcaaactgcaaggcggcagcgaggctgggggaggggcgcccgccattgcccaggcttgattaggtaaacaaagcagccgggaagctcgaactgggtggagcccaccacagctcaaggaggcctgcctgcctctgtaggctccacctctgggggcagggcacagacagacaaaaagacagcagtaacctctgcagacttaaatgtccctgtctgacagcttcgaagagagcagtggttctcccagcacgcagctggagatctgagaaccggcagactgcctcctcaagtgtgtcactgacccctgacccctgagcagcctaactgggaggcaccccccagtaggggcagactgacacttcacacggccgggtactcctctgagacaaaacttccagaggaacgatcagacagcagcattcgcggttcatgaaaaaccactgttctgcaaacaccgctgtggatacccaggcaaacagagtctggagtggacctctagcaaactccaacagacctgcagctgagggtcctgtgtgttagaaggaaactaacaaacagaaaggacatccacaccgaaaacccatctgtacatcaccatcatcaaagaccaaaagtagataaaaccacaaagatggggaaaaaacagagcagaaaaactggaaactctaaaaagcagagcgcctctcctcctccaaaggaacgcagctcctcaccagcaatggaacaaagctggacagagaatgactttgacgagctgagagaagaaggcttcagatgatcaaactactccaagctacaggaggaaattcaaaccaatagcaaagaagtttaaaactgtgaaaaaaaattagacaaatggataactagaataaccaacgcagagaagtccttaaaggagctgatggagctgaaagccaaggctcgagaactacgtgaagaatgcagaagcctcaggagccgatgcgatcaactggaagaaagggtatcagtgatggaaaatgaaatgaatgaaatgaagcgagaagggaagtttagagaaaaaagaataaaaagaaacgaacaaagccttcaagaaatatgggactatgtgaaaagaccaaatctacatctgattggtgtacctgaaagtgacggggagaatggaaccaagttggaaaacactctgcaggatattatccaggagaacttccccaatctagcaaggcaggccaacattcagattcaggaaatacagagaacgccacaaagatactcctcgagaagagcaactccaagacacataattgtcagaatcaccaaagtggaaatgaaggaaaaaatgttaagggcagccagagagaaaggtcgggttccccacaaagggaagcccatcagactaacagcggatctctcgtcagaaactctacaagccagaagagagtgggggccaatattcaacattcttaaaagaattttcagctttccacagcgcgggggaacgggaggccgcaggatggtcaagctgacggcggagctgatcgagcaggcggcgcagtacaccagcgcggtgcgcgaccgggagctggacctccgggggtataaaattcccgtcattgaaaatctaggtgctacgttagaccagtttgatgctattgatttttctgacaatgagatcaggaaactggatggttttcctttgttgagaagactgaaaacgttgttagtgaacaaaacagaatatgccgtataggtgagggacttgatcaggctctgccctgtctgacagaactcattctcaccaataataggctcgtggaactgggtgatctggaccctctggcatctctcaaatcgctgactt

SEQ ID NO: 1888675 - DNA, 4001 bp, Homo sapiens
ttattcactaaatacacctctgtatatattcttcatctttgattgtggaaatgatataatcaacataaaaatgttttatagattggactaaagacctttgaggtctcttcacaggatcctatctggcggacccccaaatctgccaacacagaggtcatccgtaaacacgtgcaggacagaggccagacaaaaccatctctctcagcctcaaagtggcctggcagtcacatgtggggtctggcctgtatgaggaagtcaggctttcggctccaggcaccctactgcaccgcaaaaccaagttctgcctaagaaacaaaaaacagcctgctcactctccctaatatcccaggtggtaacctaagagcattatctgctagacacccctcctcctccaccctccatgtccaagctatcaccaaggtcctagcaatcttacctcctaaatgtctcccaaatccacttctctcccttcactgtccaggccaccagcatgacttctgcatgtgtgtagcagcctccgcgcaggacgtaaagatgcaaatctagtcgtaggctctctgaaaggaaaattttggggacccaaaattactaagctaaaggaaaagtcaagctgggaactgctcagggcaaacctgcctccctttctattccaagtcacctatctcctcactaagataggtgcatatctgattccctgctttggagaggctaatcagaaactcaaaacaatgcaacctttgtctctcacctacctgtgaccttggaagccccctccctgcttccagttgtccccagctttctggatggaagcaacgtacttcttacatatattgattgatgtctcatgtctccctaaaaccaagctgtgccctgaccaccttgggcacatgtcgtcaagacctcctgaggctgtgtcacgggtgcacctctttctaaattacctgaaaccatctcagatagggttcacacatccctttcccaaaccctcccaggagcccctcgtgggcgcccaggtcctgcgtgctgttgtggcccaggctcacctggagcaactcgactcttcgttacagcctcgtgaacctttcagttcctaaagctgtctagcctgtgaaaggaaaatgaatctgggggccccaaaatcactaagctaaagggaaaaaagctgggaactgcttagggcaaacctgcctccccatctattcaaagtcacccctctgctcactgagataggttaatatgtgatagcctcctttgcggaggctattcagaaacccgaaagaatacaacagtttgtctctcacctacctgtgacctggaagccccctccctgcttcgagttgtcccgcctttcccgagggaaccaacgttcatcttacatatattgatgtctcctgtctccctaacatgtataaaagcaagctgtgtcccggccacctttggcacatgtcaagacctcctgaggctgtgtcacgggcgtgcgtcctcaaccttggcaaaataaactttctaaattgactgagaccgtctcacatattcgaggttcacaagcccatgcatggggacgtcccctggggtagcgcccctcctccactgagctcactcgcttcccccttgtgtgttttcttcagaagaaatttcgcagctacttggtccacacctgtctgccccacaggaacctctcttctccacaggcacatgggcggcgtacctgctgggctgtgtggagaggaccgggttcctctcctgattcctgctcagttaataacgaatgtcgacaagtcgagaaaattgctcaaatttaccccatcaaagaattaaaaactggtgaaagcttgacctgcgccccccacccctgacgtgctcaccgctccactccctctaggcgggcggcacccgctgaagcctcggtaccacacccacagccaggagccccagtcccgcactcggccgcatgcgcactccctgcggccctcccgccaggcgccgcgctgggcagccagcgccccggcggggtccttcaggccttcggccgggcagcctccctcggggtccttgtgcggttgcgtagcagctgcgaggacgcgggccgagccggaagtggagtgcgctgcggcgcgagctgggccggcgggcgtggttcgagagcgcgcagagtccagactggcggcagggcccgaggggccgacccgcagcgtccctggtctctccagccctcactcggaaccgcacgtgagggcaaatccgccccggtggctggcttagcacgcggggacagcccctccgaggcctccctagcggtgtgggcgagagggcgtccgggtcgggggaagcacggaaaggtggcttcgcgaggctgttgtggggggcgggacgggcagcctggcgatgcctggacatggttggtggccaaaaacatttatcgaaagatagcttacccacttagatggcaaggacacggacaagcaagtcttcgcccgtaagcggtggctcacgcctatagtccagggatgccgaggagggaggatcgcttgagtccaggagttggaggctgcagtgagccgtgatcgcgccaccgcactccagcctgggcgacagagtgagaccctatctctaaacaaaagaaagaacgtcttcaagcatggagccatgaagctggatttggctttctgtcgctctctctacagggtacaggtgaaagggggcagacccctcatcatgctttccaggcatctgccacttcccaggaattgtctccctggataaacaaggcgaagtccctggctgtgcagaagcagtagctgtgtggtggcacagtcaggaaaactcgggggccctgttggtattttctacccctgacccgtgtgcatacttctgtcgtagctctcaccacagtagactctgctatcattgtgtcttccatcctctgaaccctgtgcaaggtctgctcatggtgaatgcccagtaaggctcacctattgctgctgtctcatcatcatatcatttctatgtgcccccctagctaagagtctggactgtggttacattctcaggaatgtttgcaaagtcatatttaggtgtgaggagagtaaaacagagctagacataatgttgcacacagcctttggcactggatgcctggtgaatgtcttgtgcaaatgggtaacgtgaggagcagcatttggggtgcgcaggacttaactatttgtgtataacatattattgatgcctgtgtgtcatactctgctactccaagtctagtagtcaattgcataccatatctcagtctggcactgagggaagcagtctggagggaggtacagctggagatttggttgaggggacttatctctgacaacagcctcttgttgatcttcccagacagtgacaataccctcccctcccttgggctggacccctctctacagctaggagccaatggcagaagacaaaaccaaaccgagtgagttggaccaagggaagtatgatgctgatgacaacgtgaagatcatctgcctgggagacagcgcagtgggcaaatccaagtatgttgggagattagggaataaataccagccccagagagggtccaggtcatttaaaaagtcctccagaggcagaggagcatggcttcttggggctggtgaaggagcagtcttggctggagcccagatgttcatgggggaacgaggggaatcacgtgagccgttgtgtgtgtcaggtggagggggcaggtcataaggactgaggaatttgaatgtttcctctgagccctgagagaacgtgtggagcaactgaggacattgtatgtggtttgtgggctgagggatggcaagggcggggagtgggaatggaaagacaaaagtgactatgccaccgtgacagattgggtaaaggtggtaaagatgctttcttggagggactctctgaaatagagaaaactgggtagaactgacgattgactataatcattgtgaagactggcttcttcttgtaatgaattt

SEQ ID NO: 1888676 - DNA, 4001 bp, Homo sapiens
ccatgcctggcaggattatacttttaaagacatctttaaaaagccagtttcctgactggagatcacggtagccttcctgacactctcctctggggctcccattagctatgtccatctcaccaccaaggactcggtggaggccatgggagcccccaggtcccatgggaccttgagccaacaggtcccctcccagacaccagctcacctctgtgcagtatgggggcacattgaagacaaaaagagtcctcttctgaggccaggtggacttggtgccttgttgaatgccgtgtgctctcacatagaggtagtgagaagcctgttgcttttcagagaacttgattggaatagctggaaaggaaatgggaggggagggatggccaggctaccctgagctgaggccagcgagacactcacacaacttcctttctccacatccctgtctagtcctatctgttcatcgatccatccatcccttcaccaaccccccttaccctactctttggcaaagcctgtgcgggctctaagagtctgcccaggagggcctcccaaggcggtgcagggagagagaagataaatgggcaatgattacagatgggggcgcaatgagagggaagctcgaaccctgcggctcttggagtcaacgccaaaatcctaaccatggctggaagccccgtgagaccctgcctgtcactgtgacctcttcttgtaccatcttcccccagcaccttggattctctgttcccccgggtacaccagggcctcacacatgctggcctctctacctggcgtgtcaccctcttccctcccgctcacctcaggtttagctcaaacctcgcttcctcaggagagccttagcatcacctccgcccctcctgccagctcagatcccactgcctgtgccttcacagcttctcttaacagtctgggggctatattgatgagattctttggttaatcgctggcacacccatgactgtaatcctcataaagctaggaactgcttctatttttctcacacctccgtcacagtaccggttggcatagagctgcggtccctgaactcaggaagctcagttgcaataacggagaagacaattaacaagtaagcatacagcaaacttgtatcaatcgtgaaggaaacattacagggtgatggggtggcagaggtcttccttccataggccatcacggatggcctctttgaggaagcaacattaaagctcaggccagaacgccactgtgcaacaaaccggcacagcacgtgcaaaaacccagaggggggaaaaagcatgttccctcagaggaacagaaagagctttaggtcggcaccagccagaccacgtggcccacacaggttaagaagtctggtttttgttttagaagctacctgataaagccactggagggaatgcagtaggtgtggcgcctatcgtgggcgcggcagacatgatcgaatctaaatgtccttaaaagaacattctggcacgtgggtggagaacagaagcaggggcaagaggagaaggagggcaaccgagtaggagggcctataacagcccaggtaagagctgatgggggatggactaggagcagaggcgatgagaaggggatgagctcacctggacaagcaggtgtggacggaaatgggtttgtcctgggtgagagtgtggacagaggcgggctcacccaagggaagcgtggaccaagttgggctcgccccgggagagtgagcaggcagaagggcgccgcgtgggtcctcgggaccccggagcctcaagacctgcggagcctggggccacgggccaccggggctcacacccaaccgtgcggccgctcctggggacccccggccgccgccagcccccaaacacctcccggcgatgctggccgcccccggtctcgcgttccggatcccctcacctgcgtagcacggtgggctcgggataccgtcctccgggtcccgcgccgcgagcttcgtcctgcgcgccaccatcttgccacccgggagcgcgggggtcgccgggagttgcggttcggcgccggcgcgagcgcgtttttgtggcgcctgccccgccccctcgctccaagcccgcctccccggccccgcccgccatggctcaaccttcatccgctcagaggcaaatcagcgcgccaaagtgggagtgaatgtcagagtcgaccccggccagtcacgagtgcgaactcagctttccactcatgcattcacacgttgaataggcagtgtgagagaaatccaggatggctgctagcttttcagtctgagcaactaagaggatggtgttgccattgactgacatgggtagactgcaggagaggggccagcttagggaaaatcgagtagatcagttctctgtgggccgtggtgagatgcccattaggccactcaggggagatgtcaggtgggcaatcagatatgagactcaatagtcaactatttttttttttctgccgtctcactgtgttgcccaggatggagtatagtggcatgatcacagctcactgcgacctctgcctcctgggcacaaatgatcctccatttcaggctcctgagtagctgagctaatttttcgttttttgtaaagatagggcttcactatattgcccaagctggtctcgaactcctgagctccagtaatcttcctgcctcagcatcccaaagtgctgggacaagaggcatgagccaccatgccaaaccgacagtcaactattttttttcttttgagacagagcctcgctctgttgcacaggctggagtgcagtggcgtgatttcacctcactgcaaactccgcctcccgggttcaagtgattctcctgcctcagcctcctgaatagctgggattacaagcgcccaccaccgcgcccctctaatttttgtaatttttagtagagacagggttttaccacgttggttaggctggtctcaaactcctgatttcatgcgatctgcctgcctcggccttctgaagtgctgggattacaggcgtgagccaccatgctggccccaataggcaacttcaaatgtggtgtcaaggctcccagagaatgttccaggcacaggaaatggagaagtgaccatctttaaaagcctaggcacagaaatggcagagtcacatctggtcaaagtagtaacagagcacacttgggttcaggaggggcacaggaccccaccttctggagaggagtatcaagtaatttgcatccctggtggggagcagtggctcatgcctgtaactccaacactttgagaggctgaagcaggaggatcacttgtgcccaggagttcaagaccatcctgggtatcatagcaagaatctgtctctattttttaaataattaagttccaccccaaatgttgaaatccctgcaagattaaaacccttggctgggcgtggtggctcacgcctgttaattccaactttgggaggccgaggcaggcagaccacctgaggtcaggatttcaagaccagcttgtgcaacatggtgaaacctcatctctacaaaaattagccagacatggtgatgcacgcctgcagtcccagctaattgggaggctgaggtgggaggattacttgagtctggctgcggaggttgcagtgagctgagatagtgccactgcactccagccttggcaacagagtgagactttgtctcaaaaaaaaaaaaaaaaaaaaaaaaaagataactcaaaggtaggaataacaaatgtttattcagaaatggataagtaatacataatcacccttcatctcttaatgccccttcctctccttctgcacaggagacacagatgggtaacatagaggcatgggaagtggaggaggacacaggactagcccaccaccttctcctcccggtctcccaagatgactgcttatagagtggaggaggcaaacaggtcccctcaatgtaccagatggtcacctatagcaccagctccagatggccacgtggctgcagctggactcaatgaaactctgtgaca

SEQ ID NO: 1888677 - DNA, 4001 bp, Homo sapiens
atgacaccctgtctctacaaaaaacacataaaataaaaattagccaggtgcagtggcatgtgcctgtagtcccagctactctggaggttgaggtgagaggatcacttgagccctgcaggtcgaggctgtagtgagctgtgattgcaccactgtactccagcctcggcaacagagcgagaccctgtctcaaaaaaataaaataaaagtagatttgcaaatattccacaaatccacttcaacatgaacttctggctctttttctcaccctccctccccagataaaaaggttgatttccaaaaggcacttgaaggagcctagaatgggccaaggtataccatatactatggagactcctgtggcatgatcctaagtactcatttacagacacatctcaaggtgcagatggttctagctccttctcccaattcctgccagagtgtgagcctgtgagagcagattatgtcgggggcagagtgataaaaatgttcggcagttagatagtggtgttgtgagtcctggctgatgggagcacatcctcagccaggactcccaagaccccttcctccctgacttcaaaggggctctggatgaggcatgttcagtatgggtttgaagctggacctggattctaaactggaagttaaagaaataatccaattctactcttgccttcagaaaggccaagtttaattctatttttcttcgggggcaactgaggcccaagaaatcaagaagagccaggcaagctaggcccagtggctcatgcctgtaatcctagcactttgggaggccgaggcagacggtttacttgagtccaggagtttgagaccagcctggccaacatggtgaaaccccatctctacaaaatatacatatatatataaaatagctgggtgtggtggcgcatgcctgtagtcccagctacttgaggggctgaggcaggaggattgcttgattcttgattccatgtcgagactgcagtgagcccttattctgccactgcatatcagagtgagaccctgtctcaataaaaataaaaataaaaaacacacaaaacaacaataacaacaacaaccaagaagatccaggcagaacagtagaagacgatgtttctccagacacttaaaggtaaccagaaggctgggcgtggtggctcacgcctgtaatcacgttgctttgggaggcccaggatcacttgaggccagaagttcaagaccagcctggccatcatggcaaaaccccgtctctactaaaaatacaaaaattagccaggtgtggtggtgcatgcctgtggtcctagctactcgggaggctgaggcaggagaattgtttgaatcggggaggtggaggttgcagttagccaagattactccactgcactccagcctgggcaacacggcaagaccgtgtcttaaaaataataataaatatatataaagataaccggaactggagatactaacaagacactattaggttgtcctcccgcatcctaatggccactctgcaaaatcctccgacttccctatcccctaaagtccaaaccagtgctcatagaagaagcgtaataactccttgctaggggcttttttgtagatgggcttcctgctcaggtcgtttctgccttcatccttcttcatatggttcaccagaagcaggatcaggaaaacagcagagaggatgcccgcgatgctgtccacaatcaggactgccacgacctccattctctcaaagatgttgctgccctgggcagtgttggacatgggtgccttattggacacatcctggtcccccgcagagagtgagatcctcctggggatgacctcgttgtcctccagttccttggtttcagtgggaccaggttcccaggccctgccctctcagggatgtggttatctagaagcaccaagggttggatcacttcagggatgatcttggggtcccttgactcatcaatatctctagagccagagagctcagagtcatcaggttcctgcccccaacacccacatccagagtcttccagtagggatctggagaagtttggcccctaggcggtcctgggttgatgacctcagtttcttggattgactcaggggtggtgggggtgcctgcaaaaagcagcagcagcagcaggagcaggagggcgggggcagtggtaccgccatccagagagggtgaacagcctgcggtgagtcagagcaatcattcccaaagtgtacaattcagtggtacttaatatattcacaaggttttgcaactatcaccactatctaattgcagaacattcgcatcacctcaccctcaaataattctgtactcagcagcattcatttcctatttcctgctctgttccagcccctgacagccaggaatctattttctatctctacagatgtccatattctggatatttcatatgaatggaatcatatagtacgtggtcttttgtgtctggcttctttcacttagcataatgtcttcaaggttcatccatgccgtagcatggatcagtgtttcattcctttacatggctgaataatcttctattctatggatagaccacgttttgtttatctgttcatcagttgatggacatttgggttatttccgcttttttggctattatgaataatgttggtatgactatgttttgtatcagtttttgtgggaacataggttttcacttcttttgggtataaccttaggagtggaattgctggcttgtatagtgattctatatttaacctttgaggaactgcctttctattttccaatgtggctacactattttacattcccactagcagtgtatgagggccgcaatttcttcacatccttgccaacatcgttcacatcttttgttattttccatttgctttttttttttttatcatagccattgtagtggctgtcaagtggtatctcattgtggttttgaattgcatttctccaacaactatgcaattgagcatcttttcatgtgcttattggccatttgtatattgtctatggagaaatgtctagtcaaactttaaaaatgtctatctattggaccaggcacggtggctcacacctgtaatcccagcactttgggaggccgaggtgggttgatcacttgaggtcaagagttcgagactagccggaccaacatggtgaaacctcgtctctactaaaaatacaaaaataaattagctgggcatggtggtgcatggtatcaccaggttgcccaggatggtctcaaactcctgagctcaagcaatctgcctgcctcggcctcccaaagtgctaggattacaggcatgagccactgtgcctggccttgatacagattctttattgcttagtttcatctcccttcttctctcagaaattaaaattaagtatgatcatgatgacgatgttgatgatactgctgctgctgctgtctgtactacgcaataccaatggccaccaagaagtcaagacactctggagaagactccaaagacctctgaggtgggaacacaaatcctggtcaagttcataaggatttccctttcctctttcatacaacacccttgctatttattacaggaatgggttgctatggttacaggaacatgggggaggacagtgaatgattctataaagtgaaagaggccttaatttgtatgttgtctagggttggagctggcacatctcttcccacaatgcctggggttacccaaagggcatcaagtgtcccaaattcttcatgccaaactggtctctgttttcattggcatttgtggaaagcctgtagtgcctaaggctactggggagaggacctgggtctgagggtgatcaccaacaaaagagcccaagcagttgtcattcctctcccaaccctgggcaaataatccacaaatagttcagaaatggatgctgctgaaacatgggcctggctatctggatttgaatcttaacttcacctctaatgtgttgtgtgatcttgagtctcacaaggaaattgaagctg

SEQ ID NO: 1888678 - DNA, 4001 bp, Homo sapiens
acactcacccctccggagagtgccagggggcgggaggccccacctggcccggatccagccgcgggggcggcggcagcggcggtggcggagcagcgcctatttatagaccgcggcgccgagcctcccccgcccgcgcgcccaggcgcccagcccccgcagacccttggggcccctggaggggtcccacggccgcattctccgccgcgttttggagtcgcgtgaggtgaggcctggacagggcacgtcgccccaccgtggggccgcggacctgcgaggccgctgcggagggaagggctgagcctaggcgctggcgggccgtggcgcgcggggacggggaccccatgccgagtcccggagcccgcggggtcacagacccacgttccgccctctccacacacgcaccttgagccgcctctgggcctgggtccgcggcgacagcagctgctccaccaggcggtcctggggcgctgccagcgagtccatcgcggcgacccccccaggcccgggggcacgctcggaccccaggcccggtcaggccgccagagcccggcgacagcgagggaccttggcgcggctctgccttaggctgcgttgtccaccccgttttgcggacgcgggaagtgaggcctggacagggcacgtcgcctacccgggggatcgtcgacccccgaggccgaccgagccatccccctgactgggcgaactggccccaagctgtggcggcgtcgcagtccgggcaggccccgctcccgcacccgagccagaggcggggcgtcgcaggcgcccgcggagcgcgcggcggggggcggcagagacggccccgcccgccgtcgccgggaaacggtcgcctggaaattgggccgcgggcggagccacccgaaagcggctgcggagggcagggctgagccgaggcgcggtcgggccatggctcgcgtggaccgggagccctgccgcgcccccggggcctcagtccgggctccaggacagcaggaggggacgaccgggtcctgcacgcgggccggggcgggccgggagtcggtagccaccgcgcgtcccgcccccaagaggtgctgcgcggcttccgcccgccagagggcgccggaggccgctcccgggacccacgcgcaacagcgcgggtacccgcccagttcagggcccgccgtcttctcgcagacttgcccgaaaacctcccggcggcgtctcgacgccccaagtgcccacagacacgccgcgccctgcacccctccccagccctgcttggggctgacctcccccgtgcgtgcgtgcgtgcgtgcgcgcgtttgtgtgtgcgcgtccgtgcgggtgtgtgtgtgtaatgtgtgtgtgtgtaatgcctgcgtgtgtgcgcgtgtatacatgcgtgtatgcgtgtgtgtgtacgtgtgtgcatgcattgggtatgtgcgtgtgcgcgggtgtgtgcatgtgtgtttggtggactctttcccaagacattcgggggaccggaggagggcagagcccaccttttctgaagtccagcctgcctgtcccctaggaggcttagggtggacagaagggaagggaagggaaaggaagggtgcaggctgccggagtactggaggtccctgcaaaacttggaagcccccgccagcctgctgaataaacgccggccacccatgcgctgccctgcagccctcaggtggccctgccctcagagacaggggtgggggtgggatgggacccatctcccacgtgcttctgtggacattcccttgccctctgagcatcctcaccagctctgacccacaggattggagggactgggagctcctgccagccgggcctccctcccatgtggctactccagggactgcgggggtctcccgagctccgctctgtgggccacccacctccatgaccccagtagaatcccaacaggcaagcccagcggagcaggacatggggcctggaaaggttccagggtaggactggtcaggccaagcccctgcacattagaacattagaagctggaggccccaaccccaccccaccccacccgccaccagccctcccttaggctctcctggctgagagacctcctccacttcctgtccaggccctggtcctgttgtggggcctggaccactggcacctggggaggaggggcaggcccacagctgggaacaggagagcctttcatcccagggaaagggggcagctccaggccccccagctctaccagtgcatccctcagtccttgctgccagaaagcctcctcactggccccagccttccatggccctgacctgcaggaagcctctaggctgagtcccacccagtttccaactgagggtccacacctcgaagcccagcacccacccagacaggctggcatctcaggcccagggcatctccaggaagacagacagccctgggcctaggcctcaggctaggaggtgtctaacagagtgtgtggctctcagactgcctgcctcagtttccccattggtaaggcacagcctctggggaggcccaggtcaggagggcaagaatctcactctcagcgttcaacccacctgccctgccacccactggggcccagtcagggcctgtggattccctgggggagcctcaaggaaggggccgtacctgccaccccctttctctggtccccaagtgacaaaagatactcccagggcttcctgagccatatgacacagctgcgcccatctcctcccaatgcctgagcctctctggcacttccattcttagaatcacccgagtcagctctgggagcagcagccagggccaagagatcaccggtgctgcctgtgaggaggtgggggcacagagcgtagtgacggaactcccccaatgcctctacagccccctttcaaagagcaaaaagaatgcttggacaggctgaggctcagcaacggtggtagcagggaagctgccatgtgcttccagctcccccagacccactggtcacccagacacctggcctggctcctgctccggggctcccttccttggccacacagtgccttcttcctctgggcttggaggcctgggaggcctgggatggggtgaggtggactcccggttgacctcaaacgatgggcacctcagcaggagggggtccccaccctgcagtaatgggcaagagaacctggctgcacccaacagcagtggctggagcccagggtctcagagtgcccttgggtcaagctggggacacctgcaggcacaggagaagcctcaggggcctggcctcctggctttcccagcctcagttccttccatttccctcaaacagtagcctgacgcatgtgtccctgcatctcaggctttgtctgacctgctgtgatggggaggcagctcccagcctggctccccaaggggcccctcccagagagcctcatccacctctgggtggggtgtgtcccttccaggagaatggcactggtcagccagtgactcccccagctcctggcccccctgcccgccctcctgccctgcctgctgcaccctgggccaggactctggagttccactcagcatccatggctcctgagaaactccatccctgatgggggctgccagtgccaccctggtgccagaattgggctcttcttttttcctccaaagatggctgagctcaagccagagaggacaccagcaggctttccccagcccccccagcccacctggttgtcagcccccgccccaccccaggggcctcacagcattgtttaaccctgagctcggctgggtttcacccaggtgcctagaccagcctcctgtccagtcttgctttcctggagggtggggccaacccttttgagaagccacaagcctatttgtacccacagggtcccaggacccatctgggcacccagaatgactcagaccagaccctgggggttcccaatctggggaagagtccctgttgcagacctgaacactcaaatttgtgtatggggagggaaaggggcatgaaggtgcaggggaggtgg

SEQ ID NO: 1888679 - DNA, 4001 bp, Homo sapiens
aggacagccacacacccatgcccgaagggggagatgaagtataggcagcagtgcactcggttgtcttggatgttctttcggttgaggccgctctcatcacggaagtactgctcaaactgctggtccacatagtcggtgatgggcttccagctgtgggcaggagggaggtgaggccaggcctcgagtgctgtggccgcctaggcaaggcctttctcagcaggcctcactcaccactcggtgttgttgacagcgtccccgaatcccggcgtgtccacgatggtgagcttcagcttgactcccttctcctcaatgtccaccgtgtgttttagaatctctaccgtctggctgatgcgctctacggggaaggggccactggaagggcctctccaaccctcagcccctcacccttggcagccaggaccctcgtcctcatccatcttggtgccttggccctacccccaggggacccacaccgcgagaacagaacagtgggagctggacctgaaagggagtccttggagaggtcccatggaaggggactggggatcagtgccagggcctcctgggggccactcaccctcagcactgagcagcttccggtccttgtacaagtctgtcaggaagaggctgtggaccagtgtggacttccccaggcctgactcacctgcacacaggtacagagaaggagctgcgttaggtctggggctccaacgacagagcttggctggccagtgaccccagccactcccccgaggagcctggcccactcaccagccaccatgagtgtgaagtcaaagcctttcttcaccgacttgcggtgcacctggttgggcagtgtggcgaagcccacgtactgcttgtcaatgtcctggggacaggatggaacagggtagggacacaaaggtttctccagaagcccaataccctgtctcttaccaaatgcggtatgaggagacagcagagggtacggttcccagggtggggcatttcgttggcaaaaataaggggagggcccgtgggcaaaagcctggagataagaaggcaggcgaggtggtggcaggagaaggcacccctggccccaatcccagggagggctctgcagggaccgacactgtatttattccgtggggagatgtcaggccgcagcaggcacaggcgatgtcctccctcctcgggcagagggcagcaggattgggacccctgggacacactcaaggccctccataagccggagaagctgggggcctcgacactcacccctccggagagtgccagggggcgggaggccccacctggcccggatccagccgcgggggcggcggcagcggcggtggcggagcagcgcctatttatagaccgcggcgccgagcctcccccgcccgcgcgcccaggcgcccagcccccgcagacccttggggcccctggaggggtcccacggccgcattctccgccgcgttttggagtcgcgtgaggtgaggcctggacagggcacgtcgccccaccgtggggccgcggacctgcgaggccgctgcggagggaagggctgagcctaggcgctggcgggccgtggcgcgcggggacggggaccccatgccgagtcccggagcccgcggggtcacagacccacgttccgccctctccacacacgcaccttgagccgcctctgggcctgggtccgcggcgacagcagctgctccaccaggcggtcctggggcgctgccagcgagtccatcgcggcgacccccccaggcccgggggcacgctcggaccccaggcccggtcaggccgccagagcccggcgacagcgagggaccttggcgcggctctgccttaggctgcgttgtccaccccgttttgcggacgcgggaagtgaggcctggacagggcacgtcgcctacccgggggatcgtcgacccccgaggccgaccgagccatccccctgactgggcgaactggccccaagctgtggcggcgtcgcagtccgggcaggccccgctcccgcacccgagccagaggcggggcgtcgcaggcgcccgcggagcgcgcggcggggggcggcagagacggccccgcccgccgtcgccgggaaacggtcgcctggaaattgggccgcgggcggagccacccgaaagcggctgcggagggcagggctgagccgaggcgcggtcgggccatggctcgcgtggaccgggagccctgccgcgcccccggggcctcagtccgggctccaggacagcaggaggggacgaccgggtcctgcacgcgggccggggcgggccgggagtcggtagccaccgcgcgtcccgcccccaagaggtgctgcgcggcttccgcccgccagagggcgccggaggccgctcccgggacccacgcgcaacagcgcgggtacccgcccagttcagggcccgccgtcttctcgcagacttgcccgaaaacctcccggcggcgtctcgacgccccaagtgcccacagacacgccgcgccctgcacccctccccagccctgcttggggctgacctcccccgtgcgtgcgtgcgtgcgtgcgcgcgtttgtgtgtgcgcgtccgtgcgggtgtgtgtgtgtaatgtgtgtgtgtgtaatgcctgcgtgtgtgcgcgtgtatacatgcgtgtatgcgtgtgtgtgtacgtgtgtgcatgcattgggtatgtgcgtgtgcgcgggtgtgtgcatgtgtgtttggtggactctttcccaagacattcgggggaccggaggagggcagagcccaccttttctgaagtccagcctgcctgtcccctaggaggcttagggtggacagaagggaagggaagggaaaggaagggtgcaggctgccggagtactggaggtccctgcaaaacttggaagcccccgccagcctgctgaataaacgccggccacccatgcgctgccctgcagccctcaggtggccctgccctcagagacaggggtgggggtgggatgggacccatctcccacgtgcttctgtggacattcccttgccctctgagcatcctcaccagctctgacccacaggattggagggactgggagctcctgccagccgggcctccctcccatgtggctactccagggactgcgggggtctcccgagctccgctctgtgggccacccacctccatgaccccagtagaatcccaacaggcaagcccagcggagcaggacatggggcctggaaaggttccagggtaggactggtcaggccaagcccctgcacattagaacattagaagctggaggccccaaccccaccccaccccacccgccaccagccctcccttaggctctcctggctgagagacctcctccacttcctgtccaggccctggtcctgttgtggggcctggaccactggcacctggggaggaggggcaggcccacagctgggaacaggagagcctttcatcccagggaaagggggcagctccaggccccccagctctaccagtgcatccctcagtccttgctgccagaaagcctcctcactggccccagccttccatggccctgacctgcaggaagcctctaggctgagtcccacccagtttccaactgagggtccacacctcgaagcccagcacccacccagacaggctggcatctcaggcccagggcatctccaggaagacagacagccctgggcctaggcctcaggctaggaggtgtctaacagagtgtgtggctctcagactgcctgcctcagtttccccattggtaaggcacagcctctggggaggcccaggtcaggagggcaagaatctcactctcagcgttcaacccacctgccctgccacccactggggcccagtcagggcctgtggattccctgggggagcctcaaggaaggggccgtacctgccaccccctttctctggtccccaagtgacaaaagatactcccagggcttcctgagccatatgacacagctgcgcccatctcctcccaatgcctgagcctctctggcacttccattctt

SEQ ID NO: 1888680 - DNA, 4001 bp, Homo sapiens
tccctcatccctgtgtcccttgcggcagttgcctgaggtcagagggtacagtggtcaacctctgactgaccctctcatctctctttgcagatctcataagtgcaggggaaaggggtggggcagcagctcctatccttccctcccagccctactccgggcccggtcagctcctggccactgtactcaccgaagctgtggcccagaatggagaatcgattccatttcaaggctggaaatgcaaggagccagaaggtccggctgggcacaggctcagcccacgatcttgcttctagtccccaggctcaggaaatcccttcccagcatctggggtgtccacccaggacactagcttgggggacccactggaggaagcgaactcttcaactttcccaagatctcccgtgaattgctggcagacctggggccagagcccaggccccactctcaggccagcgctgcttcctggatcctaccccgcctccagtgataagagggggtgccctagagcaccccccacaccgccgaaaatacacactctgtttcttacctgccacaactcttcggatctcactcacaaaagtctggaggtaatatgggacacctgggctgtaatgggacgagagcccatgacctccgaaatccatggcaacgtaataaaagtctgaaacagagagaagcgggttggagggtaggaagaggtgtctatgccagctgtctccccgccctcctcattcccctgcagacctcccccctcaccttcctgcccactttccccctggccttcccttcagccccagcctcacaccttgcgggagaagagggatgagtctgtcgaaggagctggcattgtccagccagccgtgcaggcagagaactggagggccctgcagggagccccaggctttggctgcgatgtggccccagggcacagccagcttcagctctgagatcagacctgaaagacacagccgggtctttcattccttcattcattcacccatgaagctggtgctccctgagccccttatctctccctgatgtgcttgagccaggggctcatgtccagagggactcagacccttagctgccccagaaggttatggggagagagtcagacatgggagtggagactcccagaggagggacagagaagctaagccggaaaaagctgtgacaggcctcagagcatgcaccccatttaaactggggcagaaccttctagaatgtgctggggcgggggcgctggtcaggcctggaccccatcacttgctggctgggtaaccttggagaagttactaaaacgtcttgagcctcagtttcctttcctgtaaaaccggagtaaagaaacagcccgtttcctaagcctttcacaaaggccagaggggtgccaaaccctcacacacgcagcaggtgggagcactgtcactctccctccacagagcaggaaactgaggcactgggagctgcagtacatgcccaaggtcacactgggcgacaggggcggagtggaaatttagggcaggcggtgggactccaggacccaccgccgccccccacagctggcagcctcctccgtctctgcaaggctggagacctgcgcgcccccgacacccacgcgcacgcccggctaactcagggtctcctagaaccctgggaggccacgtgcggccgtgtcccgggtcccccaactcccggccggtcgcgctctcacgccccgggactgccgaggaaggagctgcgacacccagaagggcgacgcggtcggtgaaccctccactccatccgccctcctccacagtcccaaccaggtgggtgggcaatggggcgctcgcgcgaggcctccccgtcccatctaagtctaaggcgacctggtgagtctaaggcgacctggtgcggcgttctcagccatcgctctcgtctggcgaatgcgcggccgtcacaccctcacgcctgcctaggtagcaggaggggagtgtatcctgcagttccaggccctgcttctaggctgttccgccccgccccgccccgccccagtcaggccacacctccacgcctcacgccccgccttcgccccgcctttccaccgccatctctgcgccctggcaggacccatcccgagggccgccggccccacccctaggcggccccacccctaggccgccccgccccacccctaggccgccccgccccaccccaggcaagccccgcaactccagcagtccccgcaactccagccgtccccgcccccattcagaaggccccgccttcccaccgccctgccagagccccggcgggccctgtgcccagggccgctggctccaccccaggaaggccccggctccacccccggaaggcctccgccccacctgccaggccccgccctcacccgccaggccccgccttcccactaccccatccgctcccactggctggaacctagcagggtcccgaccactgggcagtcctgtaattatagtcacgcgcgaccacgcccgactaattttgtatttttagtagagacagggtttctccatgttggtcaggctggtctcgaactctcaacatccggtggtgagcccgcctcggcctcccaaaatgctgggattacaggtgtgagccacccaacccggcctggtcaaactaacttttaagtataaaaatagcagattgtcaggccggacgcagtggctcacgcctgtaattccaacactttggaaggccaaagcaggcagatcacttgaggtcaggagttcaagaccagcctggtcaaaatggctaaactgcgtctctactgaaaatagaaaaacagctgggcgtggtggtgcacgcttgcaatttcagctactcaggaggctgaggcaggagaatcgctcgaacttgggggatggaggttgcagtgggcccagatcgcggcagtgcactccagcctgggtgacagagtgagttaaaaagaaaaaaaaaatagcagattctcaccaatgtgcaggaacccagagaatattgttcccaaagcctttcctgaggaattactagaaaataagcttcagacaaccaacgagactaaaaagacattgacattagcctggtgtgaacattaaagatatatttacatggagaaccaagagaagatgaggagtaaaaaggagaggatggagtgtaatggttacattcgccaacaacatagacaaagtacagctataaatagggggagaaaatggtgtgggcatatctttaaagtgtgtgtgtgtgtgtgtgtgtgtgtgtgtgtgtgtgttttgttttttgttttttggccagggacggtggctcaggcttgtagtctcagcactttgggaggccaaggcaggtgggtggcttgaggtcaggagttcgagaccagcctggccgatgtggcgcaacttcattgtagggagaccccctgaaactattgctatggaataaaagatgaaatgctcctgattattgtaaatacaaaattgcatgcaggattgtgtaaagacaatgccaggttggactgccagaatgagccaatagcacgtgatgtgcttccccctgcagagagcctatgaatggacttgcagtcagggaagtttcacatcaccaagattcgtatcccagcaaagcagatgttcatagctctgggaatggaatgcgacccttgtggagagcctataaatggacgcatagggggtgcctgtccatatggataagatagggctataaacgccctcatcttgccgtggctcttctaggcctctttagggttaaggcatactcccttctgagaatttctggtctaaccggttgtctagcttcctgtttccatggattgtttgtaaccagcttttgttgcagtttttactactgattaaaatcttgctaatcataggttatggaaagactgtgtttctgttttaaggctctgttagaaattactgacgcacacactatgttgtaaattcttatctctgtatactatacttctacatacaaatgtactg

SEQ ID NO: 1888681 - DNA, 4001 bp, Homo sapiens; identical to SEQ ID NO: 1562989

SEQ ID NO: 1888682 - DNA, 4001 bp, Homo sapiens; identical to SEQ ID NO: 1563001

SEQ ID NO: 1888683 - DNA, 4001 bp, Homo sapiens; identical to SEQ ID NO: 1563002

SEQ ID NO: 1888684 - DNA, 4001 bp, Homo sapiens; identical to SEQ ID NO: 1563004

SEQ ID NO: 1888685 - DNA, 4001 bp, Homo sapiens
gaactggccactaaggccgggggggtcctgggtatacccctcactccaggccctgcagggaagcagcaactccccgactccatttacgggcaaggcagtccatctggaccttggtaaaggcaccaccttggccaggttcccaagccacagccccatttcaggcaccccagcgggctccctcatgactcacccatcttcccgtcctccacaaagaggatgtgcagtgggtacaaggtgctgaagtagaagacatcgatgttgttcttcacggccacctaggcacaagggggtccccagtcagtctctggggcttgacgccacctctgaggccccaggaagagtgtcactgagcagattctctcccagggccttccctggtaaacacaccccttcgttccccaacctgggcctccccaacacatctgcagctaagagcatgactccgcagacacgaccttctactgaccccagtggggcccggctggtaggtgagtaaggactggggtgcctgccctgcccggaacccacctggaggttgttcagaggctccatcttcatgaccgagcccaccgtgctgagaggcagggagatctccactgtctggttggggctgagtggcgcgtggacctggaggggggcggcgggggccaggccaaagctggggagagagaagccccacagggatggcagggggagtaggtgctgatgcgggacaggtgagctcctccgactcgggagctggggctgtggttggcagggagcctctcaccgtgccagccttcccatgttctggaccctggacagaaggatgggctgtgggtcccctcccccagatggccatctggacagaaagaaagagccccaggccaattgctctgctctgccccagcctggctgcaggcctgaagcccagctctgttcctctcctctgggccaggcactggtgggcccaggtaggcaggccttgccctgtcctgccctcaaggagctctgtctaatgccaggggcctggagtataagctgcttctaccttgaaaactctgggaccacccaagtctctgctgccaatcctcaactcccagaagggatctgaccatcccaagcaagacgctagattttactctcttggccagaacttgccaggtcacacagtggccacagagagattcaggaaagctctgcttctctgcaaagcagcacagtgacaaattaggaagatcctcatgggtgtgagacacgccagcagcaggctcttggaaggtaagtcacagggcatgggactgggggcacaaaccgagggctcggtatacctgggctgcggattcaatattatacctgctcctagcctcataaaaacagagccaggtacacctcttcctatcctctagatgaggacaccgtctcagggaggagcaggcctgtgtcagaccccatagggtgagggcgctgctgagaatcagagtttgggctgtctgaccccagcctgtgctctgcccaagaagccatcagcctgcctgggacacagagggagaccatttggggaaccccaggtccgcttggtggctcagcacactaggctttcctgggagctccactactgctcgctatgtgagctgtccaaggagcccaggtgtcattacctactaaaaaggggtgatggcagtgactttgctgggccatcaagtggctcaagtgagacaatactcccaaagccggtgccacagggcctgggtgcccaggaagcattcagcacacagtaagtttgctagaggcaaccattggaaccacctctcggagcctggtgcacttctgtggcctccagggtcacatgagggtaagtggtagagccacccctagccccggtctgcccaagggtcaggacctactggcccccaggcttccttggggaagcagccccttcagtcaacttcttagaggctcagtttgctcatcatgagcgtgctcaggaagaagaatcatcaggaggggctgccaggggtccccagggagtcctagcctcactggctgggtccatgacgcaaccttcccactgacacccagtgtagcggacccggtggggaggggcctgaagcagctaccgctcccagaggccccatctgacactttaatcctctgccacaatggggaggctggtaggcaggcccactccccaccagccttctgagagctggtccctaagatgggcccctcctatgtggggtgtttgccagaggtgggcttctcagctggagcagggcgtttctgtctgtaaaacactcctttggactgtggaggcaaaaataaggggggccaggtgtggtggcgtgcacctgtagtcccagagacccaggaggctgaggcaggaggattgcttgagcccaagggttcaagaccaacctgggcaatacactgaggccatctcaaaaaaaataaaaactaaaaagaaagacgtcctttcccactctgcctggtactttggagtccatatgaagaggccacttgggggtaaaaatcccactgcttggctgagcacggtcactcacacctataatcccagcactttgggaggccgaggtgggcggattgcctgagctcaggagttcgagaccagcctgggcaagatggtgaaaccccatctctactaaaaatacaaaaaattagccaggcgtggtggtgtgcacctgtagtcccagttactcgggaggctgaggcggaagaattgcttgaacccaggaggtggaggccgcagtgagccgagatggcgctgctgcactccagcctgtgtgacagagtgagactctgtctccaaaagaaaaaacaaacaaacaaaacccagtgcttcagagagttttggcctgagcggtggtggggaacatccttcagaaaaggggcactgccctcccctctacagcccccacccctgcctgcagtccccagaacagactccgagtgggttctctcacaggcctcctcttgagaggtgcgctggcctcagggagctctcacctgttgcggttgaactggatggcaaagtcggtcatgacctgcaaggccttgttggtcagctgcaggtccatggagatggagcccacctggcgggtgaaggtgcctgagatctccagccccttagccttcatggctgggagccagacctgcagggaagagggtgcggagggggcgggtaggtgcctcttcctgcagcccaaactcaacagcccacctgagggtgctttttctctctctctcctgcaggggcctcccagatccagcacccccacctttactgctaggggatgaacaggtgtgtactgggaacagaacaatcccatgtaccatctagggccaccgccatgacaggctgcctctcggagcagctcagggtggggaggcacttcagcgctccagggctgacgttgagtcctcagagggcaatggagggatcacttgggaagtagggctgagggaggccatgagctggcaatggagggatcacttgggaagtagggctgagggatgccatgagctaaggacagagctcagtgcccaatggcatcctgggcctcggccagaatctgggccttcctggccatcaccgcctgtcctcccttgcaggaggcagggctggcctttggctgtagaaactggtctgaccaaggacagtacctaagaggacccctcgcctggcaggccttctgctgcttggctgcccttgtcattcaagtctcagctcaagaaccacctcctcctggaaccctgcccccaggttccctcgccccagtgatgttatggcagataaatatgagcttgtgtctgtctctcctgtactcagagagctcgctgagggaaaggctctgtttttctgtctttaccaccttggctcagagcctggtgtgaaaccagtgtttggggagtgtttgctgagcaaacaggatgagttagagccctgccatggaagacatccaccagcggcatcctgtgggctcacaaacgcctctcaggcg

SEQ ID NO: 1888686 - DNA, 4001 bp, Homo sapiens
tcagtgatgaaggaaatgggacattccacccagggccagaggcccttgccacccctataggggtttaattattctgctacctctcctggtttctagttggactcctcaaccaactgggtcctcagccaccacccactagcctggactcagaatgagggtgttagcttccggctgaaaccagatggctggccaagtctgatcccaggtatttttctgttcgagaggcaaactaaacccaagacagcagctccctgcctgctacagagctgagaaaccatgcacacgctgctccctgctctccagctcccaagctcccaagctagggactgcatggcctcctcccttaccaattcttatagaaacgcctcttgcattcatcactgatgtgctcagcaaagacagtcttgaaggtccggaggcctcgaggggtttccacgtagcccacaatgcccacaaccaccatgggtggtgtctctacaatggtcacagcctccaccacctccttcttgttcacctctgcaaaaaaaaagcagtagtcagacttggcaggagcccaagcaaggggtgtaatgttttctaggaaaatgcaaagtgcccatttaggccggaagggcaactgggccccacacctgcagtacggactcacagggctgtccttactgcctatctctcattcaaagcacatttatgttattcaaacaaaaaatatcaggaccctagacagccaaatacctgtccagcttcaattctcttctacagaaacctctggaggcagacaagattgctatttatctggaaaattcagtgccctaacaatagctctgagctcagagattagtcagtatcaactgcctaacattaatgtctccatggctcagcaaccagtgctgttagacatctctaagtagaacacacacaggtaagtggccattattcaagctttcaggtgaaaaaaacatgaatgaggcagttcttatgccagcctcagcagctccaaccccccacactagtgttaacttctctttgctaaggttcctggcaaatttactatgctctgaaatcaataccccacaccgcacctaaagcaaacagtgctgaccatctgtagccttggaatattagttttcaagttaagcattcccattctgctgtcgcagcagttctgacaacgtgtaactcctgcttaaaaaaaaaagtctgccctctgctaacagcttgactccatctctacaatttccctccccctccactcctattcccccaacttttaggatgtctgtacatactggatcccggcctgtcgacttcccgcacgatgtgagtcatgccagccttgtatcccaggaaggctgtgaggtggaccggcttggacgggtcatccttagggaagctcttcaccttcccacgatgcctgctgctgcgcttccgaggcaggaagccgagggacccatgtctgggagcggagaactttctgtgagactaggtgggaaaaaaatcaccgtcagcacccaaaccaaagcagtgcccccttctctagttcccagctgcttaagttccaaatctcagcaatactgaagaatcctgaccagacacccagcaagccgaataaaaaggtcattatctcttccaggctcgcacgtgtcaagaatgcttttgtattcgacaaaatttaagctgaatcttatttcaaatcctctcaacctgtaagaaaacgacccattttttttatctaaccacacaaaaatacactaagtagtggcactaaaaactgcttaacaggcagctttatatgccaattagcaaggttttgaccgctaaagaaagggactcccgggacaaacgctgggtagcagctagcaatgttaagctataggctgcctccggtgcccggacactaattacactgatacacacaggccaaagaactccgcagagccaaatcagaacgtgacaatcagcacacagtttctgtccgcccgtcaataagttcatcatctgtggtttctgcgagctccagaggccttcggagtgcaccagcggccccagatattcaggaggactccacaacactcccctcccccaagcttctttacctcccaatgagaacggcgccgagaacctccacccaaggtccttctacccagacaagcaggttatgggccctaatcccaactaatgatagaattggtgaggtcgaaacttagaaatgactcatggctttaaaaacgccgggcctccaagcctgctcccacccttacggcctctctctggccgacctgcaggcccaaagccagtcctccaagcgctcttcacaagcctctcgactttccagaaaataggccagactgaagtccccgctgggtcgcccgtgcccctaaagcaaacccccggcgccggccaagacgggatggcggcgatgcgtcgcggattcagccgtgccgacgccggtgacaatgaaacggccgccattacaacacataccatcacgccatcaaatcccgccggtagaggccggtcggccttacgggtccgctatataaagccaaatctggccccgccccttccggcgtgcgagcgcgcccccgcggcagacgacaggtcgggggcacgtaccgagcgccatttccacgcacgctcttccgctcctagctttcgttcagaagttgacgtcagcttcggagacagaaattacacactctacggcgaggggtcgggttcaaacttagtgaaaagccgcggagaggtgggctaagggtgggtgagccacaaatctacggcgtccggcagcagccaaatttgataataacgaagaaaaatggctgcgtcgcttctcctcctgtgatatgcagctatctctggaattagcgaagaaagactgaaactctcgtttcctggctcccacgctggttttgcggcgacaccaatttacctttaatacctttaatctcgggcatccctccctcaagccctatctctgccatttctcccatgctaatgcagtggcccgcgcttgattctgagggtcaggagcgtcccaagcctgcggaacggcctcacgacctctggtcatgccgagtccagctgctcagcctcccggagccccacgccttccagacctatgcatcagcgagggctttcgctgatctctgcctaggctccagggtgactcggatcctgaccgattccctgcttccaggctggtcccttacaaatctcttttttgagacggagtctcgctctgtcgcagtggcgcgatctcagctcactgcaagctccgcctaccggttcccagttcaagcagttctcctgcctcagcctcccgagtagctgggattacaggaatgcgccaccatgcctggctaattttttttttttttttttttgtatttttagtggagacggtgtttcaccatgttggccaggctggtcttgaactcctgatctcgtgatccgcccgcctcggcctcccaaagtgctgggattacaggtgtgagccaccgcgcctggccccctacaaatctttctaagaatcaagtatctcgttactttccatggccgcctcgttgtttcctcggaattaagcatcaacttcagcggccaccaaagacgctcccctaaccgtctacttcagcctcatggctgcgccagagcacacgctctcatatcacctgcttcctctgtcccaccctgtcatcttctttaattctgggcctggcctttgctcccaccgtcgtttgaaaagcattctctcggccaggcgcggtggctcacgcctgtaatcccaacactttgggagaccgaggcgggcggatcacctgaggtcaggagttcgaaaccagcctgggcaacatggcgaaaccccgtctctattaaaaatacaaaaattagcggggcacgatggtgtgcgtctgtaatcccagctacttgggaggctgaggcgggagaatcgtttgaacccgggagacggagtttgcagtgagctgagattgcgccagtgcaat

SEQ ID NO: 1888687 - DNA, 4001 bp, Homo sapiens
ggactatgggccaagaggggaagggatttaggattacgaggagccaggctttcctcagcactgttcacagcgcccctgcatctgggaagccacacgatcaattcagcctcccccaccatccggcagatgaggacacactcaaagcagcaaacagcccagcaaggccagactgggaatttcctcatctcaggacttcaaagccagtgtgaaaggactgccaacaccctctccttcctttcctctcccaccacagggccaccagcgtctgtggccttggatcctccctctacaagagcccccccatgacaagtcaggacctgcctcaccttgcggagggtgagcacccgcttcttggttcccaccacacagcctttcagcatgacaaagtcattggtcacttcaccatagtggacaaagccaccctggaaaacgagcatcggatcagcacaggcccaggaggggattgtcgtgcagatgacccctccaggttcaggccctccctgaccacagggctgttctcagaaggaaggcaacaaggaacggttccgcagtctgtctcgggcgctgtgcccagcgcacattccaggcctcatcactgaacagctgagcctgagaccccacttctcaccagccaaccccgacgagtggactcagatgacaacatgccacttacaagggacacagctaggtgttgtgttggcttcagttaacgatcctgctagcagcccctaggaagcagcctatccccaaaagcacgaggcctgggatggcctcacagagcagaacacccattacttaccagagggttgatgctcttgtcagataggtcatagtcagtggaggcattgttcttgatcagcttgccgtccttgataaggtagccctggccaatcttataaatctgaatgaacaagaagggtgtaaggctggggcattagggacaaataacccagacatgccagtgtgctgacctgcaaagcacgctagaaggcagctgaggcctcagtcccagtcacagcgtatcccaaggtcagagcaaaaagctggctggccctccaggttcctttctgtaaggcggctgggctaaaactaaagatcctgctgtacaacacaggcctgtcacccccctggtggtggcatcagggaccaataagactagtatccccagccacaccagtcagccccaccacagccactctacaggatggcaccttacaaatcatcaagatgggccagaactgaccatgagaagcaagccactgatgtccacgtgatgcataagctacagtcagtgaagcagcactgacaggcacagaaaccccactccccatcacgggggcctcttcccacccccagggagccactctcagaacctcaccttcttgttgatctcagtgcggtgatggtagcctttctgcccagcgcgtgccacagagaaggctacacgagcaggatgccatgccccaatacaggccaccttgcgcaggcctcggtgggtcttgcggggcagcttcttggtgtgccaacgactggtgacccctggaatggatacacattacttcacctcagcgcccagcacctcccactgaccccttcctgctactcagcaattaccaaccatggctgggtcatctgagggagtgataagattatttcatgtgcattacccacaggtctcccctgtcaagctggataggctctgggggtgtcaccctgaactcaattctgaatgggtgctttttaaggcatccattagtttaagctcccccattcacagggactgactaacataattccaagctcccctttgcagttatcagtaggctacaaagagcaaagggtccaggaacgtgttaagaagttgtcccctggccctccgctatcccagccacttctgaccacaaggctgttctcagaaggaaggcagtagagaatggttctacactgtccgattcgggcgctgtacccagcgctcactctgagcctcatcaacgaacagctgggcctgaaaccacttctcccccaggtttgcacagcaactcaagccaccgcaaagctcacctttgtagcctttgcccttggtcaccccgatgacgtcgatcatctcatcctgcccaaacacttggttcacaggtacctgctgctcaagcctctcgcgggcccagtccagcttctcggccacagtgcctccgttcacctggatctccatcaggtgggccttcttctggcgcagaggaagcaggcgcatctaggagaaggtagacacagctcagctccagctgccagcgctcctcccacagcagaggaactgcagctccatgcggcctgattgatgtcaagcacacggcaaaaagccagtaactctgaacaagtcactgaacctcaccaagaggaaggaactttcatttttgccaacagcaacaacttaactttggatactggtgcctgagttactgtcaggatgagcggacaagacccacaccacaggcaaacaaccagatcccagcccctaccagcccaatgttcctgtggctgtcctttgggtcagttccttttggggtactgcagtggttttacctcagccacctacacttgccctagtgacaagcctgcttttgagagagcacaagctctaagtaagaaaatgcatcaccgggagcggtggctcacacctgtaatcccagcactttgggaggccgaggcaggtggatcacctgaggtcaggagttcaaaaccagcctgaccaacatggagaaaccccgtctctactaaaaatacaaaattagtagggcgtggtggcgcatgcctgtaatcccagctactcaggaggctgaggcaggagaatagcttgaacctagaaagtggaggttgcagtgagctgagatagggctattgcactctagcctgggcaacaagaacgaaattctgtctctaaaaaaaaaaaaatgcatttaagcataaagctttcactcaaggacagcctggcaatgtcctgacaaaatttcaacggtggacatgcactctcatccgtggtggccctcaccacatggggttgcactcagcacttgagatcagccaggataaccagtaacaggacagcaagaggcacccactctaaccaagtcaataaaaagcctgctcagctcatcaactaggtttccaggagagcagccagtacctcacaaccgactttcaggcaggcatttcagtgttactggtgagtcaccagttgaattttaaaggggaatggttcccttgctaagggccagtaaggacacagtgccctctgctggcaagggagaagcctacccataagcgtgcgggcacgggacccccatgatcacataggtcacttctactaagtggcaggccaagccaccccggggcactgggctcacctgggtgtgggcaatgacacggatgacttggcagtacttcttcatgctgctgaagtccttctccagctgcttcttgccatcctcatcctgccatttcttgcagtacttggtaaaggccttcttcttagatttatgccttcaggagcagagcagagttggggaggggaccaggtgcaggccttcatcacccctccgaggggtgagcggaaggcacactggcaccgcgtggggatggagctcattgccggcttctaaggagccttttccaccagcaagcggagcctggatggagctcatcgggcagagccgagcggagctgagcagaggtccacaaggttaatttaagttacacgcattcaaacaaaattcttgctccgggacaaacctttctgccctggggaagcccactcagtgatgaaggaaatgggacattccacccagggccagaggcccttgccacccctataggggtttaattattctgctacctctcctggtttctagttggactcctcaaccaactgggtcctcagccaccacccactagcctggactcagaatgagggtgttagcttccggctgaaaccagatggctggccaagt

SEQ ID NO: 1888688 - DNA, 4001 bp, Homo sapiens
gccacagcaccttgagtctgagggagcagcttcgacagcatcaggggacctgcattccacaccccgtcctggtagagcctaggtgcagcttgagcaaagacggggagtcagcaagtgggtccaagcaccagggtctgtgctgggcttcaccgagatcaccgggctccaggccaggtcacaggggtcagtccagagcctgggggcttccttcagcttacagcagcagctgcaccccagcatcctgggctccagggactgagggcagcaggcactcaacgtgcaagtcaagaaagcacataagtcccatgcccgagggggctggggtacaggggccatctccagtgggaacagggactgcaccagccaagtcccagaaggtagaccccagcccagaggggacacagccctctgccacatgttccaactaggcttccagctgccgagccggggaagtcccttaacctctgtgcctgtgttcatgttctcccagtaccagacttggggtgcagattacaaaagaacctgaacaagccttaactggaagccacccttccctggattaatttaaaaccaaatgaactttttaaacaagtaacaaacccacggtctgcctgcacaccagcatcaaacgcgccagggaacatccaggcctccctgtctccttctcgtctccacagcactggcatcacccaagctgtgcaaacagcagagacccagctgcctcaccctggtgacaaacatttgcacaatgcccactgctccaggctggatttctacagctcagctgcagaaccaggcccagcttttacctccctccagggactgagggtgggggacagagtgggaggccagaaggcaaacccagcgaagctacagaaaggagggcagtggccttggggagcacaaggcacctcaagggcccccatctgcctccccagtcccagcctctctcctgaagaaagaggcaagatgtcagtggaaaataacttttattgagaccccaccaactgcaaaatctgttcctggcattaagctccttcttcctttgcaattcggtctttcttcagtggtccctgtggggagagaggcagtggtcagaggtagaagatgacaggtgacagcagatgcccactctagaggagaccaagactctgggccagtctccacagccacaagagaggcctaaggcatcaagaccacccctaccccggctggagccaaaggcaggcggctgcccaagccaccacacccagcgaggggggcaggcagaggtgctcaccatgaatgctttcttctcctccatggtctggaagcggccatggccaaacttggaggtggtgtcaatgaacttaaggtcaatcttctccagagcccgccgcttcgtctgcaccagcaaggactatgggccaagaggggaagggatttaggattacgaggagccaggctttcctcagcactgttcacagcgcccctgcatctgggaagccacacgatcaattcagcctcccccaccatccggcagatgaggacacactcaaagcagcaaacagcccagcaaggccagactgggaatttcctcatctcaggacttcaaagccagtgtgaaaggactgccaacaccctctccttcctttcctctcccaccacagggccaccagcgtctgtggccttggatcctccctctacaagagcccccccatgacaagtcaggacctgcctcaccttgcggagggtgagcacccgcttcttggttcccaccacacagcctttcagcatgacaaagtcattggtcacttcaccatagtggacaaagccaccctggaaaacgagcatcggatcagcacaggcccaggaggggattgtcgtgcagatgacccctccaggttcaggccctccctgaccacagggctgttctcagaaggaaggcaacaaggaacggttccgcagtctgtctcgggcgctgtgcccagcgcacattccaggcctcatcactgaacagctgagcctgagaccccacttctcaccagccaaccccgacgagtggactcagatgacaacatgccacttacaagggacacagctaggtgttgtgttggcttcagttaacgatcctgctagcagcccctaggaagcagcctatccccaaaagcacgaggcctgggatggcctcacagagcagaacacccattacttaccagagggttgatgctcttgtcagataggtcatagtcagtggaggcattgttcttgatcagcttgccgtccttgataaggtagccctggccaatcttataaatctgaatgaacaagaagggtgtaaggctggggcattagggacaaataacccagacatgccagtgtgctgacctgcaaagcacgctagaaggcagctgaggcctcagtcccagtcacagcgtatcccaaggtcagagcaaaaagctggctggccctccaggttcctttctgtaaggcggctgggctaaaactaaagatcctgctgtacaacacaggcctgtcacccccctggtggtggcatcagggaccaataagactagtatccccagccacaccagtcagccccaccacagccactctacaggatggcaccttacaaatcatcaagatgggccagaactgaccatgagaagcaagccactgatgtccacgtgatgcataagctacagtcagtgaagcagcactgacaggcacagaaaccccactccccatcacgggggcctcttcccacccccagggagccactctcagaacctcaccttcttgttgatctcagtgcggtgatggtagcctttctgcccagcgcgtgccacagagaaggctacacgagcaggatgccatgccccaatacaggccaccttgcgcaggcctcggtgggtcttgcggggcagcttcttggtgtgccaacgactggtgacccctggaatggatacacattacttcacctcagcgcccagcacctcccactgaccccttcctgctactcagcaattaccaaccatggctgggtcatctgagggagtgataagattatttcatgtgcattacccacaggtctcccctgtcaagctggataggctctgggggtgtcaccctgaactcaattctgaatgggtgctttttaaggcatccattagtttaagctcccccattcacagggactgactaacataattccaagctcccctttgcagttatcagtaggctacaaagagcaaagggtccaggaacgtgttaagaagttgtcccctggccctccgctatcccagccacttctgaccacaaggctgttctcagaaggaaggcagtagagaatggttctacactgtccgattcgggcgctgtacccagcgctcactctgagcctcatcaacgaacagctgggcctgaaaccacttctcccccaggtttgcacagcaactcaagccaccgcaaagctcacctttgtagcctttgcccttggtcaccccgatgacgtcgatcatctcatcctgcccaaacacttggttcacaggtacctgctgctcaagcctctcgcgggcccagtccagcttctcggccacagtgcctccgttcacctggatctccatcaggtgggccttcttctggcgcagaggaagcaggcgcatctaggagaaggtagacacagctcagctccagctgccagcgctcctcccacagcagaggaactgcagctccatgcggcctgattgatgtcaagcacacggcaaaaagccagtaactctgaacaagtcactgaacctcaccaagaggaaggaactttcatttttgccaacagcaacaacttaactttggatactggtgcctgagttactgtcaggatgagcggacaagacccacaccacaggcaaacaaccagatcccagcccctaccagcccaatgttcctgtggctgtcctttgggtcagttccttttggggtactgcagtggttttacctcagccacctacacttgccctagtgac

SEQ ID NO: 1888689 - DNA, 4001 bp, Homo sapiens; identical to SEQ ID NO: 1563019

SEQ ID NO: 1888690 - DNA, 4001 bp, Homo sapiens; identical to SEQ ID NO: 1563021

SEQ ID NO: 1888691 - DNA, 4001 bp, Homo sapiens; identical to SEQ ID NO: 1563023

SEQ ID NO: 1888692 - DNA, 4001 bp, Homo sapiens; identical to SEQ ID NO: 1563039

SEQ ID NO: 1888693 - DNA, 4001 bp, Homo sapiens
ctggacaccccacaggcagagcagaagcagccaccagaagtgtctcacaccctcccatgaagtcaggaaaacacagcgcacatttgctcagtcacccagaggtggcacatttcgtctttggcttagggcttcggaaaatagtccagagaaatcccgaggccaactggaatggcaggacccgcaggacaggtcctggcagcaacacacgggttctgagtgaaagcaagaggggcccatgtcaaccctcctcctctccacccaaggggctgggtggcactgaccagcacccgcaggccagccatcaagcttcctttccagagatgggagcactcggggtgggttgagtctcttcagcagcctgcaggaggcagccctgaaacgcatacagagctggctggctctcctcagcgtgctagtttcctggggctgccgtaactaagcaccacagaccaggcggctgcaacaacagacactattgtctcgcagcattggatgctggagatccaagatcaaggcgtcagcagggctggctccttttgagggtcttctcggtatgcagacgactgcttctatctctgtatacacaccagcttcccctgtgcgtatctgagtcacccatcacattgattagggcctacccacatgaccttattttaccttcatcttttttttgagatgcagtctcgctctgttgcccatgctggagtgcagtggcgcaatctcggctcactgcaagctctgcctcccaggttcacgccattctcttgtctcagcctcccaagtggctgggactacaggcgcccacccccatgcccagctaatttttttgtgtgtttttagtagagatgtgttatccaggatggtctggatctcctgaccttgtgatccgcccaccttggcctcccaaagtgctgggattacaggcgtgagccaccgtgctcggccagcccctacattctttagagttctgttcactcactagccagcccaacactactccagtccctgtagcagtcaatagttctttcctaacatttcttccaccttccctgcagcatgctgtctgctgctgggacctgccactcacccaactgcaaaaagggaaaacaccagacacccttccttcctgattccttggcctgaaatgacttcactcagccttgaagtcaagcagcatggtgtctatgcaactttgcagtgactcaaatctgagaccctcttgaaatggttcaaatcatttctggtacagattttaaaatgatgaaaacttcccgagcagttgcattagagagtggttacacgtttcattttagatgtgggttatatctctgcctcgttctctgtgtggataaatgctggggtgtcctggggaatggaggtgtggccgtcctgagtccagggtcaggggtggcttctggcctcgatttcctgactcctctggctggtcctcagcgtcccctcttccccaggttctttttcctcagctcaggacccacccacagacccctagcctggccgccactttgacttctcaccagcagctgtgacccgccagcccaagctggctctcactcactgacgccgttgtcccagttctgccgcccgaccctcctcaaagcccatagaactgcagcccacctggacccatgtcactcctctgtcctacctgtggctgccttctgtggctgagtcttcacgtctttgtacattgactggagtccccgccccgagaggcattctgacagcatcccacactgagtgaccctgtcctggagggcagtgccaggcctgtgcagccccgtcctggcccacacaccttcctgcacacagcagcttgggtggcatgagaactggctgggcacccaggaccctgcagggcgcagcagatgcagagcgagggggttacctgtacgcgtttttggaaacagggcgaggatcaaacttaaagaagatgatgcacatggtggtgcagggcggctctgctgacacaggtcgcgaggtctgcgggaaaaggaaaacactgagttgagcggatggcagacactcagggctgccctccgaacctgcaacaggccagaacagagagaaccacctctgtggtgtctgtactacttgctgggtgtgggggaactggacaccacactcttggccggtgccacacaaacaactcccaaacccatgcactcattggcactggccagactgtctctccaccacctgcaacaccagccctgaacagaagcatcccatcagcaccatggtagtcttaaggcctggacacaccgagctggggtgccgagggggtccccggggggcagcagaagtgagggcaggagccacactgtgagaaacaaacttacccatccaaatctaaagaatgaactcagacccagagaacagcgaaagtgagacttttaatgacagtcttgcaagatcaggtgtcagacaggcacacccagcacagtttcgacaagcaatttatcccctagtacgcaggtccctcccccagttcctcataggccgagtactgtggggtcacaattttcccggacgtcgcctattaattgttgggtaggggcttcaggtgtttttttgggggcttgtcttgctgtattttgttgcagcccacaatgcattgcagtcctagttagctcagggactttttaagtatttaacttacgacctaagtagcaggcaggctgataagaacagacaaaatgagctattttgcaggctagtaaactttcagcttagactgaacttctttggttcgggtgaaggcaactaagtgcggggaaagtggaggccgacaagcacacatcagctatccaagcagggtggcctagtatatcctgtttcttctgtagtttgctgagctaagccaatttaagacactttgtcttggaaatagaccactgtatacattcttccttcaagactgtcccccacatgcacatctcctcccctgcaacagcaccaaacccaccccacacgccaccagtgggggcagccctgcctccgcctccaacagcatggcccactcacctgggatgcaggccctacaggtcctgctcagcacacacactcgccatcccacaggacccgaaggccccacacacccacagcagctggcatggacacgtgccggggacacgctgggtgactgcacacttagcatacacctcgtccccacccagggacctctggggcccagagcaggcagttttccacaatgcaaacgagtgcagaacggagattagattccgaggccacccaagggtgacacccaagttccctgaaatgtgcacatgtgcaatgatttagtgacacggctccagggcagagccagtgctcacagctgggacatgggacagccaagaagctgttcaaatactgaagagacccaaaaagattcctctgagaaaagtctaatgagtggggacggaggtgaagagggctcagtgtatgtgcctccataggcacgggcattagggatggccattggggaccatctgctccagtgaggagctggtggctgtgcagttgaagtattgggatagcaataagcgccacgtgcagacgcactgggtcagggggatgggcagccatttgagatggtctgctggccaccactctgcataggatgggaagctaaagggtgtgttgttgcaagggggccctgtgggaagcagactgtggggctggaagtgggttgggtccccttgccgggtgccctggaagcgcccacagggggccatcatccgagggtgggcaggctactaggggcaatccttttggtaaaaacaactcaagatgctggatgaaatatgaaaacatcttaaaaattgccaggagctgatgagctcatgcagcatttggccaacagttcggagagcgtggcccacagaggacagcagaacacagtggccaatcctgcctgagagcgtttgcccactgaacacactggggctcatactctggtggcctcgggggcgaaggag

SEQ ID NO: 1888694 - DNA, 4001 bp, Homo sapiens
ataatcccagcactttgggaggctgaggtggatggatcacctgaggtcaggagttcgagactagcctggccgacatggcgaaaccccatctctactaaaaatacaaaaaaacagacaggcgtgctggtgggcgcctgtaatcccagctacttgggaggctgagacaggagaatcacttgaacctgggaggcagaggttgcagtgagccaagatcacaccactgcactccagcctgggcaacacagtgagactccatctcaaaaaaaacaaaaacaaaaacaaaaacaaaaaaagaaagaaaacaatcatgggaaacaattgaaagagctgccaaagccacaggaacctggctaggatctccactagcactgtgcttgcataggtgtggactaaataaatacgcagctagtgaccaatcaccactactgataggaaaacgggcacccctctgtgactcctccttcagggaagagttccagcctgccacctgaaagagcagcactgccagaggcttgagccacaagacggatgggagacacagaggcttcacaggccttcctggtgcacccaacctctccttcttcttctgccctcttcagtgacagcctcgaactctccaagactccaacttcacaaaggtaatacagaagctgctctcaaaagtgcctaagacacagaatagcatcaaagtcagaggaaaaggaaagctggtgttcggtatttcaggttcacacagaagaaagctggagactgtattagtctcctgtggctgccataacaaattaccaccaactgaatggcttaacacaacagacacttattctctctcagttttaaacgccaaaaacccaaaatcaagtggtcatctgcagggccatgctctctgtcaagtctctaggtgagcatccttccttgcctcttctagcttctggtggctgccagcaacccctggctttccttggcttgtaaatgtactattccaatctctgtttctgtctccatagggccatttccctgtgtgtgtctctctgtattcaaatttccctctttttataaaaatactagttgacgaactaaggcccaccctcatccagtatgacctcattttaccttgattacttgtgcaaaaaccctatttccaaatgtcacatccatagtttccagatggacataaattcaactcagtataaggacaaattaccaagagccacagccttcaatccaaaggttgagtcactgctgtaactccacacagcagctctgttattcttacatctaagctgattaagaattagagtttagactgatgaggaaccaaaaccttaagacctaaaagtaacacataaaagttacactgtcatgtggctcctcttccctggactcttatgttctacagcatttgttcctgtcactaccaggacctcctacccaccaccattccagaatcttcactcaccttggaccctgacactggttttgttgaaaggtcttactgttctcgaatcaagcacggtcctgtggagtcgaatagggtctccggccacctttgatgactcccttcattctcaaagccactgtctgagctgtcagtaactcacgctgctaacccccagatcactcttaaaagtaaactttcctttttttttttgagacagagtttcgctcttattgcccaggatggagtgcaatggaacgatctcggctcactgcaacctccacctcccaggttcaagtgattctcctgcctcagcctcccaagtagccaggattacaggcatgtgccaccatgcccagctaattttgtatttttagtagagactaggtttctccatgttggtgaggctggtctcaaactcctgacctcaggtgatctgtccacctcgacctcccaaagtgctgggattacaggcgtgagccgccacacctggccaaaagtaaacttttctaactggatgcagtaaattccaaagtttatcattcaaacactcaaacaataatatttattatgaaacaggagtacaaaccattttactgtgtttatgaatgattctactcagacttatcttcgtaacacaattcataattttcagcattccagacttcagctttggaacagaactatgttctgaaatcttgacgtttgcttatctctgatctgttttcaccagtggctgattttatcctaggtaccctccacgtaatgtctcattccctagggccctggcatagctcagcgccacagcaatcagacaaggactctggagctctggagctgtatagcatctagggtgtacccaggtcattccagccgaagaaaaaaaaaaaaaaaaaaaaaaaaaaaaaaaaaacttcctgctaacacaacataggaggtggttttgacaccagcaagcagaaacatggaaactcacagggaaactctagtcctcttctatgctcaaggcaagagccgcagccctcaagagaccacaggcaaatcaagtgggtcaaaaacaccacaccccctgcagaaactgatccacccagcagacggggggcctcagcccggccagcttccggactccaccaaacttcacagcatgacccgaatcagttccttccagcctccccaaggagcccaggagtttctcggaaagaagcctgccagtgtcaggaaaaacgccaatagctcctcctcgtccttgcaagcctcgatcctacgtgcagccactgtcacccccagaccccacgctccgacctccgagccccccaacgcccgtcacaccatccagcagtctcctcagagtccaagttgccctctccagacccccgactccacccgcagcccaggaggccaacgcggccacctgacctctgacccctgaccccgacctggccctccgcggcacacccacctgcccgggagcttgctgttgctgcgcttccagaattgcttcctggccccgtcgctggccatggcccctcctcatccctcagacccgcggcccagacaccccgagtgcacccggccctcccctagcggccctttcctgtgccccgggtggcccctcactgctcccgggactccagagcctagagccgagaagctcttccgcctccttccggaagttgtgcctacgcgcgcccggaagtcccgcctaagtccctggtggcgagtgacgcagcactccgagcgcccgtcgttattaaagggcgacgccgcgcaacgcacgttacacgcatcgcggagggagcggaggtggttgggtttctgagtttgagtctgtcgctcctggctctcccgacacaacagcggcgcccacctgcccgcaacggactcccaggagcctcgagctcctcatttccaaagctgaactgccccgtgtctgattccgatttctcttgagcgcgtttcggagccggcccagaacagagggaagccagacacaccatacccggcccaacagtggcagggcggctgcgggtgctggtcaagctgggtcacccggcactgagtgacgatcagcaaatactcagtggacgaaatatttgcagtgcagtgaggtgaggggcataaccgcggagcgtattcgaagagatgagagagactggggattaggccaggcttgaagggaagaatggtttgagcaccgaggacaagaattaattccccaggcctgggttccagccttgtgcggctatcacgtgcttgaaacctggctagtccggagtgagatgcgctttacgtgtaaaatacaggattccaaagacgtcgtataaaataatttgtatattgtttgcatgttaggtaacatttttaatgtattggattaaataaaatgcattaaaattatttttacattccttttactctttttaaaattatttttaccttttttattctttttttccgggggggactgggggtgggtgtcttgctatgttgcccaggctagtctcgaactcctgccctctagtgatcctcctgcctcaccctccccagtagttggaactgcaggtgc

SEQ ID NO: 1888695 - DNA, 4001 bp, Homo sapiens
catcagaacacaactacacattgggtatacggtgtcacttttgaacatctgtgtaaaacataccatttatttctgtcagtcaactattaagtggacatataaaaatgtttgggccaggcgctgtggctcacgcctgtaatccgagcacttaaggaggttgatgcagatgaatcacgaggtcaggagtttgagaccatcctggctaacatggtgaaaccccgtctctactaaaaatacaaaaaattagctgggcgtgctggcatgcacctgtagttccagctactcgggaggctgaggcaggagaatcgcttgagactgggaggcggaggttgcagtgagccgagatcgcgccactgcactccagcctgggtgacagaatgagactccatctcaaaaaaaaaaaaaaaaaagaagttcggtcctggatttcacatgtgattattgcatttgtagtcctttttagatctagcttcctaggtttggggaatgttcattagtacagtccaagtccgcctttcattatgttgtaaagaagcgtttaacttgcgtggtgtgctgtccagattccttatggggctgaagttgagtcattcacgcggcccttcatggagcacctgccctggtgctgggtgtggtgcagagcgctgcggtggggagatgacttcggttcaacgcagccagtgttgacagagcatctcctggccctgtgctgtgggagtggggcaggagaacaaggaaagcctgatccctgtcctcttggagtttgtggttgtagcacggaagacagattttagaggagtaatttaaagtcttaattaaagtaattaacattcacattatcaagaggaagcctgggctgctgtagggacctgtccccttataggggtcaggggaggcctccagggtgaggtgatgttttagccatgtctcgcgggatgaggaggaggctagattgaggccgggcattcagagagggcagcagaagggccggcctggaatccaaggtgcagtgacaagtagtggcattgggaggaagggcagggcggcttgggctgcagtgctgagaaggagaagcttggggtcgagtcccaggggtgtgcgaaacccccagccactgtgctcaggttcttatctttgaacattcattctggcagctgcgtggatgagattggagggtttctggggaagctcatagaccagggacccgcagggtccagcaccggcagaggcacgggtgccctccagagaggctattctggtttgctgaactcttagtttgctgggtcttcaagccggtaaacctcagatgctctgcttagtgaagatcttcaagattgactgttccttcagagaacagagcctggtaatgggattctgtggtttcgacacctgagcacctgccagtccttgggcctcagcgttcaggttatcatgtgaccgctcatacacctttggtgcagctgccagtggcactagcccgggtgtggctacctcctgagagctgcagctggcctggttctggggatgagcttgtgttgttacttggatattcctcttttctttgaagtacaggatagcatcccagttaatcaaaggtttaagaaatccccggggtgtgggatttctccaggggctttcaggcaacagcagacagatctgtgatgcctgagtgggagctgggctctttctggggatgtgtgttcgccatgtgtccagagcctgtaaagatccacagatcctggcctgccatatgctcccactggtttcacgggaggtggggaatcctggagtgtggcattggtcctgagtaggagcagctcttcgggagtggctcatcgttctggctgtcagtgggaggttccaactctgcacatgctggcactcagagccctctcagtgttacgttctttgacttggaaagaaggatgtggtgggcttcagattcccatccttgctgtaatctggagagatgagctttacccgaggacagatcatcccccgaggatgaggacatatgcatgtagtgaattgtattgcaacccctctgacactttgtttccagttatgatttcataggaggttgtctcattgctaagcaactaatgagagctgctgtggttgaggttgacacacaggacctggtctgaaggcagaccagtcgactaggtgaactgcttcccagcacagaggagaatgttcatcttcagcaggaggctggccaggatgtcagagtcagagaaacagtttgtagtgggggagcaatgctcaagctgtgtggaggtgtgctcagaggtgggttagggttcgatgggtctccatgggtgccaggacactgccggcctgagtcaggaatacatggtatgcatcccagcagtcctcgtggagctcaccactatttgagaagggcagtttggtcctgctgttgatggatgcagagtctgtaaatgcatgtttagggcatgctcttgcacacacacatgctgtgcacacaggcgtgcaggcacgtgcacgcggacatacataaccatacagagacacaaacccacttgcacactcctcactagtgctagcctcaacctctccaagcaaatggggaacaaatctgtaatcaacctttgtttgagtggcacccaccagtttcgctcaggccctggaggtgcctgtcattggagaaagaggtcaagcgatcttgcgtgacctcagaggcaggggcagccgtgtgcaaagcatgtgaagacagtgaagtccagtaaatacagccagttcgacatcaccgaagcttggggagaaaactctacaagtgaaaacgaagtgagagggtataatgtgatgggagagatcgatcatggagaagttctctatgccaggaaggtttcgcagctcataaatttcagaggttgaagccttagggagtggggaagaaactagaggcacatagtgatacatttgctgaagcttgaatgtgcccattccagatcagagccaagcgtgcgtgcttgttcttgcagattgcgtccttgacccatggggcgggcagagtgtggaggagactccagttagcacagccattggagacgacactcagctaggaacaggcggaagacacactttttagtctaatcttttagaattgagaggaaacagcaaggcacgtgctactttggacttagttcaggccatggaagaaggcaggtctaggatgagaataacatagggtccagggcatcttagagtttgtaacagcagaggagtgacacctggtctagagacactgaggggtacaggagcaggcccagaccagaggccggtggaggcaggagactcgctgacggaggactgggcctgagaggagggcctggtcctggatgtcaaataggctgctgtgagggcaccaaggtggcttggtgtgagtagaggggagcgtgaacgagaaggaaaaatccagtcacctcctagattcctggccctgtgaggggtgtggtgccgtttaccaggatgagacgtggagtagaaagagcgggttgaggaggcgggatggggttctgatttaggatgtgctgagtgtgctctgtcggcagtgattgagtagaagagtctgttgggatccgggccttggcaggagatctgcagtggaggttagtctggaaattgtcggcctggaaatggctgctgacagtcgcggctgtggatgtgtgtgtctggggagagtggagtgcagcgggtcacaggatccagtggctctctgatgtgtcaggggtctccgagctgtgactgtctgtgactcgaggagctggcaatggggctgtcccacagggaggtttatggcgctctcccatgccggagtctgggcgttgagagtccaggtggctcctgctgctgagggccgcctttgggatctgtgaaggatgcaatgcagctctggggcctgaccgctggggtccagatccagacgctgcccctgaagagctgcaggcggccttggtgcctcagtgatctctgca

SEQ ID NO: 1888696 - DNA, 4001 bp, Homo sapiens
gtggagtgtgtctgtatctagttggtgctaactgctacgtgcttggcagggcaaggcagggtcaccacctcagcaggcgtttgtcctcctccggcatgatgctaccctagctgcccaaggttctagcctgtgtatgttattacatggatttttttacacataaatacatagacttcaactcacttttctttttacaaagtatacaatataccttggatgtatttatatcccaagacagggttctcattctttttcatgtgttttactgtatgggtaatatgggtaataatttttttttttttctgagacagagtctcgctctgtagcccaggctggagtgcagtggcgaaatctcagctcactgaaatctccgtcttccgggctccatcttacatgcccataatcccagctactcaggacgctgaggtaggagaattgcttgaacctgggagacaaaggttgcagtgagccgagattgcaccactgcactccagcctgggcaacagagctagaccctgtctcaacaacaacaacaaagaaggaggagaaggaggaagaaggagaagaaaagaaaaaaaaaagtcgtcaaaggatattaattgtcgatagataacagataatgccaaaaaatatagaagcaattcttaaaacacagtgttggaactggtccacagctctgatttttaatgagctcccatttctgaggccaatataaacttcattctatgctgcccatctctgacaggtgggcattaactaccagccccccacggtggtccctgtgggagacctggccaaagtgcagcgggcggtgtgcatgctgagcaacaccacggccatcacggaggcctgggcctgcctggaccataagttcggccaagtgcgccttagtgcactggtacgtgggggagggcatggcagtgggggaattctccgaggcccgcgaggatctggcagctctggaggattatgaagatgtgggcatggattccgtggaagctgaggctgaagaaggcgaagaatagtgaggggagggtgcggcaggcaaccatccctctgtattccccaccataacgctaggagagctaattacctattaaaatttccgtattgcaaattagccgggcgtggtggcgggcgcttgtagtcccagctactgtggagggtgaggcagccgaatggcgtgaacccgggaggcggagtttgcagtgagccgagatcgcgccactgcactccagcctgggcgacagagcgagactccggtctcaggaaaataataataaaataaaaaataaaatttctgtattgcgatactgtctttctcctgtgttgtactttgagagattcctcctccagataaccctccctgaagtccacctccccagtacgagagtgagtgcgggctctggtttttgtcgggttctttcgtgcaagcgtcccaggccccgttttatttcttccgtcagaggtcattccgaggcgagctgccgcccctgcggctttcgaggctcccaggacactgccgctttccgctcccgggccgctcccgaacgctggggccgctccatcgtgccggggtgtttacggagaaaagtgaggcctgagcggacgaaagagaagcccacgtgggcgacaatactggtagtccagggagctgggacgacgcgggcgcgtcagaaactcgcacgctcgcgccgcttactaacccagctagctaggacctcgccccgccccgccccggtggcgggggcacctccggctctccagtctctatggtaccaacttccggcgcgcgctacccctcgcgagacttcggcggcgcagcaatggccagagcgtgagtgccgctgacagaagtcaagagaatcggctgggacggggttggggcgacaacgggccgggggggacccgacaggccagagccccttggggaggagcggcggctggaggcgcgaggctcctccggatgcccggagagccgcttgcgacttaactcccgcctctttcccagatgccgcgtcactgctccgccgccggctgctgcacacgggacacgcgcgagacgcgcaaccgcggcatctccttccacaggtcagcgcgcgtgcgccgcgggctcacgtgcgcatgcgctagttgttgctcgcctcgggtcgcaactgcgtagaggcttcgcgcctttctcagatactgaggaggcttgaacctgtgggtgggaggtgaagcggaacggtcccggcgggactgaatgcagtcgggaaggggaggacgggaagtctagccggcttggacccgccccactctgttacctgccagatgacgctgaggaaactgcttttcttctcgaggcctccgttgcctcgtctgtgcccgggcggtggtgcttacccggcggggtcgcagggaggtctcgtggcggcgcgtgttgggtctgcgtttcccctctggggtgcttgggcagcatgagcccagggctgtggacagcctggtgctcacgggtttgtggctccacagacttcccaagaaggacaacccgaggcgaggcttgtggctggccaactgccagcggctggaccccagcggccagggcctgtgggacccggcatccgagtacatctacttctgctccaaacactttgaggaggactgctttgagctggtgggaatcaggtgggcctccctgccggccgacgctggggtaggatgtggggctcccggcggactgggacagctgcaggtcatggaagtcccttgagcagcctgcgtccaagggggctgtttcctgttcccagctctgcacagtgaaacccacccccaggatcactgtgcctgtgacacaaggggaaaacaggagcctttccagagagtatctttcagagccccagtcttgccagcaagtccacaaatcaaagaattctttctggctggtcagcccagctcggcttatgcaggctttccacacacctggactgtgaggagtcctgcggggaagcgattggtgtagctgtaacttggcgttccccagacgtattgtttgcacgatgccttccagcatcccacggcgctgctgctgggggcagattggcctggggaggcagcacttgctctccagctcatctgggttgcttttccccgcagtggatatcacaggctaaaggagggggcagtccccaccatatttgagtctttctccaagttgcgccggacaaccaagaccaaaggacacagttacccacctggccccgctgaagtcagccggctcagacgatgcaggaagcggtatgtgatatgggtgggggatgccccactcccacccctaggctgagggactgggccctaggggtgtctgccagcagtctcgctggacagggttcttgctacacagaacctgtggatcgggtttgggtgttaagggtggatcaggtgggctggtggaggggggtctggcaagccctcagcctagcccatcagtctctctcttcccccttaccagctgctccgagggccgagggcccacaactccattttctccacctccacctgctgatgtcacctgctttcctgtggaagaggcctcagcacctgccactttgccggcctccccagctgggaggctggagcctggccttagcagccccttttcagacctactgggccccttgggtgcccaggcagatgaagcaggctgcagcgcccagccttcaccagagcggcagccctcccctctcgaaccacggccagtctccccctcagcgtatatgctgcgcctgcccccacccgccggagcctacatccagaatgaacacagctaccaggtgggcagcgccttactctggaagcggcgagccgaggcagcccttgatgcccttgacaaggcccagcgccagctgcaggcctgcaagcggcgggagcagcggctgcggttgagactgaccaagctgcagcaggagcgggcacgggagaagcgggcacaggcagatgcccgccagactctgaaggagcat

SEQ ID NO: 1888697 - DNA, 4001 bp, Homo sapiens
tcaccaattgggctgcgagttgctgctccgtgctcttctggctctgcagttcccctccgtagtagaagagctaggggcggggctcgtaaggacggggtttaccgggcttctggaggaacgagtgtcaggggagacagggacggggaggcaatgagagcgagggcaagggcaggacttccgagaggaaccaagagacaggccctcccatctcctgcacgtacctgactcgacagctcctcccactgccctgcagctgcctgctgtgctgctcctgcggacagggtcctggggcggtgccggcctcaccgccggtcctacctcaccccacccccggatcctgcccccttccgcccgccctgccccaccccaccctgggtccagccccattccaggactcttcctcaccaagtcctccttgtggcgctccgcctcctccagtcttctgcgcacccgctgcgcgcgctcccgcgccgcctcgcgcacctccccttgcagaagcagcgcttcctggcttcgcctccgcagcagcctgcagagggaaactgaggttggcgctacaaggcggactgggtcgctcaggatcccgcagtcgccaggaaggaccagccgcaggctcatgattgaggactgggaagtcctggccgagtcccccacctgggtccgctgggtggatcacccgttcccaagggcctagagcagagatgcgggcccgggcggatcagcctggtactctgcgaagcacctcgcggcgctgcctgcgggaccgaccctcgcgcgcccgccaggtagaggggcgttccccgcgcacctccgctcccgctcgctcaggtcctgcaggcgctggttgaggcaggctctcgctctcggcctcgagcccgcgcatcagcttctctagctcctgcttccgctggcgaccatctcggttatccttctgcaactgcagcagcagctcctgcgtcgcggccatggctgtggagaccgagcctaaatgccgcccgcctcggggacccagcctgcggctggcaggcgtcacaatgggcggcagggagcgcctagcgggctggatcacaatgggcggcaggggaagcccgagggtagcccgacacatgccccttctcacgccggccggaggcgggtcaggccggatcacacttagtccatcactgatgaaaattgtgtcaaagagccgtaattagatcaatgaaaggttaatgaaatactaataccaaatgcaggcaagttgaagattggttcccccacagtgcagatggcacttgcaaactgatcgatctcttgtggaaaagaacccataaatatgttcgtaacttttgacccaattatccctctcctgggaaatttatcccaggaaggagaaaaaatttaaacccactacacactaaatggttcgctgaagtggttacagtagccacaaaaaaaggaaacaattttaatgattaaaatgtgcttgggtattatgtggtatgcctagagctattatgatgtctagtgaaaaagaatttgatttagcatttatgctaaagtaactaagataaaatacatgagcaagatccgtaaaggaaacaggaagaagataagctctttcattgcttggtgagactgtaggtaaactcgtccttttaagtattattattttagaggcaggtcctgctgtcaccaggctggagtacagtggaacaatcgaagctagctgcagcttcaatctcccaggctcaagtgatccttccgccttagcctcccaacttgtccttttaaaatctgcctttatttgtccagttacaattatgaacttggatgcaaaaatccaaaataaattactaacaaaatctaaagggaaacagaaatccatggaaaccaaacagagtttattccagggattgttcaacatcagaaaatcagtgttgttcatcatatggacaaacagggaagaactccacgatctcagtggcgcacttcaatagatgcagaaaacgtgaagatgagggtcaccatctattaataattttttttttttttctgagacagagtctcactctgttgcccaggctggagtgcagtggcacaatcttggctcactgcaacctccgcctactgggttcaagcaattctctgccccagcctccggagtagctggcattacaggcactcgccaccacacccagctaatttttttgtatttttagtagagacagggtttcaccatcttggccaagctggttttgaactcctgacctcgtgatccacccacctcggcctcccaaagtgctggaattacaggcctgagccacctcacctgaccatctattgataattctaaaagctctttcttacaaaagggagagataaaagcactctctagtctgataaaggccacggtaaatattatagtaaggaggaagtattaatagtatatgcttttttttctttttctttttttagagtcagggtcctgctgtcaccctggctggagtgcagtggtacgatcaaagccaactgcagcagccgcaaacttcagggctcaagcgatcctcccgcctctcaccctataagaagtagtagacggccgggcgcgcttttagtctgggcgcggtagctcacgcctgtaatccagcactttgggaggccgaggtgggtggatcacgaggtgaggagttcaagaccagcttggccaagatggtaaaatcctgtctctactaaaaataccaaaaaaaagttagccgggtatggtggtgcttgcctgtagtcccacctacttgggaggctgaggcagggggaatcgcatgatcttggctcaccacaacctccacctcccgggttcaagtgattctcctgtctcagcctcatgagcagctgggattacaagcatgcgccaccacgcccagctaattttgtacttttagtagagacggggtttctccatgttggtcaggctggtcttgaactcccaacctgaggtgatccacctgctttggcctcccaaagtgctgggattacaggcgtgagcccctgcgcctggccctacacccgactgatttttgtagttttagtagagacagggtttcaccatgttgtccaggctggtctcaaattcctggcctcaagtgatctgcctgccccggcttcccaaagtgctgggattacaggagtgagccaccgtgcccggactaaaaggtacatttttaaaaaagaggtgacttaagatttcatagaaaccaactttttgtaaaactatgataagccaaatacttggaccagccctcacactgagaagtaccaaaaatgctgacaaaataaaaggatgttttcttaaaggcatccaggggctgacaagacagtgaggagccgccaggcaccatctggggaaaccagaaaccagagaggcgagccaagccgctcttgccctgaaaacatctgcccccatccagccaccccgggcttccgatgagaactctaaggctggtccccaccccacagagcaccccacagaatttgggacttatggcccaaattcacaccagtgagaagattccaaaacctcacagttgatggatttagtttaaattggctttaggctgacagcgccctgaggtacctggcagaaggaagcgtaaacctagtttggaggaagcatctttaccctaggtctgaaaaattcccacaaagtcatttttccaggacaatgagtaatgcagtcaaaagtaaccacacattcacggaaacaatgccccatgagcaaggacagaaaaggccagcagcaggaccagatccagagactcaacatctcaaagacctgaggcagaccatgaggctcctccacttacctgtactcacggagggaaccgatgagcttgaaagtatatgtgacgaacagcaaacgagaaaaaaaaatgaccttgcagaaaaacaggtgtagacattctagaaataaacagcattcagcccaatgggtttaacaggaataggagaataaaaagagaatacct

SEQ ID NO: 1888698 - DNA, 4001 bp, Homo sapiens; identical to SEQ ID NO: 1563067

SEQ ID NO: 1888699 - DNA, 4001 bp, Homo sapiens
aaaaaatacaaaaaaattagccaggcctggtggcgggcgcctgtacttccagctactcgggaggctgaggcaggagaatggcgtgaacccagcagacagagcttgtagtgagctgagatcacgccactgtactccagcctgggcaacagagccagactctgtctcaaaacaaaaacaaaaacaaaacaaaacaaaacaaaaaaacaaaaaacctaggctaggcatggtggctcacacctgtaatcccagaaattcgggaggctgagatgggatgatcgcttgagctcaggagctcaagaccagcccaggcaacatggtgaaaccccgtctccacaaaaaatactaaaaaattagccaggagtagtggcagcacctgcagttccagctactctggaggccgaagtgggaggatttcttgaacccaggaggctgaggtgggagggtttcttttttttttttccattaagttgaaggaatttattttaaataacctacagttgactaaaagggaattcatgataaaaatagaggatacttgaggaaagatgtgggaaatggactctgcacacacactaaactaacaatgcctctaaaactaataattatagcaaaaaatgtcttcacattaaaattctgctttttttccccattttttacacaactacaaaagaaaaaataaaagccctaaaatcttgattatttttcctttttttttttggaccaaatactcattttcctctaaatttattgacctgtggaactttttatacaataaaatctttcaagtgaaagattagggttaaaaagaaaaagatgggtatcttaaagtacagcgaatgctcagaacaaaggatgatgggaaaatggtttcagtcactgattatttcattatccatagactcactcgcccttcatccttccccaaccccaatctacacgatctgtaagatcaagaaaaaggtttaaatattttaaaataattaaaaagaaatacaaattcacatttaaaaaggaagactcaagtcaggaaatattttcccatcatgcttttctgtgaacaggtgtctgaaccaaaacactgccaaagctacgactgcttcaagtttagtgaagattgatccccatgacaatagagtgacgactgtagcagatgcgctggtttttttgttctacttaattttaaattcctgaaatgggggagaggggagggagtttaggaatttatttatattaaaatacagaagttattgcaaaaccccaactgtaagaacacaccaatataatcggacttttcatacagtagctaagagaatccaaacatttcagtgaaacagtgaatttgcctggtagaacgctgacaaattcccatccatttgccctcttgaaaataaaaacaaaattcaaaacaaatcatacagctagaattttgatatctgaaatatttttaaataagttgtccacaggacaactggctcagctctcccttatgttattatctccaggtttatcttttctcaaagatgttggtttgttaagacttgttgcctctctcccccaggcacgagggcaagcgaggctcagtttatccatttctcccaaaccacactgttccttttcacagaaccctgccccttgagactggctaaaacttctagtcttcatcagccatgccaatggcaggcaaacttttcccgctgggttttgttgtgaatcttctcaattaggacgcccggaagtgggaggatttcttgagcccgggaggttgaggttgcagtgagtggagattgcattgttgcactccagcctgggcaaaagagagagatcctgtctcaacacacacacacacacacacacacacacacacacacacacacacggcaaggtcaaaaagaatgacagaaacctggaataaatagatgaaaaagcagatacaagagacaaggttttttattttatttttatttaagaactactggaaagtttacccatgacagcggatccacctctagagatcagtgcttaccagatgagtaagggtgcttctaggtttgaatccaaggacggtcatagcagctgcatttagttacaccggccccagcagggagttggttaaagctactaagtggtaatggctgcatcctggggctccaagtgcacatcgttttgtaagagcacctggcaggtaaatccaggaatggttaatggtgaggcaagaaggcagggcgagccagccccactcccatccctgggagacttcgcggcatctcttgagtccgccacgtgcagctcatcgtggcctctttcggccggacggaggcggcgccagaagaggccgggaccccagggttgaaattgaattggggcgggggcgacgcctgctttcctgagtgtgcggcacgtcttgcgggaggctgggctggtccgtgtatttccccgggccattttggtgaccggtgcggggcgtggggctgtgtgcccagaaaggcaagaggatctccctcttggaaaaggggctttgcgcctctgaccccgcggagatcagcgccgggacgctgcggtgttgggaccaagaacccgaggccacagagcgccggtgcatagcgcacagatcagcctaattcttgtggacggagggcaggtgagctgtgggagcggagtccaaagggccgaggcaggagatggtgggcggaggtcccactcaggatgcgggagctgaggtttaagtgtggggtgggagggtctgggggcacctgggctccttgctgtgcttgtggggatgcctgggaggtgagaagaacccagtactcaactgactcatacagacaagcgtagtaacccctagtgtcttgtgagtctctgtgtggaagataaccatagtttccttaaatttctagagaagtttggccgagcacggtggttcacgcccgtaatcgcagcactttgggaggctgaggcgggtggatcacctgaggtcagaagttcgcgaccagcctggccaacatggtgaaacccgtctctactaaaaatacaaaaattagccaggcgtggtggcacgagcctgtaatcccagctactcaggaggctgaggcaggagaatcgctggagcccgggaggcggaggttgcagtgagccgagatttccccgctgcactccaacctgggcaacagagtgagactctctcaaaataaaaaacaaacaaacaaaactagctgggtgcggtggtgtgtgcctcaggaggctgaggcaggagaattgcttgagcccgggaggcagaggttgcagtgagctgagattgcgccactgcactccagcctgggtgacagagcaagactccctctcaaaaaaaaaaaaaagaaaaaaaagttttaccaggtctcctgtcttttattataggatgcttctctgctgactcggggggcagtcagtctttttgatgtgataggagaatgtgtgtcgttagtaaccagatgctttattggaagtaatagtaacggaaaaaaaacattaccaggtgctatggtttggatatggcttgtccccaccaaaactgaggctgaaatttgatccccaatgtggcagcattgggaagtggggcctactgggaggtgtttgggccctgggggtggaatccttatgaataggttaattccctgccttggaggtgagtgagtttggattagcacctgcctgagctggttgttagagtccggcctcctcagtttctcgtttcccttcttgccatgtggtctttgtccacatctctcccccacttttgctttttctaccaggagttgaagcagcatgagaccctcaccagatgggctgcccagtcttggactttccagccatcagaatgatgagccaaacacacctcttcctttataaattacccagcctcagatattctgttgtagcaaccctaaagagagtaagacaccaggcaactccacagagatgtctaatataactgtattcttcagggtcatcaccttcaggaccac

SEQ ID NO: 1888700 - DNA, 4001 bp, Homo sapiens
agatctaatctttctggagtaagaattcaaatgcaaattaaaaaaaaaaattgcaaattaatgttcagtaagagatgaagaaatgctttgcaaatagtgaaatgggaggcaatcaaggtaaaacccccaatatggcttgtcctgagttgctttaaaggatgcaaaaaagtggcttagacgtctaaaaattacttaaacctccacttccttctccaaatttcagttaatatagaataagggcattttatatttgccattgtattacaacgcaagtggcataagtaagtcctaactttgtatcacgaagaagctaatgtaataacgtacacacatcctgtacttgcctccctcacgattatcatagctaggtaagagctggcaataaaatatggaggcaagttgaaggccctgaatcattttcatagtaaaaggacagcggggcaagaaaagagcacattcaagtcaagagcttaatgggttcccacaacccagctctgctatgcctcagttcacgctactatttttactacaaatcaccaaacaacactattactaagtgaatgcacccgaaccaaagaaacagcctatccataaacgtgctggcttccttcacgtcccagcgcacccttccactcccgacagttcaatgagaatatcatctcatgaaatgagtaagcacacacgccattctacaacttcgaaagacattcacagttcttccacggcacacgcgagagccacagaagccgagcagctcgctggcactaaaacggtgtcttaatttacaagcaaagccgtcaaataaccgttctgtaagaagacatttctggtcctctaataagccggtgtccagccctacagtacggtcggtcaaaggcaggcgaccctattcccaagccccttacagctaagacttacgagggaaacgacatttacatctgcactctctctgaataagtgctcttggtattctgccttacgaggggacgctggctacgtctccaaaacttaggcaggccgttccccgaagctgggggttcccacaggacttgtgctttcggagcccgggagtgcggtgctgggtgttgggggagggggaaggaagaagccaaatggcttcctaatatatcatcaaaagaagaaaacacaggtttgggaccaggaaaagttccacgaacgagtcgctgacaaacaaaagctgcactcgcccggccgctttcttctcgcccccagcccgcgccccgagaccacctggcccgggcgttttgacagctccgagtttcccgagcgcccacggctcggcggttcgctcggagtccgtccggggactacctgcgcgcgctccgggcttgttttctcaatgatccagctaggccaagacgcggctacgagaaatttctccaaaagaagagtcgcggagaagacccactgaaaaggcccgactgaaaagtaaagtgtgcgaagccgggcgccgacgggagcccgggcgggcggcgcggagcgggggaggccgggcgcgggcggctaccgaggggcgtggggccggggccgggagctgccgccgcccgcgggcccgccccgcccccatcccgccggggggcgccaaggcgtggaggccgcggggcgggcgcccggtggcagctccggcccggcgccgccgctggctcccggcctggctccctcgcactcaacttacttctttctggctctctggaaaggggaagcgccttgcgaggccggccccgaggtcttttgtctgcggctggggggctcggggccggggctccaggctcctcggggggtggtggctgcggctgctccacgcacttgttctcctccgacgacatcctagtcaccaggaaagacacatggatcccggtcctcctcttggggggctcccgccgccgcggccgccgccgccgctgctcgggttcctcctccccggctcagactctcgcatttcccgaagccccgggagcagcagcaggtaccgggagaggcggcaacatggagcgagcaggacacgcacgcgcgcaggggccgggcggggagcgggcgggcgggcggcgtgaggggcgccggcctccggggtctccgcccgcggcccctcccccgggccgcccgcagcaggaagagaaaggggcccggcgcggggagggcgggccgcggggcccgggcggcggcgaagttttgacagctgctccagcggcggcgctgggcgtcgggccgcggctcgctcctcacactcgctctcacacacgctcgctcgctctcccggagcaggggaggaggaagttttgcgggtgtgcgtggaccccccacacacgccgcgcgaccgtggccgtcgcgcgaggcccgcgccggggatcccccggggcgacccgcaccacagacctccccaactcgcagccgtcgcgcccacacaacgcctcctcgacggcccccgcccgctcccccactctcggcccctcgcccgccccccgcgcgccgccgctgccactcacgggcctcgctccgcgcatgcgaagctcccgccgcccgcggacgcgccgccgccgctgacctcaccgcccctccccctccccatgggttccctccccctgtgacggggcggccgggcccagccgcgacttcggctccggctccggctccggctcgggagggagccaagctgtggacccagagatccgggatcgggatcgggggactgcgggcgagggcgggagggagccgcggacacacgccgaggcggcgcgggcgcccggcgcagcccggcgcgaggagcaagtgtgcgcccgcagggcgagggcagccggggcttcgctggttcttgccgaggtctttcctcgtatcgcccacactacggggaggaaaaggaatggagtcaacttcgttctaatccaacgccagttacagtttccttattataacgtcatttttttaatccagaaaaggttcataaggatgtaagacgaaaagaacgatgacagctcgagaaataaaacggttagagacaaaataagccaataaaaacccaaccacttgattttaacgttcagtgtgttgtgatgaagaggcaaaaatcgaagtatttctaagccacctctcataacatgtaaaaatggtaaaaggaaaaatggggctagaatccgcctgaaaaatgcactttctcaagaaggacagttacaaatatgggattccggattcctcaggctaatacctaacacttggacgatgatctattctgtgctttccattaactatcgattagtatatgggagtgaaaaaattctagatttgaataggggggaaatagtaagacctatcaaccatttgtgaaggattggggtaaactatcatttaataagcatctactttggacctggcgttaagaggcacactctcatcttgatttcgtttgatcttcacaatgtagttttagtgtaaggtaaaaaaaaaataggctccttttgcagcgatgttgtttgctttcccttctagtagctaggatgttaactttaaactgtgtcttctacttgggcaaaatacacacactttgattcccagagcctattctaaatgaaagcataatttttcgaaatggctgaaatgaggaataacgtcagatagtcatttgaataccttcagggtttaatccctgctggctctttcaaatttactaaatttataaccaaaggaaatttgggattgaggaggaggctggcatggtaaatgcaaactagaaattaaaagtgcctggcgattacacatagaaatacaacatgactagtgataaacatatgatgtgatctagtgaaagtttactaagtacaaatttgaaagcacccttttttcatttttttcagcacattgtactttaaatgaagtgtggtttcaaaactggattattgatccaaatgtttagctgtgttccatactgaaattagataggcacttccacggtgagtttcacatgcacaaaattatacatcaggataatt

SEQ ID NO: 1888701 - DNA, 4001 bp, Homo sapiens; identical to SEQ ID NO: 1563076

SEQ ID NO: 1888702 - DNA, 4001 bp, Homo sapiens; identical to SEQ ID NO: 1563077

SEQ ID NO: 1888703 - DNA, 4001 bp, Homo sapiens
tttatttcgcaaacatctgagtactatctatgagaagaattgtgttatgcagacaaaagaactagtgaacacttgtgggagacttcaaaaattagagaaattacgtaaaatgtcctcatgtttcttaatgataaagcatgtcaaccataaatttatctgcaacgtttaaaaagttatatttttcaacaagcataacatgtggggagagattataacatacaatgactccataccacataaatttggcaattaattttaatattgcctccttagactttaaagaacactccctaagcatacagatttatagtactcaatctcttaatttttctaaatatcttctagaatttgactttagtctcctttccataattgagaataattatttgtcataaagatggtctgcacgccccaacttcactttcatctaggaaattagtgaaataaatggaccagaccttgaagtttttaaaatctggacttgaaacctggctctgcaaacaagctagtacaagtcacttaacatagctccctgaatctcattttattccccctcctaaaacatgctaaaatacatctcataatgttctaagggtgaaatgagataaaatatctccattacttagcacagtacttggcataaaatccaatgtccaatcaacaaagcggattctaagcttctcaactcttgcaagaaagagcgtgtatttccttaaatctctgccctcacaataactagcactagtcacacataagagaaactcggtgactccagggactgccttaggagaaagtttctggaagttctgacattccagaaactttctcctaaggcagtccctgggagtcactgagtcagtccatttccgttatttttttggaggcagccctaactccacagatgtattccactatcagatacaccagatgtttatacaaaaatgttttcgtgatattttaatcgtcttaatagcctttcaacaggttctcatggttcttagaagacaaattctttactatggcctagtaatccagttggtcccagctcatttcccaccctcacttaggatgttctggccacatctgccctctagctgatccttgaacaccctaggcttactccatcctcgggtcatatttccctccaactggaatgcccctctcacatcctaacaggctaggctcaaacaccgcctcctaagacagcccttgtcttgagtcctctgcttctcccagtactccactgtattcatagcatagcacttccccaccaccccaaattctccctgctttctttccaagtgagttgtctcctctagactgtgagcttcttgagaacagggactgtgtctgcttctagatgcatccccactgcctagaaccgtgtctgacacagagcaagccagcgacctccgggctgcggctttgaggcccacggcgctttcggtgtaactgcgcgaaccaactcctgaacagcccgctttcctgggtctcgaggccaagggcctcttttctcccagagggcctccgtcgggagtgctggccgctcatcctgccgagtcacaggtgaggtttaggattctccgccgcggtggacctccacgagaccgcgaagcaggtgaacgtcctcccgcggaacctgagctgccaagggctggggaggggaacagaagctggcgtcggctgcctccagaacctgtcaggagtcttttatgtggactatggaggtgaggtgtcggtcaaggaggtgggccctgactcggagcagtgagagagagcagaaaaccagtcaccgcaaaacggcttccaaagaaccaactggaaaactcaccggaaagcgtaggctgcccagacgccccgagggaccaaagctgaagggaggagccctcgtaagcagacaagagtgcgcgcgtcgagcttgcgcagccgcagtagaagccgcacgctcttcggcaggctgcgcaaccgcagtggaggcctcgtgtgcccggggtggggcacgaaactgggcggagctaggccccctcgcgcgctgacgcgactggtcgcggcggaagggtgtaagcacgcaggcgcgatggtggctcgggggggcagggaggcggggccgcgcaggcgctgtgagaggcggtagcggcggcggcggcggtggtatcggcggcagctgtgagggggttccgggaagatggtgctgatcaaggaattgtgagtgggtctgtgggcgcgagcgaggccgtgggacggcagtgatgggagatttgttgatggagaagtggtaggatattcctaaatcggagtcagccctgtgtcagcccctccctgcgggcgccccctccctcccccggccccttcgaagcccctcagcgagtgcgcccctcggccctccaggcattgccgtggtaacacgccctctcccttccccggggcgaaggcggctgggtcccggcccgagcgcatggctcgggaaggcgcggccgggagtttccgctgggacccgccttctccccaaccccccacccccaggctgggtctgggcccacccccaggcccgccggtgggaaggagccgcagtccgagggtgggagagacacgttggttctgactgtgatttgtcgtccggggtggagtcccctggtaaccagcgggagatgggcttgccggttgaaggcagccctcgtgtcaggactcgcggtgggacgctggcgccttgaagttcgtggtggagccgggattccggaaagcctccgctctcctgggcagctccgctgacttgacgggagagccttttctctttttggtttccgcatgttttaagatgaggtgacatcccgggccccacctactttcttagaagttaacacgtgctctgtcaaatggagggatttcgaggtgcatccgactggccaagtgattttgttgaaaagtcacggcttttcctactggcaaggactgtaaacattacggaaatctgcttgcctctgaatgttcgtctgtcacagctggttcgtgtcgtcagcatcctttgggcagctagggaggtcgagtatggcccattcgttggttttcaaattcttcattttaaattcttagaaatatttttggcttaatttagcttttttcagacaccttatttttagtgttcttaaacctcctttaaaaagtcactgatgcacttctctgagacttaatacctcccaaagactccctgtctcacccagaataaaagtcaaagcctctgcaacagctacaaggctttacacttttttttcctgccctgatctcatttactaccttttccttgcccattccatcttcgcaagcttccttgctgttcctctgctactctagaataagttcagttcaagacctttccacctgcttttgttccctttgcttgaagtgttcttcccttggcacactaactcaccttcttccaggtctttgctcagacgtcaccttctcagggaatccctttctgaagacctaattgtagttcccactatttggggtggtatttgtcttccctgctttatcggtctccatagtacttatcaccatccaacatgccaatacaatttattattattatttttctcctactagttgtgttctctttttacatgtaagggccatgagtttgttttgctcactctcatatccccagtttttagaatagtccctcgcatgtaataggtgctcagtaaatatttgttaatgaattgatgaaaaatgataactttggtcagtgacagggattttgagaagagacattttgcctttttttggtagagtgaaaattctcaattaaagcttatttatagtactgaatattgggtttatataaaacttttcttccaagtcgtttatacagtgtatcaaacaagtgttcattactctgacttctagatgatgtgggtagatgggtggcagacactaaaacaaatggagaaaataagaaggaaattgacttggaccaagttacacagcaagtgagttgcaga

SEQ ID NO: 1888704 - DNA, 4001 bp, Homo sapiens; identical to SEQ ID NO: 1563085

SEQ ID NO: 1888705 - DNA, 4001 bp, Homo sapiens
acaaggaaggagagtggtggggtagggtggatgaggaagggacttgtatccagcatcagctgcacagcagagggtctaactccaccccacataccccctcctgtgatgaggcccctcctctatccaccagcaacaccagcaggacccaggtgacatggcccagctttcaggggtggaggcacatccctgaggaaagggaggactcacgcctgcccacctgccccagacccagcacctaccgcagatgctgctgcttttgctcagggcacctgccagggcctctgtacctgccccatagagcccactgtcccaaaagttcagccacttgacatatggattggagctcaatgaggaagccagagaccggcgccctgggacagacagagcaaacacactggccactatcctggctcatgctccagggctcagcccgctccacgtcccccacctggaaagtacccccctttccacctgcttaagggacacatgcttctccttttaggccccacctaggtgtcccccacccccacctctcccagagcccccagcgggttagaagcctgaaggctccccaacccttcatgccatctgtcatagcatcaatcccatctgtctctcagatgtcgagggtagggcatgcctggcacaggcagaagctggggagtacaggggacagactcaggggcactcccatggctgttgtctcccggggcctctccctgtaagcctggacccagtgtccttccagtggtacctggggccccaggccaccgtgcagcaggttcagctctggggcactcccttggcacagaaagcagaagatgggcacaatgctatggatccagcaagacctcaggtacagggtgtccccgaccagttctccaagtccatgggtgcctggtaggagacagggggatgaatgtgaacccctgcatggctatagccacctgcctcctcccctgccctgcatcactacctggcctattttttgcctctagaagcactgcttcctatgctccttaggaccactgcccgcatatgacagataagaacatcgaggctaaggcaacgcaaatcttttccttaaagtcatacagctgtcaaaagaaagctggacaacctgggcaacatagcgagataaaaaattatttaaattagccagatgtggtagccccctgtagtctcagcgactcaggaggctgaggcaggaggctcaccagagtgcagagttcaaggatgcagtgagctatgatcctgccactgcactgaaagctgggtgacagagcaagaccctggctctaataaatgaatacataaagtctcacagctagtggtagctaatcctgccagagtcaggcctctacctgtctgatgacaaatggcacactatgtcttttaacctgattgcagaccacaaatgttttgtgaatattttccccagggaaaaaaccggaagtagttctaaattctatacatccattatattagttttacctgtggattgggaaaacccagctctgattgcatttcagggcgggacagcctttggtgcactgtctggcgggattttccattttaacctccttctagaagcgccttctcatggtaaagttcctgatgccgccaggagcgccgaggagagggcagggggctggagacgccccgcagagggctacgtgccctgctggacagaggtctcctgcctcctcggcggcgccagcccacctcccacaacccctgcgggagaagcccccaaggggaggagacgggcctggcccctgccccgagcaccttccgtctctaggtcggagtctgaatcggccttgggaccctgcttggcttcggggacccctgcaagacgtccacaggccgccgtcgcctcttcctcctgctttttatcctccccagacctctggcaggaaccgctcatcgttacgcccctttcgcagcctcagaccctgaggcggagaccgcttggcgcctcacttagagcgcgacccggggatgtgggcggagtctgcggctgcgctgaccaatcgagtgtggcgtccatcgactggcgtctgccacggcaattagcgacgcgctcccccgcggcggtcgccccggcaacccagtgctgtaggttgccgtagaaaccgtggctctcctgcgctgaggctcctcgcctgagaggataaactgcacgcgccacgggctatgcactgggctgggcgccttgtgggcatcctccctgccttcctagggggttccagcatcgcccccctttcgtggactgggaaacacgcctgactccaggacttgtgttgtcctcactgcactggggaaggtggcgggggcagcttttcaggagggcctggggaacttcgcagagccaggtcaccctctcactctgtgcctcttagttatcttgcatgctctggtctttgcatacgctgctccctgcaccaggaacctccatccccatctttgtctgcttgtcgaacttcagaaatctgcaagggtcagcttagaggtcacttcttccggaagctttcctcaacaccctccccgccctgctgctgctgccctcaggccctcctctcacagcactgataacagctgtccgtctccaccctcccaccacctccactcccaccccaggaagtgaggccagagggcagggacagagctgctgctgttctctgtgtgccagggcccagcaaagggaatgtagggagggtgggaggtgcagggcagctgggattaggggttgagggctgggtgttggaggctggatctggatcctgctttagtggaagtgtccctttaacagcaactggcctggcctggctcgggccctgctttgcctcctgttcagctgcggctgcagctgccatgctgactcatgtgcccgcagctagcaggagctggcagcatgggctccccaggggctacgacaggctgggggcttctggattataagacggagaagtatgtgatgaccaggaactggcgggtgggcgccctgcagaggctgctgcagtttgggatcgtggtctatgtggtagggtaagagagaagagcttttggccaggctggaggggcaagggaagaggtggggggtggggcttggtcctgctgggttgaagttgagggttgggctgtttaggggctggagtggaagggggcagattgggacggggttggggagagctaggcgatacaagacaggagagcaagaacaagctgtgtgtttgtcctgtgtgtccacttgcctccttcccaggcccccacccaggccccacccagggggcacatgacatagtccttaacatctgtgagagctggagcactaggcccccagagagaccaccagctgtatctcgggtcaggagagtctgtaagggggaagctggatctagtcaggctgggggtgggtgctggctagtgaaggtgattgtctgagggcattggctctctgatgcatggctggagcttctgtctcattcagggggtctggagtgggaagtggggccagagaggaggtggggccttcgatgttgggccgggagcctgtagggtgtggggggagaactgagcatgtagggctcagctccgcccctgtcactacacgctggggacacaccacactgcccgacttctcctccccaggtgggctctcctcgccaaaaaaggctaccaggagcgggacctggaaccccagttttccatcatcaccaaactcaaaggggtttccgtcactcagatcaaggagcttggaaaccggctgtgggatgtggccgacttcgtgaagccacctcaggtgggggccctgatgttgctgacgggggcgcaagtcctttccccactgacagcctgaacacccgccatgcagccagtgtgtgcgagagagaagcatgtgatgccagagacggctgcgggttctcaggaagggcttcacagaggagtggcacctggacaggactttcagggatgtgtaggaggttttggggtggaaa

SEQ ID NO: 1888706 - DNA, 4001 bp, Homo sapiens
tttgaatgaaatagcataactggctaacatctaatcagacaaaatacacttaaatgtgtttgtgttcacttgcttagggctgtaccacttggtgagcaccactccacaaaacgaaaatgtttgaaatccaattgttcaaacatttttatagtgtttgttggataatggcctgaaatttgataaaagcagctgacaactaacaaagaagcaaaaactggcatcttggacatcctagtattacacttgcaagcaattagaacacaaggagggccaaggaaaaagtttagctttgaatcacttccaaatctactgattttgaggttccgcagtagttctaacaaaacttttcagacaatgttaactttcgattaagaaagaaaaaaaccccaaacatcttcaggaattccatgccaggttcagtctcttccagtgagcccgcttgctaaaagtccacgtgcaccattaattagctgggctggcagcaccatgtaaaaagaagcctattcaccaccaaccacacagcctagacatgtaaagtaggatcaagtaatggatgacaaccatggtcgtggaatatggtcaatgagagtcagaaaagtacaggcaccagtacaagcagcagataacagagttgacgggccaaaggataaaataggcttatttaaataggatgctacagaacacatccactcctaattgtagctgctttacactgggtgccattgtaccatatgcatcagccacccttcaggcaccccatggtgaaagaaaaggattcagaatagaagccaagcaggggactgttgttaaccccgaatatccattatgcatagaaacagctcacatatcccagggactcaaacagggcttcaaaatggttgtgaagggtcccaaatgacatctaggcctcagtttcctctctgtagcatgaagaaattgtgattcttaactcttctgggtcacagcccccttggaaaacttgctagcgatggatcatcattcccctaaaacgcacattcccacaaattcccatcattcccccaaaccgcacattcccacaatttcaggaagtttggggatccccaactccaatccaaggttcccaggttcaaaacccaaggattggggaactgctaagttttcttacaactcaaaaaaaattataaacaataaccatcctttacgtacacccacgctttatagtttacaaagcgatttcaaccccacacacattgataggcagaggaggaaactgaggcgcagacaaattacagagtgactcgcctaaggtcactccgccaactggtggctaggcccggaagaaaacccagctcttccgactccggagctcgtctccccaccccggggctgccgccagagctcccgcccctcactaaggcggcataaggaggaaaaggcaaagtagaaatcccacaaccaaccatcctccggccccctcctgcccccccaactgggtccttgcaggccccgaagggtggcgccaggcctccaagccggccccggccacccccgcctccccggccgctccaaatcccgcggccgctgccgccgccgcctcccccggagcggggcggagcagctgcccgccgccgccgaccacccggacgactcctcgtcgaatcgcaaacgcataggccgccgcccgagttctgcgtacgagaagaaagacgcggcgcgagcgccaacggccaccgggcgcgcgccgcggcggccgggcctgcgccccaagagctggatgccagagcaggagaaagagccgccaaccgatcgctcgatcgaccgcacgcccgttccttcgccctaccagacccgggagggggggagggcgcgccagggcttcttcgatttaggggcctgactccccggcgacgagacaagatggctcctccggtccgcaccgcagctaccgtcccggctgcgtcgctcggcccgcccccggtactgtttctttaaatggcggagagggtcaggaaagcaggaagagaggcgcacgctgtcacgtgacaggggcgggaccggccaaccaagatccggtcacatggggacacgcagcccgccaatcaggaggctgtacatcagggcgggggcgggaggagctgcagctttgtgattggctgaatgctccgcggaggcctcgggggcttggggcgtcggggagtgtgcgaggtggccggggctgtgtgcactatcggagacaaagcggtggctgtggtgtctgtgacggcggcggcagagcagctctaaacgccgaatttcgtgttgctgaatcctgtcaccatctcaactagcgcggcgcgcgggcggcgcgcgggcggcggcggaggcagcggcggcggcggcggaggcggcagcagcacatggttccaagagcgctctgcggctgttgggttccaattccgcggggagggacaaaggcagttgtgagatccgggtagtgcccggtcaggtggtgcgctcgccactgccctcgatccggtccttggaagccgggagtagctcctcttcgtggggaggcggccacgggaccgaggcccgggaagggcctgggaggctgaggctgttgtctgagggacgtgggggcggggcgcggcctgcccgaggtgctgtgggcgggtcatttgtgaggtgtttatgtgggccaagtgtgaggtaatctgaccaccaccctgaactgggtttggtccggctttgaaaaaagaaatcgtgagtgcctaggagctttttcacttgggaggtggtgaagctgcaacttgcgccatataacactccgtcgacatcttggtctccggtcttgggcctgtttaagaatcctggcatcacgtgtggcgaagacatggctgatcagttttctgacagaagtgggtaaatttccgcgttggtaaatttcctgacaggaaatttcggggaaccaaaaaaggctggaagaacatgaagatggagcagtcataaaccacccactcaaggaccatctccttcaggaccatccacacgagactcagattgtctgaattgagctatcgcaacttaatgctaaaagctccttaaagctacagatttatgacatagttccttccaaaatattacatcataaatcattgagaagattaaaaaaaaacacttgaagaaattgtagttttaaacatctctgcatatattttggatagctactaggttactttaactgtcattaaggagcacagacttactgaagctttactggacagaatcctgggaaatcgatatcattataaggttatatttcccagttagcgggtgaagggctggagaccttattgcagtcatggctttcacaaattacagcagtctgaatcgagctcagctaacctttgaatatctgcacacaaattcgtaagtatcctctaggtgccactgaggtaaccagtaactcgttccttgatattatatggaaatcgtttccccagaaaattttgctttttcactttttgagatgtatcccactggagtgaaatgtgtcactggatatcttgagctctgtattgaagaactgagatcagtgaaatacttgttgctaatccagaagaatctgatttttgtttattggatcaaaattttctaaatgcaaactttagttatttgaagtcaatatgttgagttgtttcattcaagtgtttataggaatccaacaaatactgctctattggatcgccaaatgttggactattttagtatcaaccgtttcccctctgtagtgacaacgtcctaaacagttaggtttataacaagtgtttactttctaacaagaaaacagaagacatttaaatgacaactttcaagaagaaaatttttattttttcagaagttggcattatcttcctggcagattgctcacatccaatattatttgtatatgctaaacaggaaacggcaacttgtttatatctctatttagatagtctttccccaaaatttccacagaaacatacagtgttcatggttct

SEQ ID NO: 1888707 - DNA, 4001 bp, Homo sapiens; identical to SEQ ID NO: 1563093

SEQ ID NO: 1888708 - DNA, 4001 bp, Homo sapiens
agtagctactgtgattaggtgcaagaactgtgggaaaccaaagggcaggaggtgaggctcaagggattgctttcagccagtctcagaaaggtcctgcatgccaagtaagaggttaggattaactgctgaggacaataacaccatagaggtttttaacaggagtgaaagaattgagttatctgctttaaaagaactctggtgtccgtcaggggtagtctggggaggagagcacttgggagggcacctgagagatgaggatatagattcagagtaatttcagtaacattagaaagcaaggcatgcactccagaaatcttttttttttttttttttttgacatggagtctcactctgtcgccctggctggagtgcagtggtgcaaacttggctcactgcaacctccacctgccgggttcaagcgactcttccacctcagcctcccgggtagctgagattacaggcaaatgcaaccacgcccagctaatttttatatttttagtagagacagggtttcaccatgttggccaggctggtcttgaactcctgacctcaagtgatccgcccgcctcggcctcccaggagtgctgggattacaggcgtgagccatcgcgcccggcctgcactccagaaatctttctaaatttaaatccacaagggttaatggacgactgcacctgggagtagggtaggaaagaaagccattaaccgaccccttatctggtgaatggtggtgtcactagcttaagagatgaggagaggtctgaagtcctctgactgttcttttgtgcccacttccactccagttttataaagttaatgtcctctctagcccttagggaacaaaagaaaggaaacgttcccagggacggagggaatgctcagagactgtggctccaagttcaatgtctagctctaccaagcactgctccgcctagaacgaaccccagctctttatctcccctcaggaaactggctcctgggcctttttttaatttccggcccgttgcaggccggcagcactacccagccgccgactcacagatgctggcggggtgggctacagaggaccttggcaaatccactggcaaaagtactaagccaatttagcatgtgttcctcaccaaaaggtgccaattagcgagaaagcaccctgctgcattcaagatccaaagtaccaaattattattataaactttggcccgttttgattcgaacgactgaaatcaaccgttatccccccaaaaatggcactttatcagggaggggagatcgggatgactgagtggaggagagggaagcagaaccgcgccgcgatcggggccgacctcaggccttcctggagttggaacttacccgctgtgtgactctgcagtcacaaggcgacagtttgctaggacccagcgcaattccaaacgacccaccaacaaactgacctaactttggccgcctggcctccttctctctttcctagcccgaacctcccagactcccgagctgcggccgggccaagcggagctgcaagcccggcgcgctgcggcccagggcggggcggttccgcggcgcgggctccgggcaggggctccggcgctcgggccttccccgaaggcgcccggtttggagcctcccaaccgggctctcacattaacgacgccctcagatcggaccgcggcctccgcgacagggggacgcggccaagctccgggcggagagtggcgtgaacgccccgggccgggctgaggggccgacagcggctcccagcgcggccttgcgctcccgcccaggctgcggcctaggccagccccgttagcaccttgagcctgcgcgcggcccagggaaccgacgaggccgtgtagggcaggaagccagacggcagcgccctgagaagccgccgcctgcctcggggatccggagcctaggacgccgccccacgcccggccgctgccagagaatggcttttaccttcatcagcctcctgctggccgccatcttggatttggtgctgctccttccccagaatgcatcgcggccggccgggcggctggagcccccgcacttcctggagcgggggaggggccgcggggcggggcacaggagcagagcggagcacctactgtgtgcttcccactgtgctggggggcgcgtggaggaacgcaagtgaaccgcacagactgggcctcagcgtttacggatcgtccaatcagatggcagttacaaccagtgcctggcacatagtaggagcataataaatactgattgcataaaatagttgaccaggcgcgggggctcacgcctgtaatcccagcactttgggagaccgaggcgggtggatcacgcggtcacgagttcgagaccagcctggccaacgtggtgaaactcggtctctactaaaaatacaaaaaattagccaggcgtggtggcgggcgcctgtaatctctgctactcaggaggctgaggcaggagaatcgcttgaacccgggaggcagaggttgcagtgagccgagatcttgccactacactccagcctgggtgacagaggaagactccgtcttgggggaaaaaaaaaaagttgaataaccaaggttacttcacactgccaagctctgtgaagaaaactgggtgataggaaagtgactgtggggacatactttgagaggtcaaggaagccaaattgaggaaatggccctactaagtgccagacctctctctagtgctttattttctttaacccttgaaaccatcctctgggatacgttagcattaacatcctcatttcacaataaacagaagcacagaagaagccagtgacttgcccaaggtcacacggccagctaggagcagagccaggctcctgtcacaggtgggctgctggctccaaagccaatgctgggacctggaaaatgggaaggaacagctgggaggactggaggagaatgtttcaagcagaggaagcagcactggcgaagaccatgaggctgtctcagtgtccagaatggagtaaaaggattatagggtgggagggaggcaggggacagaccatggagggtcttgtagaaaggggaggagttggtttctattccatgtgctgtgagaggtctttgatagatatgagtattgactccatggtcagatgattttttttttttttgagacagagtcttgatctgtcacccaggctggagtacagtggcacgataacagctcactgccgcctcgacctcctaggctcaagggatcctcctgcttcgcctcccaattaactgggactacaggcacgttccaccacaccctcctaagtttttttttattttttgtagaaatgaagtctcactgtcttgcccaggctggtctcaaactcctgagctcaagcagtcctcccgccgcaacctcccaaagtggtgggattacaggcatgagccaccacacctgggctgagacgcatgttttaaagagtactttggggcttggcacagtggctgatgcctgtaatcccagcactttgggaggctgaggggggtggatcacttgaggtcaggagtttgagaccaccctgaccaacatggtgaaactccgtctctactaaaaatacaaaaattagccaggtgtggtggtgggcgaacgtaatcccagctactctggatgctgaggcaggagaatcgcttgaacctgggaggcagaggttgcagtgagccaagtccgcgccactgcactccagcctgggcgacagagtgagactccatcttaaaaaaaaaaaaaaaaaaaggagtactctgattggaaaatggggaatggaggtgggtaagaggataagaaggggagcaggggccacttggaaaccggttgcaatcattcaggcaaagaggtgacagtggtttggacctcaggtagcaatgcagagagaagaacatagcttcagaatatactcagaccttcttaaggagtttttctcttttttttttttttttttttttttttttttgagacacagtttcactctgtcaccc

SEQ ID NO: 1888709 - DNA, 4001 bp, Homo sapiens
ccacctgctaccctgcctgcagctgccagtcagcacccacggggtccacacctggcaccgcggcctcaggaactgggcctcaaggagccgttaagagccacatagtgacccatggccctgtccctgagcatccatggctgaggggcaggggctctgcagcgggagggaggccacagctggctactgcagacacccagggctcagccttttgagctacgcagtcccaggggcctaccactcagggcaaccacagggaggaggggcctcgtctagcctctttgatgggcacgtgggcatgggcttgggcttgggctagggacaagagcctcaggaaccacaaagccagaaggcgatcagggccaatgtaggctcaatgcacttggccaaccagacccaatcccccactggacccaggagtcccaggaagatgacatacccggagccctcatctccaagcagggctaccgcctcctgagaggcatggcccctgcatgcctgcagactcagacccttgacaaggagcctagactcactgctccaccatgtgactctctccaggaaggacatcaatcctgaggggagaggtccccagggatggggctggtctgggtgcacgggcccagccacaggcctgcctctccgggtggcccagaaggagggacggcgccctggggctgttcagcattcctgatcactgcaaagaccgccctgcgctgctcaccattccagtgaccacagagcactcatgcaactcagggaagaaaaatgtgctttctccagcaggtctcaaattcttccaaagtcttcccataggccttacagagtgactaatggtggaattccacgcatcctggtacccagtgctcctggagccagccgcccacctggcctaggacaacgctggccaagggacagatgccaagcctggacgtcccgtgccagccccttccaggacaccctgctcctctccgtgggtcccagctctgggtgcacacaggcagggtcctaccagtcacacaaggcccttggtgacccaggcagagccctgaggggtgtggcctcaggggatgtggcctctgctggagaggcagggctcagggggggcccttcacggggtgaaagctgtggggagagctcctggaggcaggcctggggggacagggcttgggcgtgcagggggcagggggcaaggcgggggaggagtggggggcaggccacgcctctttacctgctcgcctcatccacagaaggtgccttaggacccgtgagccggcctaaacttgtacatggcaggcgtcggggggtggcggaggctggtcctctgcaccgacagggcactctctggggatgtagaccactgtcagactgaggtcagatgggggtcaacccatgtccctccccaggtgtggctgccccgacctcaccaacactgcctgggcgtggggtctgcaggtcactgctgaacgtgccagcctccatcttgggggggcagcgccggccccaagtccagcggcttatctagcgggtccaggctgcccttggactgggagggggcggggtcagtggtgtgtggggcttggatgatgggcaaggcttcgctagggattcgacctggaagctagtcctctccccagaatctgtctacggctccacctaccccatccacctcttttaggccccccctaacttgcctgtttccccatccaagggcctgactgccagcttaggcccgcaccgcagacactcacctccagcagacgccctcttcatcgcaggggtggggcggggcgcgtcgaggaccgaaagtcgctttggggccggcgcccgtctccccgcagccaggtccacatccaggcgccgccgctccggccgggcctggccgcgggacaacgctaggcgtgcagggcgagggcggcgcgggcctccgggaggatgaatgtcttatggaatcaggtggtttgacactcgaggaatccgcccagttcccctgggccggccagggcgggccgggggcggacccgggctgggcctcgcggtgggcggggcgctcacctgggcgccggcgcgggcgcgggcccgggctggggctggggagcacgggccggcgggagcgcgggcgcgaggggggcggaggggggttcttgggcggcgcagcgggccggggcgcgctgcaggccaggcagcaggaggcgctcagccagcgcagtgcacccgcgccgcgcgggcccagacaaaggtggtgtattcctaaagaggcggcggcccctgcaggaggccgaggggatggcggcccgggccgcagtgggccaggccccaggcctgagagtgtggcggcctaagctggcccgctccccaagcgggcaagggctttgtccggaggcctgggcatggcctctgcctacccactcccttcctggcctcacgaaacccatgaacccctccccgccggccccctgcacagaagcccttgctggagcacggtcgcccccatttttcagtaagaaacaggctctgcactgtttcttaggcttaagagagttctgggggccctcctgggcctttgtggccctctctgcaccaccctagggacgggatccaggcctgatgttacccgtaacccttcaggggtctcccacctcttcccgcctgcggaatggggactccaaacccagaagacgctctcggaggccacctccttagtatcccccactctaccaagccagctctcatggggcaggggggaggggggacgggcatggggccaaagaacccagtgacacccctgcacacaggggtgcaggtgtcccttctctgctttctgctcggggcacccaccgggcctcactgatgtgctcctaagtgtatcccggggtcttgagacaactgccaggctgcccctgcacctggagaagtgctgggagtcagctcagccgggctgggtcctccccaggcccaccctgcatgagaggaccatgcagatgagggtcttgcaggcccacctggtgtcagtctgtaggaccctgactcagggatggagtgggccagcctgaggccttgatggccctccttagagcccaggtccactgacatgaagcagagagacctggtgactgggcagccctgtgctctctgcctgcccctggccatggaggtggccctgagggacatgagcagggtgcaaggctggtggcctgcctgctttgtccagaggaagtgaggacctaccagagccctggtgctcccatctcagcccagtggcaggcagtttcgcgggacggagacatactggatgggccgggccctctgcctggtgtggaggctgcactgtccacacacctctggttgccactctgtagccctcatcaccttggcctgctttatccctatcacccttgtcccagcctaggcttaccagggcattgtggagtgcatgccattcccagtcgcacagaaggtgaggtggggcccagacaccccccagccactctgccccctggcctcctgaaggggtgggctgtgcacacactgccacctccccagggggtactggctgccaagtgccaccatctcagcccttgcggtggctcaacgggtcctcccagagccacatcaagacgtcgtcatccattgcacagatggagaacctcaggcgaagctcacatagccagtgggaggctgaggcctgacccccaaacaagcattcttcctccagggtccctgcacacagcagccttcagactaggaactgagctcttgccacagggatgtatcagaccctagatgagtcatgtggcactggccatcagtctgaggacagcactggggtggaccaggctccagtcttgggctgctctgtgcttgcagagaggccttgagacacttctgtgcttactgtgcaggcgtcacttccattatcagtgacccagagcggcccactacagctgaagattgtgaccccaccccctctctcataggtttaatgcccctcccacccctcctgg

SEQ ID NO: 1888710 - DNA, 4001 bp, Homo sapiens; identical to SEQ ID NO: 1563118

SEQ ID NO: 1888711 - DNA, 4001 bp, Homo sapiens
tgggtctacatcagtccaactgaatcaggagaggagctccagaaggtgcactggacagtcatgccagaggccgtgtgcaattttaggttagatcagtggttctctgccctatctgaattttaaaataactgcgaaacttctaaaaaatatattgctgctggggttttatctatatagatcaaatcatctctaggggtaggtcctgggctcgagtttttttgtttttgtttttgtgttttttaatctccccagttgcctcctccgtgagcgaaggttgagaagcatagctgcccctgtgaggaactcagccttcagagagagcctgcccgccgcctctcatcctccagagaggctgtagggtgtccagactttgcaggcactgttgttcctcgttaagcctgatgctgccacctaattaacacttgtttatattaattagttgccatatgcattgaaggggagtggtcctttttgaagtttctagttgctgactatataagatttggcctgaagtgggacttctggaaactcaaccaagataacgacttccaggttcttccaaaagcttatcttccaggcataggcaggtaatgaaacaacccaactgcggttttttccataacatctttcaccccacagtatcgatggagcaggagggtgtggacaggctttcctgggtttttggtgctccttgtcaggtgttaaaacaaagaggatcattgtgtttcttggaactggcctaaacgtctatgtttaagattaagatctagggaaatgcatttccgtttgacacccactagtttctgattgtgaaaagggtaccaacctgtgcaatggcgccgcgacccggccgcggactccagcctctaaagtcgggtacctttaattaggagaaattaagtggggctgctacatattttgagaataagtaacactatttaaacttaggcagccttaaccactaacttaaccgctgaattctcgctgctacatgtctcctaaatagatcagcataatcttaactaggacttaaaatgcatcatcttcgttccggaactcagaacctgcagccgacgggagcctttggaggcttaatgactttaattatggcgagaaatatcttctcccggtggggaggggcgcggccggtggcgaggagggcactttcccgggtcggagaaggccggatggcagcccgccccgaaagtcccggcccgctggattgggggttcgggggtggggggaacatagagaagcagggctggtggaggggaggagggaccctgcagggcggtacacgacgggtgggagtggggaggaggagggctcctggcgcggggaggagccgcgggaggggggatgttggccgcagggcctcggagttctgagctgtgtttgtggcttcagcgctttgatctcctgccagggaaacctggaaggtcaggccgggctgcagccaagccctggagcgaggagccggcgggtggagctggcagcactgcgccacccaccctcacctcccaaccccccaagcagtgaagcccgcctggccgccctggcctctcgcccccgctcctgccgctgcccctgcccctgcccctctttacctcctgtgtgttggtctcctgtaggccgtagattaaggggctccaagtcttgaaagtaagctagccaaatgccctgcaagtttggcttagtaaaatcatgtatgttgtatatactttaaaagaaaccagatatttttttaaagctgtgtgcgtccctttcctccaccctcctcatccccaccctagtacaaattacccaagaaccacaggtgattccccctgctggttcgtgagtgttagggtctagtttgcctctcctcttctaccaccaccaccacccccgttcctggcaccaggattttctcaccggttacccgtgtgctcttggtgtgtgacctcatttcctatggaatgaaaagtttctgtcggaaaacagggcccttggtgaggcaggccttgggagcccccttgcccagcgagaatgtcctgtgtcatgcagtgactcatgcttcagagaacagcagctgaccagaatgttcaagagcctggtgcctgggtggtcactactaagtgaagaactcgaggaggaggaaaggaaaaagtgaggagtaaggatttaaaatccacttagtggcctccagagggagggggataacaggactcaaagagcctgggctctctggcctggggtaggacccgccaagagggacctgtgggcgtcaggcgtggccagtccctaggaccggctgggtgctctccatcgtgttaaccgcccttttcccctccctgaccacaggagcaggcctggtggcggcaacagaaacagggctggttcctgccgccctgcatttcagcagtgacgtgttccaggctccggctttagatggctgtgtctctcaagccttcaagcctatgcttaagtctcttgttaccccaaattagggcaccattgagttggggattttgaagctgtggtagaatttgccaccagttcacccagagagccaaggcgccagagcttcgcaccaggtggggaaagcagccaaacctgcactttcctggggttgggccgctgtatggtgtggccatatttctccgcaggttgcaggatgaactccatcagtcttttaggctggaggaaaggcaaggccccctagtgataatgggaggaggctgtaaaaattcacatacagcctgttcttgtggacatggccaagggtagtcatctggccagctttcttttggtaaaggtactaagggaggctcccattcctgcagaatggatggaacaaacactgcaagtggttgggcttgttttcagagagctttgatatccagagatgagcacacgcaggggctggggcctgatacagatccacaacaaggccaagccacttttagtgcctggggtcaaggttggccggaggagacacgatgtctgcattcgaactgacaaccagtaaaaaggctgtcaggaaatgcaacagcagaagatggcaccagtaataagaaaccgaatcctgagaatcttaaagtgcgaagaatattatgttccaagaaaatttggtagagaacagacctttctaaaaagtcaaagggaggagataggtggcctagagtgagctgcaatcagtgctttcagtagcagggcccatggtgtttgatgctaacccctagggcaaaagctgatcttttaggttaatcaacaaacattttttggccatttaccctgtgccaggccttttgccgggttctgggaattcagcaggaaagaagtctgacacactggctgccctttagtgaaggaggcattttaagtaaacaatgacagtgtgatgtcataagtgccacagtggtggagcacagcataaggccactgggcaccgcagcctgagggaataatacctgaacagagagagaagcagtaaatgaaccctgtggcagggggtgggtaatgtgctcctcattgttggtctcctgttaccccacatgtggccaccattgagtttgggattttgaagagaactaaaagaagctcagtctaggccgggtgtggtggctcaggcctgtaatcccagcactttgggaggccaaggagggtggatcacctgaggccaggagttcaagaccagcctggccaacatggcgaaaccctgtctctactaaaagtagaaaaaattagccgggcatgatggtgcacacctgtaatcccaactactcgggaggctaaggcaggataatcgcttgaacccaggaggtggaggctgcagtgagctaagattgtgccactgcactccagcatgggcgacagagtgagactccatctcaaaaaaaaaaaaaaaaaaaaaaggctcaatatagttcaacttaggagtttgagtgttgtgttcagaaacaataagcaggaggaggtcacatcttaccctaagagcagcacagtcattggagaagggt

SEQ ID NO: 1888712 - DNA, 4001 bp, Homo sapiens; identical to SEQ ID NO: 1563134

SEQ ID NO: 1888713 - DNA, 4001 bp, Homo sapiens; identical to SEQ ID NO: 1563138

SEQ ID NO: 1888714 - DNA, 4001 bp, Homo sapiens; identical to SEQ ID NO: 1563150

SEQ ID NO: 1888715 - DNA, 4001 bp, Homo sapiens; identical to SEQ ID NO: 1563158

SEQ ID NO: 1888716 - DNA, 4001 bp, Homo sapiens
tgaagacaggatctgacctccagtcacctccctaacttcatttgctcccactctctcactcacttactctactctgggtagagtaacaacactggcttccgtgttgttcctttagcacacactcctatatttcagggtcttcgtgtttgttttcccctctgtctggaattctgtgccccaagaaaaccacatggtttgctccttcctctccttcaggtctgttcttaactgttacttcctcaggtagtatccacattactccctaacctgttatcctactttatttttcttcagaggcccatctacctgatgatatatgtttgtttgttgcctcttttccctactggaatataaatcaatgagagtggaaactttgtcatgttcactgatgtctttgcagaacctagaataaggtctgacacagagtacttgatatttaaatactcaataaatactgtttgacaactaaatcaataggtgtggaatgaacagtggccaccaaaaactacccaaagctttcttgccagcttatctaccttccttccttggggtcagagcccgagcgaagaggcctcaccccattctaattctaattcaccccattctgcctgatttcaccccattctaattataggccaattgatgtggggctgtaatctgagcagatccagggaaaggacaaggggaatgccatactttttaactagtttattttcaatgctgcctactgacaggaaggcagaggagtaacaaatccatctagccctacatttgatcttcttgtcccaggagtatgcctcatcaagccactttagcttttaagtagatgcttttgctgccttcatcatgttgggttttcttgtttcctccaacttctttggattcagtcatcaaatagcaaagtggaacaggtccttgggtattacacaaccaggctgggaggagagggatcccacaaagaggaaattacaaccacacacaatcaagctcccaaatatgagctacaatgttaggttcctgctacaaatctccagaaaaaaaaaaagattaaaaagaagctatccaggatatgttacctttcccttgttttcaagtggattaaatgagtgtgcaaggtggcaaagtgacagctcaaccaaacctcagcatcatggaaattagaaatagaaatttcccagaaactgcagtccctgggaacagattattctccctgctgctcccgcatactgctctaatgtattgattagtagagagatgactgacacttttactcatccatttgattttcaggagccctggggggtggggtaaaaggaaagttacttcaggaactctagtccctatagaatggtagagggcagggataataaccagagttgggcaaagagaccaagaatgttcacggaataagctaagagaagggtcaggccttgatataatgcagggcttcctgctctctagccagacactctgatctattgagcagacactaattgcctgcatgctaccctccaaattcctcttcaagggagattaagctctgaaggtttcccctatgactcctctttttcatttgacaaatgaagctgaaattatcatgcagatgcttttgacagccactctgtttgttcaaacatctgggagacaaggggggtggcagagacagcaaaatatggcatctttttcttgatttgcacggtctgttcacagcagtcctcggcaatctggcagaatgtctctccttgcctagacaacttcttgggcaggtggaatgcacaaagaacctataccagggaacctgtgaaattgggccaccaatcctaaccatcatcaagccatggagcatccatgtctcattgctttcttggggagactccccagcactcacccaccacctgactgggatttggatgacctccccaaggtagtctcactgtcttatttaaatataaactctttactacatacaaaaagcaagtcgctgaaatatcacaaagaacagcaattgggctgtgagaggcagaaggttgaaggaatatgtggtaccttactgaaaacaataccacacaaggaatcaggggactagattcaagttccagctttgtcactgacttgctgtgtggccttggtaggaaataaacctctctctgcttctctgtctttcaccatcattgcaaggtgtttgagagtaagtgtgtgagagtatgtgtacatgtgcatatgtgcatgtgtatacacacaagaatcgtcagggttgtagggggagtcctctaagagccttggtgattctgacattctagaagtctttaacacaggtatggcaaatatgacagaaactttaggcttggcctttgaaatatatccatcaggctttactagagaaaagacttcctagaggacaacttcgctggaactggcaagttccacagtgacctcagtctgacaagaagaccatgaagaatttttcttcttacaaattgctataggctgaatgtttgtatccccataaaattcacatgttgaaacataatctctactgtgatggtatttggaggtaaggccttgggggatgatggtcatgagaatgaggcagtcatgaattaaatgggaatagcattcataaaagagaccccaaagagttctctcatcctttctgccatgtgaggttacaatgagaagacaacagtctatgaagagggccctcaccaggcactgaatctactggttccttgatcttggacttcccagcttccacaattatgagaaataaatttctgttgtttataagccacccagtctatggtattttgttatagcagcctgaatgaagtaggatgtcaatttagatgaagaaaggcttcaccaagcaggagcgtacaagggatgtgtgggcttacatgagattagagtaccaatcaatcaggctaataaaggaggcagacactgttagaactgtgtttttgtggccccattcagacatacatgcaggaaattccttctgagatgctgagtgtttaaatcatagctcagtgttattgagcttggtgctactgaagctccctgagtaggccaggtaatttcatgctatttttggttccccatggctcctgctccaaggactgatgtcccagagcacacaggggaatcagaaagtcttctaggcattgggaagttggggagatgctccagggaataggaagacaactgctgctgggcaccttctcttacaaaaaaccctgccaacgagagagaataaggccagctaatccaccttaattttagagtgtcttagagttgatgggcttgctagaagtcatttggtccagctctctgcctttaatcaggcaaatggccaaagcaatgccaacacaaggaaaaaaggacccacaattttctagtaagtctggcccagtgctggcttctgcttaagagaatgagggtctcttcatctagacaaattcctttctctgcaaatcaaagtgctgttctacttatatgggaacattatccttcaaatatagcccaaaaggatgtcagctgatcagaattgtggtctttttcagcaatctacattaaggtaggacagaggtagcagaataaaaggaaagtgacttttttctgggccttggttaagcagctgtttgtgaggatgatgcttggttcccttggaacgggctaaaatactttaagtattaagagaaatactacctcttaatcactgaaaatgacacttgagttgaggtcagtggaatagggagcagaccctacctctatattgtgaccacaaggcttaagattgctaatccctccctagtagcacgtccagcctctcctatcttggttattttagccagcagactatcagattgcacaacctgggcctgcaagacatatgtgaaatgtcattactcctgatacttttggtgggcatctaggaagggaaggtctttcagaattcagagaagtcatggctgtctgcaatgaaataatcagggattatt

SEQ ID NO: 1888717 - DNA, 4001 bp, Homo sapiens; identical to SEQ ID NO: 1563163

SEQ ID NO: 1888718 - DNA, 4001 bp, Homo sapiens
cctcagcctcccaagtagctgggattacaggcgcacaccaccatgcccagctaatttttgtatttctagtagagatgggggtttcaccatgttggccaggctcgtctcgaactcctgacctgatccacccgcctcggcctcccagagtgctgggattacaggcgtgagccactgcatccagccaattggtggtctttttaaaaagaattgtaccctggcaggtcatgctaatatatactactagaagcactgtctgagagtgccttccgccaatgggaaacagagccagatactagtcaaaagcagtaaagccatattttgagtactattataatagaggaaaagagacttcagtatagaactaagctcaatccaaagacaactaggacaagtgtggatttacagtcaagcagcagagtgagggagtcagtagaaagaaaattcctaaggggagagagatatcaagggtagggggattcttgctcaactgactaaacaggattctcgctcaaggcaggacaaggtgatcaggtatcaagggtgagggagttactcagcaggactcttgctaaaactgggctaggcaggccgaggacagggcccaaggacaaggtgtagttgaaaagaaagctgagaggagcctgtccaaagtttgctcaaagagactttgttacttcctcaggccagtgtatgtttctttatctttatgtcttactttgctgctagtctccccacaaaatagatcatatccccactactctttacttattattccataggcattttaagagcttctttgagttataatttatatttcataaagttctcccccttttcaagtgcaaattcaatagtttttagtaatttatagagttgtgcgaactatcaccacaatctaagttgggacattttcgttatctctaaaagacgctccatgcccatttgcagccactcccagttcccaccccatagctgcttttgaaagccatcatatttgcctaaggatgaaaggtacagcctcactggaaaagcaaaaatcaaaactaccacgcgtgaaataatttgagaaccaccaagcactaattgtgcatttctgattattttctcaaaaacatttaaagacaagtcaatgtgaactaaggagtgggaggaggtttcaaggaaaaggtagaacattttaaggtttttctgcagaggaaaaagtgagcaaaaaaaaaaaaaaggaaaaggaatttaagttgaaaaatactccaacaaacgaaccaacatgttttcagaactttttgaagttccagtatggtgctgtcacggttggtgagctgtctgtccttgatccagtagacaatgcgagtttctagaacagaaggataaggatttatcacaagccataaaagctgaagcaacactcaactgaaaataaacatgtattgagcgcctactgtgtgtcacgcaaggggctctgcgcaggaaaaaaaaaaaaaaaaaaggctcctcgcagctccccctgccccggccaggtggctgcgtgcccccttccgcctaatccctggactgccctggggctgagaactcccctggcgcgagaagctggactcccccggggaccggcccgagatcactcggagtcgggggcgtccggcacaggccagacgcaaggaggacccagctggggccggcccttccttcccttctcctgtcgcacgactaggcctgtgcccggtcccacctgccgccctccccctcctcctaatgggaccgaaaagagcccgaagggcctgggagggcgggtgaggttcccaggcctttccagatgccctgccgtgtttggcaaagcgattgtcttccctcttggagctccgcggacacccgacccctcttcctctccctcgccaccttccgtcattcgccacgctgaccacttcccctctgctgcctcccgctgaagccccagcccggccgcggccgccatttcccgacagcctcttccctgtccctttccctgaaaggaaatgtactggggcggggcggggcgctgtgtgagggtctcgagaaagccgccggggagaaggagggatggattctttccaaactctctccgctctcccggagccccctacctcaccctttctccccgaattcttgtgggcttgggagcgagagagaaggagctggtcccagcgctagtcaccgccaccctcagcccacagatcggggggggcacgggtactcgtacaccaccccataaggatcccagccatgtcctctttccttcgccagagctcatttcctcctcccttccagcttcctgccctttccccaagacaaagttgatgtttgccttccctgagactcaatttcctcatctctaaagtgggatgacacgtaagaacatcttgtatatgtgaaacatgccctgtgcaaaagaaggggagcaggaagagggatacagggagaaaaagggccgtggaaaaagggtccttggaatgtacgggtagatgttctaaagaatgtatcggtcagagcattaggataggttcagaaaataattactgaatatattattttgattcttagatgttatctctcactatttatctcttctttcagaagcctaacattctcttctcagagggccagatcgatgtgtgttgtgtgcatttatctgtgctgaccactgctgtgacggaggtggtggggcgtccattcacaggctgcaggcacagggacaacataactgtggaatcctaattagaaaaaaggagttaggctggctggagcaggggaaggcaaagggagaaagcaaataagctataagtttgtctttcttcatggtccagaacatataaacaaaaagaggaatcagataagctataggtctgcttttctttatggcccaggacatgtggcttcttgcgcagataacatacataactcacaaacttcctgctcactatcaaacgcctcaatttatcaaacaccccagctaacagaagaatgcaagctagctccctactgccttggttttctcaatcagcccaaaaaccatcctataaaatctccagcaagcctttgtttcttttcagtcggctcctctcttgcaggctgcccgttgccttctcgaaacgtattttcctactttctctaataaatctgcctttacctccaactgtcttggtaaattattttacccctgcaccaccagcccagttagtcgacactcccccgcgacgataacccctcaccttcccagcggagtcctgcaccatgctaacctgggccccttgggcatgcctgctttgcactcatgagaagacagttttggtcattgtgggagcagcttgtaaagggttcttgtgacactcccagcctggtataaggcacagcaagtggaatttccttccatcagcagctgttttgcaatagccctggaggcccatcttggagaaatcttcattttagctgacagcactaggaattctacctgatggaaaaggagcttgatttataaacatattcgcaatgcattttcgtatcattttgctgggtagagaaggcagagaagatatgtcatgcttacacatgggattgtctctgttttggttacctcctttagggttggatgagtgaatgcaggaatcaatgaatgggtggataatggaatccatgtatccatcagccagtagtttcctgcagcagaaccaccctgagcacttgttaaaacacagcttattggctggacagaggttcacacctgtaatcccagcactttgagaggccaaggcaggaggatctcttgagcctaggagttcgagaccagcctaggcaacatagtgagatcccgtctctataaaaatcattttaaaaaataactgggcttggtggcactcgcctgtagtcccagctactcgagaggctgaggtgggagtatcacttgagcctggaattcaaggctgcagtgagctgagatcgcaccaccgcactccagcctgggcaagagcgag

SEQ ID NO: 1888719 - DNA, 4001 bp, Homo sapiens
atctcctcctctttcccttgcttccaatggtaaacagccctactgcaggcctatgggaagaccttggaacagatggagaaaaagaagagagtggatgttaagtacttgtgacacttaccatctaagacataggtccctgtacctgcctgcctggatttagagacccatttgctggcagaaaaaaaaaaaaaaaaaagcctggggcttccccagcactgaaatgggaaggatggaaaagggaggcaggaaaagtaaaaggcaacagacagaggcacgttattttattttattttattttattttatttattttattttttatttattttgagacagagccccactctgtcacccaggctggattgcagtggcaagatcatggctcaccacagtctcgacctcccaggctcaaaagatcctcccacctcagcctcccaagtagcaggaactacagactgtgccaccatacccagctaatttttaaattatatgtagagatgaagtctcgctatgttgcccaggctggtcttgaacacctgagctcaagcaatcctcttgcttgggtctctcaaagtgctgggattacaggcaagagctactaggcccaacaaggcaaattattttaaaaccacctgtagggttctagggatttccccaaaagcccaccatttccttcaccaagatggtcaggtaggtagagggatctggaaaactgaaggatggcaggagagatgggagaccccagatcccatactctagaaccacaacctactgctgtccacgtccctttcaacctatctctaggagtctccagcagaagagaaaagctataggggaagccttttgcttctacaaaatcactatccttccccaccaaaggctatctaaaaaataataataataataatattctttaatataatttatctttttctcaatattatctgaaatgcaaataaaagcatctgtagaaaagtttgctgtcttcattggtcttcaacatacaatttaaaagtcctaagcttggtaagtaaaatgcagtttagggaaagtccccaagctagccccaccccacatcccattcagacagccgcacctaagttcctgtcatagaattcatatggaactccaatggtttagatagtgtctgtactcacactaacctccttgatccagtgcagttttctcctctccttcctttctcctcgccgcaaacagtgctacaccgaactactgtccgacagacaggagagagtaaaaccacttagtgttggtctagagcccaggacatagatcccaatactcgcctttccgggttcaggaacctggttatcaaacgtccctccccacagtctgagacaccacccttaccaaccccaccgtccagtctctaaggcccaccattttctctgcaaacgccaccgtggcgcatcccttccactaaattgagcaggaagcgagcggacatgtgtggccagtgattagagcgatgggcatctcaatctctgtatttccctctggcagagacaatctccccacaaatcaaagcccacggttcgcctgcacagatgtaggcgggggcaagggggctagggagaatcagaggcaaaggctcctcgaacttgaggcagcatagaccaccgccccctcaagccccgtaaccgctgccggggtcagtgagcttctgccggcctggccagggcgcgcgggccccagggcccttacctgctccgctttccccgggcccgatgccagcccgccgagcgcagggcagcggggagctggtagccagatgcgagtgacgactgcaacgaaggctgcgtagctctgcagctccgggtcacgtgaggaccgcgcgtcaccgccgagctcgccctcctccccagcaccccctaccacccaccaagggccggcggccagtcaccaggaactcccccctcctccactccgcacgcacagacatccccgttctctggtctgtgctcggtgccccagtgcgcacgcgttgtcactcatctccgtcctctccaatctgagggcccacaagtggcatcatcgccttgtggttggagtttacccatcttcagttacaggggagggtctgcatccccctacccactcccggcccttggctgtggccttttatgtttcttctttgagtaatcacttatttctctcttagactataagaccagcactccccacccgccccctacacgacctgccctctctaagtacaatgcctgcaccaaatgggctgtggaagggggtatcaggaaggaaagcagaaggtgcaagtagagctttaattttctttttcgtgttccttttttttcttttaatatgacattcttttctaatattgtaatcagaaaatacagtatagccattttcatttgacacaaaaaatattcagggtgtaaaaataacaaaagactcattcttttgtttacattattttgtgccacattttaaaatgtcttctgttactgcaaactattttacagctttcaaaattgactagtaattcttgacattttaaatacaaaattgtcctaaacaaaaccagcacgtattcaatatgatctataagttaatctttggaaagacatttcgttttctaatattgacaattttacacaggtgatttgtaacttttgaagttctggctgaactcagcatcttttttcaggtgtctaagaccttcttcagagaagacttctagaggatatatttaagacccaactcctgatgagcctagtgctttactagtgacttaccaaattaacctgctttactagtgacttcccaaattaacctgttttccattcaaggggctttatttggattttacataagcatgtaatcagatcagcctcaccacacccatggaacaaccaactgctagagcttggatggaaaggagacttaacaggtggaattttcatccgtcgtaacacttgagatctcgccggtgtctgccattcatgtactacatactaccctagcagtggcgagtgttcaatattttccagtggagatggtggtgagggtctgtggatgactgtgaatcactgcaacacacctgatgtccgtgtcattatttttttccctcacaagtggaagggcaatgtacaggatcccaagcaattgccaagaaaaagaagttttttcatgtcctgccttgtgttacaacttcactgcacctcccatacaagcccctcagaataatcccaaaactcagggaccaaatatgcagaagttagtccccacgcatccacctgtccccgctgaggagtcatactccaaatatagaccctccaggcagcctctttcttagaacattgaaataggacaccccagagggaggggctccactgtgaggggcccctgtgtggaggaggccctttcaggagccaagaaaggaagtcctagtgccttacaatcttactaatggcttttcagaactcaattgaaagtgacgaacttactttctccaccaaaggaaaatattgataaattaattgcatacaaattttaaactttggtaaagtaaaaaaaaaaaaccataaacattgactgtcaaaaggctaacttgtaataatctaaaagctcttacagatcattagtaaaatgataaacaacccaatagaaaaatgtgccaaaagacatgaacagatttgttcacagaaaagaaatagattactaataaacatatgaaaagatgctcaaacaaagaaatgcaaatcaaagcaactatgccttaccatgtttcaagtatgattttctcaaagtttagaaacttgataatattgttgactggtttgtcaagaaatgggcactcctctactctgttggaggcagatattgatgcaagctttttatatagggcaatttggcaaactctattaaatgataactataatatttcacaaattctttgacccaataattctattccttggaatttagccaacctatatgcctacacagtttcacaaa

SEQ ID NO: 1888720 - DNA, 4001 bp, Homo sapiens; identical to SEQ ID NO: 1563172

SEQ ID NO: 1888721 - DNA, 4001 bp, Homo sapiens
ggaaggaagctgtattgggggaggaagggaaagaggctgtatttggggagtggggacagaggctgaattttgggaggggggaaggaggctgcattcagggaggaggggacggaggctgaattgggggaggaggggatggaggctgcatttttagaggaggagatggaggctgcattcggggaggaggggacggagggacagccaggaataactgttcagcccacggatgttctgggaaccagcagccttccagagtagccagtggggactcccggggagggcggtggggacagggctttctcctacctcctagcaggcagacggctgctgtgacggtgccgtctaccaggcagggtctcagtccttctccgcactccagcctgcatcttcccatcttctgcacgatttccagtgtgtttcctccatggggcgccatcgctgccgctcacccctggatgcccacaggctatggagtggcagttctctgggcggcttccatctctcctgccttggtgcagagactgtcacgagcgggacctccccagcccctgctgcggggctgaaatgcgtctgtaaacaccccccaccccgagcccaggcaggccagactcacacccaccccgtgaggccctcctgggcacatgctcactgcggttgtagggagctcagcgcatccacgtttcccccgtgctccgctcccagctgctgttcccggcctgtgtcccgaccctcagacctcagttcaccctctggtgcccacacagccccctttcctccctggcccctccaccagggaatggctgggccaacctggggctgggctggggtggagccctttaactcacagccttgaccttaggaggcactgaggttcaggaggcatctgcaaagcgagaaccggagcaggcctaggtgctgttttcacggcgcgtgcacccagcttacctgttcctgggctgggcgtcagtctcctatatttcagctgttttcctttttctgagacagactctggagtttagctcttcttacccagactggagtacaataatgcaatctcggctcactgcaacctccgcctcctgggcagtctatttcaaggtgcaaactccgcctcctgggcggcctatttcaaggtggaagccccaccttctaggcctatttcaaggtgcaagccccgcctcccgggcggcctattacaaggtgcaagctccgcctcccaggcggcctgtttcaaggtgcaaccccacctcccgggcggcctatttcaaggggcaagccctgcctcctgggcggcctatatcaaggtgcgagctctgcctcccaggcagcctatttcaaggtgcaaccccgcctcctgggcggcctatttcaaggggcaagccccgcctcctgggtggcctatttcaaggtgcaaccccgccttctgggcggcctatttcaaggtgcaagccccgcctcccgggcggcctatttcaaggcgcaagctccgcctcctagcccaatttcaaggtgcaccctctgcctcctgggcggcctatttcaaggtgctcactgcacagatgggagtggttttctgcaatggtcacggatgatctcaataacaccaaagtcacatgctgctccacccttacagtggcctggtatcacaaaagaatgtgtaggttgctttgtgctttaagaaaacagctgaaataggctgggtgcagtggctcacgcctgtcatcccagcactttgggaggctgaggtgggcggatcacctgtggtcaggaattcgagaccagcctggccaacagagtgaaatcctgtctctacacaaaatacaaacactagccgggcatagtggcaggagcctataatcccagctacaggggggaggctgagacaggaggatggcttgaacccagtaggtggaggttgcagtgagccgagattgtgccactgcactccagcctgggcgacagagtgagactccgtctaaataaataaataaaagaaaacaaaactgatctctatatattttatgtaatataaattatgtgttccataaattctgtaaattatgtgttctatccgtgtacaggcacgtgtgtagaggtgtgagtgttcaggtgtgtatacatacacatacacacccatctgtgcgcacacacacacacacacacacacagtcacgtgtgtcactgaatgacagggacctgtttcgggaaatgcatccttaggcaattctctttgtgtgcccatcacggggtgcactcacacataccgccgtggcacatacagcctgctactcacctgggctgtgcggcagggccccaggctcccgggctacaaacctggacagcaggtgagtgtgcccagtgctgcaggctgctgtaatacaatggtagggatttgtgtgtctacaaataaaggcacacgaaaactactgtattaccatctcctgggacctccgctgtctaggaaggccgttgttgactgaagggttgttacctggcacaggtgactgtgtataattctggacagactccgttttttttttggtctgtttttttcttttttgagacagaatctcactctgttgcccaggctggagtgcaatggcacgatcttggctcactacaacctccacctcccgggatcaagtagttatcctgtctcagcctcctgagtagctgggattacaggcacccaccaccatgcccgcctaatttttgtgtttttagtagagatggggtttcaccatgttggccaggttggtctggaactcccgacctcaggtaatccgcccaccttggcctcccaaagtgctgggattacaggcacgcaccaccaaacccagctaatttttgtatttttagtagagacggggtttcaccatgttggccagggtggtctagaactcctaacctcaggtgatccgcccacctcggcctcccacagtgcagggattacgggcatgcgccaccacacgcggctaatttttctatttttagtagagacggggtttcaccatgttggccaggctggtctcgaactcctgacctcaggtgatctgcccacctcggcctcctaaagtgctggcattgcaggcgtgagccaccgtgcccggcctgactcattttttttttttttttacaatcacacatggtgtctccatgggaggcctagatgaaacaagaagaaaatttggctttgatgatgaaagggggagtccagtgcggtggcgcatgcctgtggccctcaccgcgtggcaatcaagaaggatgaggcttccaggcccctccatcacactggcctcagcgtggggccaggcaggacctgacagccaccaggagatgccacggagcccagccctgcagagcagccaggcctctgtccctcctacctccctcctccctcccttcccacgtcagcctggcccgtaactgtccctccttcctcccttcccacatcagcctggcccagagctggggcgacagcatcccggtcacctcgggctgccccagccaaactcctctgtcctgttctgagaaagcaggcaaagtccctgcctacagggttcccccacgtacctgcaggacaccgtctgtcttacggcacgaagcccagggcctccgtagggctcacaggcggcttctagagaagatgcccgccacaggtgctctctgctccatctcaggtgaccactggccatctcggaagaaacctgctttgatggttttgaagcctgaagctccttcctctccagcccctgccacccggggcggggaatggggacgggatgcagacagaggtgggcccagccctccaggagttctaggggctagggacagattcccaccacttggatgcccagggaaggccccaccccagattgaaatgttcatgggtccaagaaggttctgggagtcaccccaggaagaggccggcatgggaggtgcctctcggtggagagaatcagaggcgcctgccctagggggagcccaggccccccttcgtc

SEQ ID NO: 1888722 - DNA, 4001 bp, Homo sapiens; identical to SEQ ID NO: 1563198

SEQ ID NO: 1888723 - DNA, 4001 bp, Homo sapiens
gcccaccctcaccctaccacgcccccctggttggattgtctgggttggcagtgctctgggaggtcacttagttcagcattcccattttataagtggggaaactgaggccagagagcggtgggtctggcccaggactgcgctgctttttcatgggagcttcacgcccccttcccaagttggggtcctcctgctcctcgctgggcccaggcaaggaaggggtgaaaacactttcgctgggcccctcccaggcccacgcaggcccctcctcctccccagttagggcccagttggccggagacgagggacaggaaagggaggagtggggcaggggccaagccaggcttcacgaacccctgtgagatccagggacacccccaccctcttcctcctgccccacctgcaactacctgtcctaggaagaggggctggggacctccgtgtgctcacgggctccctcccaccacacacaacctcacatgatacagccacacagccacaaacacacaacacagagacgctcgctcatgttcttgaacataccatgagtatggacgcaccttccctgtacctgagccctcctcctccctcccccaacacctctctccttcccctgtccccacaccccctccagcccccatcccagtagttctctttccactccccccgcacccaggcctggcttggctcagccgaggccagcccagcccagcccagcccaaggcagctgctttcttcctgtttgtctgtcttctctgttgcctgtgaagccagagaccaaaacagcctcacggaccaggcccaagtccggcccgcggccaaggcctcctcttcctgcccagagagcctggcagcaccctggcccctcccggccctgttagggtggtgggaacacagggtgggcattttccagagacagcgcacacaccacaccacatacatacatgcacacagccacacgccacacacacatgcacccaccacacacccatacgccacaccacacacacaccacaccatgcacacatatattacacaccacacacatgcacacatcacacactcccatacgccacacacccacacatgtacccaccacacagccatacacaccacatacgcacagccaacaccacacacgcacacacccgcagcacacacaggtgcacatcacaccccgcatctttgccatgtttttgcagagccccttgggggcaggctgcagagtgctggcaccccaggcctgacgcttcagctgcatctcctcagcgcatgcacatcctcatgctgtccccaataaccgcatgctgtcactaatctaggagcatagaaaaggccttcctaatgccacccagatcagtggaataggagatggcttccctcaactggcagagaatttggggaccctggctggggaataggaaagcaaggctccagcccctgcttggcccctgcccagtagtgtgaccttgaacaggccacgccagctcttggcacctcagcttccccttctgtgcaatgggacttgatgattgagggagactacggtggtaagatgggcaggggtggggactggcagggccttgggaaagcctttgttccctccgtctaaagccggctagggcgaggaatccatgctaaccttttggggtgagcagacaaccatctccttatcagtttctctgcctgaacgaggctgtgcagtgccggatctcagcagcaggttgggacctcccctagcaatgtggccaggcccgtggcaatctctgcccccctggactcctcgcttcctgttgttaaactagggaagaatctggaggaagggcccgcatggcggtctcctctgggatgcaagaagccagatcaggatccagtgccattctgctcagccaggaccccggggaggaactgggagccacatgggcaggcactacatggaactgtgccaggagagaggccctgggcagccacccctcgggggccaagaaagatggggctgggcagcagctcccatgggaagaagggcagactgtgctgattcacgctaggcccacatgagtcactcaagcccctgcccttgggcgttaacgggcagggcatctacctgggggtgtgccaggcccccactcctgccagcgcagcccctgtgtgcacacctcccactggtccctctaagacttgcagaaagggctctgtgagtgccaaggtgtggctcctgatcttccagcctagtgtctgggcagaagaggacaggaggcagattggggggacactgtttgtccctctctatctaccggttccccatgatcagaaccttccattcaccaaactgcaagtgccgctggcctagcactgtggctgcagagatggaaggacctgggctctgccccaggagcacatgggcttctgcagagaagagtggaggcagggaggctggtggaagctgtgcctgtcacccaggagagaaatggtgcgacccacttaacactgggcagcggggctagagggagcaggcaggtggaaaaggcatttaaagggccctgaaggatttgtaaggggtggaagacaaagaggaggcagccaaggacgaggagaaagaggcccccgattgtgtgggaggggtgcatgtgcagatggtggagcctgtgggcagtgggaaggacggagccaagtgcctgtcaacaggaacggccctcacagggactgtgacccgaaggagaatacctagagcccaggagatagggaggaacaacgggttggaggatgggattgaaggggacaaaaacaaatttaataaaaactcaagtgtacttgtgtgaatgtgagggtgtgtgtgagggtgtgcgtgtgtgagggtgtgagagtgtgtgagggtgtgtgtgagagtgtgcgtatgtgagggtgggcgtgtgtgtggggtgtgtgtggtgtgtggtgtgtgagggtgtgcatgtgagggtgtgtggtgtgtgtgtggcgtgggtggttgtgtgtgagggtgtgtggtgtgtgtgtgtgtggcgttgggggggttgtgtgtgagggtgtgcgcgtgtgtgagggtgtgtgcgtgtgtgagggtgtgtgcgtgtgtgagggtgtgtgcgtgtgccaatgatgacaggaagacagcctgcggatgatcatctaattgtgtccattcacctaagtgaataataactgggaaagctggacagagcctgtttatagctgcggaaaggcagcccatggaactggatagattaagagcctcgcggagtggaagggagggccagggtctccagcaggtgctggggtgaggggcggggggtagaaggagggtgagcgttgagggcttgagggccgtacccatagatggcctccaggtcatcatgtgagagtcaggcaggaggcggctccctggcaaaactgcagagattttttttttttttcttttttaaaggcagtggcccctcccgctttcctccccagaggcggccgactgcagttgctgttagtgggctgtttgggtaactgcctcggggtttcccagtctgacttcctcttgctctctctgcctgcacgttcctcccccagattattgcagcagctgctccgggtgtcttcagtgctcatgcactcaccaccctggaatggccctccgcaggcaatgatttctctcctccagaatgacttttttttttttcggctttattgaggtatgattagcatacagtaaaattcattaattgtaattgtactgttcagtaagatttgacaaatgtatacagtcgtgtaaccacaaccacaatcatgacatagaataaatattttcgacattccagaaagttccctcgtggccttttgcagtcaagcttcttcccctacctgaaagcctagcaaccactgatctatcactatagattttccttttctagaattttatataaatagaatcatagagtatgtagtattttcaaaaattagccgggcgtggtggcgcaagcctgtaatcccagctactc

SEQ ID NO: 1888724 - DNA, 4001 bp, Homo sapiens
ttgtattgtattccattgtatatgtcataatttaaacaatctccaatattgacatgtttccaattttttggttctaaacatgatatttacatagtctcagagtatatccccacaagatacttgttaactactttatagtagagaaatcttgcaggcaccattgcaacaaaatgatgccagtgaacattgccagtaatgggaccaatcaatttcacgtgccctattgatatgatgcactaagaattcagaattgcttctgtggtgatcctgccaaaagtgcttaagctaaaactaatcataagaaacaaaaaataaactcaaatggagagacattctacataattacagacctatacatttcaaaactgccaatgttgtaaaatacaaataaagccttgaaattttcccaataaaataagacactgaacacaatacaaaacacaactgaacacaatacataattctgagttttcttttgctataaggactgtattaggacaattggcaaaaactcaataacatctatacactagataatagtattatatcaatgtcaagttgttaattttgataagtgttatatgatcaagtaagcgaattcttattcttagaaaatatccaataaagtatttagagagaagaggaatcgcatcaacaagacattctcaaacagttcaggaaaaataagatggtatgtgtgtggagagagagacattctgacgggtgtgagatggtatctcactgtggctttgatctacattccaataatgattagtgatgttgagctttatttcatatgattgttggccacatgtatgccttttgcaaagtgtctattcctgtcttttgcccacttttttacagggttgtttttttttcttgtgaatttgtttaatttcttatagatgctggatattagacctttgtcaaatgtatagtttgcaaaaattttcccccagtctgtagtttgtctgtttactctattgatagtttcttttgctacgcagaagctcttaggtttaactagataccatctgtcaatttttgcttttgttgtaattgcttttggcatcttcatcatgaaacctttgcccattcctatgtcctaaatagtattgcctaggttgtctttcagggttttcattgttttgggttttacagttgtcttttctttctatttttttgtaagtgaaaaccatttaatcattttagagtggtcaaactacaatataagattggtatcttgttatctgaaagcaatcattttaccatatgcattttgatcttttaccattcattttaagttgacggttaatttaaaaactgagttttaatcaaagttgttttcaaacattgtcataatgtctctttgaagtcataccaatggtacctgccattgcttctctccttctccactcttgtgctttctcccgtgttaaattacggtctttgagaaaccagagtttgcatttatcttgagcttccaatgactgcatatgttctttctgctcttctccatagcacttgttttgcattttatctgaaaaagattctacagtcaattaatttcccagatccctctgattttcttgagatgcttttggttcctttgtcttttgttccaaatgtctccgtacagttcctgggtctgagcttttacttccttttctatggctgcttttctaaattggttgaagagctcacctgaggacttcagtatacctgatggtttcactggtttgcctaaacttttccatgaatctgcattcttaatctttacatccttctgcacaggatcttgacattcaaattctaacatagttgtgtcattatcaccaggtggatgcatcacagttatgccattcgaaagctgctcagaatcacctgagggaggcagaatttgtaaagatgaaatgtttttcacagtctgtaaatgttctaattcttgataattaaatgctaattggtgctgattttgtggctttccacaggaaggtgtgtacagttaagtctttaatccatcttgagataatttttgtatgtggtgtaaggaagctcttcgggtttgatcttctgtatatggctagccagttgtaccagcaccatttattgaatagggaatccttttttccattgcttgtttttgtcaggtttgttgaagatcagatagttgtaagtgtgtggtcttatttctggtttttctattctgtttcattagtctatgtgtctctttttctatcagtaccatgctattttggttagtgcagccctgtagtatagtttgaagtcaggtagcatggtgtctccagctttgttctttttgctgcagattttccttggctattcagctcttttttggttccatataaattttaaaatagttttctctgtttctgtgaagactgtcaatggtaatttaatagaagtagcattcaatctataaattgctttgtgccatatggccattttaacattactgattcttcctatccatgggcatggaatgtctttccatttctttgtcatctctaatttctttgagcagtggtttgtagttctcgttgtagagatctttcacccccctagttagctgtcttcctaggtattttattattttggggcaattctgaatgagagttcatttgtgatttggctctcagcttgactgttgttgttgtataggaatgctagtaatttctgcacattgattttgtatcctgagactttgcagaagttgcttatcagcttaagaagcttttgggctgagactagtgttttccagatataggatcatatcatttgaaaacagagatagtttgactttctctcttcctatttggatgccctttatttctttctcttgcctgtttgccctggccagaacttcaaattctacattgaataggagtggtcatagagggcatccttgtcttgtgctggctttcaagaggaatgcttctatcttttgcccattcagtatgatattgactgtgggtttgtcatacatggctcctattattttgagatatgttccttcaatacctactttattgagagtttttaaatgaatggctattaaaagccttttctgcatctatgaagataatcatgtggtttttgtccttagttctgtttatgtgatgaatcacatttattaatttgcatattttgaaccaaccttgcatcctggggatgaaacctacttgatcatggcagataagctttttgatgtgctgctggattcaacttgccaatattttgttgaggatttttgccttgatgttcatcaaggatattggtctgaagttttcttttttgtcttgttttgttttgttttgttttgttttgtatgtctgccaggttttggtatcaggattatgctgacctcacagaatgagttaaggaggagtccctctgcctcgatttttggaatagtttcaatttgaatgaatggtaccagctcctctttgtacatctggtagaattcatctgtgaatccatctggtcctgggccttttttggttggtatgctatttattactgcctcaacttcagaactcatggttggtctgttcagggattcaatttcttcctggttcagtcttgggagggtgtatgcatttgggaatttatccatttcttctagatcttctagtatatgtgcatagaggtgttcctaatattctctgacagttgtttgcatttttgtggggtcagtggtagtatttcccttgtcatttctgattgtgtttatttgaattttctcttttcttctttattagtctagctagtattctatctatgttattatggtttatcagaaaaccaactcctggagtcattgatctattaaatggtttttcgtgtctctatctccttcagttcagctctgactttatttcttgtcttctgctagctttgagatttgtttgctcttggttctctagttcttttagttgtgttattaggttgtttacttgagatctttctaactttttcat

SEQ ID NO: 1888725 - DNA, 4001 bp, Homo sapiens
ctcaacctttattccattgcaactgtgagcagtggcagcctttttgcttggttccaagcacagggcagctacgtataggcacagagaatggtgcccttgctgtttcgcctttcggttaattccagcccaggtactgatttaaaatagcccagaaagtttttcatttccaaaatattcaagaacagtgcagcttttcactaagtccctgaagacaggggaggtggggtgaactttggttcattgtgaactctgatgcaggctatgaatagtgactcctctgagagatgcgcggggcagcatcttaccagagatttctgactattctccatactccagcaagactttcaaagtgcatagtggaaatggtcagattatcagtaaagaagaaggggaagcagaaagcaatgtggtattcagtggctaataaggagcatataaacaaattaaggtttacgcatcttcgttaagtcatttcccaagcttttccagcaaaagtaaatgtgagagaagtacacagatattaatactaacgcgtttccagcagcctcagagcagcagcatttaacgctgaatatcacacagaatcccagccaccaagaatgtctgcattttggaggttcctctcctccggctctggggcaaggcacaacagaaaaactcagatttgtccaagggacacaactgtgcttttgatctactctggggtggctgtgtctgtccatagcccctagcatagtcaggtgggaatatcaacaatgcagacccgagggagtcccagcttgctgctccttggtttctggacactcctctcatcccgcaatgtctctgggaaagctgttctactttttaatagacagaatcctaaaaggatgtctggtgatccccatagcggagaaagagggctagagtggggaagtggctatttccccgccgccagcctcccactcccattcctcagagaagccccgccagggccccggccaacctcgccgcaccaaaagcttctctggctccagggccgatagcggcacgcggtcatgtttgcggcaagtggcacagttcctgccctctcaagcagaccacgccctgctgctgcccacgctccttactgccgcccgcccttacccgaacgacttacctgagccagaacctcctcgttcgctcccggtacccgaggatcccgcacgcggccatcttggccacgccccctcacgtttagccacgtccctacgcagcaaacgtcatttcgtcattccaggttacgcccctatcagtccccattctgtccccgacccaggctgaaatctcgccctggccacgcttccccagcgccggagtccacacctgctctgcgctctggctacacatctcctgtcgctgccacgcgcctgcacgctaacttgccgacgcctctgccctccgcctgctccaccatctttgttacgcccctcagagcaacaaggcacgcccacacgtaaggaccgcgccccccacgttcgaggcacgtctctgcgttccaactacgtcatgtccctacttcccttttcgcgccacctcccttgccggtcactactccgcagcccgcctttccatctgtggccacttttccacccttcgcccagtgatcatccagtcacaactagtctgcctaccccacctccctcccttgggctcacgtccctactccgcctgaggccgaccgtcccgcgaattcgaatttcttttttacacccttgcgactacgccacgcctttcacgtaagggctaaagtcagctcgttcgggccacgcccctgcggtacgcctgggtcacgcctcttccgctaagccttgctgcctgcgctcctcactggcggggccgttcccgccgtggccgttcccaccgtggctaaccccttccattctctcggaacaggcaagacccctctggtccgcgtcacttttcttactgcattccacacctctcttttctggccagtcctggccgtcctctcaggccacacgctacaaccttgtggtcctcattggccactcgcatcctgcgcatgcgcacttacctaccttcacttctggtcacgcgttaggttcccaggccacccacttttggttccactctggtcacgcctctcccgccagttgcacgctctctgcgctccttttaggtgcgatacttgatcccgggaagccacggaggtgttggaggggcccaccagtctccagagaggactgtccaggtcctggaaccagatgtccgcggcatttatagagtgaaatgagcctgcggatctctgatcctctcctaaaaagtgactttctccatgtatctcccaactctaaacaccacaactcgttaagcaaaaaccgagtaggaaacagaactgatgggccagtggtggagcaatgttccttctagctaggtttcatgtcctttaacccgatatggagataaactggaaccgtgttccttccagcccatttaaagtcagcggactttaaatgctagggagatacatggagtaagcacactcctctacttcctgatgtgtcctcctgatgacttttcctaggcacttggtgccctaatgctctctaggtcctgtctagacaccaccacattcagacctctgtttgcagccccctgctccaagattacgcttttttactccctccattcgcaattctgggttcacaggaaaaaagtgaggaggttattaccagcttttctgtccagaaatttctgaacggacattcttagaggatggacactttccattagccattcattcattcattcattcaagacagatttatcaagtactatgttccagtaagaaataagacaagagtcaaagagatcacagactgagcttccccaactcaagtttagatggcacaagaattgagaaaattaaagatggtgtaataaaggagttgataggtggaaaaggacttgataagtgctggtttgttgttctaattagcaggagtattttggggcagcaaacataggaagccacttacatagcagttagtacagctcccttcacaataaattctcaatcttcatttaaagtattcccttttcacttgtatagaggattacaatttttccctccatggcagtgagatttactatatacacttctacatatgccagtaatcaagattttatgatcacatataaagtgtaaaagttcctttctcttcccaccttccatccatttctgctttgaagacagtgggaactttcacaatattgagctacaaggagcacagagtaaaagacaattttcaacaaaacattttttattaagctcaccctggctctgagaactctatctcatttatataaaatgttgccaatgctaatcattttttgcatgaaaaattaaacacaccggaaatgggatcaagtgcagcctgtgtaaattactgcattgatttttatagcattattttctcccagatgatttgaggccgcgtaccaaaatataggcaacactgtataaagtaagtattatagtttaaggaaccagaggggaaattcatggagggagaataaataatgtagccaatggtaagattaacactcaagtatgcacactttcagatccagaacagtttttgaaggtgggcaagagatctcactctaagcttccatagaaaacaggagataacaagtattttaaagttttacggtgttcataaaaaccaatcaatcaggattttgtttgcttttgagaagcactgtttgtttttttaaaaataatttttagccccaaggcaaatcccagttcctcatcatgatgacgctgtgagctacgtgggaaataagtgtcataagttgttacacccacattccctcaatggaaactgttggcataatcacaaagcacagggcactgaatcaatttcatgaaccatccaaaatttcctgttcgactgagtacacagccccacaatggtctggtttaattcagggtagcatttagataatctttc

SEQ ID NO: 1888726 - DNA, 4001 bp, Homo sapiens
cttcaaaaaaaaaaaaaaacaaaaaaaacaaaaaaaccagcatgctggtaacaaaaaaaaaatatatcaaaaatccaacaacaaaaataaacaacacatatacttcctatgttcccactgtccaaactcaatccatttatcacgcaaaagagatgtcttgaaaatgataataattcaatgacaatcagcaaagtcagcaacagaggagactttaaaaagttactcactgtttcctccatcaggaaaggcatcgctaagtcaaagtcagcccttaaaggagggaaatgagctgttaataccaatgttctgagaaatgaggaaggaatgacccaaaaacaggtggagaaaacaccacggccccacgtttctaaatacttcagaaaacgtgaattcctatcttctcatcactcttccctcaggtgaaaacagtaaaagatgagcatgagacagaaaaagagggagtaagagagagagaggagagagaaagagggggagagaggagatagaggagagaaagaggagagggaggagaggggggagagagagaggagatagatgagagaggcgggagagagacaagagagagaggagagagaaggagagagtgaggagatagagagaggagaaaggcgagagacaagagagaaggagacaggagagagagagatgggagagagaaaagaggagagagaggagaggagagagagaggagagaggagaggagagagagacgagagagaaaaggagagaaagaagagggggagagagagaagagggggagagagagaaaaggggagagaggagagaggtgagagagaggcgagagaaagaggaaagaggggagagagagggagagaggagagtgaggagagagaaaagcgagagaaagaagagagagaagagagagagggaacaggagagaagagagagagaggagaggagagagagaggaagagggagagaagaggagagagagaaaggaaagagaagagaggagagacagaaagagaagagagactgcagtatccataagatccataagaacgtcaccagggttgggggggaatcggatgccacctcttccccaggttcccctaaatttaagagtttgcgattctgcaaactgtagaaggaaaattaaaacttggaaccccagttcactctgccaaaataattaataataataataataaagctggaagctgagtcaggcaggaagctgtctttccttctgttcccaagcagacagtgcaataactctctgttgaccttatcttagtaaagtgccaatttagtgagcgcaagacaaatacataattgactattctacctgctgcttttcttttgcaacaggtgaattcggtaaaatgagccttcctccttctttcccctccagcgtgctttccccctttaaataccgaagctctcaatagtatctttggagaaaggcatagacccgtctcccgggctccttcctgatcttcgccgaatcaactcaaaaggattgggacttgtcccagatactttttggtttacgaaagaaacgctggctttttcctctgaaacggctcccacctggccccaggaagagcgctggggagaaagtgggcgcctcctccggacctgggtccccgtgggcacagcgcgtcccgccgggcacggaagaggggccgggtgtccccgcggggcgccccgcccctgcaccccacatccccaggcggatccccaggcccagcccgcgccaccccccgcgtcctcccacccggatcccgccgctcgctcaccggggcggccaccagacggcggagcaggccgaggagccgcagcgccagcacggccccgcgcgccacggcgcgcccaaggcgagcagagatcgtccgcgagtgcagcgcgcgggcgaaggcggcgggacggaacctcccccacgggccgggtggggcggagcccgcggaggactcgaaggggttgggtgaggggagcagccctgcaaactcagcccaggctgcgcctgccccgccccgccccaccccggcctccactggcgcacggaaggggagggaacgccgggcccggggaggggacagaggagggggcgggcggaggtggctcgggccgcgccgaggggaccacgggacgccctccttcccttctcaggaaactgtgagtgccccccgcccacaagcccgtcgccaggatgccgccaactagagcaaagtgaaacccccaacattctcgggaaagtgcgggtccctccctctctacagccccttaaatgcacgccccagggcggcccctacctggagccaagagaaaccgctgcccttcttggagaggtgtgggcctctccgcgcccgcccttgctgtcccctctctgttcctaacaggcaccccccccaggcagccccaacggggaggaaatgaaactcttcctgctcctctgctcggaaaactatggggcccccttccagctgctcacggggcgctcagggcgatccccaaggggtgcaaagtgcaatcccctccctgcttagaaaggcgtaggccttgacaggcagccacggcccctggtcctttctggagcgtccgagctgggggcgctcagtggtgaaagatggcgggggtggggggctttgagacacactgcggatacccgctctgcgcgggaccaaggacgttctgccgcaagctcagagacagggttgggagtgaggacttgtggtcgtggtttggggttgggggtaagacccctatctgggtcgcctggctgagtcctggtccttggcgactcaccccagcaggctgcgtcaggggcccttcggtaacactggtcttgtgctgtctcaggcctgcgggtgactccgtctctccccaggccacctgtgcccctggatcagacacaggcaaggccagaggggctggccccgcaccctggggcccacctcaggggtttgaggaatgcagcagtctaactatgcactccactcctggaggcagaatcatttttcttttttctttcttttttttttttttttggtctttgcttcatcctgaacctgcctgggataatgacgtgatggctggagtcccagcagccagttcgaagcaggaagtctcctacaggatagaagttgtctgtgtgttgtttgtttgtttatttgtttgttttgagatggagtcttgctctgtggcccaggctggagtgcagtggcacaatcttggctcactgcaacctccgcctcccgggttcaagtgattctcctgcctcagcctccccagtacctgggattacaggcatgcaccaccatgccaggctactttttgtatttttagtaaagacagggtttcaccttgttggccaggctggtctcgaactcctgacctcatgatccgcccacctcggcctcccaaagtgctgggattacaggcatgagccaccgcacccggccagaagttgtattctaagcatggcagaacacgttgagcaaaggtatcagggtggctgatgatacagcaggacggctgtgccagcccgactcacattcccaacttcttttacaggacaaaggagtacatttttatcttaccatttgctaaagttaggtttctatcagctttctttaaatcacttttatttctggttttcattaccaaggtctgagcccaacttagagacctcccgtgaggttcttgtgggcaaccaaagcacttaagaggtgtcagagcatcacacaccatgtctgctgcacagacgatcaaatgaagcttttgaagtcagtggatgatgggtggatagatgggtctgggggtaggaagtggtggatggatgaatgaatggacagacagccatctggatgcgtgaatggatggatcacttgctggaaggatggataaagagatagatggctggatgaatgaataaatgggtggatggatggaaagatgagtggatgattggatggatagatagttgggtggatggatgaatggatggatacatagat

SEQ ID NO: 1888727 - DNA, 4001 bp, Homo sapiens
aagccatatccactgtgccctttctgaattcctgcctctgaaattccatgcatatgatacaacgctcgtcattgtatggactcactgtggggctgtttgttacacagcaagaggaacaggaatgcaggacaccctcccctccccccacccccactcaaagccattcctcctccatagagttaaaccctaatctgatgctggcttaaattatttcactgcctaattcatggttttcccatgtgtatggacgcccctaaacaatgcggtttcatattgtctgggtgccttgataggaggagttttgggggcctgaaattgagaaaacaagcattcatggatcaggtagtcaaggcaaggcactgtgtttaccccaagaacaaacactctgttagctgttaacattcttgaggaaagagcaagttgaggaatggggtttaatctactcgataccggttatacagcgagcaggcggcaggtccaggattcaaacacaggtagtgtgtccccagaggccaaatgtgtaaaccctctgctaattcccctcatcaaaaggtaggggaccctggggaagctttctctactacaaaagccagagtcaccaccaccttctgaaataatctgagaccaagtaccttcaaaaaccaagccttgccatacatagccaagccggactttatagacacaccaacacacatagtttcctagaaggtatttactgatttctatatacttaacacatgtacaagacaggtatttcaaaagattaaagagggcagacagtgcgcagatgtctttctcattcctgtgtgcacagatgtctttctcattcctgtatccccatctccttacccagagacacttcccaaacaacaagcgaaatagtaacagctttcgctgttacaggaaataaagagtaatgaggtatgtaacacgaccaaatcttgaaatatatcatttaaaaaccagtaaatagcataactcgaatctaagcagtgaaaatatgaacgtctacctgaaactcacaggtgcgggagcccacgcacaccataatcaatggaagacgtcctagcacatgtttacaaactggttgtgtgttgccgtcctacacaccagaggcaaagcgctgaaaacaacaagcctgttcacaatagcaccaggaacgtacagtacacaggaatcatctgcaggtgatttgtgacaactgtaggcagaacagtaaaagcgagagatacaatggatggtttgaaaaatcagagacactcttcttccttaccgaattgcaagattaacgttgtactacgcagacaaaggtgtgttcaagatttggatcgtaagcgagttcactgaaaactagcggaggggaagggcaaatactggaagggaatccccggtgtgaccaggccagaaacacctctttcacagcatgggatctgtgcaggtactcggacgctccccgcagggccgcccgggccggtttcaggcgggcttgcggccccaatcactgctcctgttcgcggggacaggcaggggctgactgggaggacgtcttgtggatggccttgtgctcctcggcggcctcctcccccgggtcgccaccgccgacctcctcgatgaccacgctgcgcacggtgccctcgtccaggcagtgcggggcgacgccgtacacgcgggggtcagagacagctgcgtggaaactctgcaccccgcacctgctgcagaagctgtgcagcgccgggtgcgtgttggaccgataggtgacgatgctttctgcgccctggagcagcgtgaagcgcgaggccgggacgaggaagtggcggtgctgcttcttcctgcacagcctgcagctgcaatccacgacgcgcagatctgcaggggcccagaccgcaaagcggaccgcgccgcagtggcagcccccggtgtgatgcacgaggcccgggtactcgaaggtgtccagcaggaccttggcggcgccctcgcagctgaggccccgcagcttcctgaacgtctcccagcgctcccgctgtgcgcccaggtccagatccttgggggacggggcgggccccggcgggtccggggttggcgcggagggcagcaggtctctggggcccgccttccggacccgccgccagcggcgcttccgtcgccacctacccagccacctcttggccgccgcgtggctcccgaccccgacttggacccgggggcactgcgcgcggctggcgcccgtgaccgcgatggccgcgcaggcggcgggaggatccccgggccgctttcgcctccgccgctgagcagtggcgcggttcctcactctgcccatggcgcctgcagcctccggagcgcgtgcccacaccccaccctcatttccccgtcagtcgctgagcagcctccttgcctgcgccagcaggattggccccttgttgaatgcgatgtaaagagacccttcccttgaccctatcacaacagccttcgctggcctgaaaggcagtcatgaggcgttcagcaaacacctgccgggcaccagataccctcacctgggcgctgggatgtggagatgcatcaggctttccaaagcactcacattcatttaggatcaggtgtatgcaaatacagtccccaacaccttgggacactttgctctgacagaaataagaaccaggggctctgggaacagagaggaacgcccacacactgtaattggaggggcgtgtgggaggggcacggaaagactcttctaaagtcttcttgggggcttgattcttttattcggctgtagcgttttatttttcttgtaattttcgttgcgatgaagtcctctttacctaatgttgacatacctacttctgctgttttaattaatgtttacctgatgtgacttttcccacccgttgtatccttttcatttacccagggcgaccgaagtggaactgagtttcatataaacatgggataatcagaccgtgtttctcactgactctgccagtatctaccttttcatacatgtttctagttcatttccatgatctctgggctagtgtttaggtccacagatttattgtttgttttcttttgtttcctccgtgtctcggctaaccgagacctcctttttttgcccttctgtggcttacgtgtacaccttgcaggatttatcctgatttccgaaagtgttttcgagtgtttggctttgtaaaattgtctcagtggttgctctgggattttcagtgtgcatatgtgacttaccacaggctcctggtatccagttctcatcacttccattgaagtgtagaagcatcagccccttttagcccctctgccttcctgcttgtagacaacgttgtctggagtatcggatggtttcatagtttttgctttaatcgtcaaacatgacttccacaattcacaaggaaaacggtggcttagtgtttgtcccctaagggtgttttttctactggtcttgactcctttctgatagatacttccagaggccatcttttattctttcctcttttgtttcaagcacctactctagccattctttcaccgtgggtctgctcgtgacaaaatgctttcctttacctgagaatgtcttgatttccccttcgtccatgaaggatggtatcactggatacaaaattcacagctgacaggacttttgttcaacatctgaaacttttcgggacacttcctgatgaccgccactggtcagaggagacatttgccctcattaaaactggtgttctcctataatcaatgaaccacttcggtcttgctgctttcagtgattttatcagcttcaaaaactgactatgatgtgtgtgttggtgtgaatcgctttgtggttgtcttatctgaagtttgctcgttttccagaatctatgggtttatggttttcactaaaatttggatattttcagccttcttttcttatactcctctttcagtccactctctacttttggtactccagtcgtagggatattggaactttgttattgtcctaactt

SEQ ID NO: 1888728 - DNA, 4001 bp, Homo sapiens
caagccatatccactgtgccctttctgaattcctgcctctgaaattccatgcatatgatacaacgctcgtcattgtatggactcactgtggggctgtttgttacacagcaagaggaacaggaatgcaggacaccctcccctccccccacccccactcaaagccattcctcctccatagagttaaaccctaatctgatgctggcttaaattatttcactgcctaattcatggttttcccatgtgtatggacgcccctaaacaatgcggtttcatattgtctgggtgccttgataggaggagttttgggggcctgaaattgagaaaacaagcattcatggatcaggtagtcaaggcaaggcactgtgtttaccccaagaacaaacactctgttagctgttaacattcttgaggaaagagcaagttgaggaatggggtttaatctactcgataccggttatacagcgagcaggcggcaggtccaggattcaaacacaggtagtgtgtccccagaggccaaatgtgtaaaccctctgctaattcccctcatcaaaaggtaggggaccctggggaagctttctctactacaaaagccagagtcaccaccaccttctgaaataatctgagaccaagtaccttcaaaaaccaagccttgccatacatagccaagccggactttatagacacaccaacacacatagtttcctagaaggtatttactgatttctatatacttaacacatgtacaagacaggtatttcaaaagattaaagagggcagacagtgcgcagatgtctttctcattcctgtgtgcacagatgtctttctcattcctgtatccccatctccttacccagagacacttcccaaacaacaagcgaaatagtaacagctttcgctgttacaggaaataaagagtaatgaggtatgtaacacgaccaaatcttgaaatatatcatttaaaaaccagtaaatagcataactcgaatctaagcagtgaaaatatgaacgtctacctgaaactcacaggtgcgggagcccacgcacaccataatcaatggaagacgtcctagcacatgtttacaaactggttgtgtgttgccgtcctacacaccagaggcaaagcgctgaaaacaacaagcctgttcacaatagcaccaggaacgtacagtacacaggaatcatctgcaggtgatttgtgacaactgtaggcagaacagtaaaagcgagagatacaatggatggtttgaaaaatcagagacactcttcttccttaccgaattgcaagattaacgttgtactacgcagacaaaggtgtgttcaagatttggatcgtaagcgagttcactgaaaactagcggaggggaagggcaaatactggaagggaatccccggtgtgaccaggccagaaacacctctttcacagcatgggatctgtgcaggtactcggacgctccccgcagggccgcccgggccggtttcaggcgggcttgcggccccaatcactgctcctgttcgcggggacaggcaggggctgactgggaggacgtcttgtggatggccttgtgctcctcggcggcctcctcccccgggtcgccaccgccgacctcctcgatgaccacgctgcgcacggtgccctcgtccaggcagtgcggggcgacgccgtacacgcgggggtcagagacagctgcgtggaaactctgcaccccgcacctgctgcagaagctgtgcagcgccgggtgcgtgttggaccgataggtgacgatgctttctgcgccctggagcagcgtgaagcgcgaggccgggacgaggaagtggcggtgctgcttcttcctgcacagcctgcagctgcaatccacgacgcgcagatctgcaggggcccagaccgcaaagcggaccgcgccgcagtggcagcccccggtgtgatgcacgaggcccgggtactcgaaggtgtccagcaggaccttggcggcgccctcgcagctgaggccccgcagcttcctgaacgtctcccagcgctcccgctgtgcgcccaggtccagatccttgggggacggggcgggccccggcgggtccggggttggcgcggagggcagcaggtctctggggcccgccttccggacccgccgccagcggcgcttccgtcgccacctacccagccacctcttggccgccgcgtggctcccgaccccgacttggacccgggggcactgcgcgcggctggcgcccgtgaccgcgatggccgcgcaggcggcgggaggatccccgggccgctttcgcctccgccgctgagcagtggcgcggttcctcactctgcccatggcgcctgcagcctccggagcgcgtgcccacaccccaccctcatttccccgtcagtcgctgagcagcctccttgcctgcgccagcaggattggccccttgttgaatgcgatgtaaagagacccttcccttgaccctatcacaacagccttcgctggcctgaaaggcagtcatgaggcgttcagcaaacacctgccgggcaccagataccctcacctgggcgctgggatgtggagatgcatcaggctttccaaagcactcacattcatttaggatcaggtgtatgcaaatacagtccccaacaccttgggacactttgctctgacagaaataagaaccaggggctctgggaacagagaggaacgcccacacactgtaattggaggggcgtgtgggaggggcacggaaagactcttctaaagtcttcttgggggcttgattcttttattcggctgtagcgttttatttttcttgtaattttcgttgcgatgaagtcctctttacctaatgttgacatacctacttctgctgttttaattaatgtttacctgatgtgacttttcccacccgttgtatccttttcatttacccagggcgaccgaagtggaactgagtttcatataaacatgggataatcagaccgtgtttctcactgactctgccagtatctaccttttcatacatgtttctagttcatttccatgatctctgggctagtgtttaggtccacagatttattgtttgttttcttttgtttcctccgtgtctcggctaaccgagacctcctttttttgcccttctgtggcttacgtgtacaccttgcaggatttatcctgatttccgaaagtgttttcgagtgtttggctttgtaaaattgtctcagtggttgctctgggattttcagtgtgcatatgtgacttaccacaggctcctggtatccagttctcatcacttccattgaagtgtagaagcatcagccccttttagcccctctgccttcctgcttgtagacaacgttgtctggagtatcggatggtttcatagtttttgctttaatcgtcaaacatgacttccacaattcacaaggaaaacggtggcttagtgtttgtcccctaagggtgttttttctactggtcttgactcctttctgatagatacttccagaggccatcttttattctttcctcttttgtttcaagcacctactctagccattctttcaccgtgggtctgctcgtgacaaaatgctttcctttacctgagaatgtcttgatttccccttcgtccatgaaggatggtatcactggatacaaaattcacagctgacaggacttttgttcaacatctgaaacttttcgggacacttcctgatgaccgccactggtcagaggagacatttgccctcattaaaactggtgttctcctataatcaatgaaccacttcggtcttgctgctttcagtgattttatcagcttcaaaaactgactatgatgtgtgtgttggtgtgaatcgctttgtggttgtcttatctgaagtttgctcgttttccagaatctatgggtttatggttttcactaaaatttggatattttcagccttcttttcttatactcctctttcagtccactctctacttttggtactccagtcgtagggatattggaactttgttattgtcctaact

SEQ ID NO: 1888729 - DNA, 4001 bp, Homo sapiens; identical to SEQ ID NO: 1888727

SEQ ID NO: 1888730 - DNA, 4001 bp, Homo sapiens; identical to SEQ ID NO: 1888728

SEQ ID NO: 1888731 - DNA, 4001 bp, Homo sapiens
ttactattgtttcatccctatagttaatctaaccctagtccctaaacaccttgtgcaaatattgctccaaagacagaagtcaaaatgatcatgctaatcgaattgtgtcagcacagtcttcttatatactataacaaagggatttttgcatttataaaggtgacaagtgttactcaagatagagctcaacttatttatggaagagggctctgagtccatatgtcattctcctgttctatactccaagaaaaaggtctggactgaacatattccacataaatgaaccaagagacttaatcacagccagatggtgtgagtcaagttaaagctcctttttttttttttttttttggtagactgaagggaagttaatcgttcacttttgttgggtattaaactattgataacagtaccattaactttgattacagtcaggcattcctttcagttaaagaaaattggtcagtatagtagttatcttgttaccagaaattacatgaggtagatttagaccaaaaataacttgattagagtaggaaacaaaaactcatttagagctattacctcaaatacttctaaaggttctgggaaaagggatacgatttgtaatttatttcctcatacttaaaagcatgttcaaaactttacaatttaataagcacttccatttcatcttcacaacagctttataaggttggcaggtcagttatgcattacagatgagtaagctttgcaggaggctatatgacctgtcctaactcacaggcttaagataaactgggattagaaattgatttgactcatattccagtgctcttccctttattatgctaatacaactacactttctttattatcctttaaactgtagtgataagtagaccttttagtcatctactatgttgatgaaatgacctatcggtgcccatcaagggttcatattttattctcggccagtccggcacatgatataatgttaacaatattctcagtatggcttacataattctttcaccaaatgtctttctatgttgtaggcttacaaacgaatgaagctaaaagagctttaacatgagctatcaaacaactactattactcacattttattattttgccaagtttcattcagtggcagtataccaagctattctattttccataataccaactccttgaagaagaggaattacaacatttccgttgtgaaaaacaatttcatcctttaattcagggctttagacagcttggttctaaactctgacctcatttcttaagtgggaacacaggtgcaattgatgaattttatagctttagggaactatatgagtttcctcatgtgttaaatcctattattaagcaagcaatcatcttagtttggaggcttggtgttaagcactttacctccttaccggtcacctccacccaggaaaagaagtgaagttcaacaaaagctatctgccctagtactgcactcaaaacctacacctacaccctaaacctctggcaaactcctgttgccttgcctctgttctcgcacagtttcccaacaatttcaaagaggacgaattcactaaaggacaggtgacagaagctctcagagtgggagggctcgcgctctaaatctcaaaccagtgcggcgactcccctgaccattctttaaagcagtcccacctcccctgattctaggatggcagcgagtcccaggaaaaaaaaaaacaaaaaacagaaaaactaaaaccaagctgctggagcccaccaatcggtgccagcgctctcagccctccacagctagaccaaaaaggtcactaccaggcacctcccagggtcccaacctctgccctccccacctttccctatgccctaagagcagcttttcaaacaggaaaggatactccccatattcgacgtggtcccacgacttttcgcgggaggcgagtgcccggggcagcagcacgagtgggatgtgaggtcgcccagagtcctgcgctagtcctgaatagccggcacgcgcagctactaggtttgcaatcccatttcctgtttctgctcctggaccgagggggcggggccgggtgcctccgaggggcggggctggtgcaactccaaaatggctgccgcggggagcggcgattagaacgggttccagtcgcttgggggcgttggggggctggagggcaagaggttacgcgccccagctcccaccttgggtccttcgcctgcacccagtctaacctggcacctaaaggtttcgtcacccagccaaccttctagttctttcttttgtcctactccaaagtcttcttaaccttccgccccacctctttcctcagatttcactctgtccttggcccctcaccattgtctcagagtttaagccttaacggatgaaggaaaaaggtatagggcttttaacgtatttttcaaaaaattatagtcgtataaaataagggtctaagggatagcgcggctggtaaatttgaggtgtgaagttcacttatggcgttaaaaagcttcgtgatccttaaagttgtaggctagacttaataggtaaagtttatgtgaaatatgtattcgcactaactttttttttcaatatatatataagatacgaaaattactacaaagtctataatgtgcaaggaggttaagtgaaatactagatagtagttggcgttttatatgtgacatgaaaatgttccaaagttattagacactatggatttatggaaaggaagggcatcctgggaattgtcgattcgtttcaattcaaaacccttggaaattccaaggaagaactgagattttgctttggggaaaacaattagtatattctcttactaaggaatttaacaagtttgacgaatttttttcccatctttagtgtttcaatatataggggaaataagcatctaattggataagtttctttttatctttgtttctttttgaaagaaagatggatctaaaaactactgttttactctttagtgttaatgtaattggtggtaggcttcagactgttaccctaactacaaaccttcgatgctggaaaaacaaaccttttaaaatacaaggttctaggaaagtacagcctggaaaccacttcagtaggtgaaactgtataaagattgctttatttttgatgtccctatatatttgagaattaagactttacagaaacagataaaacttagtagatttcatcactgtttgatcagtttctatactagataaacagttgtatttcgctgttggagaacttcttttggtataaagataaaaaacattaaaaaaaaagattttccctggactcttagtatttttttaacacagctatttcaaaaaaatccatatatagaccagaacaatccactaaagctaaagcattttcaagtttcatataaagttcctagacttatatgtagctaagctataagaataagccttttttaaaaagtgttttgaaaatgttttgtggaatttcttaaggaaaaggtctttaggataggatcagttttttagtaaaattaaaatctgaagatatttgttgttagggtatttgttgttgatgtccgccttaagtaaaagacgaatcgtagcctgtgctgaccatttagaaaattaagaagtggtttttgtttttgtgagttccaaactaaatttgactccaaaaatttccctcttgttttttcttagatatctgatttcttaaagcgaggtttatatttttcttaacacttaggcacagaaatagcattatttatttaaagtacatgtgtattcattcatttataactggtgttgttaaaagcaacgaacaaatctgttaaagtaaaactttttattatagagaaaatataaaaaggaaagaaaatataacattttagttgtatattaaatattgaatacctataaaatatttataaaatgtgtgtgcaaaataaaagcaatattacaaatatatacttgtgaactatcacccaatttaagcaaaaggata

SEQ ID NO: 1888732 - DNA, 4001 bp, Homo sapiens; identical to SEQ ID NO: 1563279

SEQ ID NO: 1888733 - DNA, 4001 bp, Homo sapiens
aatccatgggcctcagggtgcagactgcaagtacagccacagattcccaaaattgtcaggagggtcggccagactctgtgaggtccccactctactggggtggagggtcccttctgtgctcactcagggccctcacctttctccttgcagggcctaataccgcccttttgctggccaaagaaactctcatggcaagaattcacatccctgatacggtacagaaggacatgaggggaccaacatctggccatacataaccagatcctcccacaaaggacaatgagagatgtccaaattcattggagtccaggtgtcctgggtgacgagcctgcttggtcctcaccactactcctgctagggcctgagagcctccctctactgacctgagtgcagccccttcagaccaaggcctccctttccctgacatcaaagatcccaggataatggagggacctcagcaggtagccttgcccaggctctctgagggaatagcaggggcagggcagatttctgtggggccctctgtcagcgttctggcccaggggtaccctcaatcctacctcaggcttctcacctggatgcttggtagatcttaggaccactgtgtctgtcgactacatgggggcccctgtgttgacctgagtcaccctctgaagaaaaggtcctcaactccctgagatctggaaacagaagtgaggaggagccacatcctgtcactcccaggtaggttgtccagggctgacccctttggttctagggtgaggcttctgatggcctcctgtgggttactcatctttactcctgccagggactgcccttcctcaacccccaaccccctgaaatgagcagacagctcctctttacaccaacaccttatctccctgagggttccccaacctcttgcctgtggtacaaatgacattgccaattggagctatctctgatcgggttcccttagagctaagaataagggacagccagactctgtggcatcccttctttctgggccgggggtatccccagtcctcatgaagggggcacaccttgggtccggcagatcctgggattcctccctctgctgacctgaagtgccactcctcagaccacagcccgcaaatctgtcaccctgaagtcgcaatgagcatggggcacattaggccactgtgcccaggatcccccagcccaaggttgccactgatctggactccaaggtcccctcagtcctccctcttcttcctccccttgactcctcgcagggctgggctccaactccctgctgaagtgggtctgtatccctaggattcccgcggccgaatgaaaaggtggctcagtttgagacaggggtactttgggcccctgtcctggcatgctgggagccctccggactccattatcttccaggaggggcttgggcccatcctctgcttcccaaaggccgtactcacgataccgacccccttccctccctgagccacagatgtgaacgtcaggatccgcgtgcttggccgccattcccggagcttccgtgggttgattgcaggggcaaagctccgattctgccaggatgggtggggatgggaatcggggtttgggggtcccgttgatgtttgagcgatggtggtgggtttggtgttgggggatgggggtggggttggtgttgggggatgggaatggtggtgggggtgcggggggttaccctcagtcccctcttggggtcctgaccttgattcctggctgagtctgggccctgagcacttctaaccagccctgccctggtcacacaaagctcttacaccagagttccctgcggttaaagcggcggggggtggcggggtgaggtggtggcgactcagcctgagaagtcttcccctgcagggtggtccaggcccggcagcagaggcagcgctggattattgggggccctctgtctggggtgaggcccgcctcagtcctccctcggcatcttaccttgcctcctcacggagcctgcgcctgcttccctccaccgacgtcaggccgttgctcagggcgagaatctcgctgttctctgacctccaacgcgcaagtcagtggcgtcacatccggccccgtgacttccctgggttcacagcaggggtggaactggattcttcctggatggggatccagatggaggtggaggtaagcatgaagatggtgttgggggtaggggtagggatagggacggggatcctgaggctgtagatcctggtggggttgggggagttgggggtgggaggggcctttggtcatccctcaaggtcctgacttggatgccaggctgagcctggaccgccatcctctgccgattgtgtctgctcccctcagaccaagtctctgactctgagtccccctgaagtggcactgggggaggggtgtggtcggggtgacattattgcctaagtttaccagggctgacaagagggactgagctggattctgtggtcccactacgtgggggagggtggaccctcagtcctcactcaagagggtcctcttcctcactcctggctgttggatgaagtgattggcaggagatactctgtttctgtaacgtctgtgcatttgcacagctgcaccccttgtagagaatggctgcgggtcccaggccaggagctccctgcagggcgggagctcccacgatcgtattgacctctggaagaagacagacactttcccacgggagctcctctccagccagagctacacttggcaaacctttggtcctaaatgatttattcactgaattgaagaaatacggtttacatatcttccaagtatatatgtaggtagcgatatatatatttatttctacgaactaacacctacccttagtatgcatcgttcactcttactatcctaatctacttctattccagtctttgtgttctgttgaaggaatttttttttaaacgtaattcctctcccactatgttggtttcaggttgttattagcagaactctggagccatgctgccttaacaaacccaattttcctggtgtcctgctattacctagggctcttggcatcgtgttttcaggagctgcctcagattgtgcaatgaagtgaagtggaaattttaaaacttttattctacccattctgttatctgccgtctaggcaggctacaaacctccccaacatccctgccgctaaccccctctaaccgacacggcaagtgtcacacacaagtaccagctcaacaaggtcttcagtctcaccctggactggccctgttttgttgtgtagattttcttgctaatactggttttttactttctgtttccattctataaatttacagggttgatttgggaagcagagcacagcagcccaaatttgcttgtaatgtcggcgactacaggtaaggcactaaattgtaaataatttaagctgagtttacatttttacactgttgtgttccccatgaatgaatatgttatactcctctatgtatgtcaagctattttttcctgaatatgtcagtatacttcgatagttgcctctataagcagcttatacatttttattagacttctattcaggtaattcttggattttattgctattgcaaatggcatattgtctattaattgctgtagttagttattgctttcgtgaggtgaagattttgattttgctgtagtaatctgttgcacacctcattctgaaggccgatgcacttgaatattccacatgccttttcctttgaattttcaagatcgataatggtattatcactaaacattacatgtttttccaatattcataccacttactcattttgatacttatagctttttgtgtctcaatcctgatttcaaacgtagagataataggctacatctacttctcgttcctgactggaatgatagttcttcgaacatttgacatttaagtatgtttgctgttgattttaggaaatggaagtgctctttgaatataggttaaataaatattttcttttttccataaactcatt

SEQ ID NO: 1888734 - DNA, 4001 bp, Homo sapiens; identical to SEQ ID NO: 1563285

SEQ ID NO: 1888735 - DNA, 4001 bp, Homo sapiens; identical to SEQ ID NO: 1563457

SEQ ID NO: 1888736 - DNA, 4001 bp, Homo sapiens
ctgcagatgtcagtcccagcggtggaccctgaagcagccctgtgacttggttctagcctctctcagccacattccagagccaatcctgcctgtttagtgacctacccagtaacccagcaggagatggcccagggaactggtgggagtcatgtgcattcacacacctggtaacagggctgctgtctgtgtactcaactgcagaccttgaagtggatccttgtcccaacaccagtcccactgaccaaggtcctggaagcaattctattggcccagacaccatgcaggatccacacctgcctaggactctggtactagaaccaccaactgcagaccccactgcatacccagctagcaaccatgtggcccagctaaatctctacttgactgcaatcccaggagcaatcccatcagcccagagacccttaactgcctgtagccacaaaattctttgttttcttttttcttttttaaaacttattaaaactttatttattttgtaatcattttcttcctttgagacaaggtctcactctgtagtccaggctggagagcggtggcatgatcacagcttactacagcctcaacttcccaggctcaagtgatcctccacctcagcctctcaagtacctgagactagaagcgtaccaccacatccagctaattttcacattttttatagagatgggaatctcactatgttgcccaggctgtcctcaaactcctgggctcaaacaatcctctgacctcggcctcccaaaatgctggggttacaagcatgagccactgcaccagccaaggtctttgctttcttaatctatctctgagaatgaatttttgaatcatgggggctgcatcttctgcacccactccaggaacactccttgcatccctagtaaagatttctcctaagcctggaaagttaccacgtggtccttccataaaagccttattgaattaagtcgcaattggaatctatacaccaatgaagatcctaattgtcaatgaccagaagacagatcctttgaattagaaagaaaaattttatttcaaatttatttgaaaacaattttagagaacgcttattctaaactatttgcttattgtatttatgggaagatcaggcagaacaaaaaattcagaaaagtattattactagccctaaaaatttccttaacaaaattaaagaacaaaagcagacctagaacaaaagttgaaatctgctcccactataaatcccccttcccactataaatcacccttctccactcacaccccaactccatgtccctgacccaccagaggatctattcactctctgggcccctgaattgaaccccccctcctcaagatccagccccatctcctcagcctctccctcctcctctatcttctcaacaaattctctctgctcctccaaaccccggaaaaactccttagacatccagctgccttcttttatctctctttccctggatgatttacaaaaaccctcctgatcttaaaagcccaaatcaggcctggtcttaaaacctgaagcttagaggtcatttatgtaagaactgactaccacaaaataaatctggcacaggctccaaggacacccaacaagacttgtttttctgtgccttgaaacctctcttatttcccaaggctttgtaatcagactccatcagctccagacctctctatgcaatgccctctgtaaatgtatcctggactcccttctcaaagaattcacgtctcctggagagcaacagatattttaaattataaagcaattttgcccccactttcagaaggacttaccaagttcagagaatagttggagagatcattggccatctgtaaccccatacgtagagaccttgactggctgctaaggggtgtatttccctctcatgatcatactgcagttattagacaggccagacggcctcctggggaaaactccctccacagagtgaacagatggccggaaccccttcctggccctcctgcaaatgaggagataggcccaactagttgctgatattcaggggcctgatagggacaatattagaggctctcctcccaaggtaaatttgtctaatgttgaattatgtattcagaacgagggagagcaccccaaggcttttgtcaagagacgtatacaaggttttcaaaggcatgcagcattacatcctgaagctccagagcatagaaatattccagtttctgctctggccggaaatcttcttgatacaaaaaggcaaatccaaactagtatagtggttgggctggtcagtctgtaagcattataatggaagcaggcactcaattatttgaaaatagcttgcaagaaaataaagggaaaaaaagaactaaaatcaagtcatcttgcggcttgaattgttacagaaacaaaggcgtgcctctaagaatgactcaaagttctttcatatctttggtcagccacaagatttttctagtttgtcttctgaaatttgcagatattgcaaaaggcagaggcattggaaaaattgctgtcctgtacaaaaaaaaaaaaaaaaaaaaaggaagaaactctccctagaatccaacacctttagaaggctcattattcccctcctttgggacaatactacattgattgatggggtcagctgatcctcagttgcacctcaaagcccaccattgaacttaaagtagaggattaagaaccggatttaattgacactgataggacttcctctactattcactcagaagaattatctctacctgttacctctgcctctattcaagctattgaaaactctgggcaacctatttcatcgcccatatctcaggacaccccaacatcctttgccctcttaacacctgccatgcctttctagtttctgactcctcacttagcaaaccttttaggtagggatttattatgtaggtttaatgctgccatacaatgtaataaggaaggcgtttttatgtctctgccttcagcccaaacttcaaactttctattaaccttagtattaaagttaacacgctctctcatggaaaccccccttgatttaaattcctctaaagaggatgcaatcttaaaagatgtcccagcttgtctctgggcttaatgtgcaagtgagattggactactactgagtacagaaccggtacacattgcatgaaaaaggaacaaacatttcccatcagtagtagctcagtaccccttctcacaagatgcagagagaggaattgaacctatcatagactcccttttgcagcaaggtgtactcattttcaccacttcaccctgtaacaccccaatcttaccagtacagaaagaaagaaaatttgcttccaatggaaatcaaatctatttgtacaagatttgtaagttgtacaagatttgtaattccctgccaccctgttatccccaatgcagctactatccctacctcaattcctggtgatgtagttgacctctgctcagctttcttttcctttccgttgtaccctgactcagtttctctttgcatttacatttagagggaggcaattaacatggactcgcatgcttcagggatattgtaagtcactctcaaaattctctctaatccttaaagcctacttgaattctgtagccttcacccaagactccattcttgtgcaatatattgatgaccttgcccttttgctttgtaaccaaactaaataggatacccttaaagacgctccctcactctcctaaaggcactagctgactgaagccataaagcctctagatctaaacttcagttagtgcaaacaactgttacttacttagaacatgaaatacctcagggcactcagaagttcaccccaaaatgcctcgagtcagttttatccattcctctccctaaaatgaaaaagcagctgtgtaaatttctaggggcagctggctattgaccaccatggagtcctaattttgtggctattgccaacccactatatgccctccttccagataccactccagagac

SEQ ID NO: 1888737 - DNA, 4001 bp, Homo sapiens
taactttagttattatagaaagggcagtagcagatgggtctgctccgtctcgcttctaagaaggtgggcaggacaaatggcagcctcctgcagaggcccagtgagaagcctggccctcggccacacaggatggaagacagattggattccacagaggggagctgccctgggaagatctcacggatggccaggacccaccatttcttcggggttcccctgttttctccaacgggcactaatgcctgtgcctgggtcctggcaacactctggactccacactcttctgggtttcacctttgtagcaggatccctgcagatcaggcccatgacaaacaccgtctccagcgggcagagcaaaggaagggcgcagcgccaggcagtggtgcagctgcctgtcaggaagaggcctacttctggtgaaactgggcagacaaaaggcagtgagaaatgtgatctcggggtggtggaggctctagggaaaggaaaaggcaggagtgaacttccacacagcagcaatggcagaaccaaaggtggctttgacctccacgagggctcagatccaggccaacagcttgtccaggacagggtgccgggtgtatcactaatccaggagcactatgctggcagaatccctttggtgcctgatggccctgccttcgtgggaacagaggctaaggctttgagttacagctgcctccccaacagtgcatccccttctccttcctcagcctcaggtaggagacagggcaggcaacccccctttcctcttctccccttctccagcccctgtctgtccacccagctggaggcagccaggcttgcctatggactggttgacagccttcatgcacaggttctccaccagagcctttcttgggggcccctggctgggctctgagctgggagtgaaggggatgacccatgcggactgtttgctgcttgtagctttccctgggaaagactctgccaggccttggagccagaccaggaggctttataggccactgcaagcagcagggctccagatgacatcacagggaatatcaagagggtgtggaggggcatcgaagcctctccaggagacaggagacgccggcccagtagagccctaggggcgacgccactcccactcactgtctactctcctctcacctctgcaacactggggacactcacaagattgtgatccaagtcggccgtcgtcttctgcagctctggagacctgatgctggggaagggcatgcctggcatcaccacacacctgggaggagacaggagcctggggccggtgggcccacacatcaccagctgctccgttctaccatttcttcagccctcttggctgtgcctgcggctctgcccctcccctctctgcacctaccacccagagagggcttgttgagctcagagatcccacctaggccaatccactgggttctgtggcagcgatggcctgcctgatcttccacctgctctcccagggccaaagccagacctgctgagcccctccctccagccggctggtctgagcagtcacagcccggctttgggctccgatggcagcagatggcaggtaggggtccagctgctggagcgagggccggccacgtatcacagccaaggagatgagcacaagcactacttactggcctaggttgtcagagaagttgatgctctcactcatctttcctccaatctttcccctatgcctggttgtggtattaagttacatgcagacaacaggggccagaagatgaacaatggcccatcccactctaggcatggctcctctccacaggaaaactccactccagtgctcagcttgcaccctggcacaggccagcagttgctggaagtcagacacctgcagatcaagaccacagcatcaagaccctgtgacctctcaaaggcctggtggaaaggacacgggaagtctgggctaagagacagcaaatacacatgaacagaaagaagaggtcaaagaaaaggctgacggcaagttaacaaaaagaaaaatggtgaatgatacccggtgctggcaatctcgtttaaactacatgcaggaacagcaaaggaaatccggcaaatttgcgcagtcattctcaacaccggccatgcagcaaaatcatcagtggaaatttaaaaaaatacacgtggccaggccccagcccaaatcactaataagaatctccagggcttcacctgttagactggcaaaaaatccaaaagtaaacactttgtggagaaacaggcactcctagacattgctggtgggatacagaacagtacaattctgatggtaatcagttaacaaattaaacatatttattttatacttttaaacccaggaatcccatatttaggagtctactgagaccaaacagcatatgctcctggtgtttccctataatccgccactactgttggagcaagagggcccagcagtgtccccagctgccagcaggcgggcgtgctgccagtacaccttgagcaagaggaccctgcaatgtccgtagctgccagcaggcggcgtgccaccactatacagtaagcaagaggaccctgcagtgccccggcgccacgagggggcggtggccaccactctaagcaagagagccctgcagttgccctagtcgccagcagggggcgccctggcacagcaccgtgagcaagcgggtcctgtagtgcccggctgcaagcaaggggcggtcgatcccggcttttcggattactgaagttccacccgtctctgcgccgcgccgccgtgacgtgagtttctgcgcgtgcacggcgcccccgcacccccccgcccccagcccggcgccgtgcgactttgctcctgcaacacacgcacccccaacccccgcccgtaggcgtgcgtctctgcgcctgcgccacgcctccacccctggacgcgctagcatgtgtctctgcgcctgcgccggcgcggcgcgcctctctgcgcctgcgccggcgcggcgcgcctctctgcgcctgcgccggcgcggcgcgcctctctgcgcctgcgccggcgcggcgcgcctctctgcgcctgcgccggcgcggcgcgcctctctgcgcctgcgccggcgcggcgcgcctctctgcgcctgcgccggcgcggcgcgcctctctgcgcctgcgccggcgcggcgcgcctctctgcgcctgcgccggcgcggcgcgcctttgcgacggccgagttgcgttctcgtcagcacagagcggcagagcaccgcgagggcggagctgcgttgtcctctgcacagatttcggtggtactgcgaaggcggagcagagttctcctcaggtcagacccgggcgggcgggctgagggtaccgcgagggcggagctgcgttctgctcagtacagacctgggggtcaccgtaaaggtggagcagcattcccctaagcacagacgttggggccactgactggctttgggacaactcggggcgcatcaacggtgaataaaaatgtttcccggttgcagccatgaataatcaaggtgagagaccagttagagcggttcagtgcggaaaacgggaaagcaaaagcccctctgaatgctgcgcaccgagattctcccaaggcaaggggaggggctgcattgcagggtccacttgcagcgtcggaacgcaaatgcagcattcctaatgcacacatgatacccaaaatataacacccacattcctcatgtgcttagggtgagggtgagggttggggttggggttgcggttggggttggggttggggttggggttggggttagggtttgggtttagggttggggtaggggtaggggtggggttggggttggggttggggttggggttaggggttggggttggggttggggttggggttggggttagggttaagggttagggttaggggttaggggttagggttggggttggggttagggttagggtagggttagggttagggttaggggttaggggttagggtagggttagggtgagggtgagggtgaggg

SEQ ID NO: 1888738 - DNA, 4001 bp, Homo sapiens
taccctagcccatgtaggcattgcccttctacactgacatttgtatcggaatggaaatgggggcttctagtatctttttcatccttatttcttcattaattccctactttccaccagaatggcctgaaatgcaccatacatagtactatctttggctgagtttttgttcatatcattccttccaacccagattccctctcttccctttttgtgccttgttcgtgaaatcctatgaatttctagactggaccattgtttccatagcactttttaacttgcatccttgtttgtccctgattcatatactgccatatgacttcttttaaaatcgtatttctctgagaatgttattgaatgtgcatatataatatatgaaacatatacacagaacatacatatatatatagagagagagagagagagagagagtgtatataaaatatataaaatacttttttgagatgttatctcattctgttgcccaggctggagtgcagtggtgtgatctcagttcactgcaacctccgtctcctgggttgaagtgattctcctgcctcagcctcccaagtagctgggactacaggcgcctgctcccatgcccggctaatttttgtatttttagtagagacgggggtttcaccatgttggccaggctggtctcaaactcctgccctcaaatgatccacccacctcggcctcccaaagtgctggaattacaggcatgagccactgcgcctggccaaaatatataaaatattatgtatgtatatgtcatcatctctcctcaatgaaactgcaaactcattgaagtcctggattccacattgtcaatagtaattgccaggaatacacaagtccaatttttaaaattgtgtcatatgaagtagtcaatcaagtgtggttggccacttactgagtctcttcacagagccagacctgagagtatccgtaattgttaccctaacctcagggagctgcattttcctctactgaaaattgaatacaatgccatctgccataattaattcaaagattaaacaaggctaccgtgggtgcctggctcttcataggcactcaataaatgtgagttgagagcctgcccctgtggtcccagctacttgagaggctgagatgggaggatcgcttaagcccaggagctggacgctgcaggcagctatgatggggccactgcactccagcctgggcgatcaagcgagatcctctttatttatttataaaaataaataaataaataaatatgtgagttgaatcacaatctaggtttgcaaacctccatgtgtaaaggctgcgcagagggaacagtggtggaattatcacaggcaggccaatgtttcaaagagcttagtgaaactgaagaagcttgtgcatacaaaaggccagtttaggtaactgtaactgtgtttaagctttagtttcctttctaagtagatatatgtggaatgcaaggccagcaaccaactcacaaatactgatcaagacgggggagggatctaaaggaatgtgagtacgtcctgccaggaaagaagtttgctgcttctgaaatattttcgtcttcgccactggcaggattgatcgattgcagttagcgaagaattttctgtgcaaactgtccaagcatctgcttctgtacttctgtacaactgttgctcaaattcactcttcttttcgaatcaccatctttgaagagagacagaaaaatccatttaaaccacccgaactaatcattcgaactgcttccaagtcctttaaaggagaatcctagcgagggtccgtaacacttccccttaccctctgcctgggttcaaacttcaactcccagggttcgcccaagtccctcccctagtcctgtcatctaatgaatatgcaaataccacataattggcagccaatggcatgggttctggtcacatggtgccgatggtaggtgagcagacagaagttgtcagtgaacagagacggcgctcagtctggggcgagcgctctagtgagcgcggacggatgcttaggcagtagtcctggcagcggcagtagtggtggcagcagaagagaggaagggggagggccccgagggctacacacgctcacactttcaagttcccttggagggagaggaggtggggctgcagaaagaggaggccaggagcggtcccatccgtcccgtcccgtcccgtctccccctcttcctcttgctccttgctccccggctctgcgagagttgagggttcaggtggccgtacgcggcagtgagggcaagagggccgggagagtggggagcggaggcaggagtgcgggggaagatgcccatcctgctgttcctcatagacacgtccgcctctatgaaccagcgcactgacctgggcacctcttatttggacattgccaaaggcgctgtggagttattcttgaaggtaaagggaggggaggggagagatggggagagctcccgagggatttcagggtgtggattgaggtgcttctgtaacgtttgtatcgccctcccccctcctttcctacgcgaccccctccgtcatcccttgccccgcagctgcgcgcccgggacccggccagccgtggagacaggtacatgctggtcacctacgacgaacccccgtactgcatcaaggtaaaggggctacgggtggggggacaggcgggaagcgggagcaagtcggcgggggctgcttacccccctgcccccgcctaaggcggtcctgcgtcgcccggcggggcgggcggcgagggggtgcgcagagggcgggcggagtggtgccgtcggcggcttcggagtagctgtcgcgcctggggtcggggagaggggaccggggaggagcagccccggggagaaaccgcaggagggccgagctcgtggcgcgacaaccgcagccgcctcggaacatggcggacattttgcttttgtatgagcctgcgagagggagactgagggcgctgctgagatggaaaggagggaggggagggaggagcggggaaggagggcccgaaacccggagggaggctgcgaggcgggcccgccccttcgaggcgcaccgcgcgagggtcgccgcgcggggggccggacggagcctgcgactccgccccgaggtcctgccggccgggcgcgcgggctttcccggagcctgggctcctcctctggcccctccttcctcccccggtcttcctccccctccttgggctcttcgctgcatctcctccttctccccctcttcctcctggtcccctccccttcctgctgagagcgtggcagagccagccgccggccttcaaagactagacaaccgcctttgcactcgttggcctctcaccacccccgcgcaatcggaaatctgtccgcgacgccagtctccccacccccagacccggagaaagtctttgcgtttctgctccggaattggccaggttcagccccgctctcagttaccttagctactgttactgtttcattggaaattccagcgaagcaacgacacggagggggacgtgccaagtgcgaacccacaggggcagagctttttagggatccgctctacctatttacatcataaattaggtttgtgctagccacgtaggaattaatccagggacaagaaagaaaggaaggggaggactcaaatgtgagcatttgtaatagtcaagttcgatgatttgattctgacctacaggagaaaagtagggaggacggtctctgtggggtaatttatgttcctatggtgaggagataaagaactgctgctttgcctgcagtggccagataaaatggaatttaaactgttaaatcaacctgcataagagtcctgcttgcatattgaaattttaaaaatactaccacaatccttgacgtcttttgttaggctttttcttttttcctcagaataatcgtaatagtgctagggagacgcagtctggatgtgttgtgatccgtttctgtagagtgaggtgttttaatgaatggaacctaccaagct

SEQ ID NO: 1888739 - DNA, 4001 bp, Homo sapiens; identical to SEQ ID NO: 1563474

SEQ ID NO: 1888740 - DNA, 4001 bp, Homo sapiens; identical to SEQ ID NO: 1563473

SEQ ID NO: 1888741 - DNA, 4001 bp, Homo sapiens
aaaaaaaaaattaagaaaggccatgtgacttactcctaatttcctggcttgcatgaggctgagccagaatttgagcctaaagcttctctgagtccaaatttggtgttctctccactatatcgtgctgcttctacttatgggattgggaaatattcgggaattttaattgacaaaagtgaactgtgttcaggacagaacttaaaactaaggtagatattaagggaacaccctatagttcaatgggtgtttttctaggctatagatgaggagaatgccaaggttattacctactccaacaccaccactttgtggtacaaattaacaaagataccccccaaatctatgtatggttggcttgcacaaattaactttgtatttggcaaaaataaaaagccctcaggataatatttcccttatgtagtaaaatagctataatagaatttcacaatctttgttattttctgttgaaatgtccacaggaaaattagaattctgctaattgattttttttctgtatttataataagccctcatacaattgaagcatatctgagaaaactagaaatctattttatttatcttgtaatctgaaaagggagtgttataaaaattaataaggtttcctagagtaggaaataaaaattttaaaaatgaagtaatgataaacattaggctctttaaatatatacgaggcatatagaattacaaatcaacctggagagaccaattggagggaatgatgacaatgaaagtagatgcattttaggatgtttggcagattaatccttcagttttatcccttcagaggtatgagaggtcagtagcatgtctaaatgtaggcttatgttatttacttttcatcatcactgtgaggaagggtgaattttttaataaaaagaaaaaaactatcatagcatggagcttgctttttttaattggcagataattttacacttaatatttctctctcagctccatacgttatcagtttaattactctgaggcctcaataaaaaaattaaggaaactaaagtaggagagtttgcagtttacactcagctgttctgagttcactgaaagtgaaatgccaagctgccagggatctactgcatgaagctctcgtgaggctcctgagtgggccgagaagtggcagatgagcttcgtgtggatacggtaaagcatttagtgaaaaatgaaagtgaaagaagctaggctgcattcacaggctggcaggctttgccttctcagtttcaaacttgaaaaagggatctaggagtgactggtaaccattctgtgaaaaaaaaaaaattagctcaggaaggtgttgtaatcacaatggtccacactctgcagatcagtctcaggaaagagattggcatcctaacagaagacattctacttccttagtacaagattagggtcctccagacaggatgaattattgcaagtaattctgattgctgcttctgtttaaaaacaggctgctgcatcaggctagagaaggccctttgtaatgaagtaaaaatgggtgaaaattccctgttatgaaagaccaaaacaattagtgctcttctcttggaaaatataatagttgagtgagaagcttcaaagagctgcctggcccttccactccttttgccatgtgaggacacaatgttcatccattctacagtgtaaggatgcagaggctatgctcagtgtttttgaaatcaagaaatcataaacatttggataggataaatgcaaacctatttaccaaacccaagcatgttgaaaccttaatctgttcaggctgctctacctgagactgggtaatttgtaaacgacagaaatttattgcttacatttctagaggctgggaagtccaggatcaaggtgctgtcagatttaatgtctgatgagtgtttgctctctgcttccaagatgacacttcttgctgtatcctcacattgtgaaatggacaaacgctgtgttctcgcatagcagaaggagtagaagggccagggagctctctaaggcctcttttgtaagggcattaatcccattcatgaggatagaacccttatgacttaatcacttctccaaaggtcccacctcttaatacagctacagtaagaattaagtttcaacataaattttagaggactacaaacactcaaaccatagtaaagggtatctttgaagcattgcagaaacaaatggggaaagggaagtaccatacatgactcacagaacaacttatcctggaagttctaaagaaatagcatgtttaaaaagtgaagtgattcaggtcaactcatgcactatagatacatggttgctttgtaagagaaaccaaggaggaaaagccatcctttctacaaagcatcccttggtgactcccaccaaaaatagaatcacaaggctaaattgatcatgaatttggtattcttcatggctttagttttaaaaatatttttaaagtattaaaaggattagtattgaagatagtaatactggtaatggtttgcaaagcttcttgttcttgtcctactttggactccacctgcatttacacaaagtaccttcctgtcaaagtcatggacctagaaatccaggcttagtgcttgtggatgccatctggtatgggggtcagcttacggactttgaaactccacagatgtccaccacttattaactacatgatcttatgcaagctttttaatttcttggaggcttactcttctcatttgtaaaatggttttataatacctatcatacgggatccttttaagaatgattgacgcaatatatgcaagtcacttaacacagtgcatggtatccactaaatgctaagtaaacagcagctcttactattgttgtgagctaagtgagctatttatacaaccctggattcaaaaagttgtaataaatatggtggataaggtgagcccacattttcctaataaaactttaaaaaagttttatgaccattttgagtgtagctggacttttagaaatgtagacgaaacagtgaaatgtgtagttatgaaatttaatttgtttagttatacagatatattcaaattgtagatgatgcagaataatctcttcaggtatgatactttgcttttcctccccactatctcattttgtaaaacaattctattgaaacttcacgcgtatctctgacattggtgtttctagaagcactggagctaatttttgtgtcatctaacagttttccagagcatattacattcatgtccacctaagtttttagagatacaacactttaatctgtgtatcagagtatcaatgtcaggctttttccgcaagccacaaatactcatttgcataccactaggtccattggcttttccattcatcttgcatgtgtatattggtgatcttcgttaggtatttactgcagggaaatcttaagtaatctttcaaaggcttgtttacaatgatctccaacacttagtactatgacgtcacaccctgtaaacaattaataggtctgtgttaaatttcattatcttaactgccttccccaattttgtacgtttacatcataagcatctaaaacccatattaagttgttccagactaatgcgtgttttccagagagtacattattaagaataatttggaaaatgtcccttggaattaagcacttgaatgtaagacatcttcctctttttttctgcgagataacttgtagggagcaacgggaaggtatgctttatatttgtgaggataggaatagagattttcttgaaatatttatccaattatatgactttaaaatcatgcaagtttcttatttttattcatcgtatatatgtattaaatgccaggatgatccaaacacatagaaggtgaagttcctgccattataggaatttttggaccttagagaatatccaattccagaacaatgcatggaatactttgtggaaagcatttgcagagagaaagctgtgagttgcagcccttgtcctcaacaactgacagca

SEQ ID NO: 1888742 - DNA, 4001 bp, Homo sapiens; identical to SEQ ID NO: 1563480

SEQ ID NO: 1888743 - DNA, 4001 bp, Homo sapiens
actgtgccagtctaaaatggagagcgagagaccttacttcctccgaggaatgcttcttgagatgaagggagggctaaggactggagaaaacttctcttgtttttatagacatccttagtgacagggaccgggactagacttatctttgaagaggaaatgaatgcctattggatcttaaccctgattggcatttgacctttatgaagataattgttacactagagatgtcgtatcctttaggccttgttttaggggcaaggttggaatattgggaaaggcatctaaacaggcttaggggtggggtacccatctccctctcctaactgctaatgcagaggaccctctttcttgcttttggggtggctcacagcttctctctttggacaggtgaatggagtgaatctgaggaatgcaactcatgagcaggctgcagctgctctgaaacgggccggccagtcagtcaccattgtggcccagtacagacctgaaggtaggagaagggaaggtgggaagagatgatgtgggggagttagacttatattatgtgttggctttttgccatcctaggtaacaaagccacttgaccaggtcccttctacctagagcagtaacctcttcctctctccttttcctgctgggtaggggttggtttgggcggcttgaaagcatcaattaaggctgtgctcagagcctgctgatgtgggctgcagtgcaggagaaggccagtagtgggcagcagcctactggaagcagcatccaaagattagggcgactggaaaaaggggagggggcggagggcccacaggagaagactgggaactgtgtgccctggaagaggagagcagctcttggttagaaggacctcaggtagaagagatccgacctcttaagagatcttgggccaaacctctgtgacccccactcccctcccctcatcaagatgaccgtgaaagacccataaacgcgctgaaaaggtgatactatgcccttgggataggccaactggagtcgactccctcccctccggggggccttctttgtattctcagtgagcagtccttggctggggcgaatgggcggggctggtcatgcaaataaaggcgtttgattggctggggccaaccgaggcccaggtgccgaggtgagccgcgggaaggcgcgccctagcctgcgggccagtggagtggccattggccggctgagggcggcctccagccgcatgccccgccccctgacccaggaggagggcggcaggcgcccctccttccccccatcgcgcgcctcaggcgtctcctcctcctccctccttccccctcctctctcctcccctcctcccgcgcgccccgctttgtgtccgtggtctcccgcgcgggacggagggactggccggagctggcgctttctcagcactagatctggactccgacccggcgccaggtgaggtggggcggacgggggtcaggccccctcgcagtcccccctaacctctctacggctctgttctcagcctcttttccaacactgcgtgccccaattctgccctctccctcgaatgccttcgttgcgtgcccccaggctccttctgagaccctcctcagggcccctcggagcgccgcgcggggctcagcgccccctcaccctacactgggcccagtctggccttcacctcttagccatcacctctcccccacagcgagctgtgcccccttctcaccccagggcctctgtcctgcctcagcccccttcctgctggctgctgcgcccccaagcagctccctaatcccttgccctagaggaattttctaaatcttcccctcccccgacacccatttctccacccaacctgtccacctctgagaacagccgcgaccggcttggtattctgccccctcccttttgtttgcaagggattcgtaccattcccgacttctttcgcctcctcctcccctttgtcccctagggctgcagcgcctgggctcctgggacacctaggccctgtgggccgattactaaggtggaagggaccgacctctccctggcaggtgctctatttccgcgatgagagggggagaggctgggagccccgtcgccaagccgaaagggatggaaagcgcctacctttgtcctttccgttcccctccccccatgctccttcagtgcctcaagatcctgaagggaaagaagagagagcctgcgaccttttccacgaggctcttctgatcgaggacagaagtgcagggaggtaactcacaggagagagagcttgttggtctgaggtaatgagaaagagggatgcaaatggacactttgagtcatttctctccttgtttggttttcagcttactgatcaggaacgcaccttagggatattgtttttttatgatttatgtgtgtgctgttcgctttccagtacagagctaaccgtctgatttttattagcaactaatatttgtgcatttcatgcccacaacttagacaacacaggttctgcaaaggaaatggtttttcttgcgtatttgtgtgtgtatgttgtaggagaaattgatgtttctttcggttttgctctctgatgttgggcacatggaaacaatactgtgaattgtgtgtggtgggggtatgctggatactagtgactacatatttctatgacttgttaggggaatgcaactggcttgcataaaaagctgcaggttgtccagggtaaggggattcctgcagtgtttattgctctctgagcatatttctgagagtttataatgtaggttgaggtgctgttttatgctagttctttctactacttgccaaataaggcctttcttctcttaggatttaggtgaaccactgttgttaaggctctgccaccccaatcaatcttacttcctcctttggtttggtaaatccagcaagtccccaacatgcaaaagcttttttttttttccccttttgaaaacagatccctggagactggtccagagggactgtcaagcattctgtgttgggctctaaattttctttggtaaagtgctagtttttaaaaataaggactccatgttgatcaatttataaacaagtgtggttcttcagaggattacatcacggtgggtatttacaaaatgaataatccaaatacatgtatgttggttggcaagagaccttgcatgtgattggccaagtaagtgttcattacttgaatttttttttcttcacgtgaatgtgagagctggaaaggatcaagtggtccaattcttcattgtgcatactgaaacaatgacaagagagccaagatataacttgtctaagaagggaaagttgctgaaggtcagcatcagagggtcagcaaatcagcttaatcctgaggtctaccagttgggacagaccatgcttgtgaacacctgagggacctaacacctagttaaaagtggaggagcaacaggaaggatactggggaattaacagaggacagactaggaagagtgtaagggaaagaaagatggatgtggaggggaaggttagagtgatctccatggtggcctctgaggcacctttgccaaaccagtgcagcctttagcatgagagatttaaaaaataggtttgactaatagaacaatcagagtaagacaatttgtctcctttttaaaatggtgttattgagaggtaagtcatttaccatacagtttcctcatttagatatatatttcagtgactttaggtatagttgtgcctccatcaccacagtacgttttaggactttttttttttttttgagacggagtcttgctctgtcgcccaggctggagtgcagtggcacgatctcggctcactgcaagctctgcctcccaagttcaagcgattctcctgcctcagcctccccagtagctgggactacaggtgctcgccaccacgcccggctaattttttgtatttttagtagagacggggtttcaccatgttagccaggatggtctcaatctcctgaccttgtgatccgcccgcctcggcct

SEQ ID NO: 1888744 - DNA, 4001 bp, Homo sapiens
tggatcttaaccctgattggcatttgacctttatgaagataattgttacactagagatgtcgtatcctttaggccttgttttaggggcaaggttggaatattgggaaaggcatctaaacaggcttaggggtggggtacccatctccctctcctaactgctaatgcagaggaccctctttcttgcttttggggtggctcacagcttctctctttggacaggtgaatggagtgaatctgaggaatgcaactcatgagcaggctgcagctgctctgaaacgggccggccagtcagtcaccattgtggcccagtacagacctgaaggtaggagaagggaaggtgggaagagatgatgtgggggagttagacttatattatgtgttggctttttgccatcctaggtaacaaagccacttgaccaggtcccttctacctagagcagtaacctcttcctctctccttttcctgctgggtaggggttggtttgggcggcttgaaagcatcaattaaggctgtgctcagagcctgctgatgtgggctgcagtgcaggagaaggccagtagtgggcagcagcctactggaagcagcatccaaagattagggcgactggaaaaaggggagggggcggagggcccacaggagaagactgggaactgtgtgccctggaagaggagagcagctcttggttagaaggacctcaggtagaagagatccgacctcttaagagatcttgggccaaacctctgtgacccccactcccctcccctcatcaagatgaccgtgaaagacccataaacgcgctgaaaaggtgatactatgcccttgggataggccaactggagtcgactccctcccctccggggggccttctttgtattctcagtgagcagtccttggctggggcgaatgggcggggctggtcatgcaaataaaggcgtttgattggctggggccaaccgaggcccaggtgccgaggtgagccgcgggaaggcgcgccctagcctgcgggccagtggagtggccattggccggctgagggcggcctccagccgcatgccccgccccctgacccaggaggagggcggcaggcgcccctccttccccccatcgcgcgcctcaggcgtctcctcctcctccctccttccccctcctctctcctcccctcctcccgcgcgccccgctttgtgtccgtggtctcccgcgcgggacggagggactggccggagctggcgctttctcagcactagatctggactccgacccggcgccaggtgaggtggggcggacgggggtcaggccccctcgcagtcccccctaacctctctacggctctgttctcagcctcttttccaacactgcgtgccccaattctgccctctccctcgaatgccttcgttgcgtgcccccaggctccttctgagaccctcctcagggcccctcggagcgccgcgcggggctcagcgccccctcaccctacactgggcccagtctggccttcacctcttagccatcacctctcccccacagcgagctgtgcccccttctcaccccagggcctctgtcctgcctcagcccccttcctgctggctgctgcgcccccaagcagctccctaatcccttgccctagaggaattttctaaatcttcccctcccccgacacccatttctccacccaacctgtccacctctgagaacagccgcgaccggcttggtattctgccccctcccttttgtttgcaagggattcgtaccattcccgacttctttcgcctcctcctcccctttgtcccctagggctgcagcgcctgggctcctgggacacctaggccctgtgggccgattactaaggtggaagggaccgacctctccctggcaggtgctctatttccgcgatgagagggggagaggctgggagccccgtcgccaagccgaaagggatggaaagcgcctacctttgtcctttccgttcccctccccccatgctccttcagtgcctcaagatcctgaagggaaagaagagagagcctgcgaccttttccacgaggctcttctgatcgaggacagaagtgcagggaggtaactcacaggagagagagcttgttggtctgaggtaatgagaaagagggatgcaaatggacactttgagtcatttctctccttgtttggttttcagcttactgatcaggaacgcaccttagggatattgtttttttatgatttatgtgtgtgctgttcgctttccagtacagagctaaccgtctgatttttattagcaactaatatttgtgcatttcatgcccacaacttagacaacacaggttctgcaaaggaaatggtttttcttgcgtatttgtgtgtgtatgttgtaggagaaattgatgtttctttcggttttgctctctgatgttgggcacatggaaacaatactgtgaattgtgtgtggtgggggtatgctggatactagtgactacatatttctatgacttgttaggggaatgcaactggcttgcataaaaagctgcaggttgtccagggtaaggggattcctgcagtgtttattgctctctgagcatatttctgagagtttataatgtaggttgaggtgctgttttatgctagttctttctactacttgccaaataaggcctttcttctcttaggatttaggtgaaccactgttgttaaggctctgccaccccaatcaatcttacttcctcctttggtttggtaaatccagcaagtccccaacatgcaaaagcttttttttttttccccttttgaaaacagatccctggagactggtccagagggactgtcaagcattctgtgttgggctctaaattttctttggtaaagtgctagtttttaaaaataaggactccatgttgatcaatttataaacaagtgtggttcttcagaggattacatcacggtgggtatttacaaaatgaataatccaaatacatgtatgttggttggcaagagaccttgcatgtgattggccaagtaagtgttcattacttgaatttttttttcttcacgtgaatgtgagagctggaaaggatcaagtggtccaattcttcattgtgcatactgaaacaatgacaagagagccaagatataacttgtctaagaagggaaagttgctgaaggtcagcatcagagggtcagcaaatcagcttaatcctgaggtctaccagttgggacagaccatgcttgtgaacacctgagggacctaacacctagttaaaagtggaggagcaacaggaaggatactggggaattaacagaggacagactaggaagagtgtaagggaaagaaagatggatgtggaggggaaggttagagtgatctccatggtggcctctgaggcacctttgccaaaccagtgcagcctttagcatgagagatttaaaaaataggtttgactaatagaacaatcagagtaagacaatttgtctcctttttaaaatggtgttattgagaggtaagtcatttaccatacagtttcctcatttagatatatatttcagtgactttaggtatagttgtgcctccatcaccacagtacgttttaggactttttttttttttttgagacggagtcttgctctgtcgcccaggctggagtgcagtggcacgatctcggctcactgcaagctctgcctcccaagttcaagcgattctcctgcctcagcctccccagtagctgggactacaggtgctcgccaccacgcccggctaattttttgtatttttagtagagacggggtttcaccatgttagccaggatggtctcaatctcctgaccttgtgatccgcccgcctcggcctcccaaagtgctgggattacaggagtgagccactgtgcccggcctaaaactttttgtgtgtgtgtgtgagacagtgtcaggctctgttgcccaggctggagtgcagtagcacgatctcggctcactgcaacctctgcccctcaagctcaagccatcctcccacctcagc

SEQ ID NO: 1888745 - DNA, 4001 bp, Homo sapiens
gcaccctcccacaacgcgtctccctcggctctaacaataggagtcagtcggccacgcctgcgtcataaagcctgggggcgggcccagccggcgacgggaggcggggaaaagcgacgcaaagagtcgcggcgccatttgctgccgccgagcgtggacgcaggcggatctctgaagagctgggtcgccagcctctcccgcgcacgttgcctggcctccagcacctacttggtcccgcgcgctccctcgtgtcgcccctcggagcagcagccgccgcggtcgccgctacccggaaagaagtcagagacgccgcgaggtcgccgccaccgccatgcccaagaataaaggtaatgccgcccggacccccggaccacggctctgctcggccgggtctcccaggtcctgcccgtagattgcaggtcacccaggccgcagtgaccctttttccttcccgccctgcctgcccgcggctgggcgccccacacgcgactctgagctcgggagaggagctgggaagttaactcctgttgcccagtttggtcacattggggtggagccggcgccatttttgtagggcctcctgcgggagaatgtgggcttttgctcctgattcgcgccagactgaccgctgctcggtggggacggtggcgggaaccttccccggggcggcctaggtttagtagataggcccctttggccttcccgggcatgaggggttataatccctggaagccgttctgaactttcagagtgctgtctgcattcgtgagcaccaggtactcctgcatgggtttctttatggacagttcagtattgttgaggctactcgctgtcccttgtgaacagtgggtgaaaccttgatacatttctaaggctcacctctagagatttactctctccatccctttacaggatatagcttatgtttgtttgctgaagacttattccatattgagccaagttttctacttttgcttcagatgatgcatatgttgtgagaataaagacctaatttaagtgtcctccattctgaggctaagcgttcacaaatgatcagacttgaggataactttatttgggatttccaaaacggaaggcctaatcttaaaaaaaaaaaaacaaaaacaaaaaacagaacactcctaaagaaattacttttatagatttacagtgttcctgtcatttttaatagccgtataacttgaagaaaattgtgcaagtaaatatagggaaaatactgtattttcctacaggagaggagcatacttcatagtccgtaagtagtctcctttgattattcattctagaggaaaccctcccctgacacaggcctacttctgctctcttttctacttgacagctggctccagggattctaccacatttcctctttgtagctgtcacttattactttatcccttagggtacttggtcgaggtgttctgtgcacaagttggtgcagtcactgctcattattttggaaaagatggagttataaacaaaaaattttaaagtcttacagttttcttctgtataatcctttattctctctgaggtggtaaggggatcacttccatcttattctcacctttatttctagtaataagatttccaattcttccaccaggctgtaagctctacaaggcaggaatagtatctgtcttaatctcattggattgccagcacttgacaattagtagatgcttaataaatatttgttggtttaagtcacctacctcctgtcgactccacccttagtgaataataggttctgctttggttccaaggggataggacttctacactaaatcacatctagttccctagcctcatgtcttaagaaagagcctctctgggaatttctccaaaacaactctggtttaaagaatgttgatgtcactttaattgttgtacactcagacctagtctcattcattcaacagagaatttaaagaacatcccattacatggcaataaaatacaaaggggagtgatccgggtatggttaattctggtaaattgacaagtaattagtcttttcttaaataacatttgaggcatacaaaaaatacagctaacatgatatacctgggaacccattactctgaatttaagaattacagcgcagattgaggtaaagccctaatcaccttttactctctttttggaggtaatcaccaggctgagtttggtgtttatcattcctgtactgtctgaaaccaatcagttcttagttatcttacttagaggaatggtacttttcatgacctaatttaagtgtcctccatttttttttgctgcttccaagctcttcccatgagtctcttagggtcattaccacttacagcctttttcctgccttttggaaatggctgccaatgtggtttcctttctggaatgggagcaaaatgctgtggagaggtaagcttatgtgggggctaggggcaaaaaaaacattgtgactttggtcaccccagcttactgactgtaatcagtgaactgatttactcactgaagctaagcgacttacttaacttctctgagcttcagggaactcatgggtaaactgggaataaatgaatgttatgacctcatggggtgattgtgacaagtaaatgggcagaattattgcatagtggttaagagcatggtcactggggtcatataatagaaacagggatgttgagtagggaccagcattataaaagaaagtaaattgggtaccgaacagatcttctttattttttaagagacagtgtctcgctatgttgcccaggctagcctggaacctcctgggcttgctcaagtgatcctcccacctgagcctcctgagtagctgagaccctaggcgcacaccactgcacccagtgagatttcaatatttatggtactctgctaccaaaagtttgaaaaccacagttctctgtccagacactgtcttcacttaattttgaaagtatcgggttccttgcatagggcctggctttagaagacacccaagatttccgcttagaagaatatgtatagaattgcatttttatttcaaaaggatgggtgctaaagtgaaatgtttttctatattttttaacataatatctgctatttatgtgtattttatgtcagaaaaatccccaaaggaaattccaagaagggtagggaggtgataatgtgttaatgttgggattggagattgtaaatttaatatgattgtgtagctaaaatagatgaattttttaatttaagtgatcttttaaaaaatggttttataagccttaatttcattttatttcatactgttttacagataattaatgtcatttacctccttttcttttttttaaaccatcaggtaaaggaggtaaaaacagacgcaggggtaagaatgagaatgaatctgaaaaaagagaactggtattcaaagaggatggtcagggtaagtgttttcataaattacgctttttaaaataacatcctttcttttttagctggggactttatttttttgagacagcgtcttgcccatcgcccagggtgaagtgtggtggcacgattacagcccactgcagccatgacctcctgggctgaagcagtccttccacttcagcctcccgagtatttgggactacaggcacacaccaccacgtctggctaattttaaaaatttttttaggctgggcgcagtggctcacgtctgtaatcccagcactttgggaggccaaggcgggcggatcacgaggtcaggagttcgagaccagcctgaccaacatgatgaaaccccgtctctactaaaattacaaaaattagctgggtgtggtggcacgtgcctgtaatcccagctactcaggaggctgaggcaggagaattgtttgaacctgggaggcggaggttgcagtgagccgagatcacaccactgcactccagcctgggtgacagagggagactctgtctcaaaaaaaaaaaaaaaaaaaaaaaaaaaactgtatagagatgaggtcttcatatgt

SEQ ID NO: 1888746 - DNA, 4001 bp, Homo sapiens; identical to SEQ ID NO: 1563534

SEQ ID NO: 1888747 - DNA, 4001 bp, Homo sapiens
tagcgggggctgctatacaactccccacacttcacaaaggctttgggccttgcctgctgtctcccttgcctggacggcctccagaaccaaaacccaagtttgcccaggtcggccagcgtcctcgggaaataagcagcttcagtggcgtacttcttcttggattcccacttcctctcaggttttgctctcttgttggttctcagctgttttgaacagtctcaaactgtttcatctatcatttgcagttattttcagcagaaatatctgtctcaataataccacccagcatcaccagaaacagatggcaggtcttgcagtgctttcggggatggacagacagaccaccctgaccaccgcccgctaggtgcgggagaagacttatttccagctatagcacacatttgtcgactttggctctcctagactgagaaagcaaatctcaccccttcccctcaggcctgcgacactcggaaccaacgcgaccgatggaatccctggatctccccgcttcctgtgaccgctgagttctgttcctccaagggtacaatgacatccatcagctgcctgccccctgctgacacactttctgtttgagggtttccctctcaatgactatagagaaagcaacctgggccgggtagaagagcagctgctagtctcctggttggtaccaaccctgggtctctgaggaaaggacagagtagggtcactctgcttcacaacacaaagtcgcccattctccctgccagttctcaagcctgtaatcccagcatttggggaggcccaggtgggaggatcacttgatttccaggagttcgagtccagcctgggcaacacagtgagaccctgtctctactgttaaaaaacgtaaggaaggaaggaaggaaggaaggaaggaagggagggagggagggagggagggagggagggaggaagggaggaaaggaaggaataaggaaaaaaggaaggagggaaggaaggaagggaggaaggaacgaagaaaggaataaggaagagggaaagaaggaaggaaggaataaggaagagggaaagaaggaaggaaggaataaggaagagggaaagaaggaaggaaggaataaggaagagggagtgaagtaaggaaggaaggaataaggaagaggaaggaaggaaggaaggatgaaaaaaaggtcacctgtcaaacatagctttaggagaggatgtaaatgttcaatgttggtcttcttctgtgtcttcatttgcattttcatgggagcttacaggaggcgcccaggtgtcttagacaacatttttaaaataacgacttgaggtttaattcacatgctacacaattcacatgtctaaagtgtacaattcgatggtttttagtatattcatagatacgtgcaaccatcagcatgaccagcttcaggacattctcatcatctcaaaaggaaactctgtctccatcagcagtcactccccgttttcccccaactcctccagccctgggcaacaaccaatcgactttccttagacaacgttttgagcccttattgggaggaattatagtcgaatggaaaatccagtttgggacgtggtgtaaactggaattgctttcgtggtttttccttgtgccttgggtggggcactgccgtaagagcattgcatccatcctttcgtcggtactctgctgcacacggatggcatttctgcccttgttacagatgaggaaactgaggctcagagacattaagcaaggggcagagtggggcttgtccatgagaccccagagtctgtgctcttgcacatacattatcaggccaacatgatctatccatccgaattccaaataaataaataaaaatgcttataagaagtccccccatgctgcggggaggcagcggctcatgcctgtaatcccaacacttagggaggcacaggtgggaggattgcttgaacccaggagtttgagaccagcccaggcaacatgacaatacctgcatctctgcaaaaacgaaaaaaaaaaaaaaaaaaaaaaaaaagacaaaaagaagtccctccaagttagtcgccatgctctctaccatgggttttctgtgttatccctatcacatgcatacagtcatttctaccaagcaccatttatggtgacagggtatggtctacaaaaatattgacagagaaatcctgatggagctcaagacaagctcaggccaccaagaaatgtgcaccgagtgtagctgtgccgagcatcgttctagggcaggggtccccaaccccccggccacggaccgatactggtctgtggcctgttaagaactgagccacagagcaggcggcgagtggtgggcacgcgagcgaagcttcatctgtgtgtacagctgctccccattgctcgcatgaccgcctgagctctgcctcctgtcagatcagccagcggcctcagactctcacaggagcgcaaaccctattgtgaactgtgtgtgcgagggatctaggttgtgtgctccttaggagcatctgactaatgcctgatgatctgaagtggaagagtttcatccccgaaccgtcatcccacgccccatccccgtctgtggaaaactcgtcttccacaaaaccggtccctggtgccaaaaaggttggagaccgctgttccgggggatggtgcctgactgagctggaggaggcctctgctctccctctggtggaaggagagagaaaacaaagcagaataaatgaggccgtttggactgccaagctgggagttaaaacagtgcagtgtgatttaggatgaggactttaagatgaagaaggtgatacgcttagaactgttgaaagtttaaacttagagctgaatgagaaaaagaaatcggccatgcaaagatgaggggacaacaaggacaagcgccgtgtgttcgaggaagggccaagaggccagcgtgtgtgaggtgcggccggcatgtggtgcggctgggtgcagcgggccagcaggagagggacataacgtgacgtcccagcggcatgagggctctgcgagccaggctgaggatgagttcaggtttccagggcaactgaagggcatggcagggtttcagcaaaggtttaccagatgacactggctgccatgtggagagtagatcacagggagcccacgctctccagtgtgaaagcagcaaggaggtcactgtgatagtgtaggcaaaaggtgaagggactcaggagtttggatcatgagaggaagaggaatccgttttggtttaagcaactggggatgagggaaagggcagagttggcagggggtgggggctaaaagtccatttctggcttggacgggctactgggctcattttcgtgaaggaacagatcaggactggaagacagaaatctgtcatcagcatcaaggccttgaagatggacgaggtcacaaaggggcagtgtctgagcaaggagaggaagagaattcgggagtcagctcggagacacaggaaccagcaaggagcctgcgaagcagctgccaggacgtggaaggagaaccaaggggtctgaggaggagaaaatgatggtgctcggaactgcagaacctctcggcaggcacactgcactcaaacccctgcccgaagacacccggccaccacctcgcggggcctctgggagcctaaggccgcgcccctgggacgccccagcccccttttgagtgagttcccgtctggaaacgctcagggctgcccagagcatgtactgtctgttccggccaacacctgacctccctttctgacagcatttactacaaagggcttaccctgtccctttgagacatctgtgtagcacccacaacccaggggctttcccgagggccccgcagccactccttggaaacggaaacctcaggaggcgcggggcccagtctcccagtctccacgggacggaagcatcccaaccttggtaagcaccggcagctcccacacacggctggcctcgcggcaaggacgctggctgccccgtcatctttcacctgagcc

SEQ ID NO: 1888748 - DNA, 4001 bp, Homo sapiens
agcgggggctgctatacaactccccacacttcacaaaggctttgggccttgcctgctgtctcccttgcctggacggcctccagaaccaaaacccaagtttgcccaggtcggccagcgtcctcgggaaataagcagcttcagtggcgtacttcttcttggattcccacttcctctcaggttttgctctcttgttggttctcagctgttttgaacagtctcaaactgtttcatctatcatttgcagttattttcagcagaaatatctgtctcaataataccacccagcatcaccagaaacagatggcaggtcttgcagtgctttcggggatggacagacagaccaccctgaccaccgcccgctaggtgcgggagaagacttatttccagctatagcacacatttgtcgactttggctctcctagactgagaaagcaaatctcaccccttcccctcaggcctgcgacactcggaaccaacgcgaccgatggaatccctggatctccccgcttcctgtgaccgctgagttctgttcctccaagggtacaatgacatccatcagctgcctgccccctgctgacacactttctgtttgagggtttccctctcaatgactatagagaaagcaacctgggccgggtagaagagcagctgctagtctcctggttggtaccaaccctgggtctctgaggaaaggacagagtagggtcactctgcttcacaacacaaagtcgcccattctccctgccagttctcaagcctgtaatcccagcatttggggaggcccaggtgggaggatcacttgatttccaggagttcgagtccagcctgggcaacacagtgagaccctgtctctactgttaaaaaacgtaaggaaggaaggaaggaaggaaggaaggaagggagggagggagggagggagggagggagggaggaagggaggaaaggaaggaataaggaaaaaaggaaggagggaaggaaggaagggaggaaggaacgaagaaaggaataaggaagagggaaagaaggaaggaaggaataaggaagagggaaagaaggaaggaaggaataaggaagagggaaagaaggaaggaaggaataaggaagagggagtgaagtaaggaaggaaggaataaggaagaggaaggaaggaaggaaggatgaaaaaaaggtcacctgtcaaacatagctttaggagaggatgtaaatgttcaatgttggtcttcttctgtgtcttcatttgcattttcatgggagcttacaggaggcgcccaggtgtcttagacaacatttttaaaataacgacttgaggtttaattcacatgctacacaattcacatgtctaaagtgtacaattcgatggtttttagtatattcatagatacgtgcaaccatcagcatgaccagcttcaggacattctcatcatctcaaaaggaaactctgtctccatcagcagtcactccccgttttcccccaactcctccagccctgggcaacaaccaatcgactttccttagacaacgttttgagcccttattgggaggaattatagtcgaatggaaaatccagtttgggacgtggtgtaaactggaattgctttcgtggtttttccttgtgccttgggtggggcactgccgtaagagcattgcatccatcctttcgtcggtactctgctgcacacggatggcatttctgcccttgttacagatgaggaaactgaggctcagagacattaagcaaggggcagagtggggcttgtccatgagaccccagagtctgtgctcttgcacatacattatcaggccaacatgatctatccatccgaattccaaataaataaataaaaatgcttataagaagtccccccatgctgcggggaggcagcggctcatgcctgtaatcccaacacttagggaggcacaggtgggaggattgcttgaacccaggagtttgagaccagcccaggcaacatgacaatacctgcatctctgcaaaaacgaaaaaaaaaaaaaaaaaaaaaaaaaagacaaaaagaagtccctccaagttagtcgccatgctctctaccatgggttttctgtgttatccctatcacatgcatacagtcatttctaccaagcaccatttatggtgacagggtatggtctacaaaaatattgacagagaaatcctgatggagctcaagacaagctcaggccaccaagaaatgtgcaccgagtgtagctgtgccgagcatcgttctagggcaggggtccccaaccccccggccacggaccgatactggtctgtggcctgttaagaactgagccacagagcaggcggcgagtggtgggcacgcgagcgaagcttcatctgtgtgtacagctgctccccattgctcgcatgaccgcctgagctctgcctcctgtcagatcagccagcggcctcagactctcacaggagcgcaaaccctattgtgaactgtgtgtgcgagggatctaggttgtgtgctccttaggagcatctgactaatgcctgatgatctgaagtggaagagtttcatccccgaaccgtcatcccacgccccatccccgtctgtggaaaactcgtcttccacaaaaccggtccctggtgccaaaaaggttggagaccgctgttccgggggatggtgcctgactgagctggaggaggcctctgctctccctctggtggaaggagagagaaaacaaagcagaataaatgaggccgtttggactgccaagctgggagttaaaacagtgcagtgtgatttaggatgaggactttaagatgaagaaggtgatacgcttagaactgttgaaagtttaaacttagagctgaatgagaaaaagaaatcggccatgcaaagatgaggggacaacaaggacaagcgccgtgtgttcgaggaagggccaagaggccagcgtgtgtgaggtgcggccggcatgtggtgcggctgggtgcagcgggccagcaggagagggacataacgtgacgtcccagcggcatgagggctctgcgagccaggctgaggatgagttcaggtttccagggcaactgaagggcatggcagggtttcagcaaaggtttaccagatgacactggctgccatgtggagagtagatcacagggagcccacgctctccagtgtgaaagcagcaaggaggtcactgtgatagtgtaggcaaaaggtgaagggactcaggagtttggatcatgagaggaagaggaatccgttttggtttaagcaactggggatgagggaaagggcagagttggcagggggtgggggctaaaagtccatttctggcttggacgggctactgggctcattttcgtgaaggaacagatcaggactggaagacagaaatctgtcatcagcatcaaggccttgaagatggacgaggtcacaaaggggcagtgtctgagcaaggagaggaagagaattcgggagtcagctcggagacacaggaaccagcaaggagcctgcgaagcagctgccaggacgtggaaggagaaccaaggggtctgaggaggagaaaatgatggtgctcggaactgcagaacctctcggcaggcacactgcactcaaacccctgcccgaagacacccggccaccacctcgcggggcctctgggagcctaaggccgcgcccctgggacgccccagcccccttttgagtgagttcccgtctggaaacgctcagggctgcccagagcatgtactgtctgttccggccaacacctgacctccctttctgacagcatttactacaaagggcttaccctgtccctttgagacatctgtgtagcacccacaacccaggggctttcccgagggccccgcagccactccttggaaacggaaacctcaggaggcgcggggcccagtctcccagtctccacgggacggaagcatcccaaccttggtaagcaccggcagctcccacacacggctggcctcgcggcaaggacgctggctgccccgtcatctttcacctgagcct

SEQ ID NO: 1888749 - DNA, 4001 bp, Homo sapiens; identical to SEQ ID NO: 1888747

SEQ ID NO: 1888750 - DNA, 4001 bp, Homo sapiens; identical to SEQ ID NO: 1888748

SEQ ID NO: 1888751 - DNA, 4001 bp, Homo sapiens
tttccctacattctggagaactaggcaaatacaagcagagagcggttgtaattttgtgcaacagacactgaccggctttttattttatctttttatatttgggggagggggggaatgattgtactggtaaagtctctcaaacctccaaagaacagcttattccaatgctataataagttacaggcataaaatgatatactctcccaatttcttttatgaaacagcaaatctctcctgctaaaaccgaaacagagaacaataaaacatttgaccaacgtcattcatagacctagatgttcaacttaagtactcaatcaagtgtctatggaacaaaggattttgaaaaaaatgcttaggtatggcgtttgtttcaactctgatataattctgtcatcatgtagttttaaccagtttatttcctgtaaaatgatcatcattataaaagaaagttaattaaggcaaacaaaactttgcagtatgcaaattgaaagctaaatcactgagaaagacaaatagaactggaacacagataccatgggcggcaggttctccctaaccccactctacccctcgactcttgaaaagtcaggaccccagcacccactgctgtggggcccttttgactacccacagcaaaacaaagtgaagactcagccccagccttcactgctggcaggaggagtccctgacactagcctgagattgcaaccacactggcactgtcccaggtactgatacttgctccagccatggctctagccctggcactggcaactggcacttgcattggtgctggtgctgatgcttgcttcagccatggcataggccctggaactggaactggcactaacactggcacttgtcacgtcaccaacggcagctgccatctcgggcacggggtatctcctcctcttctctcaatgcctcatttactgccacggaaaggaactggggtgggtgtcattcactttggccacaaactccgggacttccatctgtcttgtttcctttgagagcccccacaagaatacctagagcgtgggattgctgtgggacacctatttgtgcaccagatactcctgctgcacactagctttggtgatgagcttcatggactccccaaagacgaaatgctttttagacgaaatgtgcctccaacaccctcaacacctcccagaccacctcctcggggacacagctggcctgcatgaagatcgagtccagagtaatcatcaggagccgggtctttggtgtgccctggtcgcctgtcaggccccaaaccagggcaggatcgatttttctgatcaagacataggagtgctctgctggatcaagttccttcagatagaacccaaagactaactcggggaggtcagaggctttcttgaaaatctcagggaggaagctcctgtaccttttgatgacatacttcagcatgtctgcccttttgatcgccaccgtcttccggttcttaaccagcaggtactgcaccagctcagctactttctagctcacagggcccctgggcatgcgcatcagggatgtcgggggccggaggggtactgcgggggcggggggcggcgggggcgcggggcggggcagacagttgcctaggggtttctggggtccacaaaggaactttcagaagcacctgagcaggggctccatgcctcagaagaagtgctcccagggctccggggagcacttggtgtccccgctgcaggcgcccccgtgggggtttcttgggcaaggaggagaggagcaggccaccgggcctctgagacccgcaggccctgggtgtcacctctaccgcggacgttctcacctgcggctttggctggcccaggaagcaggaactctgggaagagatgcgcgtccacgggcattcggcggccggagcgctgtgtgccaggccgagaggacagtgacgtcgccgcggctgctgcggcggctgctaagaagacccggagccccagggtcttgagtcggagaccgccgccctcagaccgggaggaggaggagaaggaggaggaggaggaggaggaggaggaggagcaggaggaggaggagcaggaggaggaggaggaggaggaggaggaggaggaggaggaggaggaggaggaagaagcgggaggggagggggctaagcctccgccgcccgggtcttcccggagctgtgggaatgggcgggcgccgccccgcagtgcctcttctggcagaaaacagtaccgcaggctacagcctgagggatgcgggggcgctgctcccagaggtggggctgctcatgtgaggcttgaaagagaccataagcctaaaagccaggcccagtgtaagcgcttaataactgttacctgttgttgtgatgaatccgatcattctggattatcttcgtatccctccttctctcctgtggagaaggctcctaagagcgtaggcatttctgtccagcggctgcctctgcagcttcctcttcagatcatctacctgaagttgctttgctcagtgcctggcctagagtaagcacttagtgagttttcctttgcgttcgtttcattattatagtgtacatcgcatctacattgcttgcaccctgtgtggtcatctagatgtggaggaaggacccgggaaacaagtgacctccatggagaactgaagatgtgtttccttttctttatgatcagtggatctggggtgcacaacatcagttctcttgcgtattctttctctcctacacagtctggaaagttattgttaattgtaatctaactttgcaaaccaccattcccataatgacatcctcttcttgcctctcttactctcatgtcactgcgcctcatcctttctctacagagcgctctctcccatttcacctctcatctgcgattcggggaccttaaatcgactcctgctttgaggtcagcccctaggaagcctgcaaataaatagcaagaagactcctccaccctagcaagtgcattctcttattgtatcgtggtacaacttagcattcctttctttcatcctaacctttctagacagtaaccagtatagcctcctcacacataacaaaacggtcgacgtcgtcgtcgtcgtcgttgttgttgttgttattgctgctattgagacggagtctcgctcttgtcacccaggctggagtgcagtggtgcgatcttggctcactgcaacctccgcctcctgggttcaagcttctcctgcctcagcctcctgagtagctgggattacaggcgcccgccaccacgcccggctaatatttgtacttttagtagagacggggttttgccatgttggccacgctggtcttgaactcctgacctcaggcccgccctcatcggcctcccaaagtgctgggattacggtcgacttttatacagcaattgttatacctcgaaataacacgtactaaatttccatataatgtccacgcttgcacttcaaatttcttccattgatctaaattctgttgttgctaattctgctataaagatttagaaattgtttttgtgtgagtagaactaactcccccctcactattcttcttttacaaaatttcttcaaaatattttggaaaatgtcgtcatctgtaagaacttcaaaatcaaagttttcaagttaaaaaaaattccctggcttgaattttaactagaatttcttaggacttatagtttactatgagaataattaacatctcattaacatgagaagatggagggtcctcagccacaaaatatagcatgttcttcatgttcttccattgattctgctctttaatcagggtacttcaatcaccttttagtttgctttatatagcttttgcataattcttaagtttgtccatggcagtctttttagtttcattgctgctatgaattgtgtatttcccattatgtcttctaattacttatttctgacatataggaagcctactggttttgtatactttggggcatacggccatcttaatatcccctctccttaattag

SEQ ID NO: 1888752 - DNA, 4001 bp, Homo sapiens
ttccctacattctggagaactaggcaaatacaagcagagagcggttgtaattttgtgcaacagacactgaccggctttttattttatctttttatatttgggggagggggggaatgattgtactggtaaagtctctcaaacctccaaagaacagcttattccaatgctataataagttacaggcataaaatgatatactctcccaatttcttttatgaaacagcaaatctctcctgctaaaaccgaaacagagaacaataaaacatttgaccaacgtcattcatagacctagatgttcaacttaagtactcaatcaagtgtctatggaacaaaggattttgaaaaaaatgcttaggtatggcgtttgtttcaactctgatataattctgtcatcatgtagttttaaccagtttatttcctgtaaaatgatcatcattataaaagaaagttaattaaggcaaacaaaactttgcagtatgcaaattgaaagctaaatcactgagaaagacaaatagaactggaacacagataccatgggcggcaggttctccctaaccccactctacccctcgactcttgaaaagtcaggaccccagcacccactgctgtggggcccttttgactacccacagcaaaacaaagtgaagactcagccccagccttcactgctggcaggaggagtccctgacactagcctgagattgcaaccacactggcactgtcccaggtactgatacttgctccagccatggctctagccctggcactggcaactggcacttgcattggtgctggtgctgatgcttgcttcagccatggcataggccctggaactggaactggcactaacactggcacttgtcacgtcaccaacggcagctgccatctcgggcacggggtatctcctcctcttctctcaatgcctcatttactgccacggaaaggaactggggtgggtgtcattcactttggccacaaactccgggacttccatctgtcttgtttcctttgagagcccccacaagaatacctagagcgtgggattgctgtgggacacctatttgtgcaccagatactcctgctgcacactagctttggtgatgagcttcatggactccccaaagacgaaatgctttttagacgaaatgtgcctccaacaccctcaacacctcccagaccacctcctcggggacacagctggcctgcatgaagatcgagtccagagtaatcatcaggagccgggtctttggtgtgccctggtcgcctgtcaggccccaaaccagggcaggatcgatttttctgatcaagacataggagtgctctgctggatcaagttccttcagatagaacccaaagactaactcggggaggtcagaggctttcttgaaaatctcagggaggaagctcctgtaccttttgatgacatacttcagcatgtctgcccttttgatcgccaccgtcttccggttcttaaccagcaggtactgcaccagctcagctactttctagctcacagggcccctgggcatgcgcatcagggatgtcgggggccggaggggtactgcgggggcggggggcggcgggggcgcggggcggggcagacagttgcctaggggtttctggggtccacaaaggaactttcagaagcacctgagcaggggctccatgcctcagaagaagtgctcccagggctccggggagcacttggtgtccccgctgcaggcgcccccgtgggggtttcttgggcaaggaggagaggagcaggccaccgggcctctgagacccgcaggccctgggtgtcacctctaccgcggacgttctcacctgcggctttggctggcccaggaagcaggaactctgggaagagatgcgcgtccacgggcattcggcggccggagcgctgtgtgccaggccgagaggacagtgacgtcgccgcggctgctgcggcggctgctaagaagacccggagccccagggtcttgagtcggagaccgccgccctcagaccgggaggaggaggagaaggaggaggaggaggaggaggaggaggaggagcaggaggaggaggagcaggaggaggaggaggaggaggaggaggaggaggaggaggaggaggaggaggaggaagaagcgggaggggagggggctaagcctccgccgcccgggtcttcccggagctgtgggaatgggcgggcgccgccccgcagtgcctcttctggcagaaaacagtaccgcaggctacagcctgagggatgcgggggcgctgctcccagaggtggggctgctcatgtgaggcttgaaagagaccataagcctaaaagccaggcccagtgtaagcgcttaataactgttacctgttgttgtgatgaatccgatcattctggattatcttcgtatccctccttctctcctgtggagaaggctcctaagagcgtaggcatttctgtccagcggctgcctctgcagcttcctcttcagatcatctacctgaagttgctttgctcagtgcctggcctagagtaagcacttagtgagttttcctttgcgttcgtttcattattatagtgtacatcgcatctacattgcttgcaccctgtgtggtcatctagatgtggaggaaggacccgggaaacaagtgacctccatggagaactgaagatgtgtttccttttctttatgatcagtggatctggggtgcacaacatcagttctcttgcgtattctttctctcctacacagtctggaaagttattgttaattgtaatctaactttgcaaaccaccattcccataatgacatcctcttcttgcctctcttactctcatgtcactgcgcctcatcctttctctacagagcgctctctcccatttcacctctcatctgcgattcggggaccttaaatcgactcctgctttgaggtcagcccctaggaagcctgcaaataaatagcaagaagactcctccaccctagcaagtgcattctcttattgtatcgtggtacaacttagcattcctttctttcatcctaacctttctagacagtaaccagtatagcctcctcacacataacaaaacggtcgacgtcgtcgtcgtcgtcgttgttgttgttgttattgctgctattgagacggagtctcgctcttgtcacccaggctggagtgcagtggtgcgatcttggctcactgcaacctccgcctcctgggttcaagcttctcctgcctcagcctcctgagtagctgggattacaggcgcccgccaccacgcccggctaatatttgtacttttagtagagacggggttttgccatgttggccacgctggtcttgaactcctgacctcaggcccgccctcatcggcctcccaaagtgctgggattacggtcgacttttatacagcaattgttatacctcgaaataacacgtactaaatttccatataatgtccacgcttgcacttcaaatttcttccattgatctaaattctgttgttgctaattctgctataaagatttagaaattgtttttgtgtgagtagaactaactcccccctcactattcttcttttacaaaatttcttcaaaatattttggaaaatgtcgtcatctgtaagaacttcaaaatcaaagttttcaagttaaaaaaaattccctggcttgaattttaactagaatttcttaggacttatagtttactatgagaataattaacatctcattaacatgagaagatggagggtcctcagccacaaaatatagcatgttcttcatgttcttccattgattctgctctttaatcagggtacttcaatcaccttttagtttgctttatatagcttttgcataattcttaagtttgtccatggcagtctttttagtttcattgctgctatgaattgtgtatttcccattatgtcttctaattacttatttctgacatataggaagcctactggttttgtatactttggggcatacggccatcttaatatcccctctccttaatt

SEQ ID NO: 1888753 - DNA, 4001 bp, Homo sapiens; identical to SEQ ID NO: 1888751

SEQ ID NO: 1888754 - DNA, 4001 bp, Homo sapiens; identical to SEQ ID NO: 1888752

SEQ ID NO: 1888755 - DNA, 4001 bp, Homo sapiens
caaaagaatattgctaacagggttaaatgagtgctaatggctgaacgtttgccaaatgcttacttctgcgatagtataaatatggattattaaagttgtctactcaagtataaaatatatgcaaaactctcataggcaaaatgttcaaaggccgggaaaaaccttttttttttttttttttttaacttttacgagaaagtgcaactgcagggtctcttgaatgatcttctagacagttccgcagaaaattagcagtttggctcagaaagtagagttcctcaggagaaattaaagttcttcctagaagaatacaaagcaacgtttcaggcagctttctgaaaataaaccattagcttatgcctacacagcgagacaaactggaacgtgtaataatgaaggctttcacatttgtcgtgatgtgcttttttcctcttaccccaggacctctagctgttctgtaatgttacataaagtagttatagcacttcgtccagcactgacagcaggcaggaagctaatcagcgaggagaaaatcggaagtgtgttcatgtgtttcattgtttttcaggtcaaatctcaatacttgcaaataaatcattaaaaagatataacagtttctctgttattttcaggacttcatgtagtgagtgggtaatcagagtgaaagagggctttctatcagtcatcagtgatacgttctgtcacacagtcagattttcagcatttgttcggctgctgctagatgataaaggaagttttctgttgctggtggaaatcgtttttgctttagcgcctccaaattaaggactctcttttctccatcagccgaaacttctgaaaacggtgctaggttggtaaagatttctcttgtttttagagcaatatcctgtataacctggctctctgatttctctggatcttctgcagactgaacaattagctgacccatttctttgtgcagtttgcccattgccatggcctcttttgcaaggggagcaatggtaatctcactctctgccagattcacaaacacatcatagaggtctggtctgttgctcacctccaagtctacaaatccagcgacgtaacctgtgcacatctgcagggcttccagctcatcggcgttgaggtgcacgtaagagtgaaggatggtccagtcctgtcggtgccacaccagggcaggcagagtcctggtgaactcctggaccgcttctatcttggggtgatacaccacaattcttttctttagcatcagtgctgtgtgtaagataacagtttccattccaaactgagatacaatgtctttgatggagccagccgggtaggcctttcgggcatcaaaatccttactaaggaaagagccgttttcttcactctggcatatcccctttgtgagaactgcaatataactctccatcattttaactgggctcccatgtttcaggtacattctacacaatatcctagtgaaggcagcatacttctctgggttaaaatctttggcggtcaggacaatagaaaaatgagtcacctttttcaaaatggaagaatctggaacttcaattattgtgatataaaaccatgttcttctgtactgaccaaagacaaagggatggagaagtttgttttcatctgtaaggcagcattttctcagcagcaggttccttaatgtggctgtcgtggaaggataacaccacacccacagaacttctccatttgtgtccttttcgatcagcccgactccaagcatcagctgagtgtccgccaactcggccgcagccatcttccgccgccgcggcgcgcagctctaaaggtaattttctttccttcccatcacacgtctctaccccagggtctctcaactttggcactattaacatttggggccacagaatccattgtggagggccatcctgtgcacggtaggatgtttagtagcatccctctacccatgccagaaacacaacacccatcatttgtgacaatcaaaaatgtctccagacattttcaaatgtcccctggaggacaaaattacctcccatcgagaaccactgcctgtcatctcccatttcctccgccacaaccccatatgtagatcggcatatggctctcctcttattgggcatggaaggatgaatagaatctatctgggatacttttgtcatccccactattaaaaataaatgtttcattatgtttctttaagcaactccctcaaagagaaagaaaatgagtgacactcccatgggtcagaaaccacaccaaggacaaaaatttaattgaaatgttatcattagaaatgagtaatttgtggaaagactggatttggtaatgacctgcttatcatgcagataaatcctctattctcgtctatcaaatgatggattttgagtaattctcaccaacagtgctacagcttctattgccatctgcattagatgccctaactactcagttggtgtcactgcctccacactcccatgagcagggcagcccacattttgcagttgacaactctccaagcatgatcagagccctgagttttccacagcccctgcttctgatctctcctctgtacttccccattcccaacaagattctgaggtatttttttcagcctgtgcatcactagctgctgctactgctgctgccacccctttctcagcagttccacctcctacggaagttttttacctgcatctcacttgttccacctggagaactatccttgcagattgctgaatggaaccacagcactagggacctagtgaggaccaagacatgggtcttgctcaaaaccctgcccttcctttgacttgggacctttcgggcccaaaagtaatttatgtcacttcactggcagcagaaatattttattctgccacatatttttctgcagcagtggagtgtgcccccagtattgcccactcttgttcccctcttccttttagaaaaccccacctgagtagtagctgtcatttaatgtttcaacccgcttctttagtaggcttcctgaacacatgtagggctggcactatttgttgaattgaagtgtcttcctttgttttgctttctagctcagtcattgattttcctaacatactcctttagattctgcctttgtggagcccccaaaatggctcagactttcaggaagcttccccatcttactgcttcttttccaaagatggcgtccatgtgcctgaggtaagaggtttgacttatgttcttactcctctaagcgtcagccacatgggcatcatctaggtgcttattagaaatgcagattatcaggcctcaccccagccctacggaatcagaatctgcattttaacaagatcccagtgtgggtatgcatgttcaagtttgagaagcactggcctccatgacctcataaaggcagaacaaagtcagggtgcttagacgaaatgtcctctgcctccttgggtctccaaacagatgtttctgtctccactcagatagcgcttagcctactggcattcaaaatttaagtctgccactagtgtactgactcatgctctggtctccctgggcttagtagagccctctggctttcttgtctatcccccaccccaattctggttggcttctctataacactcagggtagagtcctctcacttccaccatagtgactccccctggccagctccccagctagactttcagccccttctggaccatgactataccacatgggaaccaagagtggcttaagaaaccaaaacctcagagagaaccttgctgggcctgactgcactatactgccaagttgctgggccatggcccaggtgaggaaaaggtggaagcaaggactgggggaacctaagatctatcttcctagagtcttaaatggagagtggagctatagttccccttgtttgctctccatgttaacttcaattatctaaagcaaccaaggcccagaataaggcaaatgtgaagccacatctgatttctttgctctccagcctctctctg

SEQ ID NO: 1888756 - DNA, 4001 bp, Homo sapiens
gtcaggatataaaaagacagaaatatcttttgtgggttggcaggaacatgtgacagagggagagtctcgttccccctcccccatactcttcatttttcaatattatacaatttaatcagggagagaaggattagagcaagaaggacatctacaaacacgtgtagaatcacctggttatcagccttggcccagtggttccatgagcttatgtggatggtagacaggagttagaaacaaaaggatgtatttacagtttgtgtttgcaaatttgtaataaatgcccccgccattcttattatatattcctgaagtcttctctgagtctgtttacctctaatatgtaccacagagtgtccacaccaataattctacaggcgtcctgaaaataccttatgaatggtgtttgcagaagcaaacagtgagagctatctgagaggagaagtggaggaaaaacggtgtgggaaagcccttatgattttctcaataccatctcttcttctaaggtctatccccttcctgaatcagaacttcatccttctttagcttttgcatgcctgctctgggtcaggatcccaagagagaaatgagagtaggaacaaaaggcccttggggttggtgcttggcagaaggtaaaaacatgcagagaataagcagagaccttgtacctgttcatcacccaccccaaatatttgggcttgatcaaagcttctcctgacccctctttatgtaagatatttcccttcatggtatctggaatttaaacaacaatcacaaacattttgaactaggaaatagcctcctactcttcagaatcaatatcaatcagtcattcctcagggatttatttttccctatgaatcaaattttaaagaagtggatacttgaatagacttgaggtgttaaaactctcgtctaccttgtcctcccttttcatttgggaaagccaaaagcacaaaagagtaggtagaaaatgtcagaccctttggcatcattctcctgtaactatcagtctcaacccactgcaacctttaccccagtctgccttgcagacacacagtggtgcttctgatggagcaagagacatttcaagattgcagagaagtggaaggaggggtagcaacagcttcccctgtgaagcaatggaatctacagaagggtccggtgattcagctcttatgggctaagaagcctgaaagcatttcagtgttgctgagtccgagcttgtttgttgggtagtcaggcaaggaaaaaagggctagagtctgaagataagctgagcatctggttttgcatctacattagttctgaaaagaggtgatgggggtgccatgtaggagtccagtaaagacggtgtagggctgccaggtagtagagctgctctattttgcttcctagttggcctcagaaatcaagtaaaatagtcaaataattgtgtctgtttgaaggtagggatgtagacaggccatttctctttgctgcatttctggcctcaaaacctcttctttcttttcctccagaataaaatataacacagggagaggacagaacttgttaatagactgaggccagcaaaaagccagactggttcctgaattggagggaaggaggctgcctgactttggaggagcagaaaaaaataagttaggagattagagatgggccacagcttaaatagagaggttcgactctgcatttcccaaatacgtaatgcttacggtacacgacccaagctctctgcttgaatcccaaatctgagcggacagatgagggggcgcagaggaaaaacaggttttggaccctacaaattggcttgaaatgaaaagtcagcaaaaaccactgggtggcagcgtggtgtgcgggcgcagctctgcagtgtctgcttctgctgctaccgctggggctgaacccgtctggggactctggcctcctcccctgaatggctacaagtgtcgccaagcaaaatacctctgcgcgggtgggtgagggttctccgggttgttggtgcgtccaagcctgaggcagggatctggcgaacttctgaggggctccagcccgagcacaatctggtcagctcaaacactgaggaaacacccccaccactccatcccccaatgccgagcaaacccccgctccgtcagcccaactacctcatctcagttcctcctccatcactgtttcctcccgaagctcctttcgggaaaaggaggggagaaggatttggacgactggggcagtgcggaagcccctacaggtgttagccggaacgggcggccggggacttgggggggtgggggtgggggtgggggtgggaggggcggcctgcggctccgagcctacgggctcagccccgggagggaggggccgtcgcgggagggggctgcaaggaggctgtcgcgctgttccggagggtgcctgcggcggctgaattcctgtgctgcgactgtgccgcgcccagagcagcagcaacagcgaagatgcgaggccattacctgtttgatccctgtcggaaacctggcacgggccaacttttcccgattatcacgccaagaagttgcaaggactagtcgaagactcggaggggccagggcgagggcgcgctcccccgcgcgctgcctcgtccctcctccgtccggccgcccgagctcccggcctctctcccgcccgcgctcactccctccgcccgcctccctcctctggcccccatcagaagggcaacagggcgagggggtccggcgaaattcggaccggagcagctggacatgcacggtgtccgccgggcgcaggggccgaccacacgcagtcgcgcagttcagcatccgcgtgccagtctcgcccgcgatcccgggcccggggctgtggcgtcgactccgacccaggcagccagcagcccgcgcgggagccggaccgccgccggaggagctcggacggcatgctgagccccctccttggctgaagcccgagtgcggagaagcccgggcaaacgcaggctaaggagaccaaagcggcgaagtcgcgagacagcggacaagcagcggaggagaaggaggaggaggcgaacccagagaggggcagcaaaagaagcggtggtggtgggcgtcgtggccatggcggcggctatcgccagctcgctcatccgtcagaagaggcaagcccgcgagcgcgagaaatccaacgcctgcaagtgtgtcagcagccccagcaaaggcaagaccagctgcgacaaaaacaagttaaatgtcttttcccgggtcaaactcttcggctccaagaagaggcgcagaagaagaccaggtcggaaagggcttttgctttcttttccccatactttacgagtgaggtgggggcggtggggagcaggtatgtagcataggtgagtttgttggtggcccatcttgtgcagaagaggccacctagcctgtgtgcgtgcgtgggaaggcgctggctttcttgcctccgtaacagtaacacgcttgctgcattgcaactgccctgggacaggcgcagagcctgggggcatactctgccctgggtggcttgccctcagcttcggacatgtcacatatgtgcatgcccggtgggctctgggcaggcgtgacccagacatggctgtgatatgtatggcgtggaaattgcaggcgcagagctgggcagacaccatcctcccgtccccaggagagcctggggaatccctctcttgcttttatctctgcctcagacccttcccctccagcttccacctccaagggatgtgggcttctgctgtctaggcattgcgtttctttgatgacttttaagctttttgggacagacttgacttgtggtgcagcttcgaaatgtttgctggggcggggggaggggggatttctagaaccttgttgcaaagagctgagagatttggttagacttagtgtaatcggttacatgctactaaaatgcggtgttgaagaggggatttaagctcatacccagactgtggtgcttttgaacattttcagtggtag

SEQ ID NO: 1888757 - DNA, 4001 bp, Homo sapiens
atacagcgctcaacacgaacgacacaacagtcgcttagccttgatgattttttaacctttacctagtcctggacgctaagagcagagaggaaaggaagagaaacttcgaaagcagaaacctctgtcccagagcctagaacagacggcaccttgtaaggatttcacgtttttcgaggcgggagaggtcacgccctgcagttttgaaaacccaccttctaaggctcaacccccgtgatagaaccttcctcgtgcttctctagattccacgctggagctgaaataccccctccccacccccattcgccaaacccgcgccatcccccttggacagaagaaccacagcgggccctccccctccctccttattctgcaccccacccccatcctccaaccaccccacaagcatcccagtcaagaaaaccgaggcgggccccctcacgtctactcctcgtcgccacccccgccatcctcgttgagcgaagcaaggcaggtctcccatctcccccctccacgatccccgccatccttgatgggaaaaccaagggagtcgacccaccgcttcatcctcacccgctccccacagcccctgctagctatcctggctgaaagaaccaagaggtgtccccacctcgccccaccccccactgcccgccatccttggtgacaaaaccagggcccccccttcactccctcctcactccccaccatcccccgcacaggaaaacatggagagcccccatttcactcccgatcccccccacctccaccccactgcctcttagtccccatcgagccaaaaacccagggaaggccgaggcacgcaccaggggggacctcgcactcgcagtccctcgtcccgcaccccgcagcccgggacggcccctggcccccggcctcagcgaggccgccgaagccgcagtacccagccctggaaggccaggcagccgggaccgcagggaccagccccgagcggcggcggcggcggggcagaagggcagccgctcccccgggacccaggacgccggcgggcgggaggcacacacgcgcgcacaagcggaaagaaagcgggcttactgcgtggggatgctcgcccgcgcagctgtctcggcggcggcggccgctgcctgcaccgaggccgaggcgcggcggtggcggcggcggctgcggactgagccccctccgccgggcggtggatgtagggcgcgggaggggcgcgaggggaggggtgcgcgcctgggaggcggggagggaaagaggggaggaagcaggagcgcgggggcgggcgcggctagccaggggcggggcggggcgcgcgcggggccgggctctgcccactgcacggaggctgtgtgcggggcgcgcgcgcgggagacggccggacgggcgtggggagaggggcggcttgccacgcaccccgcgcgcccacgtgcccccgccactggagagggccgggcacgcggagagggtggctgcggggacgcggtggcaggctctttcccgaggaccggctcggatccgaagaccgggaggagggcgggccgggggcgcctcgggccccctccctcgcgcagcggtccttagaggcctgcgggagtcacgaatcactgcaggcggctggggctggggaggtgggagcaacaaagacagccaagtgagggtggcgtctcgcctcaccggggtcctcgctaacctgcgcactccctgaaaagcggccccgcttcggggcccacgccgtttcggcctccgacttcggaacccggtggcttgcagcggcgccgaaaggcccaccgacgacccctccccttagtagcaagccggagggagctaaataagccccatccataatcccagtgccaccatccagagcgttttaacgtcactcagaaagcaccgatggcaaagcggcgcgtggcgtctcattcactcagcattcagtttactgagccctcgccatgtgccaagctcagtgccgggctctggtgataacagcgttgtctgcagacagtacgcaccctgccctgggagcttgtaatctagtgggggagacagacaataaagaagtgagaaaataatcaaatttggataaagcctgtgcaggaaaagtacaaatagtgtgattaggaaaggaggaggtgacatttaagctgaaccctgaaagatatgaaagagccaggaaaaagctttccagaaaacaagtcagaaggagggaccaaatcttgatgctttggaactaaaaggtggtgatcatgattggcgccaggaaagctggggagagtaccagaaagtaaggctggacaggttggcagggaccagatcgtggattgcatactagtccatgggcaggtgcagtccatgggcaggccacttcattccaaaatcaatgggagggcattgaatgagtggcttaaccccaaggcgtgacacggtctgacttatatttcttttaactaaacttttgtcttttgggatgattgtagattcacatgcatttgtaagaaataatacagagagatctggggtcccccttgcccaatttcccccaatgcaagactacactataagataactagaatattgacattaatacaatctaccaatcttattttgatttcttcagttttacttctactgtgtgtgtgtgtacgcgcgtgcacgtctggtatgtgtgtgttctatacaattttatcacgtgtggcctctttccactaccatggtcaattataaaacagtttcatcattgcaaggatcttacctgttgtattgtaattataaaacagcaataactatctcctcagttccccaagtctttcaccattggcaaccactgatccgtcctccatttctgtaagtttgatattttgagaatgttttgtaaatgaatcatacaatattcattttgagattggcttttctcactcggttttgagtcccttgagattcatccaagttgttgggtgtttccatagcttgctcttttttattgctgagtagtattccagatctggtttacatttttaaaagaccaccttgactactatatggagaatggttcagaagagattaaaaatttaaatagggagattagttaggaggctttctcaatagttcctatcaaagctgatggtggtttagattagggtggtgctagtggaggaaagtggaaggatttgatggaacagggttgcagagggaattggagttgaagtagagacagcatagggtagacaactgttttgagactttccaatgtaaatgggaagaaaaatggagcagaactggaggagcgagtagggacaagcaaagattctcttctctctttgtgatttgagagatgagagcctgttggtcaacagtttagggataatcagtagagaggggttggtgaggcatgacaggagggtttactaaaggagtcaagtcccctgcctaggtgagatggaataagggctggattcatggggagaattggccctccatctgccgaaagtcattcttcactgtacagaagaccatggaggtagatgatgatgacaggggcgggtgtagggatggtgtggtatacacagatctagcaaatagatcctcatgattcctatttgccccatgtcgcacaaactggctagtggtctcccttaccagagaaccagcagcataagcgcttacaaagtacccttctctgctcctagcaccaggggcctgggctttctcttttccccttctaagccctcagaagcactgaagtttggtccttctagatggcaagagaagtcccgctacactgcctaggagaagaggaagccaatctgcccccactccatcatggaaaggcattgaacaattagcttggccacagacaactccccaccccataccagcccaaagaaacagcccagcccaaaagaaacagccaagaggcacccatgatggaaggctctggacagagcaccctctttcagggaaacttctggctattctttggcattcaatcagtgttagttgtg

SEQ ID NO: 1888758 - DNA, 4001 bp, Homo sapiens
aagaacaaatctaggcaccaggccatgtgacttgtttcactgccaggttccctgggagtcctccattttctgacctgggcactaggtcttgtgtattgagttgggggcagccatgtcagaaccctaataggagggtccagatagatctcaaggctgaattccatacaatatccctcttggggtgacacacacactccaaacttacaaaattccagtagaaaggaacatgattttgtcttatggttccatcattcaacattaaaacacaagcaagttcccatgcacatcattatttgacttttaatggcttcctatggctttattatatatgtgtgtgccactgcttaagcttaggaatcagtcttatggtgtttcctcataagtaattaagacatggtgcttgtaaagaatttagaaaataaccatgtgctgatcaagaacaaaagcactgtcataaaatcttgtattaaacactaatagccttttgcatatttactcccattatttcaacatgcacagaggtctatatttacggtaatacactacaataagcatatttaaattaaatttatatatgcatcatgttttagatgcaaacttttcactgctcattcctgggtaactgaaattgtcatgaaatatttgcaagacctggattttagataataaaatatttgcaatgagcttcttgattgactaattcattaaagaatgttaggttctcaatttttaaaaaatttatacacaggacataatacctataatgccaccactcaagtatcttaattttgatacctgccttacctaatcattagtatgctgactatatatatatatatatatacatgctaacattggaacaggcactatgtgcttatgcctcagaacattagggtttcttttgtttatatttttcaaaacttataccaaaattttatcttaaaattttatgtaaaatctataaagttgaaacgcatactcactctaacactgaccatgattatgcatgatatgcataatgcatatatatgtataagcattagatagataggtccaagttacctggttacaggcctagagggaaaagaaaatgattgcacctattatatatatatttacttctctttatttatttatttttattcagcctctgggagcatggactatccttttctttaaagacaattgaatgcaaactggatacagttttgcacaaattcttcaacaccaccttataccatttgcatacatgaatgacaatgtatatttgagtgcttggattttttttgtatcttactctagaagacctttctatttcaagaaattacaaaagttacacccactgttggcaccgtttagattttaagaaattataagtagaaagtaaacggtacttcaatcacaacaagaaatagccacttaaaaatatccttgccatacattcttatatcttcactttgcacaaataatatacacttaaaaaatgttcaaattctcttgtactttgaatgctaaaacaagttttcctcatttgtaacttgaatgctcttcaaatctcattaagtattctttagaataatgacaggttttaaaatcttgccacatgtttttgcatttctagaaataatcatgcttctttacaatgtacctgctataacagccatgtatggagaagtgaagcgaggtcacaggtaatgccacctccagcagacaagaacttttaaaatgtgggttcatcttcaatcctcttcactcggttttggttctcatctgtttgtgcgtggtcagctctcctagcaaaagtgctaacccttcttggtttggcgggctgatcccatttctcttcaaggtcctcctagctgcaagcaatttggttgcacctgggacctccagcaagcacatggcatccttttataagcaacctggtattgtctggttctctgcagtgactctgctaccacaaaggtcctaggccccagagcctgaaggcaccacgtgtcagcctttcccagactctcaggggcggggagagagacgaatacccacaggcccagtacttcgttggttggtggcttcctccagtcccgcccatactgggagaataccaagaccccaccctacaacttcctgggcctggacttcctgccagaggccgacttagtcttccctccccacgggccagttcctacacctggacctcactctgtccagagcttcaggtaggcctcaggaggtggaactaagatccagctcatggtccgagcctgctcagcctctaacagaatggaactttccaatataagccctctaagggatggggctttttccagaaatttcctcacgatggcagtgttgctcctggaattctatccaatactgcccccaagccctcttctcccgcccgtctggtatgaaaaaaaaatgtgaccaacagattaaggcaccaggaaatatggctgacttgagaaactcgctcatactattgtgattttgcttttggtttttcatctgaaatcaaactggcgcctaaacctacactctcatcaggggtcttttcagttcaagaactcaatttccacttacctagtcttcacagttctgctttttcttcacctaactttttctcatggtactaaattgtcttggtgtatcaggggtcaaacctcagggatccaggcctagagggaaaagcaaatggttgcatctaagggcttggagaagagcaaatccatgttgttcttgcctgactcacttcccaggtttcccgggagtcctactcaatttctggcctaggcactaggcctgtgtgttgagggagaagcagttgtctggaaccctaagctaagtgtctagatggttctcaagactgcgtgctatacagtgcccatttggaagggtacacaaactcaaatatgtataaattccagtcagaggagactgatacagtctcatagtcaaaataatttaaaatcggaacacaggcatgttcctatgttcttatatgactgtcaatggtttcctgtgactttagtgtgtatatgcttatcacttaggggtcaatcttatggtattttatcttacgtaattaagacatggtgcttgcaaaggatttgcaaaggattcagaaaagaaccatgtgctgaccaagagtaaagcactgtcataaacagtacctattagtaatactgataaacatctggattatgttttgtgaactaaaaagtgtctgagacaggtctcaatagtttcagaaatttattttgcaagtttaagtacacgcatgcctgggagataggtccatgcctttcttcaaagatgattttgagggcttcaatatttaaaggggaaagggcagatactggggaaaggggaagaaattttgaaaagatgtgggtagataagaggcaaagggtagcattcttttgagtctttgatcagcccttcataggcgagatgagggtagaggaatagtcacgtacacattcatctagctcagtgaatctgcattttttacataggataaaataaacacagggcagaggaagcaatcagacatgcatttgtctcaagtgagcggagggaagactttgagttctgtcttttgttccatacctgtgaggataagccaaaatttacattgtcagggtgaaattcaacagaactgtttcagggtaaaaatcttggggctcacaaggaatttcctagtgggcaaattgtgagggagatatgtagctttttgtttttgctttgttcaatcattgtagccatcttatttaggaataaaatgggaggcaggtttgcctgacgcagttcccagcttgacgtttccctttggcttagtgattttggggccctgagatttattttcctttcacagtttcaacatacacatgcaaactcatatactcatgcactcatttcaatatatacacataaacatttatatttcgtgtcatacacaatagtaagtttacattaaaatgaggtttatttgtatgtta

SEQ ID NO: 1888759 - DNA, 4001 bp, Homo sapiens; identical to SEQ ID NO: 1563585

SEQ ID NO: 1888760 - DNA, 4001 bp, Homo sapiens
tctttgatgcatattcattgatttttttttgtatgcagtatgaggtaaaggttgaaacgtattctttttgcatgtgggtgtccacttgtcccagcttcattttttgaaaacactatactttccccattgaattgtcttggcttctttgttgacaaaggatttattatttctgccacaacccagctgtttctcactgtctaaacctttatgcctgctgccccgtaggcttagtggaatgcctctccatcctccactctcttttgtttagctagtacttccttatcctttaaggggtcagtaggaacctcaccttcttcagtatgttttcctttgtcttatcaacctaccaccatcacccacacacataccttttccctaaggctgggataggaacctcttaggcaatgatctatttgataagtactcactgagttcatactagacactctgcagtatatccgtaaatgaagtaaaacctgacaccaccctcagaaaacttactgttagtgagaaaatgggctataataatagagtggggtaagtttattgtagggataagcataggatgctatgagaatgcagaggacaggaatttaacctagacttctcagttctcccgttgaagttgacatctgaactgaaatctggaagaccagtaagagatagctatgtaaaaagaggggaaggacaataggaaagaaggaatggagagaggcccagaaactacagagtatggcacaagtagtttagcattgttgggtcacaaattctaaggatatgaaagataaagttgaagaagtggtggggctggggaggacagctcctgtagagccttttacagcgggagaaggagtttggctatggtcctgcaggcagggagaaaccactgaaggggagaaacatacagaataaatttgagtaagaagcttaaatctccccaagcccttttaaaataaattaagatataaagcctttgggtttctttatgctttgtcctattcttctaattgtccaaaacaaaacaaaaaccttccttttctgtacctattaaaaggttaattttataaagttacagacagcatgctgattaaagaattcttgataattagctattttgtctgtctttgtgtagattactaacaattgtgtcatcagatttaaaagatctaaacctctggactttatatattttttctacaagtactgtgagattgagaacttaattcaactctagtaactggactttttagtgttgtttgcagcatatgattgttaaagaaagtttagtatatttgtgtgtgcgtatatatatatatatagatagatagatagatttgaggttatatttaatcattgactattggtattctaagattttaaggagagaaaggtaggttacaatatatggctgatatatggttctggaacaattttcttagttttcagtaattctacctaaaatgtacgtccagctttgcactcactaccacattgtaatttccagtatacttgtctatttttcgagatgttgaaatctgtggagaattttttctcatgtttagtgttttagctatgtttatctctagggtatagcacatacaaggtggcaatatagatgtgcttaatgaataaaatgatcttcaaaaactgaccttcatttgaagttctattttattcataaacacataaaacgtttggtatcactgtaaaatttaactaaaaacaaaaactatctttaagctcacaagttaatttaacgttttttcttacacaggcatttgtaaaggatgttcatgaagattcaataacagttgcatttgaaaacaagtaagtgtctcgttatataattttaatgatgaggttctttaatattttatgctaattctactcttcattttttaaaaattcaagtccagtttgagtgcttttcaggaatggatcttcatgttactgactgagaagtttctgaacaactcagtattaaactaatggaatgactgtttctgctaatgtcctggaggtcccttattgtatggtattgatccttacgtcttaattcccttgaatgtgaagaaagaaaccagagagtcttgtgtattagtaactggaagttcgcataggagtatttgtaaattttaaaaagatagtaatgaaaagattcatgggtattgctaaaaagttgtatgtgagttctttaacattaaatctaaaactgatggttttagttgtctagtatattttatggaaacagtcatgtttacctattatctgattttttttaatgtttcatatgttcagcaatagcagtagctgatcttttctgttctcttttgctagatgaagaaataaaaacagtcataggcctaggaatattaactgtatgaaagcatcaatagtatagatgttaacattttattggagaacacaagtctcttgactaaatgttttgaatgctaataaaggctattttcagggtagctgttggtaagattgtaaagtacatataaactccttagtcaaagtgtagatgtggctatgatcttaggattttactaaactctgatggatggttaacagttatcatttttttggctcttatataccaagaaaattaataatatatcaaaagcaggctgcaaatctatagagacagaaagtagattagtgattgcttgtgctggggctggtggggagaacatagctaaagagtacaggatttttgtgtgtgtggcaatgaaaatgttgtaaaattgactggtaattattgcacataactgtaaaccttctataaaccattgaattgtacatttaaattgatgaattataatgatatgtggattatgtctgctaaaatgtagtatgtgacccaggcatactgagcaataaatacacacatcttgcttctaaagtttaaaaccaggcctgtgtttcagtgtctagaaaatatatttcataattgaacttagcagattcttttggctagcaacaggacaaagtagtatccttagatgcctgaaacacgtgtagggggacagagataaaaggattaaaagcatctaaccctatttctggctctggactaataatcgcagaccaaaatacaagtttgaatagtagaatacctttccctgaatacataaagccaaaagttttagtatttgtctcttcgctgtttcatatatccatggctatgcaatagacaacagcatcacaccaacagaggaatctttgataacttggagggtatttttttcttacaattatacactttatctacttacttacatcactaggtaaatgctgtttcccataaagggagagttgtctttatttgctactcttttagtttttcctgtagtctataatctaaagtgttaagcaaacactcatttcctctatgcatttaagaatttgtctagtttatacattgatttattagatcacttctttttaattttcaatcagatttctaccataaacttaaaattatttcatctttggaccttccaattatttatctcctgtaccatatctgcatgaaagtttctcttcaagctctttgtcatcctgggagtttgaaatagatcattgatttttccttgtgttcatggagtatgtttgcaatacaacactgggtttgagcacatcaataggatttaataggtctccaccaaagtaatctctttgcccttccttgtgtgtttcctttttggttttctgttagaaacaaaacgaaaacagtgttttgtaaaacaccagattgtatttaccctttctttcctttcaatcaggaagaagctcctgttactgatagcagattgttttaggtgctttgtttttaggtgcttcctaaaccttccataaagcataaaggtgttttcatatttcacattttttaataaggaatttgaatttttatctgtatacacttaaaatcattattttttccttggaaccattgagttatatattattatatgctttaaaatcaaatttagcaa

SEQ ID NO: 1888761 - DNA, 4001 bp, Homo sapiens
accaggaggaaggcggggactggtcactcaagtccagggaagaggccaaaggcacacactggaccttcaggtcccaaacctcaatccttgatcctctgccactggagctgccaccaggcacttcagaacaggggaaactgcccatcttgaggtgggcacaaaggcacgtttctaggtgagggtggcagctgcagcttgatcggatggtcctgagatagcagcagggcccagcatccggggaaagggggggaagggagggcaggctgcagaggggccctgtgggaggccctggccagctttgcacagcccgggcatggccccgggcgcaaaagtcacttctccgtggtctgagaaatctgctgaggcagccctccccatgtggtgacccatgagactgttagccagcccctgctcctcaggaggacaatgccgggccagggcccccagttgccctcctcctgcggggtgcagcgtcctcagccctgctccaggctgtcgctgggctgcaccacggtgtagctcccctggcccaaggacagctgctggctgaagaaggacgtggtgctcttcgtcttcactcgcctgatccccttgccgtcctccacataggcgatggtggagagatgctggatccggctggacaccacactgccctgcctccgcagcttggggcgctgaacaggagctggcgaggagctgaggtctgagggcgagccagttgcactgtcctgggggcctgcgggctccgccgcctggctcagttagatgcagtactcaatgaggctgctcatcagttcggcctgcttggagtagatcttgaggagcttgttgacaggtgtgaccccgctgtccctgtcgaactccagccacaggatgggctcctcctcctcaggggaggtgtggtcccacgacagctcctggaagcacaggcccagcaggacgtgcttctctctgctgtccacgacgtgcacaccttccaggctgatggccacagaaactgatttgcgcccaccccggtgcaaaaagccttgggctggcttgtcaacctcaccgtggaagaaggcacacccatagaagggcagcttgtggcacttgaggaggtaggcgcggtagtgggtgcccagggcggcctcacacccgccgtcgctgctgacctcctgcaccttgcggtaggcgttcagcaggctctgctcacccggcccggccctggccccacggccccggagggcagcaaagagaccctggccccgcttacagaggtgggcagggaggaaggagtccagcttctccctcaggtcgcaggctgccggccagtcgggctggtaggtcacgagctgcacgcggcacaccagggcgcccagagcctcgcagtcctcaacgtcgcacaggtaccgtgcagccagcacgttgcccttggcctcctcatagagcagccgcaggacctcctcgtcggggatctggagctcccgcccctttgggaagaacacgttccttcggaactgcaggaaaggctcatccatggccacgtcgtcgtccggggcactggtgaagcgcagcagcagctccggccactggcgtcccagcttgtagggctggttcttgggtttcagctgcacctccagcagaggggagaccagccagagcgcgaagacatccagggcgatgtccggaagcttcaggacctcgcggacggcgcagtgcagctcatgggcacggagcgagggcaggttctccacagccaggggcaccaccgtgtcatctgccaggtataccagcacgtcagccgctcgggctcccacggaggacacgctgcttcggtgggaccgctcagtggggccgggctgcccgacactgccttccgtcccgtccatctcacagggtcgcagagcccgccacctgagaggcaaggctcctgcccggaatcctgcccctccaccaagcccacggaatcttgctctgtcacccaggctggagtgcagtggcgcgatttcggctcactgcaacctctgcctctctggttcaagcgattctcctgcctcagcctcctgagtagctgggattacaggcatgcgccaccacacctggctaatttttttttgtatttttaatagagacagggtttcaccatgttggtcaggctggtctcgaactcctgacctcgtgatctgcccacctcagcctcccaaatgctgggattacaggcgtgagccaccatgcctggtccaacagcctcattttaacttaattacttatttaaagactcagtctccaaatacagtcacattctgaggtgctgggggtcagagcttcaacatacgaattttgaagggatacaatcagccatagaactagctgtgtgaccttggcctctctgcacctggtttctccccagggtatgtagagataattaggggtgatattctaaatatttgacacctggaagggagtctgacaacctacaaactttcgtggccctagtgttagagcagagtcctagaggcccctgctatgccaggcattaatcctttggttgttgaattatatggggaggtcctagggggaggagttctcatgaaggaatcaaggtggtggtggtgcgagtgaagagtgttaccaatcagtatagaagtttttaaatattttaacagcctgtacagctctatccctgcatactacccaaatatcagtcccagtagaattaatgcctaccttattagtgtagttatacacacacatgttgacctcttctccaaacactcaccttggtttctctaaagtaatcctatcaggcccaattctagggtctcaaaaactcagctgccccaatgctgaagagctcttttctcctctctcatacactgtggagtttaccaagatagggtagctggtggctgtttggggcatggtctctatattactctgttctcacactgctaataaggacatacccgagactggataatttataaaggaaagaggtttaattgactcacagttccacatggctggggagaccttgcaatcatggctgaagacaaatgaggagcaaagtcacatcttacatggcagcaggcaagagggcttgggtaagggaactcccctttataaaaccatcagatctcgtgagacctaatcactatcatgagaacagcaagggaaagacccgcctccatgattcaccaggtctctcctgcaaaaagtaaaagtagaggttcctcttcaaagactttcctccccgtctaattaggaataaatagtaacttctcttagaagcaaaatttattcaaagacctgtgctaacattcttaaatatctgctagctgtaataaagacatcaatgtactttatgttcttagctcccacaatttagcctaaatatttgccctggcatgcttatactggtccaagcaaagcattaggccataccctgttgctcttccttatttgaaggtgtttttacctttctcagcattccacaagttacttcctccttcctttgttctcttctgcctttgcctcttttagaaagttctaagttgctagccagtcggaacaaatacagaatttgaggtcccattccaccccatggaaactggacacagcagtagggtggacgtgtcaggttgtaaatgaccctgtctcctttgttcagtgtactctcatggcaaaactgctggcaagtgtaccctttctgcagaaagtataaaaatggccttgctgaggaaagtaaatttatgttcaagtgctatttctttatggcactggggaacaagcatttcgaacactcccatgacacataggagttataggagccaccagtcaagatgagatttgggtggggacacagccaaaccatatcagtctctagggactccaagaaagacacccatctctatgtcctggaatggtgtagactgttttatgtctacaccattacagtgtagcaagacacccatctctatgccctggaatggtgtagactgttttatatctacaccatt

SEQ ID NO: 1888762 - DNA, 4001 bp, Homo sapiens
aaaaaaaaaaaaaattaaaaatataacccgcacaatcctacttgtggatatatatccaagggaattgaaattagtatgccaaagagccatctgcattcccatgttcgtggcagcactattcaccatagccaagatagggaaacaacctaagtgtctgccatcaacagatgaatggatgaagaaaatgtggtataaatacacagtggaatactattcagtctttaagaagaagtaaatcctgtcatttgctacaacatggatgaacttggaagacattatcctaagtgaaataataataataattattataagccagacacagaaagacaaataccacatgatctcacttacatgcggaatctaaaaaagtcaaaatcatagaagtggagcatagaatggtgatcactagaggctaaggttgggagggagtggggagatgctgttcaaaggatacaaaggctcagttagacaggaggaataagtttttgagatctattgcacagcatgatgactatagttaataataatgtattatgtatttcaaaattgctaaaataataccctcactactcccactctaactcactcattctcttgtgtagtcctttaccctgccttatttttcctcaaagtccttctttgctacctaaaagatatttatcgtctgtctattcctgctggaatggatgctccatgaggccagggagttttgtctgtcttattcactgctctatccctcatcacctagaacagtgtgtggcatgtagtaggcccttgctaaatttgtcaaaagaatgaataaacgcccccccaaagacaatgaggatgcccctcagcacgactcctgtattcctaattgctgggccttacagagctcagcagggagctagaatccaaggggcacccaggaaaggcttagtttccagtgtttgctaatcatgcttctgataaaattgtgggagagttttcaagaactaaaaagccagccaggcatggtggcctgtaagcccagtactttgggaggctgaggcaggtggatcacctaaggtcaggagttcaagaccagcctggccaacatggtgagaccccatctctactaaaaatacaaaattagctgggtgtggtggcacatgactgtaatcccagctactcaggaggcaaggctggagaatcgcttgaacccagggagcggaggttgcagtgagccgagattgcaccattgcactccagcctaggcgacaagagtgaaactccgtctaaaaataaataaataaatacaagcctggctgattttttgggcatttcttacagaattggataaacaaagtggtgcagagcccaaaactagaaagccagaagacttgggttaaatctctcacatctctattccccaatagtgtagtaactgtggataaatccttttggagtgctaggtctcctttctcccacatctaaaatagtatttattatgcaactccttcctaggggcaggacatgtctgtgaggtgaacaagatcatttctgtaaattatttgggatgcttatattcagatataataataataataaaaagacaccctttaggtctatctcactgtaagaaaaccaaatatataaaaactcaatgtatgttattactaaagaacttttgcaaactcccctaggcctagagtattaataatggggttcaatctacccaaattcaattcatgcccagctgtttcagaacacaccaattacatagggaagcatttagcacattgccttgcaactaataggtaattaatatttgtttattgactccttgatcagtaatgcaaagtgtacctgtactgggacatcttaactctgacgtgacaaaggttaggctttccctagatatggagaactcaccatctctctgttctttttccagtcccccaaatctgctttcatcagtgctgcgaagaaggccaagttgaggtccaatcctgtgaaggttcgattttctgagcaggtggcagttggagaaacagatgcagtaagtgtagctttggctccctctcctcagcccctggccataatctgcctggctgtcaagctctcgctctggggcttcttatagtggacagctttccgaatgggttagagtgggagcgtccaggtgctggagggggaaaagtagtgagtgaagagggatacgtgacatccagagaggccccaggcattgtggggagaaggaatatatattgattcactcaagatccttctgatgcttagagaaatttccatccctaacacagtagcttacactcaaagcaagtgctccataaacatcttttgctacttgatagaaacaggaaggaaataatggcttcctgaagactcagggaatgagtggctggtgaaattgagctctcttcacatttaagtgatcttgcaactccacatcttgaccagaaaaggccatgcagtggtgagtaaagttgcctaaaggaaatgatacagactctcattaagtcaccaagtttttattaggcacctgctatgttcttagcaccagaggggaggcaaaataaatacctgttccctgctaccagatacctctcagcaatgttgagggggacaagaggttcagattgagacaatacaaaatctactacggggtggtattgtttcgaaagacaggtaatatttgacagcccatgccatgcagctgccaatttggggagtcttggccagccacagtgtttctcactgctttgggaggtttacatgcagtgaactgtcggctccagatgtgcaaatgagaagaggcaggtgaagagcagaaaagaagtgtgttaagcagtcatgcattctggccgagtccttcaggaatctgcagaagttagtgataacctggtggggacagaggggatagctagagctaacaggcacttgtgtgcttttgatagctgtgatgggcagagctgtctggaggcccttggcatttacgtactgaggaacagccacagttgttgggagaagatagcaggcccagagcagggaaatcagcagggtgccaggcgcttctatattatttaaggcagaattagtgagaagaaggtatagaggacacaggtgtcttccatctccatttccctgactctcattcccaaactcagtctatgccctcctccatctctgcatgaggaaggctggcaaacccaggggactacaggaccccactgggcaagctgtctgaataattgatggttgggatctgtgtcaatcctagaagaaaagttttaagagaagtgatcattgatgagcagaggggaaaaggagtaatatggagtccctgcaaatcagggtgaaacagaccccgaggtccaagtcaccaggaggatatgtgtgtcctgaatgcttgaaaacccagaggacgtatgacttggatttggtaagtatgaacaggcttatcctatgccatctcaacattgcagagtaatcagtcaagggcaggccacccagtgaagaactccttcccttcctccccactcccctcccctctcttctcttcctctcccttctacttccccttctccactttctccttcttccaccatgattcccctctccatacgtcacagctaggttacaggcacagctagtctacaggcgtaacgatgccccccactccagtctattctgaatgcaaatgccacagagtagctaggacccacctagagtgacctcattctctcggacaggccaccaggcatagtgtgaggctcttgtctgggtgagagacagacatcaatcttccaactctcactgcactcgtgaaattacctggtgttacaacatcaccctcctccatgctgccgccagtatggaccatagcagcctcatcacaggtcgggagccgggggagtccaggcccaagtgactccaggctctcctatcaaccctttcctttcgtgttccaaggctttattaagcagccagagcaaaaataaatcctgtgggtgatccttgcc

SEQ ID NO: 1888763 - DNA, 4001 bp, Homo sapiens
ccttctaactatgtctgtatctaagtgctaacttactagttttagcgattaacagcaagtcttcagagagtcatgacagtacatctgcctttaaaatagaaactctaatcttctcccttgacaaaaccgtgctgaaagttctacagaagaaaaaataaaggaaagggtgaaagcccaggttaccttcataccaccactgccattaactacttttcaatctttctccacgacagtatgagtcccaggcagccataggtccaaattccaggtttacggcaaagagtaacaagcatttggaaacacatccaaatcctcacgcctatgttctcagggaagaaaatcaagagctttcggccaacattaacattggattctcacactacaaccacagtgttttgctactctgatggggtgactgtattcagagccaagtacagcgacccaagatcggaaagccagagagccctccgaatgcgtactgcccaaatgtggcctgtctccaagtgctccctttttacgcatttcctacgcaccgccagctgccgcaaccttttgcagagtcatcatcgcctcctcatttttgtacccacttaccgataggccactgagaggctaagattctgggttaatttctagtggatctggccacagcataggagaactccaactcaggttgatcccttcactcagctaaaaaggtagttctctgcaaggcctgctagcccaagatggccaagcaaagacagcttacctcccccctcgccattttgcaaccttaattacccgaatgctgagcgcctcccctccccggcactccgtctgaaatacgcatgcgcgccgcttcctccttaccgttctccccaaccatccagatgttgtctcaaatatgcatgagcgccacctctacctcccaaacgctggtaccaactcctagcaactttgcgttgttaaatatgcctgcgagtccttcacttcccgaccttccaaccctccaaccccgacgccattcaagccttgcgcatgcgtgcctccctctccccacccccgccccactggagcccgtccccttaactcaggtcttctcaaatactgtaagcttgagcgccgcccctcggcgccgcgcctcctcatccagcctctcaaataccctgcgcaccgcgatagtcctctctcttcttgctcccatttgtatacagtatgcatgcctgatgctatctggacgtgtttctcgccacaattctgccccagtgcccaaggagagccattaccagccttccctaatgcgagtagatgcgataaactagggaagttgaatcggggaaagaaggcgttgcaggtgatcagagtgaatcccagatctagatggaatcggtcccaactccaagggagggggctagagtaccccaggattcacataagaccggtcaacctgaacaaaggcaaggaaaactttcacaaaccatcggatgaacataatcctaaggcctcgccctttaaatacatctgctacaaatgacgaaccacaaatgttttaaacagggaacattatggaaaacaccgatgctcaggtgccttgactctagttagaggaaaggaacccgcattcctttcacaatgggaagcaaatgctcaacatccttttggaaaactggggcctgtaacgtattccattttttcctcccgtgaactggaaaaatgcacaaattaaggatcttcctggcccaagttccctccgccgccctccatgttctgttcttcccctacatcgttcctttacctcctggttgaattcagtgtcgtagcaggaattcttagagctggccgtcccaagatggggtggagagagcggcatgaaagagagagagagagagagacacgcctgaatggcagcagcaggccttagcggcaatggacagcaggcacaggaccagctttgcctcgagccgcaacgctgatgccagaaaaggacaacctctccagaatcgccgcagtgtgcttccagcgcatgcgctgctaacgccccttaaccccccctccgcgccccgcctcccccacgcgccgctctccagcctctaggagtctaacccttagcggtccaccgacctccttcacttctttcccaggacgctatcccactctgcttcttccacctttcccctcccctcggtcacactggcctccaccatcatccctccctcagcccatacttctttcgtcaatccctctcccattattcttagcccaccatctacctttatttcctctgctatcgttagtggtctacccttcaattcttcactttccctgccagtctgcagccctcttgggcctcttactcctctcctcctatgcctgatgttgaaatttgtaaaaattaccgcaaaaatttttttttaaataattgtagcccgggcgcggtggctcacacctgtaatcccagcactttgggaggccgaggtggacggaacccttgagttcaggagttcgagaccagctcgggtgacatggcgaaaccccgtctctacaaataaatacaaaaattagccgggcgtggtggtgcgcacctgtactcccagctattcagaaggctgaggtggaagaatcactcgagcccaggaagtcgaggctacagtgagctatgattgtgccagctatgatgttgccagcctgggcaacagagtgagaccccatctcaaaaaaagaaaaaaaatatttccacacatcctctccaaagcagctctcagggtgagctcaaccagcctgtcttgggcaaagagaacacctttttgatgatgacccacagggaagatccagagacagggaaccagaacaaaaactgcaaaagtgttcaatcaatttgggggtaagaggcagtagaccaccaacatggaaagctcttttctttctattcacaaccctggtattgtctggacattaaaaatgagattcaatgtccttcactgcttactacaaggcctgttcttgtcttctgtaagaactcaaatattaattttgagggaaatggcattatttacttaagaggctctgaaatagatccctctttgggtgtgaactagaaagaatacaaaataatattttgtttctctttattatgttttactttggtgtctggttcttattgctttctaaaagagccagtttggaaataccaaaaactgagacccgcaaattcataaatcctaaaactcataaacttatacatcaccatcctctcaaattaacttaagaatgttatatcaacattattcagagaaaaatgggtttgcatttgttatataatacgcccaaaaaattatacaacaatgtgcatatgaagaagaaaaaagagaaataggcatgcattaaataaaaaagaaatgccgaaatctcagtggtacaaagaacctcttctaaattaaaataatcatttattattacacaaaagttaaaatataagaaattttaccccaaattctacaacactattttaacaaatgctcttatctctgttatttttctgttttaatggttttattaatatataatttacatatcatacagttaaccaacttaaagtgtacaatgcaatggattttagtatattcacagaattatgcagccaccactacaatcaattttagaatattttcatcaccccaaaaagaaacttcatacccattagtattgtcttagtccattatgtaccactgtaacaaaatactgcagactcggcaatttataaagaacagaaatttatttcctcacagttctggagaatgggaagtccaagactgaggagctggcatctgacagtggctttcctgctacatcatcccatggtggaagggcaaagagatagagaaagagagagtgcgcgcaagagggggccagaactcatcctttaataaggaacccactactgaaataacaaacccactccctcaataatagcattaagctattcataagagtggtgcccccatgactcaaacacctccctt

SEQ ID NO: 1888764 - DNA, 4001 bp, Homo sapiens
actcaaaagcaaatgatgtagggacacactggcacttagagaaatctcagtatttatgcactcctgatattcacgtgctaaatagaacaaccttcctctaaagttctgttctgcagaacaaacaacaaaaatcttttcaaagacccctaagagagaaacacacactgtctagcccgatgtgaatggggaaagagggcttgagcaactctatgttcaggaaaatctcctgccacacattctggaagtattcatacattattaaagtctttttataatcccacctcttgaacttccacacaatatgtgcctcatctatgtgggaacaaaaacagttgtgaaatttggccagaagaggacagcagtttgagagcactgtatagacaagagcacaaggctgaaccacatttggggtgggctgctttggatgagcgcagacatgcgcgagtttgttcctaccaccgtgcagtgaagttgcagagaaattaggaattaagaacaagatgaatccatccagctactcccagcctaaaaaaagcaagaagtcctaatagctatttatatgcaactccctggggactgaagtggttcttcctaatggctgaaaaacactgagtagcaatcaggtctttaagcagaatgtttttaagaccttatcgtgaggacgctgatggagataatgaacgtttgaggtgtcgatagtacatcttaaaacggtaatggaataggtaggaagattcgctcttccaagtattcctaatttcatattagtaaaagtcagttgtccagctggcactataaaagcgcggtgtcagcattaagaagaagctgaaaggagttacacgatgagaaacgagttacactgtgtagggttccagacagcagtgtccgatgacagctacaagagcagcactccttactccttacggtccagggggaatgcaggcaattcccctctggctgtcagtctccctatcccctgccgcgtctccttcgcggggcgatgggtctcagagccacccccagccaaagaaaggggcacgctttcgagatgtctccctggccgctcctgtacggagagtggcgcctgaggtttcagccccaacccgcctccctccgctagagtcagcggcggtctggagtccctgagccccgcgggcaggcgccacctggtctccggcccgctgcctagcacagcggcgaagctggctcgacgtgcgatttcggtttccgtccgtcggcctcgcccgcagtcccgggcgctgggagcggctgcgcctggcgcgcccggagcccagcggctccccgcggccgccccgcgggcgggtgccccgggacgcgaaggccgggcgggtggcggcgcccctactcacgtagcgctgtagcttcctctcggggggcgacttaacgagccagccggtgcacactgcgtcgcccgcactcatcgtggccgccgccgccgcttcctccagctgggccagccgcccgcggcagaaggaagtcgggccaaggatgccggcggggcgggcccagcgcccgcccgcccagcgccgccccgagcggccgctgcgacccccgcctccggccgccgcggcccccggggagggaaccgacgccgcccgcaacccaagacggcgggaaaagcaagcagcgaagcctgggaagccccttcgagcaactgcagctccgccagcggctgtgcccggggggggggtgtgggggggggagcctacgcagcagggcgcctgccactctcacccagggtcacgagaaagcgctcggaaggagccctgcgacctaatgggagcacagcctggaacctgttgccctcatgccccatccccaatccgccacgccaaacgggctggtccctgggtctcagggaccctggagctgaaacccaagtaccacctgcatctgccatgtgcatagttcacggagaaacaaaagcaagactcctcttggacttccctattccacttgattgcttgcacagtagtgtgttttctatgtccctcccccaaagatcgttgtattcagtgataagctttgccggctaaacggtctaaatgtcttaatgaacccaaatgacccaaactcaaaaggtagtgctgtttgcaatctctttgactcgaaggttttaaaagatggatctaaagtcgattgtgccaactagtgtgctgaccacgctaagtaaaaataacaatcatgagcacctaacacttgtgaccttccttactgccaagctaacaccatgccagcgattgtgctaagcactttccaggcgttatctcattgaatccacacaacaccctgtcaaagggctcttattattatctcaattttgcaggttactaaaatgaaaaacaggatgacagtgtcacttgtcgagagccacacgagaaaatcatccataggcagccagagctgtgtcaagagcccatccacttaagcaccaccctctgctttttgtgggtatcatctatgtgacgtttgctagcatcttcaacagaatgaccaacctcccatcctatcaggccagatgcttcagggtgatgagctaacatggtaacaccagtggagtccatcagcatgcgcacactggcttataatgattttcttgtgtgagataatgtcagtgtgaataatgggttcagtaagtcaatgggcaggagtgccagcagaaatgtgaattttaaaaaagcgaatccatgtacaaaattagtacctgttcaagtgagaaaaaattgctgccccttccagatggcagtccaggtggctgtctggtccccccagggaatgctgttattaagggttcattgtttgtctctgcctgtgggcagcttgagcacttagcagtggctgtggccatatcaactgttgccagtccctgagagccccactatgcattgctaattctctaagtcttgcttacacctctgttaaaaaaaaaatcccttaattatactttcctcatttcaaccccttgagtctactgtttgcttccttttgaaaccttgaccgatagacctggtcatgaggaactccctacgacattctgggtgtaagtccagggaatggtgatcatgcagcagcaggggccacaaagatgtgagccacctgctctagcaactttcctgtaccttccagacctgcttgagtctggtctcaaatattccacttccaaaagaggatgaaatagcaccaaatttatcagtggcagctgaagttccatggttctttggtgccccatggtcaagcattcagactttgccacagcccaggagcaagctggaagctgttggtcaaaaggaaaatacttcttttgtggtagagggcatggtttacttcaaaactctagggctttgctgtgtgtttctcctactgggacttgccagaggctccgtgtagcctcccagtgtgtcaaaggtcctgtacctgttgaatctacatggtcataagggtcaagtggcctggacctgtcacagagccttttcttgccctggatctctccccgaaaacatgcaaccctacagatgacttgctgagtgcattggtgcggcacaattaaatgtagcatatgttgcctacaaaattcaaacatccacaccaaatgccgtgcctctttctgagtggtaggtggtaagcggtacaacaacatgttgaatacccaacgtggtccagaccatctaaaaactttgctgaggttcaggctcttgagttttcatggggcttatctcctgccctgtggtgtacttgtatcttaataaagcatctagagtattcgctacctctagatcatcaggtccagtacatatgtcatcagtgtaataaaccagcacaacattcacaacaatcaagctccattcaacgtggattatgacagtgagccagagaatagatatagtcctaaggttgtacttctgttcccgctagatgaaagtaagctgcttctagtgttctctgctgaatgggaaaaaataacatttggcaaaggaatagct

SEQ ID NO: 1888765 - DNA, 4001 bp, Homo sapiens; identical to SEQ ID NO: 1563604

SEQ ID NO: 1888766 - DNA, 4001 bp, Homo sapiens
tctacctggatgcttgtggttgctccaaggggtaggacatcataggacacttcattttctctggccgtcttctctgcacatccaccttagttactcctgtgatgcacagtgccactggagttccctggttacgtgccaatccatcagcactcacagggtacttacctcatacgttctctccaagacagaaaacaataggattacatggcaaggagaacgaggagccactaccctttcttaccggaatacccataaacgcatcacatggtaaactgttcagggaaaggaacctcactgacctacaaacgtgaagatcaggttgtccgtggtaagtttatggtgcacacaatcacttacccagatagcagacacgtcccctgctcatgacccccgttcttcaggattttctcccgggaacctggaaaacatatactgagatatatgcctcagaaacacacaaggtgttctaccaggacacctgcaaatcacgatgctcacatccatcactgaaggactcttacctgaatgctagtgggggcccccaagctcagggcggtggtcccagaagacagcatttctctctacaggacacctgcaaaatgtccatggtcactgctgtgggaaggaacaccggataattaccaagtattcaaagttccactgtgaacacggggttaggcattgtctctgaaatatgcagagggaaaactcacggtttcgaatatgtcagggacacctgaagcgaaatcgggaacaacagggaggcctacaccatcatcaccatcatcacttaccaagacaagactcaatcatttctcacctgaataagtatgaaggaaataatggtggtaaggcctgtagggacacatcatcactcaactgtgtctctgtgacagtcccacggtgcaggctgtggtttaggcccacatcagcacttacctcagccagactctgtttcaaaaagaaagaaaacaatagataacatgaaagtcttacatccaaggaataaataaagctacagctttaagctggatacttataaaacacctaggttacaatggtggcaattggttgcaatttgtgtcacgtcatctctcatgtggatgcctacagaagcccgtgagatctaccagatttagagaagcctaccatacatgaagacctacaaattacccagattaaatgccattgctagggacacatcatttctttccagggtaactgtaaaatcccttggtactaccattactagtaacacattattccttgattggatatcctcaaaattccatggtcaccatatttttagagataccatcatctcttacctggttacttgcaaaatcccctgctccttactgtggttattatcagcatcatctcttaattactgacctacaaatttcgtcataaccttcacagttaagggcaccatcatgtctttactagacccctgacaatctcatggtcattttgtggttaggttcgccatcatgtctggaatagcacaaaatgccatgttcactaacatggtaagaaacatcttcagctcctatgtgcttacctgaggaaatccaattttggtactcgagttagggccatcatcctctcttatctggatatctagaaaacaccatgctcacccccactgttaggtttatcatcatttcctacctttataacttcagtatcccatgttcaattcctaagtagaaacactcatttcttacctggatattcacaaattcccgtagacattaccctggatatggccactgtcatcttttcactctatagctacaaaatcccatgggcactatcatggttacggacatgtctatcatctgttttttggattcctgcaaaatactgtggtcactacaatgatgagggccatgatcatcccatacctgaatcactaccaaatcctatggtccctgaatctcctggagagacctcaaggctcctcccactctgacttctgcctggctcaccagcctcagtgcttgctgtttccctatccccctttattatatcaacattctaagcagtttaagttccgtaacattcctttttctcctggttagctgtaacacagtgttcacacctgtccttaccatctaatgagaactgattattgtcatttccttgtaacttagtgttccttgtccttaaaattggccatggtgggagtaccaactaggatttttattctaggagagcgagttattaagctctcctggatgtgctgatgaataaagtaataaataaaaagaagtactactgaatagtaacacctcaatcttctcttttttcattaacttgatctgacttttgtggatgaatgtgtcagttcactccatacctggcttaaaatctatcgtctttccaaatatttatacttaatgaataaaatgggtatacacttttattacaaattagataatattatattaatgctgtccaaggacttacataatctcaatatgtccaaagttcataaacttgctgaaaaagaaaaacaataattaagtaattatttttatacaactgctggaaaaaaactcgttattttaaaaattagatgtattactagacctagcaaatgaaaatcattgagatatacatactcactgatatatgtatgtgacgtgtacatatatacaccacacacacacacacacacacacacacatccttacctcacccatttgccagagcaaatcttttctttttttttgccatgtaaatttcttcctgcactctttgtggaaacctaaatttccatcagtgaccgcatttagattccatgagattcttagtcacgaattcctttgaaaaccaagtaaaatgtcaagagagagaagcagcaccctatagcccctctttttagttccacagtgtgggagccaattttcttgtaattctggagaggaaaaaaatcaccatgtggctataattctgaagactgtttttttagattgcccagagactagcagatgcagaatgaaataaataaaggctatttttctcatgtttgaggtggtttccaattaatacttctttatttctctttgccactccacttttccccaatctttcctgataatagagtacaaataacctaaatgttctatggtgattgtagatacaaaactgatatatcattaggcaatttttcctttttaaagaaaatgttctattttttcatgattattcttagctactacctacttctactcaccaaagtcaaccatcagccatgagaaagaatattgaggccataattaaaacaatggcaggggcatgaacaacacctgagaatgctgctctgtctcctatatctacttctcattcaacccaaccctttactttttgaaaatgaaaaatattacctttttttctagtaatgattttgttaactttcattgattgacttcccatggaattatttcctggctggcagggaattaaatgtgatttaaaattataatgtactaccaagtgagtttttatgtccaaagttcatgaaatcatattcattaggggcttttccttcatattctgacttacatgaaggcaacgttttgcagtcatatgtattagtaaggtggtgatagggtaactgaagagcttacctctctgtgtttatcaacatctggcgacaagagacatctgacctctggtttaggctaagcagaggacaaagtctggcatttgggctttcagttatgccacaccctgacttagcaaggctctttgcctttagtagccttgtaccttccctcagagcatgatttagatgacttccaaaattaattctatattttatgtctcatgtcttgcctattatgtctggatataattgcaatactatgtaactgttatttttatatatgatatatgcagtggacccttgaagaacaagggttgctgtgcaggtccacttttatgcagatttccttctgcctctgccaccccaaggcagcgagatcaaccta

SEQ ID NO: 1888767 - DNA, 4001 bp, Homo sapiens
gtgaccttcccctcttcccatctgcactactcagggaagctctggctactatcctgccccgaacccttttccctcttgaccaaggggtcctctttaaatggtgaaataatctatgtggctatgtgttgggtccctctggggtggttctttcccacttctgacgggctcaagaaaattttgatttttgtcatttatccagcttttgcttcgtggtttgactgagagtgccatcctttactggtttctacatatgaaggagaagggttgtttatgagatgtttcaaaatttacgggaaacatttaacaaaaatggccacatattgagcttcaaggcacaacataataaattcctgtgggttgcaatcccagagtatgtcctcttgtccacatactcgggcgactggaaatcaatggaaaaggaaagcaatgggtaagtcagcacctgctctgaaattcagcaatacacttatagaaaaaaaaaattctaaaaataccaagacttgggacccagaagagagcacaatgaaaggtagcctgtattaatattaacgtgaatattaatatgccaatcttttgaggaaataagcgttatctgacttcttctaatggctgacaatgctctgtataacttgatgttagggtcaaggaacgtatattaatcttagctttggattcatatccctaaaagaccatgattacaaacactgcaaacaaaaacatcaggtaaagaatcacatcgccatgcctttaaccaccacgtggaatatcacaggaaggctgttgtgggttcagcttcggtcactcgtcccacattgggacaatgagtgttgctcatagacttcaggtcactcattggctgcaccactgtacactagggcatgagctgtttccgtggacactctgtaattctactgacacacatctggaaggaaggaaggtttctgttcaaaaagaaacgaaatgattattgtcagtgcaaaaagagaatgaattgcaatagtgatctcagagtcagggaagctggaaaacgaatggattcttgaaaatttatttagctatatgtacactgtaactgtgcctcgtttgcttatttacatggattcatggggagaaagatgctgaacacttttagcagggttaccttgcttcttatatcagcgtattcactttctctcttgccatatcgcacataatgaagttctggaaaattccaccatccagttgtaggagaatgagagtgaaaagggtaaacatcagtacattgataatatcaccacaaagataacctagaaagataactgataaaaacggccatttaggaaactgaggacatgaaacacgattacggaaacaccccctacttttccttggagcatattgcactacagatgtattggagttgacagtgttttgcactgtgggaaaaatgcttgaaaaaccgcagaaggccacacgccacatgctccccaagccagaacggtgccacccaccccaatctccagtggggtcccctccttggcaggccactggtctttagggccacgtgtggtggttctgaacagagcatttggctttcccgggtgctcgggcgctcctgagatagctcacttgcttttggtgtacctgagggtggcattcgtgccctgagactcagcgagcttgcccatcttccccggcagcagcaggcacacggccatccgaatgtcccgggaggtgatggtcacgcacttggagtagtgggccaggtgaccagcctcggtggcgatgcggtccagtatgtcacgaaccatagaatccatgacactcacggcctcctgggaaaggctgagggcctggtgaacctgcttcagcacccgggggaaataggcggcaaagctgtccccgaagatatctccaccgctgttggcatggcgcctacgggagcctcgaagccctcacttcttctgcttctgggccgtcatggagttggcctctttgggctcctggatgctctggtcttcctcagaggttgtcttagagaaagcctcagccatggtggaggcagtggccactggatggcaagaacagacaatgacggttgtggacaggggaagggtgggggggaatttagtgtggccacatggctctatgtcacagtccaactcgacatctgattgcatgaagtgtcacccagggagcctgtcagccatcctccctgcattgaaggtgactggatgatcctgttgcttggtatcatgtcaaccaatcacagtgggcacctgccggcctaagtggccccagttgcctccctcagacaaaagtacacagatagataccccacagggcaaaaccacatcaaccctccccagctgatccatgccacaccgtgagcactttgaagggtgtcacggaaaactcccaaagtttagcaatttcagctcatgctccttgaagagggcttgacctcctgagcccaagtccattatgccagaggaatgacagtggccacgtgtggaccacttctcacccatctcagaatcttctgttatcaagggctaagccaccccggcttgagcaggaacaccctgacatggctgccgaagggtcctgggcattaaagggacctggctgttcggctcctgtcctcagttatgatcgacaccttcagtgaatgtggataaggaacgatggccaaaccacagtctccaagcacacaacacaaacagaaattgagatgcttgtaaaaatattacaaatccttaaacatgtgcgaaatttaaaattgttttcttaacagtattttgatccccaaaatactctgaatgttagtgttggtgaataagtgatgttgggtgaaaaaatgttaccccaattctctaagaaacctccttatggagaaaaattgaatccatgaaattggaaatattttgaagttaaaaaatacccttcaagaatctatgataatacattcagaaacatttattaaatatatgaatgtaaaacataaatcccagaaactgaaccaaacaaggatttagcgattaagaagaattaaagaaatagcaatcaccaagaaggtaccatcccaaattccaatgctgtttcctgtcagacttttaagatcaggtcatttattgctagtaagatggttccaggtttaaagagagaaaactttttctttttttgagacagagtctcgctctgtcgcccaggctggagtgcagtggtgcgatctcagctcactgcaacctctgcctcctgggttcaagtgatttccctgcctcagcttcccgagtagctgggactagaagcgcgcaccaccacgcccggctagttttcatatttttttttttgtagagatgtggtttcatcatgtttccccagactggtgtagaactcctggactcaagcgatcctcctgcctcggcctcccaaggagctgggattacaggcatgagctactgcgcccagccgacaaaacttatttcaagaaaatataatatgatgttgatacccattgaaggaagcatactaaatatatatatatatatatatacatatatatatatgtatatgtatatatatgagcagctcatttataaatgtggttacaaaactcatacctgaaatactagtaattaaattacattacacacacccacccacacacacacacacacacgcacacacagggaaacagtttactgctataaataaaaattcagaaggatcgaactgggacaaacattactaatggaacaagcagacctcatacaatcttttttcaacattacctctgttatagaattcatttaaacacataacaaaaacccacagtgcagaaatagctgagtcaaataaatcaatgaaccctttttaagcttcctagaaactgaaataactgctctaagtcattcacatttgtctaattatattatttcccagtctacaatcttttttaatgcaaagcttaacccctatgagtatgcatcacttatgatagaagtatccaatgagagcat

SEQ ID NO: 1888768 - DNA, 4001 bp, Homo sapiens
gaccttcccctcttcccatctgcactactcagggaagctctggctactatcctgccccgaacccttttccctcttgaccaaggggtcctctttaaatggtgaaataatctatgtggctatgtgttgggtccctctggggtggttctttcccacttctgacgggctcaagaaaattttgatttttgtcatttatccagcttttgcttcgtggtttgactgagagtgccatcctttactggtttctacatatgaaggagaagggttgtttatgagatgtttcaaaatttacgggaaacatttaacaaaaatggccacatattgagcttcaaggcacaacataataaattcctgtgggttgcaatcccagagtatgttctcttgtccacatactcgggcgactggaaatcaatggaaaaggaaagcaatgggtaagtcagcacctgctctgaaattcagcaatacacttatagaaaaaaaaaaattctaaaaataccaagacttgggacccagaagagagcacaatgaaaggtagcctgtattaatattaacgtgaatattaatatgccaatcttttgaggaaataagcgttatctgacttcttctaatggctgacaatgctctgtataacttgatgttagggtcaaggaacgtatattaatcttagctttggattcatatccctaaaagaccatgattacaaacactgcaaacaaaaacatcaggtaaagaatcacatcgccatgcctttaaccaccacgtggaatatcacaggaaggctgttgtgggttcagcttcggtcactcgtcccacattgggacaatgagtgttgctcatagacttcaggtcactcattggctgcaccactgtacactagggcatgagctgtttccgtggacactctgtaattctactgacacacatctggaaggaaggaaggtttctgttcaaaaagaaacgaaatgattattgtcagtgcaaaaagagaatgaattgcaatagtgatctcagagtcagggaagctggaaaacgaatggattcttgaaaatttatttagctatatgtacactgtaactgtgcctcgtttgcttatttacatggattcatggggagaaagatgctgaacacttttagcagggttaccttgcttcttatatcagcgtattcactttctctcttgccatatcgcacataatgaagttctggaaaattccaccatccagttgtaggagaatgagagtgaaaagggtaaacatcagtacattgataatatcaccacaaagataacctagaaagataactgataaaaacggccatttaggaaactgaggacatgaaacacgattacggaaacaccccctacttttccttggagcatattgcactacagatgtattggagttgacagtgttttgcactgtgggaaaaatgcttgaaaaaccgcagaaggccacacgccacatgctccccaagccagaacggtgccacccaccccaatctccagtggggtcccctccttggcaggccactggtctttagggccacgtgtggtggttctgaacagagcatttggctttcccgggtgctcgggcgctcctgagatagctcacttgcttttggtgtacctgagggtggcattcgtgccctgagactcagcgagcttgcccatcttccccggcagcagcaggcacacggccatccgaatgtcccgggaggtgatggtcacgcacttggagtagtgggccaggtgaccagcctcggtggcgatgcggtccagtatgtcacgaaccatagaatccatgacactcacggcctcctgggaaaggctgagggcctggtgaacctgcttcagcacccgggggaaataggcggcaaagctgtccccgaagatatctccgccgctgttggcatggcgcctacgggagcctcgaagccctcacttcttctgcttctgggccgtcatggagttggcctctttgggctcctggatgctctggtcttcctcagaggttgtcttagagaaagcctcagccatggtggaggcagtggccactggatggcaagaacagacaatgacggttgtggacaggggaagggtgggggggaatttagtgtggccacatggctctatgtcacagtccaactcgacatctgattgcatgaagtgtcacccagggagcctgtcagccatcctccctgcattgaaggtgactggatgatcctgttgcttggtatcatgtcaaccaatcacagtgggcacctgccggcctaagtggccccagttgcctccctcagacaaaagtacacagatagataccccacagggcaaaaccacatcaaccctccccagctgatccatgccacaccgtgagcactttgaagggtgtcacggaaaactcccaaagtttagcaatttcagctcatgctccttgaagagggcttgacctcctgagcccaagtccattatgccagaggaatgacagtggccacgtgtggaccacttctcacccatctcagaatcttctgttatcaagggctaagccaccccggcttgagcaggaacaccctgacatggctgccgaagggtcctgggcattaaagggacctggctgttcggctcctgtcctcagttatgatcgacaccttcagtgaatgtggataaggaacgatggccaaaccacagtctccaagcacacaacacaaacagaaattgagatgcttgtaaaaatattacaaatccttaaacatgtgcgaaatttaaaattgttttcttaacagtattttgatccccaaaatactctgaatgttagtgttggtgaataagtgatgttgggtgaaaaaatgttaccccaattctctaagaaacctccttatggagaaaaattgaatccatgaaattggaaatattttgaagttaaaaaatacccttcaagaatctatgataatacattcagaaacatttattaaatatatgaatgtaaaacataaatcccagaaactgaaccaaacaaggatttagcgattaagaagaattaaagaaatagcaatcaccaagaaggtaccatcccaaattccaatgctgtttcctgtcagacttttaagatcaggtcatttattgctagtaagatggttccaggtttaaagagagaaaactttttctttttttgagacagagtctcgctctgtcgcccaggctggagtgcagtggtgcgatctcagctcactgcaacctctgcctcctgggttcaagtgatttccctgcctcagcttcccgagtagctgggactagaagcgcgcaccaccacgcccggctagttttcatattttttttttgtagagatgtggtttcatcatgtttccccagactggtgtagaactcctggactcaagcgatcctcctgcctcggcctcccaaggagctgggattacaggcatgagctactgcgcccagccgacaaaacttatttcaagaaaatataatatgatgttgatacccattgaaggaagcatactaaatatatatatatatatatatatacatatatatatatgtatatgtatatatatgagcagctcatttataaatgtggttacaaaactcatacctgaaatactagtaattaaattacattacacacacccacccacacacacacacacacacgcacacacagggaaacagtttactgctataaataaaaattcagaaggatcgaactgggacaaacattactaatggaacaagcagacctcatacaatcttttttcaacattacctctgttatagaattcatttaaacacataacaaaaacccacagtgcagaaatagctgagtcaaataaatcaatgaaccctttttaagcttcctagaaactgaaataactgctctaagtcattcacatttgtctaattatattatttcccagtctacaatcttttttaatgcaaagcttaacccctatgagtatgcatcacttatgatagaagtatccaatgagagcat

SEQ ID NO: 1888769 - DNA, 4001 bp, Homo sapiens
aaagggcatatgtggtctccaatctcctcattccaaccatgaaatcaagagagaaccagggttaccagcctggcccctggtttcccacgtctctcttctccctggcccagtctagaagcttcttgcaggcaggtaccacagtttggtcaaggtgccatgcgtcccaggtcctagccaggccctgggctgccgctggtgaacaggaagggggtctgtgccctgccatgcccccaggtagagctcccctgggagcatcctccctggcctgggacctcccagaccccaccccccggttgagtgatggcactgccaggggttgaagaccctcagccctcgacgttgtcctctctccattggatgccgcctctctctagccacccctctctccctctctgccccttcgagctttttctctcaatatgcaattttctcttttggtcttccgcactcttggcccccagttctattgcagatctgtttctcactccatctaaactcttacccctgtgtctcaggagctgctcttgctgagggaagaaggggacactacgggacaggggggcagtgtcgtactaaggacctgggctctagccactggaggaactggactcatttgggccctcaggaagcggctgagtcttggtggggtaacccggttagcccccgtaagtgaccagcacagggctgagcccagaggaagtggccacccacagagtggttctcatgtccgaggggacctgcagggattgagcaagaagactgactcgctggatccttcgtctctgaatcagttcagggcaggcaagctggggagccccctgccccgtcctgccaccaccagccggatcgggccctctttttaagggaagaaagtctggagtggaagggagggcacagggcgccaggagcctacatgaagtccttccagaaatccacaacagctacctctctgatcctggagaaaccacctccttgcttaggcccaagcaggttcctggcaggctcaggaccaaattccaggggccactcatgggcctagcagcccaaggccgcctccccctcgtctttcttccatctctctttcctctgcctggcgagatgccagccagcacctcagtgtccccatctgggcagtggaaagtttgactctctgggtccttgtttgagtgagtgcgagtgtgtccgttcctttgctgtctgccccaggcgggggagggggggggaggtggtgggggcgagggggcgggggctcagctagtccagccgtctacaagaaaattgctccctttgaagctgccaggggggccgggaagcctgccccctcctgctcgcccgccctctccgccccaccagccccctccctcctttcctccctccccgccctctccccgctgtcccctccccgtcggcccgcctgcccagcctttagcctcccgcccgccgcctctgtctccctctctccacaaactgcccaggagtgagtagctgctttcggtccgccggacacaccggacagatagacgtgcggacggcccaccaccccagcccgccaactagtcagcctgcgcctggcgcctcccctctccaggtagggctggcttcaagctgcctcctcagcaacccagagatgcccctggctctgctgcctccgctgtcccaagccctggtcctgctgtccccagtgccgcgagggtgtccacagatttccccggtgctctctgtaggctgctgatccacgccccttcatcgccaccctgcggcccccttggtccctgtcaggcttctgcctcgtctcgccgccctccaggcacctttccctcaccccttcctctccctctcccttctgaccttgctctgcttcatccacctcttgtctctctgcctcccgctcggggtccgtcttcttggctaccaccctagagcgtggctgggtgactggtaccccagctttgccaatggccctgtttcatcattgcaagtcccaggcgcatgctccactccctcagcctcgctctgcccaggcgcctccttgctccagggcttggcgcctggcccgggttgggtcggatcggggaggaccgcccagcgcccaccgagctcagcacccaggagcagtcctccgctgcactgcctgaggccagtccttggcatgggctgaaagacttagtttcccaggcacaccccaggcaccctgcccagatgttcctcgctcgctcacccccaggttaatgctctgcctctacatcctctgtgagaagtctgggtcctgggagccctggctgcaagggccctgactgggggtgcctgggtggctcagccctgtctgtttccaggacccccttggactgggactcagaatgggtgtggaggggaaggagagaaaatcaggcaactgtgccatgctccccagggcggacctggcttggggtcccagaggggcctgccaagggacccaggagagggagcgagagagtgccctggaaggcccacggaggggagcgccccctcactgctccatgggcggggctgggtgcctgagcgcctgctgagcagagcagggggcccagggatctgcagggcacagggtacatcagtctccagtggtctgtcttggtgggcaggcctctctcctgctgtcctggctgccagactgctcaggtcccatcctcagggggtcctgtttctgggccctcgcccctccctggcctgccagctctctgccctatagcaactaattggaactgagacaagctggagatgctcagcccccctgcccccgtgccagaaaggctcccggggaccagcgcccaggggtgcgggtgagcacctcctggtgacacccagccgccggtgccagccgcaccccaggagagctggtgtatgagcatggatgtcttggtgcggagcatgcccatgtatggccactgtgggccagcatggtgagcctttgagggcaagcccgtgtgggtatattgaaaggaagatgcagggctgcctccaagccaccagggctgggcggtgggagcaggttgcgagccagggagcagagagggctcccatggcaagctggccagctgtgggtggcagccctggcctccctggcccaccttcaagccccaaggacccgtacggcagtgggcattaaccctaccaacgcatagatggggagtctgggaaaggaaggggggtgtttccaaggcaagaatgagtttcctgtctttagcaacattccagagtcactcaaacaaagctatagcgtgtcccttccagtgacagcgccaagtccccagaggaggggtttgtaatgagttcacacttgacagttagcactcagagccttcagcaagggcttctgagtccttgccaccccgtatagaggtgggatgaggacctccccacctgccgtctcctgtgcttcccgggcccaccccccaccccccaccccccagcatctccagcctgcccgggagtcacatgtcctcggcccacagaatccccagcacacgccccacccacaggcctagccccagccctggggtccctggcaccccacctgccagggcccctcccctgccttgctcaccccccaacacccctgcttgtcggaaatgtcttcccatgcccaccacgaccccctcccactcatctgtgggccggagagcttggtccctgccgcacgttgcccccctagcatccaggcccaccaccgagcccccgacaggcctgggagccccactggtgggtggggacccaccagctgggggtcttgctcacaccgaggggctgggggtggcggtggctttcccagggcaccctgccttgggctgcaggccgctgggtgggcaccggctccctcggaaggcagcgcaacccgggatcctgccggccctggcccccaccctgccgaccgggcctggggcgatcagtgccccagctcctgtcctcttctgctcagatgctgggttgggagatcaggggccacagctcggccactcagagcc

SEQ ID NO: 1888770 - DNA, 4001 bp, Homo sapiens
tcgggtccggtgccacggccccgccacggccaccgcgccgtggccatcaaggagctcatcgtggtgtttggcggcggcaacgagggaatagtggacgaactgcacgtgtacaacacgggtgagtgcaaagcccgctgggtcttcggctctttccctccctccatctcctccctctccctcctctttcctccctccctccatctgctccctccctctcctccctccctccatctcctccctcaccctctacccttccctctctctctcccctcctcccttacccgtccttctcccctctccccgtccccctcccccttctcccctcctccccctccctccccactgatcggcttgcccctcccctttgctgtgccgggcttcagtgcttttctctgatcttctccccgttcccttgtctctcccgtgtttgaggattggttttcgttagttaaaagaaagcccctagtccgactggtgagggagaggggctgtcgccagcggtggtgacttcagacccacaccgttacccagcgggctggggctggggctggggcgggcggatgtgtccccttggcgcaggcagagctcccctccctccctccctcccttctcctgcgcctgctcagctctccctcatctcgagtgcccattctggagaaatgaccatttctagattacagattcgttctctgtctctcgaaaaagggagggaagggaagcgctcttaggacgcagagtttaacatccgccgacccgggtaatgccggagccttggggacccctaggacgggccggcggcagggccgcctctccctttccacgtttacttctgcagcatttctttccaagtcgccccttctcctaatctggtgccttctggtttacaagctgaattccagttacccctcagcggcctgcgtagtcgtgtgtctccccgcttctgcggatccagggggttaccccacccgctcttctgcctccctgcaaaacccaaagcccgttagttgggaaggggaggaacctctctcttcaggtatggctgatgcaccacggccttcgtgggggccgtttgttgttgcctctgcctagtagccttgcttagtctctagggcagaaagcctgctgctgtccacgacagctttgtggcatcctttttcttggtggctacttggcccgttttgtgcccctagcacaagggtcagttcccaagttgcctactgactgcccgttggcccacaggaccctggccttgcccagaaggcagggtcagggtgagttcggtcccaggcaagagctggaagagtctgggtgagggaaaagccccctgcaggcggctgggggagggccttgggatgccctagtcctgagtggcaggcacggctcccagcactaaccccttgctccgcggccgttctctcctgggggctctagcgatcccctggcctcggtggtggccctgcagacaaaccctcgctgagtgggctttgtgtcctgagcggtgagaggctgctgttctttggctgagctccagtgcctcgatgctctgggggtgggaagctggagctgcctggagggagaaagttggtttagggagttgggaaggctggagctgggctcttgggtgccgcttccttccccaccccccaaggcagaaagtgctggtttctccacatctcggagattatcgccacctaccacgttgactttgaaaggctggtgggttgtctgtgaccgtttttcgttccaggtctctcagcacctgttgcctccagggagcagggcctttctcagcagcccccgggcgggggcgcttggtggttggtggtgccccgcgccagcccaggcagctgcagtagcaggaattagctcagtaagctaaggcttctccagtggtggggctgtttatagaggcaccgtcaccatgagcagcaccttctccactctgtggaccgactttcttctcataaggcctggagcaggctccctggcagggaaatgcaattttagaaagtagggcaggggcctaattacagtcggctccagagtccaccaccactgctgccttggcttcctggggcctctgcatattcattagtttattaaaatgaattgaccactttggcatgaattcattaccagtctgcaaagacaggttgtgcattagaggggtagcctgccttccaaagggctgcttaaaatgaagctctgggatcctccagggtagcagtttggaaactgtcatcggcaattcctcagacgagagagcagctggcagacctgaagccctcttcctcaccggggtttctgccccctcccgccagcccggcctcgtcacctttgtcttgtcttcttttgttgtgtttgggatgagatcagggcatattctcacgcctgtgccccttgcagttctgcgggatcagtcctcaaaaagccttgtacctttggagagagctgatctggaaggggttcccgttgctaggataagaaagcttcagggggtgtgtgctttgagagctcttagggtagctactgtgcttgtccttagggaattttagttccatgtggcaagccaaaggattcagagtgctgccaggtgtggggggtgggggagcgagagctttggctacggtggctctgtaatgtccataggttcttggagctggagggagccttggaaaatacctagtggaactacttccttgtttctgcagatgaggaaattggggtccaagaggggaagtgacaggtccagggtcgccctcccagctggtggcggagttgggcgggagtgcaaaccttcatagaggccgttctgccacctgtctttggggcccatcacctttgaaatgcctccattctctcctctgtccctgtatctaattgttcattgcgttgggcaggcatcaaatgtgtccccttccacaccaagccctcctctcctcttactagactcttgcagtcacttcctgattggccctgctagtttcatttgtcgggaaatcctgttcacccttcaaggcccggctgaaacgtcacctcttctgagaagccctttccactcctgtcctcccctctccagcagtcgcactgctctgtgctcccaagggcccggcttggtcagagctcttctagggtgtttgtctcatcgtgggaggggggcatgcagccttcctaccccattgggagtatgagcacaagatcggtgtcctctgtgcctcccagcacgtcgtatgccacacaggaaatgctctaatgtgacaggtagaacagagaggaaggcagctcgttgaacttgaccggccacctcactgcatgggcaccagtctctaggtggtgatgggacagtggcaaccagggatggagcttgcagagcatgaagtggttgggggagctgatgaaacacagagaggccggggcacagccttgctcaggagaggggagctggagtggtcttcatctagtgcagggtcctttccccaccttcccctcccagctgagagccagcatttccaggatgaggggcccaaggattgggttacatgacaccccccagatgattcaggggtgactgagagcagctgtcacattgaaaagctgggagaagggaggagagcttgctcgtgtgctttcagggggcggaaccaggactcgtgggtgagatgaggagccgcaggtttgtcgtcacaccaggagctgtgctccctgacagacctctcttgacgggggtggggagggcccctgccctgcctggagtgttctagaatgagatcagcacctcttgggtcctgtagaaggatctggtgagcgggatccccaaagatatcacagggcgcttctggcctggcccaccggctcactgatcagcgtgtgataggaaagctgcccactgaccccacgtgccatttagctttgtcccaaactctgacccgcagccccatagctgtgggctttgaccacgagggtgctcaggggagtgagggtggctgcctggacatgggacc

SEQ ID NO: 1888771 - DNA, 4001 bp, Homo sapiens; identical to SEQ ID NO: 1563720

SEQ ID NO: 1888772 - DNA, 4001 bp, Homo sapiens
tagaagtcatttggcatccacatacttcaccaaaagtcagcagcttcagaactgaacatgtaatgaagagaattcagtgcctggaaagaaaggattttattttaaagactagttatttttatacttttttttttaaaactagaggcccccttggggcctgggctgtggtgctatcattgatggaatccatgagctcaagctttgaatgccaaaaggatagctttctttgaacttgaccagtggttcccactctctacctttaaagggcacaactggataagatcatactttgacaggagagagagagagagagagagattggccagggggtggtggggggatatgcaggctggccttgagagtctttaaatgaagtgactaattgctttttgtctctgtggtccttgttgtgtatatgttttctattctttctgtgggtatagtaaggataaacggggttctccaaacactaacgcaggcgccaactctccgtcatccacaaagacccggaacacatctaagagtgggaagtaagtgaaaaagtgctcctgtacatctgacatagctgtcaaaaagtcaagtgctgtcctccttttgtcatttattcatattcattcaacaaagatttgtggaatgtcttctgtgtgcctcccactgggctcgtcactggggaattgaaacgagcaaggcatgtgtcagtaatattgggtgcatgaagaactagggaagagggaggagagggatggaaaagtcaggagatgactctggaaagatagcttagggctgactgtgaagggcaaggacataagtccataagggcaatgtaagagttggattacaagttttaagaattaaagcagcagcagcagcagcactgatttatgacttacaaagtccatgaaaacctgtcctgatccatacactgagtttaggcttgagttagaagaatctggtaagcttttccataaatttcctggtttaagtacatttatgttttaaccatatcactgatttatatgatatgtatattcttttcctagtaactaatatgcaccaagtcctacatgaagctgtttttttggtattaccaaaacttgtatgggctgaatatttgcgatattagattgaccttttctgggcttattccagaagacaacaccagccgatctctccctttggcttcagcaaagtgtggcaaactcaggcagtgtgatcccacgcagatgacatacctctaattagacacttccccttggaagttgcttcaaccctgtggtgaatggctcgagttctccgtaagctctctctccagggtgtggggcattgtgacacgcagaaactcagtccagaaagagcacccagcctgcatctaggagaaaatgaaagataccttcatcatgctaaaagctctaatctagcaataagatatgtcactacaagagcacagctttgcaatgaaaggtgaatttgtaatggtcatatattttatgtattcagcattggaccgtaaatgctgcactttgaatatgatcttatattcaattcccaaagtgaaagatctactggctgcctttttttccttcttttcctctgaataccatttcaggtttgcatataaagttgaatgcgggttatcttgcaaaatataaaaaacggtgttaaagacataaaactaaatctccaagcagttagaactcatttcagttatttattgctgagcaccataatcaaaatgctgtataaattatgaaggaagggaattgatgcacacattcccaggcagctgaatgttttcaaattagtcccaattcattgttaacacgcactcttagttaacagggatggcattgcagaacttcttttaactccatgcttacaacaatggcagaccctacctgggcaccctgtacctacctgtcacaccaaaaaccacagggcacaatctccatttattagtccctgatgtataattatggatgtttgtgatttgctgttgcctttccaaaggggccttcccttgtttcttttggctttgcaggagttcactgtcttactttttgagtgaagaatctccatttgagctacaaaaggagcaattggtagaatctgagttaagatgacatagagaatgcatacctaataccatacccaggttttcaacagtgggagggctgaataaatacattcttaaggagataaaaaatgatctatatctcacttgccatacttggtcacatcccaagcttctgccatggtgaagggtctctctctttgcacattttgagataggtaacttttacttgacatgtatagtgactcatagactgagctagttctgaattcttcattgtttttattggttgttagtgaaaaattacaagttctccgacatcctcttcctagatatgtgtgccagggtttcttgcactgttctcctcctcttagtcctctcccatcagttttcaggagatttttctttttttccattagtgtacattttctccttcttgggatatcattttcaacaggagcagtactgaccttctgtgcatatggtgagactatgaagggcatttttcacactttatagaacagtgcctatggatgtttaggcactgtgttctagttcagagagagttgtgattgccagttcctgctgcactgtctatgcatttccttagctttggtgtgtgtggtggtgaggaggggataggtagatgtctccaccccaaggcttttccccatggtgtattttctttcacaacaaccagcccagaggatgccatgttctgatgttatttgacctaatgacaataggatatagagcagtttttaagaatttccctatgttattttgaggccagacacaggctgggagatagaaggagggttctttccttctctgaaaagaaattcagtcttctctgtttttgaagaaaacaaaaaagcaaaagtcaagctgccccaaatatgcatcatggctaaaaataaggaatatgtgttgactgagtgttacgggccaacctgtgtcccaagcacttggtacattttgtctcattaatccttgcctaccaaaagctcatgaaacaggcactattatttctattgcacacatgaggaaattgaggctccaagaggataatgatatgcccacctgaggtatccaaatgaacaattttggtaaaaaaccttctttggcaccaatgataataatagtagtagtaattaaaatatattaagcatttactttgtgccattgcactagactctggggccatataaatataaaatactataggtgcccccaagcagttcacagtcttagtagggaggacagaggatgacaacgtggtatttaagtgctacaatccctagctgatgccagggttggggtgggaaataggtcatatggggatatcaataaaggctcctgagaagcaatccctgagctctttaattttatccatttacccttcatgtagcaaggttaggtcagagaaagaaaatgcaagtcggtcactccagaggggcagaatcctctgtgtcttggtcagaacacgttggagttgtggattaggtcaaagctaaaatgaaatgtctaattccacctttttccaactttcaatccatttggagcctactgagattcagtgtagcatgctgagtcgcttaggaaacctacagcttgaatgttgcgtcagttctggttgctctatttcattgcctggatgtgaagctgggtagccagccctctgtttcagggaggaacagatggaatgggatatgtctgagcagcagagccagactaccctggaaatgactttcagggaggtgcaagcagtttcttctatgccaacagtgagccaaattgacaagacagaaaaaaaaaaaacttcagtgcagaactgtgtcactgagatcaggaagcataggttttgcagaggttgacccatgaccaatcaggccagaccactgcatttagcctcacatatggttccctt

SEQ ID NO: 1888773 - DNA, 4001 bp, Homo sapiens; identical to SEQ ID NO: 1563743

SEQ ID NO: 1888774 - DNA, 4001 bp, Homo sapiens
tatcctcacttggcagaggcactgaaatagtagggagtaaagggctgtgatgtctgtgacacatttaagcacaaagaagaaaaatctacataaatctaagaagaaaatgtggcaaaacattaagaattgttaaatttaggtgaggaatggtatttgagtattcatcataatattcttaatatttgtctatgtgttgaaaaaaaaatcaaaataaaagtgaaaaaagaatgagtcattctagaaacctaggctgcctggtgggaagtgagggagggaggtttggagaaaaggcacatcttacacttaggcatgcaacatctgaaggcaaggcaagggcctgggggcggagaggcagcagcctggccagatgcctggcctctttcccttctcccacagcttatcacctgcagggtgtgctcgatggcattagggaagttcttcagggtacagatggggatggacttctcaggtgggtcctggctggaactgtacgactctgtcaggaaggggatcaccacctgcacattgcctttggtgcccagtgtgcctgactccagcagtggcttccggtagtagacacagcggcggtccatgtacatgcctgtggggagcacaaagcgagagctaggaaagaaacatcaggagaggacagaaagacggacacccctcttggtatatacacaccgaaacacacacaactttgcccgtgaccacctcacccgcctccaaactcacgggcatccacgttgtccagggcattggccacgccatctaggttttggaaaaaatcgtcatcatagatgcgctccgtgtcaggacccacacggttctggtggcttgtcacccggatatgtggattcatttggcgcacagctgcagcagccgtgtcagactttaacttctaaagggttaagaaagtgcagttccagggtggggatgggggaacaaagctcacttatttgtgcattcacccaacaaacatctttattttttttgagacagggtctctctccatcacacaggctggaatgcagtggcatgatcacggctcactgcagcctcaacttcccaggctccagcgatcctcccacctcagcctcccgagtagctgggaccacaggtgtgtgccaccatgcgtggctaatttttgtatttttggtagagacagggttttgtcatgctgcccaggctggtcttgaactcctgagctcaaagacctcggccccacaaagagctgggattacaggcgtgagccaccgcacctggcccaaacacctataaagggctgtctgcctgagactgatttacttaatgctggggaagacccaggccctgagttaggaggctagcaggagagacggtctgtgacaatgccacatggccaggatgatgatgcatgtggcaggggctcagcataaagggaagctgtggacaggaacagactggagacaatgggccagacatctgttctttcgtctaacacctgctattttttcaggtaacagcacccaggattgatgcagactcccccaaccaccaccaggatgctggcacacagacaagcaggatcctttcaaagcccaaattgggccacgtccctcctctgctcagaatcctcccctggatcccacctccacttaccgtaaaatgagttggctccctgacccctcccacctcaggatctttgcgcaggctcttccacagcagagggcactctagtccctcatatccttgaggtctttgcagaactcaggccttccttaaccattgtcatcaatactacaaaccattctccctgacaccccgacttcccttgtctggttttagttgtttcctttgaggagcactcatcaccaacattaactatatacctcacgatcgtattgtgtctattgtttgctgtccgttcccctctccctccaggaatcttgttttattccttggtatatccccaatacctaaaacagtactaaaactatctggtgaataaatgaaataaatgaaagggggaataaatcctgggtaagcaaaaacgacactgctccttacagaaagcttctcagagaaccctgcataaccaacccagtttccatatgtgcagagaagtgtaagcctaggagactgaaactacaacccttggaaaggcctgcttccaaggtcggctccttggctggtgtctgggaacttggaattcaggaaggttcccaccgctccctacctggtatcagtggttcactgtgcctaaaccgttcatgcaaacaatacagtttacgctgaacacctttccttctgggagtctggaaattttgttatgtgccaggaagggggcgcctacatgaccagccccaagtaaaagaggtggtgctgagtctaacaagcttccctggttggcaacatttcatgtcttgttacaccttgttgctgttatttctgtagttactgttgctactggggaaataaaggccgccttgtttaactcccgctgggagaagactcctagaaacttgcaccagccttttccctttgctgattttggtctgtatccttttgctgtaataaattgtagccacaagcacgactatatgctgagtcctgtaagtactctaggtgaattgagcttgagagtagttttgaggaccccagacacactgtcccaaccagcactaaaaagaggttaaggcaaaaaaaaaaaaaaaaaaaaaaaaaaaacagaagctgagggaaagaaaggccaaaaagaagggcttctggcagaggcagaaagatctctgacagaaagaatgggaacaagaaaaaggaggggtgaggtgtggtggctcacgcctgtaataccaacactttgggaggctgaagcaggcagatcacctgaggtcgggaattcgagaccagcctgaccaacatggagaaaccctgtctctacttaaaatgcaaaatcagccgggcgtggtggcgcatgcctgtagtcccagctactcaggaggctgaggcaggagaatcgcttgaacccaggaggcagaggttgtggtgggccagagatcacgccactgcactacagcctgggcaacaagagcgaaactccgtctcaaaaaaaaaaaaaaaaagaaaaaggaggaaagtgagacgacaaagccccaacctcctaccctactcaccgtgacatcccagggccggaaaagaaactgtcgattcagatttgacttctcaatggtgtccatgtctgtaacgatgatttctccaccctccccgcagcccagcccaatcatggcaaagttcttgagcagctcacagccaatggcccccgcacccacctaagaagcaaccaagaagacaggcagaggctggtcagggtgatgcaggttagtgtgaagctacccatcacccctcactcccctgagagacggggagaggggctaacaccacatcttcaggttgcaggactctaagaaatgacacgcagtcatgtgaggaaggaggcaccagaaggggaaacgagggatgcactgggcttcccttcaagataaggagaatggcaaagagaatgcgccaccggttgcattgagatgccgaaggaagccccaggggtgatggccagaggccaagatgaggggagcagacatccaaggggaccacttaccaggaaatacttctgcttgcccagcttctcttgcaggtctgagccaaacacagccacttgcccgtcataacggttctggcgctaaggaatgcaaagggaggagggttagagaggcctccccagaaatgtccccaatgatgccctccccacaggtcccacccacatacctggaggcacttgtcctctgtgaggacctctttgtcctcagggagacactcaagggcatcaaagtatagccactgcatgatgggcatgaacttcccggagcaggcctggagaggggaagggagagagggggtggtcagtggttaacaggggcctgacacagacagagagcaagtgacagagtcatggaggaacctggccc

SEQ ID NO: 1888775 - DNA, 4001 bp, Homo sapiens
caaaacaagtgtgattgtacttaacactactgaactgtatacgtataagtttgagaaatatctcttttaaaaagggggaaatgtgaaggcttttgcatgtatgccctaggaaatgcatagaattcttagaaaggtaaacatggtaaaaaaagaagtctttgttaactttctgcagttcacctgtttcaaagtatagttacctttaaaagggtaaacacacaagatatgcattttccaaagcatacaggctttcctcctagctgtcttgttttttatttttttttattttttttatttttttgagacagagtcgcgctgtcacccgggctggagtgcagtggcgcgatctcggctcactgcaagctccgcctcccgggttcacgccattctcctgcctcagcctcctgagtagctgggactacaggcgcccgccaccacacccggctattttttgtattttaagtagagacagggtttcaccgtgttaaccaggatggtctcgatctgacctcgtgatccacccgtcttggcctcccaaagtgctgggattacaggtgtgagccactgtgcctggccttcctagctgtcttgtgaaacgataagtcaaaaccctactgcagtgagttttccaaactgaagggagaagcaatgtacagaatgcctgacttgcccttacatcttatacctggtgttctggcatgattattaaccacactctttttcactttgaaccatgtcctggtttgcatggccagcttccctgcagaggtgatagaaactgacttgaggcagtttctttctccatgccttagttagatgaccctcaaaggggcacagcagatttccctggctactgatacaccttaacaagaagcttgtgttttttatgccctcaaaagtgttttacttatactttcctagacataaaggtggaaaatgggcctaaggtctgtcaaaggtcttggaaaagaagattgtattaaaattgctgtccgtcttcattaaataatactagatcgatacaatgctttctttacagtattagtggttggtgaaagacttccttcctattgttacagtatatgtatatatctgtaaaattaatgagatatcctttaacttgtagattagaaagcgactaaaaactcataggggatttactaaagaagcaacaatgggaagaagcagccgatcctcctcagtgcacctttttctgttgcacagtacagtgcacagtgtgctggcatcaccatatagggcaagctgtgaccgcctttctcctttcccagggctacatggtgccaagcaggttcagtgtacactggttaccaacctgtctgattccattgtgacagaacacactcacacccaatacattacatgaagcagatttattacttacagacaggaagcaagggacaaaagaggccctggctccattgtgagccagtcccccagggctcaagaaagctgcccagggcggggctgatggagtcttgattgtacgtgccccacttgcaccacagcctgccttgggttatataccataggagccacataactcattgggcaaagctttaaagtacatcctccttccaggggaaagaggaacacaacctcgctgtctcaaacagttccctaaatcaagatgttacattccctaggagggacaacaacaaggccaacctgtttcaggcagttcctccatatcaggatattgcattcccagtgcattctacagttattcttaagaactacaagcaaggaagaagggagaactgggtcagtccaaggccacctggagaactgtcttgtacatgggttagggtaaagttggctattctaaaactaagcatccgcccaaaagaagtcttggaagatgtctttccctgttaaattcagatgatggtaattatagtttggaagtggaattggcttttagagttacttcctgtaatgaaattaacaagcaattcaggcctatttctgaaaatgaattcagtggttaattgttaaaaataaatgtctaactcctataaaaggaaatttacattcatttctaactcactaaaaaatctatggccgggtgcggtggctcatgcctgtaatcccagcattttgggaggccgaggcgggcagattaccggaggtcaagagttcgagaacagcctggccaatatggtgaaaccccgtctctactaaaaaatacaaaaattagccaggtggttgtggcatgcacctgtaatcccagctacgcaggaggctgaggcagaagaatcgcttgagcccaggaggcggaggttgcagtgagccgagatttcttagaaggaattgttacttattgttctgaagtgaaagtctggtctgattcagaagaaatgttacaacaacttaaacactgatgctttcagaacgggcagcaattctcagcgtaaattctgatcacagggaccagcaaaattggtgagttgcatagctacaacattctgtgccatccagggcactctagtttggggatacaactgccaaacctccaactagagagtttagtttaagatttagtcaagaagcagaaaggtaaaggtgacaatgtgtagtaaaccatgatagatgttataaaaggtggaatacttgtactggaaatgcatacagcgcctcatcccctcttgaggggtcaggaagttttcacactaatgatgatggtgatgagatgatgtaacagctaaagttttggaggcattcactattgctaggcactgtatcagcatataacatggcttatcttactcagttttcacaataaaagggttatgagatgggaactattattactatcttgatttttacaaatgagaaaacaggagtagacattaaggaatttactcaagatcacagccaaccaatgcactgagctggacaaggtcaacttgggggtgaagggcatatgtgttgctccaagtgtgtcagtataagagagattagggtgaggttttatgcagagtttgggcttcagctgagtaattctaaggagggattaggggaaggaaggcagtttagtaattgagtatctcagaaactttaatttggaggagaacggaacaaaggtaggccaaggaagctattcaatcactcaaaagatagaggttattagtcattttacagctgtaatgcatccttgtgaggaacattttttgcttggccttgtccctggccttgtatgtgtacattacagtctgattattagttgggatgatttttagtttctcaatccctactctcattgccccagtttaattcctcaacacctctcacctagattattgtgatactctagttttatcttttaaatcctttatattgcaaagcagagtgatttacctaaaacacaaacacaaccacaataagcctctatttaaaaagctttcaacggttcactgttgtctctacagaatgtaaacagagcgtcttaacatggcacaccaggccctccttaacctagccctcccagcccatcacaacaactatattccttgatattctcgaattgcactttattttgttttgtttttttgagacggagccttgctctgttgcccaggctggagggcagtggtgccatctcggctcactgcggccgccacctcctgggttcaagcagttctcctgtttcagcctccagagtagctgggactacaggcatgtgccaccacacccggctaattttgtatttttagtagagacggggtttcaccatgttggccaggctgacgaactcctgacctcaggtgatccacccgcctaggcctcccaaagtgctgggattacaggcgtgagccgctgcacccagcctcgaactgcactttaaattggatagctgggcgggcgtggtggctcgcgcctgtattcccagctactcgggaggctgaggtggaaggattgcttgaccccaggaggtcgaagctgcagcgagtcgtgattgcgccactgcactccaacctggg

SEQ ID NO: 1888776 - DNA, 4001 bp, Homo sapiens
ggagtctctctctgtcgcccaggctggagtgcagtggcgcgatctcggctcactgcaagctccgcctcccgggttcatgccattctcccgcttcagcctcccaaggaattgaatattttcttaaaggcagttgagaaagtcaagaaattgacaaattatactacaaagctatggtaaccaaaactacatagtactggcattaaaaacagacacatagaccaatggaacagaatagagaacccagaaacaaatccatgcatctacaacgaacttcattttctctttttttttttttttgagacagagtctcactctttcaccaggctggaatgcagtggcacgatctcagttcactgcaacctctgcctcccgggttcaagtgattctcctgcctcagcctgccgagtagctgggaatacaggcatgtgccaccatttttgtatttttagtagagatggggtttcgccatgttcgccaggctggtctcgatcccctgaactcaagtgatctgcctgcctcggcctcccaaaggactgggattataggcgtgagccaccaagctgggtttttttgttgttgttgttgttgttgttgtttttttttttttttttttttttttagattagtcaagtgaagcagtgagagtggagaaggaacaaagaaatctgtagctggttgtgatcaattagttgtaaacaccactgcactccgatcagccagcccatctttttcataggcagaatgcgacagaagaagcctggagcaggctgtggggaagcgggagcctcgggagagagcccaatccagttaaggcaggaggtagaagggaaagttcagtgaagaaagccaggatgtacgggagtttgtttctcactgagcaggggttccagtggttatagtggaaagggctccaagaaaagcaaacagtgggaaaaacaggttcaggtgtgtgtggaggaaagggaagcatctggggctctgacattagttctgacctcttttccaatcttgtgaaggtggcagcacctcctgtattgtcattatttctttaacggcattctttttaaactgtttaattcaaacctatatttgtagtttctaaaatgttgataacagaccattttgttgttacacatgtctgccaacgaaaacaaaaggcaaagagaatcactcccatccctataaaaggaatggctccttttctaacattctttttttttttttttttttgagatggagtctcgctctgtcgcccaggctggagtgcagtggcgcgaccttggctcactgcaagctccacctcccaggttcatgccattctcctgcctcagcctcccgaatagctgggactacaggcgcccgccaccacgcccagctaattttttttttgaatttttagtagagacggggtttcaccgtgttagccaggatggtctcgatctcctgacctcgtgatccgaccgcctcggcctcccaaagtgctgggattacaggcgtgagccaccgcgcccggcctctaacaacattctttaaaaatatacattttacacttcctgcacctcagcaaaggtggcaatgtaatcaacacactggcttattttgttctcctcactattagacgcatgtccccaaactacctgttataagccctgttttttttctggacttctcaagggctttgcccatcgttctttccccggcatctggaacagtaccacttgcgctttggtttatggttgagactcacacacgagaagcggaaccactcgatggggcattcgttgtcgcagcggatcatctcccagtaggagggctcgctggggtcgatggggaggtctgcgggggacgcctgccgctacgccttggccatggagctctgcttcttcttagaggtctgggctttcttctccttgggcgtgcccgaggtgacgtcgtcgtggtcgcggttgctggacgcgttctcacggttctagttgttgcgctgccgccgagaacgctttgctgttggacttctccgcctgcgcgtccgcctcgcccctgggcctgtccgggccgaccttgccgccgtcgcgctgcgtcgccctgctcctgctgcgggtggaacggctccacgtggctgtctacctgccgcgtgaggctctccaccagctccaccctctggctcttgatctggatcttctgatcgcccggctcctagctgcggatcagggcccgctgggcgcagggtggcacccgcggcttctgcgcgcagtccgtgtcgcggcggaccttctcatagcacttgtccaggtccttcagggtctcctccaggaaagtctccgtgccgcaagcccggctaactcacgcctccccagccatgtgcggccgcaccctccggtctgcagaggtgtggcatgtgacggtctgcgagccggtgtcgcgggacgccggggcggggcgggccgcccaagctgcagcccaggcccccagcccccagccctagcctcggcccggcctccggcattgctccgcggctggaagcgcaatgcccttctcactgtgctccactgcaagtatttttactttcattttaactttttttttttttttgacagagtctcactctgtagcctaggctggagtgcagtggcgcgatcttggctcaccacaacctccgcctcccgggttcaagcgattctcctgcctcagcctcccaaatagctgggacaataggcgcgccatgcccggctaattttttgtatttttagtagagacagggtttcactatattggccaggctggtctcgaactcctgacctcgtgatccgcccgcctcggacttccaaagtgctaggattacaggcgtgagctaactcttactttgttttctgcttaaaactcacgtgatctgattggcatgtctccaagcaaacacgctctagcccttatgaaatgtgctctctgtagctaaaaccttgttacaatgtcttaagtcatggcccaaaaggccagattgttttctcagacactgtcaaatagctctgcattcactgctgttgtatctttcctgctcttccagaatctctgctttcagttggaagaagtagaaatgtcgcaaggttttcagcttttgcccaggcgttgttctgtagaagcgctttgctggttacttgtggaagtgcttttcaaccctgtgtaaggcactagaggtcagaaagtttggtaaattctgtgacatactccagattcatagttaagaaaaacagcacctccaccgggagcagtggctcatgcctgtaatcctaacactttaggaggcagaggtgggaggatctctggaaactaggagctggagaccagcctgggcaacacagggagacctccacctccacccccatctctgcaaaaaattttaaacattagttaggcttggtgattctcccctgtagtcccagctatttgagagcccaggaatttgaggcctcagtaagctacaattgtgccactgcactccagcctgggtgacaaagcaagaccctgtctcaaaacaaacaaattttagcattatatgcccaccgttttgcaccttgcttcttccacttgaggcaagcttgtccaatccgcagaccgtgggcctcaggcggtacaggactgctttgaatgcgtctcaacacaaatttgtaaactttcttaaaacattatgagatttttgggcccagcgtcgtggctcatgcctgcaatcccagcactttgggaggccaaggcaggcagatcacctgaggttaggagatcgagaccagcctggcaaacatggtgaaaccccatctctactaaaatacaaaaaattagccgggcgtggtggcacacacctgtagtcctagctacttggaaggctgaggcagaagaatcgcttgaacctgggaggcagaggttgcagtgagccgagattgtgccactgcactccagcctgggcaacagagtgagactctgtctcaaaataaataaataaataaataaataaa

SEQ ID NO: 1888777 - DNA, 4001 bp, Homo sapiens
ccgtctctactaaaaatacaaaaattagccaggcgtggcaaggtgtgcctgtaatctcggctactctggatgctgaggcatgagaatcgcttgaacccaggaggcggaagttacagtgaaccgagatcgagccactacactcctgcctgggtgacagagcaagactccatgtctgtctgtctctctccctctctctctctctatatatatataaaataaattaaaattaaattaaaattagccgggcacagtggcaggcgcctgcaatcccagctactcgggaggctgaggcaggagaatcgcttgaactggggtggtgaaggttgcagtgagccaagattgcgccactacgctctagccggggcaacaagcaagacttcatctcaaaaaaaaaaaaaaaaaaaaagtcagatagacacttgctttcttctttcattgactttttttaaaaattcatcttcaatatttacaaaaaataatccatgctagaagttgctatgtcacagaagtttaagaaatgcatggtaaaaatcactaagtttaaaataatggttacctctggggatgagagaagagagagatgcaatcagggatgggtacacagagaacttcaactgtcacgttaatgtttgattttttttttacgttgggtggtgagaagagaggttcattgtattattccttgtatatctgtatatgtcttaagtatttcataatatatttaacgtctcctccaaaagataaagaagttaatcttgcattccttcatcaccccatcaaaaaaaaaaaaggactcatactagactattctgcaacttacttttctcacataaccatccatcataagattctctaggtcaaaagtcaaaatatttcataatatttatgtaccaaaatttactcaaacattctcctattgatggatacacaggttgtttccagttgtcacaagaacaaaatagtacaaaagtatccttgttcatgcgtcattatatactggtacttttatttctgtaggatagattcttaaaagtcagacttttgaattccagtttttgttcaagtgatatctgtattttttatttccctaaatattgccagattcttttctaaaaggttgcagcaattcatactccgcggtaatgcatgaaatttactttaatcacataagcatttaacaacatattagatgtcactcttaactgtcttccccatatatatagtaaacatgctatgcttaacataaacttaatttcgccaacagatttgaaaacaggaaatctagctcttttcttagtgagtaatcaacctggcaatgtaagtcccccaaagattacacacacacacacacacctctgagatgcttcaagaacaaatgttaagtttttgcccaaaactccacatttggggtatagtgggcacagaaaaaaattgtttaatctagtgcataatgaatacgttacaaacaaattaattaaaactaataagtctggacatgaaaggcagaacaaaaaaaaaataaagttaggcccaagaggttaggctgttcctaggaaagctctgaggagatggaatccattttggcgcgacatggtgtcaataaaaacccatttaaataaggaaaaaggaaagaacgacccatatatccctcctaggagctaccttctgcaacttccaagcttcgtcagtagaagttaggcgatcagcgagaaagaaattattctccgatattttgaagagactggagagagaaaaatggaatacaggccggttactcccccgactcaggccacgcgatcccaaagtgtgtagcctcgctaacggccacttctctagccaacgtgaggctcatcactcaccacaatactattaactggcgagtttctggacttttgttagtggactcatacttcggacgccttgcaacccccgtaaggacgcagtgattgcactccgtgcaaacgccgccatcttaagtcttccactagccctagggcataggcggatgaaagccgggggtgggcgtcacagccaaacaggcccggcgcccagccgtcgtgcactacctaaatgcctccgccggcaacatgcaccagccgttgccgtgccccagccgttgccgtgccgcagccgttgccgtgccgcagccgttgccgtggaccctcccccagtttcctgacctgttgcacttcctctcacagcctttatctcttttgaaattcccttttcctttttctttctcttcatttcttttttcctttcccaacccaaatttcttttagctttgcctcgactcctttctttcttccctatttccagatctctcactctcattaactttacctcacaagtatgatagacaaagctgccattcacttctgttatctcactaagtcattgcaacatcaggtaagctgaggactgattttttcctgttttatagatgacgaaattaaggcccaaagaggtgacccaattttccaaaagtgctagaatgagctagaacctacttcttttcactttactaagccccgtgttccgatagatgagggtgtatgtacttcaaccaactaatgggaaaacagaaaccagagggttttggcctagtcatacagtgagtccgtcaatggcaaaactggattcagaacaaggtgcttcctttaattctgtaaacaaaagagtcttcataaaagagttggtagccaggtgtggtggcgcttgcctgtaatctcagtgtaatcccagctacttgggaggctgaggtgggagaatcgcttgaacccgggaggcggaggttgcagtgagctgagatcgtgctgctgcattccagcctgggcgaccgtgccagactccgtctcaaaaaaaaaaaaaaaaaaaaagagttgagatgctgctcttgagcctaaaagtccttccatcttccctcttcttttatttatttttgttttatttttttgagacggagtcttgctctgtcgcccaggctggagtgcagtggcgcgatcttggctcggtgctacctccgcctcctgggttcaagcgattctccagcctcagcctcctaagtagctgggattacaggcatctgccaccatgtccagctaatttttactagagacgggggtctcaccatcatggccaggctggtcttgcactcctgacctcaagtgatccacccgcctcagcctcccaaagtgctggtattataggcgtgagccaccgcacccagcctccctcttcttttagattcagctcttttagattcagtcctgacacttctaagaggcctctatatttatcaaaacctttatctctgttgttcccgctccatgagggaaaatacactagctggataccagccccaaaagtatgaaaaaaccgaggccaaaacttgtttgtgaagcattatgtgtgagtggtgcaggtttctgggggaaggcttgtgcttcaccggtaaggaaaagacactttagaggtcctaatccctttccaaagctatagtttctctctatgcactaatgttgtctctggttttctacgagacccccacatagaacacctcttattctattcatttgcatcattacttttctgtctttattttgatatcgtcaccctcaaaaggaaggtaatgatacacagttgtataaaacatctgggcattgacatatggacattttggagtaaaacaccaaaaacaccacataaaaccagttacgtgttcaaaggtcagtaatagaggtggagaggtctctaagcttaaactgtttcatctcctagggtttaggcatatttgagcacatcttggaaatttgtaggacaggcaccaaaaaccaattgcaaaaggaactgttgagctcctaagaaagaactagtactaaaagagtagggaatcagatagacaatgtagggtaaaagaaggatcaagtctgaatgttgcagaggaggcaaatatgactgtaaattctgtcatattttcttttggcagtagcacaccatgc

SEQ ID NO: 1888778 - DNA, 4001 bp, Homo sapiens
ccatggaacagacagagcaggggcatattaggggagagctgcaattttaaacaggatggttggggggccctctgagaaagtgacagctgagtagaggcctgaaggaagcaagggcctgagccttgtgggtatttgaggaaagagcattccagatacacggaatgcaaaacccctgaggcggaagtgtgcctaaggtgttcaagtaatagtaaggtggccagcatgggtagatagagtgagcaaggggggagagtggtgggagataaggtcagggagattaagagggtctcatcatggatattaatatatactgatttttccagaaatttaacgaccatataaactgagaaactcttccacattgttttgtttagaactttgtgaagaattgttcattatttaggaaaactgtgtcactctacctgtggcttctgaatcaccaatcaacacacatgtagctgtcactatcattaagtgtaagaccatttcatcatgtcttctaatggagtcatatcccagtctttgcatatatatgtgcgatatatgtataatataatattatatattactcttcctttactactctctatattacaattagggcattatattggttttcagggaattatgggtgtagacagattctattttctatccatttcattttagaatagtgaagcatttcaaaatacaccttattaaaaaaaaaaagcaatgttgggtccaacaggtatgagaacgaccaaagcatagcaagaaaataaagggagtattcagaagccaggatgagaatggagggaattttgctgataactgaaggtgagttccttaaggcctggtcaaaggatttcaggatggaaatagaaaataggatgtccagggctgtatggagacataaccaggagatctgtgggcttcctgtggtgactaacattatataggataaggggctattaaaaagtggtttttaatctaagttgctcccaactttgggtgtctctacctgtttaacagagtaggctggggagcaaagagagttctctcttcaatgacaccagaagcaacccaaagccaggctccattttttacccacagaacaggtcggagccccaggctaagctcatgtcctcgggggtaaaacttattgctataaactatgcacctctaacctctttagggttgagaaagagacgggtaaaaagaggaaaaacagtaacagagaaagacagaagcattcagaaagatccaatggaggaagggtcagagacagagaaaagacagaaaccaagagagacaatattcttttcagtcaagatagtcattatttattgaaaattttctaaggaccgggtgcagggcaaagtaatgcacatgcattgtctcaggtacacattatcagacccccatttggcagatgaggaaactgaggcccaggctggtgaaggagatagctcaaggtttcatagctagtttaaactggtcaggattcagcatcttatatctactacgtctcaaaaagtgggacagagacagagatgggagaggggatgcaaagacagacacgcacgcagacgatcacgtgagcggcagacctgcatggaaccgtttcgaaagacactgagggtgggaggtggggccgcgggagggcagcaacgggcaccgaccgctccgcagggtactcacctggttgcagtctgggagccgcaggagcactcggcttccctttgcgacccgcacgatcctccgcaacccgctgacctagggttgagaggccgccccagtaaaagctcgcgcaggccccacccctcgcgcgcttcggccggcctcttcccgctgccactccccccaccgccccgtctttatggcttctcaccgtacacctccggccgtcgccgccgccgcccctgccgcgcgcgcacagacaccagaggcctacagcaagatctgaaggatacgctggacggaacccttccacgggctgcagcgcgagcaggggcacgggcctacgccgctaccgacggctccccggctcccattggaggagtgcccttctgcctttccagggattggctggggatggaaacattttatttttacccccgaggcttagagccaaaccgaggaaaactccgccccttcgggggactttgattggttaaagagccaagcccaccctttaataggattggccaggaaaggagtgcttgtcatggccctttgcctgtctattcgacaggtcttcaggcggctacttgggaatacgcaggcgggaagccggaagccacgccaggcgccgagtcactgcacaatcgagatgcctggcttctttgacgttttactctccataagccaccttgcactgccaccgctctgctaagagacgcgattctgcccctagtttctcacagttccacacccacctgcagagattcctaagccaggtttctctcgctcaaagtgagcagagttccttattccatgcatggaggatgaggtggctatggggatgtggcgtgtcacctaccagtccctgatacctgctgagacattggtcaagtgacaacctcgctaggagcctcagtttaaccatctggaaatggaaagatgttttaaaattttcctcacaatgtgtgaggattaaatgagagggcaaatatagatcagttgcctggggcataaataattaagttctctcctcccaattctttcccagtattcaggcggacagaacttatggcccagagaggcaaactgactggcttgaagtcacacagccaggccccacccctcgcgcgctccggccctgcctcttcccgctaccactccccaccaccgccccgtctttgcgtcttcttaccgtacaccgccggcagtcggcgcagtaagacccagaataaaacccaggcttccaaaggaaaactgtttaagaaggaaggagagatgggaaggaccctcctatttgcaagggttcttaatttgtattctgcagacctctaatcgaggctggggacagggtttggagaggtccatgaatttggatgggaacaaatttacacctttatggccgggcgcagtgactcatgcctgtaatcccagcactttgggaggccgaggcgggcggatcacctgaggtcggagttcgagaccagcctgaccaacatggagaaaccccatctctactaaaaatacaaaattagccgggcgtggtggcacatgcctgtaatcccagctactagggaggctgaggcaggagaatcgcttgaacctgggaggcgaaggttgccgtgagctgagatcgtaccattgcactccagcctgggcaacaagattgaaactccgtctcaaaaaaataaaacaaaattacatctttattttccctctcctctaactgaaatttagcatttttcaataaagaatgtaactaggcatagtagcagcagtagtagcagtactgattgtcactaatagaaatcagagattttcatatcacattatagatgttgcagatctcttgaaaatcatataatttcaatcattattttaaaatcatgatagtcattagaccctccattaaatcttatgatttaatggattaatggggagtacatatacgattatactatagcacatatttgctttttccatattttaataactatatttcaatgtaatcaatttcttttgtaattctagatattttattttatgaatttaaacaattttttttttctgagaaaaggtctggtggggcatggtggctcatgcctgtaatcccagaactttgggaggtcggaggcgggtgaatcacctgaggtcaggagttcccgaccagcctggccaacatggtgaaaccctgtctctactaaaaatacaaaaattagccgggcgtggtggcgggcgcctgtaatcccagctactcgggaggctgaggcaggagaattgcttgaacccaggaggtggaggttgcagtgagccgagatcgcaccattgcactccagcct

SEQ ID NO: 1888779 - DNA, 4001 bp, Homo sapiens; identical to SEQ ID NO: 1563770

SEQ ID NO: 1888780 - DNA, 4001 bp, Homo sapiens
ctgaagcctcagtttcctctgtcattaggagggggaaatacacctctctcacagtgctgctagcagatttcagttcccagggaactcagaccttccttcccaagccaggactcgatcactgggcacccccacccctgtgagcctttgtccatgctgtgcctctactaggaaggcccttcttctcctcttgttcaggcccttcacgctgcctctgcccaggcaagttccagggccagaggtgcccctgggcagggatgtgactcttggcaaggccagagaaggggcgggtcaccgcctacaaatgccaatgcctgaaagagaaagaaagagatggggacctcagttgcctggccaccagacacgtccttgcttcccccgggaatggcctcctctgcaagcccctcctccatctgctctgcccaccccaggctgagagctgctgtgtgctcaggcaggtctccttttcccagatcacttcagtacacagtaggcttctagaggccgtctggggctggaggatgggactctggccctgggagggccttgctagctaggggccttagggagcatgggctgacatggcagaagagcaagactaggggaggggacggtaggaatgcgtctctcccactcttccctgtctccaaatgcagagcttggggggtgccctcatgtaggggtaggggaacataagggacagcaggagcaggcagagaccagtcctctggccccaaagacagggcaggaggcagttttgccaagggctgtgcaggagctgcagagagacccagggctgagggctgagaacagatatggggctcaacctagaagagaaccgtcctccctatgcccaccgactggtggggaagagaagggtgggggcatcgttgctcctctagggccttccggggccgcccccagcccattaccctccattcctcagggttcaggggacaccctgggggcctctgcagaaagggaggcaggcactggggcgtgggcgggagggggccgcccctcaccctatcctgcaatcatgactggggaggaggggagagcctgcggctgcctttcctttccccacctgggctccacagctcttctggctggtttgccccggtgccttccatacttccccctgaccgccaacacgccctgacatctgaagggcagagccaccgcccctctcccattccaacctgtcgcctcctacctttctgctccgggcctggaaagtcaagtcgccgcagcagaattccctccttctggtttccccctctttggccaatatgaggcaacaggtcggccgagcccaggtagtttctggagcccgatggcaggggcccattcagtgcgtttctgcgcgatccagggcccccgggctgagaccgcagccggggccagggctgggccgtcgtgccctggcggcgtaggtctagagtccaggggtccgagccgccccgcctccgccccccgccgcggcccagctttccttcatgccggcgacccggccgggggcgggcggggacacgggcgccccttcagccgggccttcgccgccgccgccgccggcgctcactcgatccgcacctgcaggcggacgttaagcatcaccgaggccacgatgtagaagtaggggaagttcatgcgcagccgccaggccaggtcgaagaaggtgagcagcgtgcgcgtgagccccttgcagaaggcgccgtacgagcctcgggccgcagctgagcgcgacagccgcaccgccaggccagacagggccgccgcagccgccgctgcagacagagccgccgacgccgccatgggcccgggccccgcgcaggccccgccgaccgactgacccgctcgagcgcgagcctcagggcggtgggacccgagcactagtgcacccagcgggtcgcccagagccgcggccgccccgcccccgtgttcccaaggccgagcggggctcaggcggccgctgcctcggccccacctccacgatcccgcacacgccgccccctccacacctcctcactgcggggggccacccccccgaacccccaccccgaacccccccaggccagcataggtccgccgctggcttagccacgcccccaaccgggagccgcagagaggccgtcagcgctgcgaccccgcctgctcgacgtgccccgcaggctcagctccgcccactgccccgtcccgcccacacagccccgcctctttccgggcgcctccggaggctggagtggattgaagggcggagctgccagggatcgctttgagaccatttcccagggtggagcggcagtggaggaggacaatctgggccgctacgctgattctgtatagaaagcacgtgcagaagcctctgcctgttcatatcacctcccttctcccacggtctcccctgaaaactggccagccaagccattatatctttctttaattcgcatggtgcagtaactgcgctacagagtgccatcaagcccacatgcgtgcatttttccctttctggtatatttgctggtcacgtatatctctttattggcgaatttccccattgtccttccctttctaagcactcttcttaatccattgtttgccatggtggttgcacaaggtcgtcttgggttttcatttgctcttgtttatggcctttttgtttgtttgttgccagtgtgcttaaaagccctttcgtggtttcattcaatctttattaaacgtaaaccagtcaaaacccagtagcgttttttcagactgttttaatgatgtggggaaatgctctcacttcgttatggtcatgacttttgaaaaactgtcggcaagaaagaagtaggttcacccaaccccatcccagttttcacaacaaaggttgacgtgggtatttaagaactctcaaaatacctgttcaccgtcacgcctgatcatctctatggtatcccacgtaactgaggaacgcagcggatccatttacactgattgagcaattgtcctacctacatgatcaagaaaaaaaaaatccagttccagaatcactggattctggttattgtgtggacatcacgattttatcaacaacgcaacacatccatgcatgggtatacatgcatcaaaaaaaaaaatgccagggcaggaggctgggcgtggtttttcttttctttctttttctcttttctattcttttttttctttttttttcttttctttttttttttttttgagactaagtctcactctgtcttccacgctgatgatctcagctcactgctgtctctgcctcccaggttcaagcgattctcttgcctcagcctcctaagtagctgggactacaggcacgcgacaccacgcctggctaatttttgtatttttagtatttttaatagagatagggttcaccatgttggccaagctgatctggaactcctgatctcaggttatccgcttacctcggcctcccaaattgctgggattataggcgtgcaatctcggcattttgggaagccaagatgggaggatcacttaaggctgggcctgtttaccaaggtcctcgtctctacaaaaaaaaataaaatatattagtggggtgtggtagcatatgcctgtagtcccagctacacaggaggctgaagtgggaggatcgcttgagcccaggagttcaatgttactgtaagctatgatcctgccactgtacgatggagtgagactgcctctactacaaaaaagaaaaagccagggcagatatatcaaattgctctatattgttctggttaagacaatagggagacttaaactttttacttcgctctatatgtctgtatgtccaaatgtatgtctgtacatattccttgtataatacaatgaaaaaaattagtaatatttgaaaaagaaagggccatagaaatatagacttaaggcacatagaaacccattgttccagactggctagaaccccattcatttgcagaccctgttgcttccagccatttctgaaacctctccttggcctc

SEQ ID NO: 1888781 - DNA, 4001 bp, Homo sapiens
tgccaggtcttggagaagactggggaggggtgtgggagcctgcaggcccaggggcacacgcagttcctcctcatcctatctgcatgtcaagggcaaatccccccctccccgaagcctcggtttcctctgtcattaggagggggaaatacacctctctcacagtgctgctagccgatttcagttcccagggaactcagaccttccctcccaagccaggactcgatcactgggcacccccacccctgtgagcctttgtccatgctgtgcctctactaggaaggcccttcttctcctcttgttcaggcccttcacgctgcctctgcccaagcaggtccagggtcagaggtgccccagggtagggatgagactcttggcaaggccagagaaggggcgggtcaccgcctacaaacgtcaatgcctgaaagagaaagaaagagatggggacctcagttgcctggccaccagatacgtccttgcttcccccaggaatggcctcctctgcaagcccctcctccatctgctctgcccaccccaggctgagagctgctgtgtgctcagggaggtctctttttcccagatcacttcagtacacagtgggcttctcgaggccgtctggggctggaggatgggactctggccctgggagggccttgctagctacggtccttagggagcatgggctgacatggcggaagagcaagactgtggggggaggggacggtaggaatgcgtctctcccactcttcccagtctccaaatgcaaagcttgcagggtgccctcaggtaggggcaggggaacacgacggacagcaggagcagggagagaccagtcctctggccccaaagacagggcaggaggcagttttgccaagggctgtgcaggagctgcagagagacccagggctgagggctgagaagagaacagacgtagggctcggcctagaagagaaccgtcctccctatgcccaccgactggtggggaagagaagggtgggggcatcgttgctcctctagggccttcccggggccgcccccagcccactaccttccattccccaggtttcagtggacaccctgggggcctctgcggaaagggaggccggcactggggaatgagcgggaggcggctgcccctcaccctatcctgcaatcatgactggggaggaggggagagcctgcggctgcctttcctttccccacctgggctccacagctcttcgggctggtttgctccggtgccttccatatttccccccaactgccaaggcgccccgacctctgcagggcagagccacagcccctcccccattccaacctgtcgcctcctacctttctgctcggggcggggaaagtcaagtcgccgcagcagaattccctccttctggtttccccctcttttgccaatgtgaggcaacaggtagtccgagctcaggtagtttctggagcccaattgtaggggcctgttcagtgcatttctgcgcgatccggggtcccgggctgagaccgcggccagggccagggctgggccttcgtgcccgggcggcgtaggtctagagtccaggggcccgggccgccccacctccgccccccgccgcgatccagctgtccttcatgcccgcgacccggccgggggcgggcggggacactgtcgcccctccagccgggcctccgcggccgccgccgccgccggcgctcactcgatccgcacttgcaggcggacgttgagcatcaccgaggccacgatgtagaagtaggggaagttcatgcgcagccgccaggccaggtcgaagaaggtgagcagcgtgcgcgtgagccccttgcagaaggcgccgtatgagcctcgggccgccgccgagcgcgacagccgaaccgccaagccagacagggctgccgccgccgccgccgcagacagagccgccgacgccgccatgggcccgggccccgcgcaggccccgccgaccgatcgacccgcaagagctcgagcctcaggacggcgggaccccaacactagcgcgccccgccggccgccgggagagcgacgtccgccccgccctcgccccaccctcgccccgccctctccccaccctcgccccgccctcgggttctccagactgagccttgcttcaggggccactgcctcggtccctcctccacgagcccgcacagctccatccgctccacatcacgtcactgcgggccccgccccccagcatagctccgcccctaacagcctcgcccccggcagagaggccgtcggcgtagcggccccgcccactagacccgccctgcattctcagctccgcccaccgcccggttccgcccacaaagccctgcctcttttcgggcgcctcccaaggcaggagcggattgaagggcggagctgccagggatcgattgctgtgacactgtctcctagggtggagcaggagtggaggaggacagtctggaccgctaagctgattctgtacagaaagcacatgcagaagactctgcctgttcatatcactccccttctcccacggtctcccctgaaaacttgccagccaagacctttctttaattcgcatttctctttaatgcgcatagtgcagtaattctgcgctaaagagtgccaccaaacccacaagcgtgcatttttccctttctgttgtatttgctggtcacgtatatctctgtgttggcgaatttccccgttgtccttccctttctcagcagtcttcttgatccatacaatgttgtctcgggttttcatttgctcttatttatggcctttttttttttttgccggtgtgcttaaaagcccttttgtggtttcattcaatctttattaaatgtaaaccaatcaaaacccagtagcgttttttcggactgtttaataaagccgggaaatactcacactttgttatggtcatgacttttgaaaaactgtccgcaagaagaaggttcacccgaccccatcccagttttcacagcaaagattgacgtgggtatttaagaactctcaaaatacctgttcgccgtcacacttgatcatctctatggtatcccacgtaactgtttaaggaacgtagtagattcatatacactgattaggcaattgtcctacctacatgatcatgtaaaaaaagacaaaactgagcatcaaggaaactgaaggaaatggtgtggtgcagggctgattggtagtccacttttccacctgctgccaaacacaattaaataattttttagagaaagggtctcactctgttgcccaggctgcagtgcagtggtttagtcatagctcatggcagccttgaacttctgggctcaggcgatcctcctgcctcaggctctggagtagctaggacaatagatggggctacaaattctatatccatgaatacatcttttaaggatgaaatggaaataaagatattttcagataaaagaagattaagagaatttgtgagtaacagacctatgcttaaagaatggcagaaagaagttccctaaacagaaataacagaaagatgatggcatttcaggaaggaaaaagaacaattggaaagagtaaatataggggtagatataatagaccatcctcctcatgagtttttaaaatgatgtttgatggttgaagcagaaactattatgtcatctgatgtgatgcttaatatatagagaggaaatacttaaaacatttgtattaaaagtgaggcaggtaaataaacctaaatggaagtaagatttctacaacttactggaagtggtttaaaatatccatggtagtagaatgtgataagttaatatgtatattgtaattcctattgatatggtttggctctgtgtccccacccaaatctcatcttgaattgtaatccctataatcctcacatgtcaagggccagaccaggtggaggtaattcaatcatggagacagtttcccccatgctgttcttgtgataatgagtgagtctcacaagagctgatggttttatagatgtctgtgtctggcattt

SEQ ID NO: 1888782 - DNA, 4001 bp, Homo sapiens
aacctccacttcctgggttcaagcaattctcgtgcctcagcctcccaattagctaggattacaaacatgcaccaccatgcccggcaaattcttgtattttcagtagagacggggttttgccatgttagccaggctgatcttgaacccctgacctcaggtgatccgcccatctcagcctctcaaagtgctgggattacaggtgtgagccaccatgccggcctgagctttttctttgagattcgatttgtctcttcctcttgttgattctgtcaatgggtttctaaagtgttttttccttgtttttgttactctgaatccattttcatgtccactatttttctgtttatttctgtcatgtagaagagattgtgtatatattttttgcaatccatgaaatgatgaccctttgttaaatttcaattttttttctcttcatttctgaccttttctaagaagttggtcatgttatttggtaatgggtttttaaaattttccctgttcctagatttatacgttctctttacagtttatttgtaatttagttctatggcctttgctagaagactcaggacaacttttaatatgtagagttgtaaatatggtagacaactttttttccagacattaggacaaaaacccaaagagattcacctttaaataaaataagtcatttcaataagtgtctttctcttctagtatactttttttctgaacacataggttctcataccatgagatttcttatttctatacaatgtatgtgaaaaatcatgtgctttttattcattgcttgtgtattttaatatggttttgaaaaaaagattcattttgatgtagcccctcatgtttctttcatttgagcctcccttatcactcccaatataaaatgtgcctcgaccttaattgggatttgaaaagcttggaactagaaggctgggccaggtaaggtggctcacacctgtaatcccagcaccttaggaggccaaggcggctggatcacttgaggtcaggagttcaagaccagcctgaccaacatggagaaaccctgcctctgctaaaaatacaaaaattatcctggcatggtggtgcatgcctgtaatcccagctactcgggaggctgaggcaggagaatggcttgaacccgggaggcagaggttgcagtgagccgagatcacaccactgcactccagccaggcaaaaggacaaaactccatatgaaaaaaaaaaaaaaaaagaactagaaggctggctttgaaactagcatgaatgtcacattagtttgtggagcccagctgggtgggtagagccacttttcagacacagatcagaatccgtcagtcacagatcagatcacagtcacctgccctacctcttacggtctgccttgctgaaggtgttggggacctgggaggagataatggggaatcaacgggacagagttgtgtgcaggcagattcagagtcccaactgggtccaggcagcacagttgatttacaaatgacattctttctctctccctctttctcttgctgtcatctcttactcttttcatctgggggaagaatgatgtgaaaatgatcaggaatttactttttcaaatgagatcctagtcagtgtgatattcagaaaagtctttagtcatgtgggtctctggtgatttctccatctgtttccgaggtcattccttcctcatttctcagagctttactatgaacagaccgattccttcctttaggggcagactttgacttagcagatgcctttggtgagggaggaaacagtgagtaactcgttaaagtctcctctgttgctgatttgttattgtcaccaaatgactgtcatttccaagagacttatctcttttgcataatccatggattgggtttatacagtggaaatattggaagtatatgccttgttgtgttttatttttgttgttgttggatttttgttttttttcccaccaatatgctggcttttattttaaaattgttacagactttggaatgatataaggcaaatgtcacttccctggccaggtcagacttcatgggcatgtgacatgtgatgtcacacagggacctgtgcatacaagggcaccatattggtgtattactcagtagctgccatcttgaaattcgtcataaaattggaacagaatcttgcattttcattttgtgcagggcctctcaaattctggaggtggtctggacacctggcttagttttctttgaaaatacttgaagttaaatcctgtagctggaagatgatggaagggaattggcaggaggctatgtgtatgggcatccccaccacgacaaaaacaagggtcattttttacctgtttagtgaaaggtctctatgcaaattgatttttcatttccttttctggtcgccatggaaattgatttttcattttcttgactgcaaggcactgatgatcgccaactctcatgttttacaaacaggtgacccagcaccacctaatccccccaaaccaaagccagatccaaatcccaactgacctggtttcactgataagagcctctaaccctacggggtggtctctatgttgtttacctggcagtgatgtccgtgtcatctgagaagaggagatttcaggtgagcctgttcctactgttgaattacaaggtaattccagtgttcaagtagtggaaaacctagattacgaaaatatgtttttggtttggattttattttccttttcttgattttacttcaaagataaatggaacttccaaatcattgaataagagcttttagatgtagacttgatatgaggaaaagaatctgtgtgtttcccatggagaagccaacttgttttaaacaattagatttttactgagtgtttttctttacatgtttgtttaatttttaacacagaaatctatccagatggtctaaatcctgttgacatttttatggttttttgctggttatgttattattggcataagaatattccttgaccattttctcatgtcatttaatcgtttgtatcatacgactttacattattatactacagacttaattacatactttggtttctttaagtaatccctaattctgaagttatgtttcttctgatgttttggaattatcaattacaaagcaaatttgactgcccttcatgcactttcctttatgtttgaagatatatttctagagtgcaagttgtttacatcgatgtgtgtgagtacttttgtagcttctgacatggttttgaaattgccccagaattgcaccaatttattttgatggcggcggggtgtgcagatgaccctttcctcacaccgtctccgatattggtgttcaccaaaacatctttatccagtagtgcaaaatgtcatgctaaccttgtcttagtttcacgtctttaattctgaaacttgaaacaaaaacaatgcatcagtgggccatggagacttcttcttctgtgtatgggatactgtgtcttttattcttctattctggtatgtcctccctgatttctagtcatttttgaattatttatagacagtaaacattgcccaatatattatgaaaatgtgtttccactttattgttgcctctgaaaacattttgaacagaagcttttataagcaaggcttgaatttttcttttttatgttgtcttaggtttgtgtgagtttccacctttgtgtaacacatttttccttttaacagaaccattttatcactgtctctcttccttcttgggaaaaagaaaaccatctttttcttttcatttgcattacttacaactatgaattgatttatagagtgctaaaatatttgtaaaatcgagcagattcttctgtgtgcctttttctcctggtgatttatttaaatggatttctaaggtgttttcccgtcagtattgatttgttttggtgagtacgattttatgtgcgctatttgtctctctgtttctgaactatagcaacatttttgtgcattctctcttactctccactg

SEQ ID NO: 1888783 - DNA, 4001 bp, Homo sapiens
taggtcctgcattgctcttgaatccattgtcttctttccgtttcatcaccaatgttggaattcaggcctcatcatctcttgcctacaagagttccttgctggtctccccatctccaactttgccatctctgatccattcttgacacccccagagtgaaggttctaaaatgccaatgtggtcaccccccacccccagagactggctccctagggcccactccacagggcacactgtgatctgtcttctccctgttcccatctcatctgtggctctttgccttcctcctcttacgccccagtcacacattgctgcctgcctgccaggagcacagcaggcttcagctctttctttgtccattcggttctctctggctagaatgccctcttcctctttttttttgctgccatcaagcagagagtggacatttgttggtttgtggcttcccagccttcattcctcccctttccttaggctccagtttagtgaattgtctctgcctgattgtgggtaatgttggtgaaacaataaatccatgcatgcctccttccatagaagccaaagggaagttgccttccccccctcagcccagtatagccaggaggcgagcatgggactaagcttggtgactggacagtctcattggactttgaatctggaataagcaatataagaatagaggaaacagacttcattcatgttattggcaacatcctgatcaaaccattcctgcttcctattccttcccaacccctccccaagaagtgcctttgcttatgtcgatttccatacctggttctctagcttttcccttgattctgtaagctccctatagcttacccctccaaccccataaattcccttctctcctaagttaatcagagatgctttctgttgcttgcaaccaacaatttctgataggaaacccagctcaaatgttccttcatctggttctgcacaaacatacttccctgtacattcccatagcaccctctacaaagtgcagatcacatattgttttttttttttttctgttccttccattagggtaaaaactcatattggtcccatccttgtgagctctgggctcactagctcatgcgtggtccaaagccaaacatttaagggaacaaacatttaaagactaaattaatggactagtagctctacctgcttcccctctaggcgcttcagtgacttacacagactctgtcatgccacaaaaatagtaaaaatgcacctgcctctgtcgtgagtctggctaggaataacgtgggatgatttctgtttgggacactccttctgtctgtttcatggaagatggcgtgagggagggcacgagggggaagagaaaaggacagaaagggggcagggaggtagctgttggagcagctcaggtggaagatggtggtgagtgggattaacatggtggcaatgggaacagagtaaaggggctgactggtgagattgtgaacagagcattagaattgaataggctgctcaattgtttctggtaattctgaaagcaaaaactggccatttgagatggcttccatcagaaggaggtggtgagggagttcgagtgtgcctgtgcatggtggagcaggggtggggggattggtaggggagggtgtcacaccgtctccagcatccccctcctgccagcagccatgaccgtgcaggctgtcttgcctgttttctaaagagcttccccaggcagcaggggagagaggagaaggggggctggccacccacgccactcagcagaggtgagccaggagcaacgagtcctcaaattcgccctcccccaagccactacaggctgccaggtgccttgtttttgatgaaagcttttaaaaacccaagtgcatggatggtcatgcattcatttttgttcatttaactaatactcactgagcctggagccacgcaatggtgagcaaagcctgccatggaccctgctctcaagaagctcccgagctggcgagctggcgggggagaagatgcgtaatcaggcaattaggaaccagtgtgagcgggaggtaagcattggttgctatgggaacacgaggagcggccacagctgctgctcctctctgaagagtggtggcaagcaaaaaaggaggcacaaaacaggcagacctgcttgccaggcccagctctgcacaccccagccaactggtccaggacaaagatcttctggaaggaaaaaacccatcagctctctgccacaccatctctgcacctaagaaataagtagggagagcatgatccaaggacccaatgagatgctgtatgtctgtgcctggcccccagtaggtctacagcacatggcagcttctaggggttttgttttcaagaaatatttgttggttaaaagtttcctgggttattggacaccaggggtaaagctgtgaatgagataaacaagggtcctgctatcagggagctgatagtaattgaggaggagagacagatacaaacatacttatatggtacaagcaactactactatgatcattatcatgatgctatgagtgtgtttcagactgggagctggcctaggctaggggcccaggaagacttcctggaagaggggccatttcagctaagatcaaaaggaagagaattaccaaagaggtggggatcctgcgttccaagtatagtgaacagtgtatgtgaaggtgccaaagcaagagggagtctgatacatcccagacaaggaaaggaagccaggggaaactggagagggagaggggaggctggaaagatgggcagggcattaatccactcaagcctctaggccgtggtgaggagttcacgttggatcctaggatgaccccaatgcacaccacccccacctcacaatgttactgtgacttccactactgatcagcacattaaaacaactgtcagtgcctgaggcacagccatgctcaaggggcttgactcagagaaggtttagagaagattctggaatttgagagctgagagagctcttggagaacatttaggtccaaattctcactgtgcagatggaaacactgagacccagagaggaaaaaaaagacctgctcagggttgcacagcaagcaggggtatcaggcctgtaactagagctccgtttaatcagccacacagtgccccttgcctctgtggagatctaaaggcaagctttttcttacaggtgcaatttcctctgcctctcaggacaaccaggagagtgtttccagccctttgttaccttcttgcacttcccctagtgttcctcttttcaaaaagaccccatttctattaaccacagattctcatttgcttatcctccacctttctgtcatgatggagcagccagaggcagggcttggaccccaggcagggcctaacagagctctcgtaccagctattgatgtgtcttcctggcttaccctagctcctgcccttgctatcccctgaatcatgttctgtgggcagagccatctccactgacatggtcacagcacttgcctgcccaggcaggcctcaccacacacacactggtggagttgacacggtctcagccatcgtcttatacaccctcccatgccccattgccctgatggaaacagtgaagcaggggcagcccagagttcttgcctgtgaatgatctgtgtctggtcttctgactgcctactctactctcagcactgtctgctggctcccttctctctctgttgaggaataaagggagcggggagaccctatgggaggagggaggccagcactgcctgagcggaacctgcaggggttggggtgagaggaacctgcttctctgcccctctagcacagctcttacccagctagccctccctacagagtgggcccagggtccaggaaggtgctctaggcctccaccagggaactctctacctggtagggcctccctttcagggaggaactgaggccactacattcctcttgctttagtcctagaaggagctgcctttggaatcaacagtcctgagtc

SEQ ID NO: 1888784 - DNA, 4001 bp, Homo sapiens
gagtaaatgcttaagcttgtcctcccttactttctccggcctgtagcaatattactcaccctcaaagaattcatcaatattcaactggctctccaatttgctgaggtagcaaaaggagtttaataaagaaagctgttgcaatttgtctttagagaacatgccataaacccaacttttatcttacgtcgttggaatcttctgcccttttactaatttaggtggggaaatgaatgcttacgtgtagcaacccaagcaaatttacccacgaaggcaagtcttaaaaactcagcgaagcctttcatcccaagggcaccagagctttataaatgatctatctgaggatttagaagcgtgttcagtcacgtctcacagcccggcaaactttcagccctgtccacgaggggttttgaaaatcttaacagggaaacttgtagcttagtaataagactttttagcgcccaccaaaactggacgagtatcagccgttttaaaaacttttcctgaaaagaaaatcttgctatttaaaacctttttggttaacttttcaaaacagctttgcagaccctgaaagacactactcttttccctcctcgcgccccggaaaagagccgcagacgccagcgaaaggctgcgcaacgcttgcaacgccttgggtctgcgagatcgcccttgcaaaaacatttcagattttccatcagctctacagaaatatgacagtaaaatgcatgcgagagttaagtagctcaaactcgggcgccgagcacggcagattccgcggttttatttttgtaaactgatttcgtgtgtgtgtgcgcgcgcgtgcgttgctgctttctttcggcacctaattttttttcccccagcgcccgcacgcggttctgggctaccctgcgcgctgtctgcaggccgcgacaactacggcctccctcggggaatgcgggggaaggccgcgggccgccgtggcgacggctgcaggcgcgcggctcagttcccgcggcccgccggtttctttgctcatccgtggtgcagccgagcccaccgagtctggtcggaccaggggttgctgagagccgccaggaagtccccaccccgcaccgcccccggggccaacgcgctcggctgctcctccgcatagttttgcgcccggcagcctatctgccccgaggctccgatggcccctcctggcctgcccagggctatggcagctgcaggccggctctacccattgctcttcccgtccagaccccgctggccttgagccctgcttgctcgcagatttgtcccacccgggacagggaaaggaaaagaagccgcgttcattttcttagcattcaggcactattttataagggaactcttccaaaattttcattatggcattttgcaaatatttaggcaagttgaaagaacggtacaacgaacgtctgtttaccccccacccccaacaggatgcaacaactgttaacatattgcaatacttgcttcctttctgttctctctctcataatgtgtgcgtatgttagctgcatcatttgaaaactgcagacatcgtgacatttcacttctgtacacttcagcatgcatcttcaaggataaggacctccttaccttcaatatcattctcacaaatacaaaatagcatggtccttaatagcgtctaacatccaggataagggctcctttccctcccgtttccccacttcagtcttaaatatcagtttcccttcttgtactgggcacatgtgtaaacaattgctcctccctctgtgttatgcccaccaaaggactatggggctcaccctgtcccggggcctctctacctgagagcttggtggggtggcgagggctggggcgtctcgacagatctgcactcaaacgcatggggagagcgctgcacccaagcggtctgagaccccctgtttcctttcccaaaccatctcaggtactccctgtaagcaccgagcaaaaagcttcgctcagccaccttgcgccgtcccggcagctcaaaggacaccgccagaggacccgtgagcgtggggtggtgtccgtcccaggagcctctgggtgcgcgctgcgctacctcgtgcccttggctttgccgtttgccatcctccgttttttctccccgagccctcgctattcgtctcggtgttggttactctgggcgcccagtgcccttctcggccctcccccgcagcgggccaaggctgcggcgtcgagcgcctgcacaacccccttccctacagctcctctcctcccctccccccttccgcccccgggccccggagccgagcggggccaccggggggcggggagcgccacagcgcgtggccacgccccccgagccggctttttctagggcggctccgggagcctctccgccggctgcgccgctcgcctccaagggagcgttccgtgctggcccctcgctcggctccgctccgcctccgccacgccgctctccgagcttcggcagcagccagcgccccctccacgctgcgaccccggctctcggctctccgtccctgtagctccgtgcccagcacctcgcgccccgcaacctcgccgtctcccaagtcccgggccccgcttctgtcgctgtccgtcgctgtccgtgtgtcgctcgctcggtctgtctctccgcctccccagcccttccttcctccctgtctccctcgctggcttgcacgttcgctcgctctcggacgcggcgaaacagcttcgcaggcaaatcccagaaacctttgcaaaaagcttgcaatgaaatttaagaagttcttcgatttcggcgccattttcgagtggagccagaggtgacatgcgattttttaaaaagggacttggtggctggcgtctttcccgactgtaacgtgggttacggcaggcagaaaaacatctggtgataattctgaaaaaagtgctgtggcgtttgggggggttgtaaagcacgttttgcgggcgggatgggggcaaatctgacatttaaagtgtttaacaaatgagtgcggccgggaaattctcaggaaacggactgggaaaaaaaaaacaacaactaacatggaggggcggggagagaaaactgagtaaggggcagtgaccgactgtcagcctcgctagggtcgggagcgactggttttgacagaatgtaaatgaacttttcctcttatttgcaagaagttagttatgtcttggaaagaaatgtgtgattaatttcacattgtctctcccgaattaaaactttaaaggttgtttagttttccccgtagggacttgacattgtggaagtttggctagaatgcgccgagagaaggtacatcgtgtgtttggggtgtgggggacgaaggcatatgcaaaattaaaagacaaaacgttgtagagtatgaacagaggaagaggcgtattctttggctcttaaatcatttagccaaacacattgcagttcagaagggggtggggctatggcaactcgaaagtatcgattctttgtctattgtatcagtgaatgaccctctcctgaagtgacaagacgcccctttgtaatctcttttcgtaagtaaatttcagtctaaggggaaatatgtaaactaggggatcgaggtggctttttaggggtgtaactcgttgtactatcactgggagagatgaaaggggttagggtgaaaggtataaatgaatttgattccaagagcaatctggaagggaccttcgcctttgacaccgatgctgtttcgaatgaacttttgtttttctaagtagtcaactaaggaaatgttaaattaggcatgactttaacttctgacatgatggctcgtatatttgtgtggaacaaaatgttgggagaaagttgtggagttttacatgataattgtacatttgctaaacatgttttttttttctttttaagggcagtcaacgacatttttctccattaatcccaaagtcagtgtaaaagttgtttgtaaatatcattgccaaaacaagatggaatgtagagatacttg

SEQ ID NO: 1888785 - DNA, 4001 bp, Homo sapiens
agacctagcaaaacaccttcactcttcagataactccctgagaaaacataccaattagaggaactaggctgggatccgggcccctaagccaaggtcactttgcacatgtctgtactccagacactagattaacatccattgaaggctagcccatactccagaccctggataggaagaataatctctagtgttctatagcattatactaaattatcaaacaataatttaatgtattttttcaaatagctagaagagaaaatgttgaatgttaccagcacatataaatgataaagatttgagatgatggatatgctaactaccctgattttatcactacacattgtatacatatattgaaatatcacagtgtacccccataaatatgtacaataatcatgtgtccatatataataaaatatacatttttcaaagtaagacatacaagtggccaacagatatgtgaaaaaattctcaatatcactaattgtcagggaaatgcacattaaaaccataacaagatatcacctcacacttgttaggatggccattatttaaaaaaacagaagatggtaagtgttcacaaggatgtggaaaaaaatggaacccttgtacaatactgggaatgtaaatttatacagatattacagaaacagtatggtcattcctgaaaaaaactaaaaatagaattaccaaatgatccagcagtcccccttctgagtatatatccaaaggaaatgaaattagtacctcaaacagatgtatgtactcccatgttcactgcagcattattcacaatagccagggtatggaatcaacctaagtatccaccaacagatgaataaagaaaatgtcatacatgcacacaatggcgtactattcagctttttgaaaaaagaaggaaatcctgtcatttgtgacaacatggatgaacctggaggacattaagtgaaataagccaggcacagcaagacaaataccacgtaatctcacttgtatatggaatctaaataagttgaactcatagaagcagagagtagaacagtaattaccagacagaggctggggaggggtttggggagatgttggtcaatggatacaaaatttcagttagagaggagggataaattcaagggatctattgtacatcatagtgaccatggttaataaaaatatattgtacacttgaaaactgctaaaagggtagattttaagtgttcaccacaaaaaaaagtacattaggtaatgcataggtttattagcttgattcagccattctacaatgtataaaatatatcaaaacatcatatgactttttaattgacactttataagttatagttcataaacaaatttattatacaacagatatgggagaatgcatattataatctcaaattggtaggaaggccttctaactaactttatatttcaacattcatttgatagtgttgatgggaatcactggttattatttatgcagtcagaaatatatatataaacttatcataaatgcatgttaaacataaagtttctcccttgtctatactgtaagaaagtttgaaacagaacaagaagaggcctgacttcatacaggcattcctgatcctgcaataaccacagggctatcgtcttgcacctatgttatcactgaaggtttcagcaatcctgtgggtgagcatttttatttccattttacagagtgggaaactgggctcagagagggtctttacctgtctcatcctcccgcgtcccgcctttacagggaaagtagccccgggacaccctggagcaggacaccacactcactggggccagaagagacccacctctctctccttcacgaaacagccagagcgccgatccccaaagtgggaacgaggggacgtcgatctggggtcctttcgtctccctaaaccccacggagattcaggccacactgctgggcactcacaacctccactgagtccaaacgcctgaaggcggttctccccaggccaaattggtctcaataaaaagtcgtcaccgtcgctaatatgacgtcaggttactatggcaaccgcgtagcactggcttgtcttccacacctgaaaatgactatgcacaacccgctcctccatccccagcctatcccttaaagcaaaacaccttcattcttcagataactccctgagaaaacataccaattagaggctgggatccgggcaattttcaagactctctactcattatggtagaggaaaggaagtccatgttgtcaggaattttgctttaaaagtgacctaagggggccgggcgcggtggctcatgcctgtaatcccagtactttgggagggcgaggcgggaggatcacgaggtcagaagatcgacaccatcctgactaacacggtgaaaccccatctctactaaaaatacaaaaaattagccgggcgtggtggcgagcgcctgtagtcccagctactcaggagactgaggcagtagaacggtgtgaacccgggaggcggagcttgcagtgagccgagattctcaaaaaaaaaaaaaaaaaaaagtgaccttagaggagtatcatcagtacacagaagcccagagaggtgtcctaggactctgggagatgagctagccctctgaggaggaacatgtacaactcacacactatactaggcagttggttttctgtggcagaaaacagattgtttataatcaagtgactgaatgatctagaaacacaaaaactgtcatttgagtaataatacagttatttcagggaggccggactagaataatataatcatttagtaggcaggaatccagtcaattaaaacacacagtagtttgccttaaggaaatttttttttttttttttttttttgagacggagtctcgctctatcgcccaggttggagtgcacggcgcaatctcagctcactgcaacctctgcctcccaggttcaagcgattctcctgcctcagcctcccgagtagctgggattacaggcgcttaccaccacacccagctaatttttatatttttagtagagacagggtttcaccatgttagtcaagctggcctcgatctcctgacctcgtgatccacccgcctcggcctcccaaagtgctgggattacaggcgtgagccaccgcacccagccctgccttaaggaaattcttatccttcattcctggtatgtttttccatgtggaaaatacatccatgacaaaaatacatgtagcctctacacactcactcctctctacggcaggaatgacttatccgattggagaatctggaaggagacacatgatactctgcccaagccctctcccttcaacttcttggtagtaagctgcccttcaggaggcacttgttcagctttgccttcagggatgggacttaaaataggcccacaggtttactcctctaactgtgtctcactgactctacaattattcctatagttcttgattcacaatgcttaattctttaaggggcccccaaaatactcttctgcttctagtctgagctctaaaccaactgagaaacataggaaaagaataaggagaaacatatattgactttatctcttataaggtgatattggagaatgtgacttagatttgctgtcacgtgggcttactatgagtaagttctagaattgacttatccacccagcagtgctgcattgggacagtcataaagaccaaggactgcaatgtatatctatctgctgtctcctaaaggagccctgtctatgtgtgcccaaggaaagttacttccttgccaagggttatcactatagcaggagaaagtgtttcaggacactttctttgagaaacacttctaaaattgttcagaatgaatactcactaagacaacctctcaggtttcctcatagaatggtttgtagcaatgccctctcagtatcttaattcacatgattgcagtgggaattcttcttaaggagttaggtttcaaattttaagactagcatgaaaaatagatatcat

SEQ ID NO: 1888786 - DNA, 4001 bp, Homo sapiens
aattaataggaaaacaatggctggaaaataatgtttataccacatataataaataaattaggtgataggtgttggggggaagaaaccttaaattgtttcataccatttgatccaggaattccatgtctacgaatttttcctagggagaaaaaaccagaaaagcacacagatatttatatggaaagatattccttcagttatttataacagcaaaaataatgcacatataaacattcaataattggacatttagtgggacatctatatgatagaaaattatacatccacaaaacaccacattcttgtggaatattttaaaatatggggaattgctcccaatatatatttaatggatcaaacaggctaaaaattgtatgtacatgtgatcttcattttgtataaaatatatatttctatgcatttatttgcatatattcagagaaaagagactgacagtaataagattaatagtaattatctctaagttacgggattatgggtaatttttataatcatctttacattattcaaaatttactacaatgactatgatatttttataataaaggggaaaacatcatttttaatattttagtaagtgtataaaagcactggaagcacagagaggaaggcgtagaagcaaagacaaaataccaatatacaccagtggaggatcacgcaaaacgagctcattatgtactacagaaagattatagcattatttgcatgtcagtatgtatagaatgtcttatacaagatggagtcctggcaaattttcttcgctacaccagagaatggtcacatgtccctggatgcgtcagtcactctctttgccgcagtgctctgttcaacaccccctccctttgcctccagtatgttctctccctttccctctgcaaaacatgctaccagcagacatgttcaacttgggaaaatggcccatcttgaggactttcttttaagctttttcattcttatttttcctccttgattgctgctgctttgtcatctaactcaaaaacgaaatctatttatctatcatttttcttttcctcacgttcaagggccagtttgaatttcaaaggaataaaccaccacttcacttttttttttcgtttttcttgcagaaacagagctacaaaagctctgttttcaggaatgtttcagaaacaaacattaaagcttcgttgataagaatctctgctatccatctcacatcccttttcaaaaaaagaagcaccgagaacactcttgtctttactgtataaatcgctgtccaaaaatacaaattaattttttccaatgaaagcacgatcataatattcattattactttttcatgattttttcatcctaaagtcaaattttaatgtttctcattgaatacactttcatatctcacatgaagcaatcaatctgaacattattacaaactgccctcttcctcattttctctctagtacagacatcccgtcacacgactttcttaatttaaaaaaatgaggcatcgtatccttttctgcattgcaaagtaatatttttcttatgctctcccagcactgagaaaataaaccaggtttgagaacatcttgaatcataacccatttcatcacgtcaaatacaaatatcgtaaagctgaggtacaattctgaaagcaattctccaatttagtaacatcttcattaaatcttattttaggaaatattttacaagaatcacaaggggaaagtttctatattgcctcctagcaactccatcatttaagaaacaagctttaaactagaaaaatgaccagggaatatttagaatttaattaatccatttcccaatgctgctgattagaatcagagattcctacacaattttgcattattctattccctcaaaacatgtcgcttgctttaaaaatcttagtctggatatctattttacaaaatatttctcagctacttaccagtggcatgctgtctccccaccagctctgaggctgtctgtcgcactgaaggagtgggggcaaacagcagcgcaacagccacttggaaatgagatgtactctgaaaaaaagggattatccctatggaaagaaatgaaatgccttgagattatcctcaaaaattctccaaaaacatgaaatcatactaaacattatatgctaaaatgtgcatgctcttcaaagggcagattttaatagctaaacctctaatccaaaacacacttaagttgccttgatttccagaggaacccctacaagactatgagcttttggctctcccgtctcctagcaacagtctcattaacttttttttttttcctgcagtggtcctactaggcatcagagaacattgacaaggtctagtctctgaggatgaacattaccattttgttgttcaatatgtgttttctcccaggcaagtaataaggaaagttagaaattcaaataacaaagtccccagaagatttctgattcaaatgacattccacaatgaaaagcagaaaattttttggttccctcacttggtacaatgctgtcggtagaaccctgttctaatatgaatgtgctcaatgctaccaaactgtacagttaaaatcaagtggaaattttttgttacatatttttcctacaataaaaaagagagaaagaacgattcattcactccacaaatacgtgtcgtgcaacaaaatgaggtattcctgtaataccacagtcaaaatatggtggtggggacagggattataaaagtgaataaaaaatagtccatcctccctttataagttcataaggtaataatatgcacaggctgcaaaatagaagtattttgtcgaagttattctttttttcatcagttttgggtaacgttatcattagaattgttacataatctgccccaaaatactggactcccgatgggtggaagaagtaaagaaacacatatataatgttaaaatatacaaacatatattcgtacatctcaactgatcatgcacacttatctttacagtgtagcttttagaaaatttttacttctattttcacaaatgtattcacttcagaacaacttttcaacattacatcattacataaactgcttttaaaactaatttaatttctgccagataggaaatatgtggcaatccagttcagtaccttataataaaaaaagatcagtacctttattatgtatttattataggtcaggcacttttctaagtaccaggtgatgaacctgaaaagactaagtaacagaacgaggataccaacctttcttacttaaagctcaagctcctcatcacatcattgaatcacaaacatcagagttcttctaaatcacctggagtgttaattttttaaaatgaggactaaagggacctattcccaagtattctgttttggcaggctagggacaagcccagaaatctgtatttttaacaaacgtcatcatttggttctgaccagaaaacttaaatataatctgtattattggtaatgttattggagaagtaaattctaaaactatgacacatacatacatacacacacacacacacacacacacacacacaccacgtgtgtatattctgcatggttagaacaaacgagtaaatgcattttttgggggtatttttggaaccagagttctcactataggagaaaggagatacaaatatgaatctgagaaagtgaagagaatcctaaagaaacctttggtgacggatttgaatcggaatttttagtatgaactcatgatttcctaagacaaatcttactaggtctgtccacagaaaggaggcaatgacactccagtagcaattaatatgacacaccagcagcaatgagtacatctaatgcccaggtattagtttctaaatactgttgtctactaaaagaaaccaaggtttactggaaaaatagctgacgctatacatggggcaggaaaaatacaagtgaacttgaagtatcttgtattataagccaaaaagcacttgaagaatgatgagaacac

SEQ ID NO: 1888787 - DNA, 4001 bp, Homo sapiens
tgtggcctgagcaggtttgtttgacatgacacaaaaaagtgaccagagcattctatactttcctggggacaaagggcagagcggttgcctctggaaggctctgtggatatgacattggcagtattaaaacatatcccaaacccccaggccaactgttggtctgctcttaaacaatgtcttttcactaggacaagcattgggttttagaggggaacaccagggcagtctcttcaaaatggctagggagaagagtctttggtcctcaaatgccaagtactacatcactttgactttgcagtgtttttcagattgatggtgggagagatctggtgtgcagcatgatctcaccctctcccctgggtctaagcacccctgcacagcatgttaggatgaacagaagccccttccagtgtaacccaagaacaccctgtcagcaaacacacatccaacctcaaggagtgaaatgacagactctgttttaatgactcaaacatgggaggagtttattgttctaattatatttaatttctcaaaaatatgggcaggcttcagcatgtaagccacatgactttttgtccaaggccatgtccaccctagagttgctttatgacagcatccacacccatcttgacaggtcgatgtcacttctgtgcctgcccagttgtctgttgattaaaaagatcagcacattttcggtgggcttcttgcgtttgaaggatttgtctgacttcttgatgttcagtgcgggctccctgggactgcctttagggacttctttatccatgatgtgttgactccacccaacctcagtaaaacagcacaaccgaggaagtctgaaaaagatgatgtattctaggtaatcaagtgtacccggcaacctcttcctcactggcacaaaaccacacacacacacacacacacacacacacacccatacacacacacactgctaccagcagtagtcacaggagattgctttgggtcatcatctgatttgaagcaccaaccatattgtttcttctatctgtcttacacatggggctgtgcagcagcctgatgggacccgggacattaaagacacactattgcatccctctaatcattacctgacacacacaggcttgttagattgtactcaaaacactacctcatagctcaaatgtcattgtaattcttatatccacactaattttaactcaattctatgttgctctttttcagagctgcctcttctcacctctgagttttccctgtacctgggatatgggcttccttctgaactccattattcatgttatgcagagtaattctctttggtaaatccatccatgacaaagttcagtactttacatttgcatttcttcattctacaacttgcaggctgctataatttgtttcctcattccaaatctctttatgtgactttagcttcaaataggatttgcctcctttgaaaatcactggtgaagcaggtatgaatcttactccaaacccctgtgtaagagataaactggacattctcaagtactaccgagtttctgtttctaaggtccatcctgctgattttccatcctgggaacgtaatcacagtggcttaaagattgtactcacctctgatgcctggccctgcctcatccccaaaaacccagttctgcatttcatttgaatctagcacagtgccaaggctaggggtggatgctcactgtgttctctattttgacctcccaagagagactaaaagacttgcccaagtgacagagaggtgagattggaactgagaaagcctgtatctgaagcttctgcttttacccactgctctatagtgtctctgtatcagtttgaacaaatgactctctgataacctccccccattaccaaacagggttggggtttatcaggtaggttagttagttaatggcacaaaaggatgctctatgatcttggtatatcaggatattttacctgtgagaccactcaggtttcttctgaagaaagatctgggccagagggtaaacagtaacagcttggcactccctctctttccttgagtcccagggcctgattggttcagcaccaagtgaagtcatagtcactatggtgactcacaattgtcctcagaacctagtgccaacagtctgcaagattcaaacactggccaccatgcctggcttccttctggttcaagcctgaataaggtgagtggaagttgctgggagaggaggtgggtatatcctgtggctgggtgccatctgcatgtctccttcctagacagaaccctcaactaccctggcctcagagcttgttcctggcttgtataaaatccattaaaatttctcctttctgtaaataaacagcacccattgcatcttgccttgtcccctgggtagtgatcagcaactttgtccgccatgttccaatccaggaattagttccaggtcaaacttcctacctgcttctcaatcttgcatccatctttggtcatgactctgcaagtactcctcctataatacacaattcatgtaaatggagtgtttagttgcagaaattgaacactgcaattaaacattgctgtgtctcccacacttatctaaaccctcccaaagctcagtgcagtggagcccctcccaaagctcaatgcagtgcagcttcacacctttattctgtggacctgggatgcaggtgggcttttaatgctttggaaaatcttatgctaaaactggaccagttccttgagacatactcatatgtctcaagccatattcccttccaagtctctgatctagaataactacattgttgccattaaagtgtgacccatgtgggtattgtctagatgctggacatggattttccaggctgtcagagggataacggtgaggacagcgctttgtgttttttgtagtgtggttctcatgaggaactaaaatgactattatgagatgtggcttgcctccacactggctgcccactcagtcttatgtaagaacggaggaaattgacgttactgtaaagtgacccaggtcgcacactccctttcttgagtggcagggaaggaaggctcactcctccaggttttctcctagcccccgtagaaccatgctttacatggttctgaacaccctgaggccgtgttcagtgttctaaacaatttggagagggaagagaacatattggtgtattttattaacaaagaaagtggaaaactgtctttcttttaaggaattgacatcctagaaatccaagtcaatcacctaggaaatagaccaggagaggctgattgagagaagttaaatgcataaaaactttgcatactaggtcaggcacagtggctctcacctataatcccagcactttggaaggctgaggggagtggatcgcttgagcccaggagttcaagacctccagttggccttgggtcatatccagcatgttccaactgtaagacaaaaagcccctaaggcagagagtcatggtgattgccataagcagccctgtagatgcaaggatgagatgtagctctgcagggccagagtctaaatacataagtcagtgtcagaatctttttggcactgtctgttccttaaataggtcaatattcaccgtttgtgaaaattttcattgaactggagctacgtttcctttctatacatagcatgtttaaaaaaattttttttttaaagcgacccaggtcacacactccctttcttgagtggcagggaaggaacgctcagtcccgcaggttttctcctggccacatagaaccgtgtaaagaccctgaggccatattcattgtcctaaacaatttggagagggaagataacttatcggtgtattttgttaacaaagaaagtggaaaactatctttctcttaaggaactgacatcctagaaatccaaggcaatcacctaggaaataggtcaggagaggctgattgatagaagttaaatgcgtaaaaactttgcatactaggtgaggcacagtggctctcgcctataatccca

SEQ ID NO: 1888788 - DNA, 4001 bp, Homo sapiens
gcagggagagatgatattttttctgcattgttacactgaattgccctcctcaaggccatagcaagatacctgtggaaaaagcattgtctataggtcacagtcctaacaggtacttaggaagaagcaatgctgtcccatgactataaccacatacatgagtccagatacgtatgtatgtcttaagctcctctccatctccaacagccaaccctatcccgattaaatatctttctcaagaggtgtaaaaagatattgacccataaaaccaccaaacacttccagatttatgtcagtcttaatgagagagaagcaagagaatgtgccagcagggaggatgggtcagcctcctgtgggagtgggtcctcgagagtgttgctgtcccctgggcatgctgagacactagagctgcccagcctgcaaagctgaggaccccactctgggagcacccgtgggactcagctcctcattcagaaagtgaacagatcaatgtaatttgacgtgggcctctgtgaggtcctcccacccattactgtgtgtctgaaaggcccgccgtctctccattgaccttggtgattgcttgtgttgcaatttctaacaggttaaaggaacaagtatgctccaaccccctttgtagaattctcctgctgatactgtgttgcagcacatatcaaggtcacctcaggaaggcaaaagaaagaaaaaatgaagccctcctcttatgaaaacgagcaacgcgtaggtggagacgaggtcgtctgttggaagggctctctctcttgcggtggggtaggggggcctgggagctctttgtcagtttaggggttaatgccttttctgagatccacagattcttcctccacatgaccctcccgcctctgcatataaacactgcccagttttcctccgatatgaagaccgtgcgcattgctgggggaagagagatgttattccgtcgtcattcctgcatgtaagtgcctcaccagggtccgagctgccagctgtggaaaactcaccattgattggccacagcccatcgccaccaggacccaggaacaagcagcgctgcctcgaggaggagggcggacagcctaacagggctcaggaagatgctagctctctccctccacaaccccaccaccaccaaagctgaccactcccacttcacccgacgtgttgaaagttacatcaaatgccacaaagcaaaaacagtcaagcgtgccagcatttatttcaggcctggtgactgggacactgcggcgagcaggggcatggagcagcagaaggggcttggtcaccgttcatggctctgtgtctgtggctccggtggtctcagattccgagtgcccggtatcctcccctagggaggaaagcagagtgacaagtggaccctcgggagccctggggatttctggcttggcctgaggttctcttggtggaacaggaaggggaggcggatgggcttggtggcgagcagtgagagaggcagaggcgtgctccgaaggagctctcacctgaaacacttggtgaaacatgccagggctctctggaaccggctcctccaagaccctcgcagaagagcaggttccctgggcaagcctgtgccaccggatgggtcctccgtggcgtcagacacagccacccattcctcagggtcgttttgcagccctttcacattctgaaagacagactaaatagccagatcctaatgctccctcccatccctggcttccttcaccccacccagcaactattgtgtgtgtctctggccctcttgcaggggctggggatgcagcagtgacctgcacagaccaaagcccaacctcctaggggacattccaggacaatggagggaagccagactcaccaggtcagcaggtggaaggaagggagtgaagatcatgcttccaggagtgtgtgatgtgccggtagggaccgacaggacttcgttgaagacaccggcgaagctcgtcactctgccgggtgcaaagaggccgagggcctgccccctccacgccccattcagcccctctgcccctgccccatcgtccctccctcctacagccttgtgctccagcaggggatacatttctggtatgtcacattccgtctgttcctgtgtttcttactcccactcctccaatctttctttcctttgtttcttcctcctggccctcccagcaggctcgagtcacgcttctgcttgctgagcagaacagccccgagggtcctcctcgagagaacatgatgtgtagaggtcttctacaggtagctcattttatttggccatgaatggttcattgcatgccaaggtcacacatggtcctagtttgccatgagtgggaccattccggttttaaaacttaaaggcccctgtcccgggaaagctctcagtcccagggaaactggaactacttcattcatgtggacactattgtcacattactgtgcactgtttttctcacatttaacagttggaccttgtagatgaaattgtaagagtgatcctgatacctaagaagtagacatttatgagtaatcgatgtgtattgaaggctctgtatatcttcatagtgtggaggtaaatgcagcattatgtgtttgcccctgaatacatatccactaaaagcctatgattggacctcagccatcacatctgctcttggggtgtcacaccagagttctagatggacccagaattgcagagagacaaggtcaggggaaggagccgggaaagaggttaacaagaccacagatgctgcagatgggactcacacgaagatgtccttcccaccagccaggccatcgctggctttgtaaggtaatgagattagcaacattagaggtgctgaaacacagcctgagtggtcacttgtaccgtatgctgcagagaggagggttcaaatggtttcagacagccctgtgattcataggattcgtgtgcaaatcagaggtaaagagcccttagctttcatgtaaatacgtaattccctctgacgtgtacaaaaattctcctcaaaatcttgtgaatttccaggcaagtgttgtgaaatacttagaaactcctccaagaagtgagcaggtctcattgtctgtcctatctcccttttctctccttgaatctactccagttaggctttctcctacaccactccactgaaacttaggagttaattgaacatgaaccaatgaacaagtgaaagtaatgtttcttatagttgtatatgactagctatgtgattaaaatgaccaaaccggcaagttgtatttaaatgcttaataaaagctaggtttaaattgttaacttaaaaaatgaatagaaatgaagacccaagtaactacactgtcatctcccagcacaactttcattctcatataaagaaactcattttctaagtaggaaggttgttccaaactgctggaaattcccaggaagaaaggcccaggttttatggagcttccacctgtttccttgtagacgcagccaactgccaccaggtggcagaacaagatgagaaaaccgtgccccacggagtccctgagcccctgctgctgcagtttttgagtgagttttctcaggggctggaatcactcctggggaaccatcccaaggttctgccctcttaagctattccagggtgcacccagggcctggtccagggtttctgacgtctatgatgacgcttaaggcagtgacatcgatcagccgggcctctgggctaggagacccagttcacctcctcattagtaaccctgggatgtggtagtaggtggctttaggcaggatgaggggccagttgtatctgtcagtatgtcagggtagtgacatctgtgattctgcagggacatttgaacagcagggaatcagaaacgccagaaagtgagggtccgcaacacaaaaccttgccaactgctgtggactgaattgcgttcccccgccctgcaattaatatattgaagccccgacccctaatgggactgtatctggagctagaggctttagg

SEQ ID NO: 1888789 - DNA, 4001 bp, Homo sapiens
ggcagggagagatgatattttttctgcattgttacactgaattgccctcctcaaggccatagcaagatacctgtggaaaaagcattgtctataggtcacagtcctaacaggtacttaggaagaagcaatgctgtcccatgactataaccacatacatgagtccagatacgtatgtatgtcttaagctcctctccatctccaacagccaaccctatcccgattaaatatctttctcaagaggtgtaaaaagatattgacccataaaaccaccaaacacttccagatttatttcagtcttaatgagagagaagcaagagaatgtgccagcagggaggatgggtcagcctcctgtgggagtgggtcctcgagagtgttgctgtcccctgggcatgctgagacactagagctgcccagcctgcaaagctgaggaccccactctgggagcacccgtgggactcagctcctcattcagaaagtgaacagatcaatgtaatttgacgtgggcctctgtgaggtcctcccacccattactgtgtgtctgaaaggcccgccgtctctccattgaccttggtgattgcttgtgttgcaatttctaacaggttaaaggaacaagtatgctccaaccccctttgtagaattctcctgctgatactgtgttgcagcacatatcaaggtcacctcaggaaggcaaaagaaagaaaaaatgaagccctcctcttatgaaaacgagcaacgcgtaggtggagacgaggtcgtctgttggaagggctctctctcttgcggtggggtaggggggcctgggagctctttgtcagtttaggggttaatgccttttctgagatccacagattcttcctccacatgaccctcccgcctctgcatataaacactgcccagttttcctccgatatgaagaccgtgcgcattgctgggggaagagagatgttattccgtcgtcattcctgcatgtaagtgcctcaccagggtccgagctgccagctgtggaaaactcaccattgattggccacagcccatcgccaccaggacccaggaacaagcagcgctgcctcgaggaggagggcggacagcctaacagggctcaggaagatgctagctctctccctccacaaccccaccaccaccaaagctgaccactcccacttcacccgacgtgttgaaagttacatcaaatgccacaaagcaaaaacagtcaagcgtgccagcatttatttcaggcctggtgactgggacactgcggcgagcaggggcatggagcagcagaaggggcttggtcaccgttcatggctctgtgtctgtggctccggtggtctcagattccgagtgcccggtatcctcccctagggaggaaagcagagtgacaagtggaccctcgggagccctggggatttctggcttggcctgaggttctcttggtggaacaggaaggggaggcggatgggcttggtggcgagcagtgagagaggcagaggcgtgctccgaaggagctctcacctgaaacacttggtgaaacatgccagggctctctggaaccggctcctccaagaccctcgcagaagagcaggttccctgggcaagcctgtgccaccggatgggtcctccgtggcgtcagacacagccacccattcctcagggtcgttttgcagccctttcacattctgaaagacagactaaatagccagatcctaatgctccctcccatccctggcttccttcaccccacccagcaactattgtgtgtgtctctggccctcttgcaggggctggggatgcagcagtgacctgcacagaccaaagcccaacctcctaggggacattccaggacaatggagggaagccagactcaccaggtcagcaggtggaaggaagggagtgaagatcatgcttccaggagtgtgtgatgtgccggtagggaccgacaggacttcgttgaagacaccggcgaagctcgtcactctgccgggtgcaaagaggccgagggcctgccccctccacgccccattcagcccctctgcccctgccccatcgtccctccctcctacagccttgtgctccagcaggggatacatttctggtatgtcacattccgtctgttcctgtgtttcttactcccactcctccaatctttctttcctttgtttcttcctcctggccctcccagcaggctcgagtcacgcttctgcttgctgagcagaacagccccgagggtcctcctcgagagaacatgatgtgtagaggtcttctacaggtagctcattttatttggccatgaatggttcattgcatgccaaggtcacacatggtcctagtttgccatgagtgggaccattccggttttaaaacttaaaggcccctgtcccgggaaagctctcagtcccagggaaactggaactacttcattcatgtggacactattgtcacattactgtgcactgtttttctcacatttaacagttggaccttgtagatgaaattgtaagagtgatcctgatacctaagaagtagacatttatgagtaatcgatgtgtattgaaggctctgtatatcttcatagtgtggaggtaaatgcagcattatgtgtttgcccctgaatacatatccactaaaagcctatgattggacctcagccatcacatctgctcttggggtgtcacaccagagttctagatggacccagaattgcagagagacaaggtcaggggaaggagccgggaaagaggttaacaagaccacagatgctgcagatgggactcacacgaagatgtccttcccaccagccaggccatcgctggctttgtaaggtaatgagattagcaacattagaggtgctgaaacacagcctgagtggtcacttgtaccgtatgctgcagagaggagggttcaaatggtttcagacagccctgtgattcataggattcgtgtgcaaatcagaggtaaagagcccttagctttcatgtaaatacgtaattccctctgacgtgtacaaaaattctcctcaaaatcttgtgaatttccaggcaagtgttgtgaaatacttagaaactcctccaagaagtgagcaggtctcattgtctgtcctatctcccttttctctccttgaatctactccagttaggctttctcctacaccactccactgaaacttaggagttaattgaacatgaaccaatgaacaagtgaaagtaatgtttcttatagttgtatatgactagctatgtgattaaaatgaccaaaccggcaagttgtatttaaatgcttaataaaagctaggtttaaattgttaacttaaaaaatgaatagaaatgaagacccaagtaactacactgtcatctcccagcacaactttcattctcatataaagaaactcattttctaagtaggaaggttgttccaaactgctggaaattcccaggaagaaaggcccaggttttatggagcttccacctgtttccttgtagacgcagccaactgccaccaggtggcagaacaagatgagaaaaccgtgccccacggagtccctgagcccctgctgctgcagtttttgagtgagttttctcaggggctggaatcactcctggggaaccatcccaaggttctgccctcttaagctattccagggtgcacccagggcctggtccagggtttctgacgtctatgatgacgcttaaggcagtgacatcgatcagccgggcctctgggctaggagacccagttcacctcctcattagtaaccctgggatgtggtagtaggtggctttaggcaggatgaggggccagttgtatctgtcagtatgtcagggtagtgacatctgtgattctgcagggacatttgaacagcagggaatcagaaacgccagaaagtgagggtccgcaacacaaaaccttgccaactgctgtggactgaattgcgttcccccgccctgcaattaatatattgaagccccgacccctaatgggactgtatctggagctagaggctttag

SEQ ID NO: 1888790 - DNA, 4001 bp, Homo sapiens
aggctggtgtcaaactcctgggctcaagcgatcctcccacctcagcctcccgacatgtaaacggtggctacatttccgcacaatccccgcggtctccctcattctgttttacaactactcccacataaagtaacgtagaaagacgagccccgttattcccttagaaggtagactggagcttgcaggaagctgtaggataaacattcagaggccaactgagataaaacgaaacacccaggtgattttaagctaatcaagagcccctttcacgtgggtgattttaaactaatcaagagcctctttcacgcaggtgattttaaactaatcacgttctcccttcacagaactaaaaagggaggttaatttacacaaacgcgcaggctacagccacccgtcctgcctagggacttcgggccaaaaatgccacctgtcacacctccaatccaggcgctgcagggctgttaggaggggaattagcagctgggataccccgatcctacaaggaggggggttagcaacccctcctgaaataccaaaaaggcctcggcttcctgcagacgcttaaggaacatgccaatcacaaccgatttcctgaaaaacgcaagaaatcctggtgagggctggggttgcaggacgctctgcacaccacgggtaacagttttggggtagcttctctgagaccggctgcctcttactgtcccctggaccaggggggcgccgctctcatcctcctggcatctcccaggcccctgccccactcagagctccaccgcaggggctcccgaggctggactcagacccgctggatcccatccaggcccccaaggcagcagtggagaccctcaaggctggactccagcccctaatgtagactcagggacccctgggatggatgggttcgaacccccaaagctgacttcaggaccctcagagctggactccaccctccaaggcagcattcgggaccctcacggctggactcgaggcccacggcagacatgaagacccctgggaggcgtccgggacccccaggactgaatttgaggcccccaggcagacgtgggggcccctgggcggtggtcaggacgcctggggctggacccaacccccaaggcagacgaggagaacccccgggcggcatccgggccccccagggctggactcaagcccccaaggctagacgtggggacccacctgggcggcgaccgggacccccagagcaggtctcaagccccaaaggcagacgtgggggctcctcggcgacgtccaggacccccagggctggactcaagcccccaaggctagacacggtgactccggggtggcgtccgagactcccacgggggaactccagtctccaaggtagacgtgaggacccccgggcggcatcggggacccccagggcgggactcgagcccccaaggcagacgcggggatgccgaggcggcgtccaggacccccagggcgggactcgggcccccaaggcagacgcggggacgccgaggcggcgtccaggacccccatggctggactcgagcccccaaagcagacatggggaccccctgggtggcgtccgggaccctgagagctggactcgagcccccagggcagacgtggggactccggggcagcttccggggcccccacggcggctctccaggttccagggcagacgtggagacccctgggcgacgtcacggacgcccagggcgggactcgagcccccaaggcagacgtagggacccctgggcgccgttctcgatccccggggctggagtcaagcccccgaggcggcgttccggactctcgcaatcagacttggactccacccagcgcggaacggggtaggacgggagcgaggacgaggtgagtgaaggcagcgctgccgccgccgccgccgccgccgaggctcggggtcctggcgcctaccgggccggcggctgcaccgcgggatgggtctgccaggagccgcccacgccgaacaagaagcggcccggtcccgcctcccccgccggcagcgcgtgccaatcaccagcacctgatgcggggcgaccaatgaggagcacgccctgccggggcgcggcgctagggagcccgccccggccgcacgccaatcaccagcacgtgacaagggatgaccaatgaggatcacgccctatgctgcggagaggcgctggtgagcacgccccagctgcacgccaatcactagcacgtgacgccggatgaccaatgaggagcacggcctgtgccggggagaggcgctggtgagccagccccggccgcacgccaatcacgagcacgtgatgaggagcggcctgtgggcagcccccgccccaacgttcagcctccagacgcgccatgtgggccctgcgggccgccgtacgcccggggctgcggctctcccgcgtgggccgcggccgctcggctccgcgggcagccgcgccgtcctgccccgcgcgcgcgctagccgctgtcggccgcaggagccccgggaatctggaggggccgtggggcggagggcggggcctgcgggcggacggcggccgaagccgcacgggagacgacgaggaggagccggaagatgcggacgagaacgccgaggaggagctgctgcggggagagcctctgctgccggcggggacccagcgcgtgtgtctggttcaccctgacgtcaagtggggcccggggaagtcgcagatgactcgaggtgaccgcggcagggctttcgggggagaaacaggagctggagacctgggggcggggctctgaggggagggggctcataggtggagattcaggggcggggctctgaagggacgatctcataggtggagattcaggggcggggttctgtggggagaatctcataggtggaggcgcaagggcggggctctgcaggaaggatttcataggtggagattcaggggcgggactcgggagaatcatagctggcgatgcaagggcggggctctggggaggctcataggtagagattcagggacggggctctgacctgagaatctcataggtggagacccagggcggggctttgaggggaagagctcaggtggcgacgtaggggcggggcttcagggggccaggctctaaggagagggtctgatggttggagatgccagggcgtggcgctgaggggcggggctctgaggggaagagcttatggatggtgatgcgggggcggggctctgaagggaggatctcataggtggaggtgcatgggtggggttcgggggaggagcccatgggtgaaagggcggggcttatggggaagaggggaggatatcattggtggaggtgcgtgggcggggcttcgggggaggggcctatggggtaaaagtgcgggggcggagcttatggggtggagtccgtgggatggggtggggcccgtggggtccgtggggtggggtggggtggggtggggtggggtggggttgggtgggccggggcggttctcgccgatgggacctacgtttctcttgctctgggttagaggtaggcacggtgtgtttgaggtcagggaagggagggcgtccagcggaccaatctgtgtctagtcccaccccccaccccccaggaggaaatgcaaatgaataagtcgctgcacgtgtcagagtctcataaaggttgatttttcccttggaagctcctgtagtcgatgagtggtttttctttacgggtgttttccaaaatggctaattcctggaacagatgaagccccgaactgctcagaacagcgcgcagacctcttgcctctctactccccaaacctgccggtggttcctcagtaatcccctgagcacccgcagctcccgggttccctgctgcgcccgcctggagcccaaattccatgtaaggcagggtcgccctcgtgtcccgctgtggctccggtgtccttctcccgtcagattcctacttagaggccctggggggacgaagtcatatcgggggacaaacggcggctcaaggtgccttctccggggaga

SEQ ID NO: 1888791 - DNA, 4001 bp, Homo sapiens
cactacttctatctttctttctttgactttctgtctctctctttctctccctttgactccgtctctgcctctctctctttgactccctctttgtctgtctcttcctctctctctgcctctctttttctctgtctctctttgactttctgtctctctctctctgactccctctttgtctctctctcttcctctctctctctctgactccctctttgtctgtctcttcctctttctctctctctctgactccctctttgtctgtctcttcctctttctctctctctctttgactccctctttgtctgtctcttcctctctctctgactgcatctttgtctcttcctctctctctgcctctttctctctctctctttgactccctctttgtgtgtgtctctctctctttctctctttgattccctctttgtctcttcctctctctctctctttcccccctccctctctttcctctctgctgttctttccctgcctctgccagctgcttatgctgctgttctcccctctccttcccctttccctaggggagggactggcaggagtggagctactctttcttcctctgaaaagaggatgcccaagatggacattaactcgacccaggtgtacaactgaggtcctaagaattggtcaatttggtctgccactctgtaagggtcatctagtagtgatttaagctccttttttaaaactgtggacttctgaactcggtagggtagcatttacaaatccaatgcccccttcccccctccccccaccctccttgtggtacctctttcaaaggtaagaggatcagggctaaccccttaggtacagagggaaatgggaaattctgaatatcttttttacatcgttctacctcatactggagtccttttagacaggggtatttaggtcgggagggaacagactgatggaatggtaattcccaagagtcagggttataaggaggagggataacatgagtagagggggatttggaatgggatctgaggtgtcagtggctgtctgaggggaaagattggggacactgaatgggggaagatagtctagaggatctcatgcgctggaatgtttaggcgtgagagctggctcctctgacttttcattttgaggtgccagattgggttcttccctatttgtttttaagggaaaaaggagggcaggtccttgtctccatagcctagttcttcttgagacactggacttttatcattaacatatcggattagaagctgacacattacatgctcattcgacctaaactttagccagaagattgagggtttgaggatgggtccctgagttcaagtaaaacagcaatattgtatcatttgttgctttttccttttttcttttagtcccttcattatccttccagtgttttagcatgagacctagggggctatccggggggatatctttgttaccatctttatcctccttgctccctgtcttgcttggggtatttctcatcttgatggttttggggtaaggttcaaggttcaatttcccttactgggaatttctcaccttttggggtgaggctcaatgtccccactggaaatttcttgcattttggggtaaggctcaatttccccactggaaatttcttgccttttggggtgaggctaaatttcccccactggaaatttcttgcctttttggggtgaggctcaatgtccccactggaaatttcttgcattttggggtgaggctcaatttccccactggaagtttcttgccatttctactactggagatttgtgtgaggttcaatcccccacaatggggatgtctcaccactttttaacttctaagccaccccgaccaaggagtacttcaccgcccccgccccactgcaactttcttaccttggtcctgaccaccaaggaaatattttaccagctcccacagcttctccttccttggtctgtgcacagagttgttgccacactatgtgaggatcctttaagctaggttgctggccagtcccctgcccccacgttgctgagagcccaggttattcctcacactgggtgggtcttgatttctcacccctgaggctgccacaagggggcggggtgtgcctcctcacaagagagaaccagagaacgtccctagaggggaatgtaatcacaggcagcccctaaattgttatatataaagtttcagtgcagcaaaagtaatagcactcaaatataaaattttatttttaattctcagcaaggcaagttacttctataaaagggtatgcccttacagatggagcaatggtgagcgcacacttggacaagggaggggaaggggttcttatccctgacgcatgtggcccctgctgctgtgtcattctcctattggctagggttagcctgcacaggctaaattcagattggctaatttaaagagaatgttgggttgagtgctttggcgggagtcagggcagagcaggtagcaggtaatctgaatgagttagggtggagcaggtgatcagaatgagttaaggtggcacaggtgattggaatgagtcagggtggagtaggtaatttgaatgagtcagggtggagtaggtaatcgaaaaaggttgctttacgaggaagttaagtttaaaagtagaaagcaaagaattgaacatactgacatattaattatttgaaaagaaatttagaactcatatctaacgtctgagaaaaaaagaaacaagaattttaaaaggtaaatatagagcagtttcaagatggccgaataggaacagctccagtctgcagctcccagcttgagtgatgcagaagatgggtgatttctgcatttccaactgaggtaccaggttcatctcactggggtttgtcagacagtgggtgcagttcacggattgtgagctgaagcagggcagggcatcacctcacccgggaagtgcaacgggtaggagaattccctttcctagccaagggaagccatgacagacagtacctggaaaattaggacactcccaccctaatactgcacttttccaacagtcttagcaaacagcacacaaggagattatatcctgcgcctggcttggagggtcccacgcccacggatccttgctcactgctagcacagcagtctgagattgaactgcaaggcagcaacaaggctgggggagggacgtctgccattgctgaggcttgagtaggtaaacaaagcagctgggaagctcgaactgggtggagcccaccgcagctcaaggagacctgcctgcctctgtagactccacctctgggggcagcccatagctgaacaaaaagcagcagaaacttctgcagacttaaacgtccctgtctgacagctttgaagacagtagtggttctcccaacacagagtttgagatctgagaatggacagactgcctcctcaagtgggtccctgacccccgagtagtctaactgggagacacctcccagtagggactgactgacacctcatacagcccagtgcccctctgagacgaagcttccagaggaagaataaggcagcaacatttgccgttctgcgatatctgctgttctgcagcctcctcgggtgattgatacccaggcaaacggggtctggagtggacctaggcaaactccaacagacctgcagctgaaggtcctgacggttagaaggaaaactaacaaacagaaaggacatccacaccaaaaccccatctgtacgtcaaagaccaaaggtagataaaaccacaaagatggggaaaaaacagagcagaaaagctgaaaattctaaaaatcagagtgcctcttcccttccaaagaaatgcagctccttgccagcaacagaacaaagctggatggagaatgactttgacgagttgagaaaagaaggcttcagacgatcggtaataacaaacttctccaagctaaaggaggatgttcaaacccatcgcaaagaagctaaaaatcttgaaaaaggattagatgaatggctaactagaataaaca

SEQ ID NO: 1888792 - DNA, 4001 bp, Homo sapiens
gaacagttgaaatattggcttgtttacttgcatttgtatgtttgtttttaaatttttaccctgtgcattagttcattctcatgcttccataaagaaatacccaagactaggtaatttataaaggaaagagttttaactgactcacagttccgcatggcttcggaggcctcaggagacttacaatcatggtggaaggcccctcttcacagggtggcaggagagagaatgagtgccagcaggggaaatgccagatgcttataaaaccattggatctgttataaatcactatcatgagaatagcatgagggaaaccacccccatgattcagtcctccacctggtcccacccctgacacatggggattattacaattcaaggagagatttgggtgggaacacaaaaccaaaccatatcattctgaccctagttcctcccaaatctcatgttctcacatttcaaaacacaatcatgcccttccaatagtcccccaaagtattaactcattcaaacattaacccagaagtccaagtccaaagtctcatctgagacaaagcaagtcccttccacctataagcctgtaaaatctaaagcaagttagttatttccaagatacaatgggggtacaggaattgagtaaaaatacccattccaaatgggagaagttggccaaaacaaaggggctataggcccatgcaagtccaaaatccaatagggcagtcgttaaagcttaaagttccaaaatgatctccttaggctccatgtctcacatctatccaggtcacaatgatgcaaggggtgggctcccacagccttgggcagctcttcccctgtggctttgcaggatgcagccaccctcacagctcttttcatgggctggtgttgagtgccagtggcttttccaggtgcatggtgcaagctattggtggatctaccattctggggtctggaggactatggccctcttctcagagctccactatacagtgccccagtgaagactctgtgggggagctccaaccccacatttcccttctgcactgccctagcagaggttctccctgagagctctacccctgcagcagacttctgtctggacatccaggcatttccatacatcctctgaaatctaggcagaggttcccaaacctcaattcttgacttctgtgctcctgcaagcccaacaccatgtgtaagctgccaaagcttggggattgcactctctgaaacaatggcctgagctgtatgttggccccttttagccacagctgaagctgaagcagctggggacgcagggtaccatgtttcaaggctgcaaagagcaagggggggtgcctgaggcctggcccactaaaccatttttttccttcaaggcctcctggcctataatgggagaggctgcagtgaaggtctctgacatgccctagagacattctccccattgttttggtgattaatatttgtagtgataggaatattctatatcttgaaaggagtttctgttacatggtgcacgcatttgtcaatacacatgaattgatatacctaacaggtttgtatatgatacagtatataattttagctccatttctcccccaagaaatatagaaatattaaactctacttcctgatatgcatgataaagggtttaaagatgaagtgcattgatgtctgtaacttattttgaaatgcaaaaaaataattattttatagataagagcattaattgatggatatattttcataatgaaatgttgggggaaatacttggaagtgaatataatcaactaacttgcaaccgtaagttggagattgtatcaaatttgttagaggtgtggaccaagccaaattaaattgtaactataagttttttaaaatttgtgttgagctaaattgtaaggtaaactgaaagaagctgtgtaaaagaaccaaggatcatcatggtaaagagaatgaacatgaggtgtgtgtgtctgtgcatgcacacatgtgtgtgagagaaaaagagagtgagaaggggatagctgggcacagtgactcacaattggtatcctcaggacttgggaggtggaggtgggaggaccacatgatgccaggagttcaagacccacctgggcaacatagtgagaccccatctctacaaaaaatgtaaaaatattagctgggcatggtggcacacgccttgtagtcccagctacttgggaggctgaagtgggaggatcacttgacccaagaaattcgaggctgcagtgagctgcgattgtgccactgtaatccatcctgggtgacagagtgagacctcaaccccagagagagagagagagagagagaatattttaaattattttgtaaaactcaacaattccaaaataaactttattcaaggaaaaaaataattaaaatatgcattttagatattggggtgatgtcagcaagatggcagaacaggaattttctcctgtcatttccccactatctacaattttgacaaccactcaagtatgagagtacctttgtgggagtctggtagtccagctcacagatggagcaaaacaattacgagaataggcacattgaaaagaaccagaaaatagtttcactacttatgtcaaccgtctctcaagctagcagaactcaacaccaagagatacaactttgactcatgatttctccattgggtgaaagggagagtgtagtaaatgaatgcctggctttcctagccacgtgggacactgaccaagaggcctacttctttctatccccactcagaatactgaggggatcatcatgtctgagtgactgagaggctgtgagcagggaacagcggtaggggctcacagcaaccagagactggaaattcaacaaaaggacacatatactactaacaacttcacagactccatcaggaggcccacccactagtggcttgggatgcctgaactgtaaacccccgaagctgacacatgggtgctcccaaaactttgcatgtctccctctctcctctaccttggcttgctccctgcacacggcccaaaccctgacagcgagtgtgaacttgtgtgcatgcagaagcaggcagcttgactctgtgggaatgggagaaggcacaaaaacttgagcacttcagggcaccacgttagagaaaacaaatgggaaactctcagaatttggtttggttttatgaaattaagaaaatacagatgatcttaaaatttctcaaaaagagcttgagtgacacatctacagaaaagatgtgcaagagtcttagtatccccagtcaggctaactggtataactgtttctcttctgaagccagtcagtataggctgaaggaggagactacttcttcaaatgtgaacatggcaacacgagatttcaaggaacacctgccaaaaacaacacaaaaataataccaccgaagaaactcagtaattttccagttgccaacaaaaaaaaatggagatctacaaatttcctgacaaaatattaaaaataattgttttaaataagcttgggttgctacatgagaacacagacaaagaagtcagtagaatcaggaaaacaatgtatgaccaaaataataagttcaacaaagagatagaaactgtgaaaaacaaacaaacaaacaaacaaacaaattctgaagctgaagaatacaatgaataaaattaaaaaagtaacagaaaacatccacagcatactcaatcaaatgaaagaaataatgaagtcaaagcattaggagaaacacttaatatagatgacgggttgatgggtgcagcaaaccaccatggcacgtgcatacctatgtaacaaacctgcacattctgcacatgtaccccagaacttcaagtataatataaaaagaaagaaagacagaaactatcacagtgaacatgcaacctacagagtgggagaaaatttttgcaatctatccatctgacaacggtctaatatccagaatctacaaggaatttaagcaaatatacaagaaaaaaaaaaccgca

SEQ ID NO: 1888793 - DNA, 4001 bp, Homo sapiens
gttagatattaggaaatcctcttttttgttactctggtcctatatctgtgactacttctcataaaagcttttcaaacaggattgtcatggctctctttgctaactaattaatgagttgcacagataatatgattgctctgttaaaagctctgcaccatttggaaagaaaaacaaccatgcaatttcaaaaggaattcaaattctattaattctgaaggatatgattttttgtggaaagaattattttagtatcctgcagttctttctggaaagctcatgcaataaaaatcagtttctagtctttgtaaaagtgattgaaagctgttgagggaaaaggaggagagtgaggaatggaaaagggggtaaggaattagggaaagaaagaaaggaagatagaggaagagggaagggagagaggaggaaaagaaagaaatgtgagaaatgagtaaagactatgagggatgtgggatggagataagatggggcaggaaatgagtgattatgagggggagaaggaagggaaggaggtaatattgagaaagaatggagcaaaaaaagaggaagagaagtttgggggaaagggaaaagagaaagtgtttaataactggtcaatgtccaatattaacttgtacatctggtttacttcacttctaatgtaaaccaaaatactcacaagtgacatgaatatgcacctttggttttctaattgcatattttgtcattaatttggtaaataaaatcttagtaacaaaaagtcttgtgtttttagtataaacattgaaatgtcaagttctcactaatttttgacatcagcatagtgtatataacctcataggagcaaaataacatacactcctagatcatgaattttgctccccagaatgataagggaataactttctgcatcaatcaagcccgagagggattctttgagtgaaacttatttgtagcaagagcaaccaagttctccacaggcctccaaaatcagattaacatttctttggcaaacatttattgagtgccaatcaagttccagacacttttttaggtgctggagatataaaataagtgtaccctgatctctgtttggttctcagggtgctcctagtagttacttttattttctttaacatgataaggttctgggaacaacccactggtaattttacatttttctgcatgacacctgcctatataattccagagctgaaatctcatcaagtagttaaggaaaaccttcagtggaacaattcagaaaagaaattcaaaactatcaactgatatcagcttttaagagttaatacattctatttatatttatcttcctagctgaggagaaaaaactgagagagagaagtgtgtctagttccacatcaccctgtgaaaaaacgattccagcagcaaatgcttcttcagtggctggagccattaagtaataagctcgctcaagtaggagttgctgtatcttctgcagcagatggtgcctatttgtcacacctgccgataaataaaataatgcctctcacttcaccgggattaacatcgtaatatttccaaatatttcttacctctcctggcccacagtatgaataggattggtcacttaagtatcccttttgaagctttcaccaacaggtaacttgttcaggaacatctctggaatagctggaacatagaatgaaagccttgttttgccaaagaagcaggactatgttcatgcaaagtatggtttctctttcatcttcctaaagagtaatccctttgcagaaaaacagaaaaacaccttctattacttaaaatgttacttaaaatgtcagttaccacttacagcttcagagtgcagcttcagatgcctgctccttataagctctgaaaagcaaagagaagtctgtttggatgtgtgtgtgccctctggaacatttgaatgaaagcagcctgaattagtctaagtccccagttcctctttcgcaggcaacagtttagagtatgcgggaaaggtagtgattcagctctgctctgtctcagcggtgtggagagggaggagataagagaggctgagaagcaaagtttgtataagctttctactttaaccccttagaggcttcctcatgaatctgtaagactagctgaggctccctatctttataaaagctgcttcatatgtcatttaagaggatcaaatctctagctaaattcaagaggtttttcatcctgggtcttacagtaatatatgcttagaattgaaaccaaacattccaggatgtgatagtgcttaaataattccatctttacaaacagaatgtttgcatgtgtatatttctaggtttgaaaaagattttttaggcaccaacttaatacatttgatttaaatattttgtggaaatgtaacatcagcctgagtttctggttggggttctaagattaaagtagaacattttctaagtagtcatatctagccagggtatatattccactataagttattcatccatttgtagtcaaaggcccttatcatcttttacatattgtggcaggaggaaggagattaacgtttcttgagtgcctactctatatcaaacatttaacataaagaacttaatttaatcctcacaacagccctgtgatttgggtattatgatcctcattttacaaatggggaacctgagacttagagagaaagtatatcatgtagtttagtaagcctagagccagcactggagaacaaggccatgtgatcccaaaatctctgctgttttctctgtagcagtgtttcttaatctttgtggatcttggattcctttgagagtctaaggaaagctacagaccttccccttcctcagaaatagggataaaatttctgtgctccatggcctccaggttaagaacagctgaatgtcccaatgttacttctccaatattataccatcattagtgcattgctcatccaacaacacatgatcataaacaatttttattatggtatcaataatcacaatagtattaattatagtgtcatgccaatctttaagaaattactgcagtgattttcactttattcccaaattctccttaacaattcttgcatactatgtctttccatttccctcattccagtggttaaaatcaattgaggctgtccttgaaatccttgccttaccagcatattctagtaccttctttctcaaactgtggaatatgctggtgtttctcaaactacagtagtatgctcaagaaagtacaggataaacatagtgtattttcctagatgattgaatttacttgaatatttggacaaggagaacgtagatagtttaagtgataattttaaacatagtttatatgataataaacacacagaatagaatgcaaatttatgcatttttatgatcaagcatgagattttagagaaattttacacttgtggtagggcctctttgggccacccatacttccccagggatacgtgttcactcttctctgccattcgggatttttggatgaaaaagttcaaagatcatggtatagcagaaagatcagggtctttgaaatcatattgacctgggttttcaccttagctttgatctatattttctggattaccttaagaaggtcaattaatttctctgagactcagttttcacctataaaagagggaaaattataaaaggggggttagatgagaaaatatctctaaagcatacgctacagatgctcaacaaatcttaatgctgttgcttcaaattggtagatatcaatagacaatgaggctacgtgaatctaaccagaggtttcaccatggataattgaccttttcttacataattagaaaaaataagccttatttaacacaatattaaattcgagtttccaggaagacataattaatgacccacaatagttgggaattccaaagccaggtcatcatatacaaaatttacaatggaaatactccagaagaggctccaagaaataaaagggagtcagattgtgaaagggagtgg

SEQ ID NO: 1888794 - DNA, 4001 bp, Homo sapiens
tagcctgccacttgttgctgtccttaccctgagaggaaggaaggaagagtacaagcggcagtaagaggccagagaatgaccgggtggtaaactgtgtgtggaagtgcggaggctggaggcaagaaggtaacaggctgggagaaaaacactccccttatcttctaggccacctacgcctgcagccaaccctgttaggtgaggtactgaaaatatactgggctttttattatttttaccacccccaagcagagaggctcaggggaggagcagacatgcagcacagggtctgctttgaagtttcttaaccacagtgtttttaaacattttgtaaaaaagcaaaacaaacactccttactgctgcgtctatcttctgaagatgacagcagctggcagagctcgtccccctcagtctagttagcatttaatatatggctatgggagagcgccccttattagtgggctcctcctccagggctctgtactccgggctgctccacactcctttgcccaccttaggctagtaaggtccgggtgcacatggactatttctcagccctttccctagggggccagggaagacaaggaattgctcgtcaactgagacatgtgaggagtggcagggaagggcagaagtaggaaaagcagcagcacggcaagcagcaggccacttcctgggcacagttactaaggcacgtgaccatggtgaggcggatcctcaggactgggctggagctgcctgcagccacccggggactcggtctgtgccttttggccttccctccgtcaccacaaacccagaaaggggcaacctgcccaggctgccagtgaccaagtgtgcactccatggcatctcagcaactctcctgccccaggcctctgtgggcagcaagaaagctagagctatctgggataaaacccaggaggcagcatgcaacttccccttttactccagtgaaacagaaaaaagacaaggccagaaaggctgatgctggaagtagcaaatgggaacttgcatattaggaagacaatcataatcagccactttccttccctcctggacgcacccctccagcagggaagttagtcgaggagacgcagccacccaatcatacagatcatacagatgttcgctgaccgggggtcttatctaagagccgtcccttgggcggcctccaatctccttaagggggatggaaggcgctgttggctgaacagggccaacaaatgcaggtccttttaagggtggaggaaagaagggcaatggcttttctacagggggaggaaaaggctcccgtccgtccttatcctcactaaaaaaaaaaaaaaaaaaaaaaatcctccttatgccctacagaagggaatgaggtagagagaggagcacccccaccccccaaccactgttctggttcctgtttgtcctcactagaaaaaaacctcttccttattccccatagaacggaatgaagtggggagaggaatctctcccttcaaatcttctgaattcttttcaggtggagataatgggcgatctaaccacgatctggcagataaagaggatacaacgcagagcgtaccagcgcccaggtggtcaaaatagtaacattagtaaaatgaccctgctcatatcctcttttcaggcagcgacctacctgctctcataaccctaaatctaaggttccttgatcaggaaaccaagggcatttctgccaaattaaaagcataagcttgtgtagagctccaggctctacagtgcactggatagccttaagtagctgttgcactgttttaaaaaatactttctgttctttggtcatttcctgacccatgataacccaacccgcgatagtttacgcatgggtcccgtcctcctgatgggagtcaggactgtcccttaccaggattccccgaaaagtaatgagctctcctccttcacgcgtaacttcaaggcgatcacgtcggggtcaccacttgcagagcttatagcttgcagtgaacgccaagaatgagttctcagacaaatccagctgaggggggccgggggcagctcttctaagagactccgccccagcatctgtccgccaagtattcattgaaagggcttgttagaccacaaacatccactagatggcctttttgaggtcgggtcatgagacacctgtggcctggtaaaagcactcaaaccgcattctcgggaggctgttttcagcgttccttatcacaccacacactccactccccgtcctgttttcagggtcaaggagtttcattctcatgcacaaataacatacacacagtgcctcagtatgtttccatgccccgacctcaaacgccttgtacataagcttgaatatgttgccgtgcacccccgacacccactccagagacagaaattacaccacttttctattgagttatgttaaaatacacgtaacataaaatttaccatcttaagtgtttttcagttttgggttcagtagtgttaagtatatttgcattgctgtgcagccaatctccagcatgtcttcaactgcaaaactgaaatgtatacccattaaacaactcctcatttttccctgccccgcagcctctggaaaccaccattctacctgccgtttctgagtttgaatattttagatcccgtatataggcggaatcatgtagtatttgtccttttgtgactggctcatttcatagcataaggtcctaaaattttatccacgttgtagcctgtatcagaactccatccttttacaggtcaaatcgtaattcattgtaagggccaaatagtggaccacatttagtttctgtattcacccatcagtggacacttgggttgcttccatctcttggctctcatgaataatgctgctatgagcacggatgtacaaatatctctgagactctgatttctattttttcgatatagacacagaatggaattactggatcatatggtaattctctttttagttttctgagtaaccgccatactgttttccacagcagctgtgccattttacattcccaccaacagtgcacaaaggttccagtttctgcacatcttcaccagtatcacatcagttttattgaacaaatggaatttatttcatttctttgtattttgtttttgtttatttgtaatgacacaatcgtatacatttgtagtgtacaacatgatgatttgaaatacgtatacattgtgcaatggctaaattaggctaactacaatatgtatgaactcacatacctttcatcttctgtggtgagaacacttaaaatctaccctcttaacaattttcaaggatacattattattaactatagtcaccatgtctacaatagatctcttgaacttagacttcttgtctaaatgaagttttgtatcctctgaccaatatctccccaatccttcccagccccagaccctggtaaccaccattctattctctgtttctaaaaagtttgattttttaagattccacaccccagtgagatcatacagtatttgtcttgccgtgcctgccttatttcactcgacataatgtactccagattcactcatgttgccacaaatgacaggatttccttttattttttaaaaaatgctcaatactattctattgtgtgtacatatacacatgtgctttacccattcatccgttgatgggctcttggtttgacttcacgtcttggctgttgtgaacagtgctgcaatgtatatgcaagtgcagatatttttgacatactcatttcattttctttggccatctatccagtagtgggattactaaatcaaatgatagtgctatggataagtttttaattttaagtttaatggatacataagatttgcacatatttatgatgtacatgtgatattttgtcacgtgcatagagtgtgtaatgatcagttcaggatatttggggtaaccatcacctggaatatttttgattcctagtattgggggtatttcaagtcctctcttctattttgaaatatg

SEQ ID NO: 1888795 - DNA, 4001 bp, Homo sapiens
agcctgccacttgttgctgtccttaccctgagaggaaggaaggaagagtacaagcggcagtaagaggccagagaatgaccgggtggtaaactgtgtgtggaagtgcggaggctggaggcaagaaggtaacaggctgggagaaaaacactccccttatcttctaggccacctacgcctgcagccaaccctgttaggtgaggtactgaaaatatactgggctttttattatttttaccacccccaagcagagaggctcaggggaggagcagacatgcagcacagggtctgctttgaagtttcttaaccacagtgtttttaaacattttgtaaaaaagcaaaacaaacactccttactgctgcgtctatcttctgaagatgacagcagctggcagagctcgtccccctcagtctagttagcatttaatatatggctatgggagagcgccccttattagtgggctcctcctccagggctctgtactccgggctgctccacactcctttgcccaccttaggctagtaaggtccgggtgcacatggactatttctcagccctttccctagggggccagggaagacaaggaattgctcgtcaactgagacatgtgaggagtggcagggaagggcagaagtaggaaaagcagcagcacggcaagcagcaggccacttcctgggcacagttactaaggcacgtgaccatggtgaggcggatcctcaggactgggctggagctgcctgcagccacccggggactcggtctgtgccttttggccttccctccgtcaccacaaacccagaaaggggcaacctgcccaggctgccagtgaccaagtgtgcactccatggcatctcagcaactctcctgccccaggcctctgtgggcagcaagaaagctagagctatctgggataaaacccaggaggcagcatgcaacttccccttttactccagtgaaacagaaaaaagacaaggccagaaaggctgatgctggaagtagcaaatgggaacttgcatattaggaagacaatcataatcagccactttccttccctcctggacgcacccctccagcagggaagttagtcgaggagacgcagccacccaatcatacagatcatacagatgttcgctgaccgggggtcttatctaagagccgtcccttgggcggcctccaatctccttaagggggatggaaggcgctgttggctgaacagggccaacaaatgcaggtccttttaagggtggaggaaagaagggcaatggcttttctacagggggaggaaaaggctcccgtccgtccttatcctcactaaaaaaaaaaaaaaaaaaaaaaatcctccttatgccctacagaagggaatgaggtagagagaggagcacccccaccccccaaccactgttctggttcctgtttgtcctcactagaaaaaaacctcttccttattccccatagaacggaatgaagtggggagaggaatctctcccttcaaatcttctgaattcttttcaggtggagataatgggcgatctaaccacgatctggcagataaagaggatacaacgcagagcgtaccagcgcccaggtggtcaaaatagtaacattagtaaaatgaccctgctcatatcctcttttcaggcagcgacctacctgctctcataaccctaaatctaaggttccttgatcaggaaaccaagggcatttctgccaaattaaaagcataagcttgtgtagagctccaggctctacagtgcactggatagccttaagtagctgttgcactgttttaaaaaatactttctgttctttggtcatttcctgacccatgataacccaacccgcgatagtttacgcatgggtcccgtcctcctgatgggagtcaggactgtcccttaccaggattccccgaaaagtaatgagctctcctccttcacgcgtaacttcaaggcgatcacgtcggggtcaccacttgcagagcttatagcttgcagtgaacgccaagaatgagttctcagacaaatccagctgaggggggccgggggcagctcttctaagagactccgccccagcatctgtccgccaagtattcattgaaagggcttgttagaccacaaacatccactagatggcctttttgaggtcgggtcatgagacacctgtggcctggtaaaagcactcaaaccgcattctcgggaggctgttttcagcgttccttatcacaccacacactccactccccgtcctgttttcagggtcaaggagtttcattctcatgcacaaataacatacacacagtgcctcagtatgtttccatgccccgacctcaaacgccttgtacataagcttgaatatgttgccgtgcacccccgacacccactccagagacagaaattacaccacttttctattgagttatgttaaaatacacgtaacataaaatttaccatcttaagtgtttttcagttttgggttcagtagtgttaagtatatttgcattgctgtgcagccaatctccagcatgtcttcaactgcaaaactgaaatgtatacccattaaacaactcctcatttttccctgccccgcagcctctggaaaccaccattctacctgccgtttctgagtttgaatattttagatcccgtatataggcggaatcatgtagtatttgtccttttgtgactggctcatttcatagcataaggtcctaaaattttatccacgttgtagcctgtatcagaactccatccttttacaggtcaaatcgtaattcattgtaagggccaaatagtggaccacatttagtttctgtattcacccatcagtggacacttgggttgcttccatctcttggctctcatgaataatgctgctatgagcacggatgtacaaatatctctgagactctgatttctattttttcgatatagacacagaatggaattactggatcatatggtaattctctttttagttttctgagtaaccgccatactgttttccacagcagctgtgccattttacattcccaccaacagtgcacaaaggttccagtttctgcacatcttcaccagtatcacatcagttttattgaacaaatggaatttatttcatttctttgtattttgtttttgtttatttgtaatgacacaatcgtatacatttgtagtgtacaacatgatgatttgaaatacgtatacattgtgcaatggctaaattaggctaactacaatatgtatgaactcacatacctttcatcttctgtggtgagaacacttaaaatctaccctcttaacaattttcaaggatacattattattaactatagtcaccatgtctacaatagatctcttgaacttagacttcttgtctaaatgaagttttgtatcctctgaccaatatctccccaatccttcccagccccagaccctggtaaccaccattctattctctgtttctaaaaagtttgattttttaagatcccacaccccagtgagatcatacagtatttgtcttgccgtgcctgccttatttcactcgacataatgtactccagattcactcatgttgccacaaatgacaggatttccttttattttttaaaaaatgctcaatactattctattgtgtgtacatatacacatgtgctttacccattcatccgttgatgggctcttggtttgacttcacgtcttggctgttgtgaacagtgctgcaatgtatatgcaagtgcagatatttttgacatactcatttcattttctttggccatctatccagtagtgggattactaaatcaaatgatagtgctatggataagtttttaattttaagtttaatggatacataagatttgcacatatttatgatgtacatgtgatattttgtcacgtgcatagagtgtgtaatgatcagttcaggatatttggggtaaccatcacctggaatatttttgattcctagtattgggggtatttcaagtcctctcttctattttgaaatatgc

SEQ ID NO: 1888796 - DNA, 4001 bp, Homo sapiens
tcccaggtccccaaggtgagctttcttggcacatatccactccagagttgtatcctagaggcaggattgtgtcccctcgccactgccacacactccccaccccaaacacagcaggagagtcatgctttgaagggaattctggaagaaatttctagtcataagtgggctcttgggtgctattgtaacccttgtatgactctaacacctattgctgtgagtttagccaaacaaacaaacaacaacaaaaaaaacaaacccataagttccccacagcatctctctatatattccaaaaggttctcccattgatgtttcctatggcaagactgtccgaggggccttgtggctaacaccgagtagtcaatatcctttcaataagtattttcccagcatttggcaagcactaggctctctgataggtctgggaatccaaaatgaaaaagacagagctgctagttaaggagatacaaaagccagagtggaccacagtgcactgggtaagcatccacagtagagaagtgcaggggattttgggagcatgcagaaggagtgagggtgaagaggtgacagactcagggaagacttcctggaagaggaagccctgaaggaattttctgggtcaggaaagaatacattccaggtacaggaactagcatgtggaaggacccacaggctggaactcatgggctcgttcttctcttacggctgcaggcttgggatcaaagccttcctctggtctctgcacagcacctcaggttctccagtcagcccttaatgtggaacatgaaatatcaggtgtttatagaacaaaaagttccctttcttccacggtgaagggtctcagggatggcatgctctgcaggtgggcacatagttggcacctgttttccttcaaatatcagcctgacatgattgaacatttaagacttgtctgtgtggttctagtccatttttttaaacctcccttgctctagtctcagcctgccttttttttttttttttttttttgagacagagtcttgctgcgtcgccaggctagagtgcaatggcgcgatctctgctcactgcaatctccatctcccaggttcaagtgattctcatgtctcagcctcctgagtagctgggattacaggtatgcacaccacgcctggctcatttttgtatttttagtagagacagggtttcaccacgctggccaggctggtctggaacttctggcctcaagtgatctgcccaccttggtctcccaaactgttgggattacaggcgtgagccaccatgcctggcctcagcctgctttctgcatctcccctagagctccaggactttagtaggctagctcctggctccactgcccagaaacccctctccacagcctttccccgcctaccctgcaatttacctctaccatgatccttcttcttgacttaactcattcagggctctctctctctctttccaacttctaactggtgtcctccaggctgccctcttcagttcagaccacaggcttgggcaatttctgtctctctgattcttcctgtggtctgttcctgacaaccccttgggggctgtttgtgaaatgtgccctctgcttctaactcatctcttaggtatcctcacaggagactgccttcttagtgggggcctgacgcagaagacctctagttctcccacagtgtcttctggggccaggcccgctgtttctcactgaggctcggagaaaggcaatgacttaccatggtcatgcagcatgttagcggcagagctgagagtaccccaggcctcctgacttccagcccagtagtcttttccaggaatcaagctgcctctcggaagactcaggtcttctagccagcatcagctcccacccactgactgcactgtgcacccatctctgttagcacttccttcctgagccacttcattaaaactgaagctggcccgtccaggcttctgactcagcagcccagcaaagaacatccagccatgtctgcatctgattaaggaaacgccaggggcaggaaatatatatatatatatatttttttcctggctgagtcaaggggtgcaaaaggaggtggagagattcagtaaaatagttaagatttgagtagaaggtaatctttcagcacaagatgtaccacagggaccacaggggtggaagagaaatggaagggctttatcaaaagatttaggattactagttaaatacattttggtacagaagtatattactggcttagaaggacccctgtgatacactgatagtgcaaatatcatggcagaaataggatgtccccagttttttttttttttttttttttttgacagagttccactcttgttgcccaggctggagtgcagtggcatgatctcggctcactgcaacctctgcctcctaggttcaagcgattctccggcctcagcctcctgagtagctgggattacaggcacctgccaccacgcccagctaatttttgtacttttagtagagacggggttttgccatgttggccaggttggtcttgaactcctaacctcaggcgatccgcctgcctcggtctcccaaagtgctgggattacaggtgtgagccactgcaaccggcccagttccagttttgtaaaaataagttgagagtgtccctaaagtgcttatgagtagtagctaaaagttcccctccatgctctgcacccatgttaatttttgcccacaggtagataattggaaaacaattaccacaacctttgatagctattgtggcacgggtgttcccctgtgaataagtggagttgggaatctttcttcatcacagtgccccatggtgaactgcgccatcttggtaagcgtggacctgggacagtttccactagagcacttccacatataactcaatagcccgtatctttgacatcaggatgttttctgactttgaggagaaggatgtcctggtactccttgtcacagggtggctgatgcctggagccctctctctcccctgacatcggggaaccaaccacatctgaagcagtttcaaataagcagtagggttgatatctgttctgggttgaacagtgttcccctccccaaattcatgcccatgtggcacctgtgaatgtgacttttttgggggggaaatactttgtaaatgtaattagtgaaattaatataaggtcaaactgaattaaggtgggccctaattcaatgactagtgatcttataagaagagggaaatttgaacacagacaaacacagagggaaaacagccatgcaaaaacagaggcagggattggagagatgtgtctacaagccgcagaacatcaaggattgctggcaaccattaaaagctaggaagaaacaaggaaagaccctcccctagatcctttagagagagcatggccctaccaacaccttcaagttcagacttctggcctccaggactgtgaaagaatacatttctatcattttaagctccccagtttgtggtaatttgttatggcagcccttggaaactaatacaacacttctgtagaagaaagtggctccatcttttgaaatgctgctccaatcatgacctgagcagaaagatgttcatcagcagaggacacacagtcaagcggaggaaccgcatggctctttgattatgctctacactcctctacatgtgcacacagaaacaagtctgcaaggtaccacaagacttgtgtctgggtgataggttctggggtatctttatctttttgctttaacttgtctatatttttgaagtttcccacaatgaatatgtgctacttgtgtaaaaaacatgtatctatagctatatctacccatcatctatttatctatctatctttaatcatcagatttttgccattgaaagtaatggtaaaaccacaattacttttgcaccaacctaatacttgtattctctattctcatgcacttgcagaatccttccaaatgaaatagacccagggtaccttcatttcttgtaggccca

SEQ ID NO: 1888797 - DNA, 4001 bp, Homo sapiens
cacccaggagtgagagtgaggagcagctgagagagttggaaaagggagcccttatgtggccaccaagggcttccctgctagcagccacacggtggctatccagctcattatgcgagttctagttcttcaaacaagaggccacgggaggagcaacggccacccaccatcccggggatcctcattcatgatttgaaaccactctaagcaggttctggggtgttcggcagaagctggcaaccattcttgtggggaaggaacccaggaggggatgctagcatgcataggaattggaactggtgatctgaaggtcccctgcagccctacggcctacatcccataaagagggaccctctcctcctcacctcatctccagcattcctgcttcctcgagcttctccagggagaagtaggcgcatctcactagaaaaaacaagaaagcagccctttgctcattcaacacttactaagcagatactgtgccctgggcacccagtttcagaaatgagtaaaacaccggccttgccttcaaggaactcaagagaccctgcggcagccacaagtcttacagagcaattaccaccctgggttgcaagagcctaacgtggggtggggacgggggaggtacaaaatgctatcagagctggagacgaaagtctctaatactcggagtggggctgtgaaggtgactttaaagttgtgccttgaaggaggccaggagcgcaccaggacaaggccatgggaaccgccggtgcaaagcagggagacctggaacagcaggctggtggggaccagtgactgaacagcacagcgtgaacccaaagagtgtttggcttaagggtggggagagctgagccgactccctgaactgctaggacttaaacctgagaaggcccagcagcgttttcactagaggattgctggggacagatttgtgacttagaaactgagccgatggaatgtggacgacagacctgagggaagaaagacagaggactccaggttgctcaggaggctcatggaacagtgcaggctccagaccacgaggcctgaattctggaagtagcagcggggatgcaggacgaggagccgttttgtctcatcaggcactccagaggcagggacccagaacttggttatgaagtcaatgcgggagactagataaggggagggacagaggagtaaagcatggcagcactacagaacctgagcccgtgactgagagaagagagtttgaaaagcaagtttgccagggaagttgggctgtgtgctgggcgacttaggtcggaggaggcaagacattaagagtggggatgtttctcatcacctgcaaaagagacgttaaagagacggttcctccggaccccactggcaggcactgacagagcggctaggacacaggagagcaggcctggggggctcagccctgcaagactcagcctagagctgcatagaccccagtcaagtgttcccgcccttcttgctgcttccgtgccctatgggggtagacactggaggtgcagttaggtcgctgcgggcaagttttgactcttgcctaagggtgcatcacagaagggcctcagctccctcccccagctccacccacagctccacccccagttcggctctgcttcatttcaccagcatctccacccccagctcctcctccggcagctccgccccagctgttccgcccccagctcttcctcctcccagcacttaaccagttccacccacagctctttcccacaactacgccctcctcttgcaggcggctcctccagaagctctaacccagttcctgctgcagccccaccctgctcaccctgcatctccagtcccagctccgcctcctctagccccgtcccgcttctcctacccctctgcccaccccagcacctttcagctctttcctccagctctgcactagctcctcccccaccattctcacccgccagccttactccagcttggctcccccttctccagcaatttcccgcagccccgccccatctgctcccacacctctttgccacagccccgccctgctcctcctccaggaacgcccggctttccctcagctccacgctgcagctgagctgtgcaccaggccctcccacagagctttctcgtgattccaccctacacctccccaagcccccgctcccctaagctggttctcaggagtccgaggggtcctcccgcagctgctcctcgctcagttctcccattgccccgccctgctcttcgcggggctgcttccaaagccccgacctcagccagcagtttctctcagccccgcccctccctgccccgcccctcccctccctgccccgccccgcttctcccgcggctgctcccaaagccccgccctcggccccctccccagcagtttctctcagccccgccccaccccgagccccgcccgcagccccgacctgcttctcctgtggctgcctccaaagccccgcccccaaaccttccccagcattctcagcccccccagagccccgcctctcccagccccgccctacttctcacgcagctgctttaaaaaccccgcccccagcccctcccagtgatttctttctccccctccctccttctctcagcggacacctgcctccccctgctgattctcaagagtccgcgagctcttcctgcagcttctcctcgctcagctctcccacggccctgcccacaatggtttctctcagccccgcccggccctgccccacaccccgcctcttatctcagccccgccctcaacccagcccccaattgtttctgtcagtcccgctcggcccctcccccagctccgccctcctcctctcagccccgcctccaccccctccccagcggtttctcccagctcctccctgctggtatagcagctctgggcccaaaactcctgcctggtgtcctcgtcccacccttccacttactcttcctccctcccgttccttttcctccttccggttcttcgtcgaggctgccggtctcgaggtcccctggccttggcctggttggctggcgcgcatcagggccaggtaaagagaatagcgtctcctagcagccagggcgtgcgtacgtgcgtgatgtcgtcagtgcgtgtcttcgagaatgcgagattcataatgtttgctgtctatatgcatggctgagtacgtgcctcccgcgtacgtgcgtggtgtgcatacatgcgtgattgcgcgcccacgtacgttcttcgtgaaagggatgacgggagctgtatgaaagcggaagagttatagaccgctaacacctgtcactggccactggtttcccggagttagcggcaacgaccttgcagcctggacactagccaggcgctccctcttctcacagcggcccacgtctccttgcttgggagcccatcgtcctggctccggtggcctcgctgggtctcggggaagcagaggactgttcattcctgtggcgaaaagccggagtcggccctagacacccacgactcgcagggtccatggttccggaggccgtgagacctgccggggctgacaggtgccagggcccatgctgcgggagcctgtgtgctcagccttcttgcggacggtacctgagggctggggtttccctggatgtggggctgggaactcgtgcggggcgcgaccgaggcgccttttcctgtcccctgctgtcggcagggtctcggctccgctccttctaagcgcgtgtacccgcgacgtgcgtctgcgagtagaaagcccgtgtactgctccacacacagcggccccacctcagtccggtcttccctgcctcccgttggcccttctgctgtgagctcgcctggacctgaggccgggcggtgcacagctctgtggcctgtggcgccgtgctcagcgtgacctacccagaattaagctgaggacaatgggatttagagtcccaaacactcgccccgtgacaatgggaggggaagtgtcatttttctcccttcgaatggagcatgcttggctgcaaga

SEQ ID NO: 1888798 - DNA, 4001 bp, Homo sapiens
cgcccacagctccaccccagctgttctgcccccctgctcctcctccctcagctccgccccagctgttcctcccacagttccgccccccagctcctcctcccgcagctccgccccagctattccgacgccagcccctgctccacccggcacttaaccatttccgcccacagctctttcccacaactacgccctcctcttgcaggcggctcctccagaagctctgacccagtccccgctgcagccacagccccagcttcttacccccagctcctcctcccacagctctttcccactgccccgccctgctaccccttcatcaccgctcccagctccgcctcctctagccccgtctcgcttctcctacccctctgcccaccccaacaacctttcagctctttcctccagctctgcactagctcctcccccgcaattctcacccgccagccttggtgcagcttggctcctccttctccagctctttcccgcagccccgccccatctgctcccacagcgctttgccacagcctcgccctgctcctcctccaggaacgcccggctttccctcagctccaccctgcagctgagctgtgcaccaggccctcccacagagctttctcgtgattccaccctacacctccccaagccgccgctcccctaagctggttctcaggagtccgcggagtcctcccgcagctgttcctcgctcaattgcccactgccccggcctgctcctcacaccactgatggcaaagccccgaccccagaccctccccagtggtttctctcggcccggccctaccccgcccctccaacgcctgcttccaaggccccgcccccagcccatcctcagcggtttctctcagctccgccccgccccagccccacccggctcctcctgcggctggttaaaaggccccgcccccagccgctccccaatggcttcgctcagacccgccctgccccgaacccccccctgcttctcccgcggctgcctccgaagccccgccccgcgccgagccccgcctctccccatctcctccctgtttctcccgcgggtgcttccaaagccccgcccccagcacccccctcagcggtctctctcagcccgatccaacccttttctgagccccgccctgtttctcctgtggctgcgtgcaaaccccaccccccagccccaccccagaggttcccctcggccctgccccgcccccccagccccgcttctccaaaggctgttttcaaagccccgcccccgagcccctccccggcggttccctcagccccgccccacccctccccgagccccagccccccccgaaccccgccccgccccactcctcccccagccctgccctgcttctccagcaccagcttccaaagccccgcccccaacccctccccactggtttctttcagccccaccttcctcctctcaccagccccctccctccccgcgctggttctcaggagtccgcgagctcctcctgcagcctctcctcgcccagatcgcccatagccccgcccccaatggtttctctcagccccgccccaccccctcgagtccccgccccatcccaagtccccgccccatcccctcaagtccccgccccactctcaaccccgccccagcggtttcctcactcccgcccttcccctcccccagctccgccctcctcctctcagccccgcccccatcccctccccattggtttctcccagttccttcctgctggtctcgcagctctgggcttaaaaatcctgcctggtggtctcgtcccgcccctcctcttcctccctccggttccttttcctccttccggttcttggtctaggctgcctgtctcgagctccccggccttgtcctggttggctggcgcgggacaggatccggtaaactgaacagcgtctccttgtggcaagtgcgtgcgtacgtgcgtggcgacgtcactgcgtggcttcgtgaatacgtggcttcctagcgatttggcggtgtataggcgtggctgaatacgggcctcctgcgtacgtgcgtggtgtacgtacgtgcgtgattacgcgcacacgtacgttcctcatgaaagggacgacgggagctgcatgaaagccgaagttatggaccgctagcatctgtcactggccaccggtttccgggagtaagcggcagctaccttacagccctgacacgagccgggtgctctctcttctcaccgcggcccacgtctcctcgctggctccggtggcctcgctgggtcgcgaggaggcggaggactgtactctgaggccaaaagccagagtcggccctgaacgcccacgactctcagggtccagaggccgtgagaccggccgcggctgaaaggtaccagggcccctgatgccggagcccgtgtgctcggccctcttgcagacggtacttgcgggctggggtttctttcccctgggtttcgggcagagaacccgtgcggggcgcgcccgaagcgccctttggtgtcccttgctctccccatggtctcggcccccctccttctaagcgcgtgtacccgcgacctgcgtctgcaagtgctgctccacacacagcggccccatctcggcccggtcttccctgcctcccgcttggcccctgtgctgtaagctcgcctggaccccaggccgggcggtgcatagctctgtggcctgtggccccgtgctcagcatgacctaaccagaattaagcagtggacaatgggatttaggccccccaaaccctcgtccgatgacaatgggaggggaagtgtgatttttctcccctcggatggagcgtgctcagctgtaggaatgtgactcaacttgctgaaatgattttctgctctgcggactggtgcaccctgtgacccagacagatgtggagggtcccaccgctctgattagcagaaccaaaccgtgagtgaggtgcacatgtgttactcttaggaccggccctcccagctcttggtttccaatgcctgctgagtagaagaccttcctagggccattaaccagctttgctgacttgcatttaatgacctttcctctttatcttccttgttgtgcaggtaaagaaaccaagtggaagagtgtttcctcctctggccgtaaagcaggtactctctgcagcaccaggtaggaggggactcaacccccttcttgccttttcagttacatcagttcctactagggattccacacacacacagttgttgtgattttgtggtgatgacgagaaaagggttggctaagaaactgggcggcagaaaagaggcaaacattcactgtagccatttatcccgatggaagtggccaggccctgtgggggacattcagcctccgtcagaagtaatccagaaccaaggaacctggttatctttggtcactcatcagaagaataatcatgctcaggggccacaagtgtgtgaggaaatggcaccatggatgggttggtggagggtacacgggtgagtctttgtggaaagtcatttgctggcagatatcagcatcttagatgggcgtgccaggcggccgaggcatttccttcagcatgtcttcacacagcgagtgttagaagtaatgtcatttctagtggcaaaagtgggaagcaacttgtaactctccatcagtggaggaatggtcaggcaaattatgagacgaccaacaatgggatatcacccaggcagtgaaaaacaaggtagatgaagattgtcaggtggaaagaatgggcttgatgtgctgtcaaatggcaaactcgtgccctagcctgtgcagatgtgttgggaacagcagtttgccaagatggctgaaacaaaggaccataaaggggctggcttaaagaacagacaatcattgtctcgcagttctggaggatggaagtctgaaatcaaagtggtggccaggttcgtttgttctgtgggctgtgaaagacaatctggtctgtccctttctcttagctgcaggcggctggccggcaatctttggcactcattagcttgtag

SEQ ID NO: 1888799 - DNA, 4001 bp, Homo sapiens
cacttctgagggtagtttttccgtataagaatctgccctgtgctttacagaacagtgagtcacttacttgcttttggatggaacgctgcagagtgtgctgtcattgtgatatctttttttccctcatgcattctcagcattgccagccttggctttgctcattagataaataatagagtaaaattcatgcagtggccccacaatcactactccagggagaaatggaggcggggaggggagatggtggtccataaagacctgggctagtgaatttggtgtttttgtttgttggtctttaaataaatgaacttaaaataagattttccaaatttgaaaatagatgccttatagagtagatttcttatgcaacaatataaaaataagaaattaaatctgggaacgagacttaattctccaacatgattttgttttgaagttcagcctcttcaatgagatgcaggtatgggggaagggctccatttaaagagcccaaattcctatctgttacttcagatatcaggtcagattagtacttttagaaagtttaacagacccctttgatgcaacaggaaagaaaaacaagctctctaagcaggaaaattcaggacatcctttttcttagttttacgtgatgcagtgagtcacttagagactctcaggaaaataagcccaggatggccatcaagattagggaacatactggcccaaacagctgcagagcaagtagcttctctgtccctggttcccatcctcctagtgttttctctttagggccaagtgctgtaagagagaaaagaacaagatgacaaggtcaagacagcctctttgtaatccttctcaaatcaccgagaaacaaatcaaccacgattgtatgcattttgatgtgacagggaaataaagtaaggtagaatattgtggaggtttggggggcaactttgaccaaagattctcaagttcatctcactctcttgggttaaaaaagcatgtgaagccagaagtttgagaccagcctgaccaacatggagaaaccccatctccactaaaaatacaaaaattagccgggcgtggtggcacatgcctgtaaccccagctacttgggaggccaaggcaagagaattgcttgaacccgggaggcagaggttgcagtgagccgagatcgcgccactgcactccagcctgggtgacagagtgaaacattgtctcaaaaaaaaaaaaaattcagaaagcaaaatttcttgcccctgtaaattcacacttcaatagaaaactattgcctgtagtacgtgctttcaggcgttatctgattctgattctactggagctatttgccactccctaagttgtaggtcactgatagatatgcaaatcctgtcctatctggttcaattgacttccttccccctgtgtgtgtggcggcgggggcggggtggggggcaataaacagtttgcttccatttgcaattcatctctaaattcctttactccacataaattggggctgtttcttttttaaaccagttataacatctgcctggctctctcagttatgtaagtaaaataaagtctttaacacatgttcgtttttatatctgtataacggtcacgattttacctctttctggaaattaccttttaacacccttgtgagatttctttcttaggtagcagcagcaggagacctggtggaggaccttcagtctagagaagaccagtaccaggccatccggtctataggtaaagagcagatgcctcccacagagctgtgctccacagaagaaacaaaggggctcttcgaaagggacatgtcccttctcccacctgcctcccttccaacctcccaaattaacaccaccatctaaaacaagaatttggtcacctttcggaaggcatctttcccgttttagaaggggttacttctggatcctctctcaacttgctggtttcccacgctctcgacttgcagtttcacccagtgggcagggctgggtttctgttagcctggctgcaacctcctgcgccctgccaacacacaatgatcagtggcattcctggaattcctgacatagcagagaagccaggcttggccctgcaaatgcccttgaactgcagttctgaccccagtggggcattttatcttttattcacagccagaggttaggacctatttatgtaaatcctctgccaagggtcgattcatcttgaccccctggttttcatttctctaattgtcccaggtattttttagaccccttggaaactcttcattcagtgaaaaaccttggggtcagtaagaatgcggtaacaaaggaaagggggtgggggcctggaagagttgaggaggcttcctttgaagtgttgtaaagaagctttcagaggccacccagtttacaaagtaaaaacagcaatgacctcatgcaccccattttattcacggaaaataagctttcttgaaatggtgtcttcacctaagaagtttcttagagcatgcattgttcaattttgtttcctaaagcacacattgtccaatctcagtggtggtaaggggttggggaaggagctgtcagaattgcgggcctttgggcaggtggtggctcctcagacaattgttcccacttaatgggcccaggatccctcccagatttgcattttaaaagggggcactgcctccccaatagtgagaaaatacttgatccctgagaattgacccaggtgacagaaatttcaggccacatggaaagccagcaggggagatacttggaggtcagcagggcttttggaggccttcaaataattcttgattgagggccttgtgctctaacctccaactcacagtaataaagggaaggaattgcttggaaaacagcccaactgttttacaaccctaacagcaaattttactttttcactaactgaattttcatgtacgttttaagccagttggatttttttaatgctctattttcaatagaaagatgggggaaaaaaatcttctcttaaaaaactatttttcttcattttctgtcaactttttattacgaaaaacttcaaacatgcagaaaagttgaaagaatagcacaatgaaaacccctatacccaccattgaaatttgacaaatgttaaccttctggtatatttgctttatctatatacacagctatatatacagatttgcttcatgaatatatacttttttttttgctgatctatttaaaagtaaattaaattaaaagtgacatcatgacacttcatcccaaatacttcagcttgcatcattctaatataagttaattctcttatataactattgtacaatgattacctctaagaaaatcgacagtaattgcctaataccacctaactctcagaatacccagtccacattcaaatctcctcaacctgtactatgtcttgtagcagtttcttaattaaaccaaaatccaatcacaattcatacatttggtttttttagtctttttggaatagtccctctactttttaaaaatgacattgtgtttttgaagagactttgtagaaagccccacattctagatttgtctgatcaattgtgtgtggtggtgttcttgttctgccccaccagatttcctgcaatgagttcaattgtgtttgtcccccaaaattcatatgttgaagccctaaccgccagtacctcagaatgtgactttatttggaaatagtcactgtagacataattggttaagatgaggtcataccagagtagggtaatagggtgggtccctaatccaatatgactagtgtccttataaaaaggggaaatttggagatagacatgcacatataaggggaatgccctgtggacatgaaggcagggatcagagtgacacttctacatgtcaaggaatgtgaaagattgctagcaaactaccagaaactagaagcaagtgaagggggccagaatatgccacccccaaacatgtcactcaaaaaggatggttttgagctgaaggcaattagctctctgc

SEQ ID NO: 1888800 - DNA, 4001 bp, Homo sapiens
tttttcatagctattaatatccccattttacaggggaggaaactaagcttcagagagattaaataaccctcccaagattacatggctagaacatagcagaattgagcttccaatctaggtttgtgagtttctgtagctttgttcctttattacattatacctcttgagaaaaaggcaacaaagaaggacggctgtcatgggtttgtacctcatgtagagctgccttggaagcagagcaatttcagtttccgaggactctgggattggaccaagcaggcagattttgtgccatgagggagcccaaaaaaagctcattcagttggaaaaaaaaggaacccattgaggccatttcaaaagctggtgctggataagctcatgggaagaggtaaggctgagatttcaatatccagggcctgaaactggacatttctagatgttaggcttgtttggcttggatgactaagtattcgtaaagaagaaatcggtaaaagagcaggtctggtgagtgtttgttgtctgtgattgcttttagaaaacagagaaaatcaaaatgatttagaagttggtacaaaggcagagaggtaccatttttcccagaaaggaaggaaaacaagtggagggcctttaaactctgaagatagctctgctttgctaagaattgtacagcaaagtacaggcaatttttccattttatgcaccccttttgccgcattaatactaatatcagtggttagcaaagcaaatataataactgctctccccagtggacccagtgattgaggcttccactcctctggcctgcaatcgaactgttggaaggagattttccatatttctttctacctcctcactagcattttgatcaacagagccccattctcccagtggagaaaaacaaggcacagagtcacgtctgtggagctaccactggcgaattgggagagaaattaatttgggcccctgggcttgaagtaaaaaggaaatttcgtttagaagcccttcctgcctaatgtggtccatctctggtggctgcttctaccccaggatttggggggcagggctctttttaccaccaccagaggccccaaacactgaacccattatggcacgtgcttccatatgtatttaaaacgtaaaaatacaaagccataaaagaagtgtaagaaaatccaacacagtaccaccctccattgaaatatcaaatatcaaattctttctaaaaataaatgtgggtccccctcccatatcagtgccctgagcaaaagcattggcagtggaatctgtaagtcggcagcaactggggggcaccccacgtttatacatacttgacactgggttcttttatctcagttgatgatcaaccccctcagtacaaaggttcccaggcaggagagcatctccctcttcgctgcggaattcgcaggagaagggaagtaagattactctcagatatgggacttcttgggggaggcggcaaaatcgtttttcctgctcacattcttggtcctctagaacggaccagtgatttaaatcagacttggagctactcggggctgaggtgatgcctgccctaagagaggggttaagggtgggggtgggagggtccccaagggctgagacagcatctcccctttagattcagggatcctggggaacacactgcttcccgcttagactaggcctcttgagggctgagataacgctccgctaaatcgtggagttttctagagcctgggatactgtctcgctctcagatctgaggctccctgggacaggtgcgctacctcgccttcaaattccagcctttgggggcaggcctgcttttatgtgcccgatcaagggctcctggggtggggctgggggacaaggaccttccctccctctcagatttggggctcaccagggctgagatggcgtctcccctcagactctgggctccctggggtaggggcagggtcccgccctcagaatcagcttcccaggacaggagctgtgtgtctctgcctcccttcgcgtggggcaaggggctgcgggaccagcggcctctcttctggcaggagggggggttccccggaggccctgcccccttcgtgacatgctcgaggtgtccggtgaccgaaacactcttagctgggtgcagggtgcggctcagggcgtggtcaccgggggctacttagggccgccggtgcgggggacgacgcaaaggttaactgcgagctgccgggcactcagcgcgggtcatggcgtggatactggactgccttttcgcctcggcctttgagccccgcccccgccgtggtgagtggggcccaccgagtcggggggctggggtgctcggccgggggcggccggcggctgcagccccctctgggcgccctggggcttggctggtcgcccccttgcctcccttcctgctggcttttagctaattgttcctggctcaagggactgccccgtcgaggccccgcataaatcaccagctttgccgggaaccgcgagcaatcgcgctaatggctcggcggtacgcgggacgagcgcgtgggcggagtcgctggctcagccgccggcagggacagccagagccttggggccagacgcgcaggagcggcgtcccgcaactcaaggaccctcaaggcccaaggatgaatgtccctgacagggcaagccaggccccagggaccctgaaggaggcgggtattcattttgccttgaagttcgtccccttgtctcaatctcaaacacagaatatcagcaatggaccccctagagtcgtcgaatttaaccccttcatttaagagatgatgacactgaagatgggaaaagcctgcccaaggttacccaacaggttggcagcatacctgggtcagcttaggctctgccagctgcccactgccccagactgcccagtagtggacccctgcggtctttagtcgggttctttccttgggtacttgagatcaatgcttggtttccctatttctgtggaattgaggacacaagtgtgcaaagatcacagcaccggcatatgtgggtcacatttcaccccttttcgggaactgcttctacaaagtacattttgacaactgattatattttcatccttaaagtttcaggagactgatattttctttttgacataccccaggacccccacccacactgtccttcactcccccttgataataagccccacccccttcaggctgccacctgcccccacagccacctgttttttcatagtctccacctccaaaatctatattggtgagagtgcgtcattgggcaccagccatagaccaaacctggggttgtctcctctttcctctgtcccttcacaggcgggggaggggaagcagggaaaggaggggcctcagcaacttaattcagcagagacctgtttttagttcttgccagccccaacaccctgctgagaaccatcccaggagtttgacctcctgctgaaagactacagcttgcttaggcagttcaagtacagcctcaggccagcaacaagatctctgagaaggaaaaagatctgcatacacacagagtttaattttttcttttgcatatttttaaggtttatatgatcctggtgaatcaaaaatataagggagttttataagatgtcttttaaggccttactgctctaacagtataccctgaaaaagggggtgggggaaacatttcacagttgcttggactagaaggttgtcatgtgactccaatgagatcaaggacatgaaggctcctttatgagtaaccacataggagggagtccatattacaccaggaagcccattcccatctaaaaacagcaatgtctattagaattagaaggcttttctttaaactgaacccaaatctatgtcctgggaacttccaccttctggccctggcattgacttccatggtcctccttcctaggaaacagtgtcagctctccccattgtcccatcccctactcaccctgttcttacctaggccaaacttccccagtt

SEQ ID NO: 1888801 - DNA, 4001 bp, Homo sapiens
ccagcactttgggaggccgaggcgggtggatcacgagttcaggagattgagaccatcctggtcaacacggtgaaaccccttctctactaaaatacaaaaatttagctgggcatggtggcgcgtgcctgtagtcccagctactcgggaggctgagggaaaattcgtggttttgagaattggtaaagactctatcatttcctatctgaacatttaaaaagaaatcatggtaacatcaagtgttagggacacaaccatcacttgtatctatatgaagatcaggtaatctgtgctctggtttaggtctctccatcatcatttacctcaaaaccagcaatatcacatattaattaccgtagataggctcaccgtgatctcttgacacaccctggaaaacacattgtgggaaatgggtttggtactagtctaattctacttgtacagctacaaattcccttggtttcttgaatcttttggggcccacaaaagctagataagggcagaactacaaagtcaaactataggaagaggcaccgtctactctttgacagatacctccaaaaatcccatggccaataatgtggtgatgagcaatatgataaaatagcaagatacctgcatatatgtctatcagtacaagtgttaaatacacattatctcaaaagaaaaatacattaaaaactcatggttcctgttagtagtagggataatttaatttttaaactgcatacatgccataaacaaggtttatgtaacggccttgaaaacaccattcattacttacatgactgaaaagacgaaggcatctaatgagttagagtcacaccatctcatgcctgtatactatcaaacaacttttgggaagcctgaaaaagacaaacacagtaacactgtgttagagggaccatacttgcttacctaaaaatctgaagaacaggtggtctgtagtgtggtaagacccaatttatcactgacctggttactaccaagaacacataaatgaccactgttaggttcactatgatttcatgactatgggtacctgaagaaacacattcaatgatgaatgtgtttaatgaaacacgctgttttacctgcaaaaaaggacggggcacctgcaacttgtatcagtcattttcctcattagaggaaccaccaacactacctcgatcttagtagaactttgagatcaacactaatgttagagataccatcatcgcttgacttagaaatctcattgttcatactataatgtggaagagtaggataactcacctggataccggcatagccctccttagagactaatgttaaacacacattatatctcttttatttttttaagagacagggttttgtcctgttacccaagttggagtgcagtggtgtgatcacagctcacttcagcctcaacctcctgggctcaagtgatcctcccgcctcagcctccagagtagctcatactataggcacatgcaactatgcccagcttggttagatactacacattatatctaaactgtaaaataataagggctaatgcttactagccttggttgggaaaacatcatttcttaactgaatgcctgcaaaaaaaccatggtaacacaaaagttagaagcaccatccacacttaattatagatctgatgatcagattgttttctgagtgcttgcttaaggcccacgtcattacttacctggatgcaagcaaagtctcattcttgatcatgatgaggtttaccatgtcttcttgacaggatcctaaaaacacattatgacaaatgtgtgtagacacagcttttttccttgaaccccacaattaagcttattcactaccatcattccaagaaccatcaagtatacctggaatcttgcagtactgcaaggtctatagcactgttacagataccattttctctctactacttacctgcaaacaaacccacaattgctactatgacatgcaactccatggttaattccttggatagcaaatagctcgccaatcacaaagttaaacataaattttctctaaaatataaaacagcaggataacatggttgctgtagttagtaaagactatcatttcttacttgagtacctatggaaaaaaatcacacagtaaaaaagtttaggtaaatgtataacacttacttagatatatgaagatctggccgggcgtggtggtgcacgcctgtaattccagcactttgggaggccaaggtgggtggactgcttgaagccaggagttcgagaccagcttggccaacgtgccaaaaccccatctctcaaaatacaaaaatcagcaggatgtggtggtgcacacctgtaatcccagctattcaggatgcagaggcacgagaatcgcttgaacctgggaggtggaggctgcagtgagccgagatcaccccactgcactccagcctgggtgacaaagcgagactctgtcaaaaaaaaaaaaaaaaaagatataagaagatctgatggtctatgatgtggttaaagaacacatcatcacttgcctgcataccagaaatgtctgccataccaaccattgttaggtttatcagggtctcactacagaaacctgaaatacacattgtgaaatatgtgttaaaggacacaaacatttccaccaagacatctgaaaataaccttcgtcactccatcattacagaacacataaactctacctggatacttgtaataatgcaagatcaataccactgtcaggtaagacggtcatttcttgacaggacacctgtaaaaatcccctggttactgctgtggtaagaaacaccaataaccaggataggcactatcactcaaaactcagaggttaatcataaagttattctaaaatataaaaagtgagaaaaataatgtttttttaaattggtaagagctctatcatttcttacttgaacagctacaacaaaatcatagtaacagaagtgttagggacaccaccacttacctatataagggaagatcagatgggctgggctgtgttttaggcccacattatcatgcacatccatacgagcaatgacccctgttaactattactgataggctcactgtgacctcttcaaatgaacctaaaaaatatactgttgaaaatgtgtttcctaaatgtctcattctacctgtacacctgcaaattcccttcgtctctttcatcatttcagggcctatcaaaggtaactggatgcttgcataatgccaagggaaaacactcgtaagagaaactttcctctcttgaagtgatacctacaaaaatctcagcattacagtgatggacaatatgataaattacctggatactcgcatatccatatatcactacaattgataaatacacattatgtctaaacaagaacacagtaaaatctcactcttactagtaatgttagggaaaaagtaatttcttaactgcatgcatgacaaacacaaggttacaagaagagtctcaaaaaaatcattaatcacctacatatctgaaaataggaaggttgctaatgtgttaatatcacataatcttctacctgtatactaggaaagaacttaacaggatacctgcaggaatacatggtagacaagtgttaaggacaccatcctcacttacatggaaatataaagatctaatggtctgattgtgggaaacacactttctcaattagcaggttacagcacggttccattaatgactattgttaagcttgattgtgagctcattacagaaaactaaaaaacacattgctcaagtgtgtttaaggaaacaatttgttttacataaaaaaagacaagacacaaataattctgggcacttccatcagcagggaaccttcaacactacttggatttgccatgacttcaatgtcaacaatgtagtggcaccatcatctcttgatgatgttgaagtctcatggtcaataacgtggtgggaaacagtaggaaaacttacctggatacctgcatatccctccctcactataagac

SEQ ID NO: 1888802 - DNA, 4001 bp, Homo sapiens
agattcatcttgaaaagacctatttccataatagattttgctttataaatgccttttcaaaggttgctatttgacaggaaaagctttcagctttcttcttctttttttttcaggcttgtgacctctcacctactttgaatgattcactcagtctattcactgcccaggaatgttggctttggcaaagaaccacaagtctcttaaaataaacacaactgggctttcatctcatagcgatcgctgctggctgcatatttcacacactgtatggcaggatatgttaaattaaaatcataatctccccagtgaaatctagggcctggttaagccactcgagaattactcatgcattaacttccaatgaagaatatgagtaatatcttcagccattaactctcccaggtagtggtctcatcctctcccaattatcctaacccacagtaaattaaacccatccagaagaatgtcatttggaaaggaagaagtcaatgccaatgctgtttcaaatatgtaggtcctggagaggtgagcttgaactaccttgtcagttctctcaatcatatctcaaagtttaacttaaattttgctaaatcaatacacccaatccatatggattaacaatatgctcaacattgtgttaaatgttttgagtagttcaaagaatatatgacactgagcctttagcagcttaaggtcttctaggtgacgaacaagattaacacatcgagaaaatagtaacagaggccaggtacaagacagtggtaaagtggagaaagcaaaggcttttctcaagtgaggttcagggcctgacttctctcaactgtgactgcagggtaaatctttgggcttacatagtatctcagtcctaacttttaaaatggaggatgttatactaactggattgacttcacagagtagttgtaatgtttaaataaaataaagaagataaaattgcaatgtacaataccactttttatagcctgtgataaaacaagtggaacaacttaagaaataagtccaagaaggttatttgtcttctggggttgcctttaaatggtagtgaacagataagacacagggctataaacttcttgaggaccaaggccaaggccattcctttttgactttaaatgttgttcataccctgcttagtgtcaggcacatagtaagtgcctaatatatttttgttaagtgaatgaataaatgaattctgaagtgcagttaaattaaatttgtgtatattacagtaacacaagaggccctcctttggggcttcccagagttttctcctcatttatattacctgaagaatttaagagaagtaaaatcctaatgctttacaagagcttttgccctgtgggctttcttgagtgattgctaacaacgtatccctggacaccactgaaatgagcttttctgggcccatccaaaacacagccacagaaaagtgtttgtaaggcccccctgccccaaatccataatgggaagatattatgaagagccctttgtgcttcagtttagcccagtggctaaaacaagactgaaaatgcactaagctacgagtggctgaagatatacaccccactgtataaaaacaaaatgaaagaacaatatctgtctgcaaagaggctcatcacccagttcatgggcacatgccccaggaagtcacagagagaggagcattggcccatcatgcatgagattcactacgttgcttcagaaaacaacaacaacaaaatacttacagtattaaaactgctatttttccttctcataaatgaaatcttcatgaaatgtggtatttcctctaaaccatgacaaagggaaacagatatacaccatgtaggaaatgacagactttggagaaacaggaaaacataaagtaccttagaatggaatgaatttctgataaggaagcattaccttcatcaaatgaaacacaaagcagcaagtcttttccccagcaacaagcaagctaaaatgtgggcactccctggggtgacattgtgttatgatgatcttgccctatgggagagctcacagcacaagcaggcacttgtgaatcacactgtggtcggaacagaggctcagagaaacatgtttatcttccccactttcctacttgtgtgcatcttgcacctgtctctgtacatatggggttgattcttctcttgtttattgggtttggggacttaacatccctgtgtgtgtatttatgtctttcccatttctgcaatgaggttgtaagatcaagatttttgttcttcattctctaaatttctatagtactgttctacatctagtactatcaatgaaagtactgtaagatagaggaatcatcctatcagtttggatcccaatagaaaacagaattcaactcagaaagttcaaatgaagaaacttaaagagaccacaactgggttataagaacaaataagaggctccctctccctctccctctcccttgtctccatctcccgctttccacggtcttcccctctccctcctctccatctcccgctttccacggtctccctctgttcccgaggctagactgtgctgccgcgatctcggctcactgcaacctccctgcctgattctcctgcctcagcctgccgagtgcctgggattgcaggcacgcgccaccacgcctgactggtttttgtattttttggtggagacggggtttccccgtgttggccgggctggtctccagctcctgacctcgagtgatctgcccccctcggcctccccaggtgccgggattgcagacggagtctcgctcactcagtgctcaatgttgcccaggctggagtgcagtggcgtgatctcggctgctacaacctccacctcccagccgcctgccttggcctcccaaagtgctgagattgaagcctctgaccggccgccaccccgtctaggaagtgaggagtgtctctgcctggcggcccatcgtctgggatgtgaggtgcccctctgcctggccacccagtctgggaagtgaggagcgcctcttcccagccgccaccccatctaggaagtgaggagcgtctctgcctggccgcccatctgggatgtgaggagcccctctgcccggcggcccagtctgggaagtgaggagcgcatcttcccggccgtcatcctgtctaggaagtgaggagcgtctctgcctggccacccatcatctgggatgtggggagtgcctctgcccggccgccccgtctgggatgtgaggagagcctctgcccggccgccccctctgggaggtgaggagcacctctacccggccgccaccccgtctgggaggtgaggagcacctctgcccggccgccacccagtctgggaagtgaggagcgcctctgcccagccacctcgtctgagaagtgaggagcccctccacccagcagccgcccagtctgggaagtgaggagcgtctccgcccggccgcccggtctgggaggtggggagtgcccctgcccagcagccacctggtctgggaggtggggggcgcccccccggccaccccttctgggaggtggggggcccctctgccaggctgccacgtctgggaagtgaggggcccctctgcccggccgccaccccatctgggaggtgtacccaacagctcattgagaacggaccatgatgacgatggcggttttgtcgaaaagaaaagggggaaatgtggggaaaagaaagagagatcagattgttactgtgtctgtgtagaaagaagttgacataggagacaccattttgttctgtactaagaaaaattcttctgccttgggatgctgttaatctataaccttacccccaaccccgtgctctctgaaacatgtgctgtgtccactcagggttaaatggcttaagggcggtgcaagatgtgctttgttaaacagatgcttgaaggcagcatgctccttaagagtcatcaccactccctaatctcaagtacccagggtcacaaacactgcggaaggccgcagggtcctctgcct

SEQ ID NO: 1888803 - DNA, 4001 bp, Homo sapiens
aagtggtcattcataaaatggaaaaataaattgtggtagagttacacattagaaacagtacagtagggaaaataaattaactgttaataaaagttatcaacataaagctcccaaccatattttgactaaaaacaagttgagaagaatatatacagtataccatttatattagattttaaaggaagtaaaatatatatttctgagatataaatgtacatgtggtaaaaaatttaaaaaattattcatagaaaaaataaaccccaaactcatgattggagtaatggaattaaggaaggttacacagaagatctcagctgtattgatcaaatttttacttgttaaactgagctaaggctacaatggtatcggttgaatttttctttacaaccttgtgtattgcttaatatgtaatactttaaaaaagaaagtaaatggtatctggagtataaaaattaatgttgaaataaatgtacatggatctttaagaaaaaaaagaaagaaagaaagttggggaaggacgttgagaaggaaagcagaagtggggaggaaaaacaaatgctacaattccactacccagagattttcattgctagttgttttgttcataatttcctatagcattttttctgttcatatagaagtatgtattcacatatattgtaaagaaatatttgataatattatgactactactagaaaacctattttgtaacttatttcacaggcaccaaatcagtgccatttaaaagggctgtattctatccaatcatattgttataccacaatttattttaccaattcactattgatgggcatttagattatttccaaagtgtgctattacaaataatgctgcaattaacacattatatgtgtatgtgcatacctgtgtgtattttcagtagtaactgtgttgaaaaaaaattcctaagggtagaatttctaggtcaaagactaagaggttttcaagtttgttacatatgccaaatagcccaacaataaatgattatactaatttacacacttaatactgtaattgagtgccagtgtccccaaactctgcacaacactgggcataaacaatctttttatccccttgtcaatcataatctgctattccgttttttcatgtgcatttattagtgaagctgagtcactttttaaacgtttactcaccatacttgaataacttcttctgatttttttgccattttgttaacatttttgaagttttaattattatggatatataatagttgtacatatttatggggtacatgtgatattttgattagaacatacaatgtgtaataatcaaatcagagtagatggtataaccatcacctcaagcatttatcatttctttatgttagaatcatctcaattccgctttttagttattttgaaatacataataaattattgttaactatagtcgtcctattacgctaccaaacacgaaatcacaaataccaggaaagttaacggagaactggatcaggagccaaaatgtttacattcgaattaaggctctggattaatgaaaatgcgtaaccaggaaaagaaagaacaagaataatggggacatagagggtgagagaggagaaaaacgagaagaaaaagccatgtaaggaaaaagaatttgcgcctcagggtccccctccccctctgccctgttccagacacctattctcattcccgcactcctacccctggcgtcctgctagctggtctggcttccttccctctggaaaaaggcaaattattcaataaagggaggatgagtcctagctcatccccacttcttgtctcctgccgggtgttcaaatacaacttaccacgcagtcaccgccatccaactgcatgtcactctccacttcgccacggtctgaactcttggccacaagatctaagccttccggatgccccagccagttcaggctgctggtctcttgtccctaagcctttgccgaggtagtcggcttacttgatgccagcacaccaggccccccaccacccgctggaagcacaggccccagctcaggtcaggttccggaacctagcgtccccaggttctcacgtgacttagtttcccaggcaatagcgcttttctcccggatgtagcagtcagctgaaatggagagagtgcttcttaaagttaaccctcaaaccaccatggccagtgaatgcagaataagcccgctgagagtttcgtctatttctatggcattatgctggaaattataaagaaaagggatgaaaaaaactggagacttttcaccaacaacaacatacagatctgtattattaggattcttaaaatgagtatgtgttgtttttataattaaactaacaaaaggaaaataaataatgatgaataattaaagcgggattatgtatacaacaaaaccgtatgattacaacagcaccttatgtagctttgaaaataggtaatgcttcatgagagaagttatagcagtgtgcaaatatcaattcagaccttaaacaagaagaatatacacaccaaaagagatttctttaaacaaaatctatgctgtatgtgccctatgattgtcacagggcttagaacctgatattcggctatgcattcctgtcagaaagagcatgttgcagccatgtcagaaccaaccaaggtcaagaatttcttgtgaccagtcgtgaagtccctgaagcaagaaacagagaaacccatgctggtaagaaatgaagagactcagaccctgcagaaagattaagaatagcgatcgaagacgttaacttggttgcaatctggctctgccctttacaaagttatgcgacctttttcatctgttaattgcttgttgtaaatattaaattaaacaagtcaatgtgtataaggcatttaaaacaatgtctggcagtgagaagacctatttgataaataaataaaatatggacacagacattgcagcataggaatccctcaatcaggaatcctaggtctccaagaacactggtgatactaatttagctgtacaagaaggaggtgtcctgtgtgggtgacataaatatttcagggtttggagagaaacattcctacattttttatttaagaaaacaacacaccaaggttgtttagaaaggcagagtggactctgaatccatgcagcctagatttggatcctagctctgctattatctgcgttattagctcaagttatttaagccttctgtgcctcagtttccccataggtaaaataaggataacagtactaatttcataggtttgttgtgagacagtaacatattaaataaacttacaacgactgccacataagtactatataaatattgattaaaagtagtaataagagacaaaaaatattggaaaattaagaagtaaacccacaaggaactactgtctcagcctaaagtaaatcaaatacatgaccactgccagagaccttgtcaaggtatttcagataagaaaatcttgtccaatgatgttatcgtgaagctgataagattgtaatgtccttggaaaacaaaggtaagcccctcagaaatctagaacaagtatgcttacaacataaagtgtaatccaacctgactaagatggggaaatgataacctgagctactagagttggagctggggccagtgaactacagctcaagggccaaagcttgtctactatctgtttttgtttgatcagaggacaaataattatttttacatatataagtggttaaaaaattaagaaacaaatatttcatgacatgtacaaattatataaaatttaaatttaaatgttcaaaaataaagttttattggaacacaaacacattcatttatatattgtctatgtctacatttacactataatgacagtgttcagtacttaaattagacattagagcaacaacataaaaggattttaggtctctgttaccgtggagtcatcacaccgaccatggataaattatcctcagactgtcacatattattttgagtatttt

SEQ ID NO: 1888804 - DNA, 4001 bp, Homo sapiens
atctattgttagcatttgaaaattctttgaatgataaaaaagagacataaaattaagatattatttataaatatatttatattcataatataatactaaatagaaaaaaatgacattttctgtaactgacaatgataaaatattcattttaatatttaattattaaaggtttacaatatgccaagtgttgtgaagcaccttatatgcactaaattatttaatattctgaaaaatcctataagttagatactattattactctcatcttacagatgaggaaactcagggcacagaaagactaaggaacttacccaaggtcacacagctagtagggtgctgagttcaaatttatccccagctgctctaactaatcagcaattaaccactaccataaaatgcctctcatttgcagaatattttaggagagttgcaagatcagaacttatttgtaagcaggaattgttctgttattaaaaaacttacaacagagactagaaaaagaaatatattgctcatgtgagtaaatatttacatacaccaaaatatttatgttcatatatgtgagtactgctttccacagggggagaggaaaacgtgtaaatatttactcactggaaatagctgacaagtagttaggaaataagaatatttatactgtacattggttttgtgctgtcaaattgtttcatctggagtctatgcactaattcccaaattggacatgcaatacaagaatcctgaaattgtaaattcagagctccatttggagttacctaacttggttgtgagactaatttcaaaacaaagttaattctgatttttctaaatcatattttctaaaaatgtacactgctttttaagatgtcctgattctttctaggagaaattatccttaggctaaaaatcaaaggccctgtctttatgccctgagccccatgctgtgggttcttgctaggagacatactctggggaccactcctgggccaatagttagaagtggttgggaagcaggtcaaatagttaataggccagacaatggcccagattgctagtgactcccagacagccaaagatagaaaaattttcaaataaaaaaattacataagtagttgggattttgagagatattataatgaaatagaattcaaataaatgaataaatatatattatggacctagtgtactggctttggactgacactttcacatgccactgtgtttagtccttactgcagcagataacttttgtatcagttggataacctttaactgcaaataacaaaaaatctcagtgcaactgattcaaacaaaggatttactccctcatgtaataaggaggtctaaaatgtggatgctctaggattggttaattcagtgattcacctcagtcatctaggtcttatgctctttctatctttccctctgcattcttggtatattattttgtccttggcaaaatcgcctcatggtcgcaagacggctgctggagttctggaattcatttgcagatattataaggtgtaatagaaaaagtagagtttttatctcaatacatctctctttatcatccaaatctttcccagaaggcttccaaagccttcccctcccagagcactggccagaattaaattacacacccatgagtaaccaatcactaccaaagggagtgggaccatcatacttaacttaggcgaatcatttcttgtaaatttgagaattagggcatagactccagttctctggctcgtgaggccaagactacagcctgcttcctttgaagcatgtggcctcactgaacaaggaggattcctgaatgacattgaggttttgtaaaaaaggataaagaaggtaaaaagttaccgggtaggcaacagggtccactgcatcccatttgaaacgtggggaaaacgaagctcagagaggttgtgacgtgcatttaataaatgctacagctgcaatccaaatccagagtctttttctgtcaataccatggctgccttaagtatctccaactgctgttgcttttatgttactggaacagttgggtgcgtgggcacaactgatgttttccactgagctcccttctctatttcctgtctagacgattgtgaaagggctgcttgtgtgaatttaattcactcataggcattacccacctgccacgggctacaaacctcattcctccctccttctccagcaatattgtcaagaggccacactttccctagcttggagatctgcccagaggagcatctctggacctaggcgggaggagtgaaaagccagggaaaggactatggctccttggccagcactatttttgctgcaggtgcctgagcttgtcccacactctgtctccaccatgcttagattctggcttcccagtgctcagttcctccagcttgggttgtatattgcctgtcatccagctccctgcccctctggcccctgcaaaatatatgctcctctttccttatgatgatgtcttcagtatctctgcatttctggagccttccctgtctctttgacatagaccagggtgctcctcttttcagtttcctttgcctttagaacattcctcccctcccacttagggtattgtcttatatcaggttgtcatatattagtttgtttccacattatattgtatttcctggggatgaatctacatctcttcatcttggctcagtcggccccagtgaagatcaaaatatctttagcatagtggcaaccatcttccttgcaaggtctatacacataagtttttacacagtttttgtgagacttttaataagtttttgtttattagctaatgaaggaagaaggagatttattcatgtttgtttgctttgtttatgtgtttggtttgtttgcttgtttgttcatttttaatgctaaaacagtaggagaagagagagaagagagataagagagtagagaaggggcaccatggcagaggccactggtcacctgcttaaataccctaaatattttccccttctttcttattaatggaaccttcattttgttcatggtggcccaactagaagtctatattttgcagctaccttcagctaaaggtagctacatgctacagctctggccactgaaatataagtagaagttagtatatgggctttcaagaaagcttgcatggtagaatcttttgtgcacgacccagatctctcttgttgatccgaaaaggtctccgtgataaatctcccacatgctaatgtccatctaagagtctgaattctgggcagcccagcccatgacagctccttaaaaagggagactcagccaattgatattttttgatctttgaccttctttttcctaccttgtacaaaacattataaagagggcagagagccatcttgtgaccgtgaaacaacaagcataaagttgaaagccacccattcaggacagccaaatgaaagcatgaagaatccccctgtcttggtggcattgtagaaccatggtacagtcctagactgactgactacccctgaatttcgcggtctgtgaaaaatagaagcaaatcacaatttgactaagccactgttatatgcaataaaacctatttctacctgaaacagctaccaatagcacctgaaggacagttttgagcccttgttaaagagagagtcactcgcttagtagtcaacaaacagtcaatatgtctcttctattatcttcagctctgtgccaagcattggggaaatagcattaaacaagacaggcaaggtccctgctctcatagagtttacatttgcataaagagagacagagaaatatgtaaacaaaatgaatagacaaggtaattgcagaaagtgatacaggctatgaaggaaataatcactgttttttgctaatgtataacttgggtgggggtaagggtctgcttttaaaaaggtggtcagagaaaggctatctgagaaagcaaaggcgacatgatctttaaagactgagtagaagggagaggtgtgaagataggggaa

SEQ ID NO: 1888805 - DNA, 4001 bp, Homo sapiens
cctgggcaacagagtgggactccatctcaaaaaagtaataataacaaaaaatttttaaaaagtgttcttcttcccaagaaagcagacatcagacatctttcccccttcattggggccttaattgcagatgggactctggaagagatactgacataagcataaaagtaggtccaagaatatttaacctctacataagaattcaaataagctattgaccttatgagagagtcacaatgatggacaccttcaaaggaaggagaagcaccatggagggcagaggagaaagaccatacctgcttgacttggtgtgagaggcattctagatgttattgacatcatataatagacagatgacaagcatagaagctcagattcacaaaatgccttaatcttattgcctgcttaagatctatttataatattttctccacatgcagagagaacactttcttcacctttcattccatttccatatgtttaattttccttacctgcaggaagcccagatctgtggaagctcctcccttgaaagaaatttgcaataattttatcattcctcgcaacaagtccatcctcacagtgagctgtcctttgacatttataaggatgtggatttatccataagcaatcctatttacatagtctcactcatgttctttgtcattataattgctaataacactatgttttagaattggcagaatgcttcaatatcagtgtagcagatgcttattggtgtggctgcccagtccttattctttaaaaattgtccatgtcatgcacagggtttgcttccatcatacataatactcatgtttttgccatatgactctactttcctgactgtagatgtcttgcctgggggcaaatacatgataaaaactgaatgagattctctctcttcaaaatatgaatagagacatccagaagctgtaagttagttgttgagttgcattaataacagcattttggtgggaagttttattgtagatgagacagtgagctctgatgtccaggccattgttgggaaaccaagttgtggtcctgaatgactacccaaagtgttggtgtagtctcctttcccatgatccatactaataatagagatgaccacaggttggcacatgacctgtctgagtttgggttcccccaaaagcagatcctgagaaaggaatttgaatgcaaatagtttatttaggaaagaccaataaggaaatgaggaagcatattaatcaaggttcttcagataaacagaataggatgtttgtatgcagagatagagatatagagagagacagagatagagatagagacaggtttattttaaggaattagcttacatgatcctgggtcctggcaagtataaaatcttctgggcaggctgacaggctggagacccagggaagtgctgatgttgctgtctggacttgccataatccaagttggaaggcagtctggacgcagattccttcttcctctgggaacctcaggatttttaagaccatcagctggttgtatgaggcccatccacataacaggtttcccattatgaagagtaatctgctatactcaaagtctactgatttaaatatttatctcattcaaaaaaaaaaataccttcacaaaaccatctagagtagtgtttgtccaaaaactgggtactacagaatagccaaattgatatataaaattaaacatcacaggaagtgaggcaaggaaggaaaggccaccaataaagggtacattatcaagcaggttatcactacaggcaagtggaacataatcacactagggaactctggaagacaatgtagaaaatacatcttagagccattctacctgaagagtaagagagctgggatatttatccacccaatcctgaaggtcattggttgagggttgctctggggaatgggtatcagtcctgcaagcctccagtcctgctgcaggcgtagtgggccacagcagccagaaaaagcccacaggctgcaagacacagcttcctgcagtcagaaatcaggctggcatgcacaggactggtaaatgctaaggggaatgtgggtggggtactcacagcatcagctactttgtcataatccagagaaagatgatctttgtgacgttagataataattaaagagacaaggacccctctgcatcattcaactgaagatgtgttactctgtactcactctcttagttcttaagatctcacagacctgttggcaagtatactccaggacagcaggaggagacagcatgagagaagagaagcagctgaggtctttggttctcacaggtatctcctttcctcacactcaatgactttttccaacctcattcaacatgtaaattgagagacagaatagaattgtgcccaacactgcctacccactacccactatcgatttgctccttacactaatagaacccccattatgtctggtgtgatgatgtacttagttaaactacttcttcccaaactctcttgcatttatgcacaagcacgtgacccagttttgctcaaagagacgtaggtaaaagttgctgagtagtactcccaggaaaggtttttggttttgttttgctaaagggaaagacctggcagaagtgaaccctttgattcttttctttaactcttatcctattattttgcctgggacacggtcacaatgttgagaggtggagcagccactatctggccatctgaggttggcagaaccagaagtgaaaaacagtctatattcctgaatttcctgagcaaatgcatcaggactaggctgcctatctcaaaacttcttatttatggaagaaaaataaagccttttgtgcttaagcccctggagtctggttttgttctatgcagccaaatgtaatccaggctgatggaaagtaattggaagaatgaacagcttattaattgcaattattatttatattatttctctataccccctgccagaatataagcttcatgaaggtaatcattgtgtttgtttactactattcactaatattgggcactgtagacattcaataaattcttgctgaattaatgaataaatgaacaaagaatggcactcatctttgactgcttaatttacattgtttagttccccagtgagagcattcatcaggtgctgagacccaggcttctttggcatccttcaaagcacacatcacaatggcaaaacatacctgaatgaaagaatgactgatggtcacaggcttcaatcccagctcagtcagttatcagctgtgtcaccttgggcgagtcacttactctttctgagcctatttcctcttctttaaagtgagaagaacacttacttcacagagttgttgtgggtataggaacaatatatatgtctcagattgggtactctaaaaagcagaggacttggttatgggtagtttacttggggggtaagctcaaggagctaagagagagaaacgggggacagaagagaagtcatgacacaaatggattactgaagtctttgatataggcaatgggggcttgatatgactctgaactcatacagatgggtccatctccactggggtagatatcaaagttgctccaagatgcaacttggggccccaaagcatctgctatcatgtgtaaagtacctgaccctttataaccatcaaaatggccaaaactaaaaaggtgaacataccaagcgttgatgaagatgtggggaggggagtattcgtgcatggctgtggggtgtgtaatgagtgcaggctttttaaaaaacaatctggcttgtctcagtgaaatttagttggtacatgcgctatgatctggtgacctcccacatcccaggcatacagcttagaggaactgactcatgtacaggtttataaggacatctttattcagatgttcactgagcttgttggtgacaacctggaggaaagttagatacaaactgagtgtccatttttaaaggaatggataaggaaactaaggtggatgcaccttatgaaatacc

SEQ ID NO: 1888806 - DNA, 4001 bp, Homo sapiens
cttcccttgtctggacctaggagaaaggaactaagattctgatgccttaatgactggaaagcaacatttaccatctatttactctgagggctgctacctacctgtgagagttcttctacctaacaagaccacccttgctagccagcctcctcttccctccctcccataacctgtcttgccactataacctgttttaccactatcacctgcttgtggccattccctaagccaacgtttttgctgtaatctcaggatggtatataagcttcctcaggtcattgggtggttgggtcatcatgctgtgatgttccctgtgtacacatcagtaaagtttctatgcctttgctgcaattaatctgtcatttgtgagttgattttttagcgaaccttccgagggcgaaggggacactttcccttggttcctacagtttgaggctgtgagcaggctctgctctcctgacccacagccaagtgaatccaggtcctgatgagccatcaaaagggtaaggatttcttaccagtcaggctccaggtctctgtctttctgtggaatctggtcaagtggatggtaaatattgttatttgtttttcttctccaaagtcttgattaataggaggaaaggatttgtttaactcatcttgttctagtgactctggtatactttttggtactttgtggtttgaatattcatagtgtttggtcccttttctaccagaaatagtcttttcctttgtctttgggtgtccttctgtcatgaagaggagtatcattttaggttctctctcatcttgtttgatgtccttgaaagcttgacttgtgaccaagtggaaggactctcttggtctgtgccatccaggcagcataattttcgagtcccattgggtggccagtctcaaaaaggctgcaaaaccaagacattttgcttcgaatatgtcaagctgtcagctctcaggagagtttgtcttaaaaagttccattcctacacgacttttgtcatcctaacccttgttgcctagttagtgctgggaaagcccaatcccaggcaggcctatgcagtgtcacagattaaaaggtctgtgagtggcaccctcccccacaaattttgggttgccaaaggcaaacaccatcctcgacaatctgtggtaacaagagtcctctgctatctccttgatctctttggctattaagtacacacatgtgtacatgtgaatatatgttgtctacatatatgtatgtggtcatacatatatttgcatattacctacacgtggtaccacattaactcgaatgagtactcataaaattaaacctattccagggagaattttttggggagggggtctttgggtttgcttctctccagggaacatctttttttaaacctggaatattacatgctgggctttccatgaagaagctattggattgagtcactattggaatgagtacagcattggaaattcaatgaccagaaggtgaatcttttaaattagattcctgaaattttttcttgacccagcaatcccattactgggtatatacccaaaggattataaatcattctaccttaaagacccatgcacatgtatgtttattgcaacactatttacaatagcaaaggcttggaaccaacccaaatgcccgtcaatgatagactggataaagaaaatgtggcacatatacaccatggaatactatgcagccataaaaaaggatgagttcatgccctttgcagggacatggatgaagctggaaaccatcattctcagcaaactaacacaggaacagaaaaccaaacactgcatgttctcactcataagtgggagttgaacaataagaacacatggacacagggaggggaacatcacaaaacagggccagtcagggggtggggggcaaggggagggatagcattacgagaaatacctttgaagatgacgggttgatgggttcagcaaaccaccatggcacatgtatacctatgtaacggacctgcacgttctgcacacgtatcctagaacttaaagtataataaaataaataaataaataaataaataaaaagtcttttgagatctctcattctaaacaattgatgggaagatcaaattcaaagaaagacatgcaatagtgtcatggccagccctagaaattatcttgacacaattaagagcaaaaacctaacctaaacaaatttaaaatctttgtgagctcaaactgcctgctttggattccctgcaggattaataatgaacgctgctcaaccttgttgcacagtagttccaattccacactttcacagccttcgcttgggtttgatttctcctcaggaaaccagtccctgttcgttttatatttgtgtgacttttaattttgcgggtacccacttacatgtttggagatgccttgtgaatccttggttaagtcacagctttggttaaggcttattgctttcacttgggaaggtatctctagaaaaaaaagtaaaaacagaaatgtcagctgtttatcccagctaaaatcttttaacaagagattttaaaagttttttttaagagctctatagtcaaaagctgacttaattcaaactgatatttaggttatgtatgtacacatatatatatatatatattgtttaaggcttctattcgctctgtaaaaccttctcagtcaactgaattcctgtctttttaaacctctgctaaccatatttgctccctctgtctgcttctccttctattccgtgtgtccctccttccccttgcaactttcaatgccacaggaggggacctaaaaacaattctaactgcctgggatcctttaattaaaacagaaaaggcaacatgagtttctctttaggggaggaagctttgattttcctcatggaaccccaagagttttaagtggacagattcaagtctgaagctctacgactctcttttgcactaaactccttgatctctttggctattaggtacatacatgtgtacatgtgaatgttatatgttgtgtctacatatatgtatatggtcatatgtatatttgcatattatttacacgtggtaccacattaacctgaatgagtactcagaaattaattaaataagaccaaatattttttcaaatttatgtgacttgaataaatcttttggtaaataaaactatgttgttattgttggtttaataaaaataactgtcttctgagctaacaaaaaaatatacatgtgcttaatggcaaggttcttgcttttacgatacttgcctaatgtacagtaatataaaaaacagttaataaaaaatttaacttgtgatgatgactaggtttttctaatgtctcctaaaattgcctaaacataattgttaaaattaaatgaataaaacagatgtaaatgagataaaggtttataaatgaactttccacaagaatgttttatgatatgtttacttaggtttctcaatgctttttggtaatcacatacttagagttttcccaaactaaattaaatgatgggttagggttcagatgccatggagactgtggaacaaactgtctcaccttcatcagagactagtccagcaagaaagttctcatagttcataatatcatattgaaggaaataaaaatgttttaccacaaacattggccagatctaggcaagattaactgagagtctgactcttcccttcacccctgattaactgagagtctgactcttcccttcacccctgcaatatcaggccagatattttcttttctcatccgagaaaacctccaaagtagcattgttaaaatggctgttcctcaggtaggagtggaactacagaaaacaggaatatcggtacaacatgaaactttgtgaatatcataaaagataaaatatggaacacttggtaaacaaaactttatgtattaaatatgctaattaatatctaaatatatgtaaatatcaattgaaatgctgaccacacattggaacttgaaatcaagagggcctaataat

SEQ ID NO: 1888807 - DNA, 4001 bp, Homo sapiens
aaccttgaaaacatcatgttaagtgaaagaacccagacacaaaaggccacatattgtatgagtccattcatgtgaaatgtccagaaaaagcaactatatacagacagaaagcagacaaatggttgcctagggctaaacatgagagaggagattaactgcaaactgcttctgggaattcgtgggggatagggaaaatgtcctaaaactgtattgtggtgatggttgcacaactccataaatttatttttatttatttgtttagttttgagacagggtcttgctctgtcacccagactggagtgcagtggcacaatcacagctcactgcagcctcaacctccctggctcaagtgatcctcccacctcagcccccaagtagctgggactacaggtgtgcactaccgctcctggctaaatttattttttaaactgtacacttaaagtcagtggatttgatggtataaaaagtacaaggctgggaaaaaattcctcaatttattacattattcagtttctttataaattaactgtttttcctcaaatagactacttctattaagaactgtggtgaggctgctggtagtggttcacgcctgtaatcccagcactttgggaggccaaggcgggtagatcacctgtggtcaggagttcgagaccagcctagccaacatggtgaaaccccgtctctactaaaaatacaaaaattagctgggcatggtggtggcatgcctgtaattccagctactcgggagttggagacaggagaactgattgaacccaggaggcagaggttgcagtgagccgagatcgtgccactgcactccagcctgggcgacagagtgagaccgtctcaagaaaaaacaaaaacaaaaacaaaaaaaaacaaaaacaaaaataaaaccgtggtgaggccaggcatgtggctcacgcctgtaatcccagcactttgagaggccaagatgggcggattacttgaggtcaggagttcaagactagcctggcgaacatggtgaaaccccatatctactaaaaaatacaaaaactagccgggtgtcgtggcgggcgcctgtaatcccagctactcaggaggctgaggcgggagaattgcttgaacccaggagacagaggttgcagtgagccgagatcgcgccattgcactccagcctgggcgacagagcaagactctgtctcaaaaaaaaaaaaaaaaagaccgtggtgaattaagtttctgagacatttctgtcagttgggacttggggctgtgctgcatagacatcacagccagcatctcagtctgagaaattgtacgatgtcttgaggtgtacaacgtgtttccagttgagtgaccccagtgtgtagtctagatactccctggcctttctgctggtttaagtgtgagagtgcctaaggcctctacaccaagcaagaaactagtcagttaacaaactcacgtcttgaaactccccagcccagttcacaaccaggtgaattgttctattacagcatatctatgaaaatgatcgatcaaattactgatttgattttctcctttttttggagggtgggcaactgggtaagtgcttattgggcaaggatgtccggccagatcagccaaaagatacaaagtccatcccgtcggcccgtcccctggggtactacaggggaaatctcatctctccaaggccggtggggaggcacaaagggatttaacagcacctctcctggctaggggaaaggctgggacaaagtccctcctttgttgcattgcgggaagggccaaacctgccacaatgtcagggtgaggtgtctgttcccggggcctcctggtgaccgggaagctcatgcgactgctcccggacttcagtcgctttcgccgctgcagccccaccgtccggcccgggcatggcgaaacaagcaggcggtggagggaggaaaccagcccgagccaaccgctcattcctcgcagccgtccggggatccccaggcggtcccctacgaccctgcgcgtgacccccctgtcacgtggccgccgtccctttcgggatgcaccattgcttctggcgccccctggtgaccagaagagagcagagctggcaccgcgagggcgagcctgccggtccgctggaccctacgcgagccggcggcgctgtctgggcccccgcggcggaaatggccccgccggtggcaccagggcgtgctccgcgaagcccagggagctgacccaagcccgaactggagtgggtggaagccgcttccaccctttcctcccttcccccgaaagggaaaaggacctctaagaagacagaatggccagataattatcttgaacctggattccagctccttgtgcaaaaacagaagaataaggcagggttttggagtttatgtttgtttgtttgattaagagggttttgctgatgctcctgaaaacatgtatttgtagccccgagattgtgagctaattattacttctgagtctcattctcctcttctataaaatagggacaataatggtgaagtgtttgtgaggattcacaggtgtttgtgaggagcaaatgaaataatccacctgaaggttttagcagacaggtttaagctacttgtttagctttaaaccagctagtttagcaactaactcaggtctcagtaaacaccttcgagaaatgaaaggattttgacaccataaaataaacacgtgcctaaggtgaattgtccattaaaaatgtatgtatatgggaattaaaaccatctatccccaaactcggcctggacactgagaatcaaaaaccccactgtagcatctacataaaaaggactttgctaatccactgtcttcattcgcattacttttccaggacgttctctgcaggcgaatagtttctgcattacaggatcttctgcaaaggcccatcaactcgtcaatggacagcaccaacagtttgcactctaaaattttttgaatgcctctcattaaaatcctcctcttgctgcttacaccaatcctagaatgttggtatctcgtggttcttacccaatcccaatcaaatcccagcattgaaagactcaccgccttaagcccatttttcatttctcaataaattctgatctttcttttcctgtctgaagcaccgctaaagcttcacgaagtggtgttctcccgtagtgagggaagcaataaatgcacttcgtcatatcatcaggtgcattggtgatatatggggagcgagcatttgattttttattgttttaaagatggggtcttgctatgttgcccaggttgctctccaactactggcctcaagtgatcctcccacttattcaattaatggtgttggaataattagccaagcatttgcacgatttttcttttttttgaaatggagtctcgctgtcacccaggctggagtgcagcggcatgatcttggctaactgcaacctccgcctcccatgttcaagtgattctcctgcctcagcctcctgagtacctgggattacagacacgtgccacacccggctactttttgtattttttagtagagacgaggtctcaccatgttgtccaggctggtcttgaactcgtgacctcaagtgatccacccgcctcggcctcccaaagtgctgggattacaggcttgagccaccaagccgggcctcacacttgtttcattcccagtgaactacttcacatactggcaagcctattggagcagggggtccctgcattgtaatggtgaggttggcctatgatgtggctggggcctggatgattttatggtgatatcttcctctttaccccagccaccaggcctaccaccctccagctaagcttgagttttctccattcattcaaatcttctaacaggtgcactcaaaagagtagtatcattttcttctcctaagtcattcagttttatgttattgtccctcattgttttattttcagctgtgtttccatcaattctcttgctttttctaggaaaagagtcatatttattacaattt

SEQ ID NO: 1888808 - DNA, 4001 bp, Homo sapiens
gttctatccctagtgagagaagagagaggaagaagaagaaaaatagaaagataataagaaaatagaaaaagaaatgaataaatgtacattgtggggagcaggaaaggactaccagtaatgggaggcatcagctaggagcacagatccgaagcatgactcactgtgtgtcctaggacactggatgaatctatctggttctcagcttcctcacctataaaatggagataacaacagtgtctcgatcatagggttttcatgagagttcaatgaggcaaggcatacatgtaactgaacacagctccgactgctcaccagttgcaaagtccagtgaacaagaacgacgtctggtagaaagaaagtggctttattccagagctagttgaggggaagtagtacaggctgccttgaggaagccactaaagcctttggggcagaaggcaggagctttgaaagtggggcttggcgtgaatggcatgcaggggagagggcgatgaagtgcagagtctatgtgacttgcttcggatgtcttatctatcaggtggtctggctggcaccgtcacgggcagagctaggttgtaagttgaggcaatctcaatttgcctcctggtaggagagagttctggaggttcctggtttgctttaaggttcggtctctgtaacttctaagtaaacatgtagttagataagcttgctgtgtagggagtgtctggtggagagaaggtaaagtttataattgcattcccaaagagctaagtaggaggtgtgaggaaaggaaaaaggaaaaaataattcatttgattctttaaaaaagaggtacttggttatatatagactgttttattctttttcttcaactccaaatagtcaatttatcagcaaatcctgttgactccgcctcagaaacacattcccaaacctttaattttttttctctgacatgcttaagataatctctatcatcttaaacctgggatattgcattagtgtcctgtctccctgctttcaccttttttctcctataaacattctccacccagcagccagagtgatctgatgatgaaaatgtgaattacaccatggtgcccctgcttatcaccttcatactgcttgttcttgggttgggtccagagtaggtacttaatacatggtaatgcttattacattattatttgctctggtatctaggaataagatatattaggccaaggaagaaaatctgtctgctgagtgaaagacacactctcctggcacatttcctggcccagggctcatacatgcagcaaccaacataggcttattgatggaagcacatataggtacatagaaacatggtacgtgtattgttttcacaagaagatgctctatctttattacatgctgccagaggagaacaatcactctctctcccttgtgaataaaaaaatatgaaagtgagtcaagtaggaaatgtgaggctgcatggtcatttgtgaaattgtataattaagcacctcaattaatcctcaaaacacctctatgaattaggtatgattgttatctccatttaaaaaattattaaaccaaggcaaaatgagaataaactgctcaccagattagccagctagcaagtagtgagtgaagccatgattcagatacctagtctggttctagggtcactgctcacataaatctgttacatcaggccgtgatttgtggctatttttgcttaggatgagggttccattaggtacttaaggttttcaagagtgaatcaaaaattaaaaattaaattatatttaaagtaaaacatttaagtaagtactagcttttctggtgcccacatagggcaacaacactcacctaagatgcctatgagtgactgaaggtgagaaaacaccggggtacactgtggaaatctgagatgtggaagaaatcaagctgtcacagacgtcccagctagtctactgcactccatgattaaaactcttacatgtctctcatgcagcatttgatccaaggctgaaaattgatcatgaactgattagttaagagaaggagagggggccagactccaacaaaagtcagattttggttgaagtcagagagaggttgtgagattgccatcccttgacatctttttaaaagtgaattgtttaatcacttttttttaagctgatttcttagccatcttgcagaaatatgaggcaggggcacttatccattaggtacagtaggtaaggtaactaagcccaatgacacccttagcagcccatgaaaatggtttagtttctttcataaaatggtgctgaagataatgatagttgcaaaggaaaaaatacggtagaccaatatcatagtatgttaccaagcatagggcctattattggaagctatttccagtgctcaggatattaacatctcctggagcgtctgcaaaacacatcttgaaggcagaaccatagtcctcaatttggcctgcctcttttatttgacaataaagttttatttatttctgagcataagattgggattttatttctagaaaaagggagaaaaggtggaaggaggaggaggcagggaaaaggtggaaacttgcccaggcccatagcaggagcccaacacagggaacacttaagcttgtgtagagtacttgtaaccagaagcccggaggtggagcacagcagaggatgcaatgtgccactgtcgcggccagagcccatgcagtgtaaacattaacattcttggatgcactaagcactgggctgcggtctacacttgcattctgaggtggtggagtcatggccaaaattttggagtacttggacttttctcaagaagcgttgcacttcttgtccggaccggggattaccgcagatcgcagcccagagtctgcggaggcgcaccgtttcatcaacagcagggactgaaacttcagcccaggagaagccaagatggcaccgttatcgcaccctgggaatcgaggaccgggaagaacttaatggtcagtgcctggatggtgacaggtgctccagtgaactcaggcaaactaccttttcctgcgacagccgattatctttgtgcagctttcagtttgcggcccctaacctcctccagcccataaactcaggcctccagtgttctgatctttctctttgcctttccgcctttccagatgcgattcctcccgtgatctcagtgattgtatcaggcgaaaacgaggagggcaaaataccgtccagatgtaaactaggagcagccgcaccagcagcaccagcagaatgccgtggtagtgcggcaggccctggccccatggacaaagagaaactcgtcagtggcagtggccacgaactcagaaagcctgaggacagtcagcagctcctctggctcttcactttcacactggtgcaactacaggagctgaagaacatttttcaactcgttccatacccggacgtgttaggtaagtggcatgcttaggcggcaccgacttttcacggagcaggggctgggctcagggcttattctctttccccaggccccttccaaacctttctgagccaaaagctacctaggggtttcaaggctgctggggcctgtttgcccttgggcttcagggtggaggcaatgcctcctggacaccaaggtaaatattttcaagcaacatttaaatgaatcaagtggggaaactttggcctgataactaggtttgtataaatagaatttgattggaacaagaaccatgatcagggtgaggagagtaaggcatggtcgtgcaagtggatgggcaaattctggttttatgtaaatatttgataatttgctcataatatttttgatttttcagagtagtgcaaaaagtgttatttttctggaatcctgagtttttttgtgcccccttacattcactatgggggaaaatcattcctaaagaaagcctcaatctggatattacaaaatagtgtactcggggagaggtgttgggaggtaagtatttaaaagcaagcttgaaatgaacaacataa

SEQ ID NO: 1888809 - DNA, 4001 bp, Homo sapiens
cgcccggctgctcttttgttttctatctgagcaattttctccctactccctgcaaccttccactccactacccctttgaatagaggtaaacatgtgagaagtaaaactgtatggaatgacagggagatgctttcaagtaaaatagatttctatttttttttttctatgcattaccaccaaacccaatgtctaaaacttttttggtcgccaaagttgtcccatcattcattgatttatttattgaaatatctgtttcactcctattatgtactaggcactatgccttggccatccatcccctacagctctcagaataattcctacccattgcaagggcttcataaaggtttactgcacgaatgaagaaaagatgcttctctcctttgaattaaaaggatctataaaacttgggtcagattcagttttataatttgcattctataaagttcatctaaatatcagagattccttttctgatagtaagaataggaatcttaaaatacaaatagtagcacttgatggatattggaatgaagtatatgctcagcataacatttaaggccctgaagcactttatcttcacctcctagtccttcttgtagattcaaaattatagccaagctgtttccagaagaattctgccttttctctggaaaccctcggcctgaaaagcattccctgcccctccacatggcagatgtcactcaacctttaaggcccacccaaagttcctccttcctttttttttttttttttttttttttttttttttgagacgtagttttttgctattgtcgcccaggctggagagcaatggcgcgatctcggctcactgcaacctctgccttccaggttcaaatgattgtcctgccttagcctcccgagttgctgagattacaggcgtccaccatcacgcctggctaatttttgtaactttagtagagacggggtttcaccgtgttggccacgctggtctcgaactcctgacctgatctgctcacctcggcatcccaaagtgctaggataataggcgtgagccaccgcgtccgcccccctactcctcctttttgatggctcatgattactaccaggcagtgacttggtccatcctccacccttcctgaataccttgaacaagcaaacattatggcacttggatttgactatcacattgtagctttaaaaaaaaaaattcaactctcctgccttacacagagaaagacatacacttctgaaggctggccttcaacagatgctttttattggccttgaaccagcctttttttttttaacaaaaaaattttccaatgcacgcaaaagtagagagaataatataataaatccctacatatacatcacccagctttaaattatcaactcatgagcatttttattacactttccctccaccttggcaccaatgacttactttcaagcaaatcaaaagattcaagtctatttcttagaaaatataactacaattatttcatctaaaatattacaaataattatttaatgtcgttaaatatccatcatttcattcaagcatattttgtgaaagagctgcttaatccctgcatgttattttttctattttgaaatcatggaaagaacagggaaaaggggaaggaaatttgtgagaatgcataaataagtttcaaagagcctagatgtcctagatgagaaagaatctgacctggtttagggtgggagaaatttatttctctacttctccggaggaggagggtgcgacttcaggccggctgatgcaggaggaggtgcggagggtagagtggtactacctccgttgggagttccttccggataatcccaacgcggagcgaggaggcagcgcttttttggaggcttggcttcccgtgcgtttccaggtgggagagtggatctcccggaggcacaaggttggtctcccataaggattacagaaacgggtcgtcagttttctccggtgggccctggcaaagccaagagacctgagatggcggcgagtcccctccaggcacagagctggcttcctcctgtttcgctcttaccgtatttcctgtatcctgagacgtacatcccttctccgcctccacccctcctccctaccccattctattttaatgtttctattaggatgggtgttaaaaaccgatgtcgttatttaatatagtgtttttccatcgcgccccacccccactaaatgtaaataaatttattgagaatttaatataatttatgcaattttaagatgagaagaaattcaagtttacctttaagtggtaaactctgaatggcttatatgtgtgggagggacgcgggggtgggcggtaaccaaataaattattgaagagctttacaagccagctgcagatgcacatcacagagctgtgaaactagctacaaacatttaaaaagcaatatgcaaacatgtaagttgactagagtgcagaatagcacactagcacaaaccatggaaattgaatgtggaaaatgaattcaccgtatgtcatagaatctaagatcattttttctttattttttaagcaaatttgtaatttttgaaggcttattatgtttttccccaaatttgaatatctaggaaatctctgcgacctaacaattgatggtacactatactttagttggcagcttttttttttctttcttgtaggtatggaaaataatgacccatcttactagtgatgatatgttatattctatgatttatggtaaccagaagaaagtaccacgtgtctcagaagaaaaggcttctggaacttcttagaccttcattattaaaatagcctacacatccatctccctttagctatggacaaactagatcacacttcttcagctttgttctcagtgctttttgtttgttttttgtttttttaaatggagagagcttagtccttaatgccagagtagaagtgcctgttaaactctgctgtttacaagctctgagctctttgagtaattatttaaattcttggaactttggtttctaggccataattttttccttgcaaaggtgtttccataaccagggataatacatgtaaagcatttactactataactatctcttatctccacccttctaccttcctccaagtaaccagcacagccctttacacaaattaggtactcagtaaatatttgggaaataaatgaccccgtggttttgtgccaaatgctactaataaagacagaaaagtcagatgtagctgtagcttaatgaaaagatgtgagggaggcattgagagaggcaatattttagagctagaagagtagttggaactagacatactgatgtgggagacagcaacatagaggtgatagttaaagacaagggaatggattatatccccaagagaaaatctaaaggaaaaataattgagctaaaaacagaatattgagtaattagagacagatagaagaaaagaagtctgctgcaaaggctgagaaagagtggtcaaagtcagcgaagaagattctaacccagagtttctcaatcttggtgctattgacatttgaggccaaatcaatctttgtagtggttgccagagtttaccgtttagcaatgtcctaagctaagcctctaccaactatatgccagtactactccctactcctcaagttgtgataaccaaaaagatttccaaacattgccagatgtcccctcgggtacacaattgtccccagttgagaaccattggtctatccttaatccaccaaatttgctcctttcctagttttttttttctttcatctcagtgaaatgttatgccttccactcagatatacaagtcaaactttggagtctttatttttagaaactgaagaatattttattatttattcaagtaaatgaagtaacaatttcacagtctttttacataggtctctaaatcttcacgactaaagacattaagagttgcagttaagtcgttctatagctatagttttagcaaattaagagaaatatgtgcctc

SEQ ID NO: 1888810 - DNA, 4001 bp, Homo sapiens
aatcttccaggctcattgatgagaacaccccacaaagatggcagtataggcagagccccaccacttaacttgcccctggagttctctctgctcccctccccgtttctcatgcacacatctctgcaacattttcctcccacctcctaacactttcagaagctcctcatcctagaagttgttctcctgctccttcggtcaagtgctggaaatttcaacactaatttctgcagaggcagaagaatggagtttgtttcaagtccttgtgaagggataaaatgattggtacttacagctgcttcaaggtcctgttgaagctggatctggaggaggatcttttatgcacagctagtccctgcgtgagagaattccggtcttggaaggatgccttcccctccacaaagacatcaggctagcccacaagggaagatagtttacttaccaataacactgtgtacccacaggctcaggccacttttgtcagaagcagaacaggctttccaaggtcaccacgctgtactaaaacttcacctaatcattagagaaagacaacatggcacatacacgtgatgtttggtatcaaaattgtgatcaggaagatggctgcattccctgttccatagtaaaacataatataccaccaatgaaatcagccagttctggagagattaccacatgatagagtgtttctgaccatgggctctgggccagacattctctgggagtgcaagatgggaaaaaatatttccttttttcaatcttttccaggttatctatttcaaggcaagtttgaaaatcaatagttctgttagcagttttcctacactacaatagtatatcctacaagtgaaagctatcacattcttagattctttcgctttagctttgatcaattagcttttactaccagcctacatctcagaaggaagcatctttgatttttgtgtcagatgaacttctctttgtgtaggattcacaaaattctaattaagaaattatattgggggaatgcggtttctcttaactacaatatcagaatatataataattgctgtttcagggcccaccatgtatgaggtgcttgacatatcttactgatagttttcttaaaatccctgtgacataagtttctttcttccagtttcacagatgaggaaatttaggctcagaggggtagattacttgtccctgttcacatggctaggaagtgcagagctgggatttaagaggcatgcatcacaatccattgcctacactggtcagcagtatccccacattttacacagtcttggaaagaaatccctgtgtctctgaaagccactaatataaattttaaaatttcatactgctgttacgtcatccctctattttagaggttgactcatgacaaatgctatttttcttttcctgtgaaatatttagtttacaacattatatttgagggtggcagatttgaaaaggtatatatatgaataagttaagtaatgttgatttacccctttttgtgtgctgaaaagtatgctattcactgtgtagaggcccatggacaaatgaatctgctttctagtcctgcgacacctaccagcttctagaagactttgcatggctcttgatacacaaaagccactttcctatgtggaaagcaaccagtgtactgcctccaatttggaagtgggtgtttttgctatcagtgtttcagtatgaaatgtattcattcagtaaaccttctgcaatgcctatatgtttatgtagtgtaactgattgatagagcatatgtaaagaccaagtaaaaactggttcttagccaggcgccgtggctcatgcctgtaatcccagcactttgggaggccgaggtgggcagatcacaatgtcagaagttcgagaccagcctggccaacatggtgaaaccccgtctctaccaaaaatacaaaatacaaaaattggccagctgtggtggcgagtgcctatagtcccagctactggggaggctgaggcaggagaattgcttgaaactggaaagtggaggttgcaggagccgagatcatgctactgcactccagcctgggcaacaagagctaaactccatctcaaaaaaaaaaattggttcttattcataaccaactcctaggaaaacaaaacaaacaaaaagaatgtaaattcttagctatactctgcacagggcgtatttccagtgaaagaggggaaaagagggagaggagataaaaaatttgatggagcaagagtagaggaaataggagcaggactcacatctggaggaatgaatccttgtgactatgaacatgcatgtctgtgcttgaaaatgctgttatttgtgagttcagaggcgtgatttcatattccggcatgtttatgcctttcacccaaacatttaaataattggattagcaatcttatattcattcattaatctccccagttaatttatttttaatcaatcactttttacttgtaaagcctaggggaatttctaaattaatcccactgtgaggacatttcagaaactgagagattattagaaaggcatcaattatgaagccaggaattcagcaatacactggtactaaaagctattgaccaatgggagctaggttaaaacaaagtccccatgtttcatgcattgtggtaggctctgggtttgataggaacatttaggaactttgcaggtgtctcatgcagaaaatcatgcaggcatatcttaaccccactgccagtggtctgtaaagatttgtcacagttatttatccgggaggtgttttacactcacacacccacacatgcacgtacacacacacacacacacacacatctcttataaattagaatcctggaatgctgattgagtcacagagctagctggtgttggagactctaaagcctcaaagaatgtctatcatacgagttttctataataagttatttagtttaattcaaagccactgcctgccactcccctggctttgcttgtctgttgtggccccacaggagaatcctggaactgaaatctctgcctcatttaaagggcagggacagaaggggcagccccagcatctgagcccttcacactgagaatgacaccgtcttacctggaagtgtcctccattgttgctgtcacacttgaagctgcctgttctcacagctacattgtaatcagtcttccctacacaatatttagcattctcaccactgtgcgtttagctatacctactttaatttgcaccttagagctacgtaggttatggctgagccaaaaatgattcttcatcttctgcagtggtttagataacgcagtgcatcattttagccacaatagatttcatatagtaataacttaaatacctgtatattcgttttctattgctgcataaaaaattaccacacacttagtggcttaaaacagcacacatttatcacttcccagtttccataagtctgccgtggatcaactgtgttctctgcctagggctttacaaggctgaaatcaagttgtcgttctcacagacacacccaggatcatgtttgctcaaatgtctgggcaccccatggcccagtcatgctgacacataaaattaaccataacaccaagcgtcttgacacactttgtaaattaaccattatattttaattccctttgtatcttagttaaatgatctatttccctggtttcatacctataaaatggagctgtgaataattttactttgttagttgcatgtttattaattaattttaaggttatatgtgttagtaggcaaaaacggttaatcaggaagtttatgttttttactacaaaagggaatttttatcaggtggcatgcagacttttaatatttatgaaattttaccacatagcaagttcttctataagctctttaaacgctttacctcatttgattcagcaacacaccataagtacctttgttatccctatgttcataggaagacatttcatatgagacacagaggctaagtaatttatcctagat

SEQ ID NO: 1888811 - DNA, 4001 bp, Homo sapiens
tgcctattaaacctctgctcctaaacaaaacaaaacaaaacaaaaacaaacaaaaaaagaaacactatagataggtgggaggaactcttcaactggctcaaactccaatgccctaagctggggagcatccccctccaccaccaccaccacgtgtggatacccccttatcctgtttgagctttgatgtttgatgcccgcacaaggtcactttaggaggattctctctaagtactccttggtctctgataccccatacctgactatctccactggacaaaataggttcttgagtcaagcactaagtaaggaatatgaagatttcataatttgtgtgcagtttcagataaattctttccaaagttaggagaagtaagaataaaatatgtaactggaatcagttgctacctaaagatgtctttttttaaacctcaccatggtacctggggttagaagcaatgctttgtttactctttttaaaaagcaacagaatgggaatattgtagtaaatctctgggggaattcctgtcttcacaccaaaaatagttgttattctcttagttggtttggttttatctcatggacattttgaagtatatattttttcttatttttttccaatttttgagccacatacattttatagactactattcatttttaatctgtttccttttttctttttcactttctccttttctctcctactcttttttattttccttctttactttctcttttttcctgccaattttagtttttatctttgtgctgtatttaattgtatcatcacaggccacattaaatcatttctggaagatcagttttaaataaatagatgaataaaaaaatagcagttaaaaaaagggagagaaaagatttaagaacatttctaaaagtaaccccaaaatttcttcagggggataaaaagtgggatgatttgggaggtcgaggtgagaggattagctgagaccaggagtttgagaccagcttggacaagacggcaagatcctgtctctacaaaaaaaaaaaaaaaaaaaaaaaaatttaattagctgggcataatggcatgtacctatagtcctagctacttgggaggctgaggcaggaagatcacttgagcccaggagttcaaggttacagtaagctatgatcacaccactgcactccagcctaggcgaccctgtctcaaaaacaaaaatgaaacagtggaatgaaatcatttgggtaatgtctcccagacaagtaaagtattcccaagaaatttctgaaggaattaaggaaaattattgatgttatgattaaaaaacaaacaaacaaactggttctactatagaataatagacattggcaactcagaaggatgggagggtggtgaggaataagaaattacttaatgggtacaatgtatattattcaggtgatggttatgctaaaagcctggacgttacaactatgcattatatccacgtaacaaaactgcacttttaccccttaaatgtacacaaattttttgaaaactggttcttgcacctcaacagacacataggatttatgaatggacttggatagagcatagaggaaggcctggagcagttttcatgggcttttgtctcctatggccctggtgcgtctatcttcaggaagctaaatacagaggcttctgagaattcacttagatgatggttcccaagaggaacaactctctcctaagccacacatggggcagtttacttctaatatggaaaattatgggtcgggcatggtggctcatgcttgtaatcccagtactttgggaggccaaggcgggcagatcacttgaggtcaggagttcaagaccagcctggccaacatggcaaaaccctgtctctacaaaaattagccaggcatggtggcgtgcacctgggaggctgaggcaggagaattgcttgaatccaggaggcagaggttgcagtgagctgagatcgcaccaccgcactctagtctgggcgacagagcaagacttcatctaaaaaaaagaaagaaaagaaagaaagaaaattatggatagtctctgaagctgagcattctctggagtcagacactttcttaatcccttttgaaatttctgatggagaaaaatccaatccaaagaaagaatatgaaatccagggaaaattagtttttttttcttaagtgcatataagttatggatttatatataaaataaagatagtgattgtatcagtcaggattctaacagagaaacagaaccattaggagacacatgtagatatagatatagatataggtatagatatagatgaactggcttatgtgattgtggtggctagctaggcaagcctgaaatctgaaatccttagagcaggccatcagaaaggacaggcaggagttctcgagcacaagccaatgctgctgtctatgggcagaatttcttcttcaggaaagcctccattctgctattaaggcctttaactgattgattcaggcccaccagattatctaggataatcttgtttacataaagtcaactgattatagacttgattcacatctacaaaatacctctcagcaccacctagattagattttaatggaataactggcttatgttagccagttataaactagggactatagcctagctatgttaacacataaaactgaccattacaggccaggtgcacagtggctcatgcctataaccccagcactttgggaggctgaagcgggcgggtcacttgagaccaggagttcgagaccagcctggcctcaaggctggtgaaacctcgtctctactaataatacaaaaattagccagacgtggtggtgagtgcctgtaatcccagctacttgagaggctgaggcaggagaatcacttgaatccagcaagtggaggttgcagtgagccgagatcacaccaccatactccagcctaggcaacagagtaagactccgtctcaaaacaaaacaaaacaaaaaacaaaactgaccactacagtgatgtttggtgtttcattttgattttaacttccatcagtgaacattttgttctttgtgaaaataaatcacaagctaagataggcttctatggagagagtgtcaatattacggatccatggcatcagttgtaacatgtatttggtctatgaaggtcattagccatctggtaaaaggaagctatactgattataactcactcattgggtgtatgctattacctaattccactaaactgttttccgttcattgatttaaaaagttagttattcaattcaattgaagttaacacctgagaaggatttcaaagaacagatgtgtatttcatttgtagaaatcattttctcatgtcacaaatgtttaatgaatccactctcccttgagttagaaatggtaggtgctttgaaatacttgaacctacacaagagcagaaagcattttattttgaagtgtgcctactgtccagtaataatgttggacaagttattttctctctgagccttagtttgcttacctgtaaaatgggaaataatgattattgtcttgagggcttgggaaggattagatgagaaaacataagttagacacttgaaacacagtagatgttccacaaatattgattttttttgcctccttctatgaatacagacttcataagtgaagtcctatgagttaaaagtcctctccaatttttttgcagattctatctagcagcactattttggatatcactgtgtagcgaagaatcaagtgaggtttccagtgctcattaatttatcaaattgactataaagattcactgtaggtggctttgtatttacttatgtgcatagggagaccatttttacatgttatcacttcaacaataaatacagataaagttgctggagtttacaattgctttttatttgaaaaatcagcaattttcctaattttatctgaaaatgttcttcggagtcatggtggtgaaattctgagcaaatattaggtgtcactagttttca

SEQ ID NO: 1888812 - DNA, 4001 bp, Homo sapiens
cctcaaagatctagaactagaataaccatttgacccagcaatcccattactgggtatatatccaaaggattataaatcatgctactataaagacacatgcgcaagtatgtttattgtggcactattcacaacagcaaagacttggaaccaacccagacgtccatcagtgatagactggattaagaaaatgtggcacatatacaccatggaatactatgcagccataaaaaagaatgagttcatgtcctttgcagggacatggatgaagctggaaaccatcattctcagcaaactatcacaaggacagaaaaccaaacagcacatgttctcactcataggtgggaattgaacaatgagaacacttggacacagggcggggaacatcacataccaggacctgtcagggggtgggggtctggcggggggatagcattgggagaaatacctaatgtaaatgatgagttgatgggtgcagcaaaccaacatgtatacctatgtatcaaacctgcacatgtatacctatgtatcaaacctgcacgttgtgtacatgtaccctagaacttaaagtataatttaaaaaaaaatcagatctcgtgagacttattcactaccatgtgaacattatgacggagactgctcccatgattcagttatctcccactgggtccctcccacaacacgtgggaattatggaagctgcaattcaagatgagatttgtgtggggacacagccaaaccatgtcaccatggaatagtacacagccccccaaaagaatgaaatcatgacttttgcagcaacatggatagaactggaggacattatcctaagtgaaacaactccaaaacaggaagacaaacaccccatgttctcacttataagtgggagctaaacactgtgtagacatggacatagacagtggaataagagacattggagactgggaaaggagggaggggagaggaaggtgagggatgagaaattacccagtggatacaatgtacactatttgagtgatagttacagtaaaagcccagacttcagcactctgcaatctctccatgtaacaaaactgcactggtatcccctaaatctataaaaataaaaaaacgtttaaaaattacaaataagaggccaggtgtggtggctcatgcctgtaatcccagcactttgggaggctgaggctagtggattgcttgagttcaggagttcgagagcagcccgggtaacatggcaaaaccccatctctacaaaaaaatacaaaaagattagccaggcaggtggtgcatgtctgtagtcccagctacttgggagcctgaggtgggagtatttcttgtacccaggagatcgatgcagtgagccaagatcacaccactgcacttcagcctgggcaacagagggagaccctgtctcaaaaaataaaaataaaagtaaaaatactcaaccttaccttattcttaagtatccattgctgtgtggctctggggtggctgtgcctcctggggtaaaaatgtaccagcatttttctgcaaagaatggggaataaatagggtttggagaaatggagtctctatgaaggtatttacttacaacgcaagaggacatggggaaaaccacaagtcattttattttggtttcttcaacaatgaaggacttcctctctttgaggaagatggtgctttctgtgtgtgtgtgtgtgtgtttgtgtgtttgtgtgcgcacacacacacacacacacacacgctcattaagcatttacagtcctggaatgttattctgactactcatagcaactccacttcctgcccacccaaacagtcatccgttatggaaaatatgcctgcctctgaaatatttaccggtgccccggagtgccacacaggcatttcttataaatactcaaccttttgctcaagtctccaggggtcccttttctctctgggtagcagggtgagtgtccatgatttgctgacgctgcaagctcccccatgtccagctgctctgtgatatttattttccacctccgataattaacctcatcctcctctcaaaatgtaagcagcaggcagctttagaaagatggtgcagatttgcagattgcaggcttcaacatgcaggaccttgtcgagtgcattcagaggctggtttgattgaaggagatttttgatggcacagtgagtcagggcagctacagaggtaccactggacggtggaaagccaccgtggaacgaaagtctctgcgggaatcagctgagtggccttgaattagaaagggatgtggggcagatgtaaggagttgacactgaatttgcacaatgctgccttgtgtgttttcttgcctgtctccacgacccctctcgaaagccacctggaaatactggacgcataaacttggcatggatttaacatcatgctagctggcagaactcagtgatccctgagctaagccaaaggggtaataaattaaagacatgctatgttggaaagagctgcagggggaagcagatttatcaatgcgagggatgtctgtaggcacagcggacattgtcatctccccccattccccagacagactgggacaggaagaggaagctcattattagatctgtaattcatctcgggggttttactgctactctagcaagctctaagtgacaaggataatttctctttcggcacaaacagttctattacaaatgtgatctctctgggcttccagtataagcccactgctactggcacgaatgaaagacctagtaaaaagaaagttgtctctgcaaaatgttggcactgcagagactgggggttaaaaagtttgaaaaggggcagctcacgcactctttctttactgctcagaaggtattatggtcatatttgcgactgcagagtcgatctacatgtttatttggtggaaaataagacgactcaattgattatttaatttatccatttgttttcatgaaacagactctgtttggtacaaaagcatcacaatgaataaaagaagaaaatatacagtgtatcctgaaagcctgagttcaggcgcagagatgaacttggctgttacatctaaagaggaatttccatcctaaaaaggaaagtgctctgatgcaaagaccctgttactttaatgctgtgcttttagacaagttgggaagggaactgtgagtacgacaggccccacatctcccgaagctaccatagaatctgatattttgaatgaggacaaggagactttgttcttatagaactagtctgtttgcagtttgcaggactctgcgatgctaaacagacataaaaatcacacaaactggctaggcacagtggttcggttcatgcctgtaatcccaatagttttggaagccaaggtgggaggatcccttgaacctaggagttcaagaccagcttgggcaacatagcaaggccccatctctacaaaaaaaaaaaaattatccaggtgtggtggcacatgcctgtggtcctagctacttgggaggctgaggtggaaggattgcttgagcccaggagttcaagaccagcctgggcaacatagtgagacttcatctctactttttttatgaaaatgaaaaaaaaagatatacattctatttgggagactgaggtgggaggatcgcttttgttcagaaggtcaacagtgcagtgagctatcatctcgccactgcacttcagcccgggtgacagagcaagaccctgtcttcaagaaagaagaaggatgaggaagaagaggaggaggaggaagaggaagaggaagaagaagaaggaggaggaatcatgtaaacagatccaattagtacatctgctaaagtaaagatttgttctactgtgcagagtccgctctgtgtatctgtcatattggaaaacatactgcattgggaaaaatattaaaatttgatcttctcagacttgttaggtaattataggagcttctcaatccttcttatgttgttctttttttactttttccttcctcatcttcatcatc

SEQ ID NO: 1888813 - DNA, 4001 bp, Homo sapiens
attgcacatttaaaaaaacataaaatgcaaaagacaaaaagagtttagggaaaaatactgcaatgtaactgacagatggttaatatccttaatggacaaagatgttaatatctctaatgtaatatccctaatgtacagtgtaactgacagactgttaatatccctaatgtacaatgtaatttgtacactgtttacaaattgatacgaaaaggaaaaatcaccctaaagaaaactggacaaaggatatgaacatttgcaaaagagaaaagccaaatggccaatagaccaaaacaatcctcaattgcacaaagtagtcagaaaaatacaaaattaaagacagcatcaacatccagcgctggaggggatttgccttaatgaacttaatgattttgctggtaggactaggaaactttataatcttttgggggaaggaatttggctatatctattcagtaatgaaacctgcagttaataataaaacttcaaaacataggaagcaaaaattgaatagcacaaggaaaacctgccagtacagtctctctctctcctctctctctttctccctgccacatcacccccagttgacaagctgaagggaattatcaggaaacacacattttaaaaggcccaacgcacaagcttgaaccaatagagccgcagagtacgataaatccaacaactagaagatacagtgttttcaatcaaggcacaaaaccatttttgaaagctggcctcgtacttgagccttaaggcaagtttcatcaaatttcaaactcaacgttcttgggccacaaggcaaatgggcttagaaatcactaacacagggattaacttcttgttcgtttgcggaaatgcaaaatggtgttaagacctgtaacattttctgcagtccctctaaattccttctttgaataatcgattcctagaacaggacgcgacggaccaagctgggtcaaactgccgacagctccattgggcagcatgtccacccctgatgaccaaatcccaccaaacgtgcagctggcactcggccgcctttgtttccttcccctagaataaaactccgctgctttcccacgttcctggagcagcagccggaataaagcgcccatggccttgccctttgagtctcggaggatgtttgccactccaacaatggacttttaaataattcaggggtcaaaaggcgtgtgtgggggggggagaaaagttacaaatcagcacttgaaaccgaacacaaacaaaaatcaaacaaatccgaactaatataacaaatcaaaactttgatctttagaagaaaacttcaaccttaatgcttccaggaggaaagcagaaaggataatgactgaattgtgaaaacgagccaaaatgttccaccactgatgtcacacacacctatgactccctgcacagatccacggtcccgggcgctgaatccccgcaaccctctgcgcccacagaggttaaactctcgctgctggcgacttccgcttcctggcctaaatctgacacgcacgactccccccgcggcaactgcacaggttcggtgacagccgagacgccgagtgtttcccgcagccggccggggtccaggtcggaaatgtagccagtggggccgccaggtgggctccagacgcggtgggcgcggggtcccggccgccgcgggagaggggtcgccgcgtcccacagagcagtgcggcggcaggggcgggggcgggtgcgtctcgcgacctgctcctgggggtgggggctgggcgatatttaaagaggcggaggctccccggtagggacggcctgaggccgagggcaccctgagggcggaagaggcaaagcgcctcgcccgccggggcctcggaggtgactaactcctagaggctgcggcggaggggagaagcctggtggtacattccatggcccagtgcctcggccactggaaaatcccacaggggtatatcgagtaggggaccgcgggctccgcggcagaaatgaccgcccttccaagatggcggctcccgtagagacactcccaaggagacagccatgttccttgcctgagagtcactgaaggaaattggaaagcccgcctctccttcgacgcacacgcgcacgcgcacgcacgcaccggcgcggtgtaagggcacccaccaggtgtaattgtgggcgagcggccgcttcggagctgacactaagcatgtgcagatcaagtccagaagcgccggggttcctcgaagcagttttcaggacttaaggctctgggagtgagtttaacagacggacttagggccacttaagcattgagataaatatggagatgttatgacatggatcaagcattaagataattatggggatgttatgacatggattttgtactcgaagatgctcagtaggatgagtaaggaggcttctctggggtcatttatagggaggtgcagaatgagtgattggggtttgtgggtgagtgatgggtcactagagaaagttgatgggtagcctgtgggatgagtgttggggacaccggagtgaataataagggggtctgtggggtgagtgatacagggtctctagggtgagtgataaggtatatgtgagatgagtgatgagaagtccgtgggggtaagaaagggctgtgcggggtgactactggaggtctgtgaggtgtgggatggggtttattgggtgattgaccaaggttcctgctgggtgagtgatgcgtttctttgggactagtgatggggggctgtggaatcagatatgcagcttcctggggtcagtgataggtggtctttaggtctgagatgaggttatttcaaaacctacttttgactttgttggtcctcctgtatctttgtttctctgtcattaatatctgcccttaacttcgttatttcttttctgttttttaattttgttctcatttttaaagtcctgaatttaatgcttatcttactatccagtcattttattttataatataaacattcagtttataaatttttctctaagaacactttagctccgtgtcacatgttttgttgtggttgctgctgttcggttttattttgttttgagacagggtctcactctgtcgcccagagatggagtgcagtggcacgatcatggctcactgcagcctcaacctcctgtgctcagtcgatcctcccaacttagcctcccaagtagctggaactataggcatgtgctgccacacccactaattttttattttgtgtagacacggggtctcactatgttgcccaggctgatttttgttttaaagatacaagaatctctctctgttgcctaggctggagtgcagtgaaaccatcatggctcattgcagcctcaacctcctaggctcaagtgaccctcccacctcagcctcccaagttgctaggactacaggcaggcttgcccagctaatttttaaattttttgtagagattggggtcttgctatgttgcccaggctggtcttgaactccttggcctcaagcaatcctcaagtagtcctcccacctcatcctcccaaagtgctggaactacaggcgtgagcatctgacccacaagttttgatatgtagcatctccactatagtttccttctaatgttttctaattgcagttgcaatgttcactcttaccactgggttatttagatatgagattttgatttcccaaaacgttgacatttttgttattgatttctaaattgtggttagaggctgtcacctgagtgatcattacgtgcaggaatgatgcttttaagttcaatacataccaccaaactactttccaaaacttttgtaaaattggaactcccaccagcaacatatgagaaggcttcttccaaaatcctgttccacattggatttttttttaatttaccccattctgagggccaaacacaagggtatctagtttgccttgatgtgcgttttcctgacaactagtgactgaacattatttcattcttattggccattgaaatatatatttaaac

SEQ ID NO: 1888814 - DNA, 4001 bp, Homo sapiens; identical to SEQ ID NO: 1888788

SEQ ID NO: 1888815 - DNA, 4001 bp, Homo sapiens; identical to SEQ ID NO: 1888789

SEQ ID NO: 1888816 - DNA, 4001 bp, Homo sapiens; identical to SEQ ID NO: 1888794

SEQ ID NO: 1888817 - DNA, 4001 bp, Homo sapiens; identical to SEQ ID NO: 1888795

SEQ ID NO: 1888818 - DNA, 4001 bp, Homo sapiens
cttgcctttctatttttttttcacagtagcaagaacatttattataaaaataggtggataaaataagtgtgctttaacttctggatatatgacaaatgctattgtgatgcagtttttcagtgcagacatgtggctctgcaatgatggggatgggccccctagtgtgatgtgcagccacaatactccatttgacaaacctcctggttcaaggcagagaggagacaccttattctatagaacaggatggggcttccaccctggggaccatacaagtggctcccataggcagccacgcctttctggcaagctgtggcatacccaggtgcaggctgggggaggggctggcacaccagccccagattgctctggcttcagcctgatggagacacaagactaggacctccctctgccagatgttcctgaccccatctccacctccagcctctagcctcgctgggagttccctgtgacccagcctgttccatagccaaagggagaccaaagtgaacgatcacagtgccccgcacctattctaggggacttggatctcagtagagcttaatccatggcatctgagagcacccaccctgtccctgagggcagctgtgccgggccagggggccgcaagggcatgggtggaatcttggtcactggcagcactcagccacgtgcctgaggagctcttcaccttgttcgtcactgaagcactgcaggcagtgagggcactgaagttccccctggcctctctgggctgcgccaggatgcccgccctctgcagggggttccaaccgcctgggacccagtcccaggcctccagccaccaggcacgataagctccactgcatcggtggccaagtacttggcagttttgctcccagcgtgaatccagccggcgtctggctcttgagaatcctgtctccaggacacctggtgcagcaaagaggtgaccttttcctccagttcctgaatcctaccttgagcctgttcccgatctgccctttctgacatgaagtcatccttgtaagcgagaatctgctattccagtatctgcacccattccagtgcagcatcccgtgccgtcctcgaggctgccagcttctacgtcaattctgcacagtcgtttattttctcttccaactatctgttgagccgggagatctccttcctcatcagctcgggctcatgggggggggggggtctgcagccccctgagctgtgcatggagccccctcatgtattcgtccctgctgacatcgtatagctgccacttggcatagaggtcttcaacgtgagtcaccttctgttttaacagtcgattttcttcctcagtaacactctggacagaggtgtccctacctgtatgttctgactttcaggacttctctcccccacgttcctttgtgcatgctgtcgttcatccagacacttggccagatgctgacacatgtgggcagtggaggtcagcgtcctccgcagctggtgggtctcattggccaaggagctgcacagaacgtcactggcggggtgggccggttcgccctccgccatgctcctccgcatcaggacgacttccttctctcgctggtgctgtggctggctcagcagctgctgcatctccctctctttcgcttctagtcgctcagtaagcctctcaatttcctggcgcatctgggcctccgcggcgccgttctcctgccgctgcagctgctcccggaagtgcgccacctgctccagcagcgcatccaccagggacggcgcagtgtacccctccagcgcggccagcctggcgtggaggcacgcgatgagggagtcgcgggcggccagctggtcctgcaggcgccgcagccgctacccgacctggtagcacaggccgcagagctctgcagctgcgcgcggggccccctcccggccgtccgaccccgggtccccgcacgtgactgtgggcctgcctgggaggccgcacggccgccggcaacttcggtgcccggaccctgtcggctctctatcttgagggagtttctcatcgcctcttggttccaatgaggtgtgggactttccagcttgtcccctctcccttagggaggctaagctgcaggctataaaactacttagcagcagtatagaaatggctcctctggcgcggtggctcatgcctataatcccagcactttgggaggccgcagcgggtggatcacttgaggtcaggagttccagaccagcctggccaacatggtgaaaccctgtctctactaaaaatacaaaaattagcttggcgtggtgatgtgtgcctgtaatcccagctactcgggaagctgaggcaggagaatcacttgaacccgggaggtggaggttacagtgagccaagatcatgccccactgcactgcagcctgggcaacagagcgagactgtctcaaaaaaaaaaaaaaaaaaaagaaagaaagaaagagagaaagaaaaagaaagaaagaaaaatgaaatgactcctcagcaacagggtgccccaacactcatgtttcttgtcatttggcctcttttgtttgggtgtcctattgtgggacaaggaatgcagggagctgacaccatgctgttgtttctttttctgtctatgtaagtaataaactgtctgaatctaatcagtgcttgttgtcctcttaccagccaaatctgtaagcctgctcaacacattctcacagggcaactctaaagaggaccaggtaacacctgcacgtgcagtggattacattataggagagaaaccctggacttagggaatctgaacctttcataatgggcagtaatcattcctgcccttcactccagagggaggctatttttattatagtggacagtaagcatgcttgcccttttctttggagggagacactacctctgtctttcaaggatgcactgtatacaaatatcctggaaaagatagtccggaacaaaggacagtacagtgccttacttgcaagatgtgcaagcacacaagacctatgaagaactgtctcccaacaaaggatacatgcagaaggagaaaaaactctcttaaacaaaaagaggcagagccggcagggaccgagcgggtgcctcagtctccttcccctcccctcgcctgtcctcgccatcttcttctcacagccggaccggaactatgtgatcccggaagttccgggtcctttggccctatatgatcccggaagttccggggcttttggacctctgtgattccggaagttccggggcgttccggggcgttctggggcctttggagcgtgggataagcagtaatggcggaggctgcagctcccggaacaacagccacaacatcgggagcaggagcagcagcggcggaggcggcggagacggcggcagcagtctccccgactccgatccccacagtcaccgccccgtccccgagggcgggcggaggggtcggcggcagcgacggcagcgacggtagtggcggcaggggcgacagtggcgcgtatgacggcagcggtgcgtgcggcggcagcgacgcgtgcgatggcagcggcgacagcagcggcgacagctggactaaacaggtcacttgtagatattttaagtatgggatttgtaaggaaggagataactgtcgctactcgcatgacctctctgaccgtctgtgtggtgtagtgtgcaagtattttcagcgagggtgctgtgtttatggagaccgctgcagatgtgaacatagcaagccattgaaacaggaagaagcaactgctacagagctaactacaaagtcatcccttgctgcttcctcaagtctctcatcaatagttggaccacttgttgaaatgaatacaaacgaagctgagtcaagaaattcaaattttgcaactgtagtagcaggttcagaggactgggcgaatgccattgagtttgttcctgggcaaccctactgtggccgtactgtgccttcctgcactgaagcacccctgcagggctcagtgaccaaggaagaatcagaggaaga

SEQ ID NO: 1888819 - DNA, 4001 bp, Homo sapiens
atttattggaagactgtgcaaatttttaatttatttatgtattcatttatttttattgtagagatggggtctccttatgttgcccaggctggtcttgaactcctgggctcaagcgctccaccccgctcagccttccaaagtgctgggattataggcgagagccactgtgcctcacctagtatgcaaagtttttacgcatttaacttctatcaatcagcctctcctgacctatttcctaggtgattgccttggatttctaggatgtcagttccttaagagaaagatagttttccactttctttgttaacaaaatacaccgataagttatcttccctctccaaattgtttaggacaatgaatatggcctcagggtctttacacggttctatgtggccaggagaaaacctgcgggactgagcgttccttccctgccactcaagaaagggagtgtgtgacctgggtcgctttaaaaaaaaaatttttttaaacatgctatgtatagaaaggaaacgtagctccagttcaatgaaaattttcacaaacggtgaatattgacctatttaaggaacagacagtgccaaaaagattctgacactgacttatgtatttagactctggccctgcagagctacatctcatccttgcatctacagggctgcttatggcaatcaccatgactctctgccttaggggctttttgtcttacagttggaacatgctggatatgacccaaggccaactggaggtcttgaactcctgggctcaagcgatccactcccctcagccttccaaagtgctgggattataggtgagagccactgtgcctgacctagtatgcaaagtttttatgcatttaacttctctcaatcagcctctcctggtctatttcctaggtgattgacttggatttctaggatgtcaattccttaaaagaaagacagttttccactttctttgttaataaaatacaccaatatgttctcttccctctccaaattgtttagaacactgaacacggcctcagggtgttcagaaccatgtaaagcatggttctacgggggctaggagaaaacctggaggagtgagccttccttccctgccactcaagaaagggagtgtgcgacctgggtcactttacagtaacgtcaatttcctccgttcttacataagactgagtgggcagccagtgtggaggcaagccacatctcataatagtcattttagttcctcatgagaaccacactacaaaaaacacaaagcgctgtcctcaccgttatccctctgacagcctggaaaatccatgtccagcatctagacaatacccacatgggtcacactttaatggcaacaatgtagttattctagatcagagacttggaagggaatatggcttgagacatatgagtatgtctcaaggaactggtccagttttagcataagattttccaaagcattaaaagcccacctgcatcccaggtccacagaataaaggtgtgaagctgcactgcattgagctttgggaggggctccactgcactgagctttgggagggtttagataagtgtgggagacacagcaatgtttaattgcagtgttcaatttctgcaactaaacactccatttacatgaattgtgtattataggaggagtacttgcagagtcatgaccaaagatggatgcaagattgagaagcaggtaggaagtttgacctggaactaattcctggattggaacatggcggacaaagttgctgatcactacccaggggacaaggcaagatgcaatgggtgctgtttatttacagaaaggagaaattttaatggattttatacaagccaggaacaagctctgaggccagggtagttgagggttctgtctaggaaggagacatgcagatggcacccagccacaggatatacccacctcctctcccagcaacttccactcaccttattcaggcttgaaccagaaggaagccaggcatggtggccagtgtttgaatcttgcagactgttggcactaggttctgaggacaattgtgagtcaccatagtgactatgacttcacttggtgctgaaccaatcaggccctgggactcaaggaaagagagggagtgccaagctgttactgtttaccctctggcccagatctttcttcagaagaaacctgagtggtctcacaggtaaaatatcctgatataccaagatcatagagcatccttttgtgccattaactaactaacctacctgataaaccccaaccctgtttggtaatggggggaggttatcagagagtcatttgttcaaactgatacagagacactatagagcagtgggtaaaagcagaagcttcagatacaggctttctcagttccaatctcacctctctgtcacttgggcaagtcttttagtctctcttgggaggtcaaaatagagaacacagtgagcatccacccctagccttggcactgtgctagattcaaatgaaatgcagaactgggtttttggggatgaggcagggccaggcatcagaggtgagtacaatctttaagccactgtgattacgttcccaggatggaaaatcagcaggatggaccttagaaacagaaactcggtagtacttgagaatgtccagtttatctcttacacaggggtttggagtaagattcatacctgcttcaccagtgattttcaaaggaggcaaatcctatttgaagctaaagtcacataaagagatttggaatgaggaaacaaattatagcagcctgcaagttgtagaatgaagaaatgcaaatgtaaagtactgaactttgtcatggatggatttaccaaagagaattactctgcataacatgaataatggagttcagaaggaagcccatatcccaggtacagggaaaactcagaggtgagaagaggcagctctgaaaaagagcaacatagaattgagttaaaattagtgtggatataagaattacaatgacatttgagctatgaggtagtgttttgagtacaatctaacaagcctgtgtgtgtcaggtaatgattagagggatgcaatagtgtgtctttaatgtcccgggtcccatcaggctgctgcacagccccatgtgtaagacagatagaagaaacaatatggttggtgcttcaaatcagatgatgacccaaagcaatctcctgtgactactgctggtagcagtgtgtgtgtgtatgggtgtgtgtgtgtgtgtgtgtgtgtgtgtgtggttttgtgccagtgaggaagaggttgccgggtacacttgattacctagaatacatcatctttttcagacttcctcggttgtgctgttttactgaggttgggtggagtcaacacatcatggataaagaagtccctaaaggcagtcccagggagcccgcactgaacatcaagaagtcagacaaatccttcaaacgcaagaagcccaccgaaaatgtgctgatctttttaatcaacagacaactgggcaggcacagaagtgacatcgacctgtcaagatgggtgtggatgctgtcataaagcaactctagggtggacatggccttggacaaaaagtcatgtggcttacatgctgaagcctgcccatatttttgagaaattaaatataattagaacaataaactcctcccatgtttgagtcattaaaacagagtctgtcatttcactccttgaggttggatgtgtgtttgctgacagggtgttcttgggttacactggaaggggcttctgttcatcctaacatgctgtgcaggggtgcttagacccaggggagagggtgagatcatgctgcacaccagatctctcccaccatcaatctgaaaaacactgcaaagtcaaagtgatgtagtacttggcatttgaggaccaaagactcttctccctagccattttgaagagactgccctggtgttcccctctaaaacccaatgcttgtcctagtgaaaagacattgtttaagagcagaccaacagttggcctgg

SEQ ID NO: 1888820 - DNA, 4001 bp, Homo sapiens
cctgtccccacttcacctttagctctcacttcttagtgaccaattgcccatataattcccatttcaggttttttggagtgagtatctgacttgctcagcacattccttggggacagagctttttgaatgggagccatctcacatgtcttgttggactatccgacggcttcccttcaggaaaattaactctctttgattagctgtggcctgaaggtttgtttgacatgccaaaaaaaaaaaaaaaaaaaagccaccaggacattctactttcctggggacaatgagcagggcaattgcctctagtaggctctgtggacatgatatctgcaatgttaaagcataccccacactcccaacccagctgttggtctgctcttaaacaatgtcttttcactaggacaagcattaggttttagaggggaacaccagggctgtctctccaaaatggctagggagaagagtctttgctctttgaatgccaagtactacatcactacttcacagtgtttttcagattgatggtgggggacatctggtgtgcagcatgatctcactctctgctccgtgtctgagcacccctgcactgtgcgttaggatgaacaaaagccccttccagtgtaacccaagtaagccctgtcagcaaacacatatccaatccaaaggagtgaaatgacagactgttttaatagctcaaacatgggaggagtttattgttctaattataattaatatctcagaattctgggcaggcctcagcacataagccacatgactctttgtccaaggccatgttcaccctggagttgctttatgacagcatccatatccaccttgacaggttgatgtcgcttctgtgcctgcccagttgtctgttgattaaaaagaccagcacattttgggtgggcttcttgcatttgaaggacttgtcaggcttcttgatgttcagtgcaagcttgttgggactggctttagggagttatttatccatgacgcagcggctccaaacaacctcaggaagatagctcaactaagaaagcctgaaaaagatgatgaattccaggtaatcaagtggacctgggacctcttcttcactgccacacacccacacagccacatatcaagcacacgcacacacacaaacacacacacactcggctaccagcagtagtcacaggcgattgctttgggccatcatctgatttgaaatgccaaccatatcatttattcaatctgtctcacacatggggctgtataggagcctgacgggacccggaacattaaggatacactgttgcatcaacccgatcttcatctgacacacacagacttgttagattgcactcaaagcactagcttaaactcaagtgttaatgtaattcttatatccacactaactttaactcaattttatgttgctcttttgcagagctgccttcttctcacctctgtctcctttgaatatcattggtgaagcaggtatggctcttactccaacccgcagtgtaagaaataaactgtacattctcaagcgatacctagtttctgtttctaaggcccatcctgctgagtttccatctggggaacgtaatctcagtgatttaaagattgtactcacctctgatacctgaccctgtctcaccctcaaaaatgctgtgtggtattttatttgaatctggcacaatgccaaggccaggggtggatgccaactgtgttctcaattttgggctcccaagagagattaaaggacttgcccaaggctacagagaggtgagactggaactgagaaagcctatatctgaagccttgtgctcctacccactcttctatagtgtctctgtatcactttgaacaaatgactctcccataccctcccctgattaccaaacagggttggggtttatcagataggttagttaggtaatggcacaaaaggatgctctatgatcttagtatatcaggatattttacctgtcaggccactcagattgctttttaagaaagatctggaccagagggtaaacagtaagaggaaacatactttggcactctctctctttccctgagtcccagggccttattggttcagtacaaagtgaagtcatggttactacggtgactcacaattgccctcagaacctagtgccaacagtatgcaagattcaaacactggccaccatccctggcttccttcgggttcaggactcaatagggtgagggaatttgctgggtgaggaagcaggtatatcctgtggctgggcgccatctgcgtctctttcctggatgaaacactcagctatcctggcctcagagcttcttcctggcttgtacaaaattccttcattaaaatttcttctttgtgtagataaacagcacccactgcatcttgccaggttccctgggtagtgatcagcaactttgtctgccatgttccaatcagggaattagtctcaggtcgaatttcccacttacttgtcaatctctgcatcctgccttggtcatgactctgcaattactccttctataatatataattcatgtaaatggagtgtttgtttagtcgcagaaattaaacactgcaatttgacactgctgtgtctcacacacctacccccctcccaaagctcagtgcagtggagctccatacttttattatgtgaacctaggatgcaggtgggcttttaatgctttggaaaatcttatgctaaaactggtccagttccttgagacacactcatatgtctcaagccgtagtcccttccaagtctctgatctagaataactatattgttgtcattaaagtgtgacccatgtgagtattgtctagatgcaggacatgattttccaggctgtccaagtgtattagtcagggttcccttagagggacagaactaataggagatatatatatatatatatatatatatatatatatatatatatatatgagtttattaagtattaacttacacgatcacaaggtcccacaataggctgtctgcaagctgaggagcaaggagagtcagtctgagtcccaaaattgaagaacctggagtctgatgttcgagggcaggaagcatccagcaggggagaaagatgtagactaggaggccaggcccgtctcaatagttcacatttctctgcctgctttatatttgctggcagccgattagattgcgcccaccagattaagggtgggtctgccttccccagcccacttattcaaatgctaatctcctttggcagcaccctgtagacacacctaggatcaacaccctgcatcctttaatccaatcaagttgacactcagtattaaccatcacaagtccgccccttgtcaacttgaacccatacacatctcctcagagcacacataatcttcaaataaagacaataataaggtcataattatgtctaacataatacaactatccttcatacaactggaaacgcaccaatccccaacccaaatattattacataaagttaacaatactaaatgctgatataaagtcaataaatcttatgtcacatgataaaggaaataaaataaagatattttcttagtacaagtgtatacatgcacaaacatgtttttaacaaaaggagaaaataatcatgacaactacagtcctcatttctgcagctggtcacgtggtcatagctggtattgatgactaccttcttctactacccattctgtattccctttgccttcagcaaacacctccgcaggtcatggtctttttcctggtggagcgactgaaaccttcgttcctgaagggtctgggtcatttgtagtcctgcctagattgggctgttgtagtttcccattggccttaatcacagggcatggtaatactaagagacgccctaatgaatctcctgtattccatgcatacactttttttttttttttttgagacagtcttgctcagtcacccaggctggagtgcacaatctcggctcattgcaacctctgcctcccgagttcaagcgcttct

SEQ ID NO: 1888821 - DNA, 4001 bp, Homo sapiens
cagctactcgggaggctgaggcaggagaatggcctaaacccaggaggtggagcttgcagtgagccgagatagtgccactgcactccagcctgggcgacagagcgagactccgcctcaaaaagaaaaaagaaaaagaaaaacacctagcatacataaagggctttaccatctcatttcattccatcaatgagcaaatgggggttaccctgacagcagttggagttcaattgcagggaagagagaacctctccagctattttaagcaagaagagatttaacacaggaaattaggtgctgacaaaattattggaagggtgcaggaggagcagtctctggactcccaaaacaacaccactgaactggtctgccaagactactgccatctctgccaccatcaggaaggtgaggcgtgagggagcctgcctctagaaatgtagatttccagagtgcactaccatagctgcgatccaaggatcaggaagccactgccaccacaacccctctcaacacccacaaagccggtaactgagcaaacactagaatgttgttacacacacacacacacacacacacacacacacacacacacctctagcaggtacagccagacttcacacgattgcatctaactggtgaaactgaattctcatccacagtcccagctgcaaaggtgtctgggaaatccagtttttagccttccagtctctgcagaccatgggggcaccataggacgaggttggaagggaggctgtgtgcctgccaccatgcctacattttgcagataaggaaactaaggttcagagaggttaaagaacacatccaagggcacatggctggtaaaccccaatctccctgactccaaaacccatactttcaatcattatattgagcaaacagccccattccatttggggctttggcagtcttggggcatctttcggccagagggcccacacgacagcagaagctagcacacaccttctgcatgctcaaaggctggacagtgggcactgaggcacaactgaggccccggggttgtgaatagcttatctcaggttgacagacagaggagactcataatcgaacccagggttcctaactccacgtatacttcctgacctcacctccctgccccccgacatcgacatctggaggagggggaatacacacgcaggctgtctctggagacatgtttcttcaacactcagctgccctgcatttttctaggtgaggtatctagcctccagcctctcctcccacgtttggagaatccttcatcttcctagttgcctcccaccagaaaagctaaaaatcccagataggggcactttcccagccgccattgcagttggtataggctcttaccttaggctcaatccatcagatgcccccatcaaaggcttggagttgggaactaataatacagagatgcaaggagcacagaagtccattctggtggatggtggcagtcgccaagtcaatggcattccagttcctggggcgacagggaccatatccacgtcccaaggtggcagtgtatgccagggagtcctggatttggcagcgaggtcatccctggattgcctgactttggctgtggtcctgactgctgtgcagcctccttggtcgactcaccaactgtattcttcagccctcttggttattttgtgagttccccaagatccttttgataaagtccttttctgcttaaataagccagaattgtttcctgttgcttgggagccaagagctccggctgttacagctgagccgctagattttgcctggcttccctcagcgagaccacacaggacactgctaattcttggatccctcaggcatcccagtccacttcctgggagctcccatatcccaggaccttggcctgctgatcttacattaagagaactggcctggtctgacagagggtcccacatccatcctggacagcttcatggtgatgttcctgggtcccatctcagactctccccatcaaaggctttctcattgaccatgacctttccctaggcacaagtgagagctcctccctccccgctgccccacacctccccacagtcaccagtttggcatccagaaaacatttcctccttctccagagaccttgctctttgtcagccttcactcctagctgaagcaaaacagctgtgggccctgctcagactccaaaaatgcaggctgggagctctggggcctctgcaagaataatggctgaaagcagtgccccaggttcaaggccccggctttgctgtcaagatagggtgtgaataaatggcttactctcttggggccttgaaaagagaggagagtgagggcctagccatagcaaagcgagcactgctcactgtcaacactgaactggaagcagggaaggactgtgaggagggcgttcctcacctaggtttggggcctggggtcaaaacagtgggcggaattgcccggggcgtcatccagccagaggcagataggagcaggaagggcttgggttcccacaggcagcactgtgggaccagctcaaatcagcttctggctgagtgtagacaggggtcaggggagggggcccatctcaggggacggcccagctggtaggcagaccggaagtccactgggatgacgacagcgtgctgtaaacttgggcttatctcaaggatgttgcctttgttctcgtgatccctcgctttcccaataaaagtacccttgaaaattgagctgaggcccagaagggcatgtgggtcatgaggcccacagagccaggctgctgctgctgcaggaggggtcagaagggatggggccaccaccgacctggctgggactctggaggaagcaggagtagctctctgcagtcaacatggaggagtaaagggcagggggagcccagcagaagaagggtgcttctctcccctctgttgggagcaggagaggtacgatgagaacatcacagagagtaccagggacacgggtgggctggagacaagatggaaaatcgcctaaccactaggctcaggcagtggaaccacaaacgccagcctcaaccaatacttgaggaaggagcgtggatctggagtcggacaggcttgggttcaaatcccagctataccagtcaatggctgtggcatccgaggcaagcctttgtggctggactgttacacaggcagccctcaaggagccgtacctcccacatcccatgtattgactctgagtttggccatgtgactttctttggctaatggaatattaatgagcatgacgaaaagcagaggaaggataattgctcacatattgaggcttgtcctcttggaacactccctcctgaagcccagctgccatacttgaagatgcccaagccagccagatgaaaaggtcgtgaagaagagagctcaggccacccagccaacagccagcaccaaggccctagtcatgtgagaggccttctttgaccttccagcccaatctagctgccaattgattgtatccccatgagagatccagctgacaccatatggaacccaagaaccacccaatcaatctacagaattatgagaaattatcattaattgtcattttaagccactaagatttggggtggtttttgcacagcaaaaaggaactgaaacactggtgaacctttctgaacctctgtggccccctccacaaaatggggtgataatatttgctgccaaaagttaggagtaaatttaagacacaataatgatcatttatggagtgcctgctgtgtttcaggtactgtgggagatgcggaatgtatgccatttaaagcagaactcagaggtgttaagtaacttgtccaaggtggcccagccagggtcagagctgggactctaacccagttctcttggattttaacaactgtgatctagcagggcatcctctatcggcaccggtgaatggatcaccttccaggaaagcaccaaactgtcacacctttctttcctttttttttttttttttttgagatggagtct

SEQ ID NO: 1888822 - DNA, 4001 bp, Homo sapiens
agctggaagacaaaaacagattttgggagggatctatacacctctaattcctggcactccataaggaaaacaggtgtctctaaaaattgaatctgtggtaccttttctgtttttcccaagagtcccaggccatcagaaattatcttagaacctctcatgcattcagtaagagtggcaaggcaaaatggagttcagtcgactgagaaaaaaaccttttcccagcaaaacaagatccaagaagagaaaaccataaagtccttttaaatatacccataacttggatatccacttttaattaagctgagtgctctttaagaaaatccttttaagtcccttattacccgactttagccatgccaagtggccaatatttctggcttttgaactttaccaaaggtaacctcccaactactccaagaaaggaaaatacaaggtggttcatggaggggaagagaattgacaaatggcaaaggtcacacagatatcaaaccagaaaggactcattccctaagccaggattgaacctgggccaccgctgtaaatggtggaggctgaaacaaagcattgccatgtggttacaggtcacactcccaataatttaaaacaagatggaggccttcagcaaagtttgctactgaccagtttgctgggcttgaacagtggacctatgtaatcctaggcctacatcccattctaaggtacccctctttccgacagaaccataaagaaaaatatgcaaaacacaccagattgagtatagcttaagaccaacctcaaaaatcctttttttttttaaatataattaaaactttacagagaatataaacagtgatagttgggatcctggcctagtcaaacgtcttctaaaaggaaaataaaaaagcctgtcacataaaagttaatgcctggcctagtggagaaaagaaaaaaacagcttaaagtgcagagttggaaagtgtattagtctgttttcacactgctgataaagacatatccaagactgggaagaaaaataggcttaatggattcacagttctatgtggttggggaggccttacaatcatggcagaaagtgaaaagcacctcttacatggtggcggcaagagaaaatgagaatcaggtgaaaggagtttccccttttaaaaccatcagatgttgtgagacttatttactaccatgaggccagtatgggagaaactgccctcatgattcaattatctcccacagggtcccacccacaacacttgggtattatgggaactacaatccaagatgagattttggtggggcacagccaaatcatatcagaaagatgcctggggaaagaactgcttgttcttatgtaaatggtttcttccaacagggagaaaaacttaattgctgtttcttccctggggctcagagctggacccctcagctaggggaggggaggccaggtgaggggaagacatcatggacgtgtggtggggaacactggccagcctgccacgtgggggccttgggccatgtgctccagccccacctgggaggggaggggagcagggagtcatgcctgcagccattggggtgggggtgaaacacccccaatattgtaaaagaaaggataggtgccagtacagtctcaaaaaaagaaggaaaatgccatagaaattctggattggactgagactgacactgctgacccctgagagcaacgaggtggggcacagtttaccctcagaagaagtccaaggacaaaaagtctcagaaacaaaagggacaaacattttttggtctgcattttactcacctttcctcatgtaccagtatgggtcaccaaaatgatccaggatctttcgctccttagttcagctaaaatcaggttcttgtcacaggaccaggaaaaattaggcatacggacacattgaaaggtgaggagagcggaatttattaaaagaaagctctgagcaaaaagaaaccaaaaggggtccttccaacacgcatccacctcacagattgaatgccaggccaccacacacacaacctgaagaggccacgctcctccccactgcataaggaacgaatccccagtggctccaccccatgcttccagtgagcaggccggcccccagtccattgtgggcatgtccagacaagggcctgggcaggttctctcatgtgcataaaagcatctgatgtaaacacttgtggggtggttgggagattctccagggatcctcccttagctgcctcctgcaactatcaccaggactaagaagtttcccataatttcagacaagtttcctttgaagattgaaaatacactgcgtattgttttggttcataggaggccgtgtcttacagtggctaagtatatgaactttggagaaaaaaaatgacttggattttaattctggttatgtcactttctaattatgtgactttgggcattgctatggtttgaatgtttgtgtgccctccaaaatttatgttgaaacataatccccaatgtaacagtgttaagatgtttggcctttgaaagtttcttaggccatgagagctttgccctcatgaatggattagtgccttgtaaaaggactggaaggaacaagctaggtccttttgcattttgctctctgccacatgtggcttcagcaagaaggcaccatcttggacacagagagagcaacactcacctaacactgaatctgctggcatcttgatcttggacttcccagcctccagaattgtgagaaataaatttttattatttatagattacccagtctgtggtattttgttatagcaagattaatggactatgacaggcatgttaactctcagatcctcagttttctcaggtagaatctttgaacctagtacctaccatataagaatgttgtaaagactaaattagatgatgcttggaaaagacctcacataggtgctcagtgtattagcactggagtctcttccttgtactttgaaatgtacctgctatggtttgaatgtttgttccctccaaaactcatatggcaatttaactgccactgttacagtattaagagatgaaactttaaagaagtgattagggcatgtgagctctgccctcgtaagtaggactaatacctttcatacaagggcaagtttggccctcttctttctcttttcccttcttccatgtgatggtgcagcaagaagacccttgccaaatggtggcacattgttattggacttcccagcctccagaactgggagccaatacatttctatttgctataaattactcagtctattagtcggtggttttctactatagcaacacaaacagactaagacaatcacttgtacatatcatgatgcaatatgtgagaaatgcatccaactatatcaatatgacacagcaattaggactaagagctaagatcatctgtgtcaacatgacttagttatttgttccaaaaaaaacctttcccagggatgataaaactgcaaaccaataaatagtttcagtcttcgcttcaggaaattcctacaagtcactttatctgagacaacagcctgctctcctgaaaaacaatttatatattaaacggtttatttaccaaggcgtgcttcaagaccttgtgtctaccaatcttaaaccattatgttacaaactgctcagtcttgatcaggataccacactgaaatccacaccttaaaccagaccccagatcctttaaatatcctcttttgatcttctgatttttctttttttttttttttttttgagacagagcctcgctttattgcccaggctgaagtgcagtggtgcactctcagctcactgcaacctccaccttccaaactcaagagattctcacgcctcagcctcccaagtagctgggattataggtgtgtgccaccatgccaggctaatttttatatttttagtagacatggggtttcaccctcttggccaggctggtcttgaactcctggcctcaagtgatccatccaccttggcctcccaaagtgct

SEQ ID NO: 1888823 - DNA, 4001 bp, Homo sapiens
cttgtggggaggatggctggtttagcacacttctcattctgtccccaccccctggaagcaatactgaggaaaaacaatgtgagccagtcagatcctgagaatgggatgtaaggctctctaacttgaggagaaatggactgagagaataagcagaaaaaagtaaatacctttgtgaacagaagccctcaactgccactcctagatttcaccagcggtaggaaggctcccaattctttccattttccaagacaccgtgctgagttgggcaaacaaaacaaaaccctcagagtaagacacacccttgcatggatggactagagcatgatacatgatatttagcaagatcttagaagaaaaggtagattgaaatcaacatcccacctgccctcaaattatcaccctcagaatgttagagcaaatagaacgtctgacaatgttttccataattgaaataaaaataaatggtttagcaatgatgctaacaatctacagggatagagggagagggaaaaggagggaagagaggagagagagagggagggaggaaggaaggaagaaagaaggaagaaaggagggaaaaagagaagaggggaggagggaaggaagaaaaagaagaaaagaaataaggaaatagaaagagaaagaaagaagaagaaagaaaaaagaaagaagaaaggaagaagaaagagaaagaaagaaaccatcatagtatacaaaagacagataaccatcacagactggaagaatgcataaaacaaggaacagatgcaactaaccctagagttctctaagccatagtaaaatttaaaatatgatttcaacttaacaaagtttcaaagaccagatgattggcaaccgaatatgatttttttttttttttaaaaaaggagattactgagctcagaaaagaaaccgagaactcaaagaaccacatggtggatcaaagaagtaaattaggaagagcaagatgcagaagagacatgcacacaaatcgaaacaagggcatggaggaaggactttagatggtcacgctaatgctgatccaacattaagataatttacatgccttaagtaaagagcctaataaatgggatagaaaaatatccacagatgccatatgtgaaaagtttccagaaataaaggaagaattgaacctgctcctcaaaacgacaaagtctctaccatcaaaaattgatgcagaacaatcaatattgagatatattctagttgtgttatggtacttcaaaaaaaattaaagaatttcttaaattctttaaattaaagacacctaagcacgtgcgcgtgcacacgcgcgtgtgcacacacacacacacacatcaattacttacaagggaacaaatttgttccacttaaatataaaagtaaaatgtaacatctccagaatgtttctgctcctgggtgagatgaagcatgcacactctactgaatgcagctataaaatgtggacacagtgcatgggccagctatttgaggactctgaaaagtaaatggaaggaggcagaccggggaaagactacaatttgaagcaccactgaaacagcagtgaatttgacattttcccccctttagtatccttggctcaacgtagcctgcaagttagaagtagacagtggtgtgaacagagagagctctggttctgacttgagaagagggaaaagggaatactaaccctcagcgatagttaagggaatccccagtttttctttcttcttttctttgtactttcatgttctagcccacaggcaatcctgtggcagcagtggtggtgacagaggcagtgacagtgacagtggcagccgccagggccttcaggtgattaaagctctgaaggaaagtaaccttcctctctgattgtaggtcccaaaggggtgcccgtgacttctttttcccctctttggtcttcctgccgaatcacaccagaggaaggcaaaggcacaggaagcgtgtggcagagaagagtcactaaagcgacagcaacagcttcatggctacaaggttgaaaaggggaagctgagggaagcagaaagtgctggggagattgcagggagggaggaagtgcttgggaaagtaaacccatgaagctgtgtatgagcttctgggcttaccccacaaggtgtgtatgtacagatgtgatcctgtacgacatacaaaggactttgagaactgcactgagtaagggatatagacctcgccagctccaagactgctgatcatgcttaacagaaccaaataccattgcaaaggctttgaaatggaactaacaataaaacccccggtcagaacatgtggcctgagcctaagtgactgggggaaaaatgagtggagacttggggatctgtgggaatatgacaaaagagctaccttttgtgtcatcatagtgacagaaggaaaggaggaagggggtgggactgaaaaagtattcaaataaataatggctggaagattctaaatacggcaaaagacacatgcctgtacatttaagaagctgagtgaaccccaaacagaataatcttaaagaaacctacaccaagaagcatcacagtcaaacttctgaaaactaaggacctaggaaaaaagtcccaaaagcagagagagagagaaaggaaaccttacctatacgggaaaaggaattagaatggcaatatatttctcattagaaaccatggaggccagaggaagtggcataacacttctcaagtggcgaaacaaaagaaccagaaccctgtctacaaagtgaaattaccttcaggaatgcaggggaaatcaagacattcgcagaagaaggaaaagtaagagagattgttgccatcagacctacccttacctctacgcttagagaagcttcctgcatgagattccactaggcatgtaaaatgccttggctgagcatgacctgctcaccaattctctctaatgtggacatttatcatgctgcccagtattgggaagatatgtcttagaatttctcacgagctcctagtacaagtctggtctagtttctgcctccagcccctccactgaaattgctcttgccaaggcccccagcaacacttgcattgcttaactcagtgaacaggttttaatgcttatcattttggaactcagcaagtgtttctgagtttgtcccttcttcttcagttcctctggcttccttctgcacctttgctctcatctctttctggcttgattatcttttagcgtgcccccccaccccgcaccaactttatctgtggagacactcctctagtcttcttccaatgatgttcctcttttgcttgccccttaaaagaagttgtccttggtccccttatatattctatgtgctctccctgaatggtctcaactacattcatggcttcaagaactaccctgatgagtcgcaaatctgtattttcagtattgacttcactcctgaactcctaagccaaatctccttcatctccatctggatatcccacaggcatttcaaatttcacacgctcaagactgaactcatcttcctacccatacgcagacctcctccttcatcccatttgtccaggaatgactccaaagtctgtggtcacctcactctatccctgtggagtcatgctagagctttttcacttccccatcgccactcccctcccctgccaaccaatgccccgcttttccaattggctaacttgtactcgttcttcaagcttcatattggacaccatttctccaggaacatttccccaaccccaaacgtctgtgtaaagtactcctcttatgtgttcctacagcactttcttagtccatctgtgttgctataaaggaatacctgaggctgggtaatttataaagaaaagaggtttatttggctcatgattctgcaggctgtacaggaaacatggtgctggcatctgcttggtttctggtgagggtctcaggctgcttccactcatggcataaggtgaaggggagccggcaagtgcagagatcacatgatgagagag

SEQ ID NO: 1888824 - DNA, 4001 bp, Homo sapiens
ttgtggggaggatggctggtttagcacacttctcattctgtccccaccccctggaagcaatactgaggaaaaacaatgtgagccagtcagatcctgagaatgggatgtaaggctctctaacttgaggagaaatggactgagagaataagcagaaaaaagtaaatacctttgtgaacagaagccctcaactgccactcctagatttcaccagcggtaggaaggctcccaattctttccattttccaagacaccgtgctgagttgggcaaacaaaacaaaaccctcagagtaagacacacccttgcatggatggactagagcatgatacatgatatttagcaagatcttagaagaaaaggtagattgaaatcaacatcccacctgccctcaaattatcaccctcagaatgttagagcaaatagaacgtctgacaatgttttccataattgaaataaaaataaatggtttagcaatgatgctaacaatctacagggatagagggagagggaaaaggagggaagagaggagagagagagggagggaggaaggaaggaagaaagaaggaagaaaggagggaaaaagagaagaggggaggagggaaggaagaaaaagaagaaaagaaataaggaaatagaaagagaaagaaagaagaagaaagaaaaaagaaagaagaaaggaagaagaaagagaaagaaagaaaccatcatagtatacaaaagacagataaccatcacagactggaagaatgcataaaacaaggaacagatgcaactaaccctagagttctctaagccatagtaaaatttaaaatatgatttcaacttaacaaagtttcaaagaccagatgattggcaaccgaatatgatttttttttttttttaaaaaaggagattactgagctcagaaaagaaaccgagaactcaaagaaccacatggtggatcaaagaagtaaattaggaagagcaagatgcagaagagacatgcacacaaatcgaaacaagggcatggaggaaggactttagatggtcacgctaatgctgatccaacattaagataatttacatgccttaagtaaagagcctaataaatgggatagaaaaatatccacagatgccatatgtgaaaagtttccagaaataaaggaagaattgaacctgctcctcaaaacgacaaagtctctaccatcaaaaattgatgcagaacaatcaatattgagatatattctagttgtgttatggtacttcaaaaaaaattaaagaatttcttaaattctttaaattaaagacacctaagcacgtgcgcgtgcacacgcgcgcgtgcacacacacacacacacacatcaattacttacaagggaacaaatttgttccacttaaatgtaaaagtaaaatgtaacatctccagaatgtttctgctcctgggtgagatgaagcatgcacactctactgaatgcagctataaaatgtggacacagtgcatgggccagctatttgaggactctgaaaagtaaatggaaggaggcagaccggggaaagactacaatttgaagcaccactgaaacagcagtgaatttgacattttcccccctttagtatccttggctcaacgtagcctgcaagttagaagtagacagtggtgtgaacagagagagctctggttctgacttgagaagagggaaaagggaatactaaccctcagcgatagttaagggaatccccagtttttctttcttcttttctttgtactttcatgttctagcccacaggcaatcctgtggcagcagtggtggtgacagaggcagtgacagtgacagtggcagccgccagggccttcaggtgattaaagctctgaaggaaagtaaccttcctctctgattgtaggtcccaaaggggtgcccgtgacttctttttcccctctttggtcttcctgccgaatcacaccagaggaaggcaaaggcacaggaagcgtgtggcagagaagagtcactaaagcgacagcaacagcttcatggctacaaggttgaaaaggggaagctgagggaagcagaaagtgctggggagattgcagggagggaggaagtgcttgggaaagtaaacccatgaagctgtgtatgagcttctgggcttaccccacaaggtgtgtatgtacagatgtgatcctgtacgacatacaaaggactttgagaactgcactgagtaagggatatagacctcgccagctccaagactgctgatcatgcttaacagaaccaaataccattgcaaaggctttgaaatggaactaacaataaaacccccggtcagaacatgtggcctgagcctaagtgactgggggaaaaatgagtggagacttggggatctgtgggaatatgacaaaagagctaccttttgtgtcatcatagtgacagaaggaaaggaggaagggggtgggactgaaaaagtattcaaataaataatggctggaagattctaaatacggcaaaagacacatgcctgtacatttaagaagctgagtgaaccccaaacagaataatcttaaagaaacctacaccaagaagcatcacagtcaaacttctgaaaactaaggacctaggaaaaaagtcccaaaagcagagagagagagaaaggaaaccttacctatacgggaaaaggaattagaatggcaatatatttctcattagaaaccatggaggccagaggaagtggcataacacttctcaagtggcgaaacaaaagaaccagaaccctgtctacaaagtgaaattaccttcaggaatgcaggggaaatcaagacattcgcagaagaaggaaaagtaagagagattgttgccatcagacctacccttacctctacgcttagagaagcttcctgcatgagattccactaggcatgtaaaatgccttggctgagcatgacctgctcaccaattctctctaatgtggacatttatcatgctgcccagtattgggaagatatgtcttagaatttctcacgagctcctagtacaagtctggtctagtttctgcctccagcccctccactgaaattgctcttgccaaggcccccagcaacacttgcattgcttaactcagtgaacaggttttaatgcttatcattttggaactcagcaagtgtttctgagtttgtcccttcttcttcagttcctctggcttccttctgcacctttgctctcatctctttctggcttgattatcttttagcgtgcccccccaccccgcaccaactttatctgtggagacactcctctagtcttcttccaatgatgttcctcttttgcttgccccttaaaagaagttgtccttggtccccttatatattctatgtgctctccctgaatggtctcaactacattcatggcttcaagaactaccctgatgagtcgcaaatctgtattttcagtattgacttcactcctgaactcctaagccaaatctccttcatctccatctggatatcccacaggcatttcaaatttcacacgctcaagactgaactcatcttcctacccatacgcagacctcctccttcatcccatttgtccaggaatgactccaaagtctgtggtcacctcactctatccctgtggagtcatgctagagctttttcacttccccatcgccactcccctcccctgccaaccaatgccccgcttttccaattggctaacttgtactcgttcttcaagcttcatattggacaccatttctccaggaacatttccccaaccccaaacgtctgtgtaaagtactcctcttatgtgttcctacagcactttcttagtccatctgtgttgctataaaggaatacctgaggctgggtaatttataaagaaaagaggtttatttggctcatgattctgcaggctgtacaggaaacatggtgctggcatctgcttggtttctggtgagggtctcaggctgcttccactcatggcataaggtgaaggggagccggcaagtgcagagatcacatgatgagaga

SEQ ID NO: 1888825 - DNA, 4001 bp, Homo sapiens
ctgtttggactcatgagtcataaggctattttaaatgaaaaaaaataaaataaatattataggatactttaaaaactcaatcataaagtgttacgtgttatgaaatcgaatgttatgactatattctgtgggaaacgaataaatgaagtcattcagaagttacattagattgacatagcagacataacaaaataatggcattctcataaaactgaaataatgaaacagttctctttttattctatttctcactcaaactagggttcttgttaaggaatattttctgtgttctttctcaggatgtctgataaattactatgatacttaaataaatgaagtacaatttttaaaatcttacagattaattttagtcagtactgacttttttctcaggaaatgtgtaaaagagctatcttctgctctaatataatcacaattatgtagatattcacagtaagaaacattgttatctctatgttctgttccctgaaaccctaccttctaccaaaagataagtacataaaactatctactaaaattattcccaaataacattctgctttctctctttttagtatttacatgctttaacatctcttttaaggtaacttacttgtaatttattccagagaaccgaggaagtggagatacagttcttctgggaagggccctctgaagggatgagctccagagattctgcacattgattttttgagggaagagaagaaatggttagccatgattttagggaagtttgaaatataatatataatagctcacattaattctacattctaatctttaaatatcaagatagctccaggactaatctttggaaatgacaaataaaggtaattgctaaagggaaaatgtttatatattatattgaccacatagcaagtctctttctatttctatctatctgtctattgtttgcctatctatctatctgtcgtcttcatcaccatcatcatctatctatatagggatatcgaatggcccactgaagagtaagtgcaaattgaagatacgtttcagtcaccactctaagcagtaagtgacctttccatccaaaagggttaaacttaaatcccccttcccattgtcatagtttgaaaaacacgtatctctagaggaaacacagaagacaaaaataactcaggcagcaaatacttaggttgaatacagagacctgcaacatcaaatagccacaacatattctagagggttttggagggaaactaatccatacaaatcaactgataaagacttggtacttaaagaccatactctgagtcaatacataagtaaagactaaattgcaagaatatgggcattgaagcaagaatttggcatttaaaacagacattaggcatataatattggatccaaacaagatctacacagaacctattcttgtagccacaccagttaagagtatgtacatatacaatatgtattgtatgtatgtctatgtatatacatattatgacatgatcattttgattgattgattttgaaatcaaatgtatttttacgtagccactttgataacagttatttttccatgaggaaatttgatgcagtctataaaataattcattgccctttgatttaaaaagattaaatagtttgtgaaattatataccatgaactactcctaagtttcatctaatgcccacaaccacccttgaggggtagagattcttagattggtaatgatatcaagggtaagatagaggttaagtattatatgaaaagacaaaccgatacaaacaggaaaaaaaagacagacccagtatgtgtcctctgttgtttagatactctttttttgtctttcagctctcctattctgcctcttttctgcaatcttctttataataaaacagaaaattacaataaaacaaagagaaaaccatgacttttgaagtgtgagttcaatgaagattggcaagaaagcttcacatgtgcctacggccagtccctctgacctttgcttcctgttgtcatagtgggcagaatcaagggttccagaccattccatgttcttaaaggggccacctttccttccatggtggacttaatttcattggtctaggcttctttctcttatcaggcaagaaagagtagtatatctgttgggatgaaacaaggcctatataaaatttggatttgggggacctaaacacagactctttagcttcagcagtgtggatgtgttagggaggattcctttggaagcagtaagggtctccaaatgtagagggatggctgtgtgcctccttttttttttttttttttttttttttaccagtttggaccgaatttaaacttattaatccaaacccagtccttgatccaactaggtagatatagaaaattgttctaagcaaaacttaaagagtagaaaattataaagtagatggcagggccaaagagtaacggcaatggtgagattatttttgagatccggtctcagaaagagtggcgatggtagtggctataagagtgtggcactccactcatatgtgcacatgagggtacagaaaaaaaaaaccagcagctagttagtgaaggcaggtttctctggaagtagtgaccatctcaaactcgggaggtagggcgaccatataatttcttgtccaaaccagaacacttatgagagtggcagtggcagcagttaacgtttacattaaaataacaggcagaagtgtgtaaagggacatttatagcactaaatgtccacaagagaaagcaggaaagatctaaaattgacaccctgacattacaattaaaagaactagagaagcaagagcaaacacattcaaaagctagcacacggcaagaaataactaagatcaagcagaactgaaggagatggagacacaaaaaaaccttcaaaacaccagtgaatccaggagctggttttttgaaaagatcaacaaaattggtagaccgctaacaagactagtaaagaagaaaagggagaagaatcaaatagacacaataaaaaatgatgaagaacagacaaacagagagccaaatcatgagtgaattcccattcacgattgctacaaagagaataaaatacctaggaatccaacttacaagggatgtgaaggacctcttcaaggagaactacaaaccactgctcaaagaaataaaagaggacgcaaacaaatggaagaatattccatgctcatggataggaagaatcaatattgtgaaaatggtcatactgcccaaggtaatttatagattcaatgccatccccatcaagctaccaatgactttcttcacagaattggaaaaagctactttaaagttcatatggaaccaaaaaagagcctgcattgccaagacaatcctaagccaaaagaacaaagctggaggcatcacactacctgacttcaagctatactacaaggcttcagtaaccaaaacagcatggtactggtaccaaaacagagagatagaccaatggaacagaaataacaccacacatcgacaaccatctgatctttgacaaacctgacaaaaacaagcaatggggaaaggattccctttttaataaatgttgctgggaaaactggctagccatatgcagaaagctgaaactggatcccttccttacaccttatacaaaaattaattcaagatggattaaatgttagacctaaaaccataaaaaccctagaagaaaacctaggcagtaccattcaggacataggcatgggcaaggacttcatgactaaaacaccaatagcaatggcaacaaaagccaaaattgacaaatgggatctaattcaactaaagagcttctgcacagcaaaaggaattaccatcagagtgaacaggcaacctacagaatgggagaaaaattttacaatctacacatgtgacaaagggctaatatccagaatctacaaagaactcaaacaaatttacaagaaaaaaacaaccccgtcaaaaagtgggcaaaggatatgaacagacacttc

SEQ ID NO: 1888826 - DNA, 4001 bp, Homo sapiens
gattctctgcctcagcctcctgagtagctgggattacaagcgcacgccaccatgcccagataatttttgtatttttagtagagggaggattttgttgtgttggccaggctggtcttgaacttctggcctcaagtgattcacccacctcggcctcccaaagtgctggaattacaggcatgagccaccgtgcctggcctcatccaacagcttttatcaaataatgtgtagtagagtttattctttccttttactctggtgtcaaatgaaaattttttagtttttgatttttttcaagatagagtctctctctgtcacccaggctagagttcagtggaatgatcatagctcactgctgcctcaacttcctggggctcaagtgatcctcccacctcagcctcctgagtaactgggactacaggtgcatgccaccatactgggctaatttttccatttttagtaggaatagggtctcactatattgcccaggctggtctcaaattcctgggctcaagagatccttatgcctgggcctcccaaggtgctggaatcacaggcataagccaccacatccgggtgaaaatttttgaatgtcgtgacagcaacattggattctcactctcagcctttgccaaatgaccccgtttgtaggatagggaggctgtgtccaaatacttgattgaaatacagttaacttaagaggactttgttaatttaatttataagactctttggaatttcagttcttgaaatcaatgcagaaatgcaaattacattgtagaaaattatctgccattatgctaaatcgtacagcattatatttatgaccagagttttctgtaaggagcaacagtaattaatccttcattctgagcaagaagtttcctgcaatttaagtttctgtgggcaaagaaaacatttgctggtggattaaaagaatctgtcagtttaacgtataggggatgttataattgagaccaaaatattaagaagcttatatatgtaagctgaatctcttatattatactatatgttagtaacaaagtttattttatggagaaataatttatcagaaaatgtcttgttttataaactaaggttcatttattgttttaaaaggtaaattaaaatgattaaattttggtgagaatgaccaaagatataaaataagtgaaatgatataacacaaataaaaaattgataatttctttgatatctaccgataaaaatgggtatactatgtatccctattcatataaattaagttgttttttgttggggttttcttttcgtggtttttatttttttgagacagagtctcactctgtcgcccaggctggagttcaatggcataatctctgctcactgcaacctctgcctcccagttcaagcaattatcctgcctcagcttcctgagtagctgggatacaggtgtgtgccaccacgcctggctaatttttgtatttttagtagagacggggtttaccatgttagccaggctggtctcaaactccagacctcaagtgatccacccagctcagcctctcaaagtgctgggattacaggtgtgagccataaattaagtataatttgaactggcaacatctaccctctttttttattagatgtattcatcattaaatggattaataccagtttattttatagatgaaagcaaacaaaaataggaagtgtttcgtgaacctggtaaataaaccttgaatatttttctttttaattgaggtattttctctttcttcatgtcatgagggaaattctcgattcaaacagaagaaatctatttgtcaaaggtattgcaatcataccttaaattctttaggcaacagagagttgaaggagactgtattagtccgttttcgcgctgctgataaacacataccagagactgggaagaaaaagaggtttcattggacttacagttccacatggatggggaggcctcagaatcatggtggaaggtgaaaggcacttcttatatggtggcagcaagggaaaatgaggaagaagcaaaactggaaacccctgaaaaacccttcagatctcgtgagacttattcactattatgagaatagcaccggaaagaccagcccccgtaattcaattacctccccctggctccttcccacaacacgtgggaattctgggagacacaatttgagttgagatttcactggggacacagccaaatcatatcagagaccaaaaattctccttaaattcacctccaattttagtttggaatttcaggaagatggttggtttgtgtttcattctctgacgttgtaggcttagtagcttcctcattattatagcctgggatacagatgccttaacctgctgtggctagttgaagatgtgttcacctttagagcaaaataattcttcctgaaatcaacctaatctcttcaaaatcaaatcttcaggaaaattatgctttacaggttttattgctagatcattcttcacctagttctctcatttatacattcaattagcagatttgtttttctttagagacagggtcttgctctgttgcccaggctggcattcagtggtgtgataatggctcactgcagacttcacttcccaggctcaagcgattctcctgcctcagcctcctgagtagttgagactacaggtgcatgccaccactcttagccaatattttaattttaatttttagtaaagtagttttatttttaggcaacatagcaacacctagtttttatttttaggttttgctgtatttcccaggttggagattatttctcttaagctttaagtctgtaatacagacatgtgggtctgttccttaactttctttaatacagagtctatctatatcttgtctatatatctctatattgctatagagatagattgctaattggtagatgataagtatataaatctggatagatacataattgatacatagatgatagacagatacatcctttagtctaatcaaaataagtggtacacatctgatttctaggtggaatagcattattttctggtgtcagagaaaccagtgatttaaaagtaagtatgaactttcaatatcttagtttcatgcagattatgttccttttacacttcttggttcatcagaaacatatgctgtgcgaggtggaaggatgtctgattacagggtataaaaccttcagggtgaaacatatttcaataccttattaatgtttcaagctccatgtctttttcatggctgatgcatttttgaatgttatgaaaagctttaatggaatagaagcacaaaagatggtaaacaaaattatcttgtatttgagagatacataaatcaaattttgtagatagaggttgaaaactgttactatttttagggagataatgttattggcttgcagtcatctttactcctgttcctaattatatcgttctttgagttggtactaatcctattgcccagctttattcaggaaattttgcacccagaaagcagttgggcatttatcttataattaatgaagctgtctttcatttgtgctacactttgaattagacagaagaaagcctgtagatgatttctgctagaggataagtagatagctttgacatggttcttaccctgtttgttgcatttaaaaagggcaggagtggttcagtgacaaatggaaataattgtcatgctgcactatgcacatgtatccaatataagaatcatttcctttgtaaatgtactgaaaaacaaaacacacacacacacacacacatacacacacacacacacacacacacacactgtattgatctgttctcatgctgctaataaagacatacccgagccggggtaatttatgaaggcaagaggtttaatagactcacagttccacatgtctggcgaggcctcacaatcatggcagaaggtgaatgaggaacaaaggcaagtcttacatggtggcaggtaaagagaccgtgtgcagggggactgccctttatgaaac

SEQ ID NO: 1888827 - DNA, 4001 bp, Homo sapiens
ctaagaatacaaaaattagccaggcgtggtggtgtgttcctgtaatcccaactactcaggaggctgaggcaggagaatcgcttgaacccgggaggcggaggttgcagtgagccaagatcacgccattgcactccagcctgggcaacagaatgagactccatctcaaacaaacaaacaaaaaaagaaattaaatttaaaaaattaactcaaaataaattgtaggcctaaatgtaagaaggaaaactaaaacactatattagtctgccacaacagaataccacagaataggtggcttaaacaacagaaatttattttctcacagttctggaggctggaagtccaagagcaaggctggtagggttggtttctggtgaggcctcatcttgcctttcagatggctaccctttctgtgtttttacatggccttttctctatgtgtgtgcactcctggtgtgtcttcctcttcttataaggacggcagccctattgggttagggccaccctcatgacctcatttatcttcttaattatctccttgaagtccctatctccaaatatagtcatattaggggttagggcttcaatatacaaatttttggggggaggacacaattcaatacataacaaacacttagagaaaaatacaggagtaaatgtttctggccttgggttaagaaaaagcctcttagatatggcacgaaaagcataagctactgaagaaaaaatagataaactggaatgtatcaaaattaagaacttttgtgcttcaaaggaccccatcaagaaactaaaaaagcaaccaatagtatagaagaaaatattcacaagtcatatatctgataaggtacctgtatctaaaagaactcgcagaacttaatataaaagataaataacctaattaaaaatggtcaaagaatcagaattgacattcctccaaaaagatgttcagataaccaataagtacatgaaaggatagtgaacatcattaattttgaaagaaatataggtccaaaccacaatgagataccacttcacacccatcaggatgactgtaatcaaaaagacagataataagtgttgctgaggatgtggagaaattggaaccctcatacactgctggtggaaatgtaaaatggtgcggctgccttggaaaagagtctggtagttccttaaaaggcttaaaaaagagataccatatgatctagcagtttcactcctaagtatatatatacccaagagaaatgaaaacatatgttcactcaaaagcttatacattaatgtttatagcagcattacttatgatagccataaatgaaaataacccaaatgtttatcaactgataattggataaataaaatatgatacatctgcacaatggaatttttaaattttttttcatgttactgctacctctcaagatggaatattttgggcaataaaaaatgaattacaggtacatgccacaacactgacaaaccttgaaaatattatgctaagtgaaagaacccagacataaaaggccacatattgtatgattccatttatatgaatgtcaactaaggcaaatcatagagacaagaagtagattagtgattacttaggctggggggcaactgtagaagggaagtggggagtgactgctaaggggcacaaggtttcttttggagtgatgacagtgttctaaaattgattgtggtgatggtcgcataactgtgcatacactaaaaaccgttgaatatatacttcttatgcatgctttttacatatctcaataaggttgtttctaaaaatgagagaaagaggcttaatgttatacagatgagtgcagaatataagtgcaatagaccactgatttagctccatttctggagccctgtatgccttagtattctttatatagtcacctttggtctaatccagccctatctcattttatgtgtactcacctctgcattctttgttcgacaagcagtgtctgggctctacaggaggcacaggatccagaggtcctccatttatgacctttcctcaagaggctgatccctttcctgtggttaacagaggtgtttaaaatcacttaataaattttcaaacatctactgttcaatgctatttaataccgttcagaatactacgtgagatacttttagtggctatgtgagataattttagaagatgcagatataaataagatgtagttctttccttaaaattcaagtacacatttgtctataatacagagtaaaaaaataagttcataaaagtaagaaaaacaaaattctgtgaatcacaaaataggagaatcaatgatagcatcacagaggacatagcatttgagctgagccttgaaagaacagtaggatttcaagatctggagagaagaaggccatttaaatggagaatataacaagcaaaaggacataaatggtagaaatgtctggcatttgtatgatatagctgtgatgcaagtctaacagatgaataataccagtttcatacttttgccttctctgtctctgctcaatcgcattgtcacacaaagatgacaagataaagctatgaagctgatgtcccatgtcactatcatctcttctctttaccggcgtctttccaagaagttagtgtcattacgattgcaagaaaaaacacactttgccactttgcttctgcagcttccctgtgctatggatgctattttgacagagccatggatcaggaggagtttgcaatctgataataccaatcatatagttctttttaattataaagttacacagttccatgatttaaaatatatgttaatagatcaaagatttagatgtggccaggcgcagtggctcaaacctgtaatcccagcactttgggaggcttaggcgggcggatcacaaggtcaggagttcaagaccagcctggccaacatggtgaaaccccttctttactaaacatacaaaaaaattagccgggcatggtggtgggtgcctgtaatcccagctactcaggaggctgagacaggagaatcacatgaacctaggaggcagaggttgcagtaagccaggatcatgccacagcactccagcctgggcaacagagcgagactctgtctcaaaaaaaaaaaaaaagtttctgataataaaaaaatactataaacaagtccaaattccaacaaactagcaaaaatacttgcaacacatatgatgtgcaacggactaatttccttaatatttgttaaaatatcaataatagagaaagaagttttttttaaagtttaatgctgagcaaatacacacacacaaacacacacacacagtatgtttgtgtgaaccacagaaaaggggaagcaatgacagcatcacagaggagatagcatttgagctggaacttgaaagaacagtgagatttcaagatatgggaaggaagggaaggccatatgaatggagattatgagcaaaaggacataagtggtagaaatatgtggcatttgtatggtatggctgtgatacaaatctaagagatgaataaggccagtttcatacttctgccttctctcagcctctgatttctattgaattgccagtctttctggcaatatatacttacaatgcatactttttatgtatctcaataaagtttttaaaaatgacagagaatgaggcttaatattatacagatggtgcatgtatatatatgtatataccaagaccatacatatgccattttatatatatatactaagaccatacatatgcaaagactggtatatgtatgtaccaggaagaccagcaattcagtaaaaatctgaaggacatgaccaaacagttcataggaaaagaaatatgaaacacagatagcttataaatatatcaaaagatttacaaccttactcataataaaaaactggaaattaaactacaaggggcttctatttcttatccactaaagtgagacaaagattaaaaattttttttaaagcctgtgtttgcaaagatgtagggaaacaggc

SEQ ID NO: 1888828 - DNA, 4001 bp, Homo sapiens
tcaggaagtcttgtacctcatcagaacctgggaggtgggaggctatgaaaatctgtctcatgaaacttgccaagggacataaggaggcaagtgggagatgatcttgaagcagctcctctcaggcctcccatcctttgtgctctggaaggatcacaggcattctaccaagactcagattagctgtggttcaagtctttgctcgagggaccattgtagatattgccaggtgactagggtgccagggtagagccattctcatgcagagactagctgaaggtccaggtaaattcctcagggcaaagcaaaaggaagtaaagtcagggtcttttgaagtacctcttctcttcttcccttctgctgaccttccattcatgtcctttcattcttctcagtattttgggagttgggggtggggatggggcagagattaaatgcataattaggatataaaataaattcagtctctgaaagattcagtaccaaggccagagaattccaaggcctgggtccttcgccatctctggcacttagtttttcaactaggaattaaagagtatgggtaatttctaaggtcccttctagccctaacagtatgaattaccataaatgcaaatttagtgaaggtagtgataggagcttgatgtgcatacctaccccaagaatgttgggacatcagggcagatcatcagaaatcctacgactgggacagagaagtggatgacattactgttactttaggaccatcatcagaatcccttttggggtgactatccttccccatacacacttcacttcacttggacctcccttgccaatccgctgctaccattacttttgagctttctgcttcagccctctcccccatcctgcttgataactgtacaaaatgcaaatactgttttagctagtggcgtctctgtttcaaatttcaggtcagtcatctgagagtcttcaatgtgtacatgcagggaattgccaaagatattctactttccaagggcagagtaggtcacttgatacagcaactaacaggggtcctgtgtgccaccttctccaattatgatcttcccaatccaaactcccacagatacatcccttaaaaggcaaaggagagagtcctggtacagccaccactccaagttattattccgccattcatttattcactcattcaacaaatattttactgatagtctgtttgtggcaggtgctggagctcagtgatgaataagacacataatccctgccctcatgagactcataatctagagagaagacagagtatcaacgaatgaagactttttgaattataggcgctatcatttattggttgcttacagtgtgcctggcactatgccaagcactcgagatgcagtgattcattcaatcctcccaggaatcctatgaggtaaagactattattggctccctcgaacatgaagagttaatcattccatgcgcccatgcccaggcctgcagattcctacatgcctggtgagctgctagcaagggtcttagccatggctgctttgggtacgaggtaaagtttaaggcccagcactgaggaaacaaatgacccagtgcagcagctcctgaagtcagggttaaccgggaaggccttccaggtctttgctagacacccccaaaactgcccccgaggcgattctcccatcctcttttttctcccctttccctccggcaccccactaccctccctttccagcccagcccctccctctgggccgcctcctctctgagtcatttccccttctccgccctaaagaccttgtctttctcttggaatcccttaccctctggcaggaagtagaggaagagcaaactggctttgggaaccaggtgagtcctttccccagcgaggatgagaaacgcctccccgcagtcctctgaccccccacgaattcggaaggacgggaaatcctgggagtccctccagccgtgtgtgggaggtgccacgccccacctggtgtctcctgggatgtgaggagggaagcagtggtcccgtcggaccggcctgtgtggctgcgaccggctcctgcgctgtgagctcagcgcgctggggagggacctagctgccgcgaagctgggggcgcgtggaagggtcggctccagaagccagccattgggaggagagagggggaaaagctccgagcggtgcgtgtggagggtgcaagcgcttgcaagtgcgtgcaagtgggctggtacgtgtgttgagaaggcatgagtgtgtatgaaggggtatagagaggtgcgtacgtggggaggcgcgcgtgtgcgggaacgcttgtgtgcgtgtgatgtgtgggggacatgcgaagatgtgatttacacaggtgcggacgtggcagtgtgcgagtggtgacatggagatgctttcgagcgtgaagactcaccgagaagcccgtgggggatgtgtgtgcgtgtgcacgtggaggtgtgtgtgaggggatatagatttattaatatatatgcgtgcgcgtggagtgcgtgcgtgcgtgggggtccgtacgtgggggtgcgtgcatgggggggtgcgtgtgttgggagtgcgtgcatggtggttgcatgggtggtggagaggggagagcgggaaggaaggcgggagccaggtgcatgcgcaactgagagtaaagatggccgagaagctcttgctggcagagcttaaagttaggattcttagcctctttttgtttttcttgaggtgggcagtaggatgcacatggcaccgtttgaaaataaggaaaactattgaccaattgaccacctcctttaaaaaaatgcccatggtttgcatgtaagcacagagggttcgtgaacccactgatggtcatctgtagaccctagattatggtttgaaaaggggagaagatccaaataaattacgttgatatccgccattgtgtcttttgattctatgagagaaaaaatggaacagcagctgtccttgggttggtgtggctttgaggctaggtttgctgctcctgttggacgtggtgccagcagagtggggagtgtaaaatgggatcactgcccagagtaagactgaggaagggtgcctcgtggccttcaggataaagctcggcccctcccaagcggatcactagccacaggttttgcgggttagttccttgataaagttggaaagtggagatttgtgttgctttcttgcgtgattcccgtccccgccctccgccctccgtcccccgccccgcgccccggccctgacagcctgtgggtgatgtcagggagtatgagtctaactaaggttgggacttcgttgggtaagtgactagaaggagagcagcagacttgggttctgatcccatctttacgattaactaactgtgtgacattaagcaattttctttatcttcttgtgcatcactttatttatttgtttatttatttactgagactgagactcgctctgtcacccagactggagtgcagtggcacaatctcggctcactgcagcctacgcctcccaggttcaagtgattctcctgtttcagcctcccaagtagctgggattacaggcgcgcaccaccacgcctggctaatttttgtatttgttgtagagatgggatggcgccatgttgtctaggcgggtttggagctcctgaccttaagcgatagccctgcttcagcctcccaaagtgctgggattataggcgtgaggcactgcacccagcctcactttcctcatttataaaatggtagttcacagggtagttggaagtttaaataagactaaataaattcccagaacatgggaagcctttaataaatggctgcatacctaggaataaataatatgtgtgtatatatatatatatatatatatatattatacacgtatatctatatatacatttgcagaaaagttaaagctaaaagttttattttgaaagaatgtcttaaactactgttttcttttggtttcttgtaggcatacctagttgtgctgtcagccaaagcccacc

SEQ ID NO: 1888829 - DNA, 4001 bp, Homo sapiens
acaaaagtcatgaagagtcattccatgaatgaggagatatagatagcaaataagcatagttaatgatgttcattgtaagggaaatgcaaattaaaaccacattgaagtatcactatgtatttgtcagaataaataatattagagacaacatcaaatgctagtaagggtgtggagagatggaatcacttatgtacattgttgtttggaatgtaaaatgatacaatcatactggaagggagtatggcagtttctttctttcctctttctttctttctttctttctttctttctttctttctttctttctttctttccttctttctttcttttggggtctccctctgtcacccaggctggagtgaagtggtgtgatcatggctcactgcggcctcaaactcctgggctcaatcgattctcccacctcagcctcccaagtagctgggaccacaggcatgggccaccatgctggctaatgttttgtattttttgtagagatggggttttgccatattgcccaggctggtttcgaactcctgtcctcaagtgatccacctgcctcggtctcccgaagtgctgggattacaggcatgagccactgcacctgactatggtttcttaaaaaactaaacatgcaactactatatgacccagcaatttcacagaatagttcctcttcccagagttgttttacaaggcataattgactgaaaaatactgcccataagacattaagtcacatgagtggactatacatggacattgagaattactaggcctgaaaattatgggtcccctatcttcttgggcttctctatttccatggtggccaagctctgtctctccccttggctggtctttgaaattcaggagctgatagctcctctgctgccatctgtctagcttgcctggcattgtgctgaagaagttgactttggctccctctgaaaccccaagtgggttatgtagctttctcctccagatctaaccagctacctaatggaagagttaccaaactcttgaggcaggcaggaaacatcccttttgcattcctgccagtcagactggctaggataggagtgggggtcaggatgctggatgggaccctcagctgggatccaacctgctctacttccacgggccatgtagtgatttgtggcttctctcactcctgcataggcctcctggcttgctttcaagataagagtcaaaggttgtgagccttcgccaatttttcctgggtaaggaaaactcatttcctttccttggcatttgtcccctttcctctctttctcactccaagtgtctcttttacagtctcttctgggaacttcctctctccaatctgtgacaccttctataattcctgcccttctattttcagtttatgttgatgcctgtagggtcatatgtgaaagccttttagaaactccagctaaaattatgcaattgcaaagcatcattgctgcttgcctgttagatgggcaaggtcctgtgctatatgctaactgaatctgcccacaagtagcgtacatctaatgggaagataactaatattaatacagagaaacatatgccaagagccacaagaacaataaagaaaatatgctatgaattcggatctgtttcactcccatcttccaggaatcaacaggccagacaggaggctttgccagaaagccttttcaaacctggcattctaagtttccatcatgtctgtattaatttcctattgccactctaataaactaacacaaatttagtggcttaaaataatgcagacttactatctgacagttctagaggccaaaagttttacaatcaagctgtcagtatgtattagtccattctcacattgctataaaaaaactacctgagactttataaagaaaagagatttaattgactcacagttctgcaggctatacaggagccatggctgggtaggcctcaggaaacttataatcatggcaaaatatgaaggggaagcaagcacaccttcacatggtgacaggagagagagtgaagggggaggtgctacacagttttaaacaaccagatctcgtgagaactcactaccatgagaacagcagggggggaatccacccccatgatccaatcacctcccaccaggtccctcccccaacactggggattacaattcaacatgagatttgagtagagacacagagccaaaccatatcacagcaggactgtgttccttctagaagccctaagggagaatttgttttcttgccatttccagaggccgtctgaatttcttgcttgtgactgtattctccatctacagagcacatcactgcaacctttgcttctgtcatcacatcttccctgactttgatcctcctgcctccctcttacagggacccctgtgattacactgggcccatctggataatccgggataatcttcccatctcaggatccttaactaatcccatctgcaaagtcctttttgccatgtaaggtaacatattcacagcttccaggggtttaagacatagacatcttcgaggattcattattctgtctaccacaatttcctatctctctacctggagaaaccctttttctcaatcatctacagactcctttccctgtggcatctcccataatgcatggctctaggctttctgtttatattcactgtgtggttatataagaaattttgccttttcaatttgttgtatttttgttttgcttttagtcagaggcccctcaggatgaaagaaactgtctcagtcttcagtggtatagagttctttatccttgaatgtaaactagcagaccctgggggattcctttcagtcctgatatgtctcagtttcattcacagtagaatttcaggaatgaagctgactaaatgtgttatctcagagatgtctgctcttaaagagggactccagcagatccagtaccttaagacattctctcaagggtcagttattcacaactgactaaaagttttgctatatcccttcaacctcttctgtactttagctaacacttttcttttgtttacattttaaaattgcaattatatctgaaaaatcatgcattaggtgtactagttaccttcttctaataaatgttaaacacaaagctactaaaatcccctcttaagtggtacaagtggtacataaaatgtgcctgttttgcgggaacacctgaaagtaatctcatgctgacactccaggcagtgtgggagaatgcaggagacactttcggtttgccctaaaaatcagagtatcagaggacaattgccacagaccctcaaaacacatctacccatctgcctgcatttttgcctatattctgccttccatcacatttctgtagatgacctatctgtacaacccttccacctgtactctggatctcattctttcttactacttcaaggtcattgttccagcaagccctctcctccatacacataatcgaactttccttcttattgggcaattcccatcggcatataggcatgtttttcttccataataaaaaattctcttgaccccacttttttttttttttgagatggagttttgctcttgttgcccaggctggagtgcagtggcacgatctcggctcaccacaacctccacctcccgggttcaagcgattctcctgcctcagcctcccaagtagctgggattacaggcgtgcaccaccatgcccaactaattttgtatttttagtagagacggggtttctccatgttggtcaggctggtcttcaactcccgacctcaggtgatctgcccacctcggcctcccaaaatactgggattacaggtgtgagccaccacacccggccttgaccccactttctgttctagctaatgcacccatttctccactcctgtctacagccaagttctttgaaagaattgtctacacttgccaactccaatttctctctcctctttctctcttgaacaaattcaaatgaggctatcaccccaaccactccacgtaagc

SEQ ID NO: 1888830 - DNA, 4001 bp, Homo sapiens
tatatatgtgactacgcagctgaaatatgtagcagtcacagtcagggatctctcagcatccacactcgttctgcctctagctcccttccgaaaccacggctgcttccagcacctgtgaatatattgcacttataaaccattggcagcagagggaatgttattgaatatttgtaatatctgggggacaacccaaaccaatttctttttctcttaaattatagcatcaaaaaggagccatttattcaaatacgtgtgttctgtttctaacagagcaaattcttaagagggcagaaatatggtttatttttatgatatacatattgcctagtttactgttggattttataaatagtaccctttgccatatcaaccctagagcaagggtgaactgacattccattctttcagagagaaatgctgtatttctctcctcctctccctccattcctctttgcaaacctggtcactcctttgataattcacgacccatctccaccattaagagtctaaaatcctagtcaagtaataactggggtggtgggggagagagggagagggagagggaaagggagaaggagagggagagagagagagagacttgaggaggttgcacttacactccggcagtttttccagaaatgagggaggcagtagttcttacttttgtgatgtcaacttgtagactgaaatgcatcaaagctcctcttcttcttcttgttgacgcgagggatgtgaaatgtgctctagaatatgcattcagcgtggtcctttgttctaggtatgagcttttctttttctaaagtttttcggtctcgctcaaggaaaggaaagcaatattttgagattcttttaaaggcaccttccaaagcatttcccacagaaaaataccttcacagcccaacactggttatttcagtaagaatcgagtccaattttttccaatatggctgtatacattgcaggcccccaaatttgtgctttcatagtcatcgttaatcaaataggcagaaacactgtatttagggaacctgtgtttcgtgggctagaagtgcattctgattaataaagatcatgttcattttgaatgcatcgctgttattcgtgtgcctcagagtcgcgggcttctgtcaggggtgcagcgggctcgggagtgcctgcagagcggtgggaagcagttctgagcgccctggtcgtcaacccgttttcagggggtgccgacactttctcccaagaagctcgatccgccgccttgtgcggctggaaagaatgaaccagactgtgacaggaacagagaatttatgtgattgacagggagtaccagggcacccgactccatcccgggtcaccacggctctgggatttgcacgagtttaccaccaccattaacagctatttgcgtaaggttgtttaccgcctgagagcgccacaagccgacagcgaagccactttgggaccccagccacgccccctctcccctctcccctctcacccctccctcccgccaaactaatgatttcggggctgccttcttgccggaccctcccattggctcctatcccaaccaatcagagccttgcaacagtttcacctggctcccgcttcccaaataaacaaacaaactgtcccgcgactgtgcccgctctgcaccctggcgccgcaggcaggcactgcttgcgctacgccccctcccaccacctcccaccaatggggccccgactgtggcgccctctcccgaccctgatagccggccgctttctcctccgcccctccaggccttctcccgccccctcatgccttcctggactccctgttagaatcagcttggccagagagcccgcctcctcctctcggtcctcccttggcccacaggcctggagattgaccgggaggatttggcacagccggaggtggctccgcctcccgagcccgccgtctcctcccttgctcacctctactggtggccgctcgcgcccctccattgcgccggtagcaggatccgcagcggccgccgcgtgaggctgtggtcacgtgttgttttgcccgctgtcgtgcgctcagagtggagtgggcgggggcgcgggccaaggcaggagggggctggggcgggcagacgagggtagacagcctcttcccccaaccctccctttcctgaattccccctcctcctcgctcaccttaaaaccatcgtgcatcaccatggcgagttgctccttcactcgcgaccaagcgacaagaagactaagaggtgcagcagcggcggcagcggcagctctagcagcagtggtgaccaccccgcttctttcctcgggaaccccgaccgcactcattgggaccgggtcgtcttgtccgggagccatgtggctctccacggccactggctcccggtcagactccgagtccgaagaggaggacctgcccgtcggggaggaagtctgcaaacgcggctacctgcggaaacagaagcatgggcacaggcgctacttcgtgctcaaactcgagactgctgacgccccagctcggctggaatactacgaaaatgccaggaagttccggcacagtgtccgcgccgcggcggctgcagcagcggcggccgcctctggcgccgcgatccccccgctcattccaccgcggcgcgtgatcaccctataccagtgcttttccgtgagccagcgagcagatgcaaggtaccgacacctcattgctcttttcacccaagacgaatacttcgcgatggtggccgagaacgagtcggagcaggaaagctggtacttgctgctcagccgcctcatcctcgagagcaagcgccgccgctgcggcacgctcggcgcgcagccggacggagagccggccgcgctggcggcggcagcggcggcggagccacccttctataaagatgtgtggcaggtaatagtcaaacccagggggctggggcacagaaaagagctgagcggcgtgttccggctgtgtctaaccgacgaggaggtcgtgtttgtgaggctgaacaccgaagtggccagcgtggtcgtccagctcctgagcatccgtcgctgtggacactcggagcagtatttcttcttggaagtaggcaggtccactgtcatcggtccgggagagctctggatgcaggtcgatgactgtgtggttgcccaaaacatgcatgagctgtttttggagaagatgagagccttgtgtgcagacgaatacagagcccgctgccgcagctacagcatcagcatcggcgcccacctgttaaccctgctgtccgctaggaggcacctgggcttggtgccgctcgagccgggaggctggctcagaaggtcccgctttgagcagttttgccacctcagggccatcggcgacggggaagacgagatgcttttcaccaggcgcttcgtaacacccagcgagcctgtggcccactccaggcgaggaagactgcacctgcccagagggcgcaggtcaaggagagcggtttcagtgccggccagcttttttcgccgcttagcacccagcccagcacgtccccggcaccctgcagaagccccgaacaatggagctcgcctgtcttctgaagtgtctggttctggctctggcaactttggggaggaaggcaatccccagggcaaagaagatcaggaaggaagcggaggtgactacatgcctatgaacaattggggctcaggaaatggccggggctcaggaggtggccagggctcaaatggccaaggctccagtagccatagctcgggaggaaaccagtgttcaggcgagggacagggatcccgaggtggtcagggctcaaatggccagggctcaggaggaaaccagtgctctagagatggccagggcaccgcaggtgggcacggttcaggtggtggccagagacctggaggtgggcatggctcaggtggtggccagggacctggagatggccatggctcaggtggtggcaagaactctggggggggcaaaggctcaggaagtgggaaaggatccgatgg

SEQ ID NO: 1888831 - DNA, 4001 bp, Homo sapiens
aataacaagaggaactttggaaactacagaaacacatgaaaattaaacaatatgctcctgaattaccagtgagtcaatgaaagtaagaagaaattttagaaatatcttaaaacaagtgataatggaaacacaacataacaaaacttatgagatgcagtgaaagcagtactaatacaaaagtttatggcaataagcaactacatcaaaaaagtaaaaaacttcaaatagacaatctaatgatacatcttaaataactagaaaagtaagagcaggccaaatctaaaattagtataagaaagggaataataaagatcagagaagaaataaatgaaattgaaataaaaaaatacaaaagataaatgaaacaaaaagttgtttttttttgaaaaggtaaacaaaattgacaaaactttagccagactaagaaaaaaacaaactcaggaggctgaggcaggagtttaacttggacctgggaggtcgaggcctcagtgagccattattttgccactgcactccagtctaggtaaagaagtgaaaacctgtctcaaaaaaaaaaaaaaaaaaaaaaaactctcccagcaaagaaaattccaggacctgggaaatacttccaaactcattctatgaggcctgtattactctgatacgaaaatgaaacaaagacacatcaaaagaagaaaattaaaggccaatatccctggtgaacattgatgcaaaagtcctcaacaaaatgctagcaaaccaaattcagcaaaacattaaaaaggtaattcaccatgaccaagtgtaatttgatccagggatgcaaggctggttcaatatacacagatcaatcaatgtgatacatcatatcaacagaaggaaggacaaccatacgatcattttgactgatgctaaaagagcatatgataaaattcaacatgcctttacagtaaaaactctcaaaaaactgggaataaaaggagcatagctcaacacaaaaaaggtatatatgacagacccacagcaatcagacaagagaaagaaagaaagggcatacaaaagggaaggaagatgtccaattatccttgtttgcatatgatatgatcttatatttggaaaaacataaagactccaccaaaaaactattagaactgattaaaaaattcagtaaagttgcaggatacaaaatcaacatagaaaatcattagtatttatatgtcaacagcaaacaatctgagaaagaaatcaagaaagtaaccccatttacaacagttacaaatgaaattaaatacctaggaattaatcaaagaagtgaaagatctatacaatgaaaactataaaacactgatataagaaactgaagagaacaccaagaaaaaaggaaagaaattctatgtttgtggattggaaaaatcaatattgttaaatgttcatactacccacagcaatctacagattcaatgcaatctccatcagaataccaatgacattcttcacagaaataaaaaatgacaatcataaaatttatatggaaccacaaaagacccagaatagccaaaactgtcctgaacaaaaataacaaaactggagaaatcacattacctgacttcaaattatactacagagctatggtaaccaaaacagcatgggactggcataaaaagagacacatagaccaatggaatagaatagagaaccgaaaaactaatccacatatgtacagtaaactcgttttcaacaaaggtgccaagaacgtgtactggaaaaaggacggtcttttcaataaatggggctaagaaaactggatatccatatgcaaaacaataaaactacacccctatctctcaccatatacaaaaattaaatcaaaatggattaaagacttaaatctaagtcctcaaactatgaaactactgcaagaaggcattggggaaactcaccaggactttggactaggcaaagatttcttgagtaataaataccccacaagcacaggtaaccaaagcaaaaatagacaaatggatcatgctaagttaaaaggcttctgctcagcaaaggaaacaatccacaaagtcaagagacaacccgtagaatgggagaaaatatttgcaaactatacttctggcaaaggattaataaccaaaatatgtaaggagctctaacaactctacagggaaaaaatgtaattacccaattacaaaatggacaaaaatgtgaatagacatttctcaaaagatgtacaaatggcaaccaggcatatgaaaacgtgttcaacatcattgatcatcagagaaatgtaaataaaatctacaataaaatataattttatcccaggtaaaattacttttatccaaaagagaggcaaaaactaatgctgccgaggctatagaaaaaaaaaaaagcataacccttgtacactgttggtgggaatgtaaattagtacaaccactatggagaacagtttggaggtaactcaagataacttacagtagaacttccacatgatccagcaatgccactgctgggtatatacttaaaggaaatcagtacatcaaagagatatctgtactcccatgattattgcagcactattcactgtagctaagatttgaaaacaacctatgcatccatcaacacatgaatgggcaaagaaaatgtggtacatatacagaatggagtactattcagccataaagataagatcctgtcgtttgcaacaacatggatgacctaggggtcattatgttaagtgaaataagcccagcccagaaagacaaaattcacttgttctcacttatttgtgggagctaaaaattaaaacaactgagctcatggagatacagagtggaataatggttaccggaggctgcaaagtgtagtggagggctggaaatggggatagttaatgtgtacaaaaatgtagttagaatgaataagatctattagttgatagcacaataagatctattagttgatatacacaataatttgttgtacatgtaaaagagtataattggattgtttataagacaaagaaataataaatgcttgaggtgatggatacgccatttatcccaatgtgattattacacctggtatgtctatcaatatatgtcatgtacccataaatgtatacacctaccatgtacccacaaaaatgaaaagtaaaatttaaaaaatgaagaaaaaatatttaaatactaaatgcaagaaaaaaactgtgtgttcctcagtggaattaactgtgccttatgaagtttgtttccaagcataagtgctactccaaatattcaatttttatttaataaatacatgacacgatttgcctaaatggaaagttgaaaaggatcctaattcagttccacaggcatctgatgtttacatcatcttaaactataaagaccacctaaccacaagcatatgtttatcaggatataaaagcaaggcagttaattgtgtggcaaagcattgcattttaaaaaggttagtattaatgcatgtggggcttaatacctaggtgatgggttgataggtgcagcaaaccaccatggcacatgtttacctttgtaacaaacctgcacatcctgcacatgtatctcagaagttaaaataaaataaaattttaaaaaggttagtattatattgaaagtgaggtcctaatatatatattagttttgcaccaacctaaatgtttctcttgctttactttctaagtcactccagattatcttttccttaccttaactttcagagctaaagaaaagaactaagtggagagcagtgattgtaacatcgaattcattcatttattcgttggacaaatatttattaaacacctgctatgtacaagactacaatagtaagaaaagagacacagttcctaactctataaaacttaccttatcatctagtaggagtaaaatataataaattacagagaaggagagacagagagaatagttactgagaagtgtgtaaaaactcatcagttagctgggcatggtgtcccatgcctgtag

SEQ ID NO: 1888832 - DNA, 4001 bp, Homo sapiens
aggacaacaaacggaacaaaaaataatcatgtttgatagaaaatttggaattcatttttgttgtatgcagatcagtggcagaaaagaagtgtggaaatgtgggtttggtgcaaattgggcagatttgaaagtcaaaattagatatttgtaatttgctaaacttcagaatatcatctaagtatcttttgttgttagttgtttgtttcctatataaatcatatcttaagtcaactttatttagtactaacttgtacatagaatccattattttagaagtacaatttgatatgttttgacaaatgtatacaactgtgtaatcaccaattcaataaagacaagaaacattcacatcactttttatggccttgtacacttaatccaaagtttttctgccatatacaggcaacctctactctgctttctgtccctataaattattttaactaatacagaaattaataataaaataatactattatgtactcttttcttaatggcctcattcactcaacttaacattttgaatattaatccaatttatgtagtgcaaatcagcagataatccctttttattcataaatagtatccgattgtatagatatgtcacaatttcaatatctgttcactggttgagggagatttagtttgtctccagatattgactactatgaatagagcttctaagaatatttgtgtaaaagcctttctattgacatatattcttgtgtcgcttgggtaaatacctaggagtaaaattgatgggtcatatagaaactgtattttaaattcatatgtaactgtcaagatgactcttagatggagtgtatcatgttagattcccacaagcagtatatgagagatccagttgctccacatccttgctagcccttagtactatcagtcttgtgaactgtagcttttccaatgagtatattgtagtctctaattaggatgttaatttttatttctctcatgattaataatgttgagcatttattgttgtgcttattaagcatttttactcttcatttgtgagataatgttcacaatttgccaatttttatgaagctatttatttatttgttttgctttgtaagaatctgttacatggtttggatataagtccgtggttagatacatgttctactaatagtatttttcccaatctatatttcgtcttttaattttattaataatgtctttcaaaactgaattttaaaaaaataataaagtcaatttatcatttttttgctttataattcctttttgtctcctacttaaaaaatctttgtctacttcaaagatttaggaatttactgaagcatttcatgacaggatattattttttttcataaatattatagttttgtcttttatcattaggtatttgacacatttgacatcttttttttttgtctatggcatggggtaagtcaaggttaatttttttacataagttatcaactcatttcagtgtggtttgttgaaaattcagttgttttctgtattagttttttattgatgctgtaacaaattcccacacatagcaacttaaaacaaggcaaatgtattctcttactcttctgtagtttagaaatatgacatagaacttaccagactagggtggggaggagccaagatggccgaataggaacagctcaggtctacagctcccagcgtgagccacgcagaagacaggtgatttctgcatttccatctgaggtactgggttcatctcactagggagtgccagacagtgggcgcaggtcagtgggtgcgcgcaccgtgtggaagcagggtgaggcattgcctcactcgggaagcgcaaggggtcagggagttccctttcctagtcaaagaaaggggtgacagaccgcaaaatcgggtcactcccacccgaatactgcgcttttccgacaggcttaaaaaacggcacaccgggagaatatatcccgcacctggctcggagggtcctacgcccacggagtctcgctgattgctagcacagcagtctgagatcaaactgcaaggcggcagcgaggctgggggaggggcgcccgccattgcccaggcttgcttaggtaaacaaagcagccaggaagctcgaactgggtggagcccaccacagctcaaggaggcctgcctgcctccgtaggctccacctctgggggcagggcacagacaaacaaaaagacagcagtaacctctgcagacttaaatgtccctgtctgacagctttgaagagagcagtagttctcccagcacgcagctggagatctgagaacgggcagactgcctcctcaagtgggtccctgacccctgacccctgagcagcctaactgggaggcacccgccagcaggggcacactgacacctcacacggcagggtattccaacagacctgcagctgagggtcctctctgttagaaggaaaactaacaaacagaaaggacatccacaccaaaaacccatctgtacatcaccatcatcaaagaccaaaagtagataaaaccacaaagatggggaaaaaacagaacagaaaaactggaaactctaaaaagcagagcacctctcctcctccaaaggaacgcagttcctcaccagcaacggaacaaagctggacggagaacgactttgacgagctgagagaaggcttcagacgatcaaattactctgagctacgggaggacattcaaaccaaaggcaaagaagttgaaaactttcaaaaaaatttagaagaatatataactagaataaccaatacagagaagtgcttaaaggagctgatggagctgaaaaccaaggctcgagaactacgtgaagaatgcagaagcctcaggagccgatgcgatcaactggaagaaagggtatcagcaatggaagatgaaatgaatgaaatgaagcgagaagggaagtttagacaaaaaagaataaaaagaaatgagcaaagcctccaagaaatgtgggactatgtgaaaagaccaaatctacgtctgattggtgtacctgaaagtgatggggagaatggaaccaagttggaaaacactctgcaggatattatccaggagaacttccccaatctagcaaggcaggccaacgttcagattcaggaaatacagagaacgccacaaagatactcctcgagaagagcaactccaagacacataattgtcagattcaccaaagttgaaatgaaggaaaaaatgttaagggcagccagagagaaaggtcgggttaccctcaaagggaagcccatcagactaacagtggatctctcggcagaaaccctacaagccagaagagagtgggggccaatattcaacattcttaaagaaaagaattttcaacccagaatttcatatccagccaaactaagcttcataagtgaaggagaaataaaatactttacagacaagcaagtgctgagagattttgtcaccaccacgcctgccctaaaagagctcctgaaggaagtgctaaaaatggaaaggaacaaccggtaccagccgctgcaaaatcatgccaaaatgtaaagaccatcgaggctaggaagaaactgcatcaactaacgagcaaaataaccagctaacatcttcatgacaggatcaaattcacacataacaatattaactttaaatgtaaatggactaagtgctccaattaaaagacacagactggcaaattggataaagagtcaagacccatcagtgtgctgtattcaggaaacccatctcacgtacagagacacacataggctcaaaataaaaggatggaggaagatctaccaagcaaatggaaaacaaaaaaaggcaggggttgcaatcctagtctctgataagacagactttaaaccaacaaagatcaaaagagacaaagaaggccattacataatggtaaagggatcaattcaagaagaagagctaactatcctaaatatatatgcacccaatacaggagcacccagattcataaagcaagtcctgagtgacctacaaagagac

SEQ ID NO: 1888833 - DNA, 4001 bp, Homo sapiens
tacattttttcccactatcatccatttggtagtataatctagtcatgttaatctttaagtttcttatgtctgcattgcagctctctctctcacacaagccttaacacatgctagccttgaataacctttcctcctctccccttacaccccgcttccatccttttaatctggcttattcttaacttattcttaacttcaggtgtcttttagatataccttcccctagggagctgtctctgataatttaagactgggttgtgtatctctcctgtgtacttccttagcctgcaacatttcttcatcacaatacttatgatagtgtattttaattatttattgagttgtttatattacccaccagattgtaggctctttgacatcaaagaccctggttatcttgttcatcattgcatccttaacatttacaagagattagtgcataatgtgaatgttgaatgaatgaataaatgagtctcattatactataatgttaataaaggtaagattagaaaaaaaacccagcataatcctctaaaatatagtgagaattaagtttagtaaaacctacatttttggtggccattttttttatttttcccagatattgtgtttaaaagtattctacccaagtctcagataacatatcataatatataatttataaacattttcaacacatttatttatgaaaataagatatcattcttaagtgatttgttcaagggttggggaaatcagtttttattatattaagttacctattatttactcatgtattgttatggtctattcagggataacatgtaagatatacttaaagttattcattttgatctgataacagtgtatatattatttttaatgtgagtaaatacaaacagttgatcataagattgaccaagaacactctagtctttgagttttacaattaaattttacacatacctgtcttacatattttatttatcacttacagaagtgcctaatatcagggtaatatttttctttctttttttttttgagacggagtctcgctctgttgcccaggctggagtgcagtgatgtgatctcagctcactgcaagctccgcctcccaggttcatgccattctcctgcctcagcctcccgagtagctgggactacaggtgcccaccaccatgcccggctaattttttgtatttttagtagagatggggtttcaccatgttagccaagatggtctcgatctcctgaccttgtgatctgcctgcctcagcctcccaaagtgctgggattacaggcgtgagccaccacacctggcccagggtaatatttttcatttacataattccgagaacataaagcagtaaaacattttatgtgtgctctaaaatatagatgttaaaatcatatagaaattacatataattcatattattaagactctttagaattagcattgcaaaattgattatttttttcctaatctacctaactaatgctttgaaaaaagcaaccctcttctctgtggctatctaggttcgtcaaaactcagaaatgacaactatcatttcaatttcataagaaagtgcctcatattgatggaaggtatccatttcaacttagtagaaatttccattaccaacttcatcaaaaatattttctgcaaatcctctccaagttctgctatccaatttttcattagatgataaagctaagtgcttttttaaatctccaaaaactctacttctttaaagctaacttaatttctagaaaaataatatactttttgaaaattgctctttaatgtcataactttaaatcccattcccaatagaagaaagaattaaaacaagttttctaataataaacatgtgtactccattttgtagcattatacctaccattatagataagttaaacaaccaacaaacccacatagacatatgtaaggtgcaaaaactcatatgtatggacatacctttgctcttgtatcaaacttttctgccacagtgggtttacaggagatattgagaacagttattcccccaaatggaactattccttgcgatggaataatattaatgataggcaaaagactctgactacaaacctgtaattgaaaatttgcagaaatgatacattattctttaaaattatagtttcaaagctttcataggaaagcctccatgccactacctagagagaagatctccaggcacaggacataaaatgattttgtaatagtgtttgaaaataccaaaggtacaaatagtttggactaaaacaagaaactgcaaccctatccaagaaaacagaacctttggtagtgacaacttccaattcaaataggatgctgaagtttattatctggagtgctttcaagacagcaaaatttataaagatgatatttctgttcgagaagatgacaacattctagatactacttttgagagtctgtctttccctgatcctaaaaactcaaaataatgttagtgaggaggtaggatgatgaagtaatctcttgtttatttccttgacagaaagcctaatgtctaagatatcattttgatcttcagaaaacttctaagtaacttatcaattatttattctatggattttcataggccaatttaaacctatttaccatgctttaagctagaataatttaaaggaaaaatggccaagaggtttttgggactaaaggaacaaatagactatgtaggtaagaattaattctaaagaagcagagtagaaaagatcatcctcatttttcagttttgctaaagacttaatttgggcagaaaaaaacacattaatgtaaagcttgaatggaaaatctcaaatgctaaactctattactattactgggaggggaagccggtcttactacatttttcaatttaaaaaaaaaaatcaccactttgctcctctttccatttaaatcaggagcaacaaccataaacatactctctccagaatggccttgatctagttcccaggtgctaccatcatggccctgattacagactgaaatgaaaaggaaaatcatataactaaatatggagtgtaacattaattaataatgtatattttaaaacataaacatctattttttcaataaaaccaaataacagaaagaataaaagggaaaagagaagaaacagggaggctaaggaaggtagtgagaaaaattgttcttacaagaaattaagaggacaaactagatgaactatactcaggtaaatttaatgtgaagtatctaaaaattagcaaaagtgaagaataaagtattaacttcacagcattatgaccatgtcatctgatccaaataagaaattaccaacatcctatgttaccttgaaataagcatggttttgtcctacattttgaagaatggctttcctccaagttgttaaaccttgagggcaattactaaagagtatccttggctgcaaaagtaaaaccttggtgcgaccaagctaataacgagaggaggaaagaaaaaacacaattgaattaatggtaaataaaatactttgtttaattgttttggtcacaaaaatattctaattttgaatatatattaaccaaagatataaatactaaaagaaaataaaaattataatactcctatattctttattcagtatgttctaacatgcaaaataaatcacaaatcaggactttatatgctagttttgatgaaaaagtacccaaggtataataattttattttccaaaatttaaactaaatctgtgataatctagttaagatggggtaataacatcacaggagatattttatttagatattttggctgtaatagtaactaaatatttagatatttagaatttagatatttagatatttttaggtaaaatatctagatactggtggtaatcataaataatggggataatagtaataataatattattgtgtacccagtattaaccagatatatgattaatttttacttacatttccactatggtctactagtccagaaagtgctcag

SEQ ID NO: 1888834 - DNA, 4001 bp, Homo sapiens
ttagcaaagtctaatatagtataagatgtaattataggcccagtaatttttactgggcctcctagttggatcttgaagctcatactaagcttttattcaaccagcttgactgggctgctgcagtagctcattaactagcctccctgcttccatccttacccctttagtgtccattctctaagcagcagccaaagtgaccctgctaaagcttctactagatcacttctctgcttgaagccttccagtgtcttcccatgttgctgagagtaaagctgaagtctcacagttaattgtctttaagacctccctggtgtgaccctagcttcttccttgacttcacctcctgccactttcccctgcacactgagctccagtcacaaagacctctgatgttcttgaaatctgcctacatcctttacacttgctgctccctctccctaggaaaacttcttcacccagagatccgcacaactttcatcacttctttccggtctttgctcaaacgtcaccttctcagagaggccctccttatagaaaatccctctccccaccccataattctctatcctccatttcttgcttattataagtcatgacatttatcactatttttgtcttccttctattgtcacctcatataatacaatatttattagcttacattcaaaatctagaatagtgtttggcatatagtaggtattcaataaacaatgattgaagcaagattcttgttgttttggacatgaattgttgtttaccagaggactgcctaatcctgtactgtgtaattgtttcaggggacatttgggtctagtcatagcattttacattctgttaaatcccttattgaaaaggaagatacactacgtctttggatatatttttttactattgtattctatcagagaggagatagggcaggcagcatctgacttattcctagtgaattcctaatggaccagagatatatttttccaagtgcaaatcacattctaaaaattttactttaggccgggtgcggtggctcatgcctgtaatcccagcactttgggaggccgaggcgggcagatcacgaggtcagaagatcgagaccatcctggctaacacagtgaaaccccgtctctattaaaaatacaaaaatattagctgcgcatggtggcgggcgcctgtagtcccagctactcgggaggccgaggcaggagaatggcgtgaacctgggaggcggagcttgcagtgagcggagatcgcgccgctgcactccagcctgggtgacaaagcgagactccgtctcaaaaaaaaaaaaatttactttatagctttactaggtgttaaggtcaaacttccctttaccattatgaaatccaccccctcctccaatctttttgaaacatagaacatctttcctgcatctttggtcttctaattttttctgattctccaatttttctcaaagacaatacattcctttagaccaattgtttttctgggtctcatctcctgagtcttcagtgaattctttccattctcggaatgcgctcagagagaacgcttctggggaactatcagaacattgatatcttctcaaaaaagtgtgaacaaaaattccaataattcagtcagtgcttgcagttggccattctgggctagtttttctacagaatcactgtagactattctcccttttcccttgcttctcaaagtttcttggcttctagcattttcctgcctgcctcactgctgtcccaggctccttgttcatttattcttagctttcagattttatatcttgctttctccatttcagtttgatcaagttaatcgtattttctgcctcagcgaattgaatttggactactcccattttttccactaaacccacgtgtttcatttaggaacttacctgtgtagaaatttatttccgcttttattacagtaacatttcaaccttttcttcagatactcgtgtgctgtcctctttcttgcctgttttttctcctattgtgtgcaaggagtgagtggatctaggtttcctggaatgtgggaggagcttttctgaaatttctgcactgattttttttttttaccctcatctcactttcatttaaaattctttattattattacttatatttgtgagctgctttatttttttaaaaggagagtatattttgattcacatcaagggaagtaagagtccacctctttttgatgcagtgtaactaaatctgtcatcttcactgaggcacaaggccctctgtcacattttatctatgcctccactattgcttttagactgttgactacaagttagttaagagcctatactctagaatcagaatacatagatccatgttctgattccatcatttgttagctgagtgagatatagcaatttacttaaacttagtttcataattcataaaatggtgataaaatatttgcctataggtttcttgtgatgctcaaatgagatattataacacaaagcactttgaatagttacttataattgtttttttcctattctacaataatatacacaactttggaataaggaaaagcagtggacatttttttaaaggcttgattattgcaatgtcacctgaacctggaagacttgtttttctgggtgaagaaatattttctctgtgtcagagtttcacaatcatcgtcaggtaggcccttgaaccctgccatttaaagtgctcctctctttgatctgtggcactcatacatacactctggcaatgaggacactgagctcgcttctgaaatttgacaagataaccactaaaatctctttgaattctatgttgttgtgatcccatggctacagaggatcaggagttgacatagatactctttggatttcataccatgtggaggctttcttacttccacgtgaccttgactgagttttgaataggtaagtgaaggagaaggaggcactcaaagaagtcagccacagaaccagtgtgagaaataggaaatgagcttttttaagttttgcaaaggcagatcaggagagttgacctgtggagtggagagtagtcataattttaaaaaatggccatggaaattaaaactgatcagaaatggctgggcacagtggctcacgcctgtaatcctagcactttgggaggccgagttgggcagatcacaaggtcaggagatagagaccgtcctgactaacacggtgaaaccccgtctctattaaaaatacaaaaacttagctgggcgtggtggtgggcacctgtagtcccagctactcgggaggctgaggcaggagaatggcgtgaacctgggaggcagagcttgcagtgagccgagatcgcgccactgtgctccagcctgggcgacagaccgagactcagtctcaaaaaaaaaaaaaaaaaaaaaactgatcagaaatatgaattccataaagacaagggcaaagtcatgtatttggaagggaaaatgttgcccaagtagagagtttctgggaatatgatcttgaaataaaaataaatgtgagataacctattaatgaaattgtctgaaaaccatacaaacaccaacattatcttcatgatccctagttctagacctctttggtcactgtaaaattataacattttccgtgtatctttaacagctttctaggaaaatattaaccaaaagtaccggttttgatttggccataaagtgacaggagaggtaaggttctctaggattaaagaataacgtattcttatttgattcactttaaaaaattattctaaaatctgttacatatctgtcctctccaggatgaactttatattggctcagcagattgtttactgtgttcttcttctttttctttttttggtctttcctgctcagcgcccaacccaagttcaaaggctgataagagagaaaatctcatgaggaggttttagtctagggaaagtcattcagtggatgtgatcttggctcacaggggacgatgtcaagctcttcctggctccttctcagcc

SEQ ID NO: 1888835 - DNA, 4001 bp, Homo sapiens
cgtgttagccaggatggtcttgatctcctgacctcgtgatccgcccgcctcggcctcccaaagtgctgggattacaggcatgagccaaagtgcccggccctttttttttttcttttttttgagatggagtttcgctcttgttgctcaggctggagtgcaatggcacgatctcggctcactgcaacctccgcctcccaggttcaagcaattgtcctgtctcagcctcctgagtagctgggactacaggtgcccgccaccacgcccagctaatttttgtatttttagtagagacggggttttgccatgtttgctaggctggtctcaaactcttgacctcaggttatctgcccgcctcagcctcccagtgttgggattacaggcgtgagccaccacgcccagccaggatttcaatgaacaaaatgcttttaccctaaagatgaagtccccagacagaaggtgctcattggtgctgtcaacatttggtgattggttcagtttagatatcacctcctggtgggagcagcttcatcggtgcccctctccttacatccctcccagtcccatgtctcaacctttggaatattcatgaccctgtatcatgacctgctgtcctgcatgtcctctagaccaaactgtcaacttccggggcagagtccaggtgcctggcccatagcaggtgcttcaggaagcctccagggccatcactccagggacccctagcaatgcagggaagaataaaagcagccacaggtgggtttcttccctaagcatggaagcagctcagcaacagagtcctggcggaggcaagattgccttccgcattccagaggaagtatttgccttgaaactatgtaacaaaagtaacagaaacataatagacatgctttcctttttaagtttgctggattctcctgggatacagtgaagctccagtgaaaacctctctcctcagctagttaaggcctggaaatggccacttgggggtttccctaagcacccgaaactcagtgagcccccaagtgacctcgtctcccagtccccaactcagagagacccaaaagctacaatcttctttgactgtattgtcagacccacttcctctctccagctcaactgccactatcctagtcctagtctgaatcacatgtgacaatcatgactacaatctttttttttttttttttttgagatggactctcactctgtcgcccaggatggagtgcagtggcgcgatctcggcccactgcaacctccgcctcgcgggttcaagtgattctcctgcctcagcctcccgtgtaactgggactacaggtgtgcaccaccatgcccagctaatttttgtattttcagtagagatggggtttcaccatgttgtgcaggatggtctcgatctcttgacctcatgattcgcccgcctcgggctcccaaagtgctgggattacaggcgtgagccacagcgcccggcccgttagggtgtctttgatgccacgcttcgctctgggttttctccttcctctttgattgctccttgtccgatctcttttctggacccttctcctcctgcccaatgtaagtgctgggtgttcccctagatgctatcctgagcccgcttcactcctcgttctaagggattacagtctcctctcacctgtatcagggagggtccatctgcaggaaaaagacaccacttttgcaattttaaggaaaaggattaaaacagggattggccgggtgcggcgatgcgcgcctgtagtcccacttttccggaggctgaggcgggaggatcgcttgagcccggggactcgagaccagcctggccaacatagctagaccccgtctctaaagaaaaaaaaaagacaaaagaagagaacaacaacaaaaaaaccaaaataaaaataaaaataaaaacggacgggcgaacgcgtcgggtgggcgtagggttccgcgaagcctccctgtccctcttgtctcgtcctagtcggtctagctgggccccatcccctttcccactcggagcgtgagcgcctggagacacgtacagccaaccagtgagaaggagtggccgcgagtggcatgcacttggtccaattacctgcggccctgccggtcggcccgcgctggggccaatggaggtgcgaggcggggctcgggcgggggcaacggtcacctgatctgcggctgtcgaggccgctgaggcagtggaggctgaggctatgatggcggccatggcgacggctcgagtgcggatggggccgcggtgcgcccaggcgctctggcgcatgccgtggctgccggtgtttttgtcgttggcggcggcggcggcggcggcagcggcggagcagcaggtcccgctggtgctgtggtcgagtgaccggtgagcgggccggggtgggatgcgctgtggcggctgaggcgccctcgcccgactccggcgctgtcctaggcgaggggtggtgaggcccggaggtggactgttccttgctcgggggctcgcagcgaatctgccggcgacagagctccagtccacatgcgcccccgtctgacagcacctcttctgtgccctgccagggacttgtgggctcctgcggccgacactcatgaaggccacatcaccagcgacttgcagctctctacctacttagatcccgccctggagctgggtcccaggaatgtgctgctgttcctgcaggacaaggtgcgcccgccccagcccactctcccccggtcatcgggaggcagccaggccccctccccccatgacactgacgcccattccccaagggaagcttcagtgaccttgtcccaactgtagggaggtgtgggtcgtctcatgggaaggcctgtagtaaacgcttcagtgggcatggcgacagcctcggaaatggcaccaacttgattggaggaagcgacggaccagaggccaggtacctactgagtaccaagcactttggatatctgacttagtccaatatggtgggtggggattatcgtccctgtttgtttatagatgagaagactgaggctggaggttaagtgacttgtccaagctcatacagctaatgggtggcagagttgtaattctagctgtgatgatcataataatgataattggaaaatgctcacctgtttagtgctttgtaggcacttgctacactgatgtcattatcttggtttcactgccaaggaaagtaaggtttgtcgagatacaatgtttcactacagttgatagataccactttggttccagcctgagtctgccaatcctccctcccaattggagctcataacccgcatgctgttttccttcccatccaggatctttgccccaaaagcaggcgtggagaccatgagatgactctaagatagcaagtctctgctaggccctcccttgttggtggcctgtatggctcattgcccttgtagtctcccttggttgctgtgtgggcagatggtggtggcctgaagtcttttcaggaggtggtaaataatatagtcaaataggaactgagtcctagttctaccatgtaaccagccattggaggcatgaaataatctttgtgaatgacagtttctacatctgtaaaatgaagacaccacctatatcagagggctgtgagtgggaaatcttttttttttttttttttgagacggagtctcgctctgttgcccaggctggaatgcagtggtgcaatgtcagctcagctcactgcaccctccgcctcccgggttcaagcagttctctgcctcagcctcccgagtagctaggattacagggcgcccgccactacacccagctaatttttgtatttttttgtatttttagtagagatggggtttcaccatgttggccaggctggtcttgaactcctgacctcgtgatccacccacctcagcctcccaaactgctgggattacaggcgtgagccaccgcgcccggcctgtgagggggaattcttataatccacataaaacatctagccaggatcccccagtcttagggc

SEQ ID NO: 1888836 - DNA, 4001 bp, Homo sapiens
cttcttgaggaaaaagaagataatcacaaattcagtttcaacaagcaggacattttgctatactgtaccaactaagccatgttcctcaatccagcttttgggagtctgagaagaaatacctctcagagcagggagtcaaggagatatatttttattccaatctgaatactgtactttgtataaaggtggctgatcaggttgcctgtggagaggttgggtggttggacaagaagagggatgtgatttgggcattcctgaacctttggctccttatcctcaaaggaggaaaggaacttgggcaaagtagttaacttctctgcttcagcttcctcaccagtaaaacggagacaataacaggaagtccctcacagggttgtggtaagaattaaatgaatgaacacttgagaagtctttaaaagagtgcctggtgcactgtaactactgtgccatagaatgccatcataacgacaccaatcgcttcgctccaaactctctgagcacccttgtagatggattacctaaaccgtccctcccagactcttcacagagaatttcattaaagtcagtagacttcagctactctctctcatgtgcaggggaaaacaatataatccctttatgagctaaccaaataaattctctcaggaactgcccttgcatgaagaacatacctccagggatgcttgcttagttggggaggtgagtgaggctctctggacctagctgagatggcctggacctaaaggaagagagtagctcaaattccccacagaataactcagaaactttgaaggatgggagctggtaagccaaagaggtgagggagctctagggtcaggcaggaagctcaatggaagagaaatttgagagaaattgttctaatattcttctgtgtagtttgctgatttgtttattttttttttttactttttttccctttttttaaaattatactttaagttctgggatacatgtgcagaacgtgcaggttacataggtatacacgtgccatggtggtttgctgcatccatcgacctgtcatctacattaggtatttctgctaatgctatccctcctctagccccctacccctcaacaggccccgttgtgtgatgttcccctccctgtgtccatgtgttctcattgttcaattcccacttataagtgagaatatgtggtgtttggttttctgttcctgtgttagtttgctgataacaatggtttccagcttcatccatgtccctgcaaaggacatgaactcatctttttttatatatttatagtattccatggtgtatatgtgccacattttctttatccagtctatcactgatgagcatttgggtcagttccaagtctttgctattgtgaatagtgctgcaataaacatacatgtgcatgtgtctttatagcagaatgatgtataatcctttgggtatatacacagtaatgggattgctaggtcaaatggtatttctgattctagatccttgaggaatcgccacactgtcttccacaatggctgcactaatttacactcccaccaacagtgtaaaagcgttcctatttctccacagcctcgccagcatgtgttgtttcctgactttttaatgattgccattctaactggcatgagatggtatctcattgtggttttgatttgcatttctctaatgaccagtgatgatgagatttttttcatatgttttttggccgcataaatgtcttcttttgagaagtgtctgttcgtatcttttgcccactttttgatggggctgtttttctcttgtaaattggttaatgttttactggttagcctttcaaaacaatttctggccaggcacagtggctcatgcctgtaatcccaacactttgggaggctctggaggaggattgcttgaggccaagagttcaagaccaacctgggcaacacagcaagaccccatctctacaaaaaataaaaatgaaaaaattagccaggcgtagtggcacatgcctgtagtcctagctgcttggggagctgaggcaggagggtcacttgagcccaggaagttgaggctgcagtgagctatgatcatgccactacactccagcctgggcgacaaagcaagaccttgtctcaaaaaaaaaatacattcaatttaaaaatgtattgtaacattgtttagtgtagcacacgctcaactaaaaagaaataacttttttcctttttttttttttttttttttttgagacaaagtctcactgtcgcccaggctggagtgcaatggcgtgatcttggctcactgcaacccccatctcctggtttcaagcgattctcttgcctcagccttcctagtagctgggattacaggcacacaccaccatgcccagataatttttgtatttttagtagaaacatggggtttcgccatgttggccaggctggtctcaaactcctgacctcaagtgatctgcccgcctcagcctcccaaagtgctgggattacaggtgtgagccaccacgccgggccaaaaaacaactttcaaacacagaaaggggaataagtagaagtgaaagttccccagcttcccacagtctggtctggggtgtgttcttcggcttttacacaaacacaaacatatctattcttgttctttttctataaaagttgggtcatagcaggtacgtggttctgatactctctttcatattgtctgctgtgctaaaataaaccctctccactgtcccaaaccttcagcaacatcctgctacttgccttgtgctgtttatgctctttggaccagctgcttgagagttttctgtcagtgaaaggaagaaattatagtttcacctcactacaatcatatcgtaataacagctactgcttatggtacccctactgtgtctggcagtctctttggtgctttacttgaattctcatacccattcctcacaacaaccccttggaagtcagtcccactattatcctatgtgggttcacagatgaaaactcaaggcccaaaaggtaatgagtgggaagttaaggagaaaagcacatatactggaggcaggacttgggcattcagcatctccttaaatctttacaatgaccttaagagggagctgtcaccacaaatgaggacactgaggctgcagagttcacagagcaagcagcattcctgttctctgccaggatgaagccactgagagttcgtaagtacatccatccctttccgtaaaacttgatgaaagaaagctagcaaagatctgaaaacatggagatacacgcagtgctcagtgactgcaaaactcaatataataaagatgtcaattttccccacagttatctatggatttaacataattactatcaaaatcccagagggatttttcatagatacacacaagctggcccagcatggtggctcatgcctgtaatcccagcactttgggaggttgaggcgagaggatcacttgaggccaggagtttgagaccagcctaggtaacattacaagacccagtctctatacaaaaaaattaaaaattagccaggtatggtggcacatgcctgcagtcttagctacttgggaggctgaggtgggaggatcgttttagcccaggagttcgaggctgcagtgagctacgatcacatcactgcactccagtctgggcaaaagcacttgttaggaggagatagaaaaggaaaagaaactctcaaaattcaacagtaaaaaagacataaatattccattagaaggcctggcacagtggctcacacctgtattcccagcactttgggaggctaaggtgagagcatcacttgaggccaggggtttgagataagcctgggcaacatagtgagaccccatctctaaaaaaaattaaaacattagtcaggtatggtggtgcacatctgtggtcctgggtactcaggaggctgaggcaggaggattacttgagtccacatcaaagcttcagtgagacatgattgtgccactgcactccaatctgggtgaca

SEQ ID NO: 1888837 - DNA, 4001 bp, Homo sapiens
ccccgtctctactaacagtacaaaaattagccaggagttggggcacgcacctgtaatcccagctactcaggaggctgaggcaggagaattacttcaacccgggaggcagaggttgcagtgagcctagatcgcgccactgcacttcagcctgggcgacaggagcaagactccgtctcagaaaaaaaagaaattcaacctccttttcttctaagtctagggtatgtctttatcagcagcgtaaaaacgactaatacagagagtaatgcataaagacacagaaagagggagagagacaaaaagagaaagagagagagagagagagagaatgtaataggagaaagggagggacaggagaaaaagagagggccctcttcccactatccttccaaaatcagggtttcctcatgaccccttcctcaaggcctaggtgccaaaaaggtcactgaaggaagcacagtcccctcttcctcagcaggcctgaaggctcctgggctatggctgctggtcttcctaagccagaagctataaccctgagccattgggcttcccagcctagcttcctcctgtccaaaatgagaggacaaacaggagttagagagcctgagaagacctgtcccagcaacacaccccgctaagaaggcacaggctgaccactgacaactgtttaaatccagcgcccacgttcggctgggatattctgacccactcagggctgccccataaaccagcgcgtggtccggatccaagcgcaccgagaactcgaaacctctctgtcaagctgcccattgggagttaagttcaaagaggacaaaggaaacgagataaagcgtccaatacaagaattacccatttcagacgcacaagacgaagagcacaggcggtgtcaggacatgttaggatccgtccccaactccgccgtcttcatccccacaaagccacggaacacctgtaccccggagcccagctgctcctgcagcccctggagaaatctgtacattccccgccgaggaccctgccgctgggcacactgggaggctggcctgagggaccccgcgcccgtgtccctggggccgctgcctgggagagcgcacgagttaccccaggcgaggtgatccacaggaagtttggtgacgtcggatggcccaggccccagagtgctgtgtgtgctgggggtggagggtggtccccgacaggagccgtcggcgttccagggaaggcacccggtcggtcgggggactcgccggggctggggggtgcgctctacttctccgagcgccccccagggagacccagggcgcaggggcagccccgcgctgggatcccgagccgcagcggcggggcagggccctccccaggaggcgggcacccggggccctttgtcctacgacagcgtcccggccgcgccgcgcgcccctgtgggccgagtccccgcgcgcactcactcacccacggtgaccagcgtgtcgaagtcttgaaggcggttggcaggcggctccggcgaccgcgcctcggagctggggcagagctcgggcgcccagtccggggtctcctctgccacggccgcctgggccagcccgggcgccttcatggggacgcactcaggtccggggcgccgggccgggccggagcgctcggggagccgggcttccgcggatgcagcctcggagggcggcgcggcggcatcaacggaggctccccatgcgcgccatgcggcttgtggaggccatcctgcccacccggcccggagcccgcaagacgccaatgcgccttccggtgcgcgcgcggccgggcgcggctgacggagcggcggggacaatggctggccgtcgctcacggcacaagcagcaacggccccaggtagcagcagccgccggcctcgtggggcgggcacggagcgccgggaggcggcggggaaggcgggggccgcggcccgggcttgtagagccaggcgggggccctgcgcattcccagtctcgcgcccgcggcctcctgcagctcggtagcagcgtgcgcgttgaagaggcgggcggaagccgcctgggcgaggcctaggggctgggggcgtcgccttcgcacgcgctccgcccctgccgcgacccagcccaggagccagagacctgggcgtgccccgccaccgtgggcaggcgcggccctggggaggtgctcacgccccctccgcgcccgaggcgcccctcgggtggcacccaggacgacctctcaccccgacctaccgccccgaccctcttaggcgcagaggcgcacaggtccagacccggctactcaggagggaggaaacattttacaacctgttctctcttgtctttgaagcctgctagctaaaagcttcatctgcatagtaaaactttggtctccaccacctcttatcacaacccagacattcccttctgtgatctcaggtcttcagataaactcaaccagctgtcaaccagaaaatgtttaaattcacccacagcctggaaccccctttcctccaccccctcgcccccacccaccacttctacttgtctcttttctggaccaaaccaatgtatttctcaaatgtatttgattgctgtctcatgccttcctaaaatgtataaaaccaaactgcaccccaaccaccttgggcacatgttctcaggacctcctgagggctgtgtaatgggccatggtcagtcgtatttggctcagaataaatttcttcaaatattttacagagtttgactctttttgttgacaccttttcttagacagctactacaagatgttcttcagaaaatggacggcgcaaactgagaacaagtaagaggtggattcagaaagttaggagatccggtggaggagagaagtgtagttggtggccagggtgacagccattcaccaggttccatagacaaacagttcatgttggagatggggttcaagagatgctagacggagccgtccaggaagaaagagcaggaatgaatggacaaaaagtatgggagttagaaaaactgatgaatttaggggcacatggtaggccttttggagcactgggataaaatagtttcaggcactaagtaaattttatataaaaagaaggcagcccagtgcagtggctcatgcctgtaatctcagcaactccagaggctgagttgggaggatcacttgagctcaggagtttgaggctgcagtgagctataattgcaccactgcactccagccttctagcttgggtgacagaccctgtctccaaaaaataaaaaggcaattactaactccaggaaaaaggaaagaaagaaaacataatcattgtagtcactggttcatctttgaatatcattgcaatggtcattataatggaaacactgatgatttcttaaaccaaatattgtgacctaaatgtttacaagaatgtggtaggagggaaaggacatttgtgattggatggaaaggcaggcaggagagtgtcacagtctgaggggttcttctttcctgctgccccccaaaaacccagtgcactgagaacagcagatgttgcagcaaagagggaggttaataattgcagggacagctaattgagaagaataggagaggtttctcaaatctgtctccctaaaaagttggaaactatggtttttcatggtacttttgtgggcagaagcctggggaactgcaacaactgatagactatggatgaaatctcaggggtgtctaaaactgtctttctgcaggtgagttagttcccaggagagggtatctcaggaccaggtggcatctcttggtctgccaaaatgctaaatctgaaaaatatttcaaagaccattgtttaggttttacaatagtaatgttatctacaagagtagtttgggaagttatacatcttgtgatccctggttacatgactctggtgcagtgaacaacttacatgaaaacacactaagtgatggcaggtcattgattaactatgcctattctttagcaaagttcaagcccctacagtaattctaaccttgttt

SEQ ID NO: 1888838 - DNA, 4001 bp, Homo sapiens
actcccattctgagcctcttgtaaccatcattttgctctctacttctgtgagttcacctcttttagattcacttataagtgagatcatgtggtatttgtctttctgtgccttgcttatttcatttaacataatgtcctccaggtttggctatattgttgaaaatgacacaatttccctcttttaaaggctgaattgtattccattttgtatctatactacatttttaaattgttttacttttaagagtaccatgctttttatatcttattaaggaaatcttttgtttccttatagattattcataattttagcttttatttgaggtttatgatgcacttctaattaatttttgtgtatagtacacaataagggttgaaattctttttatttccatgtagatttctaatttgttttagcaccatttcctgaaaagactatcctattcctacttaattacattgctctcttttgagaaaataaattaaccatatatgcatgggtctatttctattctattgataggtatgtctgtcctcatgccaataccacacaattttgattactaaagactaaagctttataataagacttgaagtcagtagtttaagtccatcaactttattcctctttttcaaaccttatttggttttattttttgattgacagtttattaaatatactacatttgtacttaatgctgtagttttaaaaattattcacacatgggcttagtaaatatgcactttatagaaaaccaactgcaagaccgaaatgaaaataagaacacacatattgcacacatattagataaactgctgaaatgttatgaattaatttaacctgtacatgtgcttaatgaaggtgatcatgaaatattaggtggtttgatttacttaaatctgacaccagaccgtgacttcaaaagtgttaatgttgaaatgtaggtgcaaaaccatctattaacaaaatcatttaatctattagtctttgaaaaacagaataaaacattgtttttcttttaaagatacttttctaaatccattctctatgcactctttctcccattcaaagagttagttgtgcagactgatgaggcaaaaaatcaattccttttaaaaaaatcccaacaaactagagcctacttacaaaacatgcaaagggagaattttaagtaggtattactgcagaactggttaaaagtgaatacagctgagtgacagaatatacctttcctctgacaatataggtccttccccacttctctctggaagaaacacatcatcagggcatggactacataacggcataaaatgcaaagacagaaacaaagaagtttgcaagttctctatatttctagctgttgaggcagtatgtttaagagctgaagttacctctagcggcgaaaccagagccagttactaagcagccacaatcctatggtaattgaatacatgaccatttctctcttggcacgttccttgttctcctcttctagatgttgcaagcgtctatttagtttgattatctgtcgtcttaacgaagctgcatctgcaacagtcatgtcatccgaagttccttcacttgtatctatgtttgaagtgccatacctgatgttgtcacgatgcggattagaagtggtagcagcagacctgccatactgcacaggtctgcgattttcacccatctcatccacgatatgctggtaagccctacgagtagaagactggataaatgacagaatgccatgaacagaggaaagattagttctattttcgggtaacatgttgggaagacagcttcttatggtgatggtgtcacgatgaaatcactcctgatcaacgtctattttggccaacaacattttcactcaaagagcagtctctttttagcttgccaaatgcacagatttcttcattttgaagggttgaaggaggtctttctaaatcctgaaaatctggtggtcttccacttaaagtatatgaagcggtggttttagtgccagaggtttaaagggagttgactgaataaagtcaaaatccactggtcttcaaaacagaatgtctccgttgttctctgctgtaacaatcctctctagaacctgcatcatcacattagcatttagaactcctttttggaattcttgttccaggtcaccatttgatggtgctgacttaatttttctgggaccctcatttgctgactaatatctttattgtattccatttcatactgaaattgactaatttcttccatctagagaaggaagtgcttccctactcaccaaatatgtaccagctactacttgctatttggcactatctgctcccgtgcttcatattaaatgctttaatttcattcaaagtgcatgtgccgggtttagagccacttttgttcctctgggtctgtagagagttcccagtgagggctgccagggtgggtgctctcagagaccattagcaaaatgcaggaaagagctaggacaaagcacctgtcaggttggccggtggcagactaggagagcctcatttggttattttagatactttatattttcatataaattttacaataaggtttccaacttctatgaaacaacttggtggaatttagattgtgattacataaaatgtgtcatctctctatctatcatctatctatctatctatctatctatctatctatctatctatctatctatgtatctatctatctatctagatatccctctctccacctctactcactactcactatgactactttttctttactgcataactatgtttcccctggaataaatacttttcttgtttcttttgtttccttagttttctatgtatttacacgtacttttgcttccagactcttcttcattccttctctcaatacatttgaatacattagatattccatcagttttgcctttttaaagagaaatctctcttaacaaacctctgatctgattaaatatagacagcttgctccctaggcctgttgaacactgtcatcctataatctccctttgccaccatcttgggcatttttttttttttgccaccttcttgacttggttcccctgttgccttatattttcctcttccttggtttaccatctttcttagtgagcacatactctagtagtttccccagaaagagggcatgggaggtaaaatttttaagacaatatatatatatatatatatagtcttaaaatatatatatatatatatatagtcttaaaatatatatatatatatatatatatatatatatatatatatatatatttttttttttttttttttgagacagagtctttctctgtctcccaggctggagtacagtggcatgttcttggctcactgcaacctctgcctcctgggttcaagcgattctcctgcctcagcctcctgagtagctaggattacaggcatgagccaacacacctgtctaattttgtaattttttagtagagacggggtttcactctgttggccaggctggtcttgaactcctcacctcaggtgatccacctgccttggccttccaaagtgctgggattacaggcgtgagtcaccgtgcctggccttccttcgaattttgatcgcattgttctattgttttctagcttccggcattgctgtggcaaaataaaataccacaatcattcattatcctttatataaaagctgagtttttgctgttgctgtttcatctctttctctttagaaaaaccttttatttgacctaagcaatgtaaaactgccttgatgtggctctatcttccttctttgtgatgagccctttcaaattggaaattcaagtttttcaatttttgggaaaattctggaaatcgttttgttgctgatgtcttcctttctgtttttccgtcttatgtttgtggccacagatagtttgcctcttaaactatctacatttcatcatgacttcaaaaaactaaattataaatcagaaaaacaactaaaacttaaaaaaaaat

SEQ ID NO: 1888839 - DNA, 4001 bp, Homo sapiens
aataaatcatgtattattcgtcaacaatgcatcttttctaggcatctaacggggacatctggggaaaaagtggcaaaacatttgctccaaaagacaaaaatgttctttctcctctgtgttgaaaattcctaaggcgtccttctccccaatggtatgataaattatttgattagaaattgaaacatatgtaagtctcagatcatcaactatacaccactctgagccgatcattaaagagatggagtcgcagaactcaacttacagccatttcaagacctgtcgtttaaaattaaaagaaaacttcaccgctttgttcatctgtaattcagaattctgtaaattgacacaaagaaagatcaggggcgattcaggctaaggttactttaccacaaggttgtaagatgtctatttaaaataacagtaattctaacctgaactacagttttgtccaatccaaacagcagtttggtggggtattttcatcaaaatgccctatccttgatttgaatatgaatgactgcggaagggtctttctgaaaccccacggattttaatacaggtaggtcctttttccaaaaaaaaaaaaaaaaaaaagtcaggaaatgaacaaacaggaataaaaattcatgaacaactatcggcaaatccaagcagccatgagacgtgcgagtgtgtgtgtgtgtgtgtgtgtgtgtgtgtgtgtgtgtgagagagagagagagagagagacagagacagagagagagagagagagaaagagacagagagagaccgaccgacagacacacactgagatttctggagttaattgcgaataaccgcgccgcgaagcttttttacctcctccaagtcccacagtctacctaggacaagtaagcccggctccagcaccttaagccaaagacacaagcaccaccacctccacccccactacctaggcgagacagcgccaaaagccaccgagcgtgcacgccagccaggcccgctaccccgcaaacccgggagcttctttatccccagcagagatccgccccacttaccagtaatttactttaacgcctcgaaagcatgatttggtttacggaattgcagcaaataaaagaaaatcaagtctccttgagacactgtcctcctcctccctaggacgcacattcacacggaacactctcctttcgctctcaaccccgaacacgctctggactatcccaagagggtctttggggacccgccagagatcgatactgctcccacgtgcctccattaaacccttgtccaaacatgcacaaggcgccaagggcatgtgcagaatcagccctcagagtaagttcagcaaacccattccctacccccgaaagcgcgagggagcaccctgacgcaagcgccggccccggcagacaatactcaagcaactccagccttccgcgcacacgccccgaccggtccagccaccactctctcctcccatggtccctacagtcttcgggccgggagcagggggcgtcctgatggttgctgggtgtggactgtgaagagaagggcaacctgcacacgccaccgatactgcggggcgggtaggagatcgcagttttccaaagccccaccggtgtgcccagctcctcagaaggggtggggtggggacagtggaaccgagggagtgaaccctaagggaggcagcttttctgcacctctttcccacctaccacagcgcgcgcgcagaagcgcgcccaccacggggccgtgcaccttccttctgcccctggacctacccagccctcgcccccaagcgcagtggcctggaagagcgggcgtccggcccgcggtggccgggggagcgggcagagcgccgcgctcgggggtgcccacctgcgcgcagggtcgtcgctgctgccggtgcacccgccgctgttgcagtctccagctgcaggaggaagaggcgcggcggctgagcccccggactccacgcgcctactcgcgccccggagcggtggtcctcatttcccttcgtcccggctggcgagccacccacctcgcccgcaggttctgccagtcccgcggcccgccagagcccaagctatcctctccgcccctttcccgccgccccgcgctgcgctgcgctccgccccctgcccgcccatccccgccggggcccagccgggggctgcgggcgccgcgcctcgtgccgcagatttcgggttcttgggtctgtggcggtagaaaggggatgggggggaccaggggtgcggccctggggtccgcccccaaccccgctctcccaaccggttccccactcctggggcccgcggcggccgcccgcggctaagggtgtgggaaccgtgcactctgcccccgctcttccggcgtctccccgcatggcaccttccgtggcccagagggtgcctcgtgtcttagggggaggggggttggtgaagcaaggtggagtgagcctgagagtggaagcgaagaaattaccatgtgaattgccaggggatgcaagttgctgcctgtgccctgtttcttctacattaactacctggatgtgctgcttcccttgctacaaccgcagtaatattcagaagcttgaatataagatttccaagttaattggctgtagggtggttgggtttttttttttttaatgtaatgatggcagaagacaacagattcactctttttaaaaagttactttacatatatgtacaatatataaagccatatttctaatttaaaaaatagcaaaatgtaaataacagaacagctgtgttttacagaaacaaatccagtgtgtatgtgttatttaaacccacggtaattatattaattggttcgttttaaagtgtattttaggtatttcttaaaacggactcagaatttagggattaggaacccctgagttttaatttggctttttgtcatagttctaaaatgtcaatttcatggaaattactaaatgaggttgtttagaaaaatgggttctttttcttccaggttggcagcattttcagatctggcaaaggacagaattttttttaaagccaagagataataaaattctcattcattttctgatgagggaatatctggtctggtagctttttctttgtttctctctttgaggcaaacttcttttctgtttcttcttacacgtttttcttccaaaatttctcctaagtataggcaaagttatggaagccgtgatttttgagcctttgttttcttaaaagagatggaaaattaattataattcattatcaatatctatcccaggctcatgatactacatttcacattgattaaccctgtttttcaactctgcttttagtaatttcacctaacacttgagaaccaagagttttttaagtttcatccttataagaatgaaaggcacactttaattaacattttgaaccaaaattaaattcattaaattcactaatggaaagtacgttagtacagtatgtgttgctgggtaaatgaggacaatgtggatgataaacagttctgaagaaaagactctgaagcaaagaaaacaatccttagaaaaactgatgatccccttttcaaggaaaggatgacaaatgccagtaattatgcaaagaatgactcctgcctctctttgctttggttttgtggctaggcctgcatttatctctcttgatcatcataataaaagtaaagtaattcagcattccggtgacactgcttagtaaattagcaatttgaaaatgcttttattacctaattaatccaagcaaatgccttcgataaatccagttttactcttaacattttttgtgcctccagagaaacacttgcatgaaataaaaacagctaaggcaagctctaaaacaattgctagccagattccttgggtgtgtgagtgcagcaatagagttgatattaagtgacctttgggtcttaaattatatatcagatattggttctgagttgctcactggcatcttcttgagtgagtttctgtgtgtttgctttgccgtttattc

SEQ ID NO: 1888840 - DNA, 4001 bp, Homo sapiens
gtttactaagtgttgtacacgtactatgtcatgtaatcctcacaacaaacacatgaggaagctggaattacctccatttcacgagtgaataaagccagcctcaaaaaagttaactgatctgccccaggtggaggacctgaaagtagaacccaggttcttggactataatactaccacttcctcaccttgcgaatcctaccttcagaaagatgaccctgtggaggctgcccggtcacttgctcaggtgcttggtcagcagaaatgggctttagcatacttgagaatagttgacatcaggcatcacatctaaaattgccatctaaatttggaaagcagcttttatgccctctgctgcctggataatgtagcctgcagggcacaaagaccatgttttatttatcatgagcccaagtactgtgttttatttagcgttatacctgtccctctcagctttatatagcgcttttaaatatttgctccttcaacatttgtgcagattcattcactcatctaatttcataaccctgataaagttttgaatataatctagggcagcagtaaaacaaaaaacttcaaatttaaggagtgaaagagtatgggggcaaagggtatcagagaatagccttttgaattaaggtatttactttaaaaaatgtatgaacctcaagatgcttctgtgctctgaaatttctaccagatggtaataacatggccgggtgcagtggctcatgcctgtaatcccagcactctgcaaggccaaggcaggagaatcgctcgagctcaggagtttgagaccagcctaggcaacatagtgagacactgtctctatttaaaaataataaattaaaaataatttttaaaaataccaacaagacaaagtgtgtctaaatgtactttccaggaatgtttcaactgacccttaaaataatccttaagaaaagtaaggcaactgtattataacccctaatgcatcactgaggaaagagtaccttagaaaagttaagtgacttgttcaagataatcagatatactggatttcaaggggatcctaactttaaatctcttgtttgttctattacgcctttgcctcacctagataagctttctttaccaaaatagtaaaggcgcaataaaagatgagaagctgaagtgctatcaacaaataagaaaaaagtgatgactagagaggggtagttgtacttggttggagagtacaagtatggctcaaaagtattcctatagaaatccctttaaatgttgccttttgctagggtgtgggtaaggacactcacagattgttggtaggagtgcaaaacagcatatcctttccagagggaaattgagcaattcacattaaaaaaaaaaaaacccttatgtgcatactctgcccaataattctatcatctaggaatgtacacttagaaagtaatcatgggccgggcgcggtggctcacacctgtaatcccagcactttgcgaggccgaggcgggcagatcgctggaggtcaggagtttgagaccagcctggcaaatatggtgaaaccccatctctactaaaaatacaaaaattagccgggcatggtggcacacgcctgtagtcccagctactcgggaggctgacacaggggaatcacttgaacccaggaggtggaggttgcagtgagccgagatcgtgccactacactccagcctgggcgacagagtgagattcgaaagtaatcatagatatgcggacttttacatttacccaacaatgtattttaatagggaagaactgagaatgaccaatgaaataaattataatattacagccatataatggcatgctatctagtcagaaaaagataattacaaaagagaattcactttagaaaaactcatgtattaagctctgcatagaaaaagactggaggtgtataaccacattcacaatggttacttggaatggggaaaccatattcaccatggttacttggaacttggaatagtgaaacaacgtatcttcattgtgatttctatcttagaaatgtgtataaatggctaaatgttcctatatataaaaatgtttctaataagacgttttaaaggtttcttgggggtgactgaaacagctgtgatttcaaaataaaattttagtagccatttaaaaaaaacattaaaaataaaacattgctataccattaccattaaaataccaatgaaaaataaagtcctcgttatgaatctgcagcaaaacctttcttttcaaattctgctctgtcgtttggacctgttcacattcagaaaaatgctaaaaaggctgcctggcgaggagcctaaagaggccttcctgatttctacctgcagtttgtaatttgttccaggaaaaaaaaaaaaaaaaaaaaaggcaatcacctaataggtagttcgaaaagcacctgagtaggaaaatatttacggggtaggtttctctcccatttctttccctcgagacctaccaacaggacagtcctgacagcgactggcccagtttcccaatacaacccagagaagcacaggagatgcgccaattttcaggagacgcttctaaaaagacaagttttactttacaatgcaggataatgagcagccttcactactcattctcgacgttaacagaggaagatgccgctgcgcggcaggagcgcctcaccaggacaaagcggggtacgggggggtcctcggttcaggccccgcaggcgacgcgtccagggccgcctcgaggacaagggcaccgtccccggacaccgccttcccggcccccgccctcttaacagatgcagggaaccgcggggaccgcaacctgcccgacgacggcggaggatcagggtcgcggcagcaggtgcccgggtcgccgtgcctgtcgagggacctcaggggcgccgggcagctgtcccctggaaacccgcgccgggtcgccgcgcccaagggaaggcgctgaccgagggacctacggggcgcagaggagctgtcccaacagaacccgagtcggaccgccgcatcctccccgctgccccatccgccaccccgagaaccgcccctcctgggtggcggacacgccctccctgcgggcccaggcctcctcgccccgcctccccccgagccgctcacccggccgggaagcccccgccgccgccgccgccgccgccgccgccgccgccgccgccgccgccgccggcccctcgggcctcgcccctcactctgccgccgcctcccacagcagcgacaccccagccacctctgccgggccgcgggacccggaaccacttccttccggaaccgcctcgccccgcccccaccccggccccgcccactgctcgcggcctcgcactgggcccgttctccagccgacccctatcctctactctcccggcgagggtgccccgcccgggcttctcggaccagagcgctgcgccccctgccggccgttcccactgcggccgctctgtccagggcgcctgcgccctctgccacccgcccgccgggtccggctagagcgcctgcgccctctgccgccctctcgccggaaaggaggggacctaatgggcgttccaggtccagggatcctgggggttaaggcccagggattggaggtcacccctcagtcatgggcagaacttgatcccgtgggccttccagctttgtgcagatctctaaccattcacctaccctctatccatttcccactcctcaaattaagcatattcccggaaaacaaagcctcccctctggacttcccaaatggtcggatggtaccaacatctatccgtcatccaattcaaaagattgcctcatctctgtctactcgcttggtttctcccctcccacactccatgcaccagcctcaaaggtagtgtgtcttcttcactcttgaagctttccgcttgacactgatattctttcttccccttgtgaaatagctctttcaggctctgtgccatctggtagtaacaccttttgccctcccttgtcactgtcacctac

SEQ ID NO: 1888841 - DNA, 4001 bp, Homo sapiens; identical to SEQ ID NO: 1563797

SEQ ID NO: 1888842 - DNA, 4001 bp, Homo sapiens
ttatataaaattagtctccttttagcctttcttaccaaaatatcttattatatctataactttctttacatctctcttatttactggttccttttaccttgtttcaaaaataaccattaaataacatttaaatttagactaaacttatttccctttaaataagaacacattttttatgaaaaatgtttccccataatttttttaaagaaattggaaatgatccatttaatgaatatctattatttaactcaatacaactttagattctaaactatgtgaggtttatttgcaagcatttatttcattacattttcctaatcaattaattaattgtatttttcaatcgtttaactagattgtttatgaaaattgtgatagtcatcatttaaagttatatccctattaaccattttatagcacgtgcatttcaggtatttacctcagtaagaatcttaaggttaaaaaaatggtatattttgccaatattcaagatttagctgttcccattaaactcaacaatattcagtgccttatttataaaaaactatacaaaaataattctcttgtgggctgcaagctttacaattctcctgcgaaattttgacaacttataacacctaacagatattaaatattaaactactagaccaatgaatccaacaataatgtatgttgaccattctgaagaaatttctaattttattttaccaataattttaaaaccaacttatttattaaggatttacttaagtaagcttataaaagcatttgggctcctatttttctgataaagtatttgatttaagtgatttttttgtctgtaagccaattacatatataaaattaaattatatagattataaatcaatatataaatatataattaaatatataaaaattaaatctaaagagctctaatgagcgcttctgaaattagaaaaaaatctaatttcacagaccctgaaattatttaaggcccctcatgcagcagacggtggcaagaagaaagagactggcagaagtaaatggagaaaacagaattccgttgactgagaatggtaaaaaacgctttttctcaaaaaataatattctagaagagaaagaaagcataaaggccttttcaatatatacatacacacacacacacacacacacacacacacatatataatatatatgtaggtgtatgtgtatacatatatatttacctttttaaatttttgtttctgtttttctcagagatccctgttctgaacatacacatacacacacacacacacacacacacacagaggcacacacacacacagaggcacacacacatatacatcttggatcttagcttttaattaagctgacataataattgtgctcttaaaaaaattcgttaaatctcattaccatattttggctgggataaactgctgatagttcaaatgtaacaaaaatatcaaaccagaaaggacttgatttaggaaccaaaccgaggctgtcatgtgaaaaaagagcagaatcttagctactgaactacagccattgctctttcaatttggcttggctactaaaaggtggccttgttatgtaaataatgcacctaaggtaatcaaattctttcttttttttcagctgcatgattttagccaattcagagactttgttccccataatttggaactttcctttggatttgaccaagtccagtagagttggccaaatccattgggaaaaagactaaaacagcaaaaacaacagtaaaaaaaacaaactgaaaaacagaaaggcagttaagcaaaacaaaagatagcacaggattaccgagtactctattggtaagtagaaattaagaccagctacttgctaatcttaacttttagccattacggaaaatttccaagacaaaaccccaattcagctacttacctgggaatggggcccaggctgaagacttgtttgtacatttctcagccctgctctgtatgtaaagccaacatgttatgttcagctcattggagcacctattctatttaaatagaatgagaagttgttcactatagaattgcaaatgaaagctaattagatttttgaaccaaatttggtgtaattttgtcttttgacacattttctcatttctgaaactttaggactctttatatattctgcataaaagacttttgtttggcatacaatttgcatatatttgtgtaactccacatttgactttttattctctgatccatgtatttcccaaagtaaaagttttaattttgaggaatccaatttatcactttttcctttatgaatcacgcttttggtgtcatgattaagacctctttgcctgatttcaggtcatcagtatttcctcctatattttctttaaaagcgttatagttttttgtataacatttgaatctatgatccactgtgagttaatttttgtctaaagtgtgaaattttggtgaagtttttttgttaataacatatggatattcaattgttccaatatcactgattgaaaagcctaacatttttataatgaattgtctttactcctttctaaaaatctccattggccatatttgtgtgggtctattcaaggactctccattctattccattaatctatatgtgtatccattagccaattccatactgttttgattactgtaggtttatattacatcttaaaattgagcagtatgattccaccatgattttctggtttttgtttcaaaattgttttaactattccagatcctttgcctttccatacactttttgagtcagcttgtctacatgtacaaaaattcctgctagtagtttgacagcattgactttgaatctacagatagctttggtataggtcacacatctccactgagtcttgcagtccatgaagataatatgttcatatatttacttggacctctttgaattgtcttcattagcattttgtcatttctccacacagatagggacttattttattggttatatagcaaagcattttattttttaatctattaaaactgatattttaaaatatgttttccaatgtttattgtccattcttttttccagttcagcctataagaaacttgaagtgtctcttccattgacacaaacaagtaaaaagctgaataaattgaaaaaaaaaaaaaaacttttctcagatttgcttagagaactgagaccacagggcaaactaccagaccaaagctaaagaaacaggcaaaatacagtcacaccttggagataagaagtccaggagctgaatacccaagaacaagtatcaagatgggaaaacctcatctctacgagatgaatggctggaggctcactattggcaagtttgagagctcttgggggaaccatgttaaggggactaccactgtttccaacatcttctctctaggagccctgtcaggttttctcagtgaagaccagggaaaaatctcttcctacttcctgtaaggagtttggaaagaattaattagaaaatatgcccagagtgttctgttcttcttaccaaggcctgaactcaagagaaactatttttccagagtctaacttgctgggttttttctagactttaaccaacctgtgggaagggaaatatccaattacaacaccatccagccttttgtgtcttcaaggggaaaacaaaactgagaagcaccagtgaaacctacagcccaggcacactgattcaagcctaacacctagtcataggaggacagaacattttccctccctccacagctcactgccacatcaatagggcaatgaaactgaaagaacagtacatgtcagaccataatgaacaagtatccaaggaaaaccaaacacaaccaaggaggaaaaatgaaggacacaaaagggaggtttagcttctgacacctacagctacagcaaacagtaaacacagccagatgaacacaaagtctcgcactaaatgcctatttaactccattctttttatctattccattacatcaagtttg

SEQ ID NO: 1888843 - DNA, 4001 bp, Homo sapiens
gaggagaaactaccatttaagcagtagtcagtgaaatacttttccctctagacacagacttagtggaccttcgtggataagatatttggaaaaattttaaatgtcatttacagttttttttttttgcctcttgaaagagaagaactgttgcaaagtattaattttgatcttaactctgacacatttattaacaccccaaaaaagcaaagatatatatgtcttgccagaaggctatacaaaatattttaaggttctatcttctataattcctggctagtagatacagttatctaaactacaaaaagttataatttgttgcttattgataatgttatgacttttttttttttttttttgagacggagtctcgctctgtcgcccaggcgggactgcggactgcagtggcgcaatctcggctcactgcaagctccgcttcccgggttcacgccattctcctgcctcagcctcccgagtagctgggactacaggcgcccgccaccgcgcccggctaattttttttgtatttttagtagagacggggtttcaccttgttagccaggatggtctcgatctccgacttatttttaaagttccctaaataaaccaacttttgaataaaaatgggcttttcattttaataacacatactccttgatgataatggtttgattcatttctcttacagaactaatttcttcctacttcacacacattaaatgctttgtttatactgataatgtcgtgctcatcctaaattaaagtttgactatgtctgtttccccagagacacaccatctgattgggatgcagccgtagagtagcagaaagagcagtgaagctggtattagaatgcctggattacagtgtttgttctgttacttagcagctgtgtgactttactgtcttaatgatatggatttttgtgctgctgccaagtatgaaacagtttggcacactatttagatacgcaaaatatgtgatccccacaacattttagtgagtgtaaagaagataggatagaccatttaaaatggaaaattttgaacaaaaggtcaccatagacttgaataaattacttaaacttctgagacccacttttgtcatgtaataaaatagatataatgatacttacctctcaggattaagggttaactgaaatattgtatgtgagggtctagctcagtgtctggaaaatggatgatgttaattaaggtttccttaggttggaatgctcctttcaccccctccatccgccccctcccccaaaaaacactccaaaattcaaacatgcatattctgattcatcttttaaggaagagcccaagaggcaccattctacaaaatctttccaaacaacttcaggcagtacagccctttggttaagagtactgggcttctggaatcagaagagaccaccaaatttaaaaccaggtctcccatttagtagctccctgacactggacaaattacttattttctctgcacctagatttcccatctgtaatataaaatcatcatgatacatacctcatagggttgcagaggattaaatgagatatacatacagagcacttagcacagtccctgagttaataagtcctccgttaagtattacataggagaagtagtaaaaagtttcctcttaagtaaaatgctaataaaagtgcttaccctgcctcccaagattgtggcaaagttatgacgcaaggcttttaaactgtaatgctgaacaaacgtaagggattggtatataccttgagatattttggacaaagttctaaccttacttttatacaatatgctttctctcacccgcctgcagttgggttaataatgcccagcattaattaataagcaataaaatcagaagataccccgaatacaagtagctgacgctcagagagcagtattaaggcgagcacccgcagaccggacctggataactccttggagttcacctctagcggccccctccccttggagctgcgcaagcgtacactgactttgctcctctctagtgcccccgcctccagcagccgcccccccacccccccgtctgcccaacacgcaggcgcgtctcctcaaatcctgtccctacacccctcctctttctcttcatttcgttccccctcctcttgcagcacctcggcaggttcaaactcttctccgggagcgtggcggcgatcgcgaggtcacgtgatgagcatcctgctgcccaacatggcggagttcgacaccatctcggaactggaggaggaggaggaagaagaagcggcaacgtcgtcgtcgtcgccgtcgtcgtcgtcgtcggtatctgggcccgacgatgacgaggaggatgaggaggaagaggaggaagaggaggaggaggaagaagaggaggaggaggaagaggaggaggaagcgccgcccccgcctcgggtagtgagcgaggagcatctgcggagatatgctcccgaccctgtattagtgcggggtgccggccacatcactgtgtaagcgagagggggtcttgggacttgaaatgcctgagatttggcaacagaggaatgagaagtgatcgaggggcctgtggagtgggggagggttgactgattgactgaggcgtacacttaggaaaggacacctggtctaaatggggaaaccatgggtggatacgtgtgaaggaagtgaggagaatgtaaatatgatgcaccaatgccaggtaaagagtgagtataggagagggaagttaggggtttgggagccagagcgattggagtaggggtgagtctcctttcttgtatgtatgctggcaagtgaacagtctctaaactgcaggatgtaccagagggttttttgctgacaagattgatactttgtgggaaacagcaattgctgtgacatgtgacaagaactaggcttgcattcttcaaaacagaaacatgatatattttgtgaataataatagaatgttcattcacccacgtattcatccatccattcttcctatcgaatccttccttatatatcactcgattagaggttcaggatgagaggcagctatggaaagtagaaaaagaaatggattgagtcagggctcttagacgctggtcccggttttgcttcttactggccctgtgaccttggtcaggttgctttttctcatttctgcgccttgatttcttcatctctaaaatgaagggtttggagtagatggtttctaaagcttttcagttctgagataatttacctccaagggattttgtatgcccaagtatgaaatatacaggcattaaatatatatggaaattaatactttgggagctgagcataatttctttaaaatttatccagggtggttttttaaaaaattgaaatcttgaggaaaaattgaatatttcagaaaataaaatggggagggacttcataacagctacaaggcaaaaatgttgatgattctccgggatttaaagagtgcttcctcatttttatttgcttggaccataactatttggaagtttgagtactgtgtcatgttcatcctctgaactatgctatcttttactgcattttcaaaataggttgccttttgttgttatgtcatgctgcctctggttttgataatggctcacctagtccctttgactttcaattgagttcatgttacattaaatcatatatatgctacctcccttatattagcttcaatttttaacatgttgagtttttttttttttttttttttttgagacagagtctcactcttttgcccaggctggagtgcagtggcgcaatcttggctcactgcagcctctgcctcccaggttcaagcaattctcctgcctcagcctcctgagtagctgggactacaggcgtgatatgttgagtattttaattgtaatatactttcgtaatctttgcatcaaatatattaacaaatattttgaaattggggaagtgttgggggagggttttagagctgctttttgattaggaaattttaagacaatttttcttgg

SEQ ID NO: 1888844 - DNA, 4001 bp, Homo sapiens
taccaaatgggtccaggaagggggacaaagtacgctttaatttatgagaagatcagctactagaaactgtatatctgtttttctcgagttttcttcttgcagtgctctttcaatctcattggacatattttatattattttcctgcttaagcactgggggttgggtggaaggatctgtggctcatcataggcaatttccacacttttaaggtttctgactcttcacataaacacctctcactatgatgaggtcctgtatcaagtacaattaatctttgtactttacaatttacatagtgatttttatttacattatcatatttaaacttaatcaaagtccttggcacggcccatggaacaagctccatttttttgataaagaaactgaggctagaaaagtttctatgtgtgcagagaaggaaggtgaaattattttaatgcttcaaagttatataatgcttcctgcctccctgtatttttctttccattgatcttccttcaaaaccctgataggtctatcccagttttgcaagtaagaaaacatgggctgtgatgtagagctaatacgttttggggtagtgggtcctcagacttaggtctgtctccaagggtcactgactttgttttgttttgtttgttttttgtcaacagattagtccttgtggcaccaagtcagaatttcattcaaaagacaattaggaagatggttttctatggaaaatatttaagtgtaggtcttaatgtgaaagaaagagggagagaaagaaacccctttattatgttctcccttccttaggcattttttgtcccgtgggaaaaaactgtactagggacagagacctctgttaagttttagagaaaagggatcttttttttttttatttgagacagagtcttgctctgtcgcccaggctggagtgcagtggcacgatctcggctcactgcaactccgcctcctgggttcaagcaattctcctgcttcatcctcccgagtagctgggattacaggcgctggccaccacgcccggctaatttttgtatttttagtagagaccgggtttcaccatgttggccaggctagtctggaacccctgactttgtgatccgcccgcctcggcctcccaaagtgctgggattacaggcgtgagccaccgtttcaggccgagaaaagggatttaaaatgagaagcttgaatcttattgaacataattgtaggactgccagagaggactggtggatgaggaatatggcaagggacatgagatgggaaaaattaaataggctgtggtttggaagtctcaaagtgaaattcaaggtgcaaggctcttaaaagttaaatccagcgattcggtacatagcttaggccctattaaatgacccagtgctttaagaactatcttttgaaaggaacacttcacacaagcaccctcaaaaataattagacacctccccatttctctgttaaatggtgaaagacacccaagactagacctaactactgtcaccctctcctggcctcttggcagccaaaaggccacatggcccaggctctccagcatcactgtgtagccgacttggacaaaaatggacttctccccattgccacttgcagatctcttcaaagaatcagcagatctgatagtgtgcccctcttcatccccggcaaccactgttaaaggaaagattgggaaagatcccaccccgccaggagggaggcaaaagcctctgacgctcccctccccccatagctgaccaaggccagggccactgcgggagcaccgcgcgtccacgtgcacccagcatgcccggtcaccctttattacgtaagagtcccaggatggagttgtacctgctgccggcccctcttccccgacggctaataataaacccgggttcctgtttcccggccgcggccactccagattcggggctgaggggctcactctgcaaccaaggcacgtgcattctggtcatcccacgcggggagcgcgcgcaaggcccgcccagcccccacatgccagccccaccctccagtcggtccggacgccgacgcctttttgaccctcgctgtgcccggccctcctcatctggcctgcccagggcttggtgctggcggggtccagctgctccaatccctcctcctctgctctgccctgccctgccctggcctgccccggcgccctccctcagcccgggtatcaggcgagaggcggagctggcccggcgcgccccgcccccgctgtagaaagggccgggcgagtgttactcgcggtcatcccggcctgggccttttatctcggtgctgccgggggaggcgggaggaggagacaccaggggtggccctgagcgccggcgacacctttcctggactataaattgagcacctgggatgggtagggggccaacgcagtcaccgccgtccgcagtcacagtccagccactgaccgcagcagcgcccttgcgtagcagccgcttgcagcgagaacactgaattgccaacgagcaggagagtctcaaggcgcaagaggaggtgggtgcccacgccccatcgctgccccggccagcttggttgcttgagctcaggcttttcggagggagaagttgtggtggtggggggacacccttctccccgcggccgtaggtgggcgaggaggtgggactgcccagccgcggggagccacccaggcgccgtcccggacgagctgtagccagagaagggggtgcgcgcgggcaagggcgccaggccccctagcagggtgaataatctaatctgttctttcgtctccgtgtatcaaacaggccagggctcgacccacagagcaccctcagccatcgcgagtttccgggcgccaaagccaggagaagccgcccatcccgcagggccggtctgccagcgagacgagagttggcgagggcggaggagtgccgggaatcccgccacaccggctatagccaggcccccagcgcgggccttggagagcgcgtgaaggcgggcatccccttgacccggccgaccatccccgtgcccctgcgtccctgcgctccaacgtccgcgcggccaccatgatgcaaatctgcgacacctacaaccagaagcactcgctctttaacgccatgaatcgcttcattggcgccgtgaacaacatggaccagacggtgatggtgcccagcttgctgcgcgacgtgcccctggctgaccccgggttagacaacgatgttggcgtggaggtaggcggcagtggcggctgcctggaggagcgcacgcccccagtccccgactcgggaagcgccaatggcagctttttcgcgccctctcgggacatgtacagccactacgtgcttctcaagtccatccgcaacgacatcgagtggggggtcctgcaccagccgcctccaccggctgggagcgaggagggcagtgcctggaagtccaaggacatcctggtggacctgggccacttggagggtgcggacgccggcgaagaagacctggaacagcagttccactaccacctgcgcgggctgcacactgtgctctcgaaactcacgcgcaaagccaacatcctcactaacagatacaagcaggagatcggcttcggcaattggggccactgaggcgtggcgcccgtggctgcccagcaccttcttcgacccatctcaccctctctcattcctcaaagctttttttttttttcctggctggggggcgggaagggcagactgcaaactggggggctgcgtacgtgcaggaggcgcggtggggctgcgtggaggagggggccacgtgtgagagagaagaaaatggtggccggagatgggagggcccaaggaacctcctgggagggggcctgcattctatgttggtgggaatgggactgggctgacgccctgcattcagcctgtgcctttcctggggtttcttttctgttcttttcggaggagagggcccgagaaggggccataccagggcgcggcgctgggttgccacacttgggaaagca

SEQ ID NO: 1888845 - DNA, 4001 bp, Homo sapiens
gacaggaaaccataaaaagggaattcaaatgaaataaatttgatatataaacttatttcaataacatgaatgatggctatctcattacaacagtagacacaattatgccttatgcagaaaaccatggtatgtgagcacattagataactatggtgatgcacatacaagtatgtttgaggaaaaattagaaatggtaggtcaagaaagccatagactggtacttaccgagaggggcatggtacaatattttcaaaataagatggcatgaaatagtccaggagcagatggcaatggccctatagatgacatcaaggcaaatggttgtacaacatttgtgcattgtaaagccaccaccagtgcttaaccattagactataacacacaccaagataatcccagaacataggctgccaaccatgatagagaatgaagaaaaaattctagtataataacgatgataacgatgatgaggatattattaaaaattataattatttagaacttattacataccaagcactaagcactttaaaaaaacaagcatatgaggtagatgttattattttagggaaaaacaaaaaaaagtgatttgtatataatgcagtctacccttattatatatcagtggtgctatgctacctctaatggatatggtaaattaaaaaacacatgcttaacagaggaattaatggctatattgctgatagagacaataattcctgttgcataaataaatatatagtccattgccagacattcttggtgtatgagcagtcacaatagtcagaacatttgaccacaggcacactcagataatcctgcaatatgaactgacattcaggatggcagaagcacaggcaaacacgatactgtcaaaattaacaaactgttattcatgatacagatgattccatccttttatcagttcaggagtagacaatgacaactgcatttttacacaaccatagtgtatgagcgaaagtctatagtacaaccccatacacaatatatgagcagaaattccttacgcgtgctcagtctaccatggagaatgagccaatacttacacataaaagaaaacagacatgacacaaagaaaatagccacatagttgaaattgtacagatgatcacaatatataatcgaaaagccacaatacgggaaagaattccttggtttaggaggagatggcaatggtaggagacaccatgacatgcgctccaatgatcacatggaagaaaaactaccactggtgtttgagaatttaaccacaatacacaccaatatacactgaaaggtgagctatcaattatgatacaggtacaggtggaaatagaatagtagtcaactactgtgctattctttctcagaaagacacgatgaataatgaaatacaacacagcaatgaatgactttgccaaaggagtaaagggtatatgtgcaaaaggaaaaaccaaggtataacatcagacgaccatgctgaatggacagccaccaccagtaatttagcatgtgactaaggtacacaaccagacattctcagaatgcaagctaaaagtcatgataaagaataaagagacataatacaaataatataacaatatcagcaaatacttatcatttatatgtgtcaggcactaatctaagcattctacatgtgcatctttgaatcctcacaactctatgaggtattattatttattttacagtttagaaaacagaaacagaagggtgaaatgacttcctcaagaatttcaaactattaaataggagaactgggatttaagtccaagcagtgagcattgtgcacatacactgatggtgccatgcttcctcatatggatgtgatacaagattagaaacacagagcacaggaacaaatggctttggtccagaagcagacggcaatgtagcaaaagtagacaccgtagcacatgctcaaacatccgtggtgcatgagcagccaccacaggagtctgagcatttgaccacgatgcacactcaggttctgcaacagaagctgacatccaatatataggagtagatactgaggacgaagaaggaggcaaacacactgtatgacaaaaaatcatggtgcacaaaattatattcatggtacagaaaattccatttttagtacaatgtagacaacgatggtgcattttcacaaatcatgatgaatgagcagaagaccatagctaaagggcataagcacattcatacaaccatggaaaattagccagggctcacttagagccaagagacatcttatgagaaaataatcataagtggagacctcatagatggatatagtacaagatcaaaacatctcaatacatgaatgattatttcaaatgtaggtggcaaaggtgcatagaggacccaccgtgtaacatgttcagacaaaagttgatgaaagccattagtgatatttgactgtttgatcttgacttacacaggtacacaaaagtagtttacactattacgtagcatttatgccaaaggagctaagaggcatagatagatacagcacacaaacttgttttcggagaataaaaccatgctgtggtgcttacttagacagatattgtgccttatacaagagccacggtacaggggtaaacagctttgtccatgagtagatgtcagatatgtcaaaagagacctgacaccatatactcagatgaccattgcatgaacagccaccactagtatttgggcatttgactatgatggctacctacacaatcccacgacataaagtaaaagaatgatacaggagcaggtagacatgaaaccatgattaccaaaacggatatggttggtgattaaaaatcattattttctttagtctgggagaagatggcaatgattaaacgggtgaagttatgatatatgctgaaacagccatgttgcatgaacagccatcacatcataggcatttaagcatttgactgatgtacaattagaaagcccagtgacatgagataacatctgtctttttggaacagataaacaatgtgcagaaaaaggcagaagtgatctaagagtagagagtcatagaatatgagtaaatactaaactcatatacacgatgcataaaacactatttccctgtaaagcagtagacaatgaaggttcctgctcagaaaccatggggtatgagcagacaagcatgctgcatgctcagacaaccatggtgcatgagcaaaaacctacaatataaaagcaggtgggtgtgatacaagagtgaataacacaatgaggaatatgcccagatggacaggacatatgaataaaggaaacataacacatgaatacaacttatttaggcaaacagcatatgacaatgatgctggaggagatatcatggcacatactcaggcaatcatggtgcatgagcaactaacactaatatttgactgttaaaccacgatgtacacccagatatcccaacaaaaataagctgatgaccataatataggagcagatgaacaaggatattgaagaagatgctgataataaaatagcagaaaacgatagtgcagtagctaatagaatactacagatggcaacgattcaaatgactgccatggcatatacttatataatgatgctttaaacactatcacaagtatcagcatttgaccataatgcacacttagagaactccagaatttgagctgacaattattatacacgatcaagggacacagtatcattatcatcattgtcatgtcatcatcatcatcatcattgttatcatcatcatcactacctgccaggcagtattaaaaatattttatgtataatagcttatacaatcctcacaataaccttactactttttttgtcattttgcaggaaactgaagcatgaagatacgaattgatgtgtccatttcatgaactgatgtgtccaagatctcatagctagtaagtggataatccaggattcaaattcagtcattttggctccactatccattattgtaaatatga

SEQ ID NO: 1888846 - DNA, 4001 bp, Homo sapiens
catagctaaagggcataagcacattcatacaaccatggaaaattagccagggctcacttagagccaagagacatcttatgagaaaataatcataagtggagacctcatagatggatatagtacaagatcaaaacatctcaatacatgaatgattatttcaaatgtaggtggcaaaggtgcatagaggacccaccgtgtaacatgttcagacaaaagttgatgaaagccattagtgatatttgactgtttgatcttgacttacacaggtacacaaaagtagtttacactattacgtagcatttatgccaaaggagctaagaggcatagatagatacagcacacaaacttgttttcggagaataaaaccatgctgtggtgcttacttagacagatattgtgccttatacaagagccacggtacaggggtaaacagctttgtccatgagtagatgtcagatatgtcaaaagagacctgacaccatatactcagatgaccattgcatgaacagccaccactagtatttgggcatttgactatgatggctacctacacaatcccacgacataaagtaaaagaatgatacaggagcaggtagacatgaaaccatgattaccaaaacggatatggttggtgattaaaaatcattattttctttagtctgggagaagatggcaatgattaaacgggtgaagttatgatatatgctgaaacagccatgttgcatgaacagccatcacatcataggcatttaagcatttgactgatgtacaattagaaagcccagtgacatgagataacatctgtctttttggaacagataaacaatgtgcagaaaaaggcagaagtgatctaagagtagagagtcatagaatatgagtaaatactaaactcatatacacgatgcataaaacactatttccctgtaaagcagtagacaatgaaggttcctgctcagaaaccatggggtatgagcagacaagcatgctgcatgctcagacaaccatggtgcatgagcaaaaacctacaatataaaagcaggtgggtgtgatacaagagtgaataacacaatgaggaatatgcccagatggacaggacatatgaataaaggaaacataacacatgaatacaacttatttaggcaaacagcatatgacaatgatgctggaggagatatcatggcacatactcaggcaatcatggtgcatgagcaactaacactaatatttgactgttaaaccacgatgtacacccagatatcccaacaaaaataagctgatgaccataatataggagcagatgaacaaggatattgaagaagatgctgataataaaatagcagaaaacgatagtgcagtagctaatagaatactacagatggcaacgattcaaatgactgccatggcatatacttatataatgatgctttaaacactatcacaagtatcagcatttgaccataatgcacacttagagaactccagaatttgagctgacaattattatacacgatcaagggacacagtatcattatcatcattgtcatgtcatcatcatcatcatcattgttatcatcatcatcactacctgccaggcagtattaaaaatattttatgtataatagcttatacaatcctcacaataaccttactactttttttgtcattttgcaggaaactgaagcatgaagatacgaattgatgtgtccatttcatgaactgatgtgtccaagatctcatagctagtaagtggataatccaggattcaaattcagtcattttggctccactatccattattgtaaatatgacaataaatgacaatatgctgtgattcttctgacagacatgataccagattttaaaacagagcagaaaaatgagtggctttgttccagaagcagatggcaatgttgcaaaagtagacaccatagcacatgctcaaacatccgtggtgcataagcagccaccacaggagtctgagcatttgaccacgatgcacacacagaagatctgcaacatgagctgataccaggttatagggagtagacagatgacaaaggacagagaaaactcatcacaatagtgaaagacatggtgtagaaattaatatacatagtacaaaatactcattcccagtacaagtagacaatgattgtgtattttcacacaagtgtggtgtttaagtttaaatacgtagtacaacttcaatcacagtatatgagcacaaattcattatgtatgtttatattatcatggagaataggtcaattcatacatgaaaaaggggatagatatggtatcccaggaaagaatcacagagtaaaaactgctcaggtgatacaaaaaatacgggtatgtatggcattttgtcaaaaagaagatcaaaataatacaggatgttcagatgaataagatgccaaaaagcatgttttaatatgtgttcatgaggtccagtcagacacctacaggacataggctatcaattatgacacaggtgcagatggacatgatatggaaataaaacatggtgtgattcttacttgggtagatatggtatgtaatcaaaaataaccatgcaagcaattaatgactttggcccaagagaagatgacagtggtacaaaaaaaagactcacatggacataatgactcataaaaaaaataaccatggtgattgactctacacatttgtgtttgggcatgatataaatccaaacgatcccattacacaaactaacagctatgatacagttagtaagcatgatacaggaacagacagcaaatatggagaaaatacccattctgcaggagccagtgaccacaattcaggaactaatattcatgttattaaagttatcattctccacacagaaggagattatgtttattttttacacattaatgatgggtgagcaatatctatgatgtatacacagagaatcaattagtatacacataaaatacacaagcagttggctatccttcaggagtggtatccattcagacgcatgtccctatccgatatccacaatactgaatcaagttttcagttaaggataagatgacagtggtgcaaaatgacacctcatgccatatgctcagatggctcttttgtttgagcatctgatcatggtgcacaacttaacaaccataaaatgtgaggtaatgaatgataatagagaagactatatcccaagactatatcgctgtaaatacgcaaaatacaggaacagttggatatagtacaagagcaaaaagcaatgttgaagtaggagcccgacatgactgatatatgagctagtaacatgctgcacagtgtgataaccatgacatagaagttggtcaatcacagatcaatctcaaacatcagtgatatatgaacagagaactaagctgtagtgcttcctcggatgaacacatgcctaatttaaaagctataacataaaagcaaatgtctccaaatgtaaatgctattatgggttgaattgtgttctacaaaagaggggcactgaagttataactcccagtacctgtggatgtgactttatttggtaatagggtctttgtagatgtaatcaagttaagatgcctttataatggattagggtcagccctaaatccaatcactggtgtctttataagaagggggaaatttagatataacagacaacgagagaaaaccatatgacaatgaagttagagattggagtgatgctgccacaagccaagaaacacttgggattaccagaagctgaaaaatgcaaggatgactcctttgctaggctcgagagagagcacggctttactgacactttgatttagaacttttagcctccagaactgtgagaaaaacatttctgttgttttaagccacctagtttaaagcactttgttgtggcatccttgggaaacaaatacagatgacattgttacaaaaggactctgagacatgtttaaatgactgcatggtgtataaatatctccccctgtagttttaccacc

SEQ ID NO: 1888847 - DNA, 4001 bp, Homo sapiens
ggtcaggagttcgagaccagcctgaccaacatggtgaaaccccgtctctactaaaagtacagaattagccaagcgtggtggcgcacgcctgtaatcccagctactcaggaggctgaggcaggagaatcacttcaacccggaaggtggaggttgtggtgaatgagagatcgggccattgcactccagtctgggcaacaagagcgaaactccgtctcaaaaagaaaaaaataaagaaatgcaattccttaggccccatccagacctattgaatgaatctctggagatggggttggctggctgtgtcttagtaagtgctaaagttttaagaaccactagaggatccaaataacttttggtgttcagtctcaaaccactaattagctgcgcatgagaaatttctgctttaggttagtcaccctatggagcccccgaaccctaaatattaacagtaggcccacatccaggtttccatctgctagactccaaagcaaggcagcagccatccctctcagtagccctgccaccaaatcctcttctccgagaaccccaaaacagagtttgattgacaagttcattcttctctcctgtcagacctcaaaatgtgcccagttccttaaaggtatgtgtcccattggtttacaactcttcattcccttcctaagaatgagcacgtgtactaaaacaaaattagtacatgtcatccaaatattgtcagggtaataaaattcctaaaattaggcatcttggtgctttatgtagatgcaaacttgaaaagcagctatgtccaagttttcctttaggatcctcccaagagatattttacaaactcctctagcattgctaattattttttttaaaaaaaaaagagtcattttttcagatctataaatttcatttattttgaggttcattcacattcagtaacaatctgatcattcaccaaagttccaaaacacatactttataaattagctatcatagtttttagaaatccaaatatatttcaaattattttttaatagcagcaactagagaaaggattttttaccatctagcttactgtagcgctgatcaggaatgtcgccaacaaaggtcctgcggtttacagatggataccgtgcaatttttctcctatgatactcatcaaaattgcatcgtgatccacccgacaacagcaaaacagatcattttacaatgactaaatatcagaacttacggcttttaaaagttaaaataagaagacgataaaaatcctcctttcttccacaggccgggacaagtgcaatactttatatagaacacaagtaatgcaacaaatccccacccagggatgaatgggcatgagtgctggagatacgcatgaaggtgtgttcacacagacgtaggaagcacacattatcacaatcagttttgcatggatttgcacagccacatatacatatatacgctgaaatgcaaacctgcaaaactaattgtaagtagcaatgtctttgaatattctctccatcaacaagagatttgttatccaagagtactggaagtgcccatactacagtagagtcatgccaaaactacctgcactatgagcactttggtactactaggacccaatcttatcctctgtacacaactgtacactgcacagtccccaccatctgttcccaacaaacaataaaaaggcaaaaaacaaaccactgaaatgtgtcctattcaaattactactcaaggcatacttttaaaatgctgtatattaggcagcctgtgccagaaggggcatttagggcagtagattctaagctgcttcactaactgcactagatgcaccttaacacaagagacacattataagaagcagctcaaaagcatcaactacttaattatgcacaaactacagttctcagtagccattgactaaatcaccatggtaatgtaagaagtgcttacattgcagtagatctcaaaaagctacctgcactgtaagcacttttacatggccaaggcctattcctgtagcaaaattttaagtcttccaggagctcttcttttccgtcctcacagatccatgcagactcacctggttaaaacaacaaaacaaacacacacatattagaaactaaacaagtaaactactagttaatattcctgaaacaggctttcctttggcttacagagtctaagctaggttttgtggtttcaaccaaatcctgagaaatattaataatctcaattatttacacagaattgaacacgaataacactggcaactgcaaaaagtccaattcttatgtataagcagattttggactccccctctccatctaagaaaatttgatatctgcatctcagtaatttgcaggcacattctatccaccctgattttataagaggaggacctagagaaaggagcatgtaaaacccaggatgagtattcgagtcttcagatcattcagagcttttgggctccatacggaaagtgactgttagattaaatgaatattcccagcccccaccccattaatagaaaatgagagaaattttagagctggtttaagaaacacagccttacagtcttcacataatgcacagatggctgagagatgtcacattttgatctatttcaaagggctctacttctgtttaaacatttatggacccattttctccattaaaccaaagtaggcagattagctcttcttcccttcatgtcattatcttccataagaaaaccttctcccatttccaagtgcttattttacctaagaacatacagcaaggaagtgagcctctatgtgaaaaaggctcacagggtcccctatctcttccatgatggggtaacttttgtttaaaagaaaaacaaaaacgtttgggacagaatctgtaatacgttaaacgagtgagggaattttaaatgttgaactttcgtcacgatatcttatgccactaaatgagtctttagaagtctttacaaactaaactgatttataaaacttatacatcaatctggaatcaattttctattagggaagaatggatttagtatagaaatgagaaaaataacatttttccccttaaattgggtttctacacctgtgaagatttcttttccattaaaaaaaaaatactccaaacttgactcaaaatgcatagtatttgccaacccaacctggccaaactgagccccacagccatcagacagggcgcccttctagttactaccttttgctaattagcggttcatctggcatccctcgcgcacgctgggcagtcactctccaatccccttaaattgcaaataataataataataataaggaaaagaaagaaagaagtccttccctgtacgcctttgtggctcccttttgcctcttcccgcgtctctcacacccttacctaatgctcccgttgaagtccgcgagcagcccgcgcgtccagggtgtgctccagctgctcacaccacgcgctccagtcctcgtgcagcctcagccgccgccgaaattaaagagaaagaaacaaagcatcatgggaaacggagttctccattcaaagcaccaaaaacgcgccaagcccacgcctccctccccctccattcccgggttggtgggatagaagccaagagggaggggagtcccttttttccctccacgtgcaccccctcatttcacaccctcaccaccaaagttttccaggaacctaaaggtcaacggtggagaagaaaaggggagtcgtttcccgcgcgctgcccgctacccctcaaccgcactctggtactttgcttttctcaagtcccgcccgctccgtcccctcccacccaaccagtcaactctaccggatcacagctgccccaacgaagggctcccttcttgcccagccacccgctcgggaaaccgcgcgcgggacccagctccggcccgcccctcgcaggtggagagcgcggggatcccgcacgggccgccctctccgggtgtcccctccacacgtatacccagtgtcccagcgcgcag

SEQ ID NO: 1888848 - DNA, 4001 bp, Homo sapiens
cccccggcctgaacccccggccttaaacaccctccccccacaacccaggccccaaagtcttgggccttcattaattctgtcaataaaatgtttcaaggaagccatctgcccgcttcagtcactttgccttggggtgggggtgggggggcggtgagatgggttggggggttgtgagacctccacagctggagggatggagaggtggtgggggtctggggttgggtgggagccagggatggcacagaggagcagtctctccgggtgacagtgcaggggagtggccctgggtgggaaggggacacccccgctggttctgagcaagtcagggcctgcccgggaaagtcctcagcatgatggtgttcgttggggcgggtgggcctcaagaccatgactgcagtgttgcgacaggacggacttctaaggcaaccggggtggggacggagaggtggacccggtgcttggcaaggggccctggaccggaagacggaggactgagtagtcggggcggggggggggggggacaacagtctagaaatgcgcagacatggaattagggtcacgagtttcgtttgggtcatgttcagatggagaggctgtgggatgcctttagcaacctagaccacttgcattgcagccgagctagcagcagctggtgccccgccaggccccgcgtaccttcccagggtcttggatccgcatccccgagaccctcgatttgcatacgccgctcacagcccggccaggccccgcctccgatcccgctctttgcacctcatcagggcaaggggcaggctcgggctggggagccggcgcgggcacggcggcagcccgccgagggggacgcagggcacgtcgccccgccccggcccgcccgccagctgcggcggcgcgtcgggaagtgcttggggcggcgagcatggcggcagcggctgcaggcctgggcggcggcggcgccggcccgggacccgaggccggggacttcctggcccgctaccggctggtatcgaacaagctgaagaagcggttcctgcggaagccgaacgtggcggaggccggcgagcagttcggacagctgggccgggagctgcgcgcccaggagtgtctgccctacgcggcctggtgccagctggcggtggcgcgctgccagcaggcgctcttccacgggcccggggaggcgctggccctcaccgaggccgcccgcctcttcctgcggcaggagcgcgacgcgcgccagcgcctggtctgccccgccgcctacggggagccgctgcaggccgccgccagcgccctgggcgccgcggtgcgtctgcacctcgagctgggccagccggccgccgccgccgccctctgcctcgagctggccgccgccctgcgcgacctgggccagccggccgccgccgccggtcacttccagcgcgccgcccagctccagctgccccagctgcccctggccgcgctgcaggcgcttggcgaggccgcctcctgccagctgctggcgcgcgactacaccggcgccctggcggtcttcacgcgcatgcagcgcctggcgcgggagcacggcagccacccggtgcagtcactgccgccgcccccgccgccggcaccccagcccgggcccggggcgacgcccgccctaccggccgcgctgcttcctccgaactccggctcggcggcgccctctcccgccgccctgggcgccttctcggacgtgctggtccgctgcgaggtgtcccgcgtgctgctgctgctcctcctgcaaccaccgcccgccaagctgctgccggagcacgcccagaccctggagaagtactcctgggaggcttttgacagccacgggcaggagagcagcggccagcttcccgaggagctctttctgctgctccagtctttggtcatggctacccacgaaaaggacacggaagccatcaagtcgctgcaggtggagatgtggccactgttgactgctgagcagaaccacctccttcacctcgttctgcaagaaaccatctccccctcaggacagggagtctgatccatcccattcacccagtgacttctttttgcccaggcctggactttttgcatcagtcacgttaaccagatgactttgcctgttaccaaacctcatgcatccacgtttgcgtctggggaggaataaaaagacatcgttcccgcttctgcgttttgttattcctactgccgccataggaattatttcgttggctgaacgttaccagcaccccgagaacacattttgatagaatcagagtagaggacatggctgtcttctaaaaagccacgacatgaaaatgacaatccctttcgtctccttcctccgctgcttccacctaacgcagcctcctgcctccgcctttgtttcatagtgaggattttattttgcacggcgccctccctctaaatacctaccctagatgatttcatcctgcccctcacttcttaacatattcctgtgtctttgtaatggccaaatttctccttccactcgtccgcacggtacgtcttcatgggagtcattttattccttacagcttccttgtaaccacagccctaaatccatgataaagctactcttgtactcctcatgtgtggttttggtgtccgtcgtctataaaatgtgactctcttacctacttgtcaggaggccagcagcagaaccagatagctgtttgggctccaggatgtattcgttcctttgaaatttgcgctatgcctcctatgtgggcaacgaacctgcagagatcatctatgatgtgctccgtactcgggtgactgcaatgcagatacatccagtgcagcgggtctggtgccgatgcatcgatttgcattggaattcacggttctggttccattcgcagaggtatatgcagtctggatcacaacagcttttatttgtaatagggattttttttttttttttttttttttttccccccgagatggagtctcactctgtcgcccaggcaggagcgcagtggcgtgatctcggctcactgcaacctccgcctcctgggttcaagcgattctcctacctcaacctccagggtgcctgggattacaggcgtgcaccaccacgctgggctaatttttgtatttttaatagagatggggtctcaccatgttggccaagctggtctccaactcctgacctcaaatgatccaccctcctcggcctcccaaagtgctgggattacaggcatgagccaccacgcctggcctgtaatagggattttgctgcaacttttagttaagtaggtgaaatcagagtgcgtggccctttggtgttgtgcgatcacgtgactgcaaggcagcctccgtgttcccccaaagcaggatggcgttccgtttgagaacacttaagtttccaaggctttctggctcaaatggagcatgccccccaactacgctgttttcttatttattgcgtctttttaatccttttgatggtgacaacaagaactcttcagaatatagcctctttctcaaactttcaaccctggggaaatgcatcctttgggccgaagttgcacacaatcctgatcttcggggctgagatgtaaggacacagtttggagtaggtgtttttgttttgcgtctttttgcaggggagaggtgtggagggttgtcactgtgagttgagtgcctccaaatgggtgggacttgtagggtgttcttttctgcttctatttctatttcgacagtgtggaagtaatgggaagcacaggagaggcccattccaccatcattcctctttctctcacttggctgccaggaagggtcctacggagccctgaacgcctagcccaaattattgtaaaagcggttgaagggctcatgctcctttgctctttggctctttcctggtatgctcctcttaacccgggctgcagacctggccggctggcttcttgtcaggttcaggagttacggagcatgactggtgaccagtttgggatttgggcttcaggagaagcctccttagg

SEQ ID NO: 1888849 - DNA, 4001 bp, Homo sapiens
ccggcctgaacccccggccttaaacaccctccccccacaacccaggccccaaagtcttgggccttcattaattctgtcaataaaatgtttcaaggaagccatctgcccgcttcagtcactttgccttggggtgggggtgggggggcggtgagatgggttggggggttgtgagacctccacagctggagggatggagaggtggtgggggtctggggttgggtgggagccagggatggcacagaggagccgtctctccgggtgacagtgcaggggagtggccctgggtgggaaggggacacccccgctggttctgagcaagtcagggcctgcccgggaaagtcctcagcatgatggtgttcgttggggcgggtgggcctcaagaccatgactgcagtgttgcgacaggacggacttctaaggcaaccggggtggggacggagaggtggacccggtgcttggcaaggggccctggaccggaagacggaggactgagtagtcggggcgggggggggggggggggacaacagtccagaaatgcgcagacatggaattagggtcacgagtttcctttgggtcatgttcagatggagaggctgtgggatgcctttagcaacctagaccacttgcattgcagccgagctagcagcagctggtgccccgccaggccccgcgtaccttcccagggtcttggatccgcatccccgagaccctcgatttgcatacgccgctcacagcccggccaggccccgcctccgatcccgctctttgcacctcaccagggcaaggggcaggctcgggctggggagccggcgcgggcacggcggcagcccgccgagggggacgcagggcacgtcgccccgccccggcccgcccgccagctgcggcggcgcgtcgggaagtgcttggggcggcgagcatggcggcagcggctgcaggcctgggcggcggcggcgccggcccgggacccgaggccggggacttcctggcccgctaccggctggtatcgaacaagctgaagaagcggttcctgcggaagccgaacgtggcggaggccggcgagcagttcggacagctgggccgggagctgcgcgcccaggagtgtctgccctacgcggcctggtgccagctggcggtggcgcgctgccagcaggcgctcttccacgggcccggggaggcgctggccctcaccgaggccgcccgcctcttcctgcggcaggagcgcgacgcgcgccagcgcctggtctgccccgccgcctacggggagccgctgcaggccgccgccagcgccctgggcgccgcggtgcgtctgcacctcgagctgggccagccggccgccgccgccgccctctgcctcgagctggccgccgccctgcgcgacctgggccagccggccgccgccgccggtcacttccagcgcgccgcccagctccagctgccccagctgcccctggccgcgctgcaggcgcttggcgaggccgcctcctgccagctgctggcgcgcgactacaccggcgccctggcggtcttcacgcgcatgcagcgcctggcgcgggagcacggcagccacccggtgcagtcactgccgccgcccccgccgccggcaccccagcccgggcccggggcgacgcccgccctaccggccgcgctgcttcctccgaactccggctcggcggcgccctctcccgccgccctgggcgccttctcggacgtgctggtccgctgcgaggtgtcccgcgtgctgctgctgctcctcctgcaaccaccgcccgccaagctgctgccggagcacgcccagaccctggagaagtactcctgggaggcttttgacagccacgggcaggagagcagcggccagcttcccgaggagctctttctgctgctccagtctttggtcatggctacccacgaaaaggacacggaagccatcaagtcgctgcaggtggagatgtggccactgttgactgctgagcagaaccacctccttcacctcgttctgcaagaaaccatctccccctcaggacagggagtctgatccatcccattcacccagtgacttctttttgcccaggccgggactttttgcatcagtcacgttaaccagatgactttgcctgttaccaaacctcatgcatccacgtttgcgtctggggaggaataaaaagacatcgttcccgcttctgcgttttgttattcctactgccgccataggaattatttcgttggctgaacgttaccagcaccccgagaacacattttgatagaatcagagtagaggacatggctgtcttctaaaaagccacgacatgaaaatgacaatccctttcgtctccttcctccgctgcttccacccaacgcagcctcctgcctccgcctttgtttcatagtgaggattttattttgcacggcgccctccctctaaatacctaccctagatgatttcatcctgcccctcacttcttaacatattcctgtgtctttgtaatggccaaatttctccttccactcgtccgcacggtacgtcttcatgggagtcattttattccttacagcttccttgtaaccacagccctaaatccatgataaagctactcttgtactcctcatgtgtggttttggtgtccgtcgtctataaaatgtgactctcttacctacttgtcaggaggccagcagcagaaccagatagctgtttgggctccaggatgtattcgttcctttgaaatttgcgctatgcctcctatgtgggcaacgaacctgcagagatcatctatgatgtgctccgtactcgggtgactgcaatgcagatacatccagtgcagcgggtctggtgccgatgcatcgatttgcattggaattcacggttctggttccattcgcagaggtatatgcagtctggatcacaacagcttttatttgtaatagggattttttttttttttttccccccccgagatggagtctcactctgtcgcccaggcaggagcgcagtggcgtgatctcggctcactgcaacctccgcctcctgggttcaagcgattctcctacctcaacctccagggtgcctgggattacaggcgtgcaccaccacgctgggctaatttttgtatttttaatagagatggggtctcaccatgttggccaagctggtctccaactcctgacctcaaatgatccaccctcctcggcctcccaaagtgctgggattacaggcatgagccaccacgcctggcctgtaatagggattttgctgcaacttttagttaagtaggtgaaatcagagtgcgtggccctttggtgttgtgcgatcacgtgactgcaaggcagcctccgtgttcccccaaagcaggatggcgttccgtttgagaacacttaagtttccaaggctttctgcctcaaatggagcatgccccccaactacgctgttttcttatttattgcgtctttttaatccttttgatggtgacaacaagaactcttcagaatatagcctctttctcaaactttcaaccctggggaaatgcatcctttgggccgaagttgcacacaatcctgatcttcggggctgagatgtaaggacacagtttggagtaggtgtttttgttttgcgtctttttgcaggggagaggtgtggagggttgtcactgtgagttgagtgcctccaaatgggtgggacttgtagggtgttcttttctgcttctatttctatttcgacagtgtggaagtaatgggaagcacaggagaggcccattccaccatcattcctctttctctcacttggctgccaggaagggtcctacggagccctgaacgcctagcccaaattattgtaaaagcggttgaagggctcatgctcttttgctctttggctctttcctggtatgctcctcttaacccgggctgcagacctggccggctggcttcttgtcaggttcaggagttacggagcatgactggtgaccagtttgggatttgggcttcaggagaagcctccttaggcctctggt

SEQ ID NO: 1888850 - DNA, 4001 bp, Homo sapiens
ccccggcctgaacccccggccttaaacaccctccccccacaacccaggccccaaagtcttgggccttcattaattctgtcaataaaatgtttcaaggaagccatctgcccgcttcagtcactttgccttggggtgggggtgggggggcggtgagatgggttggggggttgtgagacctccacagctggagggatggagaggtggtgggggtctggggttgggtgggagccagggatggcacagaggagccgtctctccgggtgacagtgcaggggagtggccctgggtgggaaggggacacccccgctggttctgagcaagtcagggcctgcccgggaaagtcctcagcatgatggtgttcgttggggcgggtgggcctcaagaccatgactgcagtgttgcgacaggacggacttctaaggcaaccggggtggggacggagaggtggacccggtgcttggcaaggggccctggaccggaagacggaggactgagtagtcggggcggggggggggggggggacaacagtccagaaatgcgcagacatggaattagggtcacgagtttcctttgggtcatgttcagatggagaggctgtgggatgcctttagcaacctagaccacttgcattgcagccgagctagcagcagctggtgccccgccaggccccgcgtaccttcccagggtcttggatccgcatccccgagaccctcgatttgcatacgccgctcacagcccggccaggccccgcctccgatcccgctctttgcacctcaccagggcaaggggcaggctcgggctggggagccggcgcgggcacggcggcagcccgccgagggggacgcagggcacgtcgccccgccccggcccgcccgccagctgcggcggcgcgtcgggaagtgcttggggcggcgagcatggcggcagcggctgcaggcctgggcggcggcggcgccggcccgggacccgaggccggggacttcctggcccgctaccggctggtatcgaacaagctgaagaagcggttcctgcggaagccgaacgtggcggaggccggcgagcagttcggacagctgggccgggagctgcgcgcccaggagtgtctgccctacgcggcctggtgccagctggcggtggcgcgctgccagcaggcgctcttccacgggcccggggaggcgctggccctcaccgaggccgcccgcctcttcctgcggcaggagcgcgacgcgcgccagcgcctggtctgccccgccgcctacggggagccgctgcaggccgccgccagcgccctgggcgccgcggtgcgtctgcacctcgagctgggccagccggccgccgccgccgccctctgcctcgagctggccgccgccctgcgcgacctgggccagccggccgccgccgccggtcacttccagcgcgccgcccagctccagctgccccagctgcccctggccgcgctgcaggcgcttggcgaggccgcctcctgccagctgctggcgcgcgactacaccggcgccctggcggtcttcacgcgcatgcagcgcctggcgcgggagcacggcagccacccggtgcagtcactgccgccgcccccgccgccggcaccccagcccgggcccggggcgacgcccgccctaccggccgcgctgcttcctccgaactccggctcggcggcgccctctcccgccgccctgggcgccttctcggacgtgctggtccgctgcgaggtgtcccgcgtgctgctgctgctcctcctgcaaccaccgcccgccaagctgctgccggagcacgcccagaccctggagaagtactcctgggaggcttttgacagccacgggcaggagagcagcggccagcttcccgaggagctctttctgctgctccagtctttggtcatggctacccacgaaaaggacacggaagccatcaagtcgctgcaggtggagatgtggccactgttgactgctgagcagaaccacctccttcacctcgttctgcaagaaaccatctccccctcaggacagggagtctgatccatcccattcacccagtgacttctttttgcccaggccgggactttttgcatcagtcacgttaaccagatgactttgcctgttaccaaacctcatgcatccacgtttgcgtctggggaggaataaaaagacatcgttcccgcttctgcgttttgttattcctactgccgccataggaattatttcgttggctgaacgttaccagcaccccgagaacacattttgatagaatcagagtagaggacatggctgtcttctaaaaagccacgacatgaaaatgacaatccctttcgtctccttcctccgctgcttccacccaacgcagcctcctgcctccgcctttgtttcatagtgaggattttattttgcacggcgccctccctctaaatacctaccctagatgatttcatcctgcccctcacttcttaacatattcctgtgtctttgtaatggccaaatttctccttccactcgtccgcacggtacgtcttcatgggagtcattttattccttacagcttccttgtaaccacagccctaaatccatgataaagctactcttgtactcctcatgtgtggttttggtgtccgtcgtctataaaatgtgactctcttacctacttgtcaggaggccagcagcagaaccagatagctgtttgggctccaggatgtattcgttcctttgaaatttgcgctatgcctcctatgtgggcaacgaacctgcagagatcatctatgatgtgctccgtactcgggtgactgcaatgcagatacatccagtgcagcgggtctggtgccgatgcatcgatttgcattggaattcacggttctggttccattcgcagaggtatatgcagtctggatcacaacagcttttatttgtaatagggatttttttttttttttttttttccccccccgagatggagtctcactctgtcgcccaggcaggagcgcagtggcgtgatctcggctcactgcaacctccgcctcctgggttcaagcgattctcctacctcaacctccagggtgcctgggattacaggcgtgcaccaccacgctgggctaatttttgtatttttaatagagatggggtctcaccatgttggccaagctggtctccaactcctgacctcaaatgatccaccctcctcggcctcccaaagtgctgggattacaggcatgagccaccacgcctggcctgtaatagggattttgctgcaacttttagttaagtaggtgaaatcagagtgcgtggccctttggtgttgcgcgatcacgtgactgcaaggcagcctccgtgttcccccaaagcaggatggcgttccgtttgagaacacttaagtttccaaggctttctgcctcaaatggagcatgccccccaactacgctgttttcttatttattgcgtctttttaatccttttgatggtgacaacaagaactcttcagaatatagcctctttctcaaactttcaaccctggggaaatgcatcctttgggccgaagttgcacacaatcctgatcttcggggctgagatgtaaggacacagtttggagtaggtgtttttgttttgcgtctttttgcaggggagaggtgtggagggttgtcactgtgagttgagtgcctccaaatgggtgggacttgtagggtgttcttttctgcttctatttctatttcgacagtgtggaagtaatgggaagcacaggagaggcccattccaccatcattcctctttctctcacttggctgccaggaagggtcctacggagccctgaacgcctagcccaaattattgtaaaagcggttgaagggctcatgctcttttgctctttggctctttcctggtatgctcctcttaacccgggctgcagacctggccggctggcttcttgtcaggttcaggagttacggagcatgactggtgaccagtttgggatttgggcttcaggagaagcctccttaggcc

SEQ ID NO: 1888851 - DNA, 4001 bp, Homo sapiens; identical to SEQ ID NO: 1888848

SEQ ID NO: 1888852 - DNA, 4001 bp, Homo sapiens; identical to SEQ ID NO: 1888849

SEQ ID NO: 1888853 - DNA, 4001 bp, Homo sapiens; identical to SEQ ID NO: 1888850

SEQ ID NO: 1888854 - DNA, 4001 bp, Homo sapiens; identical to SEQ ID NO: 1888848

SEQ ID NO: 1888855 - DNA, 4001 bp, Homo sapiens; identical to SEQ ID NO: 1888849

SEQ ID NO: 1888856 - DNA, 4001 bp, Homo sapiens; identical to SEQ ID NO: 1888850

SEQ ID NO: 1888857 - DNA, 4001 bp, Homo sapiens
tcattgctgtatctgcagctcctagtacagaaccaagtattagggtacaactttagttaatgaataaaagaacaatgtggggtaaagtttcagtgccagtaaaaaaaaaagaaaaacagccaaccaataaaaaattattctacaattatggcaattgaaaggacactggtgatggttacgtaagctttaactcttcaaaatatatcattaaatatgcataccaaagcttttgatttgaatttgtttttagaaatttcatgaattacacacttctaactgatgataataatcaccattactaggtaggtaccatgagtttttagcgaaaaaattatatatatgatatatatgttatatatatatgagtatatatacatatatacacatatacacacatacatctattattttattgttttttaagttaaggggttttggaatctcatgaggaattagttacagtaactaataagcaaagagcagaaaacagtataattttcataaatcaatttttaaaaattttattcacatcttcatttatcataagttggatcaatagactttctaatccattttactgtcttcagatagacaagatattattagtctcgtattatatctaaaggctcaggaaggttaattcactggctcaagattacacacctaataagtgctgaaggagtatgagacagacaaggttctgcagcgtagtagcagaaatattgcaaaagagtgaataaaataaaagctgaccacattttattttagtatgcactatgtacattcagaagtcagattaatcttcctatactgattttcttagattagtatatttaaatgggctgacttttccaaagcgggtggctattactttattcagcaaacatttatatggattccaattcaaccctatagaaagtgtttgtagctagatatagaatggtgaacaaagcctgcataatccttgtacacttaataaagaagaaagatgaacaaggagaaacaggagggagaggagggaaaataggaggagaatgcacataataaggttctgtctgataaatggcaaagtcagtaagaagcaagttgcatgaaaaggggatgagaaaactagcttagagtcaaagtgatctgcatatcacttacaagacaggcataaatattttgggtgggacaatcagtttgcttttctcctaacactctccctaacctgatgaaattaacttttcctgataccaactactcctcacaaagatgtcctaggaggaaatagaaagaaatatgctaagatctttgatcttctcaggaagaaaaaggttaaaaataaataaactattatttgacatatttaataggaatttttaaattagacataactgaagttattttcattatttaaattaatttttaataacttaggctagaaatttaacccaaagaataaaatgatgggcagagtaattactgaaacattttggatacgctgcctataaattatataacgtagtaaagaaaaaaaaagctaagtgacaaagaggcttgcaggaacctagactatttcatattatatcaatgtaatgtgcaaatgaagttaagaatggatgattataacaagatttattgatgatataattcttgttttagtttattgactgtcttataataatgatttaataatatttatatattcgctcaaatttctacaataaatacttttgtgcacttgattcttactaaatcccaagctcaagtcctcttttctccccaaaagtttcccagatgagaaataatctggccttcctctaaccttttccaattctttaattcttatcacagactttcagatatggcgatcacttgtgcattctccttatatttcttctctcccatactagatcataaggtctgtctgggtcgtaggattgtatcctccacataacaggtgctcaaataagacttgttggtttatttattctttcaacaaatacttattgaggacctgctatatgccaggcatggagaaacacaatgtgttgaatatgttatgatattttctttaaaactattagaccataattttcagtttgataatatttcagaaaatgccgcaatatttctaatcagcatgtattaaaatgtttctttctatataaatccatttcccacctctattccatttatattctcacttaagtgaacttctgttatttttcttccacttataacatttcttattcatgttttggactaggcctcttaacaagtacttctaaatatttggctattaggtgactaagtttagttttggttcctgatacaagcaaggagacgcaaaaaataaaaataaattttctaattataaggaatatagtcaggactgcatcaagtacattttatacttggaattatatgcagagatcacgcagctttccaaccaaacaaaatcattctaacagtctaggaaattttttttcctatttcaaatcaaagacatatgatctacttagaattgttgaagtaacagattctcattataaaagaaaacacctggaaattatgtgaaattttaaataaatgggttaaagaaacatccagttagctgatcacaagatgatatgttcactgatatcatcatgaggtaaaattatactatggagatttcaattatcatctgtaaatagcatctgatgtgtcatcaaaagaaatttcaacatgatgaaagatcataataatgttcttccaaatgtatttttatagttctattaaaagaatgcttctaactgctactgaaagctaactttgactattcatgtgaaatttcagtaaatttttaatgtaaataaaagaggaataaaaaatgtattataatagaagcaacatgcaaatttaagttgtgagtttaaaatttcagttgtggaatagaatttggaagcatagttagtaaacagctgaaaatggagagttaaaaaaatctacatgaagtacaaaattactctttaagaattcatgttttacccttctggctgtctttcaatctctattatgttcacactgcatgctctgggtattgaataatactatacacagcccatgcaatgagcacatcctagagccaagtccagttgtgatagaaggctcaaagggtggtatcatttgatcaaattttaaatgttaagtaaatttgaaatgattaattttgaaagtcaaaaacttagccaaaagattataggattttaaagcttgaagagacaatatctaagtagtctcttaccctctagccataccctctaccctcttccaaaccataccagacagatgaatatctattcaaaaggaattccaaatttatctgggaacaactgggataacttatcagaatttataatccctaatattaaacatctttgttcatcacatccaaattaaattatttgctttgaagactaaaccaaaagtagtgtcatggaaaaaatattggccttagaactgagaaaacataaataataacttataactatctgtctttgaacaagtcagttaaattcccctagcctccgtttctatgcctgtaaaacagggataatcataaatgtagatatcatgtaaaatactaacggagttcatacatgcaaaagtgttctgtaaactgcaagaagtgagcaaatataatggattattattctggggtagttaatactgcaacccatgtcaccattttctcctcttcataggttttattttctaatcttttcatcatcttactgtgtctttgaaatctttccaagagcctctacctcactgttcaattcgacagccctgactagatttaagattcaatagagcagctggatggtagctattttgattacttattattcttacttcaatagaaagcaaactgaacaagacagatgaggaactgtctacaagggagtttacaatatggggcagaaagagggagataataaagaagagaacaaataaagaagaaaattgtatac

SEQ ID NO: 1888858 - DNA, 4001 bp, Homo sapiens
gtgggaggatcacttgagtccaggaggtggaggctacagtgagccatgattgtgccactgcactctagcttgggcgacagagtgagaccctgcctcaaataaaaaaaaaatgtagtccattaaatttctaaattccataaggatagaacagtggttttccattaggggttattttgttccataccccttcccagacatctggagatatatttggttgtcataattgggagttgaggatgctattggcatttagtaagtagaagctggggatactgctaaaacatcttacaatgcacacaacaggccttcccctaccctctattagcccaaaatgtcgagtgccagtactggagaaactctggggtggagaatgtgtcattttgttagcctctggaaacccactggctagaacattgcctagggcacagaaaacacttaaaacttgtataaatgaataaaaacacaccatcctgtctttctccttgagttttatcctgatactgtaaactgcccattttcaaaatactgatcttgtgctcagtctcttctagtaaaccaacctttgaagcttcatagcatcaattttttaaaaggtatcaggtactatcagagtaaggacttcttataacttctgattcctaaagacatcagaatgttgctgcactgagcttttcaatacccataactcctggtagtaacctcaagaagagttagggcttattctgataaaaatacaagaacaaaaaataaaagcattttacaaaatattgtctcaaggataaattaccaattagaatatgaaaaggacttctaaaaagactgaaatgtcttcaaccacaaatgtgacagattcatgaaacatttgctgaacatcagccatgtacagagcgctatactaaaagaatataaaagctgtttgaaatataccatataaatatgatgtctgctataaactaatattgacattgtatctttccaacctttttagacacatcttgtttcaattcttgtacaggggactcatttccaactttgtatgcagtgttctctgtttcctgtttgaaaaagaaaagaaatagagaccaaatgatgacatcttttctttaaaaatatgctttaaaggggtacaaatgagaaaatgtagcattaataaatcaaaggcccttaaagggctttgatttcttcttcttcttttttttttttttttttttttgagacagagttttactctgtcacccaggctggagtgcagtggcacaatcctggctcactgcaacctctgcttcccgggttcaagtgattctcctgcctcagcctcccgagtagctgggattataggcgcgtgccaccacacctggctaatttttgtaattttagtacagacagagtttcaccttgttggccaggctggtcttgaactcctgacctcaagtgatctacccacctcagcctcccaaagtgctgggattataggtgtgagccactgtgcccagcctaaagggcttagatttctgaatactgatagatgctcagaaattttatgccaaatgggacaatgtaatttgcataagaaagttacccatcagcaatattctattattctgcaataggatatttacctttaaatgtgaaaacttgctcaactttttaacattaaaaaactgtaatggacgataagaacttctacgtacttttatagctaaaaaggattaaggatttaagcaaggggctgaataaaaattgttattttccccaaagcattgctccataaatatgcacaaatacaaaagtttataacacagaaaaccacattcagggaatagttttcttaaaattctacatgctttagataaaagaaatcaagacttaaccagaagttaaatgaagcccctaaaaaaactatgaaaaaagatgaaaaaaattaaacccaccaaaaatacatatatatctacgtatacatttatatacacatacgtacatatatatatatatttgggaggttagaaatggatactgcatttctgctggaaaaaattagggtaaaataagacaatcatatatttgcaaatctcaatacaatactcttctcaatcttaagttgtctatttatagaagcacagcaatttgaatgctactcttgatactgaggaaaaaaaaccataattctttgtgcacatcacagagtttgttagaggaaggtcattataaccattttagacagataaaggactcaaggcacattaattatttaggtggcacttatacaagtatcaggatatgatcacaataggctcaataatgaaattactccagagattattaaaatgttaaagatttaacgtgccagtgaaatttctgtaggacttgcaatatcttcgagcactgaattcctcccccagaatttggagaatactaccaatcttacacagattcttctagaaaaaaaaaaatgtttcatggactcttaagtattagataaaatccaaacagtaccaaggcccatgaaggcctaaacatgacatagcctctgcctacatttttgatatcttctacactcctcatctccctctcatatcactcccccacaattacattctggccaataggatgattccttgccattagggtcatagctcaagtgctattttatcagaaaatacttccctgaccatctcaaaatagccttagctgactccttaactttctatcacattatcctatttttctttttttttttaactttaagttcaggggtacatgtgcagatttgttacacaggtaaacttgtgtcatggggttttgttgcacagattatttcatcacccaggtattaagcctagtacacattagtcatttttcctgatcctctccctcctcccacccttcaccctctgataggcctcaacatgtgttgttcccctctatgggttcatgtgtccacatcatttagctcccacctataagtgagaacatgcagtatttggttttctgttcctgcattgatttgctaaggataatggcctccagctccatccatggccctgcaaaggacatgatctcgttcttttttatggctgcatagtattccatggtgtatatgtactacattttctttatccagtctatcattgatgggcatttaggttgatttcatgtctttgctattgtgaatagtgctgcaatgaacatgtgtgtgcatgtgtctttataatagaatgatttatattcctttgggtatatacccagtaatgggattgaggagaggatgtcaaactatccctgtttgcagacaacatgatcttatatctagataacccatagtctcagcccaaaagattcttaagctgataaacaacttcaacaaagtctcaggatacaaaataaatgtgcaaaaatcactagcattattatacactaataacagccaagcagagagccaaatcaggaataaactcccatcatttgcaattgccacgaaaagaaaatacctatgaatacagctaactagggaggtgaaaggagaactacaaaccactgctcaaagaaaccagagatgacacaaacaaatggaaaaacattccaagctcatggataggaagaatcaatatcgttaaaatggccacactgcccaaggcaatgtatagacttaatgccattactattaaactaccactgagattcttcacagaactaggaaattttattttaaaattcatagggaaccaaaaaagagcctgaatagccaaggcaaatcctaagcaaaaagaacaaagctggaggcatcatgctacccgacttcaaactatgctacagtgctacagttaccaaacagcatggtactggtacaaaaagagacacacagaccaatagaacagaatagagaatacagaaataagaccgcacacctacaactatctgatcttcgacaaacctgatgaaaacaaagaatggggaaaggcttccctactcaataaatggtgctgggaaaacattatcctatt

SEQ ID NO: 1888859 - DNA, 4001 bp, Homo sapiens
cagatgtggtggcgtgtgcctctggtcctagctacttgagaggctgaggtgggaggatcccttgaactcaggtggtcgaggctgcagtgagccctgatcacatcattctactccagctagggcaacagaccctgtctcaaaaaaaaaagaaattgtagaatatagtcaactagatcacttctgtctcactttttataacaaagcatttaaaaattgaataaataataatacatatagaagtttgatttttatcaattttcagtgttcagaaattatgactcataattcaaatattatccctctagttattatacccagtgagcttttagcagatgtctaaatcaaaaatgaattagccataaatgttcagattagtcctgggaagattatattaatgtggcacagatttacaataattttgggggagctcatttaattcaaaaattatccttaggactaatgaatattgtaggaagttttcctttcaacttcaaatgtactctagcgattttctaataaatcatacatttgtcatactaaaaactcacctttgctaattatagtcaaatcagataatttttattattttgatagaaagtttttcagttattatcatcaatgaaattaaagactactcttccaccagtgattattcaatttgaatgcaagtctaggctcattacttttattccctctcctccaagataatgttaagtggttatttaaatagatttacctgttcctcctatgcttggaattcaaatggaaaaaaaaatttttttctcctcatttgtatttactaaatacctctgcttgtgtttgacatgttccatgagcgtgattattgttaaattatgtgcgaattcacacaacagttaactcaaaatctacagcatataaaattatgtttttcacagctagacctattccatttacataaaataatactttaaaaacatacacttcccaattgatagacttaaagtagctattgcaaatcactctatgatggtagtaacagacatggagagaatttgccttagtgggcagaatgcccagcaatttgaaactgctttctccataggtggtagcagaactatctgggaattatctcagtgttagtatgcacatagcacaacaaactgaaggttttcaaagagcagagctaatggagcaaaccatatgctaaatatctgtgttggagaccaactccaaccgatctgcaggaccaaaagctgtataatagtagtttcatatattcaaatatttatcgattgcttattacatgccaggcactatgccagatgctgggcatgtagtagtaaacaaggtaaaccaggcccctgctccaatggagcttacattctagctggagatacagaaaataaacatttaaacaaagatgtaggataatttcaaatcgtgataattgctatgaataaaatgaaattgcatcatgagataaagagtgattggggtaaatacattagatggatccatgtacatagccatagcttgaggttagatatcttttaaatattgtaatatacaaataatatttgccagcatttgccagctactctccatcacagtataaaatagttattttataccggtgagttaagtacacgacaagtgtcactgatgggagcagatcaaaattttctgttaatttgattttaattttgcaagctagaaaaacaaatcctctttatcttttgtcaagacacttaaaaatcaatttagttgcatactaaaatacattcccacttacatttacaatggtgtctcttcacccacaagcaattcctacttcccatttcattagattaagagatcacaaacttttcactttataacaggctcttctggttgtggagggttccagctgagtcatgaaaagtgaaaagttcagtcagttgcccagatgtatttattgccaaataacacagggtacttggatacatctggacagccgaatgaactcttaactcctcgtctctccaacagctcttccttctcggcttcaagacatcctatataaaggggaaagaaacaaacaaaaagctacttcaaagttgaagggtcagtttctggttttgctgtctcatctggaaaaaagaagtgacttctgctattgttttataacttattgatataaaatgtatacaactcataaaatgtagaaatagctagaagtaccagatgaatcttgttaaattcaaatatgtcatgaatacagaaaactgagacaacaaaaattaatttgcataatgaataatttatataatgtataattcattctagtatcattcaacaccctagccgttaaatatgtgtgattagcataaaggacattaggctgggcagtaggagacatgagttctagtcttgactcttaccacttcttgatgtgtcactcaaactttttgagcctcactgttttcatccatgacacagaagttgcaatagaggacctctatccctttttgctctgaaatgctgtgaattgggttttcttgctaaattgttgacattattctacgctgttttacaaacaagatacttctaaatagctgagtttggttacaattaaatcttacttgttattgctaattaaatataaaacatagcattcacctgacaaagccttttgtttgaaaggaatgcgaaagtgacttttaacttgagtattctcataactcagtctacacatcccacaaattaatatgtaggtattctgtaccatgcctttatctacttccttaaatgaatccttaaatacatttctcattcttaaagagttaggagaccacacagactcataaaaattttaaacaaaattgtttattggtgattttattttaaaaaatcttctgcctagaatattttacagaaaagtgaagtataagaagtaatggccagttttgtagctatctaaagcttggcttctactttagtggtttaattctcaggtagaatctgtttatggttttgtgtactcttctaccattttgtttatttatggagaaaaatagtacttcagtttgacaactttgaaaatagtgtttcctgtcccagttctacaaacgttatatcagatggtgtcaatatttagcgaaactgatatgcctattttataactcccctcagtgtaattaaagctaaaatatcagaccacaaatgacatgtaatatattttcactttttaaattttctaattagatttgtggagaattcttcaacttaccctctcagagtacctcctgtacaactcaatttataaaataaaacctgtcagaaaattcgaactaacaaatcttcaaatccttttgctcatgactctgtgtgtgtatgtgtgtgtctgtgtatacgtgtgtatgcatgtgttttgagagtgaggaatgaaaagaaaggtgctacaactacacacattttattataaccaccatccaaagcaccatcatttcataatcatttcataataattcaaagccctttgaatgtttgaatattttccttcacgtttttcaagagggagaagtaacttacctaatataaaaaatctatgaactattgatcactgaaattttggataaaataacccatttatgaaacatcagatgcttcatacaacatctgtttttacttctcactgaaagattctatatatagaattcagtcacgatcattccactcacttgagtgccatggagacagtttctatcacacagacttgttctataatatagaccaattgtagcaattttgctaaaatatcaacatgttgttctacagttttatccagtcttaaagtacattttaaaaagaaaaaaatgagatgtttctgagactataaataaaatttgaatatggactggggtattaaattaaggaattattcctaaaattttggggggtggtaattgcatcatggttttgcagtaatatagccacaattttagaaatagatactgaagcaatgtgaaatgattttaaat

SEQ ID NO: 1888860 - DNA, 4001 bp, Homo sapiens
gaaatttatttgggggatttatgtgagatagaaatctaacataaaatttcatatatgaatatccaattttcctcatgccattttttgagatcatctttttcacactaatctgaaatattaccattatcaattattaaattcttatacatgaaatctgtttctggactatattcaatgttattgctattttgtcaattcctatactaagatgatgttattttaattactgtaactttcgaacacgtattgatacctggtagagtcagcctttctgcctcatttttttttttgtcttagttatgcttggccctttgctctttcatatacatttcggaatcattttgtcaagttccacacacatacacacgcaaatccttgttgcaagtttgattggaattgcattcaatattacttcactttcccatccatgaatgggagggtatatcactcattttatttaattttttactatgttttctaaataatattataccttttggcagacactgatagtgtccaccaaatatccatgttcagatccgcatttcccactctactttgaagataagttcaggtagctgggcagttaagagccagtttgcctcttgcattcctttttctcctttctataactaactagtagtccagatggcattgccacagtttggaagcttccaggaatcttgagtcagctcttaaagggaagctgtgccagagagccacctgactcacattaactgtaactggagcaagaaataaattggtgttgtgttacaacatggctatttcagggattatgtgttaccacagcatagcgaacattacctgactaattaaaaagtcttgaccatcttttatgtattccaaggcatcatatactgtttcttaaacttttcttttataataatttgctgttgatgtataggaaaaaaattaacgttatatgttgatcttgtagctaataaccttgctaaactctcttactaataatatatctataattctttttagttttctatgttgataattatataatctgtgatcaatgacagttttatttttccttttcaatcctatacattttaactctttatcttgtcttactgaactgccaaggacctccaatacaatgctaaacagaagtggtgatactagacatacttctaattttcctggctgtgaaaaaggtaaggttaaaacagttcaccgttagtgtatgtttattgtaggttttattaagttaagggagctgacttctatttctagtttgctaaggagcttttatcatgaatgggtctagaattttgaccaaagccttttccgcatctatttattgactgcctactatgggctaagcactgatcatgtttttcactcctttcatctattaatgtaataaaccatattaatagtttttaaatgttaaatcatccttaaatttctcctggtgacatagatgctcccacctctgggttcattgtaagcctgtgtgtgttgccagtgcatagcatagctgctggcataatataggcaaaatgttttactcatgttccttattattttacttaataaatgatatattttattactgtatttgtaatatttccagtagcagaatactataaaacacatatcttaaataaatttgagttagaataaggcagacatgctcaaccaatcccaagaatcatattgtatattgttccacaagaagagctaagaaaaaaatatttagtgattagaaaaattatatcactatctcaggtggttttcttaatttcttcattatacggttttaagtgggattttagatttcattaatataaactcatagggagcaataaatagtgggaagaagagagatttgaagtcagacagacttaggcttgaatcctgtctctttaactttcttaactatatatctatctttgatcacattcacctccctgagtttatttccttatttgtaaaacagggataataatacttgcttcataatgttgctatatttgcattaagtaatcaaaaaataatataaaatatctagcatattgtggaccttaaataaatgttagttcaaaaatgagtatgaataaatgaatatacattttttcctcagaaaaatttaatatgtcgagaattctaaaaataaaaaatctatgaatgaggtgtgcccagctttacacatctctgaataaattggggttctttgttttgactgtttatcggtggttgataattgttcccatttagaaatatattattaatgtcacaatgcaacaatttgtgaaatttatgttattagtctatatattcttacctttggaactactgttaatcccaaataggtatcacggctctatttttaaacatttatataacaaaactatcagtaaatattattcagggtttaattacgttactctacttttttcctccaaataaatagttattctaatccactatatgttcagacattctctctctctctctctctctctctcttccctccccctcttcttctctcttgttcatttttgaagtaatagaattatcattttgggggagaaacttgatgttctcaaatgtgtttggaataataatgttctaataaataaatttgagtttcccaaacttttacatgagagtaaagcactagaaccaaggtctctatagagaagaagaagcaaaaaggggagagtgtagagaaaggatgaaaaaagaaaaggaggagaagagggaggaggaggagcaaggtttcaattaagtaactcaagtgtaatgtgtgcccctctcagtttcctgtctgctgccaaatctagggagttgctaaacttcagtggtctacccctgaaaatttttattattagagccatcattttcagtgagtggaatgaggttagaagctatgtggtctctatattacttggaaaatatatcatttggcactcctcaatgacattagactgtacatttctagattgatctgcacagttcttgtcaattggtagggattcaatctatgttgagttaaaccaactgagataaactgcattaaaccctttaattttacataacacacccaccacagaaaaaatttaatggtagtccttatccccaaataattttcaaaacaaagcaataacaaaaacagtcactgaagggtaacttattgaaggtatgagaagttttcattgaaaatgctcccaagtgacaggcttacagttcataaataaagatgacaatgcaatggcccagtattttaaaatcttaaacacttttttagtgaaggcctgtgaggtcatgtgagctaatatgacagacactgaatatttactactcaaaagccattcagaatccacttctcccttgccttcatctactatggacgctgtctcacatgcagataagagtgattatgtgacatgaaagtagccaatactgagtattctttgcccccagttgcaatttcctttggtgatatgaaaaatgtttctaggttcattgtaatatattagcacaaagttcttgtcttgtttgttcctggaaaaagtctttacagtccgtaagtgctgttttccaaattgttccctgtaagcaaatcaaagaaagccaatcaaaatgacaatgtacatactttaatgttaaatacaaaaaatcagaataaaaaattattagtatatatctcctgattttgttcacatacacatgagcaaagaaaaaatacttgatggaaatgaggcttataggaaacatattaaagtagtaaactcaaggtaggatttgaagtgatttttattttgttaattagaaaatttttaattgaaaaataattatatatatttacggagtacaatgtgatgttttgatatatgcacacattatgcaatgttgaaatcaagctgattcctatatttgtcacctcatcttaacttttttttttgtggtgtgtattagtccattctcatgttgctgcaaagatactatgcaagaccgggtaa

SEQ ID NO: 1888861 - DNA, 4001 bp, Homo sapiens
tcaggctactttccttcatctgcgggttatgggtggcagcgtagaagtgtgggctattgccatcagtgcctgctgacccaacctaactgccttctaaggcccttttgcttatgcctcccagctgaggacaaagtcatgggggcctcccactccccagaggccctaaccaggcttaagctgctcctggctaagtcagagaggcatcaaaatgcagccaccacttcctctctgcaaaaggaagtcattccaaggtctccaggtggagaagggaacaccatggcataaaatgaactgttggaggattatactaaacacacacacaagcacacactccttgggagggagagaagagctctgttaactgactgtggcccaagcccatttccagaatgtgggtttctgcagctgtctctccttgacaaagccccaagtgtggacagggtgaccccagcccggacaaggaagggctttagggctccctcaggcagcttcctgagagagagagagtggctctctggccctcatgctctggggctgaccagggaaaggagttgcagaaaatctagttgggggcaggggggagtcatgcagctctcccataaggccccctccacaattccaggctttgtgaccgtcccctccccccacaaccccgtgccagcttgtcagcctcctgcgagcttcactgcttccagagaagccctctgccatcccccttccctctctggcctcccaagtgacccctgggatgttcctgggcacataatctggcccccacccctattccaccttaatctcagagggagatagaaaagtggagggggatggtaggggggtttcctgggcaggcaggctagcagggactcctaaaatggccacagcaagctcactggtgtctcaaggacggcggctagggcggtgggcagaggccagggtgctcactgccttgtggctcgttggaggaactggaggtggggctgggggactgagaggctcaagcaagggaagccaaggttacatgcactcaccattcccgatccgccccttatccactgcatggtgcttgcgaagtccggcttctctgaggccccgtagctggcgcgagttgtcgcgggctgactagaagggctgggctgaagcaagcgagagccccagcgccccctccgccgcccctcctccacagccctacaacccaatcccctccgccccggacctcgccttcagtcagtttgttccatgccaaccggcaggctctgtctctccgccctgctgctcctagaggtcttggcagggagaggtgcgagtgtgggggggtcctaatgggctgcttttgtcccccaccaaggcttgagaactgtgggggtggggtgcagggagaggatgggggcgaatagcctccgcccgcccaggagaaggcagctgctacctctgcctgcctcccgctgcgctggagttagatgctgtttattgtggggcttcccaattgtgtcgagtcagcggaaagtcctttccaaagttaccagaggtgttgtgccaatctccagaataataagatcctgccccagtggagccaagccagcactctcatgcctccctcccccaccctccctctgcatactcccctagggtcttctctctttgtgtactatctgagagctttcatctgcattactttcacttctcagaacaaccctgtagaggcagccattagtatctccaagttatagataaataaatggaggtttggaagagggaaggggcataaggtcacattaaagaaaaaaaaaagataaatcctcgactttaccctctgcggctttccaagcctctttcggctatctctccctttctatctcacacacaccactccaggcttctccttcatgcccttaggaacatgaaaggtagcttgttgatggacgaattttccatttgcttattttgctgagaatgagttgaatgcacatcagcgaaacaggcaaacggagaaaccacccacctctttatgattcccccaactctggggaacacaacacaggctggtacctttgcttaggctaaaaattgactttgtcagtcacactaacatctgttattatcccttataatcctcacagtaactctatgagatggacacaacaaggattcttaattgcccaccattacagacttgaacactgaagcccagagattgaaagacttctgcttaaagtagcacagccaaacaagacaagaatccaaggctcctgactagaagagcaggtcaggcaaagacagaattgcaaaaacagaggttgcaaccaaagtaaaaggagttacagtatgatattagaaagaagttcctggagataattgacatgaagacatcactggcctgttacacgtactttatttgtcctcttctttttagcacaacttctgcacttcatccaacctgttgttttgtccatgcagagctgggcaaagatagaagcagtaccttaatgagcaccccatcatgggaggtgtacaagcagaagctgaatgaccctttggcaagggattcctgaatcaaatgggaggttgccctggatgacctttcaacttccctcccaagtctggtaacccaggcatcagtgattccacaatgttctctcactttcccatctctgggccttctttcatgctcagtatcttggatgcacctcccctgccaaccagcccattcaaactgtcatgactgttcaagatctggcaccaggcacaccacctttagaaagctttccaggaatacctccaggccctgattttgtcatctttcatttgattcctatagcactacgatttcactgtctcgattaaaaatgatctttttatttcctggatgttacgggctgaattgttttcccccaaaatttatatgttgaagtccttccagtacctcagaatctgatgactcggagaagacagtcatctaaacagcaagccaaggagagaggcctcagaagacccaaccccactgataccttgttctcagacttctggcctccaggattataagaaactcaatttctgttgtttaagccacagagtctgtggtattttgttatggcacagccctagcgaactaacacaatggtcatatgaacattttactgtcccctttcacttaaatggcattatgtgtttttgaagcagtggcaatgaattactaatttctgcatcttctacaacagtgactggcacatagtaaatacccaataaaaacttggaattttttgatggatgcattcattcaacattatcatttagcccctgtgtgccaggcattgtgacagatgctcaggatacaagacaaagttcctcatggaccttacaatctacttacagaagagagatagacaataaataagtaaacaaacaaaaatatttagagattgtaatatgtgctctgaaggatataaaccaatttatgtgatgtgagtagccctggaattgtggaaagtatctgtgccggtcatggtccaatcaggaaaataaaaaccaccctaggtcttttaaactgcgagcatttaatgcatgacacttacagagctaacaagccagacagaggatgaggatgcagcaacctagcatttaacaaacacagaaagctgctaccactcgtagggatggacggataacagatgaagccatgcagaagctaaaatcatgggttggacagcctattggaagcaggtgccatgaatggaagagttgttcaagaggagctggagccatggaggaatacagctaccaccagaaaacacctctctgatacaggtggtgggagaaataccctgggttctcccttcctcctagccaccaatctcctgtacatgtctcccattggacaaaagaagtgagaaagcaaggaaatctaacaaatgtaattttcaggagaagagtggagaatggatctggatgcaaacaggccagtgttaatataaagcctagggactcctgcaaaaaacaggtgccta

SEQ ID NO: 1888862 - DNA, 4001 bp, Homo sapiens
acgcaaaacctgccccggggtgagggtgggggggtctggcacctgcttaatcaggtgtgtgctgcgggtctgcttgggacactggaggatgctgggtggtaaaatctggcaaactcaaggggatgtaaaatcagagggggacgatttgggggttctgcttcatggaatagggttgaaagaatcagtcattggtttcctaaggatgcttcatcctggaggactgctgcttttagaccacaagaagtctttaaaatgctctcttgtttctatttcccccgcagatggcatttgagggggagaggataagccaagggaagaggaaaatcaaaatgctttcagcagcacggcttccgcatgctggagaggtggtgtatggggttgcggcttggcctgttttctgaaacctgcaaggtagcaccctgaaggtagcttgtaaccctccactctcacaccaaggtaatacctccttcctgtctggccacctgtcacagccagtggaagtagggtttggagggatggttgggacatccttacacaatgttaggtggagacttagtgatggcttcgggggaaggcagagggagtctctcttgcgtcaggggggtggaagcaccgctgccatgatcaagccctttggatgaaaggagggctgtgagatttgctgcccagatgtgggtttgcaaatgaccttgttggtctgttaccctggcctagctcatagaagctttcttctcctgtggcttgggagagagccaccgtaaaagacaagctgtggctagtaagcatcttctatgtgctctggactgtctcatgcaagagctagggcataggatcctcatgatggcccttcaagaggggttaatcttgtcgttgttgcacttctatgaggaaacagaccatgtgaggctaagtaacttgctcaaggtcacacaggggtgattgatggggtcacccagactgtctgactcttgtgtgggtatggctgccctccttgtcagccggcggggtatagaggctggccctccattcttgatttgctcagtaatgggggcaggacaactccacctccttcttcccaaaggaaagttgagctcattttggaaagaaagcaaacagccgttctcctctggggctctatccggggacagggcagaaaggaaatccagtacactgcggaaggagtcattttttggcctggttctcaccacccatctctagttcaaaccctgcttttagcatatctgtgttgatggggcagggcctgggaatcacgatttgcctttaagaagtggatgcacttggagaggctggcgcttccaccaaccaggaagagctgggggcaccctgcttgctctccgaaacttcacagaaagccccaagagctggggatgtgggttctgttctggatctccaagagacgacgtcatgctagaatgttcccttcatttttgaaaactgcactcctgcctggggccatctcgtgtcttcaatggctaaagtagatgctgatttgggcaaccagctttcttttctgttttgaaaattaatgcacctgtgtagtcacccaggcttgatagttgcaacaataactcatggacaagttgtgtgactggtggtagtgactccatttgctcacacctccttggattcagtccctggtgtagttccctcccacactgactgtgggtttggccaggtgacttgctttggccaatgggacaccatcaaccatgattagcagaggtttgaaaagtgcttgtgcattgagatttgccctctcacgctgttcttgggacccttacaactgccaacatgtgaatgtgcctgggttaggcaggtggaggtatgtggcccagtcaccactgccacccagctgacaaccagcaccaaccaccagacacactgcatgaggccatcctagaccattcggttcccaggtgacctgccagctggtcacaggtgagtccagcagaagaactgcccaacccagcccagcccaaattgcagatctgcagaatcatgggctgataaatgattgctcttttaagccactaagttttggggtgtttttttattgtgataaaatatgcataacatagcatttaccattttaaccatttttaaacgtacagttgagtggcattcagtacattcacattgtgctaccatcaccaccagccatctgcagaagtttttcatcatttgccggggttctttatatatctaagctcactcactgattcacaagctgcgggggctgcctgcacctccctgactgtcttgcagctgatgagcttgtctctgagtggaggctcaggctcaggcaccgagctctggagtgaggcccagttccaaactgaaagagaacaatgtccacgggtctcggctgtagccacagtttaacacaaccctggcttccctcaggcatgctcacaaacgatcctgttcctgtgggtgcagggaagacagacaagcagggtctccacaagggaggctgcagaccacaggcagacccggtgacaggggacatgctgggacttgctgtttaaagagccaccaccaggaacttggcacctgaccttgtgctcaggggtgagctgtgacagctgccacaccagccctgctgtccttgccacttctagctgtgtgacttggggtgagtcacttaagctttctgagtctgtttttttcccccatctgctaactgaatgtaatcgtagtgccatgttttagggcaaggattagaggagccagtgttggacacactaacagttgcttcattaattaatatatggggctggccaggatccctattccccctggccccagacccctaccatctttcctcatccttactgggaaggggcctttagaaagaaaagagacaaggtcgggcacggtggctcatgcctgtaatcccagcactttgggagatcacctgaggtcagcagttggagaccaacctggccaacatggtgaaaccctgtctctactaaaaatacaaaaattagctggtcatggtggcactcgcctgtaatcccagctactggggaggctgaggcaggagaattgcttgaacccaggaggtggaggttgcagtgagccaagattgtgccactgcattccagcctaggggacagagcaagactctgtaaaaaaaaaaaaaaaaaaaaaagaaaagaaaagagaaagactttgttagcatcagaaattatgctttgagagggatcttcagtattagctggagaaacactcatttgtcttttagatactcacttcttgatattcatgttaggaccctgggctaggctgacagtgtatataaataaatacgggggctctgggagaggagggagagagcaagggcatttggggatgctgtggcagactgttgtgtttattttcttcatcttcttatgtaatagaacccctgatttttagttgggcatacactcatctggaataaagacaatgtttcccagcttctcttattgctaggtatggctacatgactaaatactagccaattttatttcatgtcctgaggcatcctccaggaacttccttaagagagagctgtgtcacacactttgcccttttccttcatccctcccaatatcctaccatctggaatgcagatgtaatggctgaagctccagacaccattttggataatgaggacaaggtcactcctagctgtggcagaacaatgagctggatggaaccagaatttctgtcccagttactttcggtgtgtaacaaactactgcagagttggtggcttaaaacaaccattttagggctgggcgtgatagctcacgcctgtaatcccagcactttgggaagctaaggtgggcagatcacttaaggccagtttgagaccagcttggttaacatggtgaaaccccatctgtaccaaaaatacaaaaattagccaggcatggtggcgcacacctgtagtctcagctactcgggaggctgaggcacaagaatcacttcaa

SEQ ID NO: 1888863 - DNA, 4001 bp, Homo sapiens
tgcctataaagacggcaacactgggtgatcaaatagcagatgaagggaagtttttctttatagaagtattccagctaataaatcaagagaataatgggattagaatatcatcattttgcaacccctaatgaaataacggctctaagaattgagcatcggtggcaactaacatcacagaaagatgatcatcagttattttgtgcctcttaatggaagtagttctgctcccccttcctcaaaattaagcctgaatttgatcaggcttccagatgcaactatcagtttacaggaaatacaaacaaggagaaggaacatgtaaactacatcacagggatgtgatcacaaaaatccagactatgcaaaactgtataggatgaatggcccactttcttccaacaaataaattataaggaaagaaaaaatatagatggaagggaaagatataattcaaagggacttaagatacatatcaaccaaatgcaatgcatggaccttatctggatcctaatttatgatatttctgagacaagtggaaatgggaacaacagatatgtgatgatattaaaaaattgttggcaattttttttctttttgagatgaagcctcgctcttgtcacccaggctggagcgcagtggcacgatcttggctcactgcaacctccgcctcccgggttcaagcgattctcctgcctcagcctcccgagtagctgggattacaggcacctgccaccaggcctgactaatttttgtatttttagtagagacggggtttcaccatgttggccaggctggtcttgaattcctaacctcaggtgatctgcctaccttagcctcccacaaagtgctgagattacaggcatgagcccctgtgcctggatggtaattatttttaagtgtgataatggtatgattttttttttaaaagcggccttagattttagagatacatagtaattatcagctttccctttttccattgtaacttactacttcccagccctatgcttctgccacaatggctctttgttgttcctagaacacagtaggcctttcctgactaccctatttgatatcgaaacttctccaccaccatctatgctgtaactacccccacccactccttgtccccttttcctgccttattattctccagagcacttatcaacaattggcacactatctattacttacttattttgttcactacctgcctcccctcactagggcagggattcttgtcttttggtcactggtgtatccctggtgcataggggagtacccaacacacagtagctgctcgataaatatttgctgaatgaatgagtggctcaccaaatgaatcggctgcaaatcctgggtctggggagataacagagaaaactcacaatctgactcatatctacatgagtgtctaagaagacagatcttcacacaccctcttgagcaaacaagtgtgcatatggaaaggcatggcacagtgagtggattctactttctgaacccaaaatgtgtgtgcatattacatctttgcatatggttatgatatagacacaattttcctcacaaactgggtttgtgagaattagctagaagactcccttttcatcatgccccatgtacaggagtcctgagaaggttctctctcctcctctaggtgccgctaagacagaaccaggtcaaaagaccccccttccttctctaggctgtgcctatccctgagtatgaggggctgcaccatgtgcaagagaaagctaagagaagtctccctctcctgcaggatccatgtaagactgagatgggagaaaggacatggctgagagtcattctccttcccaccacatgggtgtgtgtttttcttttggtgaaggagtgcgtatgtgtatatacacatgcacaagagagcaaggaaagctgaggctcgccatcctgcaaaccctgcatgtgggaggggttttcagaaagctcaccctccaccatgcaagggatgtgagagagggagcagggaagggcttgctctcttggcacgacatatgggtatgctctaggaggcaagaggcactggcctggggggtgcaagtgggcagcaagatagccacaggagtgctgatgggtaaactaggagcagtggccatggaagcaggacagtcatccagatgggatggctgctaacagtgtaccccacatacagagcacgtaagagagggtctacctccctttggtgtacctgtccatgtgctcatgcctatgcactggagagggaagagaaggctcgctcttctgcaagccttgggtgtgggagggtaattaagatgccaacggtcctacactcaaggcatggaggagagaaagcaagtcgggaggtctgctctcctgtatactgtgtgcatgcgtatcccagatgccttggacttctatgactgtgccccagacatgctgtaatgagaaggtgtgcttgtgtacattcacatatgtaccttcagaaatgttcactatctacaacatatttgttttccttccttctttcttttcctttatttttattcctaacaccagtatagtatttacatttgcagagcactgttttaagtgcttttcacacatagctcatttattctcataaaatatccatgaggtgatcattatccctattttacagatgaaataacacacatacgagaacagatggtaagaaagcttagaatctggcatgcaggtcattagaaagaggactcaaaaaaggaggctcaagctctcagccaccaaccactttgtgtccacacacacaccacacacacacacacacacacacacacacacacacagagagagagagagagagacagagacagagacagagacagagagacagacagacagacagacgcaagagaacttgcacttgtcagcccagggaaaagctggattagtgtggaaataatagaggaagtgagaagtatgagaagtggctgtgtggtcagattagacatgtattttgaaagtagagccaacaagatttgacagcagtttgtatttggagaatggaggggaaaaagtgtcaaagatgaatccaaaacctttagcttattaaaattctccatatccttggcatatgcaattgggaaatgctgtttgctgagttggagaacacagagggaggagtagggctttttgagagggggaggaaaaccaggacctcagctttggatgtgttaaagttttgagatacttattagacattcggggcagatgtccagtacatagttggacataggcatctggaattcaggagagaagtccaggctggaaatacaaacacagaaatcatccacataaaatggtacttagagttgcaagacaagatgagaacagctgaggactaatgagaagttaaaaaaaaaaaaagaagtctgaagactaagccctatatctctttaatacttagaattcaggaagaggaggagaaaccatcaagagactgagaaagagaggcttgtgaggtaagaagacaacctcatgagtgtggaatcctggaaagcaggtagagtctcaaggcagagggagtgatcaactgtgtgttgatctgtcaagtaagatgacaacattgcccagtaaattgggaaatgtgaaggacactggggaccttgaccagggtcatttaagtgctgcaggttacagttttacatggagggttttcaagagtaaatgggactaacatttaagtctttaatccatcttgaattaatttttgtataaggtgtaaggaagggatccaaggacagaaaaccaaacaccacatgttctcactcataggtgggaattgaacaatgagaacacttggacacaggaaggggaacatcacacatcggggcctgtcatggggtggggggaggggggagggatagcattaggagatatacctaatgtaaatgacaagttaacgggtgcagcacaccaacatggcacatgtatgcatatgtaacaaacctgcatgttgtgcacat

SEQ ID NO: 1888864 - DNA, 4001 bp, Homo sapiens
tcctttgttaactttgtcctagaagctgtcgttagctgttttcgagcagtggttctgcaagtatggtgtcttgaccagcagcatcagctcctagggaaaggttagaaatgcaattccttacctgtaatgccagcactttgggaggccaaggtgggtggatctcttgaggtcaggagttcgagaccagcctgaccaacatggtgaaaccccgtctctactaaaagtacagaattagccaagcgtggtggcgcacgcctgtaatcccagctactcaggaggctgaggcaggagaatcacttcaacccggaaggtggaggttgtggtgaatgagagatcgggccattgcactccagtctgggcaacaagagcgaaactccgtctcaaaaagaaaaaaataaagaaatgcaattccttaggccccatccagacctattgaatgaatctctggagatggggttggctggctgtgtcttagtaagtgctaaagttttaagaaccactagaggatccaaataacttttggtgttcagtctcaaaccactaattagctgcgcatgagaaatttctgctttaggttagtcaccctatggagcccccgaaccctaaatattaacagtaggcccacatccaggtttccatctgctagactccaaagcaaggcagcagccatccctctcagtagccctgccaccaaatcctcttctccgagaaccccaaaacagagtttgattgacaagttcattcttctctcctgtcagacctcaaaatgtgcccagttccttaaaggtatgtgtcccattggtttacaactcttcattcccttcctaagaatgagcacgtgtactaaaacaaaattagtacatgtcatccaaatattgtcagggtaataaaattcctaaaattaggcatcttggtgctttatgtagatgcaaacttgaaaagcagctatgtccaagttttcctttaggatcctcccaagagatattttacaaactcctctagcattgctaattattttttttaaaaaaaaaagagtcattttttcagatctataaatttcatttattttgaggttcattcacattcagtaacaatctgatcattcaccaaagttccaaaacacatactttataaattagctatcatagtttttagaaatccaaatatatttcaaattattttttaatagcagcaactagagaaaggattttttaccatctagcttactgtagcgctgatcaggaatgtcgccaacaaaggtcctgcggtttacagatggataccgtgcaatttttctcctatgatactcatcaaaattgcatcgtgatccacccgacaacagcaaaacagatcattttacaatgactaaatatcagaacttacggcttttaaaagttaaaataagaagacgataaaaatcctcctttcttccacaggccgggacaagtgcaatactttatatagaacacaagtaatgcaacaaatccccacccagggatgaatgggcatgagtgctggagatacgcatgaaggtgtgttcacacagacgtaggaagcacacattatcacaatcagttttgcatggatttgcacagccacatatacatatatacgctgaaatgcaaacctgcaaaactaattgtaagtagcaatgtctttgaatattctctccatcaacaagagatttgttatccaagagtactggaagtgcccatactacagtagagtcatgccaaaactacctgcactatgagcactttggtactactaggacccaatcttatcctctgtacacaactgtacactgcacagtccccaccatctgttcccaacaaacaataaaaaggcaaaaaacaaaccactgaaatgtgtcctattcaaattactactcaaggcatacttttaaaatgctgtatattaggcagcctgtgccagaaggggcatttagggcagtagattctaagctgcttcactaactgcactagatgcaccttaacacaagagacacattataagaagcagctcaaaagcatcaactacttaattatgcacaaactacagttctcagtagccattgactaaatcaccatggtaatgtaagaagtgcttacattgcagtagatctcaaaaagctacctgcactgtaagcacttttacatggccaaggcctattcctgtagcaaaattttaagtcttccaggagctcttcttttccgtcctcacagatccatgcagactcacctggttaaaacaacaaaacaaacacacacatattagaaactaaacaagtaaactactagttaatattcctgaaacaggctttcctttggcttacagagtctaagctaggttttgtggtttcaaccaaatcctgagaaatattaataatctcaattatttacacagaattgaacacgaataacactggcaactgcaaaaagtccaattcttatgtataagcagattttggactccccctctccatctaagaaaatttgatatctgcatctcagtaatttgcaggcacattctatccaccctgattttataagaggaggacctagagaaaggagcatgtaaaacccaggatgagtattcgagtcttcagatcattcagagcttttgggctccatacggaaagtgactgttagattaaatgaatattcccagcccccaccccattaatagaaaatgagagaaattttagagctggtttaagaaacacagccttacagtcttcacataatgcacagatggctgagagatgtcacattttgatctatttcaaagggctctacttctgtttaaacatttatggacccattttctccattaaaccaaagtaggcagattagctcttcttcccttcatgtcattatcttccataagaaaaccttctcccatttccaagtgcttattttacctaagaacatacagcaaggaagtgagcctctatgtgaaaaaggctcacagggtcccctatctcttccatgatggggtaacttttgtttaaaagaaaaacaaaaacgtttgggacagaatctgtaatacgttaaacgagtgagggaattttaaatgttgaactttcgtcacgatatcttatgccactaaatgagtctttagaagtctttacaaactaaactgatttataaaacttatacatcaatctggaatcaattttctattagggaagaatggatttagtatagaaatgagaaaaataacatttttccccttaaattgggtttctacacctgtgaagatttcttttccattaaaaaaaaaatactccaaacttgactcaaaatgcatagtatttgccaacccaacctggccaaactgagccccacagccatcagacagggcgcccttctagttactaccttttgctaattagcggttcatctggcatccctcgcgcacgctgggcagtcactctccaatccccttaaattgcaaataataataataataataaggaaaagaaagaaagaagtccttccctgtacgcctttgtggctcccttttgcctcttcccgcgtctctcacacccttacctaatgctcccgttgaagtccgcgagcagcccgcgcgtccagggtgtgctccagctgctcacaccacgcgctccagtcctcgtgcagcctcagccgccgccgaaattaaagagaaagaaacaaagcatcatgggaaacggagttctccattcaaagcaccaaaaacgcgccaagcccacgcctccctccccctccattcccgggttggtgggatagaagccaagagggaggggagtcccttttttccctccacgtgcaccccctcatttcacaccctcaccaccaaagttttccaggaacctaaaggtcaacggtggagaagaaaaggggagtcgtttcccgcgcgctgcccgctacccctcaaccgcactctggtactttgcttttctcaagtcccgcccgctccgtcccctcccacccaaccagtcaactctaccggatcac

SEQ ID NO: 1888865 - DNA, 4001 bp, Homo sapiens
gtttccaaggctgggcatggtggctcatgattgtattctcagcattttgttaacctgaggtgggtagattgttgtagcccaggagttcacaactagcctgggtaacacagtgaaactctgtcaaaagaaaggaaagaaaaaaaaagaaagaaagaaaaaagaaagaaagaaagagagagagaaggacggaagggatgaatggagggaaggaagaaaggaaggaagaaagatagaaggaaggaaggaaggaaggaaggaaaagaaagaaagaaagaaagaaagaaagaaagaaagaaagaaagaaagaaagaaagaaagattgattccatgaaggagtgagatttaagaagaaaaaggaaaatgaggagaatcttcaaatcaccagaactggacactacagagggaattctaatctttcttgagaagacagaggatgtctcctcttaaggaagaaaacgtaggaggtgcgtcccattgttggcagtagaatactgatagcatttaaacttttggtgcattgttttctttatgtattaaatagggatagtacatgtataatacttggaacaatgtctggccctgagcaaaaactcaagtgttggccgttgttatttagctttgacagtgctgcctatctgcctgtagtgaaattatttttgcaaccagaactggaatgttaactacaattacattatttatttattttgtgcatttattggggaattaaaccagtaattaatatgtaaaagttgtacatttcttttacttttttttttttttttttgagatggagtttcactcttgttgccctcaggctggagtgcaatggtgcgatctcggctcatcgcaacctccacctcctgggttcaagagattctcctgcctcagcctcctgagtagctgggattacaggcatgcgccaccacacccagctagttttgtacttttagtaaagacagggtttcttcatgttggtcaggctggtctcgaactcccaacctcaggtgatctgcccgcctcggcctcccaaagggttggggttacaggcatgagccaccgcacccagccaaagttgtacatttctaaggaggatagaagagagaaacagcaaaggataaccagaggtagaagactctagatataagaacaaaaatcaggacctctggactgtattcttccacatatgtcattataatttaaatatactgataccattattctttttgtatttagaatggaaacttacccggtaaagaaatttttttctctaggataaagatcccgcagtgaagtgattaaggatattgttaaagggaaaagtgatattgggagaagacatttcaaacccaaagtaatgattcacaggtgaagatatgtgggcctgggaatttccaagaatatcacctcatgaactgatttgcaaagaggaaggaggccttcatctatccattaaaaagaaaaagaccagatataggagtagatgctaggtatatacaagtacacaaggctgacaagttacctgctaagcttttcagagggatgttttttgggtgaatgcctgaggacaggaattaaggcatcagtgtatagactcaagatcagccctgtggaatatgtaagccctgtggatgataaccataagtaacaaagaaagataaaacagagatagctgttttacagagggactttgtgaaggggacagggacaagtattgctttttcaatgtttagataacaaaatgtgccacagttataaaggggcattttcctaatttatgcaaggaacacagctaagtacaatgaatactgacgcaaatgcagcacacctggtatcttgagggtttgtagatttggcagccccgggtgacagcactctggagaagtaaccagcattctcatggaaggcaccggtggcgaaatggcaaagcgtcagcggagaccacaatgcctggtgggagactgtggatgcccaacagacatggcggtactcagcagatgccgagcaaatgatgatggatacccagtggcagatgatggatgcccagtgggagatgatgaatgccaaatgggagatgatggatgcccagtggtagatgatgaatgcccagcagatactatgaatgatgacgggtgatggtggatacatgtgtgctccatgaaagcccagaataattgcagcagtgcatgatgaaaattgatttgctcatgatcacacgagagaaccactggtgacttctagaagtacttaggggaaaatgagtgtactttttctagagggctagaggacctttgttagcacaggggtgaatgtggagtatcaacatgaaagctatttcttctgtgctcacagctgtgatgcccatcacaaatgtaaacacttttagggaccaggtaggtaatatcagtgggtaggacagctgggtataagaagatggggagtggtagaaaagatagcaaagttggaactcactcttaaaatgtattcaaatgataaagtttaaaaattgttggctaggccaaaacaaaatttatctgcaggcaaaattcagccaaagagccactataacaatatgttccaataccctagggcttaatatgccatctatctagggatatggtaccacctttatacacacaagaaaattgtttcactttgagaatgacctctagttatacaaattttggaggtattaatatatatgagaagattgtcttctgctattcattaaccaattcgaagaaatcagggagattttatttattgcatgtttattttcataaactgtatatgttttgagaacatttaggacaacttggactccagtgagtaacttttgatggaatccttgaaaatccccagggatgacagtggaaaatatgatggatctacactttctagatccattcccaaaccctctttcccaaatatagttctggtctaggtttgacaatatctatcttttacaaaaaggcataaatctctagcaaaagggggtttggatttaaggcattcttcaaaataaatgaagacaaaattacaaaatccagaaagatttataagcatatattccattttaatggaataattaaatttcaaagataattcactgtcatgcatatatatctagaaaaccatgtatatatacacatatatgtgtacaaatagtatatatactatatatatgtgtatatatagtatatatacacgtatatatacacatatatgtatatatacacgtatatatacacatatatgtatatatacacgtatatatacacatatatgtatatatacacatatatatatatatagagagagagagatagagagtaatcttttggggggagggtgccttatttatcagttctatgttttaatgtagttattcattaaaggagcattctaagtgacatataacatgaagcaatgactacaaacaaggactttggagttttataggcctgtgcttaataatcagttgtgttactgaaaagttctaaggtcttggacacattacttatctcttctatacattactttcctttatttaaaatatgaaaaaatagataatacacatttctttgaaagggtttggaagagttaaatgagttaacgcatgtgaaattttttgcagaatgcctggggttatagtatattctcagttaatgataattatttttaatgtaaagatgaaatgggttgattgttgtctagggctttacaaagttactagtcaacaattttagttctctcccttccagttctcaaatccttccaaattccaattaacatacttaaccggttggttagttcctttttacatagataatcttatattttgataaaaaacaacccttttataacttccacaggaattttagctaccagacttatttctgatccacaggttttttgactcaggtgaacagaaaaccaagcctaatacatttgcattctcaagggattcaaattatttaggtagttattactactagccctaa

SEQ ID NO: 1888866 - DNA, 4001 bp, Homo sapiens
tagcttagagtcaaagtgatctgcatatcacttacaagacaggcataaatattttgggtgggacaatcagtttgcttttctcctaacactctccctaacctgatgaaattaacttttcctgataccaactactcctcacaaagatgtcctaggaggaaatagaaagaaatatgctaagatctttgatcttctcaggaagaaaaaggttaaaaataaataaactattatttgacatatttaataggaatttttaaattagacataactgaagttattttcattatttaaattaatttttaataacttaggctagaaatttaacccaaagaataaaatgatgggcagagtaattactgaaacattttggatacgctgcctataaattatataacgtagtaaagaaaaaaaaagctaagtgacaaagaggcttgcaggaacctagactatttcatattatatcaatgtaatgtgcaaatgaagttaagaatggatgattataacaagatttattgatgatataattcttgttttagtttattgactgtcttataataatgatttaataatatttatatattcgctcaaatttctacaataaatacttttgtgcacttgattcttactaaatcccaagctcaagtcctcttttctccccaaaagtttcccagatgagaaataatctggccttcctctaaccttttccaattctttaattcttatcacagactttcagatatggcgatcacttgtgcattctccttatatttcttctctcccatactagatcataaggtctgtctgggtcgtaggattgtatcctccacataacaggtgctcaaataagacttgttggtttatttattctttcaacaaatacttattgaggacctgctatatgccaggcatggagaaacacaatgtgttgaatatgttatgatattttctttaaaactattagaccataattttcagtttgataatatttcagaaaatgccgcaatatttctaatcagcatgtattaaaatgtttctttctatataaatccatttcccacctctattccatttatattctcacttaagtgaacttctgttatttttcttccacttataacatttcttattcatgttttggactaggcctcttaacaagtacttctaaatatttggctattaggtgactaagtttagttttggttcctgatacaagcaaggagacgcaaaaaataaaaataaattttctaattataaggaatatagtcaggactgcatcaagtacattttatacttggaattatatgcagagatcacgcagctttccaaccaaacaaaatcattctaacagtctaggaaattttttttcctatttcaaatcaaagacatatgatctacttagaattgttgaagtaacagattctcattataaaagaaaacacctggaaattatgtgaaattttaaataaatgggttaaagaaacatccagttagctgatcacaagatgatatgttcactgatatcatcatgaggtaaaattatactatggagatttcaattatcatctgtaaatagcatctgatgtgtcatcaaaagaaatttcaacatgatgaaagatcataataatgttcttccaaatgtatttttatagttctattaaaagaatgcttctaactgctactgaaagctaactttgactattcatgtgaaatttcagtaaatttttaatgtaaataaaagaggaataaaaaatgtattataatagaagcaacatgcaaatttaagttgtgagtttaaaatttcagttgtggaatagaatttggaagcatagttagtaaacagctgaaaatggagagttaaaaaaatctacatgaagtacaaaattactctttaagaattcatgttttacccttctggctgtctttcaatctctattatgttcacactgcatgctctgggtattgaataatactatacacagcccatgcaatgagcacatcctagagccaagtccagttgtgatagaaggctcaaagggtggtatcatttgatcaaattttaaatgttaagtaaatttgaaatgattaattttgaaagtcaaaaacttagccaaaagattataggattttaaagcttgaagagacaatatctaagtagtctcttaccctctagccataccctctaccctcttccaaaccataccagacagatgaatatctattcaaaaggaattccaaatttatctgggaacaactgggataacttatcagaatttataatccctaatattaaacatctttgttcatcacatccaaattaaattatttgctttgaagactaaaccaaaagtagtgtcatggaaaaaatattggccttagaactgagaaaacataaataataacttataactatctgtctttgaacaagtcagttaaattcccctagcctccgtttctatgcctgtaaaacagggataatcataaatgtagatatcatgtaaaatactaacggagttcatacatgcaaaagtgttctgtaaactgcaagaagtgagcaaatataatggattattattctggggtagttaatactgcaacccatgtcaccattttctcctcttcataggttttattttctaatcttttcatcatcttactgtgtctttgaaatctttccaagagcctctacctcactgttcaattcgacagccctgactagatttaagattcaatagagcagctggatggtagctattttgattacttattattcttacttcaatagaaagcaaactgaacaagacagatgaggaactgtctacaagggagtttacaatatggggcagaaagagggagataataaagaagagaacaaataaagaagaaaattgtatacagtaataatgctgtgaaagataaaacagatcaacacaagaaatgggagtgagtagtttggatggcatgatcaggatggaactcttccaagcagtcacatatgacatgagacttgaagaatgaggatgatctagtcatttgaagaaatggaaaactagtgttccagagagaacaccaagtacaaatgactttaaggtgagtgtgaaccactgtgacaaaatgatttctaaagactgagattagggagaaaaccctaggaccatattattaacatgttgtatgcaatgataaggagtttagatagaaaggcattgaacagtcttaagcatggaatgatgtgttaaaatcaactaaacaactaatattcagaatgatttctgaatcctcttaatacattaaactggggcctcttttaccatctatatgatctgcaaattggacttgggaattttcctttcatctgtttagtaaacattaattttcattcatatggtactttgcaataaagtaatgacttagacattaaatgtagtcaaattagagatttatgctatccactttgtgttcattctccagatctgtcaaaatagacagaaacgtcaagctcatgctatttctgtttcataggaagtcaggcaaaattctgtatacggatgaaactatgtttcctactcctcacctgttgttcagttagaaatgactgaatggtgatgctacacaaatcttcaaaaccagagaaaaggccgggcacggtggctcacacctgtaattccagcactttcggaggccaaggcaggcggatcacttgaggtcaggagttcgttaccagcctggccaacatggtgaaaccccatctctactaaaaatacaaaattagccagtcgtggtgatgcgtgcctgtaatcccagctactcaggagtctgagccaggagaattgcttgaacctgggaggcagaggttgcagagagccgagatcacgccacttcactccagcctgggcgacagagcaagactccatcaaaaaattaaaaaacaaacaaacaacaacaacaaaaataaataaaaataaaaataacacagaaaagatgaaagattacctttgctctgtgac

SEQ ID NO: 1888867 - DNA, 4001 bp, Homo sapiens
caactagctcaagattaaaatgcaattcagagagagttcctcttactgattaaaatggactgatgttatgaggaaaaatcaaaagggtttcaaaattagaaaattccatggcaccaggaagtaagaatgacacatactgataccatcttttagtttggcagcacctttttgatgagaactaaatgttcatgttggcagacagtaaaactaccacaagcctcgtttcttcatttgccaaatacatgatgttaaagattaacattaaaatatgaaacatagaactggaaagcaagccagtccctgcttcgagttcttttaattttatgaagtttaaaataaacaacttcctttgttaactttgtcctagaagctgtcgttagctgttttcgagcagtggttctgcaagtatggtgtcttgaccagcagcatcagctcctagggaaaggttagaaatgcaattccttacctgtaatgccagcactttgggaggccaaggtgggtggatctcttgaggtcaggagttcgagaccagcctgaccaacatggtgaaaccccgtctctactaaaagtacagaattagccaagcgtggtggcgcacgcctgtaatcccagctactcaggaggctgaggcaggagaatcacttcaacccggaaggtggaggttgtggtgaatgagagatcgggccattgcactccagtctgggcaacaagagcgaaactccgtctcaaaaagaaaaaaataaagaaatgcaattccttaggccccatccagacctattgaatgaatctctggagatggggttggctggctgtgtcttagtaagtgctaaagttttaagaaccactagaggatccaaataacttttggtgttcagtctcaaaccactaattagctgcgcatgagaaatttctgctttaggttagtcaccctatggagcccccgaaccctaaatattaacagtaggcccacatccaggtttccatctgctagactccaaagcaaggcagcagccatccctctcagtagccctgccaccaaatcctcttctccgagaaccccaaaacagagtttgattgacaagttcattcttctctcctgtcagacctcaaaatgtgcccagttccttaaaggtatgtgtcccattggtttacaactcttcattcccttcctaagaatgagcacgtgtactaaaacaaaattagtacatgtcatccaaatattgtcagggtaataaaattcctaaaattaggcatcttggtgctttatgtagatgcaaacttgaaaagcagctatgtccaagttttcctttaggatcctcccaagagatattttacaaactcctctagcattgctaattattttttttaaaaaaaaaagagtcattttttcagatctataaatttcatttattttgaggttcattcacattcagtaacaatctgatcattcaccaaagttccaaaacacatactttataaattagctatcatagtttttagaaatccaaatatatttcaaattattttttaatagcagcaactagagaaaggattttttaccatctagcttactgtagcgctgatcaggaatgtcgccaacaaaggtcctgcggtttacagatggataccgtgcaatttttctcctatgatactcatcaaaattgcatcgtgatccacccgacaacagcaaaacagatcattttacaatgactaaatatcagaacttacggcttttaaaagttaaaataagaagacgataaaaatcctcctttcttccacaggccgggacaagtgcaatactttatatagaacacaagtaatgcaacaaatccccacccagggatgaatgggcatgagtgctggagatacgcatgaaggtgtgttcacacagacgtaggaagcacacattatcacaatcagttttgcatggatttgcacagccacatatacatatatacgctgaaatgcaaacctgcaaaactaattgtaagtagcaatgtctttgaatattctctccatcaacaagagatttgttatccaagagtactggaagtgcccatactacagtagagtcatgccaaaactacctgcactatgagcactttggtactactaggacccaatcttatcctctgtacacaactgtacactgcacagtccccaccatctgttcccaacaaacaataaaaaggcaaaaaacaaaccactgaaatgtgtcctattcaaattactactcaaggcatacttttaaaatgctgtatattaggcagcctgtgccagaaggggcatttagggcagtagattctaagctgcttcactaactgcactagatgcaccttaacacaagagacacattataagaagcagctcaaaagcatcaactacttaattatgcacaaactacagttctcagtagccattgactaaatcaccatggtaatgtaagaagtgcttacattgcagtagatctcaaaaagctacctgcactgtaagcacttttacatggccaaggcctattcctgtagcaaaattttaagtcttccaggagctcttcttttccgtcctcacagatccatgcagactcacctggttaaaacaacaaaacaaacacacacatattagaaactaaacaagtaaactactagttaatattcctgaaacaggctttcctttggcttacagagtctaagctaggttttgtggtttcaaccaaatcctgagaaatattaataatctcaattatttacacagaattgaacacgaataacactggcaactgcaaaaagtccaattcttatgtataagcagattttggactccccctctccatctaagaaaatttgatatctgcatctcagtaatttgcaggcacattctatccaccctgattttataagaggaggacctagagaaaggagcatgtaaaacccaggatgagtattcgagtcttcagatcattcagagcttttgggctccatacggaaagtgactgttagattaaatgaatattcccagcccccaccccattaatagaaaatgagagaaattttagagctggtttaagaaacacagccttacagtcttcacataatgcacagatggctgagagatgtcacattttgatctatttcaaagggctctacttctgtttaaacatttatggacccattttctccattaaaccaaagtaggcagattagctcttcttcccttcatgtcattatcttccataagaaaaccttctcccatttccaagtgcttattttacctaagaacatacagcaaggaagtgagcctctatgtgaaaaaggctcacagggtcccctatctcttccatgatggggtaacttttgtttaaaagaaaaacaaaaacgtttgggacagaatctgtaatacgttaaacgagtgagggaattttaaatgttgaactttcgtcacgatatcttatgccactaaatgagtctttagaagtctttacaaactaaactgatttataaaacttatacatcaatctggaatcaattttctattagggaagaatggatttagtatagaaatgagaaaaataacatttttccccttaaattgggtttctacacctgtgaagatttcttttccattaaaaaaaaaatactccaaacttgactcaaaatgcatagtatttgccaacccaacctggccaaactgagccccacagccatcagacagggcgcccttctagttactaccttttgctaattagcggttcatctggcatccctcgcgcacgctgggcagtcactctccaatccccttaaattgcaaataataataataataataaggaaaagaaagaaagaagtccttccctgtacgcctttgtggctcccttttgcctcttcccgcgtctctcacacccttacctaatgctcccgttgaagtccgcgagcagcccgcgcgtccagggtgtgctccagctgctcacaccacgcgctccagtcctcgtgcagcctcagccgccg

SEQ ID NO: 1888868 - DNA, 4001 bp, Homo sapiens
caccaggaagtaagaatgacacatactgataccatcttttagtttggcagcacctttttgatgagaactaaatgttcatgttggcagacagtaaaactaccacaagcctcgtttcttcatttgccaaatacatgatgttaaagattaacattaaaatatgaaacatagaactggaaagcaagccagtccctgcttcgagttcttttaattttatgaagtttaaaataaacaacttcctttgttaactttgtcctagaagctgtcgttagctgttttcgagcagtggttctgcaagtatggtgtcttgaccagcagcatcagctcctagggaaaggttagaaatgcaattccttacctgtaatgccagcactttgggaggccaaggtgggtggatctcttgaggtcaggagttcgagaccagcctgaccaacatggtgaaaccccgtctctactaaaagtacagaattagccaagcgtggtggcgcacgcctgtaatcccagctactcaggaggctgaggcaggagaatcacttcaacccggaaggtggaggttgtggtgaatgagagatcgggccattgcactccagtctgggcaacaagagcgaaactccgtctcaaaaagaaaaaaataaagaaatgcaattccttaggccccatccagacctattgaatgaatctctggagatggggttggctggctgtgtcttagtaagtgctaaagttttaagaaccactagaggatccaaataacttttggtgttcagtctcaaaccactaattagctgcgcatgagaaatttctgctttaggttagtcaccctatggagcccccgaaccctaaatattaacagtaggcccacatccaggtttccatctgctagactccaaagcaaggcagcagccatccctctcagtagccctgccaccaaatcctcttctccgagaaccccaaaacagagtttgattgacaagttcattcttctctcctgtcagacctcaaaatgtgcccagttccttaaaggtatgtgtcccattggtttacaactcttcattcccttcctaagaatgagcacgtgtactaaaacaaaattagtacatgtcatccaaatattgtcagggtaataaaattcctaaaattaggcatcttggtgctttatgtagatgcaaacttgaaaagcagctatgtccaagttttcctttaggatcctcccaagagatattttacaaactcctctagcattgctaattattttttttaaaaaaaaaagagtcattttttcagatctataaatttcatttattttgaggttcattcacattcagtaacaatctgatcattcaccaaagttccaaaacacatactttataaattagctatcatagtttttagaaatccaaatatatttcaaattattttttaatagcagcaactagagaaaggattttttaccatctagcttactgtagcgctgatcaggaatgtcgccaacaaaggtcctgcggtttacagatggataccgtgcaatttttctcctatgatactcatcaaaattgcatcgtgatccacccgacaacagcaaaacagatcattttacaatgactaaatatcagaacttacggcttttaaaagttaaaataagaagacgataaaaatcctcctttcttccacaggccgggacaagtgcaatactttatatagaacacaagtaatgcaacaaatccccacccagggatgaatgggcatgagtgctggagatacgcatgaaggtgtgttcacacagacgtaggaagcacacattatcacaatcagttttgcatggatttgcacagccacatatacatatatacgctgaaatgcaaacctgcaaaactaattgtaagtagcaatgtctttgaatattctctccatcaacaagagatttgttatccaagagtactggaagtgcccatactacagtagagtcatgccaaaactacctgcactatgagcactttggtactactaggacccaatcttatcctctgtacacaactgtacactgcacagtccccaccatctgttcccaacaaacaataaaaaggcaaaaaacaaaccactgaaatgtgtcctattcaaattactactcaaggcatacttttaaaatgctgtatattaggcagcctgtgccagaaggggcatttagggcagtagattctaagctgcttcactaactgcactagatgcaccttaacacaagagacacattataagaagcagctcaaaagcatcaactacttaattatgcacaaactacagttctcagtagccattgactaaatcaccatggtaatgtaagaagtgcttacattgcagtagatctcaaaaagctacctgcactgtaagcacttttacatggccaaggcctattcctgtagcaaaattttaagtcttccaggagctcttcttttccgtcctcacagatccatgcagactcacctggttaaaacaacaaaacaaacacacacatattagaaactaaacaagtaaactactagttaatattcctgaaacaggctttcctttggcttacagagtctaagctaggttttgtggtttcaaccaaatcctgagaaatattaataatctcaattatttacacagaattgaacacgaataacactggcaactgcaaaaagtccaattcttatgtataagcagattttggactccccctctccatctaagaaaatttgatatctgcatctcagtaatttgcaggcacattctatccaccctgattttataagaggaggacctagagaaaggagcatgtaaaacccaggatgagtattcgagtcttcagatcattcagagcttttgggctccatacggaaagtgactgttagattaaatgaatattcccagcccccaccccattaatagaaaatgagagaaattttagagctggtttaagaaacacagccttacagtcttcacataatgcacagatggctgagagatgtcacattttgatctatttcaaagggctctacttctgtttaaacatttatggacccattttctccattaaaccaaagtaggcagattagctcttcttcccttcatgtcattatcttccataagaaaaccttctcccatttccaagtgcttattttacctaagaacatacagcaaggaagtgagcctctatgtgaaaaaggctcacagggtcccctatctcttccatgatggggtaacttttgtttaaaagaaaaacaaaaacgtttgggacagaatctgtaatacgttaaacgagtgagggaattttaaatgttgaactttcgtcacgatatcttatgccactaaatgagtctttagaagtctttacaaactaaactgatttataaaacttatacatcaatctggaatcaattttctattagggaagaatggatttagtatagaaatgagaaaaataacatttttccccttaaattgggtttctacacctgtgaagatttcttttccattaaaaaaaaaatactccaaacttgactcaaaatgcatagtatttgccaacccaacctggccaaactgagccccacagccatcagacagggcgcccttctagttactaccttttgctaattagcggttcatctggcatccctcgcgcacgctgggcagtcactctccaatccccttaaattgcaaataataataataataataaggaaaagaaagaaagaagtccttccctgtacgcctttgtggctcccttttgcctcttcccgcgtctctcacacccttacctaatgctcccgttgaagtccgcgagcagcccgcgcgtccagggtgtgctccagctgctcacaccacgcgctccagtcctcgtgcagcctcagccgccgccgaaattaaagagaaagaaacaaagcatcatgggaaacggagttctccattcaaagcaccaaaaacgcgccaagcccacgcctccctccccctccattcccgggttggtg

SEQ ID NO: 1888869 - DNA, 4001 bp, Homo sapiens
gttctccctgttccctgtagatcctgtctccacagtggcatgatgaggggtgggaacatcaggttcagaaaaggtctttctgctctcagcttctcacaagcttaactgaagccccccgccggggtgatagaagatatgacttcccctgagtttggtagaggcaagcatttccctttgaaagcttgttggtcattggtcatctccgtggtctcttctaaaccccaagagtcatccagggccatgcacccaggggctttttccacctctccattcagagcctttgatgccccttacacacctcttatcagctgttgaacaaactgtgacctgtctccaagaatgctggccagctgaggctgacaatggggcttggccaaccaaagtgatatggatagcaactggcagagggccaggatggcataaatgtcaaaaggtgcttgcacttgctgctgtgactgctagctgtggtcttaaggtatcttgcagaggagggggtaaaggatggtcccagaggcaccaaaaggggcaacaagcacagacatttttaactgccactcagagaacaacaactctgtgccaagccctgtgctgagggctctacactcacaatcttcttcatatacacatgggtctcactgaaaccataacacagcagagtgggaagggatattttaaccaactaaggtgttcacttgccagtgcctgggatccaaagtcagcatagccactctatacgctcaatcattgggagagggtaggaggagccagttggcttagtgacacatttaacttggagtacattcatcaagacatgcctggaaaaggccacagaggaaaggctccagagaggaagatagcactgggtgactgaactgaggggaccacagcttcataagaagggcaacaagaaccaggctcagcacttattctggtgttcactcaacagcatacaatgtcatcacattcactctcttactggaacctcctagggcgcccaggaagtcagcagggcaggagtcttctcccctctgaacaaatgaggaaagtaaggttcagagaggtgaggtgactttacttgccaaagacctattactggtatggtaggctaaataatggcccacaaagatgtccacatcctaacccctggaacctgtgaatatgactttatatggcaaaagggactttgtgtatgtaattaagttaaggatcttgaagtgagaaggttgtcctagattatctgggaaggctgtgaatgcaatcacaagtgtccttataagaggaaggcagaaggagatttggcacagacagaagaaaaagggatgtgatgacaagagctccatgtgtatatcaaggattgtgagtgtaaagccttcagcacagggcttggcgcagagtcattctctgagtagcagttaaagcaatctgtgcttgtcacccctttggtgcctctgggacctcctccgcaagataccttaagaaagagattgaaacgatgtgctttgaagatggaggagggggtgatgagccaaggaatacaggtggccaacctgaaaaaggcaaagtaatggattctcccctcagagcctccaaaagcatccagccctgttgacaccttgattttaggccagtgaaactgatttgttttggacctctgacctccaaaagtataatagtaaatttgcattgttttaagccactatgttggtggtaatttgttataacagcaatgagaaactgatccatctggtgagtggcagaactgggacagaagccagtcatctcatcacccaggcaaaggcagacgccatcatctgcttcttggcaaagtttcccagggcctggatagatgtgggagtggaggatgggaggacttcaataggaggcaatgatggttcggaagcaggaagctagctgctggaagccaccagcttgaagtcccttgcttgaggctcgtcatgtgattatccgaccgcttcaaggaagggactaggagcatggaggcagaggcctgtctttggccccagaagctgggacgtttgatccattgctgactgggtgagggtcctgctgattgagatggagagtccttagaggcaagactggaccgatgacttcttgaggtgcttttcagctctcaggttctgtcagtccctcttcatggaatcctaggtgccaaaagcagacccaggaagcctgtggccctgataacccaaggcaacctctgtctctctaaatgttcctgtggaaccgagtaagcataatcccagagggcagtttgggacagctcacacccttccagtggcggtgaaaattggtcattccccttggagagaggaggcgctcttggcaattttccagagctctaccctccttcctttgtgcccaaacagctgtgggcagatcaggctgggggtagaaaggaatgaattctattttcttccctccctgaggtactccatgtggtcacagaaggctgcacaggaaatataacggttgacagacgtgcggtgttttgtgatgtgaaaattaaaatcaccaggaaatgttcacgttctctctctccttctctccccccctcccctatcttccttcctctgagcctttctctctctctgttctcactcttcctctgttgcctttttccccccagttcattttaagtccctcaaacttcctacctccaagaacaactctctagttgaggcttggactttacaactttcacaaatcactttgaatccttaaggtgcctacagacctctcagtttgagcaattatgggagggagaacaaagaatcagggtgggcgagcttccagccaccactgccataaagttaagtgacaactgttcactcccaagcctctgagtctggacaggtttgaaaaatttgttttaatctcaaaaatctattcccaatgagcaattagaagccatttccttgagctcttactatatcccaaacttcggtttagttaaattttgtgaggttcaaattttgcaccttgagactctacttttctctaaatttcacaatttagggataagggtctgtttgtattcagcactgattggaatgaaaacatcattgagcttgccaagctgagacctggaataccacagcatgaggttcatatgttctgaatgagcaggtttcagaaagctgagcacttagatggtgaggcgtgtgacttgtaagatgtgctttctgtagggacacaggccatccccaccgctgcaccttcagcatctgtaaatggtacaagggctaaagtacttgcacgcaggcatttggattttcccctgtgtattattattggcgttatctaaggcaatgtccctatcttacttcataggtcaagagtatccccagggccacccagcaatgcctaggaatgaactcctagaatgaaaaacactttgggagattcttctatcaaccttcccttgttctataaatgtggacactcaggcctgaaagaggggacaggccctgcaacttgagatggctcagcaggactgggactcaggtctagctcgtactctccaccccaggcctagatacttgtccactgtgactacctccgggagccaggtgccagcctgggaggagccatatctgttttggagcaattgccccgggcatagcaaagaagggggttgagtatgagatagtataaggatggcatgtatcctttggtaaacaacaaatcttggggctggaaggctggtcaaaagtcagtctggagactggttttccacaacagaacgtgctgcgaaagagttgtgggcaaaactcggttttgaaaattgaatctttaacccccctgggtgccatctattgcaatcttatgagaactacttttgtgaagcaaagggtcttcttgtaatgcaaatttccactccctaattggcccggtgtgtaacttctatgccttcaattgctgaagggggccaagcccctttgacaccggtttttgttttggtttagcacaaagcaggt

SEQ ID NO: 1888870 - DNA, 4001 bp, Homo sapiens
ccagtcgcgggtactttgttataccagcatgaatggactaagacagtgatcaactcagttgtcagaggtcaggggtgggattgaatgttgaaagctccaaccctctaatcataccttggtctttctgacaaccagccttcatcctgaagctaacttgccaccacctctactccccgctaagccaagtcatctcattatcttgttagcatacagaaagacactcatcactccagagagtccaaggatcttagaagctcttgtgtcaggaacaggggactaagaccaaatactttaacaaaagatgctatcacctctattagttagaaaattatgacagttttagcagctctgttccaggaactgagggtgaagaccaaatatgtctttttcttattatattatcacaacattcaatcttgctttgaggatcaacccaatacttgtacctgagagggaaatgtaaacttatcaatggaattagggagttcttcacacctggcaccactgtcaacaccttctcatttaatgataggcaaagggactcaaagaacatcagaagtaaggagtggaggactgggcatggtggttcaagcctgtaatcccagcacttttggaggctgaggcgagaggatcacttgagcccaagagttctgtaccagtgcactccagcctgaatgacagaatgagaactcatctctttaaaaaaaaaaaaaaaaaagtatgagtggacatgggagaagagaaactgtccctttggtaattatgatttattaaacataaccatgttgcacagagccacttatttctcttaaaagcctgtcaaacgtcttaagtggaattactttctcttcccgggtcacaaaagccagtggctcaggtacagaatagataatagaactgattggtgagtaggaagccaaaagacacacacagagaacagtacaatcttttaaaagctccaagtcattagctttatttttactgaattcagcatgggatgacaaaaatgcattatatcactaccatccattattacatgtagacatttatccttgtattctttatatgtccattttctacgttaaatctgttaaccaatactaatttaaattacatgatttcctactaaaaatatgcagttcatataagcaagggcaaataaatcctccttaaaacattttattcctttataattgagaacttaacagtcttaatggctagttcttaaaaaatgtttataggattaagtttatttaagagagcagacaaacaaaacatattgtaaaactagtattttccagaagcaatttccattctcttcctttcttcctgcaaactggtgttttatctttacaagttctctgtcattccataagaaagctgaacagtggttaaaacatccagtttgcttgaattcctgagtgattcagattccagtgagattgagggtcattcataacagttacaaggctggtgtggtaaagggagaacaaaaataaactgggtttctgcaggtaagtgagaagacaaaatgaagaggaataaggttgtaaggcagtatgattaggcttgtgggtgctatgccttctgataataattatgaacagaaatagaagccaaaaagtaaacaacatgtaagttgtcaatctttgacagttgaggcagggagaaggaaggaaggatgacattacaccttatctctggtttactaggctggtgtgtgagaccatttgggtgaaatcgtattgaaatcattcattgctgaggtgatcagctttcttgcggtcctttctctgcactctattcaatgataaactccactggtttatacctcctggaaaacagttattcagaaacattataggggtagcattggtgagacagccaatggagaacatgtttccaggtagcctgaaacccagcagacaatgtagctgttgcctaacgaacacagaaatctacattgtatgccaggttcatgccccagacctggatgttcagcttgcaagtaattctcacatactatttcaacacaactgcctactgcattcaagatttcaaaattggcatttgtcttttctaccacaaggaaaagaaaaccaacagtcagaaatgctgggacttacctactaccaacaaaatttccttaaaccatcatatcatcaagttgtcatcatttaatcatgacatcatgttgaaaatgccatctaaaagtcaagagatgaaaaagctggatggaaggaaggtcggatagataaactggtaggtacgtgggcaggtgggtggatggatggatggatgggtggatggataaatgggtggatgggtaggggtagataggtaggtaggtagatagatgaatagattgatctatccaaatgatacctttcataggggggaaagagaaaaaaagaggtaaaacaaaaacaggtaagagctaaaacatggataaatatccagattcctcccccttgtagtattgaaagcaaatagacctcatcattcataaaaccttgaaggttcccaagccccagctgataatgttggacttaacaccctagaacttgactctctcctctctctctgtctctctctctctctctctctctctctctttgtgtgtgtgtgagtgtgtgtgtgagtgtgtgtgtgtgtgtgtgtgtgtgtgtgtgtgtgtgtgtgtaattcaaggtaaagttttcattattaaagactgcccaataatctctctcaggacactgaagcagaagctagaagatgccatcagagacccagtagccagatgtagctgctgattacgaaagacaggatctacactggctactgagccattgagggtacctacaccttccagcagctgggtgatcctttgccttctggggaggggctctgtggaagaaaaaagaagatatcagatttcaattgcacattttctttggatcatgaattgacattttgacaatattcccatgtacgtaattttaaacaacctctggatttatttacttatccaacagatactgactgagtgacattaaataaagtgccacatattttcttaggtgctggagatccagcagcaaacaaaaaaagtggaaaatctctatacttctacagcatacatgattccttgtgacaaaatctacaatcaattatttggtatgttttgcagtaaaatggaaatatacacaagagaaaaacaaacaagcaaacaaaaaaccaatctaccattttattgtggcttggagcatttttgttgcttcctgtcactttaacttgggtaatctagcaatgatgcacatatgtaaagtaaattgcagttaaaaaattctttcgtgttacgaactgaggataatacagttattttaccaaatatctcaaacaccaaagaaaattacagaaaatgcatattataataaatattcaaagcaggtgctcactagcatgtcagttccaagctttcctcccatgatacaatgaaggtaacaaaataagtcacaggattggtgttctctttgctattcatttatccaccccagaaatacttactgagtaccttcaataagtacctttcagtaccttactgaaatacttctgcgtgctttattccaggcactgggaatgcaacactgaacaaaatccttgcactcacggaagtttaagtctaagatttaaggaaagggtagaaaaagactgaaaaaaacctccatagatatggacggtcatttcatagagtaatgaaacagttaagaggaatgctattttcgataaggtggctaggaaaagcctcactgagggcctggcatttgagtggattcctgaagtaggaggagaagaatcatgtacatacctggggtgggaaaggacaccacagggagaggcaagagtcagaacaaaaagcactgaaacaggaaaaagcctggtatcttggacaaggtgttcttttattagcacatgaccacatggccaattattgtttcctacttttaggattattctag

SEQ ID NO: 1888871 - DNA, 4001 bp, Homo sapiens
acaaaagccagtggctcaggtacagaatagataatagaactgattggtgagtaggaagccaaaagacacacacagagaacagtacaatcttttaaaagctccaagtcattagctttatttttactgaattcagcatgggatgacaaaaatgcattatatcactaccatccattattacatgtagacatttatccttgtattctttatatgtccattttctacgttaaatctgttaaccaatactaatttaaattacatgatttcctactaaaaatatgcagttcatataagcaagggcaaataaatcctccttaaaacattttattcctttataattgagaacttaacagtcttaatggctagttcttaaaaaatgtttataggattaagtttatttaagagagcagacaaacaaaacatattgtaaaactagtattttccagaagcaatttccattctcttcctttcttcctgcaaactggtgttttatctttacaagttctctgtcattccataagaaagctgaacagtggttaaaacatccagtttgcttgaattcctgagtgattcagattccagtgagattgagggtcattcataacagttacaaggctggtgtggtaaagggagaacaaaaataaactgggtttctgcaggtaagtgagaagacaaaatgaagaggaataaggttgtaaggcagtatgattaggcttgtgggtgctatgccttctgataataattatgaacagaaatagaagccaaaaagtaaacaacatgtaagttgtcaatctttgacagttgaggcagggagaaggaaggaaggatgacattacaccttatctctggtttactaggctggtgtgtgagaccatttgggtgaaatcgtattgaaatcattcattgctgaggtgatcagctttcttgcggtcctttctctgcactctattcaatgataaactccactggtttatacctcctggaaaacagttattcagaaacattataggggtagcattggtgagacagccaatggagaacatgtttccaggtagcctgaaacccagcagacaatgtagctgttgcctaacgaacacagaaatctacattgtatgccaggttcatgccccagacctggatgttcagcttgcaagtaattctcacatactatttcaacacaactgcctactgcattcaagatttcaaaattggcatttgtcttttctaccacaaggaaaagaaaaccaacagtcagaaatgctgggacttacctactaccaacaaaatttccttaaaccatcatatcatcaagttgtcatcatttaatcatgacatcatgttgaaaatgccatctaaaagtcaagagatgaaaaagctggatggaaggaaggtcggatagataaactggtaggtacgtgggcaggtgggtggatggatggatggatgggtggatggataaatgggtggatgggtaggggtagataggtaggtaggtagatagatgaatagattgatctatccaaatgatacctttcataggggggaaagagaaaaaaagaggtaaaacaaaaacaggtaagagctaaaacatggataaatatccagattcctcccccttgtagtattgaaagcaaatagacctcatcattcataaaaccttgaaggttcccaagccccagctgataatgttggacttaacaccctagaacttgactctctcctctctctctgtctctctctctctctctctctctctctctttgtgtgtgtgtgagtgtgtgtgtgagtgtgtgtgtgtgtgtgtgtgtgtgtgtgtgtgtgtgtgtgtaattcaaggtaaagttttcattattaaagactgcccaataatctctctcaggacactgaagcagaagctagaagatgccatcagagacccagtagccagatgtagctgctgattacgaaagacaggatctacactggctactgagccattgagggtacctacaccttccagcagctgggtgatcctttgccttctggggaggggctctgtggaagaaaaaagaagatatcagatttcaattgcacattttctttggatcatgaattgacattttgacaatattcccatgtacgtaattttaaacaacctctggatttatttacttatccaacagatactgactgagtgacattaaataaagtgccacatattttcttaggtgctggagatccagcagcaaacaaaaaaagtggaaaatctctatacttctacagcatacatgattccttgtgacaaaatctacaatcaattatttggtatgttttgcagtaaaatggaaatatacacaagagaaaaacaaacaagcaaacaaaaaaccaatctaccattttattgtggcttggagcatttttgttgcttcctgtcactttaacttgggtaatctagcaatgatgcacatatgtaaagtaaattgcagttaaaaaattctttcgtgttacgaactgaggataatacagttattttaccaaatatctcaaacaccaaagaaaattacagaaaatgcatattataataaatattcaaagcaggtgctcactagcatgtcagttccaagctttcctcccatgatacaatgaaggtaacaaaataagtcacaggattggtgttctctttgctattcatttatccaccccagaaatacttactgagtaccttcaataagtacctttcagtaccttactgaaatacttctgcgtgctttattccaggcactgggaatgcaacactgaacaaaatccttgcactcacggaagtttaagtctaagatttaaggaaagggtagaaaaagactgaaaaaaacctccatagatatggacggtcatttcatagagtaatgaaacagttaagaggaatgctattttcgataaggtggctaggaaaagcctcactgagggcctggcatttgagtggattcctgaagtaggaggagaagaatcatgtacatacctggggtgggaaaggacaccacagggagaggcaagagtcagaacaaaaagcactgaaacaggaaaaagcctggtatcttggacaaggtgttcttttattagcacatgaccacatggccaattattgtttcctacttttaggattattctagaaggtaaatgactatgcaacttttctccaagtacacgtcttagaatcctttgctgtgaatttaaaatgcttcagctatcacttagaaaagatttaataaagctactgtcaattggaaactagtaccatttgatcggacatgcagctataccacagtatgacacacacatatttatcaccaagagaaaagtggctttttaaaaatgtgttagctataagaaaagataaccagctttctgggagctctaaatatatacatatctagggaatgatttaactatttaatcacagatgtctaattttaagaggcaactcacttgccaaattatagtaatagtgcttcaccagtgtggttagctcttggtgggggaggataagggtggaatttacaaggtgaagcaggggtttttttgattgcttgcttttttttctctttaaataagttaaggccaatcccatctatgaagtatattttggcactgcctacaaaccagagcatacatactgaagtgggggaaaagaccgtttatataggtttggctaagtcttaccctcaatgtaaaataaagcatttgtagaacacacaaacttacatttcataaaccactaaaactaactgttcataactctacttttatgaataagactaacaattaaagtgaggcaagggtttagtgtggtcactttcaatgccaaaatacaaaagattatcttttataaatctttacatttagatgagaaaaggtaaatttttaattctcaaaggtatctattctccacatcttagtactaaagttaaggtggtcttttgccccttgttttaaatttaatctaggtaatacaaataggaaaatctgta

SEQ ID NO: 1888872 - DNA, 4001 bp, Homo sapiens
aaaaacctcaacattttcctcattccagacgctagcttctcctagttggcgaaaggaacaactctttcttccccatcgtgcttacaagcctctgaaatagggcctccacccagtggaaaccccaacttccttcatgaaacaactctgcgtccagaccctacagcctttgaaaatacccattatctttccctactacccatagaaaaagtgagttttaggtgttgggaagagaatcctggttgcattttcactggtaaaaggagccacacatccagggacgctgctccataagagctaaggactcccagggatatctcaaagtcattaatcttaaagagcctagagatcactgattctaatacttccgtattggagatgagaaaatgaagctcagagaggaacaaaaacacagttagtggtagaaaggagaccaaaagtcaggcctgtgaactcctcagtgcatatatttattgcagcatctggatcttctttgcctcaaaacttagaatatttttaaatacaggacaagctagtaaagaattcctatgtaataaagatagtccacagctgcagaggctaaacaaaaatgagatgataacatgtgacctttcttaggcagatggctggttggggaaagtagatgaatgaaaagaggaaaagatctccagaagagcgggaaggtataaagtttctctaggacagtttcccaaatcgtgcttcattggacattgacacaggagaaggctgtgggggaaaagaaaattcatgatcagataggtatggcaaatgcctcattctatggtttcctctttgagattctcaatgcaacattagactattaaaggctctgaaaaatcctacaagaaaacacctgtataaccttgtgtgaccaagtaataccaaaatttatttgccctctgagtctgctattttgccctcttcctccagcccttgacactgtttctcaggaagaaaacatccttcatgctggctactacctcatatgctctataacattgtggtgttcacagtttgaatttttcaaaatccagggtagaatttggcccccaaacctaaagctagtggacaagaggaaagtcaatcaatcagtaaatatttattattttctgtaactaaagtactgggctgtggtaggggagacaacaatcaaagacatagccttgtcttccagaagctcacaatctagttgggaattcaagaataccccttagaaaagttcattgacaatttacgaggtgctattagacagtaggagagaaaggcatacataccagggcccagggaagaagagctttgtgaatgaagaaggaaaaagtgtaagttgactttcaaaagtctctggaaacactggactttagctggtccaggaaatatagggaagaattggataggcaggaataaatggagaaagtgttcctacaggaaaagacatgtggaaaaggggagaggtaggcaagatcaaggagtgtttagaaggcaagactgagtatcaagaaagtgaatttctaagccctgcttactcagataagccattaggcttgtgtgagaatgctgatgtcctagataggagactctgggaggggaatatgaaggaagaaaataataatgaatcaaagagcacttccattcctggacactttatacattttcaagactattgcgcccccatcagcactctcatggtgtgtgtagacacagcccagggctgtatttccctgagatgccacacttttcccctggtgtcctcagatataatgcctcagttcctgcaaagtcacataaaataacttgtgagaacttggtgcttggtgagcatccttgtatccagctggcagtccattcgtcatatcccatctgccctggcctagagctggtaagcatgtgccgcacttggggtatttgacaaactgacactctaccacatggagtgtccaactcagcttgtcaaatacacggagcgtggcactgcaggaggccaggccaagagcttctgtggggaagtgagatcttcctgggagatgtgaccctagagggaaagagagagaaaggaatgatgaagtcacacccttagccccggggatcttgctcaaaggaccaaccaaagcaccagaatagggaagtgagcaaaataggcatagggttcctaaccagaagagagatcctgaagataagcaggtaaagcccgagtgacacccagtgctcagctggaagctcatcaggcctgagtcctgtagctatggcatttctaggggtcccaagcttcagtgggttcctctatgcagcagagaggggaaaatttggtcatcatcctgcctccctgacttgaggaaagtaccagaccctagagtcagcatccttgctccctcttctcaattctcccaagctgtgttttcagtgttgtggttatgcacataggctttgaggttaaacatgagcttaaatcctagttcttccattagctagttaggcaaccttggatacatcatttcacctctctgagctcaagttttctacacccacaaaatgtatgtaagtataatacctacctcataaggttattgtgagaatgacaggagataatgcatgtaaagcctttggttcagtattcaatacataacaaatgctcaaaaagtagtggttgtgtgaccaaaatgaaagaaagagctattggcaattgatttagcaggatctggacaggtgtgacattgatttcttgtggtctcagccttgcctaacatgatcctcttgtcccatagggactcaagaatggcagctattaaagtgcccttaaagatcatctagtctcactcacttaggttataaatgagataacaaaggctcctgttggggaggagacttgtaaagtttatacaataaattttttacagttcagcagtatgccttatacagctttcctcattggttattttgcctcccttctctgtatatccctctgggaaagggaagacacatcaacaaagagggcaaaaacaggcaatagctttgtaatgcaacatttgggatcactgaacccacaagccaccagggcaataaggaagctgccaggagcagggtcaggtctgaaacttctgggagaattcccttggcaacaatcagatcctgttgctaaaaatcccaggttgctggtgtcaaattactgcccttaccagctgtggcagttgatctgtgagcaggtagctggtctacattaaatattgtcatgaaaagtggcaaacatcacaaggttaccagaaatggtaaactgcccccatgaggccggaaagccctgtcccagcccaggtaagacagagggattcagccttgtctttcagcaagaaaacaatcagtgtcttttcttgctctattcttttaattgaatgttaagaaggtaacatactccttcaatttaagttctggcagtcatctcaaaactaaagctctttcactccctcacttccttttctacctacccaattcagcctaatccacccagcagcaaaagcagcagtcatggtcaccaaatatggcatgacagaatcgacaaacttgtgttctaatgctgtcttggccatcaactagccaatcatggcttgggcaagtctttctttgggtttcagttgtcttctctggaaatgagaacaaggagacttacctacttacctggcaaagttgttggaaagtgttgctaagctttccagagcctcccacataggagctcaaaaggaccttgtctcagcccctggacctatggttggaggccagccaagcaagctgattaacagagtctgagttggggatggcaggagaaaaagaaatggattgttaccttttttgtatcattacactcattggctgtcagctccagtaagaagacctagataagctggaggtgttcacagccttttgaatgcactttctgactttattcacctccagaaaggctggaaaggaggcatgaaaggggctaaaaattattagta

SEQ ID NO: 1888873 - DNA, 4001 bp, Homo sapiens
gtgtttcagggaaagagaagaaaaagcttaaaatgaacatttcagtcagccctccagaagtcaggtctgtggcatacacatccacagggcagactgaggtcctcacagtcacttggacattgtgtccttggtcatggctctcagctagacggtcatggctcctccgggacctgatgacaacctatatctctagttggcatcttcttttgtagcattcatgctgctttatgctctgacacaccctccccaagcactctgctgctatcatgactcccaggctggtgtgggcttttctctgagcccaggacatcattttccactttcagcatcacattgcagttgcaatactgtaaaattcctaggcctataattaggtcgtcttttaagtcccttcaaggcagggctcatgcaggccctgtggcttagcccctgcccatccaagctcagaacagcctggaacccagcagacactcagcaactcttgctcctgtcaggcaacagctttgtaaagcagaccagaacactaacctgtccgtgtgtcctcctattttggaaagtggatcaactgcccagcaggtctgggtgggctggagctgaatgagaagagcagcctttcgtactcaccttggcagcactgaaactcaaggagcaaagcttctcagattcttctggaagaaggcaagggagcgacctgttgtcagtgggaaacctgtgtgttgagtatagctttgggatagaactcctccagagctgctgcacggaccaccctcgcacttgcctactggccagaatgtatttatcaaaagtcctcttgccgtgggatcttgactgcaatttaagacacttctaattagttatacccaggccctgcaaaattgctgggtttatataatatattcttgttgcacgaagatttattattctgttggatgattctattttaattttatttattctggccaaaaaagaaccttctccgctcgtcaagagatgccaatttgtcttgaaggacaagagaaagatgctaacacacactttcttcttcttgaggagtgagagaagcacgggtaaggaaaacaatatatctggggctgatgaaccaaagcaaaaaaatatatgctaaagatggttttctgctcaaactcttatcctctttgaccagatcatggttggtcactgcagtgtcagagggacacaattaaatagaccatgtccagaggactgggactagaagaatgaatggacccaaagctttgaagaataagggaagaaaaataaactagggctatgtagactacaacagactatgatccatgccgggaatgatgatgttgatcgtttaatctcggtcctgtgaaacagtggctggactaatgtaacctggacagttccaaggaaaaagaactaagcttaatgtgtggaacttccagagactccaatttcagaagaacagggagagttttttgatgaacagaactgtctagagaagaaggaaacctccttgtaagacagtgaattcctgaccagcaataatattccatcagaggctccacagccatcagtgaagggcaagcctctctctggaggcagggctggactctcttagaagctcctgaagcagagattctctggatcaaggtccaagatggccagagtagcaggctaccactgcattctgaacccttaatcgccgagcacgtaagtatgctccagatggagagacctgccccagggcccaactggaagagtttgagaccagtcccaaagataactctgacattgaaggaaccacgtctccagatcaactagtctccagcagaggagaaagaagacctcttttctcctcaagaatcctcctcactcccaaggaggtctggtgcttacctactgtcattgctttgatgatgatgctggctctggggctttgtagtcactagggcaccattttgaaacaatgcacaatcatctactaaacggaaccactagtgacttgaaagcccctgggccttatcttctctgtcacttttgatgatgggtccccacctatccgggaaaagctgaggtgcagaaaaccaagaggcaggcccatggttagctggcagaagagcaaggctcccaagtcaaaggtagtaaaaccgcttccccagagtccccaagaaaaagggcaagtatttttaaggtagcccagccctctgcccctgcctaatactgtgcaagcaaagctctagccacatgagcatgagctttccctcatccagagactgactcaataaatgaaacaaaagcagattttctgcctagtcacatggtagcagaacaagatgcctctcacgacaaatggctggttgggtgactggctccatccacattctggaaacgatgagggcagtgccttcactgccctgaacttggtcaggatgtgtgaagagtgtttccagggttgctctgggagctaccctggggaggtcccttggctcctcattcaggtcacctaggaacataagtgaaggtgctcacatctaattgggagctgaagtgtaagatacccaggaccttcccctttagtctttgtcagagaaaaggtcagaaaaccagtggccactatgtctatgtggaatccaccatgaagcctttgataagaatctgtgcttttcagacttgttcctttaagataaatgtcaatgcagcagccagtgtagctgctgtaacttcctccagactttcccagccttaaactagctgacattagaactctagcctccacctcccactacaatggactttgcttcccattcaaccagactggattggttctgggtatggagaactcacacgagctccattccccaaagtcatccaaagaggtcagagttgtaacctcgaaactgaagggtctgcatgaaaaagccagctgcacattccgacagcagcagaactttatctacttacctaacctctcaaggagcttggcaaagcacttacttctttgcagatgagactgagacatagttacaaagtctcagtttcctctgcaaacagttgtaagtgcttagcaattataagacaggagccatgtcttacaatgtttgcacgggatgactgcaaagcatttgtatggatggccatctccaatcatccctaccaccttcctggacttccgccaagccctggcacgcttaccaactggggttgtgattatttcagttttgttgctcactcctgtaaaatcaaactggaagagcttccaggagttcttctcattgatttcaagcttgaaattttcccacttgtagatcatctcattctcaggataggaaactggaaaggaatgtgagaaagagggtcttatgagacttggaagcccacctgaggtctccaatagcatgaagtcagcctgcacaatgccttggagtcctgtctctggcctcaccagctgtgggaccttgcctctcttacctcattgttgaagtccattcaatgagtgcgtttactgagcattcctcagtatcaggccctaggccagaaatacagagatgagcaaggcatgaaccctaccctcaagcaatcacatttaattttataagacagtgagtatactactgtgatttttggaggagctctgaaaaacctatgtccacagaacagcggggaaacaaagtagataaaggtcacttggggacatactcagaaaagacttcataaagcaggtgatattcccattaaatcttgaaactcaagtaaatattctcaataagaatgaggttgaaggggttaaggggcagtatagaaaggtgaaacacctggtgtattgtggaaaggacaaaagttcaggatggctagctcacagaggatgaggtgcacaggattgggtggcagggtccagttcatgaatggccttgaggttcattctaaggaatttcaaattgatccatgagagttaacggcagattcgagactaagaagtgacccaacctaggtgacccttcagctaggtcactctg

SEQ ID NO: 1888874 - DNA, 4001 bp, Homo sapiens
acttaccctaggtcttcctgaccctcagcccttaccttctttctctccagtctctcctgctcaatctgcagcataatctgttctctctcgagacgcatctgttcagctacctcccgggcctttgtttctgctgcttctttctaacagaaacaggtaaatcaaggcaaagctttaataagctaagaaaacagtgtggtaattccctggctttgcacatgttccttcatctcatcatctgccctaaagtggatgctgctccaatattcaatgtggatttatacaaaccactgcatgacacagcaaacatggttggacctcattcatatacccctggctcaccatgcaaatcacctgcagacagttctcacacatggccaaggcttttctgtgtctgtgggcaggcttgggccatgaagtgtgcatgtggccagatcagagagttaattccccagggagtgaccttctactaccgtgaagggcaggatgtggtagataagtagttcagtttcctcatccctcagctggacaattctaaagcatgatccacagtctgtcagaggttcccaatgggactgtgttccagtcacccacagtaacacatgcatcaatgcacttacattggcttttctcctattcctctaccagcttcctgggattcgcttgcaaaaaaaactgctggcactcaaattcttagcccagggtttgcctttggggaaaccctaactcacagatggcaaacattaccaacttcactgcaactgccccaacttatatttaataaccagcccagacagtttaagaagaaacttcaagtaaacattatgagtcattgaaatttaactaattgtacctactatcaaggtccttaaaaaacaagtaaagtccatctgaggactcatacagtacctgcttttcaatcatggctttctcttgtttttcttgttcttgcttttctttcaacaacagctcctcctcagccttccgcttggcctcctcgcctgcctttcttttctcttccccttcctgttttttcttttcctcttcctgccgcttcctttcttcttcctgctttcgggcttcctcttctaggcgaagcctttcctcctctgcctttcttttcaattcctctctctccagccttttgagaatacaactgttgttagaagatgacatgctcgaaaagcaaactgccagagaactgtgtgctgacagccgagaataatgctccacatggtaacacacacacatacctttcaacgagcattcatttaataacatgattcatccttcctggaaatccactctggtccatatatttaccaaaaagtattaaccaggcttgactttaaattctgtaatacagcaatgaatgatgtgttgatgtgtaacgcatactgtattgaaaacagatgctcctcagtcaatgaacaaatgaccacggtgacagaaagccaagccatcattcttattgaatgacaattcttttaaaacctaagcagaatatttaaaaccaatgaaagctaggaaaaatgggaagtgtctcaatggccacaaatgtgccagtcagcaatttaagagcagtgactacgaactcaaaaagtcataccaatttggttctaattggtatgtgacttatgaagcagcaaatggaagaaaatgctcaacagaaacttgacatttaataaattaaaacctctatttccatttattttggcaatctttagaaatctattttagctttctttgctatatgaaaattaagtggcatttagacattttcatccacagtcagatgaatggttcatggtgtaatggtaaagagctcgaagcagtaagggaaaatcctgtaaagtccaagagcttgttttaacctttctaatgttcctcctcctcacatgtacgtcactttccttgggtaatcactggcaatgtgatgtatgggcatgactcaaattgtactctgattatgccactcactgtgtgacacctggaaagtcactcaatgttcttgatgcccatttaaaaaatgggaaaagctatactattgttctatggctttactgtgagaatgaaaatgcctggccctagaaggttctcaaacgttagtttgttttacaatttaaaatgaatcctctctccaagccccaatgtcctttaaagtgcacctataaatctgtatgtcctttagaaattaccttcatttggaagcatgtgccaatgacttactgggatgctgttgttataaaaaggtcaagacttaaaaagagcatccatccatcctaatggtcagcttcagaacttgtgcaggctaacagcctatgtatgaccaaaggaaatattttgtttattcattcaaagaaatattttaaaagaaagataaacaaatacttaaatatattagcctgagactgtaacaatacgtgataacactaaattaggtcacaatgcctataaaccattgtgaaacaactcaaattattaacagatattctggagaggagcattatagaacctatcagaaagaagctcccattttcttagattcctcaatgaaatactatgtccaacacaggattatccaaaatggatgtgttaataacaagatgtatctaaaggttaactgaagtaccatttcatttcttaccctttattaacgagccaattatgattgtcccagagaagttaacacacaaaggatacattgtgtattaattaatgtataagctacttcataaaggacctgccgtcttcatctccaggacctgaaaatccattctcttttttttttttttttttttgatggcgtttcactgttgttgcccaggttggagtgcaatggtgcaaccttggctcaccacaacctctgcctcccaggtgcaagtgattctcctgcctcagcctcccaactagctgggattacaggtatgcgccaccatgtctggctaattttgtatttttagtagagacggggtttcaccatgttggtcaggctggtctcaaactcctgacctcaggtgatctgcctgcctcggcctcccaaagtgctaggattataggcatgagccgctgcacttggcctctgtttcttgttttttaccatcaggacttcagaagtgcccagatgcacacatgtaagaacatccttatggcccctgaacctccataatcctcattatcacccaaaatataaatccccacaagcccatgagaccccgcttgtcctttccatagcacctccagggaaatcttgtccttttttttttttttttttttgagatggagtctcactctgttgcccaggctggagtacagtggtgtgatcttggctcactacaacctctgcctcctgggttcaagtgattcttgtgcctcagcctcccaagtagccgggactacaggcatgcgccgctatgcccagctaatttttgtagttttagtagagatggggtttcaccatgttggccaggctggtctcgaactcctgacctcaagtgatctgcctgccttggcctcccaaagtgctgggattacaggtttgagccactgtgcccagccccttcatcctcttatataccaagttctctcccttaaccacactttgcttccctaaagtaggtaaaattcaacaaaacaaacaaccctggcttcccctgtgtgaaaccaggtccctcacaatcctctccgaggatgagcattccttctgtctctgctcaaagaaccagacagcacattagatttcatcattttccccaccgccctctgccgtgggctaccccgagcctaccgcccttgccgtcattactaaacctccaaagttcatcagctctgtgtgtagtccttttttttttttctttgtagaggcagggtttcgtgctgttgcccaagttggagtgcagtgctgccatcacagcttactgcagccccaacctctcaggctcaagcgatcctcccacctcagctcccaagtagccaggaccacgggtgagtgccaccatgcctgg

SEQ ID NO: 1888875 - DNA, 4001 bp, Homo sapiens
gcaaattacatcaggaacacacacatcccctgtgcggagatctgtgctttatgtctttgaaagtaagttgtcgagatcacagcactccacccctccacaccgaagcccgcagcttctcaggaaagggcagtcttgtgtgatcagtgcatatcatcacacacaggatgtctgacactggcaccacgctgccatctcagagtccatttcaatgctgggggtcatcggttttcagcaggttcttccctgggttcaacgcgtcttcccgccagagggatggaatcttgggtgagtgttgaaatgcgtcagaaacaaaaacgcaaagtggaactggagcacgtcacagaccttggaccagaagtggcctgtgaggcactggaagagacgccaccgtgcgagctgatggtcacacagcttgaggaccacaaagcccaggcaagagagcacccccaaagctaagtaggtagccgaggtggtgctgccatagtgcctgtgggtgcgcagcgcctgccccacagcggccaccacgtgagcacccagtgcgacctcgaagccctggggatgcagcagagcgaggccataactggccagggagacgcactcaagagagaggaacagccagggccgccagccgcggtctaggtagaggcaccaggccacgggccatgcaaagatgggcagtgtgagccactggtccagcaccgcggcacggcgccactgcgtccacaggcgcagccactgcacggggccatagagcagggccatggctgcgaacacgtccttcaggtagcggggacccagccccatcgcgccgcccctgtgcagccacgacagccccagcagcgtgtaggccatgttcacgagtgagttgaacggcatggccaggaaggcagggaggccggccacgggcgcctcggcgtagtgctcatagcccacttgcacggaaacactgtcgaaaatgcccgtgaacacagccacggcacagaggccaccggccacggccacgtgcacgaaggcctgcccccactctggattcatctggaaccggcggcgtgacctggggcagggagcttcagagagcagccttcaatacgcagcctctgcagaacactctgggcctcccggctgagccagcagaaagaagccccgtgatttcgtgatttccgaggcagatgctgcgaccttgccccgaaggaaggcaggagtcctgctgattggctggcgccagcggaggaacgttctgcctttttcctttgtggttacaaaaggagtgtggttagaaaacaaaccgtccccagcaccgcctccatgttcctgacccccggcctcaggagctaccaaccatcttcactggagaagcaaatcagagtgaaaccgctgcacactgactctctcaagcctctagaatcctctatcacccctttctcctggcacctaggaaaatcctgcccatcgtcctagtttccttaaagccactgcatctacagacaagacctgtctagctctgtcattacaactcagaatgcgccttcccatgtcagtgtgttataaaagtggacgtctccagccccaaagcccttttcaccaaatacccagctgaactagagaccattagatggagtccgagctctggcctctgacacaaggtgggggatggaggaggaggaggattcaccgtctgccactcaagcaccaggccgggaggcaagggggtgacccgcaggcttcccaggccagcttccctggctcactcgcctgccctctcctgaagtgccaagccccaaatcaccttctttcctcaggccaccataaagccttctgtctccttcagtcacagaaccagagagacaatttaattaccactgactgtcaactgctttggggccactggtgctgtaagtgagccctagtagctgagaaatacattaatatggaagggagaagagctttaatgctctgaaaatgactccaatcattaaagctcttctcccttccatattaataaatttcgcactcaagagggtgggcgggtaggcgggctcagggagagagaagggtgggctccagttcctggtcagctgatgccagactgttcaaaccttggctctcccacttactaaccatgtgatcttgcaccttaactgtcttgggcctcggtttgtgcacctttttttttttttttgagacggagtctcactctgttgcccaggctagagtgcagtggcacaatcttggctcactgcaacctccgcctcccaggttcaggtgattctcctgcctcagcctccctagtagcggtgattagaggcgtgtaccaccatgcccggctaacttttctatttttagtagagttggggtttcaccacgttggccaggctggtcttgaactcctgacctcaagtgatccacccgcctcagcctcccaaagtgctgggattcacaggtatgagccactgtgcccagcccggttagctcacctttgacctaatcgcttagaagttccaggcctgggagggatcttagaaaccatctgtgccagccccggcatttcacagataaagaaactgaaactctagcagtttgacttggctgaaagttacagtgaggaggagcagaaacccaggcatgccgcctcctggccccaggtgctctctgctcacctccctggaagaagcgccaggagggcttccacgtggcttcttccttgctttctgctgccatggcctgggtatttttatttagacacgggggtcttgctctgttgcccaggctggggtgcagtggcacaatcacagctcactgcagcctccacctcctgggcccaagctatcctcctgcctcagcctcccaagtagttgggaccagggatataccaccaccttgccctgctaatttttttttttttttttgagacggagtcttgctctgttgcccaggctggagtgcagtggtgcgatcttggctcactgcaagctccatctcccgggttcacgccattctcctacctcagcctccctaccacagcgcccggcctgccctgctaatttttgttaaaaaaattttgggccaggcatggtggctcatgcctgtaatcccagcactttgggaggccaaggcgggtggatcacgaggtcaggagatcgagagcatcctggctaacacggtgaaaccccgtctctactaaaacaatacaaaaaatagccaggcgtggtggtgggcgcctgttgtcccagctactcgggaggctgaggcaggagaatggcgtgaaccctggaggcggagcttgcagtgagctgagatcgcgccactgcactccaacctgggcgacagagcgcgactccatctaaaaaaaaaaaaaaaaaaaaattgtagagacagggtctcaccatgttgcccagcctggtctcgaactcttggcctcaagtgatcctcctgccttggcctcccaaagtcctgagattacaggagtgagccactgcacccagctaaacccctcttaagttgaaagtccagttcctatattttcgacttatgatgggtttatctggacattaccctgttatacatcaaaaagcatatgtagctgggcatggtggctcacatctgtaatcccagcaatttggaaggccaaggtgagaggactgcttgagtccaggagtttgagaccagcctgggcaacaaagtgagaccctgtctctacacaaaatacataaaattaaatttaaaaaataaaataaaaattagccaggcatggtggtgcacctatagtcccagctcctcaggaggctgaggcaggaagatcacttgagcccaggagatggaggctgcagtgagctatgggccacagagcaagaccctatctctaaaaaaaaaaaagctaggcgcagtggctcacacctataatcctagcactttgggaggccgaggcaggtggatcatctgaggtcaggagtttgagaccagcctagccaatgtggtgaaaccccgtctctaccaaaaataca

SEQ ID NO: 1888876 - DNA, 4001 bp, Homo sapiens
cggcctcccaaagtgctaggattataggtgtgagccactgcgcctagcttttttttttttagagatagggtcttgctctgtggcccatagctcactgcagcctccatctcctgggctcaagtgatcttcctgcctcagcctcctgaggagctgggactataggtgcaccaccatgcctggctaatttttattttattttttaaatttaattttatgtattttgtgtagagacagggtctcactttgttgcccaggctggtctcaaactcctggactcaagcagtcctctcaccttggccttccaaattgctgggattacagatgtgagccaccatgcccagctacatatgctttttgatgtataacagggtaatgtccagataaacccatcataagtcgaaaatataggaactggactttcaacttaagaggggtttagctgggtgcagtggctcactcctgtaatctcaggactttgggaggccaaggcaggaggatcacttgaggccaagagttcgagaccaggctgggcaacatggtgagaccctgtctctacaatttttttttttttttttttttagatggagtcgcgctctgtcgcccaggttggagtgcagtggcgcgatctcagctcactgcaagctccgcctccagggttcacgccattctcctgcctcagcctcccgagtagctgggacaacaggcgcccaccaccacgcctggctattttttgtattgttttagtagagacggggtttcaccgtgttagccaggatgctctcgatctcctgacctcgtgatccacccgccttggcctcccaaagtgctgggattacaggcatgagccaccatgcctggcccaaaatttttttaacaaaaattagcagggcaggccgggcgctgtggtagggaggctgaggtaggagaatggcgtgaacccgggagatggagcttgcagtgagccaagatcgcaccactgcactccagcctgggcaacagagcaagactccgtctcaaaaaaaaaaaaaaaaattagcagggcaaggtggtggtatatccctggtcccaactacttgggaggctgaggcaggaggatagcttgggcccaggaggtggaggctgcagtgagctgtgattgtgccactgcaccccagcctgggcaacagagcaagacccccgtgtctaaataaaaatacccaggccatggcagcagaaagcaaggaagaagccacgtggaagccctcctggcgcttcttccagggaggtgagcagagagcacctggggccaggaggcggcatgcctgggtttctgctcctcctcactgtaactttcagccaagtcaaactgctagagtttcagtttctttatctgtgaaatgccggggctggcacagatggtttctaagatccctcccaggcctggaacttctaagcgattaggtcaaaggtgagctaaccgggctgggcacagtggctcatacctgtgaatcccagcactttgggaggctgaggcgggtggatcacttgaggtcaggagttcaagaccagcctggccaacgtggtgaaaccccaactctactaaaaatagaaaagttagccgggcatggtggtacacgcctctaatcaccgctactagggaggctgaggcaggagaatcacctgaacctgggaggcggaggttgcagtgagccaagattgtgccactgcactctagcctgggcaacagagtgagactccgtctcaaaaaaaaaaaaaaaggtgcacaaaccgaggcccaagacagttaaggtgcaagatcacatggttagtaagtgggagagccaaggtttgaacagtctggcatcagctgaccaggaactggagcccacccttctctctccctgagcccgcctacccgcccaccctcttgagtgcgaaatttattaatatggaagggagaagagctttaatgattggagtcattttcagagcattaaagctcttctcccttccatattaatgtatttctcagctactagggctcacttacagcaccagtggccccaaagcagttgacagtcagtggtaattaaattgtctctctggttctgtgactgaaggagacagaaggctttatggtggcctgaggaaagaaggtgatttggggcttggcacttcaggagagggcaggcgagtgagccagggaagctggcctgggaagcctgcgggtcacccccttgcctcccggcctggtgcttgagtggcagacggtgaatcctcctcctcctccatcccccaccttgtgtcagaggccagagctcggactccatctaatggtctctagttcagctgggtatttggtgaaaagggctttggggctggagacgtccacttttataacacactgacatgggaaggcgcattctgagttgtaatgacagagctagacaggtcttgtctgtagatgcagtggctttaaggaaactaggacgatgggcaggattttcctaggtgccaggagaaaggggtgatagaggattctagaggcttgagagagtcagtgtgcagcggtttcactctgatttgcttctccagtgaagatggttggtagctcctgaggccgggggtcaggaacatggaggcggtgctggggacggtttgttttctaaccacactccttttgtaaccacaaaggaaaaaggcagaacgttcctccgctggcgccagccaatcagcaggactcctgccttccttcggggcaaggtcgcagcatctgcctcggaaatcacgaaatcacggggcttctttctgctggctcagccgggaggcccagagtgttctgcagaggctgcgtattgaaggctgctctctgaagctccctgccccaggtcacgccgccggttccagatgaatccagagtgggggcaggccttcgtgcacgtggccgtggccggtggcctctgtgccgtggctgtgttcacgggcattttcgacagtgtttccgtgcaagtgggctatgagcactacgccgaggcgcccgtggccggcctccctgccttcctggccatgccgttcaactcactcgtgaacatggcctacacgctgctggggctgtcgtggctgcacaggggcggcgcgatggggctgggtccccgctacctgaaggacgtgttcgcagccatggccctgctctatggccccgtgcagtggctgcgcctgtggacgcagtggcgccgtgccgcggtgctggaccagtggctcacactgcccatctttgcatggcccgtggcctggtgcctctacctagaccgcggctggcggccctggctgttcctctctcttgagtgcgtctccctggccagttatggcctcgctctgctgcatccccagggcttcgaggtcgcactgggtgctcacgtggtggccgctgtggggcaggcgctgcgcacccacaggcactatggcagcaccacctcggctacctacttagctttgggggtgctctcttgcctgggctttgtggtcctcaagctgtgtgaccatcagctcgcacggtggcgtctcttccagtgcctcacaggccacttctggtccaaggtctgtgacgtgctccagttccactttgcgtttttgtttctgacgcatttcaacactcacccaagattccatccctctggcgggaagacgcgttgaacccagggaagaacctgctgaaaaccgatgacccccagcattgaaatggactctgagatggcagcgtggtgccagtgtcagacatcctgtgtgtgatgatatgcactgatcacacaagactgccctttcctgagaagctgcgggcttcggtgtggaggggtggagtgctgtgatctcgacaacttactttcaaagacataaagcacagatctccgcacaggggatgtgtgtgttcctgatgtaatttgcataacttttctgtagtttgaaatgtttccaaataaatattggcaaggggagtggaaatgacaccaagaagcccctcatgc

SEQ ID NO: 1888877 - DNA, 4001 bp, Homo sapiens
aaggggctcctaggcctgttagaaagtgacattctttacttaccacaggtcaggaaccctgtacagggactgtgcagacaagataggaggccagttttcccaaggggcttttattggctctatgccccacccaagctggcaattcaggatctctgggagtggccctggcttcctaggtgattccaatgtgcagctctagaagtcactgcctcacaggaaggtgtgatggtcttagcacttaatatggttcagctgtgtccctgtatgaatccgttctcacgctgctaataaagatatacctgaaactgggtaattgataaaagaaagaggtttaatggactcacatggctggggaggactcacaatcatggtggaagatgaaggaagagcaaagggacttcctacatggcagcaggaaagagagcatgtgcaggggaactcccctttataaaaccatcagatttcataagacattcaccatcacaagaacagcatgggaaagtcttgcccccatgattcaattacctcccactgggttcatcccatgatacatgggaattatgggagctataattcaagatgggatttgggtagggcacagccaaaccctatcagtccccactcaaatctcacgttaaattgtaatccctatgtaatccccatgtcaaggaagagaccaggtggaagtaactgaaccatgggggtggtttccacaatactgtttgtgatagtgagtgagttctcattagatctgatggttttataagagtttggcatgtcctcctttgttcattctccttcctgccaccttgtgaagaaggtgccttgcttccccttcaccttctgtcatgattgtaagtttcctgaggcatccccaaccatgctgaactgtgagtcaattaaacctctttcctttatagtctcaggcagttctttatagcagtgtgaaaatggactaatacagcactgaaggatgagtgggattttattaggcagatgtgttggtaataactctttgatctaggtggtacagattcttttatcttcatgttttttgattaagaatctaggtttccagacacttagctcacacagtagcagagcaggctttctaaaatcaggtccaatggtctttccaggactccaggctgtcaaagccaggaaggattgaagcaattaataaaaattcatataaatctgctctgtcttttcaaagtagaagtagtcacaaaatgttttgtgtgaattttgaaatgaaataaaacatcaacctttttatgtagataagatttacattcatattttcctccataatgagaaatgttttatgttatctggattgcaattataagctatataaaaagagggttttttctttcagtaagtgtcttatagcataaatatgataagaatttgacagatttgctgtttttttcaaatttatgctagcaattctcagtaaaaaacatttctatctttccactgttattttacctaatgcataaggaatatagtaaataatatcatatgtgaaatccagctagagcagtagcatacaaattgaataacttgatggtctactgaaacagcctcttgccacccccatattacacacacacacacacacacacacacacacatacacactatctaaacataaaaaactctagctaactgaactggagcaataaaaattaagtaaaatagagattacctcagaagtgcatccaaatcatactgcaagaatactaaatgtgattattttagatgttttttcttctttagatgtttatagacaggaaatagtgcatttttctccaacaacccacaatatcaaggcttacttgagtgcattaaaataagtaattttttgtggcaatataatagtgggaaatccagctttttttcttgaatttaaaaataacgatttttttttcttttttcttttctgctcctctcaacccagcttttcctgactccaagaagaactgggaagagaaggcttattgatacatttgaagacatttcagaagtagaattacaactttagaaaggctaaaagttcccacttgcttaaaggtgataagagctggttagctttacaagggctctaagaacacagtgaatatacagactttaatgtgaaaaatggctacaagtaattgactggagaatcccaatttccagtggcagcagtctgaaaataagctgtccacagggccacactccctttagggcaggggtccctaacccctgggccacagaccagtggtgagcagtgggcctgtgagcattaccacctgagctccacctcctgtcagattagcatccacatgagagtctcataggagcaccaaccctattgtgagctgtacatgcaagagatgtaggctgcatgctccttacgataatctacctaaagcctgatgatctgatgtggaacagtttaatcccaaaaccgccccccaacaacacctccctgagtacgtggaaaaattgtcttgcatgaaacaggtccctggtgccaaaaaggttgaggattgctgctttagaggctctagaaaagagtttgttccctgcctctcccagcttttggtggctccaagaattccttgatttgtggtagcatcaatccaatcttgcctccgtcttcacatcaccttctcctctatgtgtttgtctcttctcttctgtttcttataaggacacgtgttatcagttttggggtccacctggataatctaggataatctcattttgagatccttaccttaattacatctacaaaaccctttcctcaaataaagcaacattcacatattccaggtatttggatgcggacatatcttttgggttggggtccctattcaacccaccatggtttgtttcagtggaattagggctgtaccatctgctcaaaaacattaaaacaattaggaggagcatgagtgtacctcaatatcttatttgcaaaatgaagatagggacatagtttggttagctaaggtacggtgtttggctaaaatgccatgtttaaccagtcagcatccacatctttaaggtttgcttgtacccggtataatctcgtttcttgaaaaccgagtaagtgaaaaattggaggtgagggcataatagaaaccatataaaatagaaaatatatacaagtttctttctttatttcacttgttagtagttcagaacttcataaacacaaatattaccactagcaagcagacatcccccaaactcaaaagtaaagcatcgacagatgtgtctggctagttgggtgagaccatttccaaatactacttgtaagttactgagttggttaaggatcaaatgaggttctgcatttgaggttctttttaaattgtgtggtatcatacaagtgtaaaatattgcagttgctcttttgaaggggataagaataagtgtgatatcatagatgaacactatcaaaaaaatttttcagtaagtagaagttaaagacatttttgttcgacacaccaagcatgcttgcacctagttggggtggtcattggggtttagtgtctgattatagatcaatctagcaggttatttccctcttcaagaatgaattgggtttgcattagagataatctccttgtgcagaagtaggtgagtcaagaggaattcctttcttgctttattaatttatttagttatttatttagctgatactgattcatttgggatgtaaagatagatgaaaatcttagagaaaatgattacacaatgagggaatttgagatcctagggaaataataatctgtcagcaagattaaaaatcacttttaagaaagtgcatctcatatttgagacatatagttgcaaagattcagtagaaaaaaaaattcatcgccaatataataacagagttaaatgccatagaatagtggctttccaacttttaaaaatcaaaccccaatttttccctcaattaatcttacctggaagcccaatacataaaagagactaaa

SEQ ID NO: 1888878 - DNA, 4001 bp, Homo sapiens
ttcagccaggccactggcctctacctctatgttacatactcagaagccaagccatagtaggtaggggtaagtaggaggggatcctgggaattgtaacaaagtatcgttctcttaggaaaattaggatattagtacctacctcacaggattattttaagcactgaaagaaataatatgaataaagtgcttaaaacagtgcctggcatagagtaagtgctacataagtttcagctgttgtcatcatcactattattgttgctattgtgaaagaggacagcttagggcttcctgaagctattccctattttctctgggttttcttcacaggtacctccaaagatgggagttgctgtcactactcttcttctagaatattttccccaccaagatctaaactgtggagccagttggtagccaaaattgtacctcaaaagctctcctagacacatggaaaacttggcttctctgcctgatgttcatctcaaagcatcagtgataaactgtttcatatgttattactcactactattcttgtaaagaccatggaaatacatggacagaccgccagctcaccacactttctgcagaattactcagcccagacgtgttgttttcatctcctttgtgtgattcagttcctcttcattcctacacctctcaccacttctgaggagttacatgtttccagctagccgcagacattgaactgccttatcttgctggctacatctgcatgcagctggtaccactaggacaggctgaactacacattcacagattaaactccctaagcagcctgagtctgccatctcattccctttgaagctcttagagaaggggaagccaagttcacagatatgcagcacaccttctctcacctgtctctttatttgggagggtgggtgaatgacaactaagacaactagcatttccctaccaaagagtctcatcactgacatctctttacttcctggtttctcacaaacataaattgaacattcgacttctggtacaaatctttgtaccatcacagaggggcttccatggggattaaccataaagcctcacttgcttgactcaattccagtgactttttctacacttcatttatccacatccatggcccatgcagggtcttttcatcatccagaacagctctacttctgaaatcttaaattcgtataccctactcttcagctacttttattttccagtgagggcttttacttccttgcccatactactcctattctatgggctcctggtttctgtcagtttatcagtccatcctaattattttttctgacttgcctaggctctataatctattattgcaaccattttcttttctctagttttaaccacattttgacctggtaccacctgaaaatttatggtttccttcttcaggagagttattggcaccacatgataacttcttcaggagttcctggccaactttctcttccatctcttcctatatattcagacatctcttttcatcaatcactgtcctaacttcgaatcttcactccttccctctccaatggttctttgtcctctgcacaacaatatgctgaaacctcccatcatttaagaaacagtccctccaccttatctctttctctgtttgttgccctgtctctccttttctttctaaccaagctttttaaaagcagtttaagaacagtttaaaaacttttaaagaaccatttacattcaccatcttcacttactcttttccttttcacccctcaacacactgaaatctggttctgtttctggggtagatcctctcctacccgtttgtacctttgtcaaaatattaatcactctactgtaaccaccactaggcctaagtacctcaaaatgtaggatgttgaataacttatctatgtagtcccagagcctagcacagtgcttgattgataggaggtcctcaataaacaaattatgtcacaaacacttactggacacctactaggaaccaagcactgtattggttctgtggacttgaatccatctcaaaacctatatttaagcaactttttctcacagaacctttctttcctttgtgaatgtcaagtcagtatatttaattaagccatacaatccctgtcccgtgccgtgactttactcataatggtcattcaacatttgttgaatgattgcttgatagaactcagcagacccaaaaggactaattgtgaagagttgctgtaggaaatggccagagagaggcctgttctgaaatctggttccttacagagagcttttcaggctttcagaaccatttctgagcagttctctagaaatacattcatttgcaactctatcccaacatggctgataggttttggtaaacccgtttacaacctctccatttcctttgtcttcaacttctctcccctctctccagtctttccccctacacctattagacaggtgcaaatatctctcctagtcacaaataaggaaagacctaaattagaaaacctccctggactccaaggtttcacattacctaatatccttcctttctccactaatcttctgcaagaatagtctgaactttctagtcccatttccttcttcccattcattcccacaccaaatagtcagaaaggctaggatatgaattagaatggtcagggaagggtttcatggacaagtaagggcacaggatgcagaagaattttgtgattaaagtgcagaatatggaaatgtattggagaggtattaggtttttctattttatttttcatctgctttataatattcttttttttaagtaggtaacacatgtatatgatacatagttcaaaaaatgcaaaatgaaagtaagggttcttcccaatcccaccaagttcccttttctagaggcaatcactgttaaaagtttcttatgtatcctcccaaagatgcatttgtaaatatttacatatatggagtgcctatacaatatggtagagcacaataagaagggcagtgtgaactgacaagcacagaagaggctttgaagaattagggaatatcatcttccctccaacatactcttcctcttaagtccccacctccattaatagcctttccatcctcccaagatgacccaggctcaaagcctctgaacattggcaggaaatctgttactaaccagagtttagttttctaaaatggttttctgtacatcacaattaagccaattaacattccctccacacctgccactgctattttcaattttgttttgaaaatataagtcacatacatctactcctcaccactttcactaccccagcctccattaggccctcgtgacttcttatcttcaaaattgaagtaactgccttcttcatatggttgttaggtacatttggtaaaattaaataagcatggtaacaattagcaggctcaacaaatatttgttcctttctcttctccccaatacctcccagccactataccaccccaccaccccatcaaccttaatccactccccatattacatacttggtttatcaaaacaacgtcgaattcttgaaatttttctatatctatcctatattgatcccaagatcagagcttcagaatatgaaaacttacctgaactctgaggaaaggcactagaaaattccaaatacagctgtcccaaaggaaaaccactcttagtacctctcaaaggcattgcctttatagtctagggtagtatcattgacatgtagaaactaaaaaggttatgatctaacctatatttttcccctagaaaaaccttacctattcttcaggactccgtttgaattccaccttcttcttgaagtcttccaggattctgcccatgttaactcttttcacccaagtcttaatgaatcttacctttctctgcattacaaaatgtggagggaagggagggaggagaggggagacaaaggaagacatgggatggggagtgagagagtgacacccaaatcctcgttctgacaaaacccattgtcccacctcct

SEQ ID NO: 1888879 - DNA, 4001 bp, Homo sapiens
ttataaaatacttcaatgatccccagtgtgtgatgttccccttcctgtgtccatgtgttctcattgttcaattcccacctatgagtgagaacatgcggtgttataataataataaaattaaaaaataataataatagtaataaatacttcaatgagcactttctcctttgtttatcagaacagttaagtagcttcatttgagggaaacactgctggaaaattaaaaattaattatcttcatcaaacttaattatgtattattcctccacacgtatacaataattatctctgtcacacaatctagtttgatcaaaaaaagttaaataacagctattttgcaccacaaggcatgaaacgctaggcttcttatcttttaggacagataatattaactttattttacaggtaaggaaagcaagtctctgtgaggttaatttgctcaaagtccacatatcaaatagtagaactaggagtcaaagtctctctactctgactccaaatcatctgctctgttttctacctcagcatttcgaagtgccattcaactgccttgattaaaatgcctgacatcctccctgtcaagaaacaggcagtggctaactgaagccatcttcctaaaagacatctttcaactcacaagttcctaagccaagttatctcacaaaagagtaagtttcctttccaggcaaccaagtttctatgccatgctgaagaacctttctttttaacctttcaggtatacagccatagagcctcatccatctgcagaaaagatgctgacatatattgcaccaaacagagctccaaccccaccttcaatcttgcagcattatgtcagtcgttatcaaagcatctggcccagtgtctcactgcagagattgtgcacaaattagaaatgctgcaatctatgaaaattcattcttcattctccatgtttgtcagcccctacccttcacattgcagtcccaacaaaggacagaaaggcaaccacatgggagaaatccagataacgcaggccaatttctacctcagcccacaaacgacaaggaactaggtagccagtcttgcacatgagagattagatactgttctaagcctaccattttctcttacacagctctctaaaacatcgcaaggtatactcctcaactcaattctaattagctgactcattcacttcctgccttacctattataattagctcttttcttcaagatttaccaatccctccttctaccctaaatagcatccctaaacagctacacagcattatgaccgtctacagttaaaaagatggaaaagttttcattcacggtttggtattccgttaactttggcctgaagtgagaccagacacaaagaatgccttcaggagctggcatgcagagccaggaatcactggggccacatacaacctagtctcagctccagccagatgaaattactggatgctgtgaggtcacatactgcttcccagacaaaccaaggcagagcccaaaactctgcattacctcctcaaaatggcctctcatatctcacacaaaaaaaaaaaaagcccaactttgggtgcaactagcaactagcctcttttgaatctcccctcaacaaaccctggcccctgtattttcctgtcttcttatttgatctgttttctatcctggttctcagctgagtatcaacttctgttaagtacctgattccttgctttggcttgaatcagcatagtcttcagccatcttcctgggtttaccgaccacaggctcgagttctgcagaattggtttaaactggtcaaaatagatttgaactgaccagaactgattttctttgtcaaaaaatatttgaactgatcaagatcaacttctgacaattttaaacccttttgggccagttttacattactaatgcaggagcaagccactgagggaatcaggatgaaccaggaatgagatgaagctgcttcaatctgcttagaagaccagcaaggaggggacaaaaaggacctgatgctaaggatcataccatttgtggtggtggtgctggaggggggataagaaaggacctaatagtccgagaggtaggatcaaactactgtggaccccgggggaaggactaaaataaactgatgctcaataacgcaggatcaaatcactggtgtgagacaggaggaggaaagatgctgatgctcgccagacaggatcaaaccactgagatgcatatggagctgaatggggatgcttgtcgataaggagccatcaaaccactctgggagagggaaggaaaagaagaggaagagtgagatcgtaaagggtctagtagtgtgtaagacagagtcagacccctgtggaggattgatgactaagggatgctgttctaagtagcaggactaaaccactgtgaaagagaggggagcaaaaagaagctgaaatttcttaaagcaaacataaattctttataggagaagtaaacaagaatatggtgttctgtaagacagaatcaaatcctgcttttatatttaataaagcgtgtttatatatattattattatcatttgttctttactctcccctctgatggttgggtcagaccatgttcccacaaaggcttgtgcagtaattctcagctgcccctaatggttgctaggcaacagtgcggcagctgctggatgaaccttgcccttttgacattaacccctgggttactggaagggaaataagatgtacataaatgaaaaaagtggggaacaaagtgagatgatgacatcaaatgctaggtggggagaagtggaagacaaattcacagaccttcgaaaataaaagggagacagtaaagtaattggcgaatgatggctatgtggaagaagcaacactttgacaaaagtacagtcctataaacttagaaaacatcaagcccagttctacataagacttctgagtcctcctatgacatccctaaccagtggtgcttgaatactttacgtgaaaaagtagtagttggaaaaaagtagtagttcctggacaacctattccattttcctataactctagtcatttttaaaaattgtgagccccaaatttcttccctatggatttcacccagaagtctgaatcctgtcttctagagcaggggttggcaaactagggcttacaggccatacccaactcactgcctatttttgtagagaacatgagctaagaatggtttttacatttttaaatagttgaaaaaataaaaaaagaataacattttgtgacataaaaaattttatgaaattgaaatttcagtccatgaataaagttttgttggaatacagccatgctcattcatttacatattatctatggctgctttcttgctaccacagcagagtttagtagtagtagttgagtggtagtagacattatggctctcaaagcccaaagtattttactatgtggccctttccagagtaagtttgctgaccacagatctaaagcaacaaaatagcagttttcaacaggactctgcttaagtaagaatgtaatggggatagtagatatatgacagagagttaagagacctcacagagaatcccaaatcctcaaagggaggaaggagatgtgtgccaaggtcctccaagaccttgaataacttcaagtcatttcccatggtctccaagggataaggaagagatttagcttgtgtggagagagggagtctctaagaataaagaacagctggaagtgaaggtttgggtcagactgttaaagaccttgagcacaaaatacattttcttggccatcctgaaagcaagagaagagccactattgagtttcaggttgtgatagggtcgattgacagggtaaaagcaggacctgatgaggatgattcatgcttctagatatcattctagttctatcttggttctacacaagttgcactggtttgagaagttcaggtcattctggtcactcaggttcaaaaccatctcaatacagctaccctagtctgaacgcaatctg

SEQ ID NO: 1888880 - DNA, 4001 bp, Homo sapiens
tttgaaacagaaaaatgtgatagagcttcttttaatatctgtttctactttacttcaaaggatgatcatagaaagatttctttgaagtgttgtttccaaataaggaaaacacttatgcacggacattatcaggtctctgtcatctgatatgtgttggaacaatgaatcatatagaaccctccattgaccttctttcaatgtgtctagataaaaggatgaaaattagaatccatctccttgcagtgccacaagttataaatgtactttatagggctcattatccaaactaatggactaagggcaacatccttgaaatggacttaccagcattgacaaagccagtatgcaatatttcaggaactatatgcaaatgactgtgtgtttgctatatcttttgattatggaaatatcaatttatttgtgtcacagcttctcctttggggaacagaattattttattagaaatgaacttatgtgttgcccctcataagatgcaagcaaattaattccaaaagcatactgtaaaatatactggtataagttaaaatctgttcattcactttaaaaataagccatataagtgatattttccaggaataaaggcattaaaaataaaatgactaacactcaagaccaatagtgagaggaatttaatttgtatttcctaaaggcagattataatatgctggtattttttaataaatggcatcccactgttgtaaggatagtctatgatgtctagtgatgttacatgtacataatagatattttaaccaattaaccaccttttaatataacatttgtaatattacgttaatatttacatgatttttttccatctcatctccaccttctttctcttctacacttctgtttctatacatacctcctcatatttcattgaactagagctcttgccttataaaatacttaagaaaatagatctgaagtatttacatctgatattctccaaaataatgttttaaaaactgaaaatataagtaattcactcagtcttctattttaaaacactcatataccatttgaaacacaaagtgcttcaggcaattgagaagagaaatctgctgtcattaaacatcaatctctatttgtcctgtaagcactgacaaatctttttcttacctttaattcagagactatgtaaagtcaagaggaaataactgggcagaaaaaaggggttgttaaatttctatatcttgataggggcttaggttatacagatttatcatttgttaaaactcagttaagaagcacttaagatttggacccttcactgtatataaatttacatcaaaagaaaaacacttaacaaatattgagctccaggtaataatatgcaagctggaagtatttaggggaaattttactgacatctgcaattcacagtcaaatgcattaaaaagatgactcgatacatggatagaggggttaatatttgggtagacgtgtgactgaacaagtttattaaaatgttatagaatccaggaggtggatatacaggtgttctcttgaaattccttccatgtcagtataagtttgaaaatgttcatcataaaatgttaaaataaaactgggggagggggtcagtgttaatataaatctcagacctgagtgtaagtctttaaaaagggttcccatttaaactgtattattaaacctggccctcaagctttgtaggcttctaaacatgaacgaggttgttttggtggtagccatacctttggtgacagacatttgtttcaaaagttatgatattagaaagaactaatggagatcactcaaaaggcaagtatgggggtttgggagttagggagctcaaccataccaggagaagatactaatacatgtgcctatttatgctgatgcttctaaagaaacggtgattctcagagcaggaggaggaaaaggaagcaaatcagaatcacacctgggggactttttgaaattataaagtacccctggagattctgataagctcccaaatcccaggaaaaaaatcactgtcaagcgtgccactgctactgttgtatctcttatgttgtgctaggtggagaaaaatcaagggctattggtacagataaaatatttgtttctgcagaaattgaggtgatggtcacatatgcccaagtctcagtctggtagatgataataacatgactcacctgataatatcacgctgaagtactaagactctaggcttaagcaaaactgctcaaatcaagacatgtttaagcaagtgataagatatgttttcctctcagacatttaacttactgtcatatattcagcataattgggaaaacaatgaataaaaaaacattgattttagatctaaatttagtctttgtattataaagattcatataaaaaattagatgacatttaattaacagaaagcagcaaaataaacagtgctgccagagtcatgaaaatacccctcccacataaacctgaggaaggcaggaaagattaaaccacgtaagatttagttgagggccttgctgagcctcataaatagtaacttgaggaggaacgtaacaggtgtctccagttacagggacacaatgaccaagctgaccatacaaaacactcaagccagacagaacatttctagagctaagctttctaaatcaacaaatcacaagttattcagttattggttcaacgatataagtgtgtagatagcaaaatgatgatgaggaagaaaatagtaagatgaaaactcaaaatctggaatttggcccagaagaggaaaaataacactaaaacaagtattcaatctctgtgatcttcagaatgaatataccaactaattttatgataaagaaagcagaaatcacatatggaataatttaaaggaaaatgtactaaggaaattagaagattctcaatcactgaagaaaacaaaataattttccctagtcactatgcccttctgagctttctcaaacacattagttcaaatgctacctcatccataaaaccatttcaaatgcttcccactcatttttcttgggtgaaaaacactctactagttctaaacaccattagcaggcaaataacttcaaatctatagttttaggctctgacttctgttaagttctgtatccatatttgtaattgtctattatctactactttctggatagactccaagctcccttttaataaatacttaattgaaaaacaaaaattgtatatagtcaatgtgtataatgtaatgacttgatatacactgtgtaatgattaccacaaatgaattaacacatctattgccacccatcattaccatctgtgggtgtcatgaggaacttaatacctgctcttaccaaatctcaaggaaataatatagtattattagccaagcattttttaaaactagcatgctgcaaactgagtttatcatggctcctcacctgctcccactcccttggaatccctatgtcaggcaatggcataatcagcagttttcctacctcaaatctctttttatatctagtctgctataacattttgattccgctttataaatacttcctgaaactagcctcttctctccgtctccactgatactgccttagactcttacaatgtctaatatgataatgacctgctagcaaattggtagttcatttgttcaacataaatgtatagcataacaaccatgtgccaagcactgttctaagaggtaagaataaaaatgttttgccctaaaggacaagattcagacagagacaatttttgaagattcaggcagagacaattttaagacaatagcaaagtccagtgataaaagataaggatagggaattacacagtactagaagaggtacctaactcatcttatggtggaggggtggagtatcagggaatgctctttggaggaagtgacacatttgttgcttttaaaggataacatacagttaagcaagcaaataaggatacagttatctcaggtagaagggcagaatttgcggggt

SEQ ID NO: 1888881 - DNA, 4001 bp, Homo sapiens
cctcaggacatgcagatataatgaatgagaaggagtccattctcctccctgaactgtacactccatgaaggtagggaaccagatatggctcattctcttgtgggccaactgcccaggacagcacctgcaatagagtaggtaggtactcaacaaatagtcatagaaaggatggaaggaggaggtagaagtgctctgtcctatgcgaagatgtcactcccccttgcagaatccttgcctgggtgcactgcattcagaaagcactctcacccaggtagcaaggattagagagggggaaccaggacaggagattccagtacctgtacacctcacatgtgcatctaacaagaaggcttgctgttcttgcctagtgcattaaccttgcattgaactaaagtagagagaagttgcttcgacaagtatcaggctgggtgcagtggctcacacctataatcccaacactttgggaggctaaggctggtggactgcttgagcctaggagtttgagaccagcttgggcaacatagtgagaccccatctctacaaaaaataaacacaaattagccaggcatggtggcacaagcctgtggtcccagctatttgagaggctgaggtgggaggatcgcttgagcccaggtggttgaggctgcagtgaactgtgatggtgccagtgcactccagcctgagcaacagagcaatactccatcaaaaaagaaagaaaagaaaagagagaagaaaagaaaggaaaggaaaggaaggaaagaaagaaaagaaagagaaagaaaaagaaaagaaggaaggaaggaaagaaggaaaaaacaagaaacaagtatcaatgtgacagcaggaatgagaagactcacacttatgggtgggttaaggtgggaagagggtagataagaagttcctatgtggcccactcaccctcagtatatgcaggggcaatgagtggtgacaaagtccattctcctctcaggctataatatccaggaaggcaggggcgaagtctgccttgttcatttctctgtgtccaatgcccatcatggtgcccaatacatattatttgtggaaggaaagaatgaatgagggtcagagagcaggcaggcaagcagcaagcagctgagaggtgacatacagatcttctgttctccacgcagagggggctcaccctctcagaatccttgcccgggtgcattgcattcagaaagcactctcacccagggacaaaggattagagaggaagagcagagcagaagactcaggcacctgcaccctgcatgtatatctccatatatatttgactttcatggtcccattcctgcaaagtatctctgtgtgcatttgctaagacagatgcctctcctcagggatagcatatgtattcatccccctgcacaaggccacatggacatgccctctcagacaaaacctcagactagaatgaaagatatgagtggcatctttttcagatcacacttgagggtctgcaggtgctggatgtatttggggcctagcaaggaggttgggacaaactgtatgtgggcacacatgtacatgcacatgttggaagatggtacagaaaattgggatacttcattctcttctgtttctctggtaaactataagctcactgagagcaaagactggctgtgcaagtctcatcacccaatgtgtgtttccccattacagtatctgacacatagtaagctgggagtaaacagaaagctcatgctctcaaagaggtgtaagcttgtccagggcaatgatgaagttcattctcccacaggtgccctctacagagcccagggaccttagctgtcttatttaccgttgtatctccaccacccagtgcaggatctggcaccgcatagcaaacacaaacatgtgaaagaaggggacaggttgttggtccttctacatgtagacaaggctcagcctctttgaatccttgaataggtgtgttgcactgaaatagcactcacacctaggttccaaggattcaagagggggagcagacaagaaggctctgacacctgccctttttgtgtgtttgtatgtgtgcatgtgtagctataaccaagtctcactctcatgtatatacagtgtcatttactagggactttacagaaaggcagagaatcttttctcctgcagagttccatgtgagatcagagaagattcatgcttttgtgtatgtttgtgggtgacagtggtaatgagaagtccactctgtggcccacccactctcagggcatgtaggtgtaatggatgatgaggaattccattcttcttcctcaactgtagctccatgagggtagggaccaagcatgtcttgttagcaactgtatgctcattactcaacttagtatcatatacagaaaaggtggtcaataaatacttgtggaatggatgataggaggacagaaagacgctctgtcctacacgaagatgaagctctcgctctcagaatccttgcccaggtgcattgcattcagacagcactctcacccaggtagcaaggattagagagggggagcagaacacaaagccctgtgaatgttcagtgagagggctcattcttcttcacacaaggtacttacttgtcatgatatagaagtaaagagaacagttcttgagctttgcattaaagatgtctagttaaacacacattttgtctgttctctcagatagtaacaacaaaaaagtataaacctataaagagactgggaggagagaggagtgtgaaagggaggaaagagagaatgaatataacgccaaagctcatgatcccgcaaatgctttgtgtgactatgcaacaagaaggcagtacagtttagcacagttgttctctaacatgcaccagaatcatctgaagacctgggtaatatacaggttacagaggtttctgacttggtgagtctggggtgagacccaagaatttgcatttctaacaagttctcaggtgatactgatgctactggtccagggactacactgggagaatcactaatgtagtggaaaaaccaggcactttggtatctacgaaccttggttcaaatgcacgctctaccacatattagcctagagaatcgacctgattttcccaaggtcaagttaaacacttttgaagaatgaggacaatttaaagcctacctcttaaatggtgtcaagaaaatgaaataaagtatagtacctggcacacagccgtcaatatttttacctcttactctctatttttatgtatatatgtgtttgaatgaatgtgcatttttaagggggatggtgaaactcctgcatgcaagggacaggtgagagagaagaggtccgagtatctgtgagtgtgagtgcctgcacaaggggatacacagattcatcctcttaaattcctcacgtgtgagttgatgaggttctccttcaatctccctaggtcaacaaagttcacgccccttcacataagggatatgaaggaaaacatcagaagttccactctctctgtgtgtgtgtgtgtgtgtgtgtgtgtgtgtgtgacagagagagagagagagagagagagagagagagagagagagaaagagagagagagagagacagaaaatgagtaaagatgggggcatctggccctgtgagtataatcaaaaaggctcctgtctctcctgtccctgtatgctcacatgtctgcatatgctgggcacccagccacatgtgggcctcccttgcatgctcattctcctgtatgccttgcttgtgcacatgtgcatatacgagtatttgtgtatctgtgattgtgagagagaacattaacaaggaagtgcatcttcattcaacagctacctaagggaagaatgccgagacagctcactgccctttctgggagggcaaagagagtagagttagggcaggaaggaaccacccactgcttacctgatcagtgggactccgtgtatacaggtctacatccctagatgcctgaccatcctgggggacaaggtggggtgcttgggggg

SEQ ID NO: 1888882 - DNA, 4001 bp, Homo sapiens
catcaaacttaactatgattaggcaccaacaacgtagtcagcactagacaacacaggaaatacctgtagttatttatgtttgtataattgcctcaagcattagtcacttttaaaaaattacacacacatacttaatactggacgacagaatttactaccctaagtctcttttcattaagatttcacttcatcactaacaattaaaatccatccccccagccgccaccaccagagaacttacttaacccacatatccttgaggtagaccaatgttatcactgtatttcccctaatgaggaaattgaagccttaggcaactagctcaagattaaaatgcaattcagagagagttcctcttactgattaaaatggactgatgttatgaggaaaaatcaaaagggtttcaaaattagaaaattccatggcaccaggaagtaagaatgacacatactgataccatcttttagtttggcagcacctttttgatgagaactaaatgttcatgttggcagacagtaaaactaccacaagcctcgtttcttcatttgccaaatacatgatgttaaagattaacattaaaatatgaaacatagaactggaaagcaagccagtccctgcttcgagttcttttaattttatgaagtttaaaataaacaacttcctttgttaactttgtcctagaagctgtcgttagctgttttcgagcagtggttctgcaagtatggtgtcttgaccagcagcatcagctcctagggaaaggttagaaatgcaattccttacctgtaatgccagcactttgggaggccaaggtgggtggatctcttgaggtcaggagttcgagaccagcctgaccaacatggtgaaaccccgtctctactaaaagtacagaattagccaagcgtggtggcgcacgcctgtaatcccagctactcaggaggctgaggcaggagaatcacttcaacccggaaggtggaggttgtggtgaatgagagatcgggccattgcactccagtctgggcaacaagagcgaaactccgtctcaaaaagaaaaaaataaagaaatgcaattccttaggccccatccagacctattgaatgaatctctggagatggggttggctggctgtgtcttagtaagtgctaaagttttaagaaccactagaggatccaaataacttttggtgttcagtctcaaaccactaattagctgcgcatgagaaatttctgctttaggttagtcaccctatggagcccccgaaccctaaatattaacagtaggcccacatccaggtttccatctgctagactccaaagcaaggcagcagccatccctctcagtagccctgccaccaaatcctcttctccgagaaccccaaaacagagtttgattgacaagttcattcttctctcctgtcagacctcaaaatgtgcccagttccttaaaggtatgtgtcccattggtttacaactcttcattcccttcctaagaatgagcacgtgtactaaaacaaaattagtacatgtcatccaaatattgtcagggtaataaaattcctaaaattaggcatcttggtgctttatgtagatgcaaacttgaaaagcagctatgtccaagttttcctttaggatcctcccaagagatattttacaaactcctctagcattgctaattattttttttaaaaaaaaaagagtcattttttcagatctataaatttcatttattttgaggttcattcacattcagtaacaatctgatcattcaccaaagttccaaaacacatactttataaattagctatcatagtttttagaaatccaaatatatttcaaattattttttaatagcagcaactagagaaaggattttttaccatctagcttactgtagcgctgatcaggaatgtcgccaacaaaggtcctgcggtttacagatggataccgtgcaatttttctcctatgatactcatcaaaattgcatcgtgatccacccgacaacagcaaaacagatcattttacaatgactaaatatcagaacttacggcttttaaaagttaaaataagaagacgataaaaatcctcctttcttccacaggccgggacaagtgcaatactttatatagaacacaagtaatgcaacaaatccccacccagggatgaatgggcatgagtgctggagatacgcatgaaggtgtgttcacacagacgtaggaagcacacattatcacaatcagttttgcatggatttgcacagccacatatacatatatacgctgaaatgcaaacctgcaaaactaattgtaagtagcaatgtctttgaatattctctccatcaacaagagatttgttatccaagagtactggaagtgcccatactacagtagagtcatgccaaaactacctgcactatgagcactttggtactactaggacccaatcttatcctctgtacacaactgtacactgcacagtccccaccatctgttcccaacaaacaataaaaaggcaaaaaacaaaccactgaaatgtgtcctattcaaattactactcaaggcatacttttaaaatgctgtatattaggcagcctgtgccagaaggggcatttagggcagtagattctaagctgcttcactaactgcactagatgcaccttaacacaagagacacattataagaagcagctcaaaagcatcaactacttaattatgcacaaactacagttctcagtagccattgactaaatcaccatggtaatgtaagaagtgcttacattgcagtagatctcaaaaagctacctgcactgtaagcacttttacatggccaaggcctattcctgtagcaaaattttaagtcttccaggagctcttcttttccgtcctcacagatccatgcagactcacctggttaaaacaacaaaacaaacacacacatattagaaactaaacaagtaaactactagttaatattcctgaaacaggctttcctttggcttacagagtctaagctaggttttgtggtttcaaccaaatcctgagaaatattaataatctcaattatttacacagaattgaacacgaataacactggcaactgcaaaaagtccaattcttatgtataagcagattttggactccccctctccatctaagaaaatttgatatctgcatctcagtaatttgcaggcacattctatccaccctgattttataagaggaggacctagagaaaggagcatgtaaaacccaggatgagtattcgagtcttcagatcattcagagcttttgggctccatacggaaagtgactgttagattaaatgaatattcccagcccccaccccattaatagaaaatgagagaaattttagagctggtttaagaaacacagccttacagtcttcacataatgcacagatggctgagagatgtcacattttgatctatttcaaagggctctacttctgtttaaacatttatggacccattttctccattaaaccaaagtaggcagattagctcttcttcccttcatgtcattatcttccataagaaaaccttctcccatttccaagtgcttattttacctaagaacatacagcaaggaagtgagcctctatgtgaaaaaggctcacagggtcccctatctcttccatgatggggtaacttttgtttaaaagaaaaacaaaaacgtttgggacagaatctgtaatacgttaaacgagtgagggaattttaaatgttgaactttcgtcacgatatcttatgccactaaatgagtctttagaagtctttacaaactaaactgatttataaaacttatacatcaatctggaatcaattttctattagggaagaatggatttagtatagaaatgagaaaaataacatttttccccttaaattgggtttctacacctgtgaagatttcttttccattaaaaaaaaaatactccaaacttgactcaaaatgcatagtatttgccaacccaacctggccaaactg

SEQ ID NO: 1888883 - DNA, 4001 bp, Homo sapiens
tccaaggccagcctgggcaacgtggtgagactgtctctacaaaatatttaaaacttaggtggctcatgcctgtaataccagcaatttgggaggccgaggtgggcagatcacttgaggccaggagtttgagaccagcctggccaacatggtgaaatgctgtctctactaaaaacacaaaaattagctggtcgtggaggtgggcgcctgtaatcccagctactcgggaggctgaggcaggaaaattgcttgaatctgggaggcagaggttgcagtgagttaagatcacaccactgcactccagcctgggggacagagcaagcctccatctcaaaaaaatataaatatatccaggcattgtggtacatgcctatagtcccagcttcttgtcccagctacttggaaggctgaggcaggaggatcacttgagctccagaggttgaggctgaagtgagctgtgttcatgccactgcgctcaagcctgggtaacagaatgagaccctgtctcaaaaaaacaaaaaacaaaaacaaacaaaaactacgaagtacaagatagacaaacaaccaaacaaaatcaggaaaacattatatgagcagaacaacaagttcgacaaagagaaaaaaaaaaaaaaacattaaaaaataaccaagcagaaatcctggagctaaagaacgcaacgattcaatgactgaactgatatattccacagatgtcttcctcagcagactcaaacaaaaaaagaatcagtgagttcaaagacagcttattcaaaattactcagtcaaaacaacaaaaggaaataagaataaaaaattatgaagaaagtatacagaatttatgagacacaatcagatggaccaatatacacattatttgaggcccaacagaatagagacaagaggggcagaaaatttctttaagtaaataatgacagaaaaattctcatatctgaaggaagtgaacatctagatccacgaaggtaaagagccccaaatatattaaacataaagacacctcttcaagatacataataagcacattctcaaaattcaaagacaaagagagaattttgagagcagcaaaagaaaacaggcttgtcacatacaaaccaacttccactggagtatcagaggattttgcagcagaagtcctgcaggctaaaagagtaggatgacatatacaaagtgataaaataataaaactgctaatcagtagttctttatctggcaaagttgcccttcagatatgcagtagagataaagactgtcccagacaaagaaaagctagggggattaaacacccctagacctgccttacaagaaatgctaaagaaaggcctgcaagttgaaaagaaaggacactaacaacaaaaagagagaaaagtagaaaactcccaaaaaacaaacatagtcaaattaagaatactctaatgtggccaggcgcagtggctcacgcctgtaaacccagcactttgggaggccaaggcaggcagatcacgagatcaggagttcgagaccagcctggccaacatagtgaaaccccatctctattaaaaacacaaaaattagccaggcatggtggtccacacctgtagtccccgctactcgggaggctgaggtaggagaatcgcttgaaaccaggaggcagaggttgcagtgagccaagacagcgccactgcactccagcctgactccgttaaaaaaaaaaaaaaaaactcttacgttatgatgtggtacataaatcatgtttgactctagcacaaaagtcaaaagaaaaaggtatgaaaataactataataactttttagtatacacaatataaatgatatgaagtgtggcatcaataacataaaatggggggaagaaaaagttgaagtgtaaggttgttttaacatgttcaaagttatcagctttaatagtaatctttgtgattatcatgagactcataaaacatcttgtaatagtctaagatgttttacatgagtctcatggtaatcacaaagaaaaaaatgtgtagtaaatacacaaaagataaaaaaagaaatcaatgcataccattacagaaataaatcacaaaggtacacagaaatagaggaagaaagacatagaggaatgacaaaatgtcagaaagcaattaacaaaatggcaataataaacacttaacctattaataagttatttaaatataaatgaattaaatttaccaataaaaaaacagagtgactaaatcgattttaaaattagaatccaactatatgctaagtaagaagactcactttacttttaagaacacagagaggatgaaagtgaagaaatggaaaaagatattccatgcaaatagtaactaaaagagagcttagttggctacatttattttacttacatcagaaaaaaaccagactttaagtcaaaaactgtcacaatagacaaagaaagtcattatatcatgataaaggggtaaattcatcaacaagatgtaacaaatgtaaatacatctatgtatgcaatattggagcacctaaatataatatataaggtatttattaacagaactgaagggagaaatagacagcaataaaataacagtccacttcaatacccgatgttcaacaatggacagattatccaaagagaaaatgagtaagaaaacaagtggcttgaacaacactatagaccaaatggacctaacagacatatacagaacattctattcaacagcatcagaacatgtagtctttttaagcgtataaagaaaatattccatgacagagaatatgtaaggccaaaaaacaagtctaacaaatttgagatgattgaaaatatatcatatatatatttcacttcaatttatttattgtgctaataatttttaatttttaaaataaattattgtgggtacatagtaggtatatatatttgtgaggtacacaagatgttctgatataggcatgcaatgcgtaccaatcacatcatggagaataaggaatccatcccctcaagcacttatcctttgttttacaatccaattgcacctttttgttatttttaaatgtataattaagttattattgagtatagtaaccctgttgtactgtcaaatgtagatcttatgttctttctatgtttttgtacccattctttctatgtttttgtacccattaaccatccccacattcccttcctggtcctctgctactacccttcccagcttctggcaaccatccttctactctctatgtccatgagttcaattgttttgatttttagaccccacaaataaattagaacatgtgatgtttgtctctctgtgcctggctcatttcacttaacataaagatctccagttccatccattttgatctttttaatgactaaataatactccattgtgtacaggtacaacattttctttatccattaatctgttgatggacgcttaagttgcttccaaatcttggctattgggaacagtgtttcaacaaacatgggagtgcagatacttatttcctttctttgggtatatgctccacagtgggattgttggatcctccaaaatgttctctatagtagttgtactattttacattctcaccaacagagtgggagtcttcccttttctccacatcctcgccagcatttgttagtggctgacttttggatataagccattttaattgaggtgagatgatatcatatgggagtttcaatgtgcatttctctgataatcaatgatgttgagcacattttcatatgcctgtttgcatttgtatgtctccttttgagaaatgtctattaaaattttcttgcacatttttgatcaaattaatatcctttttttctacagaatttgagtttcttatatattctggttaccaacaccttgtcagataggtagtttgcaaatattttctcctattccatgggttgtgtcatcattttgttgtttccttagctgtgaagaggcttttaacttaatataatcccatttgtccatttttgctttg

SEQ ID NO: 1888884 - DNA, 4001 bp, Homo sapiens
aggtcatcggtaggggactgtaggggtcatgagtaggggactgtagagttacattaggtgtggtgagtaggggactgtaggattaagctaggtggacgtggggcagggtctcttcctgtctacacggggtccaggtggttgtgggacaagagctcctcctgtctatactgggtctctgtggaggtggggcagggtctcctcctccttacactaggtgtggtgagtaggggactgtagggttacgctggaggtcgtcagtaggggactgtaggggtcatgagtaggggactgtagagttacactaggtgtggtgagtaggggaccgtagggttacgctggaggtcgtcggtaggggactgtaggggtcatgagtaggggactgtagagttacactaggtgtggtgagtaggggaccgtagggttacgctgagggttgtcagtagggtctgtggtttcacttaccagtaggttttccgtgccaggctgggtattctagaaacaaaacaaaacacaacacaaggctcactgtttccatttctaaaacactgtagatggttcacacagtgtctcccctggtgtgggcaccgaatgggaaggagtccctgcggagtggcaggcaggtctccctccacaaaccccgaatctacaagacaggtaggatgaggagctgcaaacacagaagtcttcctggccagatatcttcctgtaacccatccagaaaggtcccactggccttggggcagggtgttctcctgtcgtccaggtagacatggagcaggctctccttcttgtctacactgggtccaggtggttgtgggacaagatctcctcttgtctacactggctcgaggtggacatggggcagggtctcttcttgtctacactgggtccaggaggttgtgagacaagatctcctcttgtctacactggatcgaggtggacgtgaggcagtctctctccctgtctacactgggtccaggtagttgtgggacaagaactcctcctgtctacactgggtctccatggaggtggagcagggtctcctcctgtctacactgggtgtaggtggaggtggggtcgggtgtcctcctatctacactgggtccaggtagacatggggcagggtctccttctgtctacactgcgtccagctggaggtggagcagaggctctccttgcttgtggcatcgtcccccacacctcccggtccacttcctggttccatggttgcaggatcatccttgtccaccctccctgcaacctctttcaaggtggctccacaggccacagacccttcacctcttcctccgctacccgaagtgcgttcaccccagagtcaccgctcaccacccacgcatccttcccccaggccacttccccgggattcccaggctcctgtgcgggcgtgtcccgtacgcctccctcctggtgcccagccccggggagctctcaccgacctttctgtggacgtccagctggtactgaaagtccaggtacgacagcttctgataggtcctgggctgtttccaccgtacgaggcagtgcgtcgtgttgcaacgtacggtgacattgctgggagggttgaatcgttctgtaacgagggcgcaggacacacccctgaacccgagaggtcctgtctacactgggtccaggtggaggtggtgcagagtctcctcctgtctacactgggtccaggtggaggtggagtaggtcctgtctacactgggtccaggtggaggtggagtagggacacctctttgactacactgggtccaggtggagatggggcagggtctcctcctgtctacactgggtccaggtagaggtggggcagggtctcctcctgtctacactcggtccaggtggaggtggtgcagtcttctcctgtctacactgggtccaggtggaggtggggcagggtctcctcccatctacactgggtccaggtagatatggagtagaaacacctctttgtctacgctgggtccaggtggagatggggcagagtcttctcctgtctacactgggtccaggtggaggtggggcagggtctcctcctgtctacactgggtccaggtggaggtggtgcagagtcttctcctgtctacactgggtccaggtggaggtggggcagggtctcctcctgtctacactcggtccaggtggatgtggactagggacacctctttgtctacactgggtccaggtggagatggggcagggtctcctcccatctacactgggtccaggtagatatggagtagaaacacctctttgtctacgctgggtccaggtggaggtggggcagggtctcctcctgtctacactgggtccaggtaaatgtggagtagggacacctctttgtctactctgtgtagggaaaagaaagagagatcagggggctgggcgcggtggctcacgcctgtaatcccagcactttgggaggccgaggcgggaggatcacgaggtcaggaggtcgagaccatcctggctaacacggtgaaaccccgtctctactaaaaatccaaaaaaattagccgggcgtggtggcgggtgcctgtagtcccagctactcgggaggctgaggcaggagaatggcgtgaacccgggaggcggaggttgcagtgagccgagatcccgccactgccctccagcctgggtgggcgacagagtgagactctgtctcagaaaaacaaacaaacaaacaaaaagaaagatcagactgttactgtgtctatgtagaaaggaaggtaagaaactccattgtgatctgtatgttgaaccactgttttgccttgagatgctgttaagctgtaactgtagccccaacactgtgctcacagaaacatgtgctgtgtcttgttaacaataggtttgcaggcagcatgcttggtaaaagtcatcgccattctccattctctattaaccagggacaccatgcactgcggaaagccgcagggacctctgcccgagagagcccgggtattgtctgagggttccccccactgagacagtctgagatatggcctcgtgggaagggaaaaagacctgaccgtcccccagcccgacatccataaagggtctgtgccgaggaggaagtcctctcgcggttgagataagaggaagccctccgtctcctgcctgcccctgggaatggaatgtctccgtgtaaaacccgatcgtacattcgttctattctgagacaggagaaaaccgccctgtggctggaggcgagatatgctggtggcaatactgctctgtgactctttgctacactgatgtttgtgtggagagaagcataaatctggcctgcgtgtgcatccaggcatagtagcttcccttgaacttatttgtgacacagattcctttgctcatatgtcttcctgctgaccttctccccactatcaccctgtcctcctgccacattccccttgccaagatagtgaaaatagtaagcaataaatactgagagaactcagagaccggtgcaggtcctccgtatgctgagcgccggtcccctgggctcactgttctttctctatactttgtctctgtgtcttatttcttttctcagtctctcgtcccacctgacgagaaatacccacatgtgtggaagggctggtcgccttcacactgggtccaggtagaggtggggcagggtctcctcctgtctacactgtgtccacgtaaatgtggagtagggacacctctttgtctacactgggtccaggtggaggtggtgcagtctcctcctgtctacactgggtccaggtggacgtggagtagggacacctctttgtctacactgggtccaggtggaggtggtgcagggtctcctgtctacactgggtccaagtggaggtggtgcagtctcctcctgtctacactgtgtccaggtaaatgtggagtagggacacctctttgtctacactgggtccaggtggaggtggtgcagggtctccttctgtctacactgggtaaagtggaggtggtacagggtc

SEQ ID NO: 1888885 - DNA, 4001 bp, Homo sapiens
cacacaacaacaaaatgacttaatgatccattactcagaacatatcctgtctttaagcaacacatgactgtatagttaaatgttaattataaaatctaggtgttgggtacatggcttttcaccgtacaattctttcaacttttctgtatgtatgtttgacaactttcacaatacaattttgggaaaaatccagcaagcagctttaaaaatatggctgtaagacctttccttctattatattttattcctaggatgatcctatccaacgagatgaacctattcagtgtttcctccattttgttttagatttagctttctcaaatatgactttgagctctccgactttttaatgaagtgaaatgaatcaacatgtattcataggcaggttaccaagatagtacatgtaaagttggggaggcacaaggggaggggctctaagctcttggaagtctaggctcactatctgtatacatctaaataaatgagtatttcagacaccccacttcttcatttaaaaattagtgttagggaccctctaaacatttgcctcagcttacctttctgccttatctcacattaagtccttatttcccatattctcattgcaaagaactgtgtaggaaggaggggggcaaggacgaaggcaccaaagcatgctatgtccacgtgcttcaagtttgaatataataaaaggtatttctagagtagaggttcaaagcttgatgttgaagggcagggtataactgactgactgcaggaccctgggggaggtcttataatcttctactttaaaacatgtcttagctggcttatctgtaaaagaggaaaaagacttgtcacaagcaatgacaaatgaagtaaataaatatgaatttctggtctggtgaatggaatgagaaatgaaaccatcactgtcgagtgatgatccagagtgggcacagatctttttctacaaaggctttgtgggccacaatgtctccaatatatttaatggcaaaaacagcaactacttttgcaccaacctaatagctacttaattgtgccactgggccgcaaaagcggccccaggtaaaacatcgatgaatgaacatggctgtgttccaatatagaatggtatttacaaaaacaggtagcccatgggcaataaagtttgcccacccttggtttagaatatggagtctggttgggtgcagtggctcacacctgtaatcccagcactctgggaggctgagggaggtagatcgcttgagtccaggagttcaagaacagcctgggcaccataacgagaccccttctctacgaaaaatacaaacattagccaggggtggtggcacacacctatagtcctaactcagaatgctgaggtggaagatcacctgagcctaggagttcgaggctgcagtgacccgtgttcgcaccattgcactccagcctgggcaacagagtgagaacctgtcccttaaaaaaaaaaaaaaaagaaagaaaaatgcaaagtcctatctaagaatactatttggatgattacctgggccctgaggatgaggccccaatctaacagttatcactcaagtcccaccaagaaagcaagtgtcagcaatagcaacagttgcaacatctgtaaatatcaaggactgaaatccaaacacaaaaatggcattgtctcatgagaaactcttaggaagatatatacagaaatatcaaatttctgaccacatgctttttgaagaaacagctgacaatccagagcctgtggagctcactttagcaggcacacaataaatgtttgctgatgagtcattcatttattcatctaataaacatttactgaggcctactaatgtgccaggctgggctctggagatgaagacaccttccttgccctcaaggagctcacagtctaactgataacaggaagagagacaggcatatacacagacaattacaatacaatctgataagtgctataacacttatcaggttgtattataatggccgatgtaaaatttcttcccagggggtgctgctccaggctgctgctggctgtaacatcaagagaggtgaggaacaaattatagaaatcaaaggttaaatgcttttcggttatttcaaatattcaggctttccctaacccgtggccatagacggaattgggaactagacactggcatgatgtaaaatgggacttccatgcacagacttccaataaaggaacttctcaatcccctcctctaaaatatgagcttttttttttcctttttgcttatactcctcttaacctccccaccctactacccacatgagcctggtttaatatctacagctagcaaaatgctgaaaaatgggagcttacaactaactggattaacccagtgtaaccggatagcaaaaagcagtaagtaatagctcatttggcacttctaaatccaataatcctcatccttcactggaaaaaaaaagttagaatgttattaaatacaaaatagataatatacagatcagagtaggaataagttagaaaagtttatttaataaacataattaaacagattctctaaactagaaataacattcagtttcaggaaaccagaattagacccctccaagacctttgagaatatctaattcacctatgtattataaacaagaaaaatgaaacagagagataacacactctgcccactcccttttcaaaatcatgtgagtgatagtaacagactccttgaggcaagattattactgtaatagttatttggttcagatggttttatacaaagataagatggcatttttctgtgcctcatacctttcttaataatacctaggtttttactggcttttttgtctctgaccagcaaatagggctgataacatcagcaagttgttgacagttatactgagatcactgttttgggacccaatgtctctatgaggctgttatttaataagcttaacatactattttcccctaaagttatttcactgctcttgcctatacactgttcctttctgccaattagcccactcctggtgccttctcacatgctagcgtgttcctattagcatttcacatccccaaagcatttaacagtatgtataaatgtggacacttcaatattgcccatatcctccctcagaccactcagaaatatttaaaataagaccagtccctgaatggatgggggagaagggaccgctgttttgtttcttgtctaaattagtttctcattagggacaaaatgttgccctgtcttctccccatgcccagagccaggaagcaccactgttgtacagtactcaaaagtgctttccttttagataaaaagaaatggatttctgtttaaaggtcagacaaggctgggtaaggtggcttatgcctgtaatcccagcactttgggaggcggaggcagaaagattgcttgagcccaggagttcgagaccagcctgggcaagacctccactctaaaaataaaaacaaaaataagatagaggtcagacaaatgttatctcaaaatggctaccaagaaccagacatgtatccacacagcagttatatttggaattgcaaacatttcttcagactcaatggcaacaaatattactgggagcatatctgcaacaaacgacatttgcaacttacaaataacattcaggcacaaattgaataattcacaaaaggaaataagagctagtaattaagatctaaaagtccagcctcactaataatcagagaactgtatcacaaaacaaagatatcggccaggtatggtggctcacccctgtaatcccagcattttgggaagccggggtgggaaaatcacttgagcccaggagttcaagacaagcctgagcaacatggcaaaactccatctctacaaaaaaatttaaaaattagctggacatggtggcacacacctgtactcccgctactcaggaggctgaggtaggaggatctctggagccctggaagttgaggcttcagtgagccatgatcacgccactgt

SEQ ID NO: 1888886 - DNA, 4001 bp, Homo sapiens
aaatctaacactccaaagtctactctgattacaggtcctatcactccagttttccaattactcagcactcaccttgttcacattaaagcctctttttggcccagactgaggccactcctgaccttacttccttccatgtccaggttggatttttttttttaaatgaagtctcactctgttacccaggctggagtacagtgggtgggatctcggctcactgcaacctccgcctcctgggttcaagtgattctcctgcctcagcctcctgagtagctgggattacaggcatgtgccaccacacctggctaatttttgcatttttagtagagacagggtttcaccatgttggtcaggctggtctcgaactcctgacctcaggtgacctgcccaccttggccttccaaagtgctgtgattacaggtgtgggccaccgcgcccggccttagtttggattcttaaatccatttctgtgtaactcgtctcttgctagctgtccacccctcaatcaatcaaggcaaccaaatactgctagtgacaatgccccaaaaccacttcatattttcctgagcttctaacccagtttcaaactcatttcttactttgatataccataagctctcctgttaatggtctcactccagcgttttggcctgaatattccttagggactctggttcatatttagccctctagtatttctgttccagcagcttttgtcttcatattcctgttcctggtcagcttcctccccatcatccacctctacaattacaaatcttcaccacccttgccaagtcctcttccttactcctatccctatctctgtgctccagcaaagaggtagttccacttacctaaggctaaccctccacctgcatgtgttctagagccataaatttcacccttccagcttcacctgcatcatctttcaagatcatcttccatctattatcatctctctctttctcacatctacaatgactcccttctcaattccttctgccccatggtctgcaaacacactcaatttttttctcatgttaaatgattcactgtaaggcgctggataagtggttttaacttgtattctggttgtcacatctacaatcagaaaagcttctcacaaaataatgattaagtacaataaataagataaagaaaatatgaacctggtgagaggtgaacaggacggtggaggattacctgtcagtgcaggtaaggggatagctggagtaaagttgaaaggggaaaactttaaatatcagccacaggagcaaacctcagactgtgaggatgaggtttctgttcagacaatgagcactctggtccaacccagggagcaattagcagcaattacagtagcagcaacagccatgcaacatcagcaagtagctaagaccaaaatgcaggcatagaaatgaagtatttcatagaaaacagagtagcaaatatgacatatgaggcacttgtgctgctactcccccttctccgaccctcagcagacatcactaaatagttataaatgtctttcacactgagataagacctggtttcagaatcttgttataaaacataatcagggcaggcattatcaatcaattggagatggtacttgagatgaagtgtatttgctatcattgcactacacagaaaagtcctcaacaaaagaattagaagacaggaataagcttcaggagtaagcattctgaagagagcttggacgttgttggcaactggcggggacaagctgagcccatggagatcacagagcaggcgcccaattaatgtctgttgatgattcattttttcattcaacaaacatttaatgaggcctacaatgtgcaccggattaggcactgtgaatacaaagatgagtaaggcactgtccttgcccttaaggaatttaaagtctggtagacgagagccatagacacggacaatgataatacaacctgctaagtgctaggacacttagcaggttgtattatatccatccgagtaggatttcttcagaggagcaccactccaggttgctgctggatccatgaagtcctcccaggcaccagggtctgctgttgtttttgtcacgtgctgggtgtcccaagatctaacaataatagctgtaattaatgtatagagtgcctatgacaaacactttacaaatatcttcatggaaactctgaaaattaatagttatattagaggaagaaactgaagttcaacaagtttaagtcacacagccagcaagcagttgaattaggtttcaaatccagttttgacaaagtctaatgcatttttctgttttcaggataacctttatgcaggtgtaatacaacaacttttcaacagctttctatttggaactaaaagcaaaggcaatagattagtcactagatcatggagtgattaatttggtttcccactctacctggcagagaaataaaaggtgaaatgacctcacacttacataccattgaaaaccttcaagtcagttactgtttttctttctcaaccctaacatcgtcactgatcattcaaaatataagtacctctagtcaaatctcttcttttaatacttgtcatagtcaacaccattatcagcaacaacagttgacacagcatttagctgtatattccaggcctgttctaagcaatttacataattagtccctttaagtactttttacccccatcattgaaaataaatattattcctattttacataagagaaaacagagtcctggggaagtgaagaatcatgctcaagaccacattgctaagtgtgagagcagatttgagcccaggctacctggtcccaagacccaaactctcactttacatagctctgctgcactgctcagggcctcctttcccaactcttgatggcaagttacacaaggccccctgaaaaacccagtcctacttacataaaatctcatcactaaccattctggtcatagaaagccattctctaaatcccaaatatcaatactcagagccttaattggaaaatttcccgaagaacattgagtttagaatatacctttgcaaaaagagaaaataaacactcgatatgtttaggtttttaattattgaattttttttttacttgcagatatagtcataaacgttttaagatccataagcaaactaaagcaattatgccaataatgactaaggccactgcttcctcaattgagtctttgatataaaagccttcacttttggttaattacaaaaaaaaaaaaaaaaaaaaaaaaaaaaaccgtgggagatatgtgacagtgagagtaggcctgctactgatgagaaggaccagcaacttagcaacaccataaaatgtctgctgcaattcaggtgtctaggtgtctccctgagaatcaacatttcatatacagctgttcccagaaaacaatcttgcacaatctgtacagtcaagttatgatctaaaaggagttaattgcaacattcatccaaagaatatgacagtatttttcatcaaggtctttttctataagtttttctataacttttcctataagttctattatgtctatacagtcatgtgctgcctaacaatgtttaggacaatgatgaacctcatatatgacagttgtcccacagttgtcccaccacaaaatcatatcatatttttactgtagcttttctatgtttatatatgtttaggtacacaaatacttaccattctgttataattgcctacagtattcagtacagtcatatgctgtacaggtttgtagcctaggtgtgtaataggctataccatttagagaggtttgtgttaatatactctatgaagttcacatgacaaaatcgcctaacaatacacttctcagaacatatccccattgctaagcaatgcatgactaaatttttataacttcctaagaggttatcccctcttcgccactcccactcctttcagccctacatcatttctcatcttagccaccacagtatccttctaactcatctccct

SEQ ID NO: 1888887 - DNA, 4001 bp, Homo sapiens
tggcgaagaggggataacctcttaggaagttataaaaatttagtcatgcattgcttagcaatggggatatgttctgagaagtgtattgttaggcgattttgtcatgtgaacttcatagagtatattaacacaaacctctctaaatggtatagcctattacacacctaggctacaaacctgtacagcatatgactgtactgaatactgtaggcaattataacagaatggtaagtatttgtgtacctaaacatatataaacatagaaaagctacagtaaaaatatgatatgattttgtggtgggacaactgtgggacaactgtcatatatgaggttcatcattgtcctaaacattgttaggcagcacatgactgtatagacataatagaacttataggaaaagttatagaaaaacttatagaaaaagaccttgatgaaaaatactgtcatattctttggatgaatgttgcaattaactccttttagatcataacttgactgtacagattgtgcaagattgttttctgggaacagctgtatatgaaatgttgattctcagggagacacctagacacctgaattgcagcagacattttatggtgttgctaagttgctggtccttctcatcagtagcaggcctactctcactgtcacatatctcccacggtttttttttttttttttttttttttttttgtaattaaccaaaagtgaaggcttttatatcaaagactcaattgaggaagcagtggccttagtcattattggcataattgctttagtttgcttatggatcttaaaacgtttatgactatatctgcaagtaaaaaaaaaattcaataattaaaaacctaaacatatcgagtgtttattttctctttttgcaaaggtatattctaaactcaatgttcttcgggaaattttccaattaaggctctgagtattgatatttgggatttagagaatggctttctatgaccagaatggttagtgatgagattttatgtaagtaggactgggtttttcagggggccttgtgtaacttgccatcaagagttgggaaaggaggccctgagcagtgcagcagagctatgtaaagtgagagtttgggtcttgggaccaggtagcctgggctcaaatctgctctcacacttagcaatgtggtcttgagcatgattcttcacttccccaggactctgttttctcttatgtaaaataggaataatatttattttcaatgatgggggtaaaaagtacttaaagggactaattatgtaaattgcttagaacaggcctggaatatacagctaaatgctgtgtcaactgttgttgctgataatggtgttgactatgacaagtattaaaagaagagatttgactagaggtacttatattttgaatgatcagtgacgatgttagggttgagaaagaaaaacagtaactgacttgaaggttttcaatggtatgtaagtgtgaggtcatttcaccttttatttctctgccaggtagagtgggaaaccaaattaatcactccatgatctagtgactaatctattgcctttgcttttagttccaaatagaaagctgttgaaaagttgttgtattacacctgcataaaggttatcctgaaaacagaaaaatgcattagactttgtcaaaactggatttgaaacctaattcaactgcttgctggctgtgtgacttaaacttgttgaacttcagtttcttcctctaatataactattaattttcagagtttccatgaagatatttgtaaagtgtttgtcataggcactctatacattaattacagctattattgttagatcttgggacacccagcacgtgacaaaaacaacagcagaccctggtgcctgggaggacttcatggatccagcagcaacctggagtggtgctcctctgaagaaatcctactcggatggatataatacaacctgctaagtgtcctagcacttagcaggttgtattatcattgtccgtgtctatggctctcgtctaccagactttaaattccttaagggcaaggacagtgccttactcatctttgtattcacagtgcctaatccggtgcacattgtaggcctcattaaatgtttgttgaatgaaaaaatgaatcatcaacagacattaattgggcgcctgctctgtgatctccatgggctcagcttgtccccgccagttgccaacaacgtccaagctctcttcagaatgcttactcctgaagcttattcctgtcttctaattcttttgttgaggacttttctgtgtagtgcaatgatagcaaatacacttcatctcaagtaccatctccaattgattgataatgcctgccctgattatgttttataacaagattctgaaaccaggtcttatctcagtgtgaaagacatttataactatttagtgatgtctgctgagggtcggagaagggggagtagcagcacaagtgcctcatatgtcatatttgctactctgttttctatgaaatacttcatttctatgcctgcattttggtcttagctacttgctgatgttgcatggctgttgctgctactgtaattgctgctaattgctccctgggttggaccagagtgctcattgtctgaacagaaacctcatcctcacagtctgaggtttgctcctgtggctgatatttaaagttttcccctttcaactttactccagctatccccttacctgcactgacaggtaatcctccaccgtcctgttcacctctcaccaggttcatattttctttatcttatttattgtacttaatcattattttgtgagaagcttttctgattgtagatgtgacaaccagaatacaagttaaaaccacttatccagcgccttacagtgaatcatttaacatgagaaaaaaattgagtgtgtttgcagaccatggggcagaaggaattgagaagggagtcattgtagatgtgagaaagagagagatgataatagatggaagatgatcttgaaagatgatgcaggtgaagctggaagggtgaaatttatggctctagaacacatgcaggtggagggttagccttaggtaagtggaactacctctttgctggagcacagagatagggataggagtaaggaagaggacttggcaagggtggtgaagatttgtaattgtagaggtggatgatggggaggaagctgaccaggaacaggaatatgaagacaaaagctgctggaacagaaatactagagggctaaatatgaaccagagtccctaaggaatattcaggccaaaacgctggagtgagaccattaacaggagagcttatggtatatcaaagtaagaaatgagtttgaaactgggttagaagctcaggaaaatatgaagtggttttggggcattgtcactagcagtatttggttgccttgattgattgaggggtggacagctagcaagagacgagttacacagaaatggatttaagaatccaaactaaggccgggcgcggtggcccacacctgtaatcacagcactttggaaggccaaggtgggcaggtcacctgaggtcaggagttcgagaccagcctgaccaacatggtgaaaccctgtctctactaaaaatgcaaaaattagccaggtgtggtggcacatgcctgtaatcccagctactcaggaggctgaggcaggagaatcacttgaacccaggaggcggaggttgcagtgagccgagatcccacccactgtactccagcctgggtaacagagtgagacttcatttaaaaaaaaaaatccaacctggacatggaaggaagtaaggtcaggagtggcctcagtctgggccaaaaagaggctttaatgtgaacaaggtgagtgctgagtaattggaaaactggagtgataggacctgtaatcagagtagactttggagtgttagatttcaaaactggagtggttaagatacctgtgaagctaggatgtcagatgatcatttacatgactattatagta

SEQ ID NO: 1888888 - DNA, 4001 bp, Homo sapiens
aatgcatcattcctcaagcatagtagcaacgtatttggtcaatggttctctgtactaaaaagtccaaagtatattagtgtccttcacttgacacttagtagataccaccttgcatcattctttatccttgtatcatcaatagcagccaatattgaatatttagtaggtgaggcacacagaggggaaggagcatccattttccaaggcactattaatttcaaataggctacctacattttcagataatgtattccaacttttagtttggaaaatatggtcaccataggtgaaaaaatcatacatgaaactatcatacataaaaagtatatacagtatataattagattggcaaaactcagtgctagagacaaaatgaacttaaagggctggaggagttttttgttattttttttttaaagatgggccaggccagcgcggtggctcaagcctgtaatcccagcactttgggaggccaaggctggcagatcacgaggtcaggagatcgagaccatcctggctaacacggtgaaactccgtgtctactaaaaatacaaaaaattagccgcacatggtggcgggcgtctgtagtcccagctatttgggagcctgaggcaggagaatggcgtgaacccgggaagcagagatcgtgccattgcactccagcctgggcgacagaatgagactccgtctcaaaaaaaataaaaaagaaaaaagaaaaaagaaaaaaaataaaagataggccagtctgacccaaagcaactagaggagtttcacaaagaaaagacatctgagctggtccctgacagttgagtcatctctggatacagtagagatgaaaatgggagtgaggtttctcatctgagcaggtttaagcacccatttatatgactgtcaaatattgctcaacagcatcttacaacatcagtcaattccttggcacctataatagattctgatgtcaattgttagaaggccctgcctaataaatcagaggtttaccccttggttccacatcccatgttgctagctcattccctggcctcattttactgggcttcctgagatggtccagttacattagtcaatcagaagttaaccaaaatggcttaattgttggaatggactggagatactccagcctgagagagaaaagaattccagtcggtgatgcaatatgatcttaactctcaaaggctaaactaattcaacatttttcttcttcatctccaaattgtcggggatgattatatagagataacctataatagacaatgttgacataaaccaatgtgtagatcatttcaaaatagtaaatgaaaataagataaatacagatgggaatcaaatatatagataaaacaattacaccatgtgcatactcaggcccattaacagggaggtgagcagggaaaggcaaggaagtttcatgttgacacagaggaggttggtacaatttattgggtttcttttgagtagcctaggaaaacttggaggagttaggatattaaaaactgcttacatggagtcgagtaaggtagggaaaaggaaaggaagcttgagctaaagcttgtgaacaggaataagaaaatttggatggggctttagaggatctgataaacaagcttccctttatatctgtttgttggtttcttttatttctagtgcctcttaaaatgagcgtgttcaaagccctgaatcaccaaacagctagtaaaaattcaggaatttgtgagagctataaaaattaagtagcattattattactagaattatgattaatatgtagacatataaacagacaaataagtagaattgctaaaacaaatgttgcaatccaaagatgtcatagagatggccagttagcatcttgaaggtttcctatgtatttcaggcatcttgttatttgcatatatgttacaggcattatgaacaatttctaggaatgacttatgaacattatacatattgtctaggaattgtttaaaattcctgatttaacattctgcctataacataaatactagttaaaaggcaaggaacttgatcatacactggcatcaaatcagaaggcactatttctgcaggcctgacatataaccagataattgattatctataaaaaatgtaatacagcataggtaatagccaaataactatactgtattttttaagacgcatgtgtagaagactacataaagtaaatgaaagaatgtaagtgcaaagaaaattttgattcagtcctttttaaagaaagttataaaacttcttattgagttgtacaaccataagtccaaacatatgatacatatttaaaaatctaacattttacaacgtgaaataccaacatgatggctatattgaaagtaagaacatgcttccttctggcaatgagcccaagatatcactgcttggctgttgttaacaaagatgatgatgatggctggtgatggctatagcatatctctggattaggagctgattagattagcttagtgccttcagagactaatatcatgtcccttgtggacgagtttgcatatgccatgttccattcacagattaagactggtttaggccagctagcttgcaaatacatgccatagggttttgttttcaagtgtgggaactgaaacccagagatctacagtggcttgagctagggcacatagcaaactaatgaagggaagaagagcttcgttctcagatgaggaaaatcaaatatcaggtccctgcatgctctggcatttacccttttccaagctaaaattgcagtcctggaatctttctccatggtctgaccaccttcttcttaggctagaaaatcatgaccctgaggccctcttcaactctccatctaatttgggaatagcccccactgcctgtattagaaatagcagcagcaacagtactactactactacatagcatgcagtatggtgaccctttatatgtgatatctcttttagttcctttcacaaacccatcaagtaagcaatgttattatcttaattttataaataaagaaactgaggtttgaagaagttaagtcacccagttagtcagggatctaagcctttacctgcccaactctgaagcccagactctgaagtacaacaatatgtttctttctcagcattgtgtactgctctctgccacatccttctcctaacccacaataaacctgcaagaaaaatctgaagagccatcataattcaaactttaaagtgatttggtatcacttacagcactcaataataatggctgaaaagcaacacaatcctagagaatgaccatctgttttaagagcttaagtgggtatgtttttctggaatatccccttagaaatgttttttgaacatttgttcaaacaagttgaagtctggacaccctctgatgcctttctcaactggttaaatgccaagtatgacataatctttctgcatgtggtttgagttaggtggaagtattgtacgtgcctgagacactgggcaagccctccagagatgcttctagatccagccaagaaggcccactgaggagatggcagccctagaatgatggggctgagatcagtaataggctgagtaatcctataagccccatttagggggcatccttcacctgacaactaggacatttgtgttctcctagtatttaggatattctctcatctttgggacaggtcccagaaatgcccagtggacttttcttgccttgtgacttaagagtttcaggggctctgaccttaaaccactaggccagcattgctgtggccttactttcctgccacaagtcacctgagctccacctgctgtaccatgaaatcattagggaactgattaatgtctttaaaaggtgcctcctagtgcacataactggaaggtactacaatcccagacagttttacagttttggcagaatggaaatattctctgtggatagattgaatgtcacctcttggcaagggtttgtgggagatggctgcagggcccttcagcaaa

SEQ ID NO: 1888889 - DNA, 4001 bp, Homo sapiens
ttacaagaaaggaaaataacaggccaatcactttcatggacgtaaaggaaaaactatgaatcaaagaaaatctagcaatacacaaaaaagattatacgtcttatccaggtttagtttattacaggaagaaaggcttttttagcattagaaaactaagtcatgtgatttgacatatagcagaataaagaagaaaaatacgaccatctcaaatgattctggaaaaatatatgataaaatttggcatccggtagtgataaaacctcttagaatattaagaacagaaggtatctacaacaaacctacaggaaagatcatacttaatgattatttattaaagttcttccctctgagacttaaaatgagaaataaatatccacaatactcccattgtactagagtatttatacagtacaatatgtcagggaaaattaatgacatgaaaaataattggaaagggagaaagaaaactgtcattactcaaaaacaacctatatatgtacatctgaataatactacagataatgtattcaaattattaagtaaatgtagcatggtacctggatacaagaccaagaaaaaaaatcaactgtatttctttatatcagcacaaatagaaaatgaaatttcaaaaatatattcataacagcaaaaatataaaaacccaagaaataaatctcagagaaagtttaagagcctttactttaaaaactataaaacattattgagagaaaataaagacctaactaaatgaaaggattgaaagactttacataataaaaatgttgattctgtacaagttgatccagagaatagatgaaatccaattaaaaccacagcagattctttttgggggcagggttcacaagctgttcttaaaattcatatggagatcgaaatggccaaaagcagtcaagataatctttaaaaaggaagaaaataaaatggcttttactgaccaactgaccaaaacaaacttaatgtgactaaactctagacaggcttttatttgactataggctcctgacctctcttttcttagagcgcttactttagggaaacttgcaaccaaaaacatattctctgcctctttgagatgtaaatcttctacaatccgggaatatctttctcaaggacctaggagccatctctttgaaatgtaattgttaatgatagcacgcctatctcccagtctctgtgggacagtaggagcctaacttcattaagtgccaattaacaatcacagattgcctaatcaccatcctaaccccctaatatcttccagtatttttctactagctctcctcagtgcttaaattctctcctgtctttctttcagtagaaatgatttccatctctctctcctatggcaatagtcttgatccataattcagtagtcttgaataaagtctttcttgcctgtttgtctggtgcattttttcttttacaatattaccagatacaggctgggcctggtagctcacgcctgcaatcccaacacttcggcaggccgaggctggcagatcacctgaggtcaggagttcaagaccaacctgaccaacatggtgaaaccctgtctctactcaaaatacaaaaaaaattagccaggcatgatggtgggcacctgcaaacccagctattcaggaggttgaggcaggagaattgcttgaaccagggaggcggatgttgcattgagctgagatcttgccactgcactccagcctgggtagaaacagcgaaactccatctcaaaaaaatattaccatatattaaaacttgtcataatgctatagtaattaaaacaatgtggaattagcatgaggacaggcaagtagagaaataaaactgattagagtccataaactgatccatgcacgtataggcattttatttctaatattttcgtcaaagatgacaccacagaatattgaggaaaggatggtcttattgaaaatctttgcaataagaccatcttttcctcaatattctacagtgccaacttgttgtttcagttggatctatatgggaaaaaatggacattcatcccttcctcatacctgtaataataggtggattgtaatacgaaaggtaaaacaaacagttcctatatagcaacccaggaccatagcttcagaattttaaagtagagagttttatttttaaactgaggacaaaagtacactaaacataacagaaaatattgaagtgaactatgttaaatttaaacttctgtttatgaagagatatatcattacggagtgaaaaggcaaggtacccattcaaaaagaaaaatgtaatataaacagcaaagaatacccagaatatatatattttaaactaaaataaatcagtaagagaaatatagaaaatccagtagaaaaacaggcatttcagagaagagttcatttaaatggccaataacaactgaaatagtattccgcctcactggtcatcagtatatacaaatgaaaaatgagagatgacattataaagtcaccagaaaggctcaaattaaaaagtttaacaaacaagtattcaagaagatatgaagcagtttgtactttcatttactactggtgagaatatgaatttatacaactttggaaaaccctttgttaatatcttgaaagctaaatatgcatatacccaatgattaagaaatgctattcttaggtaaatacctaatacaaaagtttacatatatacacaaaaatatacgtacaatttatgttgatagatgaattatttgtaatgcttccgaactggaaacaaccccaattttctgaacagaatatgtaaaatgtggtatattcatacaaagtaattctatccagcgatgaaaattaataaagtaatgctatatgcaacatagtgaatctcacaaatatagtatccagtgaaaaaagccagttaaaaaactgcatatataaaagtttcatttacatcaagttaaaaatatagcaagactaacctgcagcattataactcaagatacatgttacctttgaggagatgggaagagtttatgataccatagggcttgatggaggtttcctggttgctggtaacatactatctttttctggatgtggaatcatagtatgttacttctgtaataagtctttaagctataattataacttatgtcctttgcttgatacttcaatttaaaaagtaccataaagtttgcatttttttttcagaaccatcaacagataaacagataacaggttatatatacataatgcaatgttatttggccataaaaaggaatgaaatatagctatttgcaacaacataaatggaactggaggtcattatgttaaataagcaggcacagaaagacaaataccacatgttctcattcacatgtgggagctaaaaaattggatctcatagagctagagattagaatgatagatactggagactgggaagagtgtgtggatggaatgaagagaggttgtttaatgggtacatacgcttagatagaaggaataagttctaatgttcgatagcagagtaggaagactatataattatatacaacagtgtaacaaaatatcacatgtactctataagtatgtacaaatattatgtatcaataaacttaaaaattttttgtaaatgtattaacacttgcattcataaagaatattattggccgggtggccgggcgtggtggctcacgcctgtaatcccagcactttgggaggccgaggctggcggatcacgaggtcaggagatcaagaccaacctggctaacacagtgaaacccatctctacagaaaatacaaaaaattagccaggcgtggtggcaggcgcctgcagtcccagctactcgggagtctgaggtaggagaatggcatgaacccgggaggcagagcttacagtgagccgagatcgcgccactgcactccagcctgggtgacagagcaggactccgtctcaaaaaaaaaaaaaaaaaaaaaaaaaaaaaaagaatattattgttccagcatact

SEQ ID NO: 1888890 - DNA, 4001 bp, Homo sapiens
atataaaacagttgaaaaaagatttcactatgagcaagagacagcaggattagacactcaagaacttcagataatgaaacaatctattagagaccataaaatttgcttttttttttttttttttttgaggcaggggctcactgtcacccagggtggagtgcagtggctcaatcatggctcactgcaggctcgactcccccagctcaagcaatcctcctgcctcatttttaaaaattttttttgtagagatgggggtctccttttgttgcccaggttggtcttgaactcctgggctcaagcaatccacccgccttggcttcccagagtgttgggattataggtgtgagccaccatgcctggcccataattagcatgtttaagatgattaaaagcttatgtttttaaacaatgaaaacataaaggaaaaaacagacactatgaaaaggaacatgcatgtatatttttaaaagaaactaaattgaacttctagaaataaaaaaatatagtcactgaggttgggcatggtggctcacacctatattcctggagcgttgggaagctgagatgggaagactgcttgaagccagaagtttgagacaagtgtgggcaacatagcaagaccctgtctctacaataaataaataaataaataaataaataaataaataaataaataaattagctgagtgtggtagtgtgagtctgtagtcctagctacttagaaagctgaggcaagaggacagcttgagcccaggagcttgaggctgcaatgagatgtgattgcaccactacacttcaagctgggcagcagagcaagactctgtctcaaaacaaaacaaaacaaaaaaaagaaatgtcaaaaaacaaaacacacacacacacacacacacacacacacacacacacacacacacacagagtcattgaaataaaaaatctcagtatataagttaaacagaaattattgaaccagagagtgatgtcaaagaattacccagaatgcagcacagagaaacaaagaaaagggaggtgaaaggatatggagaatagaataaaaaattctcatatataactaattggagctccagagggaaagcataaagacaatgtgggagaagaaatgttcaatgacataatagctaggaatttttcagaatttatgatacatagattcagaatcctcagcaggatagatttcataacttagtatgcatattgctctataaaaaggtaaaagtgagctgggagtgggggcttatgcctgtaatcccagcactttgggagactgaggcaggaggattgcttgagctcaggagttcaagatcagcttgggcaacatagggagaccttgtctctacaaacaacaaaacaaaacaaaacaacaaaaaactagtctggcgtggtggcctgtgcctgtggtcccagctactcaggaggctgaggtgggaggattgcttgagctcaggagtttgaggttgcagtaaggtataatcttgccactgcactccaacctgggtgacagagtgacaccctgttgctaaaagataagtaaataaacaaaaaggtaacagacaccattctaccaagtacattcatatcaatccagagcaaaattctagggacatcaacacagtagcagtgtgggtagaaacgagaaggatgctagaacatgctatatagtacttttcttgttctaaggcaaatgtatctatttcagttgttatgtccatataaaaattactctaaaatttagtggcttaaaataaccacaatcattttattatctctcatgatttctgtgggtcaggaattctggaagggcttaactgagtggttctggcttggagtctctcatgtggttacaattagactgtggctgaagcaatgtgggagaagcacattgagatgcccatccagccccccattgctacagccgcctgttgttgtcgagctgaaacaacagggaactgtagcaactgagggctggttgggcattcttctctcttcacacggtctcagggcctctctaattggcctctctacgtgggctatttgggctatttatagcatggcagcctcaggatagttggactttaaaaatggtggttcagggctccagcaccaatgatccaacaagcaaggtagaagttgtgtcgcctttttggacctagccttggaagtcattgagtgtcacttacaatgcattcaagttacactcaaatcacaagtctgcccagagttaaggcagaggatatagaccctccacccctaactctgtctggatgggaggagtgtcaatatgccattgtagaatacgattgtgggacatagaatagtattgacacgggggatattgctgggaccatctttggaaaatacgagctgccacagtataggtattgataagtttaacaaattgattgacggtataggtaatcaccagaagaataaacttagaatttgtagcttataaactagcagagagacatttgatattgtcaatagtctgaaaaaaagaaaacaaaaagaaattacagttagtagaaaatgggaaataagatggcaaaatgaattcctaatggtagttacaacaaatataagtgagccaaactcacctatcaggacccagactgctattgtctactttcagctattttatattattattattttttgctctgttgggcaggctggagtgcaatggtgcaatcacggctcactgtaccctcaaagcctcactgtacttcccaggctcaagttatcctcccacctcagcttcccaagtagctgtgtctacaggcacacaccaccacatctggctaatatttttttgtagagatggggtctcgctacattgtctatactgatctcaaactcctgggctcaaggaatcctcctacctaggcctctcaaaattgctgggattacaggcatgaaccaccatgtccttgatctattttgtattcttaaaactaaggaatacagaatagctgaaattaaatgaatggaaaaagatatatcaggaaatataaattaaataaagctggggcagcaattttaatatcagacaaaacagcattaaaaactacagatatcataaaggacaaaggggaatcatacatacggagaaaaggaataatagttctagaatatataacaattatgaaagcacatttattcatgtagatatatttgagacagagactcactctgtcacccaggttggagtgcggtggcgccatctcagctcactgcaacctatgcctcctgggctcaagccattctcccacctcagcctcctgaggagctgggactacaggtgtgcaccaccacacccagctaatttctttttgttgtattttttgtagagatggggttttgccatgttgtccaggctggtctccaacttttgagctcaagggatttgcctgcctcagcctccaaagcgctgggattacaggcgtgagccactgcacccggccagtaaaatatattgaatgcctataatattctaggcattgctctaggtttgaaggagatagcagagaccaaaacagacagaaatacttatcttcattagaatttacattctatacaattatcaacacaacctcaagtatttaaaacaacaatggacagaactagagaataaaatagataaaccaggaagtgtaggtggagatgttaagattcctgcctctgaaactgatgaataaaggagacaaaaaataaagctattgaagatttgcaccacacaattaataaactttaactagcggatatgaatagaatctgacattcaaccaacagattacatattctttttgaatgcacatggcacttttacaaaattagagaaaggaacttaccaaaaaggcaatctaaatacattccaaagactcaatgtcattcagggctgggaccctttttcccccccgagatggagttgcgctcttgttgcccaggctggagtgcaatggcgtgatctcggctcaccacaa

SEQ ID NO: 1888891 - DNA, 4001 bp, Homo sapiens
actaatatgaaccattagaaacatttctattaagtgaatcactagaaacatttccattaaaatcagaagcaagacaaggactcctgctagtactgctattatttaacattatcccaaaagatctagccaatacaatcaggtttgaaagcaaaacagcagttttgttctttaaaaggaaataaagttatcatatgggagctggtgtgattaatttcaaaaataatccaagagaagcaactgaaaaactattagaaataagaattaagcatagacacacaaaatcaaaaattttcctacctaccagtaataactagtttgaaaatataataaatatcataaactatcaactatccagggatgatcttgatgagaaatatatgagatacacacacatgcatgtgagcaactaaggaacataaaagaaaattaataaattaacatatcatgtcttttcctggatgacagactctgtgttgtgatgatgtcaatgaaattttaggtttaaagtagttccaatcaaaatcctggtaggattttgaggagaacctgacagaaacattctaagttcatttggacgaaaaaatggttgagactagctaagaaaaaagtgtgggtaatgcgctaggctgcagagaaagcaaaagaaatctggtttaccagctgttgcatatataagggtatgaaactgatggaaaacccaagagagagatcaatgaataatacaagctgaaaaaatcctagcatatagaagaatttatgtatgataaaagtataatagcaataatcataggaaaatagttatttgatgaatggtgctcaaataaatgactctctaggggaaaatataagctatactctacttcatactagtcacaaaatgaatttttgatggactgacaagttaaatatttttaaaactattttaaaactggattgttttaaatcccattctaaccttagaatgggaaatgtcttttcaagtgtaaaagcaatggaagaaattaccatgatctgaagggggtttagaaatcaatcaatttgaccaataaaaatgtaaaccaaatctattatcaaaagcatcattaaaaagttagaagacaatctggggaaaacatttactgcaaaagtgataaaagattaacactctttatatatgtaaaactcatacaaatcaacaagggaaacacctgtacatcaaaattcagcagagaccatgagctgacaatctacagaataaaatatgtaaatagctaatagatataagtaaccaccatattatgtatatgttccaaattacccataatgatatttgaaagaaaaaaaaactgacacaaaaggcaagggaaaaagaaaagagaagccaccagtgagatgtgagatgtgttgggggaactggggggtgagggggaggtctggttacactgcaacacagtcctttatcctatccctgaggttttcaaaaggaaatcttatttgttaataactggtgaggcaggctagttcatattttgggactgggtcggttccctaagatgaatgagacatgtaacgtttttccaagttagtagcaggatagtaagtgcaaaaccatccctaaggatatgttggttttattcaaaccgaagtgaggaaaagaattctgtggcttggatgtcaacggcactggtagatagctcttcaggaaagtaccattcacatcagccaaatgagtcaaaagaaaatggctcagattcaaagagatacagaacagcactgcatgtacagacacaatacaacaaacaactctgacgctgctatgtaagcattcacagagaagaggagccaagaacaggaaggataagaggccttcagaggcagaagactgccaggctggaattctaggagttggagatactagagatcaaaagaaaacgatgcccaaggttgctgtggtagtgggccaggtagaattttggcccttctaattttggctccacaccctggatgcatgctttccactgaggcagcccttccagcagcaggctatagcagcaggactgagcaagtcacatgtcaactgaggtacatataaatgaagcattccaggacccagacataacactgtggtactatcattccctcttgtcaagtgtaccatgggaaccatgtggagaatcctgtcccttctccaccccagtgggagttgccagcctttgccaagcacaggacatgcagcctgctgcacacgtcatacccctttcctatagtggctgggcatgcctccaggaagaacatgctggcccctggttagctgggaagctggtaaactcatgtgtggctggcacagcaaagggcccatagagaaagcaagagagataggtatatgatgctagtcaacaaacccaaagaacacacgggcataaagatcacaacagagctcatccatgtatactgagacatagggaattttaaataagatgctttcatacttttaacaatttaaacaacaatgggatagtagaaaatattcacttcagcaacacaaggtcatgattagcagcatgggctctggagtgagagaaactttggatcaaatcctgcatgtaccacatgcaagccacatccagtcatgtaaactttctgagccccagttctcttgaccaaactactattaatagtaccagtactactattagtacttcccacacagttttgttagaaggattaaataaaataatcaatgttaagtgtttcccaccatgcctaggcacacagtaaacctgattatgttatgatcactggcaagagaagaaagaataggaatcctgactctgccacgaagtaatcttagccaagttatataatatttcttggtcccctactgctctatttatagtatggataatgtattcgctatcccccaatactattttaaagattagatgagaaaatttaaagcaaagaacttttaaacagtaaagaacaatactaatgtaaagttaaagtattttaagggctctctactttttaaaatactgatttttaactcaacatggtatttccacacaatggaataatatgcacccattaaagatggtgtgtatcagccaccgtgttggctcattcctgtaatctcagcactttaggaggccgaggcaggagcatcacttgaggccagaagtttcagaccagtgtgaacaacataatgagactccgtctctacaaaaaaaaaaaaaaaaaaaaaaaaaaaattattagctaggcatagtggtgcacacctgtggtcccagctacttgagaggctgatgtggaaggatcacttaagtcaagcaggccaaggctgcagtgagccgtgaatgcaccactgcactccagcctgggcaacagagcaaaacgtggtctcgaaaacagaaaaaaatgttgtgtattataaaaagttggataactctccagggaattatgctaggtgatttttaaaaagtcagcctcaaaggtaatataaggtataactatatttacacaagattcctaaaatagcaaaattatagatatgaagaatagattcatggttgccagggatcagggatggggtttagatatgtagatggtgggtatggctataaaagaatgacagaagagatctgcatggtgacaggactgttctgctttatcagaccgtatcaatgaaaatatcctggcagtgatactgtactatagttttgccagaggttaccagtggaggaaattaggtaaaaggtacatgggatttctttgtgttttttcctatattattttttctacattattatacttaatagacaacaggtcttcaataagttaatgggaaatacatattattacaaaaaactatgcatggatttcaaattttcagcaccaaaataaactcgtgctaacttattctaacatgtctgaacaggatctagtttgaggcactaagaaggataagacaccagtttgaaaagagcccctaccagaacaacaataattctgctaaaattgaa

SEQ ID NO: 1888892 - DNA, 4001 bp, Homo sapiens
cctccaagtcattcctcacagtcactgaagccttttgtacctggcccagtgttcattctaagcctagcttctactataatcctgggttactataatagtcatgtaaatgatcatctgacatcctagcttcacaggtatcttaaccactccagttttgaaatctaacactccaaagtctactctgattacaggtcctatcactccagttttccaattactcagcactcaccttgttcacattaaagcctctttttggcccagactgaggccactcctgaccttacttccttccatgtccaggttggatttttttttttaaatgaagtctcactctgttacccaggctggagtacagtgggtgggatctcggctcactgcaacctccgcctcctgggttcaagtgattctcctgcctcagcctcctgagtagctgggattacaggcatgtgccaccacacctggctaatttttgcatttttagtagagacagggtttcaccatgttggtcaggctggtctcgaactcctgacctcaggtgacctgcccaccttggccttccaaagtgctgtgattacaggtgtgggccaccgcgcccggccttagtttggattcttaaatccatttctgtgtaactcgtctcttgctagctgtccacccctcaatcaatcaaggcaaccaaatactgctagtgacaatgccccaaaaccacttcatattttcctgagcttctaacccagtttcaaactcatttcttactttgatataccataagctctcctgttaatggtctcactccagcgttttggcctgaatattccttagggactctggttcatatttagccctctagtatttctgttccagcagcttttgtcttcatattcctgttcctggtcagcttcctccccatcatccacctctacaattacaaatcttcaccacccttgccaagtcctcttccttactcctatccctatctctgtgctccagcaaagaggtagttccacttacctaaggctaaccctccacctgcatgtgttctagagccataaatttcacccttccagcttcacctgcatcatctttcaagatcatcttccatctattatcatctctctctttctcacatctacaatgactcccttctcaattccttctgccccatggtctgcaaacacactcaatttttttctcatgttaaatgattcactgtaaggcgctggataagtggttttaacttgtattctggttgtcacatctacaatcagaaaagcttctcacaaaataatgattaagtacaataaataagataaagaaaatatgaacctggtgagaggtgaacaggacggtggaggattacctgtcagtgcaggtaaggggatagctggagtaaagttgaaaggggaaaactttaaatatcagccacaggagcaaacctcagactgtgaggatgaggtttctgttcagacaatgagcactctggtccaacccagggagcaattagcagcaattacagtagcagcaacagccatgcaacatcagcaagtagctaagaccaaaatgcaggcatagaaatgaagtatttcatagaaaacagagtagcaaatatgacatatgaggcacttgtgctgctactcccccttctccgaccctcagcagacatcactaaatagttataaatgtctttcacactgagataagacctggtttcagaatcttgttataaaacataatcagggcaggcattatcaatcaattggagatggtacttgagatgaagtgtatttgctatcattgcactacacagaaaagtcctcaacaaaagaattagaagacaggaataagcttcaggagtaagcattctgaagagagcttggacgttgttggcaactggcggggacaagctgagcccatggagatcacagagcaggcgcccaattaatgtctgttgatgattcattttttcattcaacaaacatttaatgaggcctacaatgtgcaccggattaggcactgtgaatacaaagatgagtaaggcactgtccttgcccttaaggaatttaaagtctggtagacgagagccatagacacggacaatgataatacaacctgctaagtgctaggacacttagcaggttgtattatatccatccgagtaggatttcttcagaggagcaccactccaggttgctgctggatccatgaagtcctcccaggcaccagggtctgctgttgtttttgtcacgtgctgggtgtcccaagatctaacaataatagctgtaattaatgtatagagtgcctatgacaaacactttacaaatatcttcatggaaactctgaaaattaatagttatattagaggaagaaactgaagttcaacaagtttaagtcacacagccagcaagcagttgaattaggtttcaaatccagttttgacaaagtctaatgcatttttctgttttcaggataacctttatgcaggtgtaatacaacaacttttcaacagctttctatttggaactaaaagcaaaggcaatagattagtcactagatcatggagtgattaatttggtttcccactctacctggcagagaaataaaaggtgaaatgacctcacacttacataccattgaaaaccttcaagtcagttactgtttttctttctcaaccctaacatcgtcactgatcattcaaaatataagtacctctagtcaaatctcttcttttaatacttgtcatagtcaacaccattatcagcaacaacagttgacacagcatttagctgtatattccaggcctgttctaagcaatttacataattagtccctttaagtactttttacccccatcattgaaaataaatattattcctattttacataagagaaaacagagtcctggggaagtgaagaatcatgctcaagaccacattgctaagtgtgagagcagatttgagcccaggctacctggtcccaagacccaaactctcactttacatagctctgctgcactgctcagggcctcctttcccaactcttgatggcaagttacacaaggccccctgaaaaacccagtcctacttacataaaatctcatcactaaccattctggtcatagaaagccattctctaaatcccaaatatcaatactcagagccttaattggaaaatttcccgaagaacattgagtttagaatatacctttgcaaaaagagaaaataaacactcgatatgtttaggtttttaattattgaattttttttttacttgcagatatagtcataaacgttttaagatccataagcaaactaaagcaattatgccaataatgactaaggccactgcttcctcaattgagtctttgatataaaagccttcacttttggttaattacaaaaaaaaaaaaaaaaaaaaaaaaaaaaaccgtgggagatatgtgacagtgagagtaggcctgctactgatgagaaggaccagcaacttagcaacaccataaaatgtctgctgcaattcaggtgtctaggtgtctccctgagaatcaacatttcatatacagctgttcccagaaaacaatcttgcacaatctgtacagtcaagttatgatctaaaaggagttaattgcaacattcatccaaagaatatgacagtatttttcatcaaggtctttttctataagtttttctataacttttcctataagttctattatgtctatacagtcatgtgctgcctaacaatgtttaggacaatgatgaacctcatatatgacagttgtcccacagttgtcccaccacaaaatcatatcatatttttactgtagcttttctatgtttatatatgtttaggtacacaaatacttaccattctgttataattgcctacagtattcagtacagtcatatgctgtacaggtttgtagcctaggtgtgtaataggctataccatttagagaggtttgtgttaatatactctatgaagttcacatgacaaaatcgcctaac

SEQ ID NO: 1888893 - DNA, 4001 bp, Homo sapiens
acctgggtcctgcaggcgtccactggaggaagccggatggcgcgggcttggtctttcaggaaggctggctggcaccgggcttccttctggctccagggggaaccgtacaggacggggagaaagggggaagctggtgagaggcagaaggggcgtcacaaggtggctctcccacccccaagtgcaaaggcaggcggatgcggggacctgttcgccgtttgagcctggagattgcgggcctgaggggccctgcgctggccggccggggcgaggcgggagcagaatggggatttctaggccgccgggtcgggctggtgggcggcgccccgggagcctgagggtccccgccggcccgggagggacccgagccgcccccgcgcactgccccggcgcaagggagtctgggagagccagcgtctcgggccgctgaacccgactcccagctctagacttcggaaccccggccccaccccaaactgggaaacttctaggggcccactcctggccccgggaagcccagttccaggcagcccattcagaccagaggagtttgggtgtcttttttttttctttaaggtgacaaaaagtgtgggaaagattccacacctccctccccacgcccgccaatggtcctttacctgtccatgtttcagattaaataattagctcaagagatttgcacagaaagcgaattagcccttttctagtcagactgttaagctctcaggcgggcaactcggaaccccgtttcctcaccgaaggctcaggaggccagcccagtgagggatggaggtggctttagagggcgacagttgtgcagcactcatgagcaacagtgcccaggacttttgaagtcacgaagggctcctgaaatcgacagctcaggtcccgcccctggggcgacaaaggagtcttgggggcgtgccgccgggttggaattgtggtagcagatttttgggggaggagggcgcaaagcagctagaaacgcacatcctcattctggaactatcccaaggcccccatgcttctcagcaggcctcgggctcagattgggcgggttggagccttccaccccaccttgggttcacccgcccgcaaggcctcgcgcctcacccgatccttctagagtgctggagctccacggagcctccctaaccccccagcagcggggaagggagggcgagggagtggggaagaggcccgttattttgatctttcctgaattcttaagtcccttccatacccaggacatgagcgcgtttaccaggaaccgcagagaggtgtaaagacttcttgcagctgctcacccttcctctccccttactccttttccagtcctccccaccccccagcatttcgtgggtggggactgaagataggttttcttcgttgtcctgtgggtggtattctgattgggaagggatttttttcaattgtttacattctacctgagcagggaaagggggtgccaaaatgaagcatcattcacgtccagtcacatatgcagagacggggcaaacgtttgatgcaatcttgggtctcgctgctcccggggccgacaccgcaggcgatggcctaagacttacctgctgggtaggcccgaacggcagtcccagacttaccctggcagcggaaacaataccccagagcaccgatcgctcactgcagaactgttcccgctgctagggcacggctgagcgcgggcaccgcgtctctcctcgactcgcaccgcctatgcgccccagcctagccaggaatactgccctccccggactacagccctgctgcgtggacaagggcgaggacccgccggaaacagagacgcgagcccccgcccacctacctgctcctgagccggcctcgcggggagcgggcacctggtggcaggaacacgcgtccggcagaccccaccttctaccttccccacgagggggtatagcagcgcctcacgttttgaaccatttagaacacttcaaaacatgaattgctgctgtatcccctcggagtcaatgaagggggatcgatctgggggtacctgcgggtgaataaagactggatgactgaaggaagccccgccccaccccctggcaaggaatagggcaaaacttatgactaggccacttcactccaagttaaggtacttcttataacttcaccatttgatttccaggagctgcaggtggagccgaaagtgtggctctcaattttttcccctgaggatgaatcttggaacaacgtagtgggtgaaaagcagagcgatgggggatacgaattagtgtggaagagaatctaattacttctgaaggtagacgaataaggttaagtagaggcaattggacatctggatcattcttgccagtttcaaagtcttggtgaaacttcttcctgctgcatattacaagtctcattcattgtccccattaaaaaaaaacaaaaaacgaaacaaaaaaacaacctttattggaaatggactcagatgactgaaagaaaataaccaaaacctcaccggtagcttcagctgattcttacactatcgttgcgacatatacatctatctttaaaagcattagatgtcctaactcactgctagtgtttttattcttaaacaccccagctgagttattttaaagagctccaaacaatgacagagaactttctgtagatgaaataccagtttacatattaaactggttactcaaacttatttataatttatacctatcaatgtcatctatcaaaacataaatcaaaaagtttaaatacttgatgtcaagtcgctccttcctgtttcaagcagctccacagaaactttcatgtcctgaaatggccggcactgcgcatactccttaatgattaactcattagataccactttttcctttttaaaatggacacatattagcaacaagtcacatgcatgccctctttttgtttgaatacaatattcaattaagcattaaaaaaaaaacccactctgaaatcctcaatcacaaacctaaaagttaaaacaacaaaatcagcactaactgtaatggttttgaaagttaaatacatttcagcacaagtaatagacatttaaattatccaactgtaagtatcttgttacacttacaaattaagtcggtttttcaaaaccagtacaatgaatgttaagtgtcctatttattagttaataaaatgtgcagagtatttaataagattaagtatcgaatttataacatccagactgagatccagtggtaacaaatacactatgtcatggtaaaaaaaaaaagtcattagtaacaataaccccattccctaaattgcgacaatcaagtatctctacattccatcttgttttggcaatgatatttacaaacaacttttacactgactttgggattaatggagaaaaatgtcgttgactgcccttaaaaagaaaaaaaaaacatgtttagcaaatgtacaattatcatgtaaaactccacaactttctcccaacattttgttccacacaaatatacgagccatcatgtcagaagttaaagtcatgcctaatttaacatttccttagttgactacttagaaaaacaaaagttcattcgaaacagcatcggtgtcaaaggcgaaggtcccttccagattgctcttggaatcaaattcatttatacctttcaccctaacccctttcatctctcccagtgatagtacaacgagttacacccctaaaaagccacctcgatcccctagtttacatatttccccttagactgaaatttacttacgaaaagagattacaaaggggcgtcttgtcacttcaggagagggtcattcactgatacaatagacaaagaatcgatactttcgagttgccatagccccacccccttctgaactgcaatgtgtttggctaaatgatttaagagccaaagaatacgcctcttcctctgttcatactctacaacgttttgtcttttaattttgcatatgccttcgtcccccacaccccaaacacacgatgt

SEQ ID NO: 1888894 - DNA, 4001 bp, Homo sapiens
acctgagacagggcaacttacaaaagaatgagatttaattggactcacagttccatgtggttgggaggcctctcaatcatggaggaaggcaaggaggagcaagtcacatattatgtagatggtgacaggcaaagagagagagagtttgtgcagagaacctcctattttttaaaatcatcagaacacttgagactaattcactatcatgaaaacagcacaggaaagatctgcaaccataattcaatcaccccccactgggttcctgccgtgacatgtgagaattgtgggagttacaattcaagatgagatttgggtggggacacatccaaagactaatcattctgcccctggcccttcccatatttcatgtacttacatttcaaaattaatcatgcctttccaacagtcccccaaacttttaactcatttcagcattaacttaaaagttcacagtccaaattgtcatcccagacaaggcaagtcccttgacaaatgaagtgaaaaaaataaaataaatgacagaagaaggagaaggagaaggaaaagaaagaagtgttaggaggagaaagaaagggaaaaaagacaaaaaaagaaagaaagaaaaaaaagaaagaaagaaaagaaaagaaagaaagaaaagaaaagaaaaaagaaaagaaaagaaaagaggtagaaagttaaaaggatgggagggagagaatgagggagggaaaaagggagggagtgtggaaggaaggaaaaaaaagacaatgaacaaaatatattttagaaaggaggagaatgtgtggcacatagtgggcattgaatatatacattttttattattattatactttaagttttagggtacatgtgcacaatgtgcaggttagttacatatgtatacatgtgccatgctggtgcgctgcacccattaactcgtcatttagcattaggtatatcgcctaatgctatccctcccccctccccccaccccacaacagtccccagagtgtgatgttcccctttctgtgtccatgtgttctcattgttcaattcccacctatgagtgagaatatgcggtgtttggttttttgttcttgtgatagtttactgagaatgatgatttccaatttcatccatgtccctacaaaggacatgaactcatcatgttttatggctgcacagtattccatggtgtatatgtgccacattttcttaatccagtctatcattgttggacgtttgggttgaatcaatagacagtgtcaaaagtgttcaaaattcaaaaacaaacaaatgaaaaaaactgggagagtgagagtagataaaatttattagagcctttggaaagataagttggaaagaaggctggaatggtgtggtaagggtagagtagggaagatggaaaaagaagcagtttggaggaagttaggaaggaaaggaatgatgagagagtaaaaatgatgcaaattatgtgttttatatatttgactgggaataaaaggtgataaactgatcaagaatttagaatgtcaggcagagatttttgttacccatttgtttgttatagacaaaggggtcctgagactgaggacataaaccaaaaaaaaggccatggaacaaaagatgaaagatacgagaaaagaaggggcaatggcttataagaatttgttacctaaacaatttatagacatagcagtgccttaatctaaagcaataaaacccaatggtggaatttcagaaagtatgataaccagtttgaaaaagtgggatacatttatacagcctcagattagaaatctacttctcctccttaaaccaattatatcagaggcaattgtcctggtttgattttcttttgaaaagactgcattgacttgaaatgtgtatgtgagggatgaacagggagcagggaaatttgcctttggaaattaagttcttactaaaatagtttttatctctcggaacagttaatcctgggaaaactggttctcaatggttctcaggactcaactgttttggggttaattcaggaaattctaaataccagagaggccaaattattgcttcaacttttgggaagaggtgccattcttgaacttgctagatggtgagctaaaatgaggaggatgatctgaagtctttttacatagacttccaatgtcatgctcttatgggcttgctctgtccagtaaatggcacagatctccatcctcagcgacctcagaagtgccaatgaagacttatcaaaagtatcacttcctgggcctgtgcatgtctcagatgcaggttcactgttgatcttacccatagatattagtcaatgtctgcattaatgacccttctgggtcaacctcaagagagccacagaacttgtttttcttctcttcaatcctgacctgacccctctattagccttactttaagccaggagagctcctactacagaaaaaggggatgagtcactgagggccaggaacaagactagatctctttagtgtcaaaggaagacataacatgccctgtgaagtctattgttttctaaaaatcttgtatcatcagataatatcttgaaagctaactttcctttcatagcagagagaaacattgagagtacccaggtataaaatgcttgaggggatggagactcaatttttcatgacttgagtattatgcattacatgcctgtatcaaaatatgtcttgtataccataactatatacaactactaagtacccacaaaaaataaaaataaaaataaaattgtagcatgaattgctaaaaaaaagaggttctataagatcctataccaattatatgccgaaactaacagggatattggggtcctccattttatgtggaggtaaactgatagtagatggctactgtgatttgcttaaggtcacaaaagatcataatcagtgcaaatcatttgactaatacactatccaagtaatacatttcattttgcctctggggttgcagacaagttccctgctgcaatgaaatctgtgtgggtatacataaactaataaatacattaatatatgatgtaatataaagtcacataatagtaagtttcatgaagaaagtaaaacaggataaggagatagtttgtgcagagtatgtatttgctttcattttggttgttcagaaaagtactctgaagaggtgacattttgagtagtggactggataatttatcagagccgtagtcttaagggaaaatgttgcagtcatagacaaagcaagggtaaaggccccgggatggaaagaggattagtatttggtttttattaacaatacttagtgacttctatagggtagagcactccaaatgtttcaatttaactcaatgaaattcaattaaccagttaagtagaatttagtgccgaataagtattaagaaattatttattattcaaaggcctaaaaacagaactaccattcaacccaacaatcccattacagggtatttacccaaaggaatataaatcattctattataaagacatatacatgcatatgttcattatagcactattcacaatagcaaagacatggaatcaagtaaatgctcaccaatgatagacttgataaagaaaatatggtacatatgcaccatggaatactatgcagccataaaaaagaatgagatcatgtcttttggaggaacatggatagagctgcaggctgttatccttagcaaactaatacaggaacagaaagccaaatactacgttctcacttataagtggcagctaaaagatgagaacacatggacacatagagggaaacaacacactctggggcctatcagagggtggaggatgggaggagggagaggatcagaaaaattagctaatgggtactaggcttaatacctgggtgatgaaataatctgtacaacaaaccccataacacaagtttacatatataacaaacctgcaaacatacccttgaaattaaaataaaagttaaatttttaagaaagtaattacttgtataaaacacttgtg

SEQ ID NO: 1888895 - DNA, 4001 bp, Homo sapiens
atttacttctgctaagataatggcctctactcatgcctgttcccatcttggtggatgagaagtcatttacagactctcttctctctcctttagaacgtgaaaaactcagtccaaatgataactctgcccagacatcagacaacaagaaataaatctgtatttgagagcagaactaaaccaaaacctacctgctaaagggaataattacctgttttgtctggattgcaggtcaaacttggtatagacaaacgatgtggtccaggaccggtagctggacttgcaggaacctcagcctgagccacagctggagttggagttggagctggagttggagccacagccggagctgaagttggtgcctgagtctgagcaggagcagaagcctgagccgctgctggagctggaaccggaaccagagccggagctggaactggagccggagcagctggagcaacctgaacagcagcagcagcagcagcagaaggagcaacggcagcagctgaggcaacagaggcagcagctggaatctgaccagcagcagctggagaaacagcagcagcagtagcagcggcagtggctggagacggggcagcagcagcagctggagcagcagcagcagcaacagcaactggagcagcagctaccatggtggtggtgatggtggcagcagtggcagtgatggcggcagcagtggcggcagcagcaactggagcaggaacagagatgggagcaacagctgcagttttgttcgattccgtcccacgttcagtttgggtactgcagtctcggctgcctgtcttggagtgagccgagagcaggggagtcgagggtggcacaggcgagggtgtggaagggacatattcagcacggtagtctccacccaggagaatgcctacaaatgaaagaggaacagatgttagaaaacaataggtgattcaaatccagacatctaattacctgttctcccattcaaatttcagaagaaatttatttatttttaaataagtaaatattatttaaatatttaaaatattattatttttaaatattaaataatttagaatagtctaagttatttatttttgcctccagggaacccagaaatcagtgtgtgaggctcctccaaccatggctaaaagtttcctacagacttcgaggatcccttctggtcctcatccatcacctggcacaacatattaagcctgtaagtgacctgggtatctgttttgatttatttttccaatggtgattgggttccaccaagttgtcagaatgctcctactcggctccacttataaaccattaccacacgttaccagggagcaagaaaggatctggggaagaagtctgttgacacagattgagtgtggtaataattgtgtgatctgaggttctcaccatgaccatagtccccaaaatgcttattctaaccaaaagatattacaagtatcagaggaccaagaaaggaattaacagcaacaaaaagggttaaaataaaaatatatataagcttccttcctcgggctctaaaaatgtgcctcgtggtatccacaatatgtctggggttttgattagaggggagggaatggacaggaacggaatgaaaaagtacattctgttctcatctcacaacactgtgggaacaaaacctgctacccaaacgatttagtgtaactaaaactctgggttctcctattatagaggaggaaggaacacagaaatgccggaattttgacatttggaacgacacaaaggccacatgggctttggagaaagataaaggtgccacatggcaaaggccaaatctgagaatagtttagaggaaattagagttatcttccttgacacccaaatgaaactcaagattcttgtcctctaagccttggcctcaatcggtattctcaccgggagacttcaaagtgtggaggagctccagaatgtggaactagggtctcaggaggaaaaaaaaactccaaaaccctggtacaccttcctctctagaacctggaccatcatcccttttccttaagcatgggtgcttatctcagggctctctttgaacacgtgactataatcttccttatttactgtcattacctaggctccccttccagctcttgtcgtctcgcttttcttccatgatgggggagccagtcagggtggatgagtgggagagcaagcctgatccagcattggaaatggacatcagagacttcgctggccgcatgcacgacagctgctctgtcttgctcggctccttccgggaacgctgctggagtactttgatcatggcatccttctcaataatctgggcatggagggtcttaatcctaggagccaaaggcaaagaacatataaagaccttgttgtgggctgggcgcggtggcttacgcctgtaatcccagcattttgggaggccgaggtgggcggattgcaaagtcaggagttcgagaccagcctggccaacatggtgaaaccctgtctctactaaaaacacaaaaattagctgggtgtggtggcaggcgcctatagtcccagctactcgggaggccgaggcaggagaatcactttaacttgggaggcggaggttgcagtgagccaagatagtgccactgcactccagcctgggtgacagagcaagactgactccatctcaaaaaaaaaaaaaaaaaaaaaaaaaccttcttgctacctccacattttggtctaattgactacatgactacgtggagctcccattatcttttcgactaaaggctgatctagttagttctgagttggaaaacaagggatggtgtgctacagtttttaaaacatgttttttcttttttctgcacacccaaatggatacagcagagcatccaggagctgttgcttaaatcttagtaagtcacaataaagtaccagtgaaaaaaaaggctgaatatgagagaatgaactgatgtactaggtgctgtagtgaagaatctcagtcaatggaaacaatttactcagtgagaagatgagatctatgaatgagcgacaacctgcaggtagtaagtaaatgatcatgtgtttataaaaggaatcaggtatcctacctccactttgagtagatgttctttttgttgttgttgttgagacggactctagctctgtcgctcaggctggagtgcaatggcatgatcttgactcattgcaacctctgcctcccaagctcaagcaattctcctgcctcggcctcctgagtagctgggactacaggtgcccgccaccacacctggctaatttttgtatttttagtagagacagggtttcaccatattggccaggctggtcttgaactcctgacctcaggtgatccgcccgccttggccttccaaagtgctgggattacaggtgtgagccattgtgcccggccgagcagatgttcttttactcttttattaagcaatctgctgtatcacagggttgtggtgcagtgctagaaagaatactccagagtgcaaatgccaacaattcagctcaggcagagggaagaggaaaagcaattaggaaggccaaagggacagaaaccctacctggaattccatgtttagtggagattatcaaggtaaaggtcattgcatctcacacctttaagtgacaggctggcaggggtgatggtggagcggggaggctgcatgatcagatttcctagctgtgaataaagatcctatgtggtctctatatcaatgtctcagattcctcagggtccagaacaacattttacctgccctccatgtcaaggcaacgcttattggccatcaagatttcttcctcctctttctggatgcgagcttctagagctgtgtcatagctggtgttaggagagtgactgatgactgttgtgtccctggggaggaaaatggaagtgatgagatgggagcatagcaagatcaatgaatgttatctttcttctaagtcaaggaaggcttttctggaaagtcctaagctgaaatcaagcacatttggaacagatg

SEQ ID NO: 1888896 - DNA, 4001 bp, Homo sapiens
tgctttaaccactgtgcctcatggcttatttgcaggccacacctggttcctggctctagagcactgggtctcaaatttagtgcatgacagagcagccaggagtattaagaaattgcagctttctaggccttcccctagagagtgtgacttggcaggtctgtacggggccctggaatctgcatgtttcccaagtgtctcaggtgattctaatgcaagcagcccaggaatcccttctagagaaatcctgctgttaactcagccctgcccctagcccttggcaatttaaggatgtctaggtctgtcatccagtgactcctgctgagtttgctcttgagggtttatatactagtccctgctgggactttataaacttgttctagtgtataagatcttgctttgaccctcagactaaaccctaccctctatcacagttctggtgatggggttcccagcccaatgcctgataataacctgaccagctccctgaaaacagggcaaccagaggcctgactatggccaccttcctgctgccaaactcatcctgatggcttgcctgagtagggttgcctatttatcaaaaatacaggatgctcagttaaatttgaatcccaagtacattcttagtataagtatattccatgcaatattcggacatacttatactcaaaattgtccactgtttatcagaaatttaaatttagccaggggccgtgtattttatctggcagctctatggctgcggaccacctgtagctgaccctaaatgagccaaatatgaggacttggcattggttggtaatgggattttctttctccccttcccccgagcaaggggctcagtcaaccctggggagcaggaactattgattcaggattggaggggcccagttctggctgtcaacttgccatctgcctctggcggatactgatttgatatatttcctactcgctttagccagcctcctctgtttgctcaggagattcataacccattcttagaaacatgcctgtctcctgtttgcctgagtagtacgctactgtagaatcgcccctgtacgtagcagtttgcaaattgacccctggcatttgaggaatgtacatactgttttgaattgggcttatatttgaaacgactgtgtgttttgtatccatgccatcttgtaggtatggtgagtctctctccgaacctcaattgcagctgccctggaagacttagcttttgggggtccttcccaggactcccccaaatcaattttgtatattccatgtaacatatcttctgagtctgaccattataaagctacctccaaatgcagacaacatctatctagccattttcacatgatgttataacacacgagcagtcagaaaaaaaaagtatacttttattgaaatagctttgtcacctaagccagagggttgggactcccttattacatctgtatccattctagtcagagggaggcccatgagtgaaaggtggggaattgtgtgtacaggaaccacctcctcaagctaagtattactggaatggagaggaaagtgtgtggagggcccaggggggagatgtgtctgtctggaatattaaagaagcaaaaggacaaactgcaataaaacacgctagcaggaccattcatttggctgtagagtcaccaaaggaaatcactggaactttctgtaagtggatgcaaatgaggaaacaatcccacactagcctgggtcgaaaagactccaagacttcacctatttttttcattgctgaggccagcgccaatttgtaagacttaaagccccagggaattagattgaacagatattgtaattccagtgacacagggcccacaatgagcccccatttggaacaaacaccaaaaacacttcctgagtctcccctctggcctgacctgcaaggctctgatctgaggagcagctgatgaagtaggcgtcaaaaagaagcccccttcctctcctgcatcctcagataattgcctgctgacaattagctagtagttctggtgcttctatcctctctgaaacagatagttcatagttaagttccactttctagtcaaaattgccttacgtcgccagtatgcttctcactgtctgctttctgttctcactgtgtgatgaagacatacccgagactgggaggataaagaggtttaattggacttacagttccacatggctggggaggcctcagaatcatggtgggtggtgaaatccacttctcacatgatgacagcaagagaaaaatgggaagagaaaaatgaggaagatgtaaaggcggaaacccctgataaaaccatcagatctcgtgagacttattcactaccatgagaacagtatgggggaaatcgcccccatgattccaattatctcccaccaggtccctcccacaacacatgggaattatgggagtacaattcaagatgagatttgggtggggacacagagtcaaaccatatcactgtgacacattacattttctaaaatgaaaaaacaaacaaaaaaataaaaaaacacattcttatgactttccttccacttggagatgtcctttggctttcacagaaaactcaagtagtttgattggaaaggattttgaggtgatcaccaaaccctttccttcactccttccttgctgtcacattctactgcattggagaaggaaggcttctggatctccagagaggcagaattcagctgccctccatgtgtgaggggtagtaatgaccttagcttctttctttctttctttctctttctttctctctttctttttctttctttctttctttttctttctttcttctttctttttcttttttttttttagatggagtctctctctgtcgcccaggctggagggcagtggcgacatcttggttcactgcaacctccacctcccgggttcaagtgattctcctgcctcagcctccagagcagctgggattacaggcgtgtgccaccacacccagttaatttttgtttttttagtagagacggtgtttcaccatgttggttaggctggtctcgaactcctgacctcgagatctgcccacctcagcctccccaagtgctgggattacaggcttgagccaccgcgcctggccagctgctctttttcaatagcatctgtgtgttacacacagtgcctcatgtcatttattcctcacagaaacccagtaagatcattggcattgttatgagggaacagaggctctgagagaagaagccatctttcctatcaggcacgtcttctctttcctcaaacttcctccctctcgtgtccactcccagtgaggatagacccaggagctgggcttgtggtcagcatgatagggggatggtttactctgggatgtaactgactagctgaatgctttccctgggcttaagctggcagagaaagccccaggatctcaggtcttatccaggtcccggaaggtagtcttagctccacccagttttctttgcaccagctgccctggtgtgaaacgctgaggtcctggtagtgctgctgtgcctcaaaagctgagccaaaaggctggctgggcacgcatgccttcctctactgcaagcactgctccaccaactcccacgtggagacgggtgagggaacttggaacatacccttaagcatccctttgaccttgcctttgagtaggagtcagttggtcaaatatctgggaatatttgggctgtttttcttgttgccaagacaaccaagcctctcttttcaggctggctaccaacagctattcttgggctgctttgggtagtgctttttgttactgctcttaagatattctttcctaccttcaggtcatgaagatactctcctatactatcttgtaaaagctttctagttttttctttcacattaggtctctagtctatctgggcttgatttttttatgtactgtgtgaagtaggactctaatttttatacatgtatttgtgtcttcttaagcaatattttgtagtttttagga

SEQ ID NO: 1888897 - DNA, 4001 bp, Homo sapiens
aaggataaaatctgtccatgaaattattgattacaaaataaactcatgactcaatctcccactcaggtttattcaaaatgttgcaagcttgaaagatcaatccttgcaatgtaaacttgcagactttgtggtgagcaaatattacatctttctatgggcacatctgggaattgcctttgccagagagagctgtgttgttttcttggccctgcactcactctggctaaaggttagttgttaccacctgctgcctctggccaggcttacttgagactgggcttcactaaagttgagggttgggggtgggagagggaggaggaggcaggggaaaatgggccaacgagctgactcagtcacacgttatttttcttgccatcatgtcctgcagctattccagtaaacctcttaatggttgccatttgtaaagacatggaaccctttagctttatctggcatcctaattctcttaatcactgttgcctcttttggcttatggcacataaatgtcccgaattgtggaatttcctatggcttagcacaagacaggaaggatagggctcttacatatgtgaaagaatgaggggaaacaatcataattaataacatttataaactactgactgccaagaattgattcatattatcctcacaacaaccctacgaagtagaaattattattatccccattctgcagatgagcatatcgaggctaatgtaacacagtccataagctatagacgtgggatttgaatccaggtatacgttatgcctgagcccatgcttttaatcacccagctatatactgccttctgaaagagtgtccattgaagtctcatttgttgaactatgctagagttgctccaggtaaagaagtcccaccagcatgaatgcaaacatcagaaactctagcttttttttttttgtatgctgccaccataatatattgcatagtttcttgtgcaatacatgtgttagttcattagaaggagttgggaggaacagattttcctctaagaaacagttggttaactcctcttttcacaggaactaaacatttctggtgtttaggagcaatgtagaagcaaaagatttacttcactgtgtgggatcttaagtcatgaatcaggattagaagctactcctaatttggggggaaatgtttataaattggaaagaccaatgttggtgaaagctgaaatagactagagatggaattcctctcctaaagactcaccatttgcatgggaggggggttttggaatggaatactttccaagggagctggtagacagaactattttagtgggtactgctgtagaagctacaactacatggttgctgaggggaacttaagctaaaagagcaaaattgggtgatactcacggggaaagccttccttgaagaggtgacttgagatggatattgaagaaagcaaacaaaaataaaggaaataaatgggaaatcaggataaggggaatggtatatgtgaagacttagagctgtgtgtttgagattagtttggcatatttgactggattgtgtcaggcctctgagcccaggccaggccatcgcatcccctgtgacttgcacgtatacatccagatggcctgaagtaactgaagatccacaaaagaagtaaaaacagccttaactgatgacattccaccattgtgattggttcctgccccaccctaactgatcaatgtactttgtagtctcccccacccttaagaaggttctttgtaattctccccacccttgagaatgtactttgtgagatccacccctgcccaccagagaacaaccccctttgactgtaattttccattaccttcccaaatcctataaaatggccccacccctatctcccttcgctgactctcttttcggactcagcccacctgcacccaggtgaaataaacagccatgttgctcacacaaagcttgtttggtggtctcttcacacggacacgcatgaaatttggtgccgtgactcggatcgggggacctcccttgggagatcaatcccctgtcctcctgctctttgctccgtgagaaagatccacctacgacctcaggtcctcagaccgaccagcccaagaaacatctcaccaatttcaaatccggtaagcggcctctttttactctcttctccaacctccctcactatccctcaacctctttctcctttcaatcttggcgccacacttcaatctctcccttctcttaatttcaattcctttcattttctggtagagacaaaagagacatgttttatccgtgaacccaaaactccggcaccggtcacggactgggaaggcagccttcccttggtgtttaatcattgcagggacacctctctgattatacactcacgtttcaagggtgtcagaccacgcagggacgcctgccttggtccttcacccttagcggcaagtcccgctttcctggggcaggggcaagtaccccaaccccttctccttcacccttagcggcaagtcccactttcctagggggcaagaaacccccaattgcttatttccacaccccaacctcttatctctgcgccccaatcccttatttctgcaccctgacctcttatctctgtgccccaatcccttatttccgtgacccaaccccttctctgcttttctgaagggcaagaaccccccaccccttctccgtgtctctactcttttttctgggcttgcctccttcactatgggtaagcttccaccttccattcctccttcttctcccttagcctatgttctcaaaaacttaaaacctcttcaactcacacctgacctaaaacctaaatgccttattttcttctgcaatgccgcttgactccaatacaagctcgacagtagttccaaatagccagaaaacggcactttcaatttttccatcctacaagatctaaataattcttgtcgtaaaatgggcaaatggtctgaggtgcctgaagtccaggcattcctttacacatcagtcccttcctagtctctgtgcccagtgcaactcatcccaaatcttccttctttccctcccacctgtcccctcagtcccaaccccaagcgttgctgagtctttctaatcttccttttctacagacccatctgacctctcccctcctcgccagcccaagctaggtcccaattcttcctcagcctctgctcctccaccctgtaatctttttatcgcctcccctcctcacacctggtcgggcttacagtttcgttccgtgactagccctcccccacctgcccagcaatttactcttaaaaaggtggctggagccaaaggcatagtcaaggttaatgctcctttttctttatcccaaatcagatagcgtttaggctcttttttatcaaatataaaaacgcagcccagttcatgacttgttcggcagcaaccctgagacgctttacagccctagaccctaaaaggtcaaaaggccatcttattctcaatatacattttattacccaatctgctcccgacattaaataaaactccaaaaattaaattccggccctcaaaccccacaacaggatttaattaacctcgccttcaaggtgtacaataatagaaaaaagttgcaattccttgcctccactgtgagacaaaccccagccacatctccagcacacaagaacttccaaacgcctgaaccgcagcggccaggcgttcctccagaacctccttccccaggagcttgctacaagtgccagaaatctgaccaccaggccaaggaatgcctgcagcccaggattcctcctaagccgtgtcccatctgtgcgggaccccactggaaattggactgttcagctcacctggcagccactctcagagcccctggaactctggcccaaggctctctgactgactccttctcggcttagtggctgaagactgatgctgcctgatcgcctcggaagccccgtagaccatcacagacgccgagcttccggtaactcacagtggaaggtaagccc

SEQ ID NO: 1888898 - DNA, 4001 bp, Homo sapiens
ttatagataaaaacaattccacaattttagaaacatatttcccaatatcacaaccctttcttaattggaaatgacccaaatattaagtgagcattaaaataagtttaagattttaatttacaaaaaaagtttatctaaaacatttatcccattcactgtacttaatttttacttttaaggagggagacacaagacatcaatcggcatatgtaaaatgaacatcacattggtctggaaaggcaggagaacttgaggcaggttgggggattgggggctttcagattcaggtagttggaagacaaaaagttgcattcttttgagtttctgattagcctttccaaaggaagcaatcagatctgcactcatctcagtgagactttgaatagaatgggaggcaggcttgccccaagcaactcccagcttgaattaacaatgacattttaaaatatctagcgaagacaaacataaaattcagacaaaatgtatgctgacaattctaaaggcatttctatttttattccaccaataattttaaagctgtcttgtttagtaaagttatactttaagtcatgtgaacttgaaaatagcttagacttacttaatttatgagtgctcatttacttacaagccaatttggtagacacaacatataacaataagtgtacatacaaataaacacatctaaacatatatatacacacataaacaaagatctaatagcttgggaccttagccatgagacagcaatacaatacttcgccagttttactttgccccaatagataatccattgaaggctgtgaatcaaaatttcagataaagcagtctccatggcagtttgattttttttctttcttttttttttttttggagacagagtctcgctctgttgcccagaatggagtgtagtggcgcgatctctgctcactgcaacctccgcctcccgggttcaagtgattttcctacctctgcctcctgagtagctggattacaggcgtgtgccaccgtgcccaggtaattttttgtatttttttagtagagatggggtttcactatgttggtcaggctggtctcgaactcctgacctcgtgatctgcctgcctcagcctcccaaagtgctgggattacaggtgtggacgccacgcccagcaggtagtttgatttttaaaggccaaacctccccagactccaaaaagcactgaggccaaacagtaccaaaggagggcatcacatattaaacaggccttctgcttagaacagcagcacaaaagcctggatacatgcaacaccatcccactttctgattagacagcaaagttcagattctgaacaattttggagccaagcatcattgcaagtgagagagaaaattctaaagagggcttaatactagacctcagaacctctgcagagtgtcgctttgggcaggttgaggtctgcaggattacctggagcattctccagatgtctctgcccttaggtgggcaccggtgccactttgcatgtgttccctccggagcctactgtcaggcctctgagcccaagccaagccattgcatcccctgtgacttgcacgtatacgcccagatggcctgaagtaactgaagaatcacaaaggaagtgaatatgccctgccccaccttaactgatgatattccaccacaaaagaagtgtaaatggccggtccttgctttaagtgatgacattaccttgtgaaagtccttttcctggctcatcctggctcaaaaagcacccccactgagcaccttgtgacccccccactcctgcccgccagagaacaaaccccctttgactgtaattttcctttacctacccaaatcctataaaacggccccacccttatctccctttgctgactctctttttggactcagcccacctgcacccaggtgaaataaacagccatgttgctcacacaaagcctgtttggtggtctcttcacacggacacgcatgaaatttggtgccgtgactcggatcgggggacctcccttgggagatcaatcccctgtcctcctgttctttgctccgtgagaaagatccacctaggacctcaggtcctcagaccgaccagcccaagaaacatctcaccaatttcaaatccggtaagcagcctctttttactctcttctccaacctccttcactatccctcaacctctttctcctttcaatcttggtgccacacttcaagctctctcttctcttaatttcaattcctttcattttctggtagagacaaaggagacatgttttatccatggacccaaaactccggcgccggtcacggactgggaaggcagccttcccttggtgtttaatcattgcagggatgcctctctgattatacactcacgtttcaagggtgtcagaccacgcagggaggcctgccttgctccttcacccttagcagcaagtcccgcttttctggggaaggggcaaatacccctcaaccccttctctccttgtctctaacccttctctgcttttctggggcaggggcaaatacccctcaaccccctctccttcacccttagcggcaagtcccactttcctggggcaggggcaagtacccctcaaccccttctccttcacccttagcggcaagtcctgctttcctaggcggcaagaaccccccaattgcttatttccacaccccaacctcttatctctgtgccccaatcccttatttccacgccccaatctcttatctctgtgccccaatcccttatttctgtgccccaactccttctctgcttttctggagggcaagaaccccccaccccttctccgtgtctctactcttttctctgggcttgcctccttcactatgggtaaccttccaccttccattcctccttcttctcccttagcctgtgttctcaaaaacttaaaacctcttcaactcacacctgacctaaaacctaaatgccttattttcttctgcaatgccacttgaccccaatacaaactcgacagtagttctaaatagccagaaaatggcactttgaatttttccatcctgcaaaatctaaataattcttgtcataaaataggcaaacggtctgaggtgcctgacgtccaggcattcttttacacatcagtcccttcctagtctctgtgcccagtgcaactcatcccaaatcttccttctttccctcccacctgtcccctcagtaccaaccccaagcgtcgctgagtctttctaatctttcttttctacagacccatctgacctctcccttcctccccaggctgctccttgccaggctgagctaggtcccaattcttcctcaggctcctctcctccaccctataatctttttatcacctcccctcctcacacctggtccagcttacagtttcattccgtgactagccctcccccacctgcccagcaatttactcttaaaaaggtggctggagccaaagccatagtcaaggttaatgctcctttttctttatcccaaatcagatagtgtttaggctttttcatcaaatataaaaacccagcccagttcatggctcgtttggcagcaaccctgagaagctttacagccctagaccctaaaaggtcaaaaggccgtcttattctcaatatacattacccaatctgctcccgacattaaataaaactccaaaaattggaatctggccctcaaacacaacaggacttaattaacctcaccttcaaggtgtacaataacataaaaaagttgcaactccttgcctccactgtgagacaaaccccagccacatatccagcacacaagaacttccaaacgcctgaaccgcagtggccaggcattcctccagaacctcctcccctaggagcttgctacacgtgccagaaatctggacactgggccaaggaatgcccgcagtccgggattcctcctaagctgcgtcccatctgtgtgggaccccactgaaaatcggactgttcaactcacctggcagccactcccagagcccctggaac

SEQ ID NO: 1888899 - DNA, 4001 bp, Homo sapiens
acctgaaaacaaataaaacagatatcttgaaaatgttcaaatatttgcaaattaaataacacaattctaaataattcatgtttcaaaaggaaaaggcaaatgaagttaaaaaataatttgaagtaaattaaaatgaaaacaaaacgtactaaaatttgtctgatggtgctaaagtagtactcaaagggaattttctaacgttaatggtttattttagaaaagaaaactcaaatccatgatctaagcttccaaaattaaagtgctaggcaaaaaaggaaaaatgaaatccaagtaccagaagaaataaataaatataaaagcagaaatcaataaaatttaggcaatactataatattgagaattcaatgaaataaaatgctgcactttattgggaatagatcaataaaactgataaacctctcaacagatcgactaagaattaaaggtagaagccacacattatcaattatcagtgatcaaagaggtgatatctctatagactctacagaaattacatgggtattatacataacagtatgctcatacatttgcatggaactttggggtccttgtatatgaaaccatacgttttttgaactattcactaagcccctaattccaatggagagtctgtgctgctgaggaaaataaagagatataaatgctctaaatcccaaaccctaaatcagcctgtttttcagcctaagattggcccacttaccatccactgtgaagaatgccaaagccaggatggttgactagaaactcatcccagattcgaatgcatagcaaatcaacattttttagaaccccaaagtctttggagatggcctgtttaacttgaccctaatttaaagtcagtggaaaactcgatagcatcccaggatacaactcaagtttgtgctgttgacataattgattctctgccagtagcatctcctacagattagtcattttcatataaagatccatagtgaaatttcagcagtctaaagtgaaaatggaaaattatgtataacagccaattatttataaagctaaatatattccatttaaatggcttatttctattctgagattatatccttcctgtaccaatccagaagtagaagggccgctaggattggctggattttgcattacttttaatcctgccctatgtttttaagagctgggccctgctctcgatatttcctatcaccttgcttttgacagaattccctggatatgattggatactgcagctgacagaaattatatctctgaaatatttgtagggacatgccgctaactttctccctttgcaatcacacctacttccttgtaacttgattcttgcctcaaagtgtaatagactgtttctgctcaatttagaattgttagttcttctctggaatactcctcccaaatatccttcttctgactttgagacatattttttaatttactatcttaccttgaccctcagacttgaaattctaggctgcttttcaggatataatctttgtttttttctataattaagaattagattctctctacctctaggtatttggctctggctagcctaaataaatatgcccaactattgaatctccctaattcggtgtagctctgagagtaggtggcacaattctggaggcattatctgtgtggccagtgttgttgctaatatggtttaatgcagatctactggccctgagcttaaagatccactcacatacccactgcctcttatgagccaaggtcatagcagtcagtactctaccctcctctaaatacatttgtcagaatgcctttctagtgatgcagctctagcatctgtgtttccatgacacgcagattttattgttcttcagtgaagcagagtggtgtttctggtgtctgtcatgacgaagtgggctgggagatgggacatcctacatatgcaaccagccagccccctcttatatgaaatagggatttcctggcagcactatgcaggatgttcaacctcccggcccatgcgaagatgaactgctgcaccatgaagttccagtttctgctgaaaggcttgacattgattgatgcttctctgtgtaaatgctgtcatgaaagcctcttctggcctggtggtcttttcctgatgaactggttgtgattacaagtagcctaaatgatccaaaagcttgtcaaccaataactcatctcttacttgaacttaaaccccttatctcaaaaatatcatttcccaccaattaaataaaaggagaaaaatctcctgacacttataggtaccaagatattttctgggttacaaacactgcccagctccacttccaatttagtcaacctgtattacctgcttctaaatcatataaacagacttcttacatgacagtagaggaattctatggctggaagaccccagatgggctgcacacactttttaccaaagctatcccagatgtatcacaatttagttgccaaaaacacaggcctagaagcatcatgagatcctaggctctgcggctctgcaatgtgaccaccacattacaaaataaagaaacttagctaaggacaaattcaatcagccctgttcatttagcttagcaaattctgcattatgtacttgctcatctcaagtctctcagcaccaagaactttcctatctgcaaaattttgtgagcctacaatttcatcaggacctgacacctgagaggttcaatacaatctacaatatcttcaaacaaacaaacaaacaaaccctagattttctcttctgagatagtctcacaacccatctttcctggaattttttatgtaatttccaattgagctacctcctttcaagctgatctcaaaactttacctatgagtgcatggaaaagacttccatttctctgttgatattttcttcagagttgaatggaagacaactttattaaatgattctctatttcttctattgtatggatcttgagtggtggaaaagggataaggacaaagaagcaatcatgaattcttgcctaagcaagaatataataatgaggacttctgctgatttgtactatgtgactctatcctctcagtagtggggaaaaagaaatgagtaggtaagagaataagatataattgtggctttaactttatgactctagattttctggtttggattttggctttactttatcacattaagcatacctttaatctggtattttatttacaagagaacaaaagtaaaatctctttgactatgtcattaatgtagagtgatttctaagtcaatagaaaaaaatataattttttaaaagtatatttaatcttgccaggcatgttggctcacgcctataatcccagcactttaggaggccaaagtgggtggatcacctgaggtcaggagttcgagaccagcctggccaacatggcgaaaccccatctctactaaaaatacaaaaattatctaggggtgatgttgcgtgcctgtaagcccagctacttgggaggctgaggtaggagtaagccaaaatcgtgccactgcactccagcctcagagacagagtgagactccatctcaaaaaaaaaaaaaaaaaaggatatttagtctttataatttgtttagtcttgatgacactagcaggattaacatttgctaactctcctaggtgcttcagtgataaacaacatggccatgctatcattctaatgttcactaaaaactaaagtaaactgtaaaatatatttttgaatactgctttttatagtaatcttcttaataactaatgacatattcagaaatattaaaatgcagatttctttaaaattaaatatacatctaaataatgtatggcttattcatggccaagtaattaatcattaaaagttgtaggccagtgtttctaactttcgctgtgactcactaatttaccatggaatttgatgggatacattattttctacaatatattttaagccaaagatataggatataacctataaaatcaatttcctttttatct

SEQ ID NO: 1888900 - DNA, 4001 bp, Homo sapiens
attttgtccagcagggactagagtgagccctaggggaaaggaggccacttagatggttgcttagcaaagcagattctctgtgtggtctgacctggctcagacgaaggtcaaagcctcagctgatccctgctctgtacccagtggcagacaaagtattcgtgtgttcaaggcctctctggctcagtatcaccttaacctccgcttctcccctacccgctcctctatccacaagtaactagcacagaggtaggcacccagtaaatatgctctgattgacagagtgtggcagataaaaatgcttatgctccttaaagaggagtacacacatttaagcatggggaccagtttggttgtatgattgtatgttcttaagcagaacaagggcagggcatcagaaaattggaggaatggtctcctgtatctttgtaaatggatatgtgtatatatatttgcctcacaactcagcttctcctttaaggaatatgatggatctattttgaaagtaatgtcggccgggcacggtggctcacgcctgtaatcccagcactttgggaggccaaggtgggcagatcacgagatcaggagatcgagaccatcctggctaacacagtgaaacccgtctctactaaaaatacaaaaaaattagccaggcaaggtggcgggcacctgtaatcccagctacttgggaggctgaggcaggagaatcgcttgaacctgggaggcagagcttgcagtgagctgagatcgcaccattgcactccagccagggtgacagagccagccagactccgtctcaaaaaaaaaaaaaaaaaaaagaaagtaatgtctagtcatatggacttgctagagtgccaaatatgtccttggtgggggaacagtttcccaaaatgctactaaaaagataggaaggaacttagatcctcctgtaatgtgtctctgtccaaatcagtgccactgaggaacgctaaaaccttggtaggtgcccttcagaccatgggccaggtacgtgaccaaatggttccatctcttaccagaacaaggatcgcctaaattgaggtgtcacatgtgttctgcaacaccagagttactatggagctcagctgaatttgcgggaaaatgcagggggggctttacccgcatctgcaagaagttggctgagtggaaataacctaaataaggtgttttcctgacttgggcatatctcaaactggccaatgcgtcttgaggccctgggcgagcatccaagtaccaccttcctgaattgctactagaggaaaaggagcctgtttcagctttctatacttctttaaatgttactttgattagacatagatagcagtttgtttactaatattactattataactctgtcgtggttatattttttagttatactttctcttttctttgccaagagcaaatgaaaacacatttgcactgcagatccaactgaagttgtacaaaggtttcccagatatgtttgaaaaagtattctaggcccactgctggccaaataggaagtcttcccccacccttatgtcaggggttcatgctttaaaaaaaatacaaactctttttaaaaataaaatgttttattattgctataaaagcaatgcattttattgtttatgcaaatattacttggaaaatacataaaagtataaagagaaaaacaaacattacctataattttatactataatactgttacaagttttggtatatttcttcctagacttttctccatatgttgatacaaaactatggatgcaaaatgatcccaatacacttatattacatattcaggaacatattgcaaaaataattctgcatcttacatttatcacagaagtaaaccacagatagccgctgttagattttttgcttattccctccatcttttcatctgtatattgatacaaaactatacatgcaaaatgttcccaatatatttatagtgcatattaggaacacatcgcaaaaacagtttagtatcgtttttgattgcctatagtgacacaagtcagcgataaccacctctagacttttggtatacttcctgatagcctcttttccccatattattgatacaaaactatgaatgcaaaatgtccccaatacatttatattacatattaggaacacatcgcaaaaatagtttagcatctttctttggtcacctttataccacaactcagagataatcacaataaagtttttatatgtttcctcctagccttttatctgtatgttgatacaaaactattcatacagaatgctccctatatacctatattgcagagatgggaaaatattttgcaccttttttcaatcgctaaatgttttatcaggagcacattctcatgacatgaaaattactttcagaaacattattttacatgaaagcatcctattctattgtactagctagctacgctgtattttatttgtctaatcctttgttgttggtcattcaggatgttcctaacttccatccttaaaatattgaaatgagcatctttatgcattttttttaactggggctttctgttcatgtagtttttatggtttttcttgaccacttgtgtggactcaacatactaaaaatgaccctgtgtctgtaatgcttatagcaaagtgttttccagttgtttgcttgagcataaattctttattttagcattctagcacaagtataaaatcatataccttatgtaagtttcaattcattcaacaaacatttaaagcaataaagacacaaataaaggcattcccattacactcctatgaaaacacaactcatcctcccaccccatcccatagcaacccctttcttctttgcttagggcccactttcctcctgatcttttcattgattcgtcttgtaatacttaccacatgttttgctatgaagatgagtggctcccagacctttcagttatcaatctgtcacaagtgcacactggtatctcgtgacatgatgatccccgagatgtctgagatctgtgcatccttgaccgatcccaaatttctgtatcacccatgacccctaaagactttttagagaattatattttgacaacataacaagaaaacgtggcatctcacacacacacacacacacacacacacacacacacacacacacacacaaaaccatgaaaaagtagagaaagaagaaacttcagctctaatcccaccacccttaagtaacaagtatgtctgttttgcaggtttcctccaggttctgctcctatttttcaatcatggtgtccatgtgattttgtggccctgattttttttaagttgatatcataagcattttccaggtttctgtatattctctatcattattatttgcaatggctgaaaaaggttccattgagtgagtgactagattaagtcaacccctatagcttgacacttcatttgtttccttaagataatttgattgaatctacagaaaataacaaacatgggacagaggtttaaaatgaatttaaatcatgcttttttggtttgtgcagattgacttgtacacggctgggtaacttatagtcactatttagtaatcctggggccaatcttgggcctcacccaggaagtgtccaatgtataggccaaagctcatcataagactagccagtttcaccgggaatttttgtaaccaaacacattcacctccatttcctgctctggtcactactgcatagtcggttctgatgaacaggtaatgacataaggaacacagtatgaggcctggaggaagagcccccagagagtagcctcagacaaatccttaacctccagaggccccagttttcttgtctgtaattattttttggactgccttaactctgtttgtctttcaaggttgtcacaaattaaaaaaagaaaaaaaagaaaaaacaaagtatttggaaaagtatgtaaacacacgatacaaaggcaagatgttgggatactgatgattctgtggccacgcctttagaaggtctggt

SEQ ID NO: 1888901 - DNA, 4001 bp, Homo sapiens
tggctcagtatcaccttaacctccgcttctcccctacccgctcctctatccacaagtaactagcacagaggtaggcacccagtaaatatgctctgattgacagagtgtggcagataaaaatgcttatgctccttaaagaggagtacacacatttaagcatggggaccagtttggttgtatgattgtatgttcttaagcagaacaagggcagggcatcagaaaattggaggaatggtctcctgtatctttgtaaatggatatgtgtatatatatttgcctcacaactcagcttctcctttaaggaatatgatggatctattttgaaagtaatgtcggccgggcacggtggctcacgcctgtaatcccagcactttgggaggccaaggtgggcagatcacgagatcaggagatcgagaccatcctggctaacacagtgaaacccgtctctactaaaaatacaaaaaaattagccaggcaaggtggcgggcacctgtaatcccagctacttgggaggctgaggcaggagaatcgcttgaacctgggaggcagagcttgcagtgagctgagatcgcaccattgcactccagccagggtgacagagccagccagactccgtctcaaaaaaaaaaaaaaaaaaaagaaagtaatgtctagtcatatggacttgctagagtgccaaatatgtccttggtgggggaacagtttcccaaaatgctactaaaaagataggaaggaacttagatcctcctgtaatgtgtctctgtccaaatcagtgccactgaggaacgctaaaaccttggtaggtgcccttcagaccatgggccaggtacgtgaccaaatggttccatctcttaccagaacaaggatcgcctaaattgaggtgtcacatgtgttctgcaacaccagagttactatggagctcagctgaatttgcgggaaaatgcagggggggctttacccgcatctgcaagaagttggctgagtggaaataacctaaataaggtgttttcctgacttgggcatatctcaaactggccaatgcgtcttgaggccctgggcgagcatccaagtaccaccttcctgaattgctactagaggaaaaggagcctgtttcagctttctatacttctttaaatgttactttgattagacatagatagcagtttgtttactaatattactattataactctgtcgtggttatattttttagttatactttctcttttctttgccaagagcaaatgaaaacacatttgcactgcagatccaactgaagttgtacaaaggtttcccagatatgtttgaaaaagtattctaggcccactgctggccaaataggaagtcttcccccacccttatgtcaggggttcatgctttaaaaaaaatacaaactctttttaaaaataaaatgttttattattgctataaaagcaatgcattttattgtttatgcaaatattacttggaaaatacataaaagtataaagagaaaaacaaacattacctataattttatactataatactgttacaagttttggtatatttcttcctagacttttctccatatgttgatacaaaactatggatgcaaaatgatcccaatacacttatattacatattcaggaacatattgcaaaaataattctgcatcttacatttatcacagaagtaaaccacagatagccgctgttagattttttgcttattccctccatcttttcatctgtatattgatacaaaactatacatgcaaaatgttcccaatatatttatagtgcatattaggaacacatcgcaaaaacagtttagtatcgtttttgattgcctatagtgacacaagtcagcgataaccacctctagacttttggtatacttcctgatagcctcttttccccatattattgatacaaaactatgaatgcaaaatgtccccaatacatttatattacatattaggaacacatcgcaaaaatagtttagcatctttctttggtcacctttataccacaactcagagataatcacaataaagtttttatatgtttcctcctagccttttatctgtatgttgatacaaaactattcatacagaatgctccctatatacctatattgcagagatgggaaaatattttgcaccttttttcaatcgctaaatgttttatcaggagcacattctcatgacatgaaaattactttcagaaacattattttacatgaaagcatcctattctattgtactagctagctacgctgtattttatttgtctaatcctttgttgttggtcattcaggatgttcctaacttccatccttaaaatattgaaatgagcatctttatgcattttttttaactggggctttctgttcatgtagtttttatggtttttcttgaccacttgtgtggactcaacatactaaaaatgaccctgtgtctgtaatgcttatagcaaagtgttttccagttgtttgcttgagcataaattctttattttagcattctagcacaagtataaaatcatataccttatgtaagtttcaattcattcaacaaacatttaaagcaataaagacacaaataaaggcattcccattacactcctatgaaaacacaactcatcctcccaccccatcccatagcaacccctttcttctttgcttagggcccactttcctcctgatcttttcattgattcgtcttgtaatacttaccacatgttttgctatgaagatgagtggctcccagacctttcagttatcaatctgtcacaagtgcacactggtatctcgtgacatgatgatccccgagatgtctgagatctgtgcatccttgaccgatcccaaatttctgtatcacccatgacccctaaagactttttagagaattatattttgacaacataacaagaaaacgtggcatctcacacacacacacacacacacacacacacacacacacacacacacacaaaaccatgaaaaagtagagaaagaagaaacttcagctctaatcccaccacccttaagtaacaagtatgtctgttttgcaggtttcctccaggttctgctcctatttttcaatcatggtgtccatgtgattttgtggccctgattttttttaagttgatatcataagcattttccaggtttctgtatattctctatcattattatttgcaatggctgaaaaaggttccattgagtgagtgactagattaagtcaacccctatagcttgacacttcatttgtttccttaagataatttgattgaatctacagaaaataacaaacatgggacagaggtttaaaatgaatttaaatcatgcttttttggtttgtgcagattgacttgtacacggctgggtaacttatagtcactatttagtaatcctggggccaatcttgggcctcacccaggaagtgtccaatgtataggccaaagctcatcataagactagccagtttcaccgggaatttttgtaaccaaacacattcacctccatttcctgctctggtcactactgcatagtcggttctgatgaacaggtaatgacataaggaacacagtatgaggcctggaggaagagcccccagagagtagcctcagacaaatccttaacctccagaggccccagttttcttgtctgtaattattttttggactgccttaactctgtttgtctttcaaggttgtcacaaattaaaaaaagaaaaaaaagaaaaaacaaagtatttggaaaagtatgtaaacacacgatacaaaggcaagatgttgggatactgatgattctgtggccacgcctttagaaggtctggtcttagggtaatagtcttgtctggatggcaggtgggggtggacatgggggaacaggtgagggagctgccttgggagactcaggcttcaaagcaacccagactctcactggcaggttgctgcagtgttctgagctccctgactccagcagtggagccaaggccatgtttccaaacacc

SEQ ID NO: 1888902 - DNA, 4001 bp, Homo sapiens
atagaaagaaattcaggggctgaagatttttttttcactggtcaacgaaaggggcttaagatcaatgctcaatttggaatgatttctctctctctctctttctcagccctagaggcgagacctcccatttagaaaggggtccctcccacactctgcccctattccatacattttgtccagcagggactagagtgagccctaggggaaaggaggccacttagatggttgcttagcaaagcagattctctgtgtggtctgacctggctcagacgaaggtcaaagcctcagctgatccctgctctgtacccagtggcagacaaagtattcgtgtgttcaaggcctctctggctcagtatcaccttaacctccgcttctcccctacccgctcctctatccacaagtaactagcacagaggtaggcacccagtaaatatgctctgattgacagagtgtggcagataaaaatgcttatgctccttaaagaggagtacacacatttaagcatggggaccagtttggttgtatgattgtatgttcttaagcagaacaagggcagggcatcagaaaattggaggaatggtctcctgtatctttgtaaatggatatgtgtatatatatttgcctcacaactcagcttctcctttaaggaatatgatggatctattttgaaagtaatgtcggccgggcacggtggctcacgcctgtaatcccagcactttgggaggccaaggtgggcagatcacgagatcaggagatcgagaccatcctggctaacacagtgaaacccgtctctactaaaaatacaaaaaaattagccaggcaaggtggcgggcacctgtaatcccagctacttgggaggctgaggcaggagaatcgcttgaacctgggaggcagagcttgcagtgagctgagatcgcaccattgcactccagccagggtgacagagccagccagactccgtctcaaaaaaaaaaaaaaaaaaaagaaagtaatgtctagtcatatggacttgctagagtgccaaatatgtccttggtgggggaacagtttcccaaaatgctactaaaaagataggaaggaacttagatcctcctgtaatgtgtctctgtccaaatcagtgccactgaggaacgctaaaaccttggtaggtgcccttcagaccatgggccaggtacgtgaccaaatggttccatctcttaccagaacaaggatcgcctaaattgaggtgtcacatgtgttctgcaacaccagagttactatggagctcagctgaatttgcgggaaaatgcagggggggctttacccgcatctgcaagaagttggctgagtggaaataacctaaataaggtgttttcctgacttgggcatatctcaaactggccaatgcgtcttgaggccctgggcgagcatccaagtaccaccttcctgaattgctactagaggaaaaggagcctgtttcagctttctatacttctttaaatgttactttgattagacatagatagcagtttgtttactaatattactattataactctgtcgtggttatattttttagttatactttctcttttctttgccaagagcaaatgaaaacacatttgcactgcagatccaactgaagttgtacaaaggtttcccagatatgtttgaaaaagtattctaggcccactgctggccaaataggaagtcttcccccacccttatgtcaggggttcatgctttaaaaaaaatacaaactctttttaaaaataaaatgttttattattgctataaaagcaatgcattttattgtttatgcaaatattacttggaaaatacataaaagtataaagagaaaaacaaacattacctataattttatactataatactgttacaagttttggtatatttcttcctagacttttctccatatgttgatacaaaactatggatgcaaaatgatcccaatacacttatattacatattcaggaacatattgcaaaaataattctgcatcttacatttatcacagaagtaaaccacagatagccgctgttagattttttgcttattccctccatcttttcatctgtatattgatacaaaactatacatgcaaaatgttcccaatatatttatagtgcatattaggaacacatcgcaaaaacagtttagtatcgtttttgattgcctatagtgacacaagtcagcgataaccacctctagacttttggtatacttcctgatagcctcttttccccatattattgatacaaaactatgaatgcaaaatgtccccaatacatttatattacatattaggaacacatcgcaaaaatagtttagcatctttctttggtcacctttataccacaactcagagataatcacaataaagtttttatatgtttcctcctagccttttatctgtatgttgatacaaaactattcatacagaatgctccctatatacctatattgcagagatgggaaaatattttgcaccttttttcaatcgctaaatgttttatcaggagcacattctcatgacatgaaaattactttcagaaacattattttacatgaaagcatcctattctattgtactagctagctacgctgtattttatttgtctaatcctttgttgttggtcattcaggatgttcctaacttccatccttaaaatattgaaatgagcatctttatgcattttttttaactggggctttctgttcatgtagtttttatggtttttcttgaccacttgtgtggactcaacatactaaaaatgaccctgtgtctgtaatgcttatagcaaagtgttttccagttgtttgcttgagcataaattctttattttagcattctagcacaagtataaaatcatataccttatgtaagtttcaattcattcaacaaacatttaaagcaataaagacacaaataaaggcattcccattacactcctatgaaaacacaactcatcctcccaccccatcccatagcaacccctttcttctttgcttagggcccactttcctcctgatcttttcattgattcgtcttgtaatacttaccacatgttttgctatgaagatgagtggctcccagacctttcagttatcaatctgtcacaagtgcacactggtatctcgtgacatgatgatccccgagatgtctgagatctgtgcatccttgaccgatcccaaatttctgtatcacccatgacccctaaagactttttagagaattatattttgacaacataacaagaaaacgtggcatctcacacacacacacacacacacacacacacacacacacacacacacacaaaaccatgaaaaagtagagaaagaagaaacttcagctctaatcccaccacccttaagtaacaagtatgtctgttttgcaggtttcctccaggttctgctcctatttttcaatcatggtgtccatgtgattttgtggccctgattttttttaagttgatatcataagcattttccaggtttctgtatattctctatcattattatttgcaatggctgaaaaaggttccattgagtgagtgactagattaagtcaacccctatagcttgacacttcatttgtttccttaagataatttgattgaatctacagaaaataacaaacatgggacagaggtttaaaatgaatttaaatcatgcttttttggtttgtgcagattgacttgtacacggctgggtaacttatagtcactatttagtaatcctggggccaatcttgggcctcacccaggaagtgtccaatgtataggccaaagctcatcataagactagccagtttcaccgggaatttttgtaaccaaacacattcacctccatttcctgctctggtcactactgcatagtcggttctgatgaacaggtaatgacataaggaacacagtatgaggcctggaggaagagcccccagagagtagcctcagacaaatccttaacctccagaggccccagttttcttgtctgt

SEQ ID NO: 1888903 - DNA, 4001 bp, Homo sapiens
gagagaagcacgggtaaggaaaacaatatatctggggctgatgaaccaaagcaaaaaaatatatgctaaagatggttttctgctcaaactcttatcctctttgaccagatcatggttggtcactgcagtgtcagagggacacaattaaatagaccatgtccagaggactgggactagaagaatgaatggacccaaagctttgaagaataagggaagaaaaataaactagggctatgtagactacaacagactatgatccatgccgggaatgatgatgttgatcgtttaatctcggtcctgtgaaacagtggctggactaatgtaacctggacagttccaaggaaaaagaactaagcttaatgtgtggaacttccagagactccaatttcagaagaacagggagagttttttgatgaacagaactgtctagagaagaaggaaacctccttgtaagacagtgaattcctgaccagcaataatattccatcagaggctccacagccatcagtgaagggcaagcctctctctggaggcagggctggactctcttagaagctcctgaagcagagattctctggatcaaggtccaagatggccagagtagcaggctaccactgcattctgaacccttaatcgccgagcacgtaagtatgctccagatggagagacctgccccagggcccaactggaagagtttgagaccagtcccaaagataactctgacattgaaggaaccacgtctccagatcaactagtctccagcagaggagaaagaagacctcttttctcctcaagaatcctcctcactcccaaggaggtctggtgcttacctactgtcattgctttgatgatgatgctggctctggggctttgtagtcactagggcaccattttgaaacaatgcacaatcatctactaaacggaaccactagtgacttgaaagcccctgggccttatcttctctgtcacttttgatgatgggtccccacctatccgggaaaagctgaggtgcagaaaaccaagaggcaggcccatggttagctggcagaagagcaaggctcccaagtcaaaggtagtaaaaccgcttccccagagtccccaagaaaaagggcaagtatttttaaggtagcccagccctctgcccctgcctaatactgtgcaagcaaagctctagccacatgagcatgagctttccctcatccagagactgactcaataaatgaaacaaaagcagattttctgcctagtcacatggtagcagaacaagatgcctctcacgacaaatggctggttgggtgactggctccatccacattctggaaacgatgagggcagtgccttcactgccctgaacttggtcaggatgtgtgaagagtgtttccagggttgctctgggagctaccctggggaggtcccttggctcctcattcaggtcacctaggaacataagtgaaggtgctcacatctaattgggagctgaagtgtaagatacccaggaccttcccctttagtctttgtcagagaaaaggtcagaaaaccagtggccactatgtctatgtggaatccaccatgaagcctttgataagaatctgtgcttttcagacttgttcctttaagataaatgtcaatgcagcagccagtgtagctgctgtaacttcctccagactttcccagccttaaactagctgacattagaactctagcctccacctcccactacaatggactttgcttcccattcaaccagactggattggttctgggtatggagaactcacacgagctccattccccaaagtcatccaaagaggtcagagttgtaacctcgaaactgaagggtctgcatgaaaaagccagctgcacattccgacagcagcagaactttatctacttacctaacctctcaaggagcttggcaaagcacttacttctttgcagatgagactgagacatagttacaaagtctcagtttcctctgcaaacagttgtaagtgcttagcaattataagacaggagccatgtcttacaatgtttgcacgggatgactgcaaagcatttgtatggatggccatctccaatcatccctaccaccttcctggacttccgccaagccctggcacgcttaccaactggggttgtgattatttcagttttgttgctcactcctgtaaaatcaaactggaagagcttccaggagttcttctcattgatttcaagcttgaaattttcccacttgtagatcatctcattctcaggataggaaactggaaaggaatgtgagaaagagggtcttatgagacttggaagcccacctgaggtctccaatagcatgaagtcagcctgcacaatgccttggagtcctgtctctggcctcaccagctgtgggaccttgcctctcttacctcattgttgaagtccattcaatgagtgcgtttactgagcattcctcagtatcaggccctaggccagaaatacagagatgagcaaggcatgaaccctaccctcaagcaatcacatttaattttataagacagtgagtatactactgtgatttttggaggagctctgaaaaacctatgtccacagaacagcggggaaacaaagtagataaaggtcacttggggacatactcagaaaagacttcataaagcaggtgatattcccattaaatcttgaaactcaagtaaatattctcaataagaatgaggttgaaggggttaaggggcagtatagaaaggtgaaacacctggtgtattgtggaaaggacaaaagttcaggatggctagctcacagaggatgaggtgcacaggattgggtggcagggtccagttcatgaatggccttgaggttcattctaaggaatttcaaattgatccatgagagttaacggcagattcgagactaagaagtgacccaacctaggtgacccttcagctaggtcactctggtccttctgtgaggacaacatgttgtcaaggaggccagtgtagtaatccaggcagaattaaattaatgcaggtggaagtcaaagctgtacagggtgcagagaaatagacagcatcgatagagactgggaggaaacaccaacaggatgtgctgattgattagatgcaggaggtgagggagagggaacatcaaagttcttgatttgcgcaactgggtgagtgatggtcctcttcaatgagacagatgggaacccagaagcaacacacttgttttggtggtagaggtttggaggagacaatgaatttcattttggacatgtgcagtttcaaagtgaagatgtggcaaaagtccaggtggaagataacaaaggcctaaaccaaggtagtgccagtggagatggagaggagcagacatacttgagatacgcttcagaggcacgtggaagggatgagcaacacagtattgttggcaggaaaggaaatgagggtggaggatggaagtcctgcacaaccttggcagcattttagaagaaaagcagaggcagaaaaatgtaaatggcaaggatgagaaaaagaaggagcccagcatgtttctggggccccagaaacttaagaaggtactcacagctagagaaagatagagggcaagagtgagaatccattggaaatctgagcatgtggagtgagcatccggcatcaatggtcatcctggaagggagaaaggagcctcatcaggctggccctaagcacttccgtatccacccagctttggtctagggactaccaccaatgaatggccagagtcaatttttttctttgtttgtttgagacagagtctcactctgtcacccaggctggagggcagtggcgtgatgtcagctcactgcagcctcttgcctcccaggctcaagcaattctcatgccctagcctcccgagtagctggaattagtgccagcacaccctgctaatttttgcatttttagtggagacagggttttcccatgatggccaggctggtctcgaactcctgacctcaagtgatctgcctgcctcag

SEQ ID NO: 1888904 - DNA, 4001 bp, Homo sapiens
gtcagatatgaagaaatcctccatccttcttcaacattttactgggtatttcaacttcaaaagaacagcttatttctataagtgctgtacaagatcatagattatgatggaacgacttcattttagaacgttagcaaaactgttatactaaatgtcaatgacaggaaacaaagaaaaaaatttgttcaattatatttttaaacatattgttattctcaacaaacggaattttaaaacgaatacaattttccattatcaaaagcaaacactctatttcgcagttgaacaatgatcactgatcacaaatatcaaatacagtgtcccccgcccccaatcgacatcattttcaacttaggaccctggcatctactccttggggtacctgtgactctcttttacacccccaagggtctgcctcagatctacttaaggggcggaataacccctagcacctgaattgaggatagcctcaacctctgcatcatcgtccgaatcccagtcataattacaaggccagtctttagagcatcggttacgaacccttgccacaaaatgcatgactttcagtttgctcgattccacgtgtgctcggggcccccagaagaactcatactccaccggactgctacggggcaccggtttataaatcaggtaccctctgcgcacaaactcttctgtgacgatcttcttcggatctccaaagatgctgtgctgacgtccaggctgcattcctaacttccccagcactttccagaccagagcttccttggcgctgttgcccatgatgaagatgagcgctaatatagacatcaggagacttttcttggtgccctgaaaattgctccggggcactgaaggcttttgtgcttgggcagtgctcgaggcttcttcaggggtggtagaggcctcctctggagtgctcgggtcttcctcggggccgctcaggtcgtcttcgggggtgctcgctaccacagaggcggccataggggtctcggaggcctctgaggcctggattttgcgattgttgcggttctcttctgcggctctcgcattacggcggcgccgactctttcgtccccgaggcatgtctcctgctagaggctcaaagcttacagcagtcctagggaaggatgcttgtagcctcttcaggaagcaacagctttataccgtaagaagctgctgccgctgaagctaccaatgtcaatagagtctttgtagcaataaacaagccgttctcagctacaaagggtagttcccacgccagctgacttgcgcgagcagccgccgccagcacttgccgcagctgcaagcccgcgagaaagctcagcaaaattggccccgcctctcctgccacgcacactcctagcaccaaagaggaagtaggctggtcctccacagggacttccgctagcagataggaaaaggggcaggcagcgacaggggtgggacaagggcagaaatgacagctagagattggaggggcctggagtttgcagaagagaaaaaaatagcttaaagtttctgtattttcagcctactacaaacattccaagattggctcgacggtctagggaaggagtgcgtcggctccattcccactgacgacgggctgtgtgtgtgttgggggttgggaggccaggggtggcgggagggtgtattcttggaaggagtcagctgtctccagccttcctttcctgtcttggcttacacagcgcgttcattcactcgccctgttttcagaaggcatttgtgtgtatactaatcaatttgtggtcccatgtaggacccggataatattgttatggcagatgtgctggatgatgtgaggagatgggactgcagaaacaagcagggtgaaagaggtgcagagcctttaaaatgtggtagatatatgcacgatatatatactgccctgcttttatacatacatacatacatacctatatcgtgcatatatctaccacattatgtttatatacagtgcatatatctaccacacatatatgtatgtatgtatgtatgaaagcagggcagtgacaggatcagaggaattgcatttgtgcagcctctcagaaaagcaaactgtttcctggcagaccacataggaagcaattggaataagaagcactgggaactaaagtatgccttaaggctgttgccatggggatggagaggcagaaagacattttaaaggtgaccgttgaagggctttgcagacagaatggatgaagtggggaatgtggaggggatgatggagttcagattggctccaaggtttctaggctccagtcttcctggactcctgatttattttgcttctttcagagcatactctgaactttatccactgcttgcttttgctcactgtttgctctgcctgacctgtcttctcagccttctccaactatctaaattccatttgactgctcacagacctgtttctccctgaagcttgtcttgatctgcccaaaagggtaatgagtccatttttactccattgaggaaagccctataactagcactctatatctttcttatgtcattcaaggtattagtttaagcaagtcacttctctctaagcctgttttcccatctataaagtggggctaaagtacagccctcatagggttgtgagaattaaatgagataaaaaatgaaaagcatttattacatggtaagcacagattttgcctctcaaggttttccaagcggtgtgtgagtgtggcatttaataaatgcgtgctgaaggaattcatgatggaaaagattttataggtgttcttaactgaactcttaagaaacaaatgaatactttatgcctgtcttgctgaaattttctttataattagagcccaccgagacctcctgttgggtaagttagcaataaatcaatttggtcaagcaaagaaagcacctctccaggacacagagcactcttgagccagccctccgtttgggataacctttgcacgcgttctgggacatgacctactcaaaacagtagtctggctccatctgctgtcccacattctgagaattctcgcagtttctggtccattgataattgctctgaattgtttttcagtacaggtatgaacttattttactgtttccaggaatttgggtcttgcatggaagtctatagcatgtacaatcctaccctcatgaaacaaaaatgggaggattacttttgcagtttatttgcttgtttttagcatgaatttttttttactgcgacttaatctcaaacgtagggcaaagaagagagattaatattataaacaccaatagctagctgtataaaatttaaatattaggccctacttactgtttatcttttatatattggatatggcaaaaccctcctattacgtcttccctgacccactctgctctctccttccccactgtgctcctctataatgaagtcagcaattatgcccatggagacttgtatatatttgctacctacttctgtgtctgtacacaatatagaatctcttcctttatttaaagcacgtcttcataatgtatacattgatcaacactttggttttccagctcaactttatattttttatgtttacccatgtaaatacatggaactctagttcatttattttaattttgtacatttcatcattttcaatttatcctgttcctaatgatccacgcctatgcagttcccatttttccaaaacaaaataatactcttattaatatttgtgcgcatgttccctatgaacatgtgcatgcatttctctaggatcaacatcaacgagtagggttgctgatgtgttggcatgtatatgtttagatagaacacatggctttccactttgtttcatttataaaaatcaaaccattccatattgaatttccaggcaaacctttttcctaattaataatgaaatctcctcaatttatacctctaattctttcattctagtggctgaatgttattccttgcaatggatttaccataatctcttcaagtgtct

SEQ ID NO: 1888905 - DNA, 4001 bp, Homo sapiens
ctgtgtattcaagtaccatggggaggagaaggtgttaaaaaagaagattacaggaccctaacctcaaagatcctgatttaatttctcttggttgagacctgagaatctgtatcccaagtgactctgctgaggattatcagagatccacacctggagaaaaccagctctagtctttctattttataaatgatgatgcagagggtaagaacgaagttgcatatttggagagtagagaaatatcattcaatcaccctccaaggggtcactgtagatttaattaaacattcagacactcaaaactatgataggcgctgttgccatgagtcttctcagaaactacgtcaggtgatagaggtcctctccataagagtccttgctgcatttcatgtgtatgacagctcacacagccctctggaagctataccctcagagacacagtttaggttcaaggaaacagatccacattattgagatggggaaattgttctgatttagaagagctatcaccctaacaggtacaggccaacgtcattcaggacaacaccactgacagcttctgtagtggttaatattaggtggcaacttgattggattgcagaatgcctagctagctggtattgtttctgagtgtgtctgtgagggtgttgccagaggagattgacattttagtcagtggaataggagagaaagatccaccctcaatgtgggtgggcaccatccaactggctgccagtgcagctagaacaaagcaggcagaagaaggtgggataagctggcttgtggagtcttctgcccttggacatcagactccaggttctttggcctttgggctcttggacatacaccagtgatttgctgggggctgtcagcccttcagccacagactgaaggctgcactgctggcttccccgcttttgaggtttttggactcggactgagccactactatttccttgttttcccagcttggagacttttggggactttgacttgggttcatgtgagccagttctccctaataaacttcctctgatatatacacatatcctattagttctgtccctctggagaaccctgattaatacagaaaagtggtactgggaaatgggacattgctataaagatacctgaaaaggtggaagcagcttcgggactggttaatggacagagggtggaacagttggagggctcagaagaagatgggaagctgagggaaagattggaactttctagagacttgttaaattgttgtgaccaaaatgctgatagtgatatggacaatgaaacccaggctgaggtggtctcagatgaagatgaggaacttattgggaactggagcaaaggtcactcttgttatgcttcagcaaagagactgtcagcactgtgcccctgctctagggatctgtggaactttgaacttgagagagacgatttagagtatctggtggaagaaatttctaagcagcaaagcattcaagatgttgcctggctgcttctaacagcatatgcatgagcaaagggatgatctgaaactggaacttatatttaaaagggtagcagagggtaaaagtttggagaagttgcagcctgatcatgtggtagaaaagaaaaacctgttttctggggagtactcaagctggctgcagagatttgcataagtaaagaggagccgaatgctaatagccaagacatattgtatcttggaattaactaacttgttttttattttacaggctcataggtagaagggactcgccttgtctcacatgagacttcagactgcggacttttgagttaatgctggaataagttaagacttgggggactgttgagaagggatacttgtattttgccatgtgagaaggacatgagatttgggaggggccagggacggaaagttatggtttggatttgtgtcactgtctaaattgcatgtcaaattgtaattcccagtattggaggaagggcctgggaattacaatctgacatgcaatttagacatgatcatggaggcagattttccccttgctgttctcatgatagtgagtaagttctcaggagatctggttgtgtagcacctcgctctttgctctcttcctcctgctccagccacataggacatgtttgctttccccttcgccttctaccatgattataagtttcctgaggcctccccagccatgtttcctgtacagtctgtggaaccatgagacaattaaatctcttttctttataaattacccagtctcaggtagttctttatagcaatgtgagaatggactaatacagcttccaaagaccttcaagggatatgccccatatcaagagtccctgcacctaggaacacccaaagctgtgacttcttctcaagtatttatggttcttccaacctagatacatctcatccatccacgggggacatttttatcataaaatagttgacatataccatttaactagtttctaggataatagagctaggcagttagccaaaagtccatttctcttgcaacatgattttgttaacacaccaacaatcataaatacaattctcaaaatggtaacttttacgaggatctacctaaagggctctcactgataacatctcacttttaccaagatatgccagtgatgggaggatgatgaagaacaagacagcatttattttttaaaactggtaaatctttcaaaaaactcagtgcatgttgctctgcagtctagaaggtgcctcagaatatttgcctcacctttctctcatcttacaaaatagaagtctcatttcattaggacactcaagttttcaagagatagacaagtataatggacctagtaagaaatgaatttttatatataacttatttgagttggggaaagataagaacaaaggcatcttgattattgctcattctttgttactacctatgaacttgggaaagtcaattgtattcctactttccttttcaaattctttccaaatccaagcttattcttgttatggtctgaatgttgtgtccctcaatgatttatatgttgaaatgcaatcccaaatgtattaataggtggggcctttgtgaagtgactatatcatgagggtggaaccctcctgaatgggattaatgcccttataaaggaagcctgagagagtttgtttgtccttccatgatgtgaggacacagcaacaagccaccatctatgaagcagagagctctcaccagacactgatattgctggtgccttgatcttggacttcccagcatctagaactgtgagaaataaattcctattgtttgtaaattacaagtctaaagtattttgttatagcagcccaaacagactaagataacactatttttctgttattttaatgtattaatttcaggcaattgagagaaggtatttacatttgcatgcaactggaatgtattgctatttgggaaaaatttaaagactgataaaatacttctgctgtcatagtattttctacatactaataaaatgtttgaaatagttttcattttctaaagggaaacataaagataagcaagattctctaagatttttctgatacagaaatgggcattatgaatttctacagggagaataagcaggcatcattccataaacttgtttgaccatagaaccatttttaaacagaacattcacttggtgtaaaatctagaagatgctggaaaatatttttaaacaatgcctctaaatgtcaagtgcctttgaaaaagggttttaattttattatgtaaatgtataaacaaattttcattaaaaaatgccaacaattcttaggcaacaccattctcctgtgaatttaaagacaaagaaattgtaatagccagtgctattcattctgtatcagttatttatatatttaaatggtctccattaatcagaaaatgactttggagagtatctgatacaaactacgtcaaacactgctaacttaaaatttcaataaataatacttcacatcctaaaataggttttaa

SEQ ID NO: 1888906 - DNA, 4001 bp, Homo sapiens
taaaaggagaaaatttggacacagagacacacacagagggaagacgataggacaagatacagggaaaggaaagcaggttcaagctgaggagaaagacctggaataggtcctttcctcacagccctcagaaggaattaagactgctgacatcttgatctaggacttctggcctccagatctgtgacacaatacacatctgctgtttaggttacttagtctgtggtatattactatggcagctgtagtaaactaatacagaaaccacgaacgactgtatttgaggcgcaagtccctacctaatttgctcataaattgccttctctgaaatcccgtgtcctcaaagggaaatcacgattgcattaaatgggggaagctctcttatagtaccacctctaagaacacataattttattgactatatattatgcactggtactaagggcttggcctgcctcacctcctttatcacctccattttacccaggaggaaacagacacaggtgcactttgtctatcatagataataattcttgctgaatccaggcatgcccctgtccactatgtctgcactaaactagaaatacactctcatgtttacacctttttttttttgtctttttccccttttgtggagaacagggtctcgctatattgcccaggcagttcttaaacttctgggctcaaactattcccccaactcccacttctgcctccctaagtactgggattacaggtgtgggccactgcgcccagcacaccctcacgtttttaaagtcttgaaattctcctatttccgcttctcaaaaggtccaatccttttccttaaacgtgaatataccacataaacgaacacgaaatagaaacagggacaaaaaagtatttttttgacgatggcaaacgggaaaaaaaaaaaagaaagctgtttaggtggcatttgaaaagttaaaaaagaaagaaaactcagagcagcccaaaagacagatgatacctaagaaggcacaaccagcaagacatgttgactgttagtattatttcagcatcctccttgagcagcttggctttgctctgggacaatgcaccagcctgggatgctcagagatgcaggcacggaggttgtgcagcctctccgcacactgcgcatgcgcggctgccggttcaagtcgcggtccaggaccgcaaggaggcgggcaagcgaaactgagaaaaacccacccacggtccagggactgggggctcgggcgaacccacccagggacctcctgaccaaggccatttgtctgcaacctgatggctagaagtgataccaccctgagcatcttcaatcccctttccccactctacagccccttgtactgtccctccttcctcattcacacccctgatccaaactcaagcactgaatttgtccccagacgagggcctcggctctgcgcggccgctggctgagtagcttggcccgattccgggtgtgaagtgaggaggaattgatgcgggtaaacatacagcgccggcccgcgccgcatcccgggtctgcagctacagctgcggcgaaagcccaaggtgcgcgtgcgcggagcgccactaggcagcccaggacgcgcgggctcggagccgggcgaggggccgcggaaggcgcgtgcgcagagcgaccccgggcgcgcgagaaggtcctcagtgcgcgtgcgcggggcgggcgggtgcgcgcgcacttcctcctcgcccccacccagacccagaaggcgccaccatggcggcgcccccgcagcccgtcacccacctcatctttgacatggacggacttcttctgggtgggtagtgtgcagccgccgcctccagtaagggcggtcttgtgtgggcgtggggacggtcggcgcggggtacgtcacggcctgggggccgcggcggggcggtgttcatgcagggacgctcgggctcccgcgcgctctgcccccggctggccccgaagtcgggcggcggccaggagcgcccgcgggcccatgtccgggctggcgggcgcgcgtggccgcggcgtctacgcggccccagcacccgcttccggtcggcggcccgcgcgtggggccggagcacgtgggagcagtccctggggtccaccgggcgggcgcgcggctccgcgtcctctcctcagagcgaggcgcggcgggacctccgcgctctcttttcggttacgcatgcgtgcgaccttgagcggtgcccagcctcagcttccccgtctgcaaagtagcctggaggatacttgcctgcctgctccaaggttgctgctgtgggcgcactttgatggtagcatcctgcatggtagcggttctctacctggcggttttgcagccctgagggcatctggcaatggcgatgtcaggagacattttggctgtcacagctggcgaggagtgatggggtcactggcatctagtggagtccagaccagtgatactgttaaacttcccgcagtgcacaggagtgccctatgcaaccataaggaattatcccgcgccgtcaacagtgtagaggcacagaaggtccgtcaagtggcctggctgcctagggtgaccagcaccggggacatcacctgtgggctacttgtaaatgtagaagctggggccccaccctacccctgcccaatcagaatctgcattttaagcgcgtgaacgtttgagaacagctgctctatcaatccgaggcattaagaaacccttggcagtgtactaaggtagtcagtcttagcacatgtgaacttcaccagccaagaggaattcaagtagaattcaaagaataaaaccctgtttttaactcaagacagaactatgctgagctctaccgaaagccttgacacagttaacactatgacacataatcaccaggaggcttcatatatctataaacatgtctgcatactctttgtagacagctgacctgcttggttacgtatatcattccttcatttcaaaaccctgcaagttaggaggaagtatttgcatgtcactaattaaaaaaaaaaaaaaaaaaaaaaccctgcagctcagagaggtaaagctacttgcccaaggtcacacagctaataagccaagctgagaaacgattctggattgatccagttctaaatataaatgatgttgagctcatcttaaattgtgaatgtgaccttgtttctgctcatcatattgctgggtaattccctagcagtgtttccttttaaaaaggcatgcagaaaccattctcttcattttatgaacacagaggtgtaaactgatgaattccaaaggaaaaaaaaaatccccgtagaggtcactaattggagccaacggtgtatgcagctactaaatttgaaatgactcaatttcagaaagcttgtgggatacataggtatagtttgtagacatgaattttcctactccggtggtcaaaaagttaaattgtcaaataaatttcttatcctctaataaaggtccagagaacctgttctgggagtctcatgaattttaataccaaacaagatgtctcattaaaattaaatttattaaacttctaaatgagcttggtgcctaattctgattctagattcacacatagccatgccctgaagtgatgaatgtgacttaaatggcattacaagcattgacctcacattgttacccaatcctctgatctagtcagataaccaagaattagtgctatttggaaaaataagccctgcttctttttattcccccccctcattttctgcccatttcctcctttcctgccctacctcttctttgaggtggtaaggccttgcaaaactttcttggaaatatacctttgtttatcccattctttcaccaaatgtgtaaatataaaacacagctttccaagatgtgccactttaatttaatctaccagattatgcctgctgtcattctttagcacctcacttcagtgtatctgttgtttgcataacaatatactatcaatttataatgagttattttacaataggtctgtttttc

SEQ ID NO: 1888907 - DNA, 4001 bp, Homo sapiens
aaaatatacttttgtgatgaattcaacttacgattagaaaattcagatatcaaatgtaaaatacacaaggggtgcttgattttttaaaaaatatattcttaggaagtattccaacaagaaaagatggtagacctccaatgtgggtcacagctggcagtctgaccccaagaagtttgaacccagcctctattatctgtgcaagacagaactgtacttctgctttggagttaatcccagaagaatttatttcttttccagcccttcacatagcttgtgctttatggtggcagactcaatggaccaaaccttcagctgtgggaatcatggcttcagccattgaacacacacagcccagtcagctggcagagtggacaataaacctacaaacactcagcaagtcactcaggttcttgattcaagagtaaatggcttcataaacacaatcataacaacagcggcatgagttggtgcatgtcaatgtgtacatttcggtagagagggcccagagacacgtattttggcagatgctaggtcttggcaagactgtaagcaaaatcacaaagcagcccaagtctgtggtcagtcccaacttcctatcagtacaccttttccatccaggcaccccataaaggtggatttggtctcttccacattccattaagtgtagcctcaattcccaacaaaaacccacaccacacctcttttaaggaattttataggaaaactttacctaaacatgtatccccaaatcctctgaactagcaaaatcctattcaggtttatctccatgtcagagagatgggaaatatatcaagttctgtcagcaggtcagccaggccgagcatgccaagtgatctggggttatagacagcagattaatctcaaagctggaacttctttaagaccaggaagtagccccttttctgattaaaagacaagtcaataattctgggtccttggtccaccactgtgatatgtcccttgcaaaacaggcactctcaggcagtcttccctgcagagcaaccatgatggatactgactactgacttgaaagtgctttgacacccccagatggaaggaactaatcaattatgcttctcacttagaggcaccctgctcattcatgctgaagatagaagtccagataaaagtagaattactgggagtccaagatccagaaagaaaatgagagagctcagctggtcactgtgaatgatgtgcatgtgccccaagcctttgaaacacatgacattttccagcagccaagcactcatcaaattgcagaatgtcgaagctacaaggaaacttagcaattatttaatgatctaaattacttttattatagtgaagaggaagctgaggcctagagaggtaaaataacctgtcatatagctgagcagcgaaaggaacagactcattaccctagtgatctcctgtcacacaacccatctcatgaagctctctctcaggtcgagtttaatagatgagagaacaaggggtagtctgcctatgcaaagcaggtacacacaatgagatcagagcaaaggggatttcctcccctgaagctaaacagcccccataagtgatgttacgtgttaggataatttccttggtgtgctggaagatgtttcacaagcatgggtggtggggacccttatttgccatatttgccaatttctatagtgtaaatactctcatcatggcagatttcaagctaccaacttgatgccactgaacagcagttggggagagatatgtgcaatcagctcttgtgagctgatagaagctggatcctccacaccactggaatttctgagaagtctacatcacgggtttaggaatgaaataactttctggcccacaagaataaaacacccaggtttatgaggaaaatcctagcagcacacactctaggtttcactcactgaaactctgattctctctggatctcctggacatcacagttcccatatccatgggatccagagagaatcaaagtttggagaagttacttggtccatcatgtctgtatctctgggtagtatcctacctaattgatccaaggcaggagcactgagaggtggaatccacattccctatcttaatgcttttggcaaccaagcattcctttcccagcagtaacaggatccagtttccaaggtgatatgtgagctcagagccccatctttaccaacgtcaaaggcagtgcttggattcagcttcaggtaggcctcctctgttcatgtaagcaggaaggaaaacatgtaaaactgaattcctcctcaatttctttctttctttctttctttctttttttttttttttttttttttttttttttttttttttttttttttttggctgagaagagttccaaggctggggcagcaactcatcaggaaaagttcttagcctgtgctttctttttgccaaacattgatttgctaatagagaaaataactggtgtataaacaaaagtggttgatgacatccaagggtctggagcaattcctccacatcgttctgacagctaacaaatggaactagctcttagggagcatgtttaaggaacagctggaatatgtaacggacatttttctgtgaatttgacaggtcaagctccatcacggttgagctacgctcaccggacgtggatcagaatgaactctgccattcctcagaaggttgccaagagggctttgaagagaagggaatccaaggaactcagtttcagacatggagaagaataaagaccagacaaatcatgagcaaacctgatttaaagagaaagatctataaataccagttgctcagctttctccctggtttcctgaccctatgatgagctccaccaaaattaagtaagtatagccctttccagagggtcacttggagggaagatcctgccatatgtcgcctattggtctttagcctcaccaccaccccaacatctgataaagtcaacagacgtgagttcctaaaggatacagaatatacaagatactttcccttatacaaggattcactctaagcatcgttaaaatggcaaactcacctgggacccctaagataacctgatttaccaaaatctggtttatccttagcatatgaggagcacatccattctctaaagcaaggagattttcaagatcaatgagcagagaaacttctcaaaagaattttatagaattttttaagataacaagcaaactaacaaatgattgagtaaacctggtactattccttttcttcttccaaactcaagggagttattccaaacaataacatacctagaaaagaacctgtgaagattgcaagattatctaaagaagccaccggggcaagagcggtggacatgcttctccacacggccctgcacccagaccactcattgtgaactccacccaaatgcataaacctttgggaagcaaaggatgaattgattagctgcaatctgtaggcccaatcaatccatctccacactgtagggacctgcacagaatctctccttaaagtctagtctttcatgaggagaaattcacctcataaaagacatgatcagaagacatgacagcctggaggagcaaactactgctaggtcagtggaagttctcctcctgtttgtgaaagtgaggagaaaagcacagagcatttgtccctcagcttgtctcccttgcagtcttctcacttattataattcaaaaattacctccatttcaaggaatccttctccttcagagctttcagctcaaggtggcctggtttgatctctcctgacaccacttcctccctccaccccaaagtagattaggatcaccttggataaccaccagaacttgatgattaaaacattcagagcaaaaagatcttcagaggtcatgccaactgataagccaagttagtagcaaggcataaaataaggcattactgtctttgttctgtgctgatccatgcattgtcctacctaccatgccagcactttggtctgtgaaatatgcaga

SEQ ID NO: 1888908 - DNA, 4001 bp, Homo sapiens
agtagagacagggtttcaccttgttagccaggatggtctcgatctcctgacctcgtgatctgcccaccttggcctcccaaattgctgggattacaggcgtaagccaccatgcccggcctttttttttttttttttgagacagtcttgctctatcccccagcctggggtgcagtggcatgatctcagctccctgcaacttccgcctcctgggttcaaacgattcttgtgcctcagcctcccaagtaactgggaccacagggcatgcgccaccacagctggctaaattttgtatatttagtagagatggaaaccatgttggccaggctcgtcttgaactcctgacctcgtgatctgcccaccttggcctcccaaagtgctagtattacaggcgtcagccaccatgactgtcccatttcctgtgttttgacccccccaaaaatatccaaggggcaaagacaccccgtaaacatcctccaaccccaccacagacctctgaaggattctgggccaggactgtgacgtccatgtttaaacatggcgagaaggactgaggctcaggtgagagaaggactggccccccaggctccccactgagctgggtcccatgctgaataccacatggctgtgacccctacaagcttcctctcagctgtcacagagtctctcccagagattcacccacagacaccccgaatgctggggatggaggatgctcacttgacctattttaacagatgttctacaagagcaatgggggatgtaatgagcccagggttacagatcctgccaggagctcatgccaggtctctggtggaggtagcctcgtctgctgttctgggctctgtgtcccctgagacctgttctggtctccggtcctccctgtccattctgcattgcacttggcgaagggctgacctgcagggtagacaggtcggcaggagaacgacctccacgctgggttccatccttcccctgctacttcaccttccccctagggcttggaagagctgaggacttaggaaatgggccctgaggccagggagcagcttaagagtgcaggtagctgacactaaggtttggcgaattgccaggagcggtcagcctcttgcaggcagctgagggaacattgacaaggtcaccagggatgaaccagggctcgggcccttaccttacagttgtgcccatcagcaaaggctgcggttggccccttcggtggacaaggttcagaccctccgagggcgtaaccaaggtgtagatgttgatgtagaaattgttgctgcatgcgcattccctgcttaagtggctgagtactgtgtgttcaaaatctgcccattcccatccgggacataatttgggccgtggggtaacctcccaggagtgtaaaaggctctgggacaggaccacagaagatccagggggctgtgcttggtgacctagaatgccctggaggagacctgggttcttactggtaagagcagtgggtactctgatgagagggaatttgggggtccttttctttaccaaaggagatatattggggcccttttcaagcacgttcaggtcaggaggacacaggtgctccattgaatgtttgcaccagtctgaaattctagttcccaagggcctcacttgagtcaagacctttggagtatgaggggcaggagccagggactggaccccgctgtggaagcaggaaggcctcagaggggagtatttggaggttctctcactcagtttttctagagaaaggatgattcataaaggtgagggtcgagtctagagaccctagtttgggtgaggggacagttgggttgagggaggtgtgtggagggtatgggccagcatatctggctggtcttaattttgaaccctacctgcatttcattgctgtcagtatttccttccaagttggtcagaggagtgaggggagaagtaggggagggaggatggcagagcttggggatttttagctcataccttctctccatcccacctctcctctgccccaaacagtcccttccaaggaatgtcctgcagccatggctggggagccagggccaccccttcttcccaagtccccagctgggttactgtgggactctgggtgccctgggtcccctttcactcaagtcagactcatggtacaaaacctgaggatgaggacagtaacacccacgtgtttggatggggcatcctcactggacaacatcaggactgtgcttgaggcaatgatagtcatttgccaattggtagggcatttgtcaatgactctgtcagctggcaagatgtgtgaatggggaatttccagtaaggcagtgatttgtcagctgtgggataatttataactagaaagccctgggcaaatagcaattaggaatcagtataggaaaatgttttaaagtattggctggagaaattattcagaggttacggttgataatgcaggttcagtgaccattgctgctgttgcagatcatcagtgctaatgccaatgttgagaattactaccagtacatcagaatttaagtaaaatataaaaacccaacatttggcatccctcatccccactggtcccagggtgctcacaccaggtcatcagcaacatgggtttgttcccaggcactacacagaaacagtgtctgctgggtggtaactctttatttcattgtccggaagaaagatgggagtgggaacagggtggacactgtgcaggcttcagcttccactccgggcaggattcaggctatctgggaccgcagggactgccaggtgcacagccctggctcccgaggcaggcaggcaaggtgacgggactggaagcccttttcagagccttggaggagctggtccgtccacaagcaatgagtgccactctgcagtttgcaggggatggataaacagggaaacacctggaagggaggagggaaacatctctgagggcttctccctgcctcccccgtggagcagaacttcctctcctcagctttcaacactgagccgctggggagacttgctctcaccccacctaagtacataccccaggacagcccctcccattgagggaaatgtcactgggtcctgaaaggtaacagtaagccagtaaatcagtgtcctggaatggtggctggggaataggccctgggggtcagtcaggcaggtcgcctgtggaattgtcccaaaggacagggaaaaactggcagtagtaaggggccccacccggttggcggctaaggagtttaagcacaggaatagccagtggggcttcaagatagtcactgggctcagaggccatcaggagccatcagggaacaggcttggactagccaggaggtcagtgtaacaccctctggtgtctggaatagtcagagctgcagagcaacaagcagatgtgctgaggaagggtcagtgggattagggaacagcactttgggttcttggagaacattctggggaaccaagaaacaatcccgggggctcaggaacggggagtgggattacagaatagtcacaagggagaattagagggaccagggagggacaggtgatcacacggtattggacacagggaaagggagcagccagaatttgtaagggagcagtctcgggcttggggaaatagcaagagagatcagggacagcccttagggttggggagcagccacagggacacagaatagccagagggagcaagaaacaagcccacgatttagggaatggccccgggaaggatctcccgttggaggtcagggtccaggcactcactgtgcattcctcacagccaacagtgtaggtcttggtgaagccccggcgctgagctaagctcaggctgttccagggagccacaaaactgcaggtagtgatgtgcaagagtccatcctgcagttttcctaaggagaaaggcggggcggggaccgacaagcagcttgtgattggctgagctgccaagctgccaaaggcccggccttctgatagactgaaattggggtggtccccatttccag

SEQ ID NO: 1888909 - DNA, 4001 bp, Homo sapiens
ataactcactgcagccttgatctgagtccaagcgaccctcccagctcagcctcccaagcagctgggactataggcgcttggcgattttttgttatttttttgtagagatgggagtctccctatgttgcataggctggtctcgaactcctgggctccagtgatcctcccacctcagcctcccaaagtgctgggattacaggcgtgagccaccgcacccagccgacacatttaaagaaatgttttggcaacttatcaaatacccacagattggatctaatcatttaaaaaacacaaacttggttgtagactttctgtccttctgaggccccatgactatgtagtcccaaactattctcgccgatcacaaaggaacattctgtttagggctacttttacctttgcttagaccatccctttattcaattaatgtttgaaacatcatacagtgggggaaacagccatgctatggagtgcgcaatgtttgttaaaaattaaacaaccactcacccctccttgccccagtgaccttttcttatctaatctttttcttggcaccggtaaagagaacagcctttcttcacataatcgctccatggcttctcagcagaacataaccaaccgccttgctgaggtggcctagggtgaccgggtcttcctatcttttgtgcagagctcttgtcatgcgcaggagtttggggagatgccccccacccccccgcaaaaggtttcctatggctttaaaataagaggtagttcaggaacattaactgttcactttacatttaagatatgatctcctggagatgttgatgtgccagctggtcttgttgagaggcagttactgatctagcaggtgtttatagattttacacctgtcttgttcttttttttaaaaagaaacaacctgcaactaactaactttatttcgtatgttaatgagacagatgtgaaagaacacaaaatcaaaatgcttcccaggattcacagctctagtgttccttggctttatggtttggaaggaaagctgatttatataggcagaggctctctatataggtccttacctcccctgtcctgttgttttggaatgtgagcagaacacactcaggtctactgtatgaataggacaccctgcgccctgaaattccatcagcttcacagatctctcgtggattctctcagagtgatgactccctctccctttctccagtgtctgaacactacgtggtaagggactttccacgcacaatattactctcagcagacagaagatgctttcctggagaagaaagcggcagtatcttccagaggcaattggagttttcaaatgttggtggagttatggggttgaaggctccagctttactgggtagagtctcacgcctcacagtgcgcttgccctggggcccactggctgtgtgtgggtgcttgtcctcaaaactgtagcagcccagtgcccctggagagccactttacccagcatcactattaggtgctctgccagctctgtggcatggagaggaattgtctggtaagaacggaatgttttccattctctccatcaagaactcgaaaggctgattgacaggtgcaaacgcaaatctggtcatctaggctgaattacaagatgtctggtggaagttaagagacttcaggaggtattaagagggatggaatacctggaattccttgggggccaggagagttgagccatcctcagagatgtgtgcatactgcaaacctcctttaagccagggcactggtattgtgggaagcccagttagggattagagggattccagaattaagatcaacaaagcagtctgacaccctttggggtgccagagattatcacttagattgaggacaggggaaagggggtacactcaactcaattgcttcctataaaatcttacagacatcaatgatcccagaggatggggagctacagtgtcatctcagatcattttccaagggaaggatagatgaccccataactcattatctctaagagagaatgagattccacatgcaagataggaatcaaaacccttttcaccaccttcattgactcagttatgcaaatggccctagctcatagcctctaagcccagagcagacagtgcatcctggttgctgattgcatacctcctgatgggttgtaactgtgtgctttacggagggctagtgtaaacattctcattgcaaagcgtcttgcatggatgagcagacatagagtggcatttgccggagctgagcacccctgacttcagagttcacgtttggcaaagtgatttgttgcactacttggcaattgaagcatcccgaatagctttgttttatggggtggggggcgggggcgaggggaagagagtggagctttctgtctccctactaatcaggagggtccttgtttgggctttaggccccttcccttgttttctgggcagaggaattgcccctaggaatcctctgcaggccctgccagtttcagagctccctcattttcatctctccacttcaatgagctcattcactaaggctttcccacagcccaggatctgacttgggtgggcctgcttgggttttgtgtgcctctgtgccaggaagagaacaggcacagggctctgcttggctattgccggcattcctgggctagtgcgtcacggggtctcatggtgacagcattccactggaaacacggagtcccggaacccaattttgaaaggaatcctctctaaaaatctttcaggagggagaaaacagagatttcagagagttaacagtgctcctcaaaacagcgtttgtcaaggaaattagtagcgacttgtatgacaccctctttctcctgtgatttcactttcctaaatgttgattgctccggggtgtggggcttttttcttctatacccaaagccacctagtagaagggttaagtgcatagactttttccaggcgatctctgtgttcataaagagaagtggggaaagggctctagtgtttcaaatgtaaagtaaccattgttaggaaaatgacttattctttctttcattcatttatacaaatgtaagttctggctatgcttagctactcaagggaaatcagaggcaactgggtcctctagggatgtttagcaatatctggacacgttttttatttgtcctcgctgggaggttgttcctggcatctagcaggcagaggcccagcgatactacagggcacatgccagcttcccatcataagaaatatctccttccaaatgtcaatagtggtgttaccagaaaggggtctctatccagaccccaagagagggttcttggatctcgcacaaaaaagaatttgaggtgagtccatagagtaaagtgaaagcaagttgattaagaaagttaaaaaaaaaaaaaaaaagaatggttactccactgagctgctccaccgaggatacttattattactccttcattatatgccaaacaaggggtggaccattcatgagatttccaggaaaggggtgggctgttcctggagctgagggttcctccctttctcagaccatgtagtgtaacttctggatgttgccatggcatttgtaaactgtcatggcgctggcgggagtgtcttttagcatgctaatacattataattagcatataatgagcagtgaggatgaccagaggtcacttttgttgccatcttggttttggtgagttttggccggcttgtttactgcaaccagttttgtcagcaaggtctttatgacttgtatcttctgccgtcctcctatctcatcctgtgactaagaatgcctaaccttctgggaatgcagcccagcagatctcagccttactttccccagcccctattcaagatagtggagttgctctggttcaaacgcctctgacagtgggatggttgagaaacttgggggtagaccaagggcaaggcagcaatctcagcctgtggaaaacattttagtagatgccattgtaatgtctgaagtcattc

SEQ ID NO: 1888910 - DNA, 4001 bp, Homo sapiens
atctctacaaaaaataaacacaaattagccaggcatggtggcacaagcctgtggtcccagctatttgagaggctgaggtgggaggatcgcttgagcccaggtggttgaggctgcagtgaactgtgatggtgccagtgcactccagcctgagcaacagagcaatactccatcaaaaaagaaagaaaagaaaagagagaagaaaagaaaggaaaggaaaggaaggaaagaaagaaaagaaagagaaagaaaaagaaaagaaggaaggaaggaaagaaggaaaaaacaagaaacaagtatcaatgtgacagcaggaatgagaagactcacacttatgggtgggttaaggtgggaagagggtagataagaagttcctatgtggcccactcaccctcagtatatgcaggggcaatgagtggtgacaaagtccattctcctctcaggctataatatccaggaaggcaggggcgaagtctgccttgttcatttctctgtgtccaatgcccatcatggtgcccaatacatattatttgtggaaggaaagaatgaatgagggtcagagagcaggcaggcaagcagcaagcagctgagaggtgacatacagatcttctgttctccacgcagagggggctcaccctctcagaatccttgcccgggtgcattgcattcagaaagcactctcacccagggacaaaggattagagaggaagagcagagcagaagactcaggcacctgcaccctgcatgtatatctccatatatatttgactttcatggtcccattcctgcaaagtatctctgtgtgcatttgctaagacagatgcctctcctcagggatagcatatgtattcatccccctgcacaaggccacatggacatgccctctcagacaaaacctcagactagaatgaaagatatgagtggcatctttttcagatcacacttgagggtctgcaggtgctggatgtatttggggcctagcaaggaggttgggacaaactgtatgtgggcacacatgtacatgcacatgttggaagatggtacagaaaattgggatacttcattctcttctgtttctctggtaaactataagctcactgagagcaaagactggctgtgcaagtctcatcacccaatgtgtgtttccccattacagtatctgacacatagtaagctgggagtaaacagaaagctcatgctctcaaagaggtgtaagcttgtccagggcaatgatgaagttcattctcccacaggtgccctctacagagcccagggaccttagctgtcttatttaccgttgtatctccaccacccagtgcaggatctggcaccgcatagcaaacacaaacatgtgaaagaaggggacaggttgttggtccttctacatgtagacaaggctcagcctctttgaatccttgaataggtgtgttgcactgaaatagcactcacacctaggttccaaggattcaagagggggagcagacaagaaggctctgacacctgccctttttgtgtgtttgtatgtgtgcatgtgtagctataaccaagtctcactctcatgtatatacagtgtcatttactagggactttacagaaaggcagagaatcttttctcctgcagagttccatgtgagatcagagaagattcatgcttttgtgtatgtttgtgggtgacagtggtaatgagaagtccactctgtggcccacccactctcagggcatgtaggtgtaatggatgatgaggaattccattcttcttcctcaactgtagctccatgagggtagggaccaagcatgtcttgttagcaactgtatgctcattactcaacttagtatcatatacagaaaaggtggtcaataaatacttgtggaatggatgataggaggacagaaagacgctctgtcctacacgaagatgaagctctcgctctcagaatccttgcccaggtgcattgcattcagacagcactctcacccaggtagcaaggattagagagggggagcagaacacaaagccctgtgaatgttcagtgagagggctcattcttcttcacacaaggtacttacttgtcatgatatagaagtaaagagaacagttcttgagctttgcattaaagatgtctagttaaacacacattttgtctgttctctcagatagtaacaacaaaaaagtataaacctataaagagactgggaggagagaggagtgtgaaagggaggaaagagagaatgaatataacgccaaagctcatgatcccgcaaatgctttgtgtgactatgcaacaagaaggcagtacagtttagcacagttgttctctaacatgcaccagaatcatctgaagacctgggtaatatacaggttacagaggtttctgacttggtgagtctggggtgagacccaagaatttgcatttctaacaagttctcaggtgatactgatgctactggtccagggactacactgggagaatcactaatgtagtggaaaaaccaggcactttggtatctacgaaccttggttcaaatgcacgctctaccacatattagcctagagaatcgacctgattttcccaaggtcaagttaaacacttttgaagaatgaggacaatttaaagcctacctcttaaatggtgtcaagaaaatgaaataaagtatagtacctggcacacagccgtcaatatttttacctcttactctctatttttatgtatatatgtgtttgaatgaatgtgcatttttaagggggatggtgaaactcctgcatgcaagggacaggtgagagagaagaggtccgagtatctgtgagtgtgagtgcctgcacaaggggatacacagattcatcctcttaaattcctcacgtgtgagttgatgaggttctccttcaatctccctaggtcaacaaagttcacgccccttcacataagggatatgaaggaaaacatcagaagttccactctctctgtgtgtgtgtgtgtgtgtgtgtgtgtgtgtgtgacagagagagagagagagagagagagagagagagagagagagaaagagagagagagagagacagaaaatgagtaaagatgggggcatctggccctgtgagtataatcaaaaaggctcctgtctctcctgtccctgtatgctcacatgtctgcatatgctgggcacccagccacatgtgggcctcccttgcatgctcattctcctgtatgccttgcttgtgcacatgtgcatatacgagtatttgtgtatctgtgattgtgagagagaacattaacaaggaagtgcatcttcattcaacagctacctaagggaagaatgccgagacagctcactgccctttctgggagggcaaagagagtagagttagggcaggaaggaaccacccactgcttacctgatcagtgggactccgtgtatacaggtctacatccctagatgcctgaccatcctgggggacaaggtggggtgcttggggggtgggaactaaagtaaattcattctccagtatccccagcatgtgtgcacacctgcacagtgagtacaaatgagctttatcctcctatatgtgctagctaggcagtacactcaggggactgtggctgtactgttctcttctggctccctacaggagtaaataatactggcaggcagcaggagaggtaggcgatgtacaagggctctgtccttccatctgcagctaaggctcaccccatctgaatccctgccaaggtgcattgcatgtggagagcactagtaccagtatcaaggattaaagagaaggagcaaatgagaaggctcaggcacctgtaccccaaggatagcatgggagttaggaaagaaaaagctccccttttccagccccttgaacacatgaaggcaggctgaatgggaatgatgaactgtgttctctggcacaagctcaccccacagtaaaaccagggtccctgatgctcttgccactattggatccccaaatccaacaggcattcaaaaagctctctgaaaggaac

SEQ ID NO: 1888911 - DNA, 4001 bp, Homo sapiens
aaagaaatgaaataatgggacatagaggggtgatgcaaagactctacacttttaaacatggatgagattccctctctgaatttttgtacaaggcaatggactggaatagcatttgtacccaactacgaagaatgaaagagagggacaacctgaatagaaggctcgagcatcttcaaatccattgtgtttgtgtgtatgtacaaaagaaacagcactctctggctcacaggtgattttcctatgaccatacaaaggtgaagtgtcttttcttcatatgcatgtgtgagatgactgacaagtagggccactttccttcaagctctggtggcataagcagcaagtagaaagcctattgccttgcacaccagacatgagtgagaagatgctgctaatgacactcattatcctatgcacactgtggctgcagctctgtgtaaggggagacacaccttttgtagttctctagctgagcactgttggggggttggagaggggatgatgggaagactcactctctgctacatacgtatgcatgaacaatgtgggcaacggaagttccttctcttaaacatgctcactaggcatgtgagtatgagttctgtgtctttcttgaccaccctgtctctccatgtctggtgcatgacaggagcgccacccctgcttgttaaaggtgggaatgaatgaaggatggggattataaacaggtgttcttcgctctatgcagaaaaggctcagccgtggaatgcttgcctgggtgcaccgcattgacacagcacttgcatccaggtaccaggattcaagagggggaacaggactgaaggcccaagcagccatacagagtatgtgtgtgtgcacgtgtgcgtgtgtgcacatgtgctcacatgggtttacagggaaggctcaccgcatatagtgtgttcatctgtgactgtacagaaaagtaatgaaaggatctctcctatacagagcagcaagaaggaaagtagcagtaagaagacttccctcatttaatccccatctataagggagttaaggaagctcactggcttgcacgctgagaatgggagagaggagagcacaacaggctccatctcctaccctttcagtaggtggggttctctgcatgcagggccatgtctctgagtgtgtctggtgtacaaggattggggacatttgagaatttcacttgagcagaacctgcacatgcttgtgcatgcagactgggtaacaaggaacatatagatctacttcattcttttgaacagtggcctattcatccacaacatttatgtatagtgtgtttatgagtccctaccagaatgtagggtagcaacctgtccattttgatccctgctatatccttggtgatgaacataatacctgctgtctaatagacacttgagtatctgtggaaggaagaggagggagagttgatgtgcaaaagctctgtccttttaagtgtagacaaggcttcttcccttggaattcttgaaaagggacagtgagtcaaggcagtactggcacacaggctgaaagaatgtgagtgatgcaccaggtcagagggaccactctgtgaggacatgtctctgtggatgtaaccaagtcaggccctttctcttgcacacagcgtatttatgtgtgattgtactgaggtttagtagattctccaacatgtatctgtaccccacccaccctgtaccccacccaccctcaggacatgcagatataatgaatgagaaggagtccattctcctccctgaactgtacactccatgaaggtagggaaccagatatggctcattctcttgtgggccaactgcccaggacagcacctgcaatagagtaggtaggtactcaacaaatagtcatagaaaggatggaaggaggaggtagaagtgctctgtcctatgcgaagatgtcactcccccttgcagaatccttgcctgggtgcactgcattcagaaagcactctcacccaggtagcaaggattagagagggggaaccaggacaggagattccagtacctgtacacctcacatgtgcatctaacaagaaggcttgctgttcttgcctagtgcattaaccttgcattgaactaaagtagagagaagttgcttcgacaagtatcaggctgggtgcagtggctcacacctataatcccaacactttgggaggctaaggctggtggactgcttgagcctaggagtttgagaccagcttgggcaacatagtgagaccccatctctacaaaaaataaacacaaattagccaggcatggtggcacaagcctgtggtcccagctatttgagaggctgaggtgggaggatcgcttgagcccaggtggttgaggctgcagtgaactgtgatggtgccagtgcactccagcctgagcaacagagcaatactccatcaaaaaagaaagaaaagaaaagagagaagaaaagaaaggaaaggaaaggaaggaaagaaagaaaagaaagagaaagaaaaagaaaagaaggaaggaaggaaagaaggaaaaaacaagaaacaagtatcaatgtgacagcaggaatgagaagactcacacttatgggtgggttaaggtgggaagagggtagataagaagttcctatgtggcccactcaccctcagtatatgcaggggcaatgagtggtgacaaagtccattctcctctcaggctataatatccaggaaggcaggggcgaagtctgccttgttcatttctctgtgtccaatgcccatcatggtgcccaatacatattatttgtggaaggaaagaatgaatgagggtcagagagcaggcaggcaagcagcaagcagctgagaggtgacatacagatcttctgttctccacgcagagggggctcaccctctcagaatccttgcccgggtgcattgcattcagaaagcactctcacccagggacaaaggattagagaggaagagcagagcagaagactcaggcacctgcaccctgcatgtatatctccatatatatttgactttcatggtcccattcctgcaaagtatctctgtgtgcatttgctaagacagatgcctctcctcagggatagcatatgtattcatccccctgcacaaggccacatggacatgccctctcagacaaaacctcagactagaatgaaagatatgagtggcatctttttcagatcacacttgagggtctgcaggtgctggatgtatttggggcctagcaaggaggttgggacaaactgtatgtgggcacacatgtacatgcacatgttggaagatggtacagaaaattgggatacttcattctcttctgtttctctggtaaactataagctcactgagagcaaagactggctgtgcaagtctcatcacccaatgtgtgtttccccattacagtatctgacacatagtaagctgggagtaaacagaaagctcatgctctcaaagaggtgtaagcttgtccagggcaatgatgaagttcattctcccacaggtgccctctacagagcccagggaccttagctgtcttatttaccgttgtatctccaccacccagtgcaggatctggcaccgcatagcaaacacaaacatgtgaaagaaggggacaggttgttggtccttctacatgtagacaaggctcagcctctttgaatccttgaataggtgtgttgcactgaaatagcactcacacctaggttccaaggattcaagagggggagcagacaagaaggctctgacacctgccctttttgtgtgtttgtatgtgtgcatgtgtagctataaccaagtctcactctcatgtatatacagtgtcatttactagggactttacagaaaggcagagaatcttttctcctgcagagttccatgtgagatcagagaagattcatgcttttgtgtatgtttgtgggtgacagtggtaatgagaagtccactctgtggcccacccactctcagggcatgtaggtgtaatggatgatgaggaattccattcttcttcctc

SEQ ID NO: 1888912 - DNA, 4001 bp, Homo sapiens
gatctctcctatacagagcagcaagaaggaaagtagcagtaagaagacttccctcatttaatccccatctataagggagttaaggaagctcactggcttgcacgctgagaatgggagagaggagagcacaacaggctccatctcctaccctttcagtaggtggggttctctgcatgcagggccatgtctctgagtgtgtctggtgtacaaggattggggacatttgagaatttcacttgagcagaacctgcacatgcttgtgcatgcagactgggtaacaaggaacatatagatctacttcattcttttgaacagtggcctattcatccacaacatttatgtatagtgtgtttatgagtccctaccagaatgtagggtagcaacctgtccattttgatccctgctatatccttggtgatgaacataatacctgctgtctaatagacacttgagtatctgtggaaggaagaggagggagagttgatgtgcaaaagctctgtccttttaagtgtagacaaggcttcttcccttggaattcttgaaaagggacagtgagtcaaggcagtactggcacacaggctgaaagaatgtgagtgatgcaccaggtcagagggaccactctgtgaggacatgtctctgtggatgtaaccaagtcaggccctttctcttgcacacagcgtatttatgtgtgattgtactgaggtttagtagattctccaacatgtatctgtaccccacccaccctgtaccccacccaccctcaggacatgcagatataatgaatgagaaggagtccattctcctccctgaactgtacactccatgaaggtagggaaccagatatggctcattctcttgtgggccaactgcccaggacagcacctgcaatagagtaggtaggtactcaacaaatagtcatagaaaggatggaaggaggaggtagaagtgctctgtcctatgcgaagatgtcactcccccttgcagaatccttgcctgggtgcactgcattcagaaagcactctcacccaggtagcaaggattagagagggggaaccaggacaggagattccagtacctgtacacctcacatgtgcatctaacaagaaggcttgctgttcttgcctagtgcattaaccttgcattgaactaaagtagagagaagttgcttcgacaagtatcaggctgggtgcagtggctcacacctataatcccaacactttgggaggctaaggctggtggactgcttgagcctaggagtttgagaccagcttgggcaacatagtgagaccccatctctacaaaaaataaacacaaattagccaggcatggtggcacaagcctgtggtcccagctatttgagaggctgaggtgggaggatcgcttgagcccaggtggttgaggctgcagtgaactgtgatggtgccagtgcactccagcctgagcaacagagcaatactccatcaaaaaagaaagaaaagaaaagagagaagaaaagaaaggaaaggaaaggaaggaaagaaagaaaagaaagagaaagaaaaagaaaagaaggaaggaaggaaagaaggaaaaaacaagaaacaagtatcaatgtgacagcaggaatgagaagactcacacttatgggtgggttaaggtgggaagagggtagataagaagttcctatgtggcccactcaccctcagtatatgcaggggcaatgagtggtgacaaagtccattctcctctcaggctataatatccaggaaggcaggggcgaagtctgccttgttcatttctctgtgtccaatgcccatcatggtgcccaatacatattatttgtggaaggaaagaatgaatgagggtcagagagcaggcaggcaagcagcaagcagctgagaggtgacatacagatcttctgttctccacgcagagggggctcaccctctcagaatccttgcccgggtgcattgcattcagaaagcactctcacccagggacaaaggattagagaggaagagcagagcagaagactcaggcacctgcaccctgcatgtatatctccatatatatttgactttcatggtcccattcctgcaaagtatctctgtgtgcatttgctaagacagatgcctctcctcagggatagcatatgtattcatccccctgcacaaggccacatggacatgccctctcagacaaaacctcagactagaatgaaagatatgagtggcatctttttcagatcacacttgagggtctgcaggtgctggatgtatttggggcctagcaaggaggttgggacaaactgtatgtgggcacacatgtacatgcacatgttggaagatggtacagaaaattgggatacttcattctcttctgtttctctggtaaactataagctcactgagagcaaagactggctgtgcaagtctcatcacccaatgtgtgtttccccattacagtatctgacacatagtaagctgggagtaaacagaaagctcatgctctcaaagaggtgtaagcttgtccagggcaatgatgaagttcattctcccacaggtgccctctacagagcccagggaccttagctgtcttatttaccgttgtatctccaccacccagtgcaggatctggcaccgcatagcaaacacaaacatgtgaaagaaggggacaggttgttggtccttctacatgtagacaaggctcagcctctttgaatccttgaataggtgtgttgcactgaaatagcactcacacctaggttccaaggattcaagagggggagcagacaagaaggctctgacacctgccctttttgtgtgtttgtatgtgtgcatgtgtagctataaccaagtctcactctcatgtatatacagtgtcatttactagggactttacagaaaggcagagaatcttttctcctgcagagttccatgtgagatcagagaagattcatgcttttgtgtatgtttgtgggtgacagtggtaatgagaagtccactctgtggcccacccactctcagggcatgtaggtgtaatggatgatgaggaattccattcttcttcctcaactgtagctccatgagggtagggaccaagcatgtcttgttagcaactgtatgctcattactcaacttagtatcatatacagaaaaggtggtcaataaatacttgtggaatggatgataggaggacagaaagacgctctgtcctacacgaagatgaagctctcgctctcagaatccttgcccaggtgcattgcattcagacagcactctcacccaggtagcaaggattagagagggggagcagaacacaaagccctgtgaatgttcagtgagagggctcattcttcttcacacaaggtacttacttgtcatgatatagaagtaaagagaacagttcttgagctttgcattaaagatgtctagttaaacacacattttgtctgttctctcagatagtaacaacaaaaaagtataaacctataaagagactgggaggagagaggagtgtgaaagggaggaaagagagaatgaatataacgccaaagctcatgatcccgcaaatgctttgtgtgactatgcaacaagaaggcagtacagtttagcacagttgttctctaacatgcaccagaatcatctgaagacctgggtaatatacaggttacagaggtttctgacttggtgagtctggggtgagacccaagaatttgcatttctaacaagttctcaggtgatactgatgctactggtccagggactacactgggagaatcactaatgtagtggaaaaaccaggcactttggtatctacgaaccttggttcaaatgcacgctctaccacatattagcctagagaatcgacctgattttcccaaggtcaagttaaacacttttgaagaatgaggacaatttaaagcctacctcttaaatggtgtcaagaaaatgaaataaagtatagtacctggcacacagccgtcaatatttttacctcttactctctatttttatgtatat

SEQ ID NO: 1888913 - DNA, 4001 bp, Homo sapiens
tatggtttacattaataattatatttaaactattatttaataatagttataatacattataattatactattatttaataataatgtctcaacattagcccatcaattttaacaagtgtacaacactcatgcaagatgttaatagcggaaactggggtgtctcgagaatatataacaactctatactttccattcaatctttttgtaaacctaaaactgctcaaaaaagtctatgaatttttaaaatatgaaaagaaactaaaagagccatttacacataaggaaattttgatgctaaaaatcatcctgtgtaacacagaaatccccctagtaatgacagaatagaaattttaagtcatttaaaccaatggttctcaaacttcagtgtgcatcagaatcacctggagggctgttaaaacacagattgctgggccccacccctgactttctgattacctaggtctgaggtgaggcctgagagtttatttctaacaagttcctggaggatgctgatgctgctagtcttgggcatcaagagaggtataaagtctgataaaataagactaaggctgagcagtaaccaaaatgagattttagagtatacaaaagataaggagcacatattaaataacctgaatctttactgcaggttagattgggagaatctgggagagaagaaggaccaaggatcagaatctataagtcccaaatgtttaagaacttgaggactgaaatggagtgtgtgtctctttctgtctctgtcaccactatttataatactgtattgctacgctgacctgaacactataaatttgcaatgggcaatgagcaaaaatgataagatggggaggaatgaatagatcagcttagctaagaagagagtaacaactgaagaatactgctgaggtcacagtagaaagcactcaggctcaggcgctaaggatgggaggaggggagtgaatcagatcatgggcacctgtactccctaggtgagagagagagagagatggagagacggacagagagagcgatagactgaaacagagacatgtatagtccatctctatttgactaaagtaaggtaatataaagatataggctgttctcatttccatattgtgtggggtgcatacaagatcagcaataagaagggtcccttgctcttcaccccctctaattcaagaagagtctgtaatagacatctaaaggcagctcacagttctactcaggatgtcctggaagataaagggcagcttataagctcaaactcctatacattctgtaagtgtaaatcttcatgaatgtgtgcatctccctgtcctcagaggggacagagtggggggaataggaagactctctctttggcccccatcatttgtgcccgtctgaatttttcttctaaagctgcccatcagagagcacatccagtgattttgactctcgtttgtcactgcatccttaacactaaaaagagtatctgtcacactctagaaactcaagatataggaaggcaagaaaagagacatatatgcactcagtccatatatatacatataggtaggcaaggctccatctcattgaatccttggcttaatacttgagacagcactcacatctaggttggaaggaagtgagggagcaaatcagaaggctctggttcccgcccaccaccctgtgtgtggacagcaggtggggaacacagagaaagctcactgtctcactctggatacctgcatacatggacattatttaataaggacatttattctaatacacagacaagcccaccagagcacctgaagtccctaactattctgttctgtgcttccccaacacacacccatcactcaaaaactatgacaggggagggtgggaggggtgatgtctaggctctctgtccttcttggtacagttgagctccccctctctgaatccttgcccaggtgcattgcattgagccagcactagcacccagatagcaaggattagagagggggagcagggcagaaggcttgggcacctgccgtgctcgaagcagagaaggttctctgttacacagctctgtgtgagaacaggaatgagagtcttgcattgtgtatatgttgggagagggtgtcaataagaagtcccatgttgtggcccacactaactcagcacgtgcaggaatattaggtgacaaaaagtcaagtctcctacacatattctttgaggcaagaaccaagtccatcttgtgtgataccatatgcccactgccctggcagcacagcgttagcatgtactaagtgctcaatacttgtgaaagggaggtagaggggaaggagagggaggaggaagtgtgactcacaggcactttgtctgtctatgggcagaaaaaggcccctctgagagtcctggaataggtgctgcactgagacagcatgcacatttaggtggcaaggatacaaggggaagcagagcagcaggctcaggatgtgcacaccacatatatttgcacaggtacccatgtctgtgggagggaataaagaaaagcctgatttctggcaccctgagcccatgtattcacaggaagttggatgacatgaggatgcttattctccatgagcctgctagacagtaaggtcggcatctctgacaggttagtttactgtggcattcccaaacagcaggaattcagtaaatttgttaaagggatgaataaatgaatggaccaaaaacatgcacacacaaatgactgactgaaagaatgaacaaaggaaagagaagggatggacaggctctgtcctacacataggcaaggctcacaagctggtatccttgcacaagcccattgcactgctaagacagcacttgtgcctaggctgcaaggctaggagagggcaagcaaaaatcaaagtccaggcacctgcacaccaggcatgcatctgagtgtgtgtggcaaggaaacttgcaggcaagtttagataataaggctccttcctttcagctttgtacagaaatgtttctacacttacacatgtgtgtgtgcacatgcatgcacaatgtgagcatgtgtattcataagagaatgagaaggctcaattcctgacacacctgtgtctgttgcctaggcctggggaagtctaggcacctaatacctccactagataggaagtcccggagagagacactgtccattatttagcagggtactcccagcacagctcatggcacatcaaaagtgcgcaataaacacgggctacttggattgttcagcagaagattcacgatgacaaggctcaccctcctgtaatccatgcacacaggaggtgttttgagaattcacaactccgatatgcaatgggtatgggagaaggagcagttcattcttctgcacatgggaggggggtgggggaggagagagaaagaaagacagaaagagagaaagagagagagaggagagagattgattgattgattgagagagagacagattgagattaaagtgtcaggtgcacgcctggagaagcagtgccaagtctattccctaataaagtacttgttgtgtgttcacttagcctcatgtgctcactgaatgtgtggttatggaggaggtggagacagtaatgaaatgatggcttccctgccacagtctgcatggactcggcattgggaacgtacatgagcaatgcaggagctcattctcttccacccttcacctgactagcttatcactgcccctagctagcacttatactaaatcagtgattctcaaacttaagtgagcatcagaatcagttgagagccttggtaaagtacagatttccatggtttatggtgtagtaggtcagggatgagcccaagaattggcattttgaacaagctcctaggtgatacagatgctgctggcccagggaccacactgagaaccactgctctatacataacttaaagaaatgaaataatgggacatagaggggtgatgcaaagactctacacttttaaacatggatgagattccctct

SEQ ID NO: 1888914 - DNA, 4001 bp, Homo sapiens
gcaatcttcttaattgacacagaaatgtttggctaaaatattgctttattcacatttttgtccttggaggaaaatctaggcacactgcaacttggatcgtgtaaataaaggtacaaggaatgttttaagtcagaaaagggcatcacgcagtcagggggctgtgtggacgagctcaatttcgatgcatctcgggagacccgggcaaaaggccgcttggattccgggaggcaacgcccccaagtcaggatcccttgctcgccgcccccaaccggtcaggatccctggctcgcgtccccaaccggttccgtgtctcacctgggtcctgcaggcgtccactggaggaagccggatggcgcgggcttggtctttcaggaaggctggctggcaccgggcttccttctggctccagggggaaccgtacaggacggggagaaagggggaagctggtgagaggcagaaggggcgtcacaaggtggctctcccacccccaagtgcaaaggcaggcggatgcggggacctgttcgccgtttgagcctggagattgcgggcctgaggggccctgcgctggccggccggggcgaggcgggagcagaatggggatttctaggccgccgggtcgggctggtgggcggcgccccgggagcctgagggtccccgccggcccgggagggacccgagccgcccccgcgcactgccccggcgcaagggagtctgggagagccagcgtctcgggccgctgaacccgactcccagctctagacttcggaaccccggccccaccccaaactgggaaacttctaggggcccactcctggccccgggaagcccagttccaggcagcccattcagaccagaggagtttgggtgtcttttttttttctttaaggtgacaaaaagtgtgggaaagattccacacctccctccccacgcccgccaatggtcctttacctgtccatgtttcagattaaataattagctcaagagatttgcacagaaagcgaattagcccttttctagtcagactgttaagctctcaggcgggcaactcggaaccccgtttcctcaccgaaggctcaggaggccagcccagtgagggatggaggtggctttagagggcgacagttgtgcagcactcatgagcaacagtgcccaggacttttgaagtcacgaagggctcctgaaatcgacagctcaggtcccgcccctggggcgacaaaggagtcttgggggcgtgccgccgggttggaattgtggtagcagatttttgggggaggagggcgcaaagcagctagaaacgcacatcctcattctggaactatcccaaggcccccatgcttctcagcaggcctcgggctcagattgggcgggttggagccttccaccccaccttgggttcacccgcccgcaaggcctcgcgcctcacccgatccttctagagtgctggagctccacggagcctccctaaccccccagcagcggggaagggagggcgagggagtggggaagaggcccgttattttgatctttcctgaattcttaagtcccttccatacccaggacatgagcgcgtttaccaggaaccgcagagaggtgtaaagacttcttgcagctgctcacccttcctctccccttactccttttccagtcctccccaccccccagcatttcgtgggtggggactgaagataggttttcttcgttgtcctgtgggtggtattctgattgggaagggatttttttcaattgtttacattctacctgagcagggaaagggggtgccaaaatgaagcatcattcacgtccagtcacatatgcagagacggggcaaacgtttgatgcaatcttgggtctcgctgctcccggggccgacaccgcaggcgatggcctaagacttacctgctgggtaggcccgaacggcagtcccagacttaccctggcagcggaaacaataccccagagcaccgatcgctcactgcagaactgttcccgctgctagggcacggctgagcgcgggcaccgcgtctctcctcgactcgcaccgcctatgcgccccagcctagccaggaatactgccctccccggactacagccctgctgcgtggacaagggcgaggacccgccggaaacagagacgcgagcccccgcccacctacctgctcctgagccggcctcgcggggagcgggcacctggtggcaggaacacgcgtccggcagaccccaccttctaccttccccacgagggggtatagcagcgcctcacgttttgaaccatttagaacacttcaaaacatgaattgctgctgtatcccctcggagtcaatgaagggggatcgatctgggggtacctgcgggtgaataaagactggatgactgaaggaagccccgccccaccccctggcaaggaatagggcaaaacttatgactaggccacttcactccaagttaaggtacttcttataacttcaccatttgatttccaggagctgcaggtggagccgaaagtgtggctctcaattttttcccctgaggatgaatcttggaacaacgtagtgggtgaaaagcagagcgatgggggatacgaattagtgtggaagagaatctaattacttctgaaggtagacgaataaggttaagtagaggcaattggacatctggatcattcttgccagtttcaaagtcttggtgaaacttcttcctgctgcatattacaagtctcattcattgtccccattaaaaaaaaacaaaaaacgaaacaaaaaaacaacctttattggaaatggactcagatgactgaaagaaaataaccaaaacctcaccggtagcttcagctgattcttacactatcgttgcgacatatacatctatctttaaaagcattagatgtcctaactcactgctagtgtttttattcttaaacaccccagctgagttattttaaagagctccaaacaatgacagagaactttctgtagatgaaataccagtttacatattaaactggttactcaaacttatttataatttatacctatcaatgtcatctatcaaaacataaatcaaaaagtttaaatacttgatgtcaagtcgctccttcctgtttcaagcagctccacagaaactttcatgtcctgaaatggccggcactgcgcatactccttaatgattaactcattagataccactttttcctttttaaaatggacacatattagcaacaagtcacatgcatgccctctttttgtttgaatacaatattcaattaagcattaaaaaaaaaacccactctgaaatcctcaatcacaaacctaaaagttaaaacaacaaaatcagcactaactgtaatggttttgaaagttaaatacatttcagcacaagtaatagacatttaaattatccaactgtaagtatcttgttacacttacaaattaagtcggtttttcaaaaccagtacaatgaatgttaagtgtcctatttattagttaataaaatgtgcagagtatttaataagattaagtatcgaatttataacatccagactgagatccagtggtaacaaatacactatgtcatggtaaaaaaaaaaagtcattagtaacaataaccccattccctaaattgcgacaatcaagtatctctacattccatcttgttttggcaatgatatttacaaacaacttttacactgactttgggattaatggagaaaaatgtcgttgactgcccttaaaaagaaaaaaaaaacatgtttagcaaatgtacaattatcatgtaaaactccacaactttctcccaacattttgttccacacaaatatacgagccatcatgtcagaagttaaagtcatgcctaatttaacatttccttagttgactacttagaaaaacaaaagttcattcgaaacagcatcggtgtcaaaggcgaaggtcccttccagattgctcttggaatcaaattcatttatacctttcaccctaacccctttcatctctcccagtgatagt

SEQ ID NO: 1888915 - DNA, 4001 bp, Homo sapiens
gcccccaagtcaggatcccttgctcgccgcccccaaccggtcaggatccctggctcgcgtccccaaccggttccgtgtctcacctgggtcctgcaggcgtccactggaggaagccggatggcgcgggcttggtctttcaggaaggctggctggcaccgggcttccttctggctccagggggaaccgtacaggacggggagaaagggggaagctggtgagaggcagaaggggcgtcacaaggtggctctcccacccccaagtgcaaaggcaggcggatgcggggacctgttcgccgtttgagcctggagattgcgggcctgaggggccctgcgctggccggccggggcgaggcgggagcagaatggggatttctaggccgccgggtcgggctggtgggcggcgccccgggagcctgagggtccccgccggcccgggagggacccgagccgcccccgcgcactgccccggcgcaagggagtctgggagagccagcgtctcgggccgctgaacccgactcccagctctagacttcggaaccccggccccaccccaaactgggaaacttctaggggcccactcctggccccgggaagcccagttccaggcagcccattcagaccagaggagtttgggtgtcttttttttttctttaaggtgacaaaaagtgtgggaaagattccacacctccctccccacgcccgccaatggtcctttacctgtccatgtttcagattaaataattagctcaagagatttgcacagaaagcgaattagcccttttctagtcagactgttaagctctcaggcgggcaactcggaaccccgtttcctcaccgaaggctcaggaggccagcccagtgagggatggaggtggctttagagggcgacagttgtgcagcactcatgagcaacagtgcccaggacttttgaagtcacgaagggctcctgaaatcgacagctcaggtcccgcccctggggcgacaaaggagtcttgggggcgtgccgccgggttggaattgtggtagcagatttttgggggaggagggcgcaaagcagctagaaacgcacatcctcattctggaactatcccaaggcccccatgcttctcagcaggcctcgggctcagattgggcgggttggagccttccaccccaccttgggttcacccgcccgcaaggcctcgcgcctcacccgatccttctagagtgctggagctccacggagcctccctaaccccccagcagcggggaagggagggcgagggagtggggaagaggcccgttattttgatctttcctgaattcttaagtcccttccatacccaggacatgagcgcgtttaccaggaaccgcagagaggtgtaaagacttcttgcagctgctcacccttcctctccccttactccttttccagtcctccccaccccccagcatttcgtgggtggggactgaagataggttttcttcgttgtcctgtgggtggtattctgattgggaagggatttttttcaattgtttacattctacctgagcagggaaagggggtgccaaaatgaagcatcattcacgtccagtcacatatgcagagacggggcaaacgtttgatgcaatcttgggtctcgctgctcccggggccgacaccgcaggcgatggcctaagacttacctgctgggtaggcccgaacggcagtcccagacttaccctggcagcggaaacaataccccagagcaccgatcgctcactgcagaactgttcccgctgctagggcacggctgagcgcgggcaccgcgtctctcctcgactcgcaccgcctatgcgccccagcctagccaggaatactgccctccccggactacagccctgctgcgtggacaagggcgaggacccgccggaaacagagacgcgagcccccgcccacctacctgctcctgagccggcctcgcggggagcgggcacctggtggcaggaacacgcgtccggcagaccccaccttctaccttccccacgagggggtatagcagcgcctcacgttttgaaccatttagaacacttcaaaacatgaattgctgctgtatcccctcggagtcaatgaagggggatcgatctgggggtacctgcgggtgaataaagactggatgactgaaggaagccccgccccaccccctggcaaggaatagggcaaaacttatgactaggccacttcactccaagttaaggtacttcttataacttcaccatttgatttccaggagctgcaggtggagccgaaagtgtggctctcaattttttcccctgaggatgaatcttggaacaacgtagtgggtgaaaagcagagcgatgggggatacgaattagtgtggaagagaatctaattacttctgaaggtagacgaataaggttaagtagaggcaattggacatctggatcattcttgccagtttcaaagtcttggtgaaacttcttcctgctgcatattacaagtctcattcattgtccccattaaaaaaaaacaaaaaacgaaacaaaaaaacaacctttattggaaatggactcagatgactgaaagaaaataaccaaaacctcaccggtagcttcagctgattcttacactatcgttgcgacatatacatctatctttaaaagcattagatgtcctaactcactgctagtgtttttattcttaaacaccccagctgagttattttaaagagctccaaacaatgacagagaactttctgtagatgaaataccagtttacatattaaactggttactcaaacttatttataatttatacctatcaatgtcatctatcaaaacataaatcaaaaagtttaaatacttgatgtcaagtcgctccttcctgtttcaagcagctccacagaaactttcatgtcctgaaatggccggcactgcgcatactccttaatgattaactcattagataccactttttcctttttaaaatggacacatattagcaacaagtcacatgcatgccctctttttgtttgaatacaatattcaattaagcattaaaaaaaaaacccactctgaaatcctcaatcacaaacctaaaagttaaaacaacaaaatcagcactaactgtaatggttttgaaagttaaatacatttcagcacaagtaatagacatttaaattatccaactgtaagtatcttgttacacttacaaattaagtcggtttttcaaaaccagtacaatgaatgttaagtgtcctatttattagttaataaaatgtgcagagtatttaataagattaagtatcgaatttataacatccagactgagatccagtggtaacaaatacactatgtcatggtaaaaaaaaaaagtcattagtaacaataaccccattccctaaattgcgacaatcaagtatctctacattccatcttgttttggcaatgatatttacaaacaacttttacactgactttgggattaatggagaaaaatgtcgttgactgcccttaaaaagaaaaaaaaaacatgtttagcaaatgtacaattatcatgtaaaactccacaactttctcccaacattttgttccacacaaatatacgagccatcatgtcagaagttaaagtcatgcctaatttaacatttccttagttgactacttagaaaaacaaaagttcattcgaaacagcatcggtgtcaaaggcgaaggtcccttccagattgctcttggaatcaaattcatttatacctttcaccctaacccctttcatctctcccagtgatagtacaacgagttacacccctaaaaagccacctcgatcccctagtttacatatttccccttagactgaaatttacttacgaaaagagattacaaaggggcgtcttgtcacttcaggagagggtcattcactgatacaatagacaaagaatcgatactttcgagttgccatagccccacccccttctgaactgcaatgtgtttggctaaatgatttaagagccaaagaatacgcct

SEQ ID NO: 1888916 - DNA, 4001 bp, Homo sapiens
accactttttaaaagagcacaaggataagacagggcagcaaaaggtgctattttaaagtaaaaaagaatagcaatctgctataaagagaaaaaaaagaaagcagggagcaataatgccatcaactaaattagggctgacacagggctgggaggtacataatcatctgtttctcagatactcagatgagaagtgaaaccattcccagtgttttcaaaaattttaacatgtatgctatcactaagatgttttcatagggagtttttgtcctatgatttaattccctggcatttacattgtatttcttcaattgtctacattttgaaatcaaaatgttcaaatgctgaatgatggtagtctagactctctaaactgtccaacaaaagacatggattttcttcttcctgagaaaagtctgagttgctatattatctcataagcctcatcaataaggatccaatatctgagagttttttctacatataatacactgtgtatttgcattcctgaaaagaaaaaaatgtgtttttattgttaaaatctagccatattcagttgtcagctaatgaggaaattcatgagaaagctacattctcctaaggtatgatccaaaaagtacgtatgacaataattgaataagaggtgctagaaagaagcacttaaagaaagtgaagttgggacatggcaaagtgtactggaaagagtattggttaggagtcacaagacttgctttctaattccaaattccaatgttgtcaattatttattagctacgtgtcttttggaaaaccacttcatctttctggacataagtttccttatctataaggacagaataataagcccttctctatctcacaaggtgtagcagggatcaaatgaggaaataaagatgaaaatactataaattttaaagtgttagatataggtctatttcaattatcatatatgaacagaatacagaaacatatacaacttataaataaaagatcattattccatttcctaacacttttttaagaattcaagtgcctgatctagacataaaggttgtacacatttaggtgtgaacagttccttgttcccaaaaacaaaaacaaataaacagagaacaaactaaatagattattactattcaaccactaaaatgtagattaagaataatattttaatatatagaggaatagtcataataacgagtaaacagcaggtttgaaacatggtatgcatagttattccaaatgtacatatatatctttatgtaatatatatgtattttatatatgtacacatatatgtgtatacatatattatgctatatcatatattaggttatatatgtatattatgtatttatacatatatataaaatacgtatatattacatgaagatatatatgtatatttggaatatatgtatacatatataatatacatatatattacataaaaatgtatatttggaatatatgtatatatatagagagagagagagaaagaaagacaaagacagagagagagagatatacacgaattccagctagccactacaaggatctataacagaacattaatattggttttctcttggttgggggactttgtagatacctttttgtattttccaatttttctgcaaagaacatatattacattggtaaacagaaaataaacatacacaaaataactgttcagaaagaaaagctcaattagaaacttaacattcttactgaacctgactataagagagttacaaagacatttcaataactactaaagagacttatcaggattgagtttcttcatagaagaggatcagttgaattttcatgaagcattggggtggtggggtaagattccaggtgaaatggctttgaagttgagttccagtcaacatttgccatacggtggtagtctgtgccctctgtatgggaaaccctgccctgcactcccttcagtaagaatacagatagagtgcagaccagggtctcccaacagcagctgattcaacattccactccatattttctgtcttctgttgtgattctatgtgggaaatggatggctcgttgagttaccttttccttttgagttattccacttcagtgatggacactaactgatgagggtagactgtggccttgtggatcagttcgtcccctgtaaacagctgtacttttggactttacataaatttttcttagtcttaaaaaaaatgacaatttaatatatgataggatttccatagtcttccaagaattataggcttatatatattggcctgaaggcagcatgttattatatggactgtaacggcaaataatatgaagcatttgttaacttaatgaacttaacactgtaaaatgctgtgcatgtattatcattccatttaatcctcttaagaaccctatgaggtctatactactattacctccattttatagatgaggaaactaaaggacagatggattaataattcctttgccccaaatcataaaccttataagcatttgaattgtgtttcaaatccatgtaatgtcagagccctccctcttaaccactacaggcattttaaaggcagatattatgtatcatttattatgatgctgcagcctgcttaaaatcaggatagcaaaaggttgttgccacagggtaaaaaggggaagaagtgggggagggtagtgtgttctatttcagagatagagacaatgactccattgttggttattttgagtttaaagagccattagtgataggttaatgtgcagcagccatttgtatatataagcctggctctcaagatgaaaggtgtctgcatatggatggtaactgaaaccacaagaatacatttaataatctagagaacacaagcagaatacaagacaactactgaggctggaaactgggggtggggaggacatcaaacatttcagaaaagacgagggaagtgtaaaaattaaaagaaaaatagtgatggtgtagaacagagaaaaagcagtgttgtgaaagcccacagaagagatggtttcaatgaaaaagttgaccaacctggtcaagtgctgtagaaaggagaaataaggtaaggactgaagggagaaatggattttagttggcagtcactagcgacattagcaggaggagttcatggatggcaatgtgggcagaagatagaatgcggagggctgaataattaagaattagatgagaaaataaaagcaaaggtgaagctgaataatttaaaaataggcgagaaaatgaagaaagctcttgcctatcaaaggaaagagacagtctgaaagagaaacttaggagggactttttaggatgagaagtcttgaaatgatctgtatgccagtggaaaaaaggtagtagtccaggaggtagtgaaggtacaggacaaaggataattgatgtatctaggtccccatggctttgggaagagataaaataaatggaaaaagaagaggaacttttcttttgggagatggttgttgaactgaatggcttttaaggcccttcacaatactgatgcaatttcataaaggatggaaaaatcctacagttattgtagtgagttctggaaaactagacagaggatgtactccagtggtatcaggctggcaatacatggcacaaaacaatgttacaaggctccagtgtacttcagacaactaccaataacccctgtgcctgatgctaaacccagacttttttcaacaaataactgtctcttttcctttcttgtctggcttcttttaaatgctaagtttgaaatgtgatacctttgcatgaaagcggcatgcagtctacatgtcagttgataagagtatactggaaatatttcactttaataatgtggataggatccttctgcctctccccttctcccctggcccccacaccttgttcttaatatctctggattccatctcttccctaaaatacctttaggatttctcctatgtgcataacaaataacagcattatttacattttagcactt

SEQ ID NO: 1888917 - DNA, 4001 bp, Homo sapiens
atatatatatatatatatatatatatatatatatatatgcattttttttaaatgacataaatttactggagtcataggtttcagaaaagagcatctatgtatgggaagattcctatagctattgttgtggagacctaaagccacctgtttttagcatctccttttttaaaatcaaaattactacagcaaacgtaaggcattgaagatcgaggttttggtgtttctgctgtgtcatggacaggatgtttgtgttcccctaaaattcttatgtggaaatcctaacttccaaggtgacagtactaggaggtgaggcatctgacaggtgatcaggccatgaaggtggagccctcataaatgggattagtgccctagggagctcatttcactctttttctgccatgtgaagatacaataagtcaccagtctgcgacgtgaagccccctcaccagtacccaaccatgctggcatcctgatcttggacttccaagttccaggattgtgagaaataaatttctgttgtgcataagccactgaatctatgttatactttttatttgttttgttttgtttttttgaggcagagtctcgctctattactcaggctggagtgcagtggtgccatctctgctcactgcaacctccacctccctggctcaagcagttctccagcctcagcctcccgagtagctgggattacaggtgctctccatcacacctggctaatttttgtttttagtagagatggggtttcaccatgttggccagcctggttttgaactcctgacctcaaatgatccacctgcctcagcctcccaaagtgctgggattacaggcgtgagccactgagccccacctgttatacttttttttataacagctcaaactcatttggggttggcatgtatgttctctaaattgactggttcccatgctttaagtacaacaatgaccctgcaccattgctcaggtaattgcctcctcctgtaatgagactgcccatccctaaaatctcagaaccttcagccctttgggtccccagaggcccagttgacaggctacttcctccataaagctctccccaagaaatgaagccagagagccagtgcctccttctgaatgcctactgcacttactgtgtatgtccttcaaaaggatggctctggtgacctactggccttgtgtggaggatggtcctgtgtgctggtcttctctctcttctaccaaactgcaggctactggtgagcagggctgtaccttacacacctctacagcaccaaataggggatgagtgttccaagaaagctgtgattcacatgaatgttttcagaaaagaagccagaataaattgtacactatactatagatcccttaatccttattactgcaaaatacattaattgtgaagcttaaagaacgtccccactgcttacacaacaggtgtagcttacataatctgctctacccagctgttacttacttgtggcaattccctcctggcttctactccctgtcgatatgtgggattactgcaccatccagtatgatttccttattccttgctccaatcataacaaatttgttaattttcctttataacagtaaaaatggctgaaactccaaataaccagagatatccctagggttttccatgactataaaactcaaaagacaatccaggatataaaccaatatttgtaaatattgccataaaattcattgctcagaattttttttttcctatatagtcttctttgacaaaatactgcagtattcccaccatttggaaattgtgttacccaaaaggtatagaatgggatgaagtgatgatgcaaatgagtattaggactatgagcaaatgaatgggagcagtaacaaaagtccaaaagtcaggaaaaatgaaaatccacgaacttggcgatgctccagagaggaaaccagcaagtgttgacgctaaactggcagaaacatcaatacttcctggctcccccactgggtgcatcaatttaccaccggcaggctgctcttctgcttcaagtgacaaacagtaagtgctttcaatgacagtatgaaaaggaatgacccataatctagaagcatggctatgggcagcaaagaaaagatgtgattgctgggagtctgtctcagctgtactgctgattagcttaatgatcttggacaagtcatttcctttcactgaaaaaataccagtgtttcacaatatttgcgtgatggaaagagttaacatagcaggcctgacactgctattcttagtaaggcctgtttgcaaggttggtccttggctggtgtctggggacttggattttgggagggtttccatcaccctgataagagtggctcactctgcttaagctgtgtaaacaatagggtttacactgaatacctgctttcctccttggggtctggaattttgctgtgtaccaggtggagggtgcctgtgtgaccagctcccactaaaaaccctgggtactgaatctctaataagcttccctagtagacatttcacacaagttgtcaaaactcatttgctagaggaattaagcatgacctgtgtgatttcagtgaaagaggactggaagcttgcacatggtttcctccagacttggccccaatgagccttttcccgttactgactttgctctgtatccttttgctataataaatcacatccgcaagcgtttctatgtactgagttctgccagtgaatcaacaaacctaggccggttttgaggacctctgtcacaattggtatagtgttgaatagtctaccaaacgtttttttcaacagtcttgtgaaataggtattattattcccattctatcgatgaagaaactgaagttcaaaaaggtgaacagagagtgtgcccagaaaataaatatttccgtgtttactatattatatattgctgttctcaaattttagtgaacctaagaaccacttggaatgcttgttaaaaacagtttcttggagtctgtcacccaagacttggattcagtaagttcaaggcccaggaatctgtatttatagtaagcatacaggattattattatttgagatggagttttgctcttgttgcccaggctggagtgcaatggcacgatctcggctcagtgcaacctctgcctcccaggttcaagtgattctcccgcctcagcctctcaagtagctgggattacaggcctgtgctaccactcctggctaattttgtagcccagtctgaaatgcataagcttcttggtggctgcttcctaaactgatcattcttcatctgttattactgactcagactgtgttaccaattcagctcaaaacaattaaacaagtattaattgaacatctactgtttacctgatgctgtgctaactgcaagatcattttcaagaacacttctgatttttccaagaataccttggtaaagagaaagggactaggaaaacattgccacattaatactttatgacaacatataatagagacgtctaaaaaacaaatgatgatatctgcttgaacagcaatatcatcaacatcaccaatcctcccatattccattaaatacatatggcacaagaaatcaatgatttctacttcacaaatacaggttaaccttctaaatctggaaatccacggtccattatcatttataaatcacatcttctattatcaagaagtcagccgacccagtaatccgtccatacactgcaataattgaggggctgtctgccaatgtgtgggcatagggcatcctgtgcccatatctgcagtgctgagcactcattcatcattaagctgcagcagtgttaacatatgctgcagttgtgccagtatgttttgttttacgatcaccgctaatctacccttataccaggccaagaaggtaaatgttaagtgaaaggaaataaactcgagagccagcacctaattcatttgtggaagcccagaacctccctccacctaaccagaaaaactcccccagtctcgaggg

SEQ ID NO: 1888918 - DNA, 4001 bp, Homo sapiens
tttctacttatatttttattaatatacttctgtgttttcttgtctctcttatccccttatcatgtaacgtaaggtgtactgatattatatcatagttattaaccgttgttaactttaaataatcatagtattgatgttatggaacaccaaggagaagagtaaacaaacaacactccaggactttatctcctcttctggtgaagtggttcatgaattctgggttgtataaatggtagttgtatcttattaaatgaaattatgaccttggtatttttctcatttgatgattaaatataatttaaggagatgcgtataagtgacaacatgacaaggagtgaacttgtgatgattaattctatatttcaacctgactgggtcatggagtgcccagacatttggtcagtcattattctgggtgtttctgtgaaggtctttttggatgacattagcatttaaatcagtagaatgagtaaagcagaccaccctccctaatgtggatggatgggcctgcaccaatcagatgaaggtttaaatggaacaaaaaggctgactctcccctaagttagagagaattcctcctgcctgactgcctccaaactggggcatctcatttttttctggcattgtactcaaattaaaacattagctcttcctgggtctcaaacctgctggcctttggactggaactacaaaatggtttgttctactgcttctttggcctctggacttggactgcaactataccatcagttctcctgggtccccagcttgctgacccatccccctgcagatctaggaactcaccagcctccatagttgcctgaggttattccttgcagtatccttataataaatatcttaagggatttattttaaaaatagacttctataataattatatacatatatatttgctcaatcattgtcctgggtgtttctttgaaggtcttataagacctgatccagaatctgagggtgcctggggtacctgtgaaaagtatgtcctgtaggttttttaagcatttattcctttttctccacaaaaggactacaaaacactgggaacaagatttgaggtaggaacatgatcctttttctgcatccttttcctttttctgtgaatgtcatatgtatgtgtgtgtgtgtgtgtgtgtgtgtgtatatatatatatatatatatatatatatatatatataaagggatatataaacccctttgtatatgtaaagtttccagaagtatatgtacacacatgttcatacatatatgttctcatcacttcatccgttcccataatagttaagaccagctaaaaacatataaatagttcaaatgaaagcaaatttggggtatcatatcaaactccactgatatgagattatcatcacggatacacaggaatattaaagggaatttgagtgtatctaagccttgaggagatcacttcataagaaagatggttcatggagtttggagttcagcagggaagggcaggaggatatttgtgctccctaaaaagaaggcttaaatattgtgaggaaagaagatcagtgtaaacttctcaggggtttataaggcaagaagtgtatttgggttgttatagagagaaaagactaagaggtacaagagaaaaagaagtatcatgttcctacctcaaatcttgtttccagtgtagtcagtcattttgtggagaaaaagcaataaataattgaaaaacctacatgagagacttttcccaggcaccctcagattctggagcagatctctcaagaggtacttcagagagtacctggaaatggctcatcactaaaggttgggtaccaaggctcaagggagggcagtattgtcactgaaattccactcgtcattaccaatgccaccacaaatgttgtccatgttgcacattactctactcagaagggtgccttacaaatattaatctattaagtaacaccttcctgaataaggcactacacatagtatggctgatggtggtggcactgaccatcttaatagtaacacggggaaactacagatgaggctattcccagagaacctcatcctctaggttttaccccacagaattctctttaaagggttgtatgagttgacccatcactgagtgggtagttctgacttgtatctgttgtgcattatttcactccaaaaggtgcaaaacatatttctagacacatgcatggcacttcttgaagtgaagcactacacacagcacagcggaaaatgtccctcactccgccatttcagtcagaatcccaacactctcagtccactaggaataagcagaatatagtcaatagattaaaaaaaaaacaaaccctttttcctctcccttttgtctcctatgtctttcactgaatgcttattaattacttcacctgctgcacatttaatgagacagattttaggagagagaaaattttccctcttcctcccagacttagcatacttcactaaattgttctgctaattttcaatttaatatagttggcacatgaacaactacttcatatgcctcaaaagccagtcattacatagaaaggaccactcaagtgactcatcatatctagcgattgcaggccagatagagctcagttgaagcagtgctggagagttctcttctttccaatttgaatcttctttatatcattggggccttggtttggcatcctctgttcagagatgaaggcctacagcagcagaagcagtagtcaccacagtcatgcacttgcaaaccagtgtttagaccaagaaatatctgcaacacatgtgaacacatgcatgccacacatgcaaataaacatgtgaacaatgaaacaaacaaccccaaaacgaatgctcacaaaatagggcaatgcaaacacaaagacaaacactgcatgatctgactcatacgcagagtctaagaaagttgatctcataggagtagagagtagaatgatggttaccagagtctggggaagggaagggaaaggggggttggggaaaaattggtttatgggtacagagtcacagttaggagggctaaaagttctgatgtgttattgtgcagaagagtgattgattatagttagttaacaatattttatggtatattccaaaatcactagaagagagggttttgaatgttcttcccacaaagaagtgatggacgtttgaggtaatgaaaatactaaatccctgatttgattattacacaatgcatgtatgtatcaaaacatctcactatatctcatcaatatttacaaattattatgtgtcaactaaaaaaacaataaaggagtaacaattttttttttgagacagagttttgcttttgttgcccaggctggagggcaatggcacaatctcagctcactgcaacctccgcctcctgggttcaagcgattctcctgcctcagcctcccacgtagctgggattacaggcatgtgccaccagacccagctaattttctgtattttctgtagaagcagggtttcaccgtgttgaccaggctggtcttgaactcctggcctcaggagatccactggcctcggcctcccaaagtgctgggattacaggcatgagccaccgtgcccagccgggagtaacaatttttaagaatgtaaaaatactactgaaaattctaattaacacacatttaaaaacaccattcaaaatcggaataaaaaaaaacacacaaaatatacaaaacacatccaaatatacaaaattctacaggaaacaaaaaccctaaaaaagcaaacaagcaatacaataacaaaaatcaaaaagaacatacacaatacaaaaacccccaaaacataaaaacaaatacactaaaatgtaactttactttccaataatcccaaacaaaacagagaacgaagttcaaaggaaatctagcacgtatcagggatagacgacactgcactgagaaatgctgcgagtgtaggaaggagagcagtggacactgagaagtaaacagatgaggtatcataa

SEQ ID NO: 1888919 - DNA, 4001 bp, Homo sapiens
agttgtatcttattaaatgaaattatgaccttggtatttttctcatttgatgattaaatataatttaaggagatgcgtataagtgacaacatgacaaggagtgaacttgtgatgattaattctatatttcaacctgactgggtcatggagtgcccagacatttggtcagtcattattctgggtgtttctgtgaaggtctttttggatgacattagcatttaaatcagtagaatgagtaaagcagaccaccctccctaatgtggatggatgggcctgcaccaatcagatgaaggtttaaatggaacaaaaaggctgactctcccctaagttagagagaattcctcctgcctgactgcctccaaactggggcatctcatttttttctggcattgtactcaaattaaaacattagctcttcctgggtctcaaacctgctggcctttggactggaactacaaaatggtttgttctactgcttctttggcctctggacttggactgcaactataccatcagttctcctgggtccccagcttgctgacccatccccctgcagatctaggaactcaccagcctccatagttgcctgaggttattccttgcagtatccttataataaatatcttaagggatttattttaaaaatagacttctataataattatatacatatatatttgctcaatcattgtcctgggtgtttctttgaaggtcttataagacctgatccagaatctgagggtgcctggggtacctgtgaaaagtatgtcctgtaggttttttaagcatttattcctttttctccacaaaaggactacaaaacactgggaacaagatttgaggtaggaacatgatcctttttctgcatccttttcctttttctgtgaatgtcatatgtatgtgtgtgtgtgtgtgtgtgtgtgtgtatatatatatatatatatatatatatatatatatataaagggatatataaacccctttgtatatgtaaagtttccagaagtatatgtacacacatgttcatacatatatgttctcatcacttcatccgttcccataatagttaagaccagctaaaaacatataaatagttcaaatgaaagcaaatttggggtatcatatcaaactccactgatatgagattatcatcacggatacacaggaatattaaagggaatttgagtgtatctaagccttgaggagatcacttcataagaaagatggttcatggagtttggagttcagcagggaagggcaggaggatatttgtgctccctaaaaagaaggcttaaatattgtgaggaaagaagatcagtgtaaacttctcaggggtttataaggcaagaagtgtatttgggttgttatagagagaaaagactaagaggtacaagagaaaaagaagtatcatgttcctacctcaaatcttgtttccagtgtagtcagtcattttgtggagaaaaagcaataaataattgaaaaacctacatgagagacttttcccaggcaccctcagattctggagcagatctctcaagaggtacttcagagagtacctggaaatggctcatcactaaaggttgggtaccaaggctcaagggagggcagtattgtcactgaaattccactcgtcattaccaatgccaccacaaatgttgtccatgttgcacattactctactcagaagggtgccttacaaatattaatctattaagtaacaccttcctgaataaggcactacacatagtatggctgatggtggtggcactgaccatcttaatagtaacacggggaaactacagatgaggctattcccagagaacctcatcctctaggttttaccccacagaattctctttaaagggttgtatgagttgacccatcactgagtgggtagttctgacttgtatctgttgtgcattatttcactccaaaaggtgcaaaacatatttctagacacatgcatggcacttcttgaagtgaagcactacacacagcacagcggaaaatgtccctcactccgccatttcagtcagaatcccaacactctcagtccactaggaataagcagaatatagtcaatagattaaaaaaaaaacaaaccctttttcctctcccttttgtctcctatgtctttcactgaatgcttattaattacttcacctgctgcacatttaatgagacagattttaggagagagaaaattttccctcttcctcccagacttagcatacttcactaaattgttctgctaattttcaatttaatatagttggcacatgaacaactacttcatatgcctcaaaagccagtcattacatagaaaggaccactcaagtgactcatcatatctagcgattgcaggccagatagagctcagttgaagcagtgctggagagttctcttctttccaatttgaatcttctttatatcattggggccttggtttggcatcctctgttcagagatgaaggcctacagcagcagaagcagtagtcaccacagtcatgcacttgcaaaccagtgtttagaccaagaaatatctgcaacacatgtgaacacatgcatgccacacatgcaaataaacatgtgaacaatgaaacaaacaaccccaaaacgaatgctcacaaaatagggcaatgcaaacacaaagacaaacactgcatgatctgactcatacgcagagtctaagaaagttgatctcataggagtagagagtagaatgatggttaccagagtctggggaagggaagggaaaggggggttggggaaaaattggtttatgggtacagagtcacagttaggagggctaaaagttctgatgtgttattgtgcagaagagtgattgattatagttagttaacaatattttatggtatattccaaaatcactagaagagagggttttgaatgttcttcccacaaagaagtgatggacgtttgaggtaatgaaaatactaaatccctgatttgattattacacaatgcatgtatgtatcaaaacatctcactatatctcatcaatatttacaaattattatgtgtcaactaaaaaaacaataaaggagtaacaattttttttttgagacagagttttgcttttgttgcccaggctggagggcaatggcacaatctcagctcactgcaacctccgcctcctgggttcaagcgattctcctgcctcagcctcccacgtagctgggattacaggcatgtgccaccagacccagctaattttctgtattttctgtagaagcagggtttcaccgtgttgaccaggctggtcttgaactcctggcctcaggagatccactggcctcggcctcccaaagtgctgggattacaggcatgagccaccgtgcccagccgggagtaacaatttttaagaatgtaaaaatactactgaaaattctaattaacacacatttaaaaacaccattcaaaatcggaataaaaaaaaacacacaaaatatacaaaacacatccaaatatacaaaattctacaggaaacaaaaaccctaaaaaagcaaacaagcaatacaataacaaaaatcaaaaagaacatacacaatacaaaaacccccaaaacataaaaacaaatacactaaaatgtaactttactttccaataatcccaaacaaaacagagaacgaagttcaaaggaaatctagcacgtatcagggatagacgacactgcactgagaaatgctgcgagtgtaggaaggagagcagtggacactgagaagtaaacagatgaggtatcataataaacaatgatagaaaacaaagtagaacagtttcccacctcttcactacagcctgtatttcctcatgactttgggtgaagtgaggtatttggccactgcaaaaacaaaatccacacacatcatcagttgccaactagacaccaagaaagacatgatttgaaagagctttcctgggagataatgtagcagcagactatcaaattctatcccatcctctgatatggacatgtaaca

SEQ ID NO: 1888920 - DNA, 4001 bp, Homo sapiens
aaccaaagaagaaaactcagattggaaccaacaactaataattaaatcatgacagccccctccccccgaaacaggaataaaacatttgctgaaacacaaaccacaattctaacttaaaaaaaaaaaaaaacttcaagtatgcaacgaaacaacaagcagaggtgccatgaacactgaattgcaaacaataaaaaatcacactgtacccccaaaatatgtacaatgattatgtgtcagttaaaaataataatacaagcaaacaaaataaacaaataaacctaaaaaggaagaaccaactttgaaaaataaatgcacagagactggaaatgaaaggacaattataaacaaaataatatcacaaaaaacaaaaacaaaaccaaaatcagacagttaccaatgtctggataaacaatattactaagcaaaaacaatttgaaaagtccccccaaacccaaccacaatatgcacatgaacgaatcaactaactaaattaactcatttgtaaaaaccaacacacacatactcacacacaaactcacaccttctcaaaaataagcacaaatttgagaacaatttgcagtggtgccactgtcactgccccagacacacatctagggtggtgagactttctgcccaggaaaactcttagagctcatgaaatagggaagaagataccatgagcagtagacactggttgtacacaggcgataatgtagtagtattagtgatataagagaagaatacccttcctcttgattacaatctaaatttttgccaagatttggaacggagtgagacatgtcactgactcgagatgacaacaaaattccataaacttcaacttgcccacttaaggtgctttatgagaattaatccggaaggggtcaccaggatgattaccctccaaccccactccacctccatttttccagcaccgtagtgtgtacaacctgcttcctagtcactgctccagtctgaagatgttctccagggatccggcgctggccatcttttgtctgtgattctcaagttttctttctgaagaccttaggttaagaaggagcaactgaagggaagtggaagggaaaagacaaatatatatgttatcattctcaataatctgagatgaataccttcacttctttttattccttcatataattttaaaaataaaatgttaaatataattcaaagaaaactaacaaaacaaatattctaggcaacttcttaaccttttatagatatgttgaatttagaaaggactgatatacacatattttcaataaatattttttaaaatatacatataaatattttttaaaaatatatacataaatattttatatatatatatattttttttttaaccaacagatagataattttggaaataatgtatttttccaagtaaggaagaacacacaaactcttaaggaaaggcttgtcttcaatcctgaaagagcaagagctttttggtgcagagggatgcttctgaggcaggagggaatttgaagagcccactgggaaatgaaaaggcttggaagctaaaagaaatgttgtgaggaaaaatacgttggaggtttttcaaggcaaaatgaatagttgggctctgtagcagtagaagctctgaatataaaaagaggaaaagccacatcctcactacaaattttcttacctgtgtgggcatgcctcctttggacaagggtatataaatccccggaaagcctacatgggtgatttttcctgggagccctcagtccctaggatttgcctttcaagacctgcctatgggagtccattgagttagcccagcaaggggagggtggtgcttggacacaagggagggcagctctgtgcatgcggctgtatacactcacacccatggccaccaaatatgcgttacgtgatgtgtattactctactccaaaaggctacaatcatgttttagtttacatgagtgacgccctctggagtagggcactacactcagctgaaggtggtggctctacccaaatatatacgtgaagtttagatacgatgaagaatttctagtatgtttgccactccattcccattctctaaccatcctttagtgaggatactcttacttgctgcatatttcatgtgctgattttgaggacttcttctcttcagtcggcaacaaataatctcaccaacattttcctatgtattttcaagtcattaggaatggcatattaaaaatgatttgtgttccaccagtgttaaaggtctccccaccctctgtgcccccaaattcctagtcccttggttcagagttatttaacttttaacaccaaaacaacagagagaacaaggtaaacatgcagagaattcaagcaaaagagatagatcatttaggcagtgccaggattcataggacaaaaatctcattttctccaccattcctggggattatacagatcatttaccttgcctggaatcatttccaagagagcaattggcttagaacctagttatatcttattcttccttctcagccctggactttctcaacatttcctagagttcttgtcaagagggtctctttcaaaattttcatttggagacacaggcctcccaggaatctattttttcctttcaatactgaggctgaagaaagggggaagcaagtaggagtaagagatccacagaccccaaactagttatattttaagagctagggagccaagttaaacaaaagactgtaaagagagagggaggtgcactgaataaattaaaggattagctaaattacttgccatggagcaagagaaagggagattatggtgtgggacatttaatctggacatgtccaggtctcccagcattcaggaacctccaccagtgtcagtagtccaaaatgacccaagtctacagctacacaccaataaatcaaaactcaaacaaaaatatttctaaaatcaattctacctcataaataagtgaaacaatgctcaatatcactaattagggaaatgcaaccaaaaccacaatgtgatacgacttcacacccattagaatcaatattatcaacaagcaaacaaacagaaaataacaagtgttgacaagtgaagaaattataaccccgtgcattgctggtaggaaagtaaaatggcacagtcaccacagaaaacactatggtggttcttcaaaaaattaaagatataattaccatatttcagcaattgcagtattgggtatatacccaaaagaactgaaatcagtatttcaaagggacatagtgcccccatgttcaaagcagcattatttataatagacaaaaggtagaagcaatacaagtgttcatcaacagataaagtgatatgcaaactgtggtatatgcatacaaggaaatgttatttgccctacaaaaggaaataattttctttttaaactgggtttccttatgttgttcaggctagaatctaactcttggactcaagcgatcttcctgcctcagcctcttgagtagctgggactacagtcatgtgcatacatgtccagcttagaaataaaattctgacacatgctataacatggattaaccttgaagacaatatgctgggtaaaataaagcagtcacaaaggaatactactgtatgattttattctattcagtccctggaataggcaaactaggagagacagaaagtagaatagaggttaccaagagctgggaatggggagtcagtgtttaatggttacagaggtttagtttgggataatgaatcatttctggagatggattgtggtgatcattgcacaccactgtggatttacttaattccactgaattttacacttaaaatgattaaaatggtaaattttatgtttatatacattttacaattaaaaaaaaattaacctccaaataattccaaatacctctgaaaatataagaacccacccccaaaacagataccaaaactaaaacaatcagtaataaagcaaaaaaatacggccacgaagcaaaataaaac

SEQ ID NO: 1888921 - DNA, 4001 bp, Homo sapiens
tacacttttccattcagtaacatagcatgagcatggcctcagaaaggtgaaacaccagagtcataccaaaatatgcctaatggaaatagcattaggacaggagagagaaaaccagaaaaaaatagtgttgaaagaaataatgctaaaaacttcaaatttcataaaaaacataaatgtacacatcaaaaaagtgagataagcatgaagatatccagacttaaagacattgtattcaatctgttaatggagagagagagagagaaagagaatgtgtaaaagaaagaatacctttatagctgcaagagaaagggagcatatttcatacaagtgattcttacaagatttaacactgacttcttttgagaaaccatggaagctggaatcagttgtagaacatattcaaaatgctgaaagaaaaacacagttaaccatgaatctcacatctaagtctaaaagttgttagatacagcattaaaagcataatgcatacattgaaaaactgttaagtcgtactttatcaaaattgaaaacatttgctctgcacaaaatactgttgaaaatgaaaaaaacaaaacagattgagagataatatatgtaaatcataattctggccaagaaattgtatgcagtatacctatatatctctatctatatgtatatagtaaacctcaaagataagtgaacaactcggtaaaggtgagaaaaatcccaaaggcacttcaccaaggaagatacatgaatggtaagtaagtacatgtacaggtgctcaacattttccgtcagtaaggtgatgcaaattaaaaccacaactgacaagggaactatacacatattaaaattgctaataaaaacaaaacaaaggcttttcaatacaaaatgctgataagaagttgggtaattggatcactaatacattgcttaatgcagcacaaaatggtaaaaccattctggaaattattttttaattaattttaaatgtaaacttacacttgccatgtgaccttcaaatcctactagtagcagtttacacaaggaaaatgaaacttgtgttcatatatacatctgtatgcaaatatacaaagtagctttatttttagccatgaataactggaataaaacctagatgtccacctgtgacttctaccctacttgattaaaaaaaaaaaaaaaacagattattcttgctctaattctgactctcattctctctcctttacccattttctgcttccatacaccctctctcatcactgaatgagaaagaaacaacataaaggaagtaaatgaaaacctagagataaaaaatgtttttaagtaaatgcaaaaaaatcaaacaataaaaaattctcagcattattcacaattcctgatatatgacttactaataatagattaaaatatatttacaaaagaacgaatatgtactttattagcacatgaagaaagaggacattttatatctgagatagaatatattttgattttcagaaggttaagtgtttaagaagcaggagggaattttggaaagcttaagaagacttgaaaatgagaaaggaagctaacagttaacagatttggatgttggagtaggcaatagtttctgcaaaaagaataatactcttaaggcagaaagaaactgtaaaatggcaagataaaccttggttcaatcaggcaacatcatagaaatggaaatcaatctcagaagaactcaatgggaggcttgttgcaaggaccttaaattcctagatcacgtgtctggtggtcaggcacctgagagagttttctgaggtagtccagcatggaagtggagggtttgtgagggtaaaatacctgcactgtaaggaaagcatccctctgcatgcaactaaatgcctccaacacacacacagtgtcatcatgtatgttgcacgtgtcatgcagtactctacccacagacgtaccaatcatttttaattatacatgattgccactgtctgcagtagggtaccacacacagcatgtctgaggatggcagccttgccttaatacccacccattcacctttaaaacaaccattcaatatttacaagctgtgcgtggccattggaatttggacgaaggacttctgcagaattcaatccactatctttccttatatttcccgctttgagtcctgtccactcccacgttgcatctttcacatgacagttttcagaactgagaaatattaaacatttctgttaggttctgttactcacagaagaaatatccttgcatgtcttatcctgttccttataatagattaaaatgtatttacaaaagaacgaatatgtactttattagcacatgaagaaagaggactttgtatatctgagatagaaaatattttgattttcagaaaagttaagtgtttaagaagcaggagagaattttggaaggcttaagaagacttgaaaatgagaaaggaagctaaccattaatagatttggatgttggagcaggaaacagtttctgcaaaatgaataatactcttaaggcgtaaagaaactgtataatggcacaataaaccttgattcaatcaggcagcatcatagaaatggaaatcaatctcagaaaaactcaatgggaggcttgttgcaaggaccttaaattcctagaccatgtgtctgattaggcacctaagagagttttttgaggtagtccagcatggaagtggagggtttgtgagggtaaaatacctgcactatagggaaagcatccctctgcatgcaactaaatgcctccaacacacacacagtgtcatcatgtatgttgcacgtgtcatgcagtactctacccacagacgtaccaatcatttttaattatacatgattgccacgtctgcagtagggtaccacacacagcatgtctgaggatggcagccttgccttaatacccacccattcacctttgaaacaaccattcaatatttacaacctgtgagtgaccattggaatttggacaaaggacttctgtagaatccaatccactatctttccttatgtttcctgctttgagtgctgtccactcccatgttgcagctttcacatgacagttttcagaactgagaaatattaaacatttctgctaggtcctgttactcacagaagaaatatccttgcatgtcttatcctgttccttataatagattaaaatatatttacaaaagaacgaatatgtactttattagcacatgaagaaagaggactttgtatatctgagacagaaaatattttgattttcagaaagttaagtgtttaagaagcaggagggaattttggaaggcttaagaagacttgaaaattagaaaggaagctaaccgttaatagatttggatgttggagaaggaaatagtttctgcaaaatgaataatactcttaaggcagaaagaaactgtaaaatggcaagataaaccttggttcaatcaggcaacatcatagaaatggaagtcaatctcagaagaactcaatgggaggcttgttgcaaggaccttaaattcctagatcacgtgtctggtggtcaggcacctgagagagttttctgaggtagtccagcatggaagtggagggtttgtgagggtaaaatacctgcactgtaaggaaagcatccctctgcatgcaactaaatgcctccaacacacacacagtgtcatcatgtatgttgcatgtgtcatgcagtactctacccacagacgtaccaatcatttttaattatacatgattgccactgtctgcagtagggtaccacacacagcatgtctgaggatggcagccttgccttaatacccacccattcacctttaaaacagccattcaatatttacaagttgtgggtggccattggaatttggacaaaggacttctgcagaatccaatccactatctttccttatgtttcctgctttgagtgctgtccactcccatgttgcagctttcacgtgacagttttcagaactgagaaatattaaacatttctgttaggtt

SEQ ID NO: 1888922 - DNA, 4001 bp, Homo sapiens
agagttttctgaggtagtccagcatggaagtggagggtttgtgagggtaaaatacctgcactgtaaggaaagcatccctctgcatgcaactaaatgcctccaacacacacacagtgtcatcatgtatgttgcacgtgtcatgcagtactctacccacagacgtaccaatcatttttaattatacatgattgccactgtctgcagtagggtaccacacacagcatgtctgaggatggcagccttgccttaatacccacccattcacctttaaaacaaccattcaatatttacaagctgtgcgtggccattggaatttggacgaaggacttctgcagaattcaatccactatctttccttatatttcccgctttgagtcctgtccactcccacgttgcatctttcacatgacagttttcagaactgagaaatattaaacatttctgttaggttctgttactcacagaagaaatatccttgcatgtcttatcctgttccttataatagattaaaatgtatttacaaaagaacgaatatgtactttattagcacatgaagaaagaggactttgtatatctgagatagaaaatattttgattttcagaaaagttaagtgtttaagaagcaggagagaattttggaaggcttaagaagacttgaaaatgagaaaggaagctaaccattaatagatttggatgttggagcaggaaacagtttctgcaaaatgaataatactcttaaggcgtaaagaaactgtataatggcacaataaaccttgattcaatcaggcagcatcatagaaatggaaatcaatctcagaaaaactcaatgggaggcttgttgcaaggaccttaaattcctagaccatgtgtctgattaggcacctaagagagttttttgaggtagtccagcatggaagtggagggtttgtgagggtaaaatacctgcactatagggaaagcatccctctgcatgcaactaaatgcctccaacacacacacagtgtcatcatgtatgttgcacgtgtcatgcagtactctacccacagacgtaccaatcatttttaattatacatgattgccacgtctgcagtagggtaccacacacagcatgtctgaggatggcagccttgccttaatacccacccattcacctttgaaacaaccattcaatatttacaacctgtgagtgaccattggaatttggacaaaggacttctgtagaatccaatccactatctttccttatgtttcctgctttgagtgctgtccactcccatgttgcagctttcacatgacagttttcagaactgagaaatattaaacatttctgctaggtcctgttactcacagaagaaatatccttgcatgtcttatcctgttccttataatagattaaaatatatttacaaaagaacgaatatgtactttattagcacatgaagaaagaggactttgtatatctgagacagaaaatattttgattttcagaaagttaagtgtttaagaagcaggagggaattttggaaggcttaagaagacttgaaaattagaaaggaagctaaccgttaatagatttggatgttggagaaggaaatagtttctgcaaaatgaataatactcttaaggcagaaagaaactgtaaaatggcaagataaaccttggttcaatcaggcaacatcatagaaatggaagtcaatctcagaagaactcaatgggaggcttgttgcaaggaccttaaattcctagatcacgtgtctggtggtcaggcacctgagagagttttctgaggtagtccagcatggaagtggagggtttgtgagggtaaaatacctgcactgtaaggaaagcatccctctgcatgcaactaaatgcctccaacacacacacagtgtcatcatgtatgttgcatgtgtcatgcagtactctacccacagacgtaccaatcatttttaattatacatgattgccactgtctgcagtagggtaccacacacagcatgtctgaggatggcagccttgccttaatacccacccattcacctttaaaacagccattcaatatttacaagttgtgggtggccattggaatttggacaaaggacttctgcagaatccaatccactatctttccttatgtttcctgctttgagtgctgtccactcccatgttgcagctttcacgtgacagttttcagaactgagaaatattaaacatttctgttaggttctgttactcacagaagaaatatccttgcatgtcttatcctgttccttttcacattgctacttgcaaagcattaactaccagtttgcattctccatatccattaattaagtagtaaataatcctccatctcatcaatctcatatgataaggtttggctctgtgtccccacctaaatttcatcttgtagctcccatgattcccatatgctgtgggagggacccagtggaagatgattgaatcatgggggcaggtctttcctctgctgttctcataatagtgactaagtctcatgagatctgatggttttaaatatgggagttttcctgcacaagctctctatctttgcctgtcgccatccatgtaagatgtgacatgctcctccttgccttctaacatgattgtgaggcttccccagccacatggaactatgaattctccattaaacctctttcctttgtaaattgcccagtcttgggtacgtctttatcagcaatgtgaaaatgggctaatacagtaaattggtaccagtagagtgggacactgctgaaaagatacctgaaaatatggaagcgactttcgaactgggtaacaggcacgggatgaaacactttggagagctcagaagaagacaggaaaatgtaggaaagtttggaactccctagagacttgacttgttgaatggctttgcccaaaatgctgataatgatatggacaatgaaatccaggttaaggtagtctcagatggagatgaggaacttgttagaaactgcagcaaaggtgactctttatgttttagcaaagagactggcagcatcttgcccctgccctagagatctgtggaactttgaacttgagagagatgatttagggtacctggcagaagaaatttctaagcagcaaagcattcaagaggtaacttgcatgcagttaaaggcattccattttataagggaggcagagcataaaagattggaaaatgtgcagcctgacaatgctatagaaaagaaaaacccactttctgaggaaaatccaagccagctgtagaaatttgcataagtaatgaagagccaaatgttagtccccaagacaatggggaaagtatctccatggcatgttagaggtcttcgtggcagcccctcccatcacaggcctggaggcctagggggataatgttgctttgagggccaggcccagggttcctgtgccgtgtgtagtctagggacttggtgccctgtgtcccatccactccaactgtggctaaaaggggtcaaggtatagctcaggctgtggctttggagggtacaagccccaagccttggcagcttccataagctgttgagcctgtgggttcacagaagtcaagaactgaggtttcggaacctccacctagatttcagaggatgaatagaaatgcctggatctccaggcagaagtttgctggagaggcaaggatctcacggagaacctctgctaggacagtgcagaaggaaaagctgagatcacagccccaacacagagtccctactgaggcactgcctagtagagctgtgagaaggccaccatacgccagaccccagaatggtagatccactgacagcttgcactgtgtgcctacaaaagccacagacactcaacactggcccatgaagacagccaagaaggaggctgtaccctgcaaagccacaggggaagagttgcccaagaccttgggaacctaccttttgcatcagcatgacctggatgtgagaaatggagtcaaaggagatcactttgga

SEQ ID NO: 1888923 - DNA, 4001 bp, Homo sapiens; identical to SEQ ID NO: 1888921

SEQ ID NO: 1888924 - DNA, 4001 bp, Homo sapiens; identical to SEQ ID NO: 1888922

SEQ ID NO: 1888925 - DNA, 4001 bp, Homo sapiens
tttttttttttacacttttccattcagtaacatagcatgagcatggcctcagaaaggtgaaacaccagagtcataccaaaatatgcctaatggaaatagcattaggacaggagagagaaaaccagaaaaaaatagtgttgaaagaaataatgctaaaaacttcaaatttcataaaaaacataaatgtacacatcaaaaaagtgagataagcatgaagatatccagacttaaagacattgtattcaatctgttaatggagagagagagagagaaagagaatgtgtaaaagaaagaatacctttatagctgcaagagaaagggagcatatttcatacaagtgattcttacaagatttaacactgacttcttttgagaaaccatggaagctggaatcagttgtagaacatattcaaaatgctgaaagaaaaacacagttaaccatgaatctcacatctaagtctaaaagttgttagatacagcattaaaagcataatgcatacattgaaaaactgttaagtcgtactttatcaaaattgaaaacatttgctctgcacaaaatactgttgaaaatgaaaaaaacaaaacagattgagagataatatatgtaaatcataattctggccaagaaattgtatgcagtatacctatatatctctatctatatgtatatagtaaacctcaaagataagtgaacaactcggtaaaggtgagaaaaatcccaaaggcacttcaccaaggaagatacatgaatggtaagtaagtacatgtacaggtgctcaacattttccgtcagtaaggtgatgcaaattaaaaccacaactgacaagggaactatacacatattaaaattgctaataaaaacaaaacaaaggcttttcaatacaaaatgctgataagaagttgggtaattggatcactaatacattgcttaatgcagcacaaaatggtaaaaccattctggaaattattttttaattaattttaaatgtaaacttacacttgccatgtgaccttcaaatcctactagtagcagtttacacaaggaaaatgaaacttgtgttcatatatacatctgtatgcaaatatacaaagtagctttatttttagccatgaataactggaataaaacctagatgtccacctgtgacttctaccctacttgattaaaaaaaaaaaaaaaacagattattcttgctctaattctgactctcattctctctcctttacccattttctgcttccatacaccctctctcatcactgaatgagaaagaaacaacataaaggaagtaaatgaaaacctagagataaaaaatgtttttaagtaaatgcaaaaaaatcaaacaataaaaaattctcagcattattcacaattcctgatatatgacttactaataatagattaaaatatatttacaaaagaacgaatatgtactttattagcacatgaagaaagaggacattttatatctgagatagaatatattttgattttcagaaggttaagtgtttaagaagcaggagggaattttggaaagcttaagaagacttgaaaatgagaaaggaagctaacagttaacagatttggatgttggagtaggcaatagtttctgcaaaaagaataatactcttaaggcagaaagaaactgtaaaatggcaagataaaccttggttcaatcaggcaacatcatagaaatggaaatcaatctcagaagaactcaatgggaggcttgttgcaaggaccttaaattcctagatcacgtgtctggtggtcaggcacctgagagagttttctgaggtagtccagcatggaagtggagggtttgtgagggtaaaatacctgcactgtaaggaaagcatccctctgcatgcaactaaatgcctccaacacacacacagtgtcatcatgtatgttgcacgtgtcatgcagtactctacccacagacgtaccaatcatttttaattatacatgattgccactgtctgcagtagggtaccacacacagcatgtctgaggatggcagccttgccttaatacccacccattcacctttaaaacaaccattcaatatttacaagctgtgcgtggccattggaatttggacgaaggacttctgcagaattcaatccactatctttccttatatttcccgctttgagtcctgtccactcccacgttgcatctttcacatgacagttttcagaactgagaaatattaaacatttctgttaggttctgttactcacagaagaaatatccttgcatgtcttatcctgttccttataatagattaaaatgtatttacaaaagaacgaatatgtactttattagcacatgaagaaagaggactttgtatatctgagatagaaaatattttgattttcagaaaagttaagtgtttaagaagcaggagagaattttggaaggcttaagaagacttgaaaatgagaaaggaagctaaccattaatagatttggatgttggagcaggaaacagtttctgcaaaatgaataatactcttaaggcgtaaagaaactgtataatggcacaataaaccttgattcaatcaggcagcatcatagaaatggaaatcaatctcagaaaaactcaatgggaggcttgttgcaaggaccttaaattcctagaccatgtgtctgattaggcacctaagagagttttttgaggtagtccagcatggaagtggagggtttgtgagggtaaaatacctgcactatagggaaagcatccctctgcatgcaactaaatgcctccaacacacacacagtgtcatcatgtatgttgcacgtgtcatgcagtactctacccacagacgtaccaatcatttttaattatacatgattgccacgtctgcagtagggtaccacacacagcatgtctgaggatggcagccttgccttaatacccacccattcacctttgaaacaaccattcaatatttacaacctgtgagtgaccattggaatttggacaaaggacttctgtagaatccaatccactatctttccttatgtttcctgctttgagtgctgtccactcccatgttgcagctttcacatgacagttttcagaactgagaaatattaaacatttctgctaggtcctgttactcacagaagaaatatccttgcatgtcttatcctgttccttataatagattaaaatatatttacaaaagaacgaatatgtactttattagcacatgaagaaagaggactttgtatatctgagacagaaaatattttgattttcagaaagttaagtgtttaagaagcaggagggaattttggaaggcttaagaagacttgaaaattagaaaggaagctaaccgttaatagatttggatgttggagaaggaaatagtttctgcaaaatgaataatactcttaaggcagaaagaaactgtaaaatggcaagataaaccttggttcaatcaggcaacatcatagaaatggaagtcaatctcagaagaactcaatgggaggcttgttgcaaggaccttaaattcctagatcacgtgtctggtggtcaggcacctgagagagttttctgaggtagtccagcatggaagtggagggtttgtgagggtaaaatacctgcactgtaaggaaagcatccctctgcatgcaactaaatgcctccaacacacacacagtgtcatcatgtatgttgcatgtgtcatgcagtactctacccacagacgtaccaatcatttttaattatacatgattgccactgtctgcagtagggtaccacacacagcatgtctgaggatggcagccttgccttaatacccacccattcacctttaaaacagccattcaatatttacaagttgtgggtggccattggaatttggacaaaggacttctgcagaatccaatccactatctttccttatgtttcctgctttgagtgctgtccactcccatgttgcagctttcacgtgacagttttcagaactgagaaatattaaacattt

SEQ ID NO: 1888926 - DNA, 4001 bp, Homo sapiens
atgctgataagaagttgggtaattggatcactaatacattgcttaatgcagcacaaaatggtaaaaccattctggaaattattttttaattaattttaaatgtaaacttacacttgccatgtgaccttcaaatcctactagtagcagtttacacaaggaaaatgaaacttgtgttcatatatacatctgtatgcaaatatacaaagtagctttatttttagccatgaataactggaataaaacctagatgtccacctgtgacttctaccctacttgattaaaaaaaaaaaaaaaacagattattcttgctctaattctgactctcattctctctcctttacccattttctgcttccatacaccctctctcatcactgaatgagaaagaaacaacataaaggaagtaaatgaaaacctagagataaaaaatgtttttaagtaaatgcaaaaaaatcaaacaataaaaaattctcagcattattcacaattcctgatatatgacttactaataatagattaaaatatatttacaaaagaacgaatatgtactttattagcacatgaagaaagaggacattttatatctgagatagaatatattttgattttcagaaggttaagtgtttaagaagcaggagggaattttggaaagcttaagaagacttgaaaatgagaaaggaagctaacagttaacagatttggatgttggagtaggcaatagtttctgcaaaaagaataatactcttaaggcagaaagaaactgtaaaatggcaagataaaccttggttcaatcaggcaacatcatagaaatggaaatcaatctcagaagaactcaatgggaggcttgttgcaaggaccttaaattcctagatcacgtgtctggtggtcaggcacctgagagagttttctgaggtagtccagcatggaagtggagggtttgtgagggtaaaatacctgcactgtaaggaaagcatccctctgcatgcaactaaatgcctccaacacacacacagtgtcatcatgtatgttgcacgtgtcatgcagtactctacccacagacgtaccaatcatttttaattatacatgattgccactgtctgcagtagggtaccacacacagcatgtctgaggatggcagccttgccttaatacccacccattcacctttaaaacaaccattcaatatttacaagctgtgcgtggccattggaatttggacgaaggacttctgcagaattcaatccactatctttccttatatttcccgctttgagtcctgtccactcccacgttgcatctttcacatgacagttttcagaactgagaaatattaaacatttctgttaggttctgttactcacagaagaaatatccttgcatgtcttatcctgttccttataatagattaaaatgtatttacaaaagaacgaatatgtactttattagcacatgaagaaagaggactttgtatatctgagatagaaaatattttgattttcagaaaagttaagtgtttaagaagcaggagagaattttggaaggcttaagaagacttgaaaatgagaaaggaagctaaccattaatagatttggatgttggagcaggaaacagtttctgcaaaatgaataatactcttaaggcgtaaagaaactgtataatggcacaataaaccttgattcaatcaggcagcatcatagaaatggaaatcaatctcagaaaaactcaatgggaggcttgttgcaaggaccttaaattcctagaccatgtgtctgattaggcacctaagagagttttttgaggtagtccagcatggaagtggagggtttgtgagggtaaaatacctgcactatagggaaagcatccctctgcatgcaactaaatgcctccaacacacacacagtgtcatcatgtatgttgcacgtgtcatgcagtactctacccacagacgtaccaatcatttttaattatacatgattgccacgtctgcagtagggtaccacacacagcatgtctgaggatggcagccttgccttaatacccacccattcacctttgaaacaaccattcaatatttacaacctgtgagtgaccattggaatttggacaaaggacttctgtagaatccaatccactatctttccttatgtttcctgctttgagtgctgtccactcccatgttgcagctttcacatgacagttttcagaactgagaaatattaaacatttctgctaggtcctgttactcacagaagaaatatccttgcatgtcttatcctgttccttataatagattaaaatatatttacaaaagaacgaatatgtactttattagcacatgaagaaagaggactttgtatatctgagacagaaaatattttgattttcagaaagttaagtgtttaagaagcaggagggaattttggaaggcttaagaagacttgaaaattagaaaggaagctaaccgttaatagatttggatgttggagaaggaaatagtttctgcaaaatgaataatactcttaaggcagaaagaaactgtaaaatggcaagataaaccttggttcaatcaggcaacatcatagaaatggaagtcaatctcagaagaactcaatgggaggcttgttgcaaggaccttaaattcctagatcacgtgtctggtggtcaggcacctgagagagttttctgaggtagtccagcatggaagtggagggtttgtgagggtaaaatacctgcactgtaaggaaagcatccctctgcatgcaactaaatgcctccaacacacacacagtgtcatcatgtatgttgcatgtgtcatgcagtactctacccacagacgtaccaatcatttttaattatacatgattgccactgtctgcagtagggtaccacacacagcatgtctgaggatggcagccttgccttaatacccacccattcacctttaaaacagccattcaatatttacaagttgtgggtggccattggaatttggacaaaggacttctgcagaatccaatccactatctttccttatgtttcctgctttgagtgctgtccactcccatgttgcagctttcacgtgacagttttcagaactgagaaatattaaacatttctgttaggttctgttactcacagaagaaatatccttgcatgtcttatcctgttccttttcacattgctacttgcaaagcattaactaccagtttgcattctccatatccattaattaagtagtaaataatcctccatctcatcaatctcatatgataaggtttggctctgtgtccccacctaaatttcatcttgtagctcccatgattcccatatgctgtgggagggacccagtggaagatgattgaatcatgggggcaggtctttcctctgctgttctcataatagtgactaagtctcatgagatctgatggttttaaatatgggagttttcctgcacaagctctctatctttgcctgtcgccatccatgtaagatgtgacatgctcctccttgccttctaacatgattgtgaggcttccccagccacatggaactatgaattctccattaaacctctttcctttgtaaattgcccagtcttgggtacgtctttatcagcaatgtgaaaatgggctaatacagtaaattggtaccagtagagtgggacactgctgaaaagatacctgaaaatatggaagcgactttcgaactgggtaacaggcacgggatgaaacactttggagagctcagaagaagacaggaaaatgtaggaaagtttggaactccctagagacttgacttgttgaatggctttgcccaaaatgctgataatgatatggacaatgaaatccaggttaaggtagtctcagatggagatgaggaacttgttagaaactgcagcaaaggtgactctttatgttttagcaaagagactggcagcatcttgcccctgccctagagatctgtggaactttgaacttgagagagatgatttagggtacctg

SEQ ID NO: 1888927 - DNA, 4001 bp, Homo sapiens
ggcacctgagagagttttctgaggtagtccagcatggaagtggagggtttgtgagggtaaaatacctgcactgtaaggaaagcatccctctgcatgcaactaaatgcctccaacacacacacagtgtcatcatgtatgttgcacgtgtcatgcagtactctacccacagacgtaccaatcatttttaattatacatgattgccactgtctgcagtagggtaccacacacagcatgtctgaggatggcagccttgccttaatacccacccattcacctttaaaacaaccattcaatatttacaagctgtgcgtggccattggaatttggacgaaggacttctgcagaattcaatccactatctttccttatatttcccgctttgagtcctgtccactcccacgttgcatctttcacatgacagttttcagaactgagaaatattaaacatttctgttaggttctgttactcacagaagaaatatccttgcatgtcttatcctgttccttataatagattaaaatgtatttacaaaagaacgaatatgtactttattagcacatgaagaaagaggactttgtatatctgagatagaaaatattttgattttcagaaaagttaagtgtttaagaagcaggagagaattttggaaggcttaagaagacttgaaaatgagaaaggaagctaaccattaatagatttggatgttggagcaggaaacagtttctgcaaaatgaataatactcttaaggcgtaaagaaactgtataatggcacaataaaccttgattcaatcaggcagcatcatagaaatggaaatcaatctcagaaaaactcaatgggaggcttgttgcaaggaccttaaattcctagaccatgtgtctgattaggcacctaagagagttttttgaggtagtccagcatggaagtggagggtttgtgagggtaaaatacctgcactatagggaaagcatccctctgcatgcaactaaatgcctccaacacacacacagtgtcatcatgtatgttgcacgtgtcatgcagtactctacccacagacgtaccaatcatttttaattatacatgattgccacgtctgcagtagggtaccacacacagcatgtctgaggatggcagccttgccttaatacccacccattcacctttgaaacaaccattcaatatttacaacctgtgagtgaccattggaatttggacaaaggacttctgtagaatccaatccactatctttccttatgtttcctgctttgagtgctgtccactcccatgttgcagctttcacatgacagttttcagaactgagaaatattaaacatttctgctaggtcctgttactcacagaagaaatatccttgcatgtcttatcctgttccttataatagattaaaatatatttacaaaagaacgaatatgtactttattagcacatgaagaaagaggactttgtatatctgagacagaaaatattttgattttcagaaagttaagtgtttaagaagcaggagggaattttggaaggcttaagaagacttgaaaattagaaaggaagctaaccgttaatagatttggatgttggagaaggaaatagtttctgcaaaatgaataatactcttaaggcagaaagaaactgtaaaatggcaagataaaccttggttcaatcaggcaacatcatagaaatggaagtcaatctcagaagaactcaatgggaggcttgttgcaaggaccttaaattcctagatcacgtgtctggtggtcaggcacctgagagagttttctgaggtagtccagcatggaagtggagggtttgtgagggtaaaatacctgcactgtaaggaaagcatccctctgcatgcaactaaatgcctccaacacacacacagtgtcatcatgtatgttgcatgtgtcatgcagtactctacccacagacgtaccaatcatttttaattatacatgattgccactgtctgcagtagggtaccacacacagcatgtctgaggatggcagccttgccttaatacccacccattcacctttaaaacagccattcaatatttacaagttgtgggtggccattggaatttggacaaaggacttctgcagaatccaatccactatctttccttatgtttcctgctttgagtgctgtccactcccatgttgcagctttcacgtgacagttttcagaactgagaaatattaaacatttctgttaggttctgttactcacagaagaaatatccttgcatgtcttatcctgttccttttcacattgctacttgcaaagcattaactaccagtttgcattctccatatccattaattaagtagtaaataatcctccatctcatcaatctcatatgataaggtttggctctgtgtccccacctaaatttcatcttgtagctcccatgattcccatatgctgtgggagggacccagtggaagatgattgaatcatgggggcaggtctttcctctgctgttctcataatagtgactaagtctcatgagatctgatggttttaaatatgggagttttcctgcacaagctctctatctttgcctgtcgccatccatgtaagatgtgacatgctcctccttgccttctaacatgattgtgaggcttccccagccacatggaactatgaattctccattaaacctctttcctttgtaaattgcccagtcttgggtacgtctttatcagcaatgtgaaaatgggctaatacagtaaattggtaccagtagagtgggacactgctgaaaagatacctgaaaatatggaagcgactttcgaactgggtaacaggcacgggatgaaacactttggagagctcagaagaagacaggaaaatgtaggaaagtttggaactccctagagacttgacttgttgaatggctttgcccaaaatgctgataatgatatggacaatgaaatccaggttaaggtagtctcagatggagatgaggaacttgttagaaactgcagcaaaggtgactctttatgttttagcaaagagactggcagcatcttgcccctgccctagagatctgtggaactttgaacttgagagagatgatttagggtacctggcagaagaaatttctaagcagcaaagcattcaagaggtaacttgcatgcagttaaaggcattccattttataagggaggcagagcataaaagattggaaaatgtgcagcctgacaatgctatagaaaagaaaaacccactttctgaggaaaatccaagccagctgtagaaatttgcataagtaatgaagagccaaatgttagtccccaagacaatggggaaagtatctccatggcatgttagaggtcttcgtggcagcccctcccatcacaggcctggaggcctagggggataatgttgctttgagggccaggcccagggttcctgtgccgtgtgtagtctagggacttggtgccctgtgtcccatccactccaactgtggctaaaaggggtcaaggtatagctcaggctgtggctttggagggtacaagccccaagccttggcagcttccataagctgttgagcctgtgggttcacagaagtcaagaactgaggtttcggaacctccacctagatttcagaggatgaatagaaatgcctggatctccaggcagaagtttgctggagaggcaaggatctcacggagaacctctgctaggacagtgcagaaggaaaagctgagatcacagccccaacacagagtccctactgaggcactgcctagtagagctgtgagaaggccaccatacgccagaccccagaatggtagatccactgacagcttgcactgtgtgcctacaaaagccacagacactcaacactggcccatgaagacagccaagaaggaggctgtaccctgcaaagccacaggggaagagttgcccaagaccttgggaacctaccttttgcatcagcatgacctggatgtgagaaatggagtcaaaggaga

SEQ ID NO: 1888928 - DNA, 4001 bp, Homo sapiens
tcatgctcttcccggagagtttgcccagtatgtcattaaacatattctcttaagttttgcgtttatggggcggcccacaaaaattaaaactactaatggtccagcttacaccagctcacaatttcaccaattttgtcacacatggatgtccaatatgtgacatccacaggcatcccgtacaaatcccaaggacaagtcatagtagaacatgcccattccacccttaaaaatatgctcagaaaacaagggggaatatgagtaaggatgctgcaacactactagcataagccttatttacccttaatttttttaatttagataaatttcaatcagccatagaaaagcattttgcaaaagcccctcaagacataaaacccatggttttatggaaagaagttaatagtaatctatggtgtggtccaaatgatttgctgacctggggaagagaatatgcttgtgttcacacgccctcaggtcctctttgtattccagtgtgacagacacatcaaaccataccatggcgtggctaagacccaagctggtatcaaaaataaaggaaacgacgctgcaggacccgcagccccagacgatgtggcttcctccgatgacacaggccccagacattacctgggggaagctgaagaagacaactcaggaggccgagtgaatccttctctggacacagacaccatcactccagataatctgttccttgctatgctctctattgtaccttgcaactctcatagggtattcacctttcttattctctcactttgcctgcaactcatacctgctacattctattgggcccatcttctaagatctgcctttcttccaacctgttaccttggcagacacccccttcccatcctctaataatgtaactgcttagctgggaggggttgacatgcccccagtggggttccttaataatggcacacattgaactgaggtgccaagtaacactacatatctctccttgattggaaaagaataatagtgactatactaatgtttgacttatgttatttactaattctaggatgcaaagccggaacacgagctgtaaccgctgcgcctgtcaaatctgtcactgcacacatctgtactattcaatcaacaaaacccgatgctaaaaacagaaaagggggagacgcgggagatcggtcagagtggtaggagaaggtatagggaaaggaacagaccttctgaaaggcgggaaggctctggatagcttcagggatgaataagctgaaggcagctgttctcttaccctgaggcagagggcaaggggtaggtaaggaagtataggggaatttggcataaacaggcttgtttacttacattgtccggaaaccgactttgatcatcagggcaggagactgctccctgaaagggggaataataatgttaattacccacagattgtgttggctccaggctttcattattttgtctgtactgaataaaagcaagcagctccagctgttcgagactgctcactcttcagccattagtgctgggcattcctgtagctgctcttacactgcatgcctgtggctgagtactcctttcatccgttgcttggccagggtctgtgggatggaccccgcaggtaagggttatcaaaaaaaaaaaaaattcacaggcagataggaacaccatgaccatactaaaaggcttttttcccattttagtcttgcaagtttgtaaagaaggatatgaagcccctaagaaatcagtgaaacactttttcccaaaacctttatttcctatgtcttgtcttcagaagtttatctagaaactccccagctagtttagtattgaggagggtaccagatggactatctatgtgctaagaaaagcataccactgcatgcaactaaatatctgcaatatcattgcatatgtagtacatgtcatgtgttactccactcttagaggtttcaatcacacctaattacatgtgattgccactctcctgagtaggacaccacacacatacacagcattcctgaaaatgggagcacagcctaaatacttaatcacacacttttcaaacaacctctcaaatgttttcagtctgtaagtggccgttggcatttatgtaaatgattcctgaagaacctacatcattttttattcactcattcccccttgagtgttgtccactcatggtttggagttttcacatggcagttttcaggactaagaaccttcctgctaggctctcctgctaacgggaaaaatctcattcgatgccttattctatttcttttcccattgttttatataaagtattaatgagtagattgcattccccagattcagtagctacccagacactacactctatctcaccaatctgtgcctatcatccaaagatctgagttcttctacctgagttccttactacaactcctcactacagaataagcaaggacatcacacaggatcctggaagcaaagaagagagaataatcagtgagtggtaagatggagagagtagaatttcttttatcctcatcaaattttgaagtgaaaaaaaaaatcccattttacttaccaggagtgatctacaaaacagaaattgtgctaggcacccagacactcttagagatttttcagtttctgggttttcttcgtcttttctgggagcaaggttctttttagcatgtgtttgcatttttccaatctgagacacatgctactaggtgactgtgtttccctgcaaaactaaaattagcacacacaaaaatatggacacaattttggtgactggatttcagagactgagaactgagaatttaaagtgactgtggcttacaaaattacctgttcccctatctcctaatcaagagcaacaatatacttgtgggtttaagaagcctccagaatttctcatccactccacaaacccagtttagtgtttcagaggctaaatactaggcatgtgaggttagaggtcaggggcctgctactatagccattcttcatcacagggtttaggctctataccaggtgcagccggcggagataattgagtacgtaatactcctcatctcagcttaatcatcagggggagcttccactttgggtgaggcaaaccagaacactagaatccactgctatcactcatcaccctggttgtaaagcaggggtgtcagtgtacaagaagcaggacactgccttattctcagcttggggcaactgctcagggatttgtccattgagagaggctagccctaagagaaaaagcattaaagctttccttctcaaaagaaaatgacttcagttgtaacagaagacaagaaaggtctcacaaataatgtagactgtggtgccaagtaattaggatggaactggaatcaggaaacagacagctaataagagcctttctggtaggagaatagcctttagagacctgccccaaaaattatctgcaaagtatttggataagactctaaagcaatttttgcccatggtattctcaaaagctacaaaataatccacctgcaaacactgaagcttattacctgtgtgtgataccgcagaggcaggcagcttaacagaaagagcagcaaaagaacaaagaactctactaaaatcacgacagtttagagtgactgtgtacatatccaaagttataccttgcaaggaacaacattaggttttcacaataaaaagaatatagattttactaaaacagcacagccaagtaaatcaacaaataaaaaaatcagacaacaacaatccccagaagcaagatctgcatccaaaacttctataatatattaataaaatatccagttctcaactggacattctcagacatacagagaaaataaaaatataacacacaggacaaaagtagattacagaaaatgctggcaacagagcctaatgttatacttaacaacaaccttaaagcatccactgtaagtattttcaaaacactaaacaaatggtgcttggaagagtaaaggcagctatgttga

SEQ ID NO: 1888929 - DNA, 4001 bp, Homo sapiens
catcttttggagggggactgttattctgcataccacagagatcctataatttgtatttagagtttcacctaaatatgttatgtttatattattttatgttttaattaggtggatttaatcattgtataatatatacatatatccaaacatcatgttgtacaccttaaatatatacaaaagttatgtcagttaaaccttaataaattggtagaaacacggatgaatgatacaaaaaagtatttcactgaaagaaaaaccacaaataacagtgaatagagtactcttttgagaaatcataaaagagatatgatactaactaaattctcttctttcgttttaggatatgacttaaaattatataagtacacatgcattcactataatacagttttagaaattatatactaaaaagtgttatcactttggaaatttctatgtacatacagcatttccaactgacagaatttttttactgttcagaatgttcccccgcccccaatgaaaaagatgctatgtaatctattagagcaattgttttaatattgaaaaagatacttcaactgattgtttttttacttccagacattaatggtcttaaacatattcatccattctgaacgtaacaaaacaaactaaaatcctgcctgtaaccatatagtaattgttttttatactttctcccttttgatgtatatgctataacctctatttccattggaatcaaatttgtattaataacttactatttataacatttttaacacatttctgcaatataagtagcttatttataacctacttctcaaaaatgcatactagtttcatgctgcagatggcctcacaccatccggcacttgtcttactcttttgccctctctctctttttttgtgtgtttgtgtgtgtgtgtatttccctctatctctctccattaggttaagagttaagaagtgtcaacacaagaaaatgggaccaggcgtggtggctcacgcctgtgatctcagccatttgggaggcttaggtgggtggatcaggaggtcagcagttcgagaccagcctcatcaacatggtgaaaccccatctctactaaaaatacaaaaagtagccaggtgtgttggggcacacctgtaatcccaactactcgggaggctgaggaaggagaatcccttgaacctgggagatagatagaggttgcagtgagcccagatcacaccgctgcactccagcctgggcgaaagagcaagactctgtcacacacacacacacacaaagaaaatggggagagaagactaggagatatctcttgagtatcaattccatcatacccttccattgttcatacatattcttaaaaaacggggaaaaaagataatgaaaaagagtgaaatattcttgggtggactatgcttaatccttcataaattggtgacttaaggctttgaaaggtattttaaaagtcaatgagaaaatgttttagtctttgacagaaaatggacgctgtggatcagcaatgaagggacctgagaggcaggagagtcttttgggagcgctaaaggagaatccttgcaaatgatgactagttgataagtgaaaaaagtttagagaatttaggaatctggagtaaagcattccagctgacgaagaatggctgtggcctctatccaatgtatttcctatttgagccaagcctcatttggcaaaaataaattcttaaggaacctaagtgcatgcgttttctcaggagtccacaattcctatgtacagtcgtctagaaggcacaaaaagttccttgaagtgtagcccagcactgaggagtgggtgcacaggatgcaaaacaggcatcaccatgctcgcagctacacccccatcctcagggacaccacatatgcagtgcatgctgtacattacccttctcagaaaggtgaaatttatattttagttcacataaatgacacctccctgtgaaaggcactgtacgctgaatggctgaatgtggcatcccagaccaaatgctcccttttcatgctgtttttattcaagtccctataggtgtatgccttcgcatggccaccaagatttatgccaagggacaatgcaacttgtaacccccagcactccccttttcatcctgccccgagtgagattttgacatgcagatttttgttttgtttttgttttcagatgaagtctggctctgtcacccagtctggcatgcattggcgtgatctcagctcactgcaacctccgcttcctgggttcaagcacttctcctgcctcagcctcccgagtagcttaggttaaaggcacacaccacctcgaatggctaattaacacgcagatttttagactgatcaagaatagagcttttcacttcatctcttccccaaaggcgagtaatccttgtctgaattatcccattagttttcacgttaatttgcttgtctcattaaaaatcctcaaaatcaggccaggcacagtggctcatgcctgttatcccagcactttggtaggccaaggctggtagatcatctgaggtcaggagtttgagaccagcctggacaacgtggtgaaactccatctcaactacaaatacaaaaaatcagccgggtgtggtggtgggtgactgtaaccccagctaatctggatgctgaggcaggagaatcatttgaacccaggagacagaggttgcagtgagccgaggttgtgccgttgtgctccagcctgggcaacaaaagtgaaaatccatctaaaaaaaaaaaaaaaaaatcttcagagtcggccgggcatggtggctcatgcctgtaatcccagtactttgggtggtccaggtgtgcatatcacttaaggccaggagtttgagaccaccctggccaacatggtcaaacaccatctctactaataatacaaacttagcggggtgtggtggctcgcgcctgtaatcacagctactcaggaggatcacttgaacctgggaggcagaggttgcagtgagcggagatagtgccaatatactccagcccgggttacagagtgagaccctgtctcaaaaaaaaaacaacaaacaaacaaaaaaaccccaaaaacttttaaaattacagttaagtaggcagggccaaccactcaccaaagctctctatggtcctaaaactccagctgtgctgcacagaccctaattccaatggaaaaaccacagaatacaaccacctggatccaaactactagagaagagtcagacagtaccaggttggagagagcagaaatttaatttcttcttcaggctatgcagtgggaagaacccatagaaattaatacgagagacagacaagacagataatgggctggaagacaagaaatgctatttaatttttcttagttccatggttctttatagtacatttatttgggctcagtctctctctctcgctgtgtgattaacaattaatagtgctaggattttttagctttaatatttactgtttgcattaatatattttccatccttttacccaactttcacgtaggtcttcatatttaaaatggtttcgttttagaaagtgtacagctgtttcttatttttacataatttgacagtgtctctcttaattgaagcatttatatcatttattataattatttatgtacatgcgtttaaatctactggctttctagttgttttctgtacttcatccttttgtaattcctaattttcctgtttttctgcctgatggtagatttagtatttttatcattcagttatattttctgcactcttggcttattagttggtcactttaaaagaatagcggttgctctggagttttcagtgttcatatttaattcatcacagtctatctatcttcaaagaatattttactagtttatgaaccctgaacatttgagacaggtctcagttaatttcagaagttaatttttccaaggttgaggatgcacacccattacccagcctcaggaggtcctgagggcgtgtgcccaaggtggtcag

SEQ ID NO: 1888930 - DNA, 4001 bp, Homo sapiens
actcctattcaagatagtgttggaagttctggccagggcaaccaggcaggagaaggaaataaagggtattcaattaggaaaagaggaagtcaaattgtccctgtttgcagacgacatgactgtatatctagaaaaccccattgtctcagcccaaaatctccttaagctgataagcaacttcggcaaagtctcaggatacaaaatcaatgtacaaaaatcacaagcattcttatacaaaaaagtatttcactgaaagaaaaaccataaataccagtgaatatagtactctttttgagaaatcctaaaagagatagtactctttttgagaaatcctaaaagagatataactaaattctctgtctttgtttcattttacgatatcacttatttaagtacacatgaattctctctaatacagttttagaaattatatgctaaaaagagttatcactttggaaatttctacacacatacagtatttccaacggacagaatttttttttattattcagaatgtccccccgcctccaatgaaaaaagttctatatattctattagtacaattgttttaatattgaaaaagatacttcaactgattttttttacttccagacattaatggtcttatacatattcatccattctgaacctaaaaaaacaaacataaactaaaatcctgcctgtaaccatatagtaattgtttttttatagtttctctctttcggtgtatatgctgtaacctctatttccgttggaatcaaaattgtattaatcaatcacttactatttataacatttttaaacacatttccccaatataagtagcttatttatatataacctacttctaaaaaatgcatactagtttcatgctgcagatggcctcacaccatctggcacttgtcttactcttgtgcacgtgcgtatttgcctctttctctctccattaggttgagttaagaagtgtcaacacaagaaaatggggccgggcatggtggttcacgcctgtaatcccagcaatttgggagggtgaggtgggtggatcacgaggtcagcagttcgacaccagtctgaccaacgtggtgaaacctggtctctactaaaaatacaaaaattagccaggtgtgttggcgcacgcctgtaatcccagctacttgggaggctgaggcagaagaatcgcttgaacccgggagacagaggttgcagtgagctgagatggcgccactgcactccagcctgtgtgaaagagtaagaaagactccatctcaaaaaaaaaaaagacagaaaatggggagagaagactaggagatatctcttgagtaacaactctatcatacgcttccattgttcaaacataaaaaacagggaaaaaagataatggaaaagggtgaaatattcttgggtggactacgcttaaccctccataaattggtgactgaaggctttgaaaggtattttaaaagtctatgagaaaatgttttagtctttgacagaaaatggacactgtggatcagcaatgaagggacctgagaggcaggagagtcttttgggagcgctaaaggagaatccttgcaaatgatgacttcttgataagtgagaaaagtttaggaatctggaatatagccttccagctgacgaagaatggctgtggcctctatccaatgtatttcttatttgagccaagcctcatttggcaaaaatagataaattcttaaggaaccgaagtgcatgcgttttctcaggagtccacagttcctatgtatagtcatttagaaggcacaaaaagttccctgaagtagcccagcactgaagagtgggtgcacaggatgcaaaacaggcatcaccatgctcgcagctacacccccatcctcagggacaccacatatgcagtgcatgctgtacattacccttctcagaaaggtgaaatttatattttagttcacataaatgacacctccctgtgaaaggcactgcacactgaatggctgaatgtggcatccaagaacaaatgctccctattcatgccgttttttttcaagtccctataggtgtatgccttggcatggccaccaagatttatgccaagggacaatgcaacttgtagcccccggcgctccccttttcatcctgccccaagtgagattttaacatgcagatttttgttttgtttttgtttttgttttcagatgaagtctggctctgtcgcccagactggcatgcattggtgtgatctcggctcactgcaacctcccccttctgtgtctaagcacttctcctgcctcagcctcccaagtagctgggattaaaggcacataccaccgcgaatggctaattaacacacaaattttaggcttagccagaatataacatttcacttcatctcttccccagagatgtgtaatccttgtctggattatcccattagttttcgcgttaatttgcttgtctcattaaaaatcctcaatatcaggccaggtgcagtgggtcacacatataatctcatcactctggtaggctgaggctggtggatcatcagaggtcaggattttgagaccagcctggacaacgtggtgaaattccatctctactacaaatacaaaaaattagccgggtgtggtggtgggcaactgtaaccgcagctgctgaggcaggagaatcacttgaacccgggaggtggaggttgcagtgagccgagatcatgccactgaatcacttgaacccgggaggtggaggttgcagtgagccgagatcatgccactgcaccccagcctgggcaacagagttagttagactctttctcaaaaaaaaaaaacaaaaaaaaactatatatatatatatgtgtgtgtgtgtgtgtgtgtgtgtgtgtgtgtgtgtgtgtgtgtgatgtacacaaataatcatgagctgaggcaaattaaaagacctggattcttctagctctggcccttgatagcatgtagaagtcagaccacatgatcgtcaagaccgagtgtttctatgtaccattctcattcatctactaaacataacccctgaaagacagacagagaagcacatagctcagtgttagtgctgagtcacggtcaaggagccatagttcactgaacagaatgattctaaatatctcaagcattttactgcattttttgaattccatgaaaagcaaccaaagttagattctacagaaatatttatatatatcaatcaatcaatcaatcaatttagcttttctcttaagtatttgggcccttgagctatctccccaaaaagttctcaaggggaaaaaaatacacagacacaatactccctccttcaaacaccagtacaggtactacttctcttcctctgcatcacccacccctcagtagcttcaaaggagtctttccagcaacctggcacatcatagcaggagattctaagacccactgctccatgaaaccacatacacagacacatatacgcccaagtaaacaatattaaaaagaatgagaatacaacaaaatatgaatacaaaaaaactaaccataaacagaattgataagccatcgaaagaaccctagcaatacacaatgcaaagttccaacaacatatgtgcaaattaatatgcaaattaaaatataaccgaaatcacacagtgaaatccaaataacaacaaaaagaaaatacaaaattgcaagcaatgtacgtaaagaaataccaatcaaaacaccaatgaccaagagcatggcaaatctgaaaacaaattcaaacaaacacatataatcccaaaggagccaaagtcaaacaaacaaagcaaaaccatacacatgaaataaactgataagaatagcaaaagcaaaacaaaaacaaaacagagatccaacctcaaacaaaaacaacataacaaaatcctcatgctacatgccccgtgcacacacaaatgtatgggcacatacaccaaagtgcacacagatacatgtattactccccccatcaccatataaacacaaacaaatgtgcta

SEQ ID NO: 1888931 - DNA, 4001 bp, Homo sapiens
ccttctgttggctctagaggagaatctacttgattgtctttagaagaagatgctacttgctttctccgttctttggctcatggactttacctccacctctagtcaatactatagccttttccaatgtttctcttattctaaccgcctttctcctacttataaggacccttgtgataatgttgggctcacctagataatctaggataatcccaatctcaaaatatttaatttaatcacatgcacaaattttcttctgcaataaaatgtgttgtttacaagttcaggggttactctgtaaacattgttttgagggggctgttattctgcctaccacagagatcttgtaatttttttcttagaatttcacctaaatattttatgttcatattattttatttttcaattagcttgatttaatcatttcctaatgtacacatatatcaaaacatcatggtgtataccttaaatatatacaacttttatgtcagttaaaccttaataaattggtagaaacatggatgaataatacaaaacagaatttctctgaaagaaaacataaataccagtgaatatactattctttttgagtaaatcataaaagagatacgataacaactaaattttcttactttcattttaggatatcacttaaagttatataagtaacatgctttcactataatacagttttagaaactatatactaagaggagttatcactttggaaaattctacgtacatacagtatttcaaactgacagaatttttttactgttcagaatgttccccccgacccacacacacatacaaagattctttgtattctattagtgcaattgtttcattatggaaaagatacatcaacagatttttttttttactttcagttactaatggtcttacacatattcatccattctgaatctaaaaaaaaaaacataaactaaaatcctccctgtaaccatatagtaattttttaacagtttttccctttcagtgtatatgctgtagcctctatttcagttggaatcaaaattgtattaatcacttactatttctaaaacattttttacacatttccacaatataagtagcttatttataacctacttcccaaacatgcatactggtttcatgctgcagaaggcatcacacagtctggcgcttgtctctctctctccctctccctccttttctctctctctctctgtgtgtgtgtgtgtgtgtgtgtgtatttatttccctctctctctctctccattgggttaaaagttaagaagtgtcaccagaagaaaatggagagagaagcctgggagacatctcctgagtatcagttctgtcacaccctttcattcttcaagtgtattcttaaaaaatggggaaaaagataatgaaaaagaatgaaatattcttggatggactatgcttaacccattgtaaactggtgacatatagctttgaaaggtaatttaaaagtcaatgaaaaacattttagtctttgagagacaaatggacactgtggatcaacaatgaagggacctgagaggcaggagagtcttttgggagctctaaaggagaagccttgcaaatgatgactagttgacaagagagaaaagtttagagaatttaggaatctggagtacaaccttccagctgacgaagaatggctgtggcctctatacaatgtatttcttatttgagccaagcctcatttggcaaaaatagttaaattcttaaagaacttgagtgcatgcgttttctcaggagtccacagttcctatgtctagtcgtctagaaggcacaaaaagttccttgaagtagcccagcactgaggagtgggtgcacaggatccaaaacaggcatcaccatgctcgcagctacagccccatccctagggacaccacatatgcagtgcatgctgtacattactcctctcaaaaaggtgacatttatattttagttcacataaatgacacctccttgtgaaaggcactgtacactgaatggctgaatgtggcatcccagaccaaatgctccctattcatgccatttttattcaagtccctatataggtgtatacattagcatggccaccaagatttatgccaaggaattatgcaaatcctagcccccagtgctcccctttcatcctgccctgagtgagattttaacatgcagatttttgttttattttgttataatcccagccacccaggagctgaggcaggagtacaccttgaccctgggagtcaggtttcagtgagaggagatcaggccactatactcaagcctgggttacagagtgagaccctgtctcaaaacaaaaacaaaatgtaatagaaaaaaaaaaaaaaaaaaaaacataaaattactggttaagtagaaaggaccaaccactcaccaaagctttctgttgtcctaaactccagctgtgctgcacacacctaaagtccatcagaaaaaccacagaatacaacaacctggatgcaaagaagtggagaagagtcagagggtaacaggttggagagagtagaaatttcatttcttcttcaggctatggagcaggaagaacccatagaaattaatacaagatacacacaagacagataatgggctggaagacaggaaatgctattttatttctcttagctccatggttctttatagttcatttatttgagtgcctgctcactcgctctgtgtgtgtgtgtgtgtgtgtgtgtgtgttattaaatagtaatagctgtaagatttttagttctaagattctttgcattaatatattttccatccttttacttttacccaactttcacgtaggtcttcatatttaaaatggctttgttttagaaagtatatagttgtttcttatttttatataaattgacaatctctgtcttaatagaagcatttatatcatttatattaatacaattatttacatacatgcatttaaatctactggctttctgattgttttctatgtttcatccttttcttattccaaattttcctcttttctgcctgatggtggatttagtatttttagcattcagttatattttctctactcttggcgtattagttaggtcactttaaaaaatatagtggttgctctagggtttacaaagttcatatttaattcatcacagtctatcttcaaagaatattatactactttttggctgaataggaacagctccagtctgcagctcccagtgtgatcaatgcagaagacgggtgatttctgcatttccaactgaggtacctggttcatctcattgggactggttggacagtggctgcagccaatggagggtgagctgaagcagggtggggtgtcgccttacccgggaaacacaagggtttgggggatttccctttactagcgaagggaagccgtgacagactacctggaaaaaaggacacttccgcctaaatactatgattttcccaaggtcttagcaaccggcagacaaggtgattctctcctgtgtctggctcagcgggtcccatgcccacggagccttgctcactgctagcacagcaatctgagatcgatctgtgaggcaggcggcagcctggcttggggaggcgcatccgccattgctgaggcttgagtaggtaaacaaagcagccaggaagctcaaactgggtggagcccacagcagatcaacaaggcctactgcctctaaactccacctctgtggactgggcatagctgaacgaaaggcagcagacaacttctgcagacttaaacatccctgtctgacagctctgaagagagcagtggttctcccagcatggcgtttgagctctgagaaaggacagattgcctcctcaagtgggtccctgaccccccatgtagcctaactgggagacacctcccagtaggggccaacagacacctcatacaggtggctgcctctctgggacgaagcttccagaggaaggatcaggcagcaatatttgctgttctgcaatatttgctattctgcagc

SEQ ID NO: 1888932 - DNA, 4001 bp, Homo sapiens
tgttccttctgttggctctagaggagaatctacttgattgtctttagaagattctagttactttctccattctttggctcatggcctttacctctacctctagtcaatactatagtattttgcaatgtttctcattctaaccacctttctccaacgtataagggcccttgtgataatgttgggctcacctagataatctaggataatcccaatctcaaaatatttaataacatctacaaattttcttctacaataaaatatgatgcttacgagttcaggggttacattgtgaacattgtttgggcgggggctgttactctgcctaccacagagatcttgtaattttttcttagagtttcaaataaatattttatgttcatattttatttttcaattagcttgatttaatcattgcataatgtacacatatatcaaaacgtcatgttgtacaccttaaatatgatttttatgtcagttaaaccttaataaattggaagaaaaaaggctgagtaatacaaaacagtatttcactgaaaaaaaacacaaataccagtaaatatactattcttttgagaaatcataacagaggtatgataacaactaaattctcttttatttcattttaagatatcacttaaagttatataagtaaacatgcatcactataatacagttttagaaattatatactaaaaacagttatcactttggaaaattctatgtacatacagtattgcaaagtgacaaaatttttttactgttcagaatgttgcccccaccccaaaaagattgtatgtattctattattacaatgtttttcattatggaaaagatacttcaactgttttttttactttcagacattaatggtcttatacatattcatacattctgaatctaaaaaaacataaaccaaaatcctgcctgtaaccatatagtaattgttttttatagtttttccctttcggtgtttatgctgtagcctctgtttcagttggaatcaaaattgtattaatcacttactatttataacattttttacacatttccacaatataaatagcttatttataacctacttcccaaacatgtatactagattaatgctgcagatggccttacatagtctggtgcttgtctttctcttgcatgttctctctctctctctctcctctctctctctctctctctctctctgtgtgtgtgtgtgtgtgtgtgtgtgtgtgtgtgtgtgtgtgtttatttccctctatttctctccattaggttaagagttaagcgtcaccaaaagaaaatggggagagaagcctaggagatatctcttgagtatcaattctgtcatacccttccattcttcaaatatactcttaaaaaatggggaaaaaagataattaaaaagggtgaaatattcttgggtggactatgcttaacccttcataaattggtgactgaaggctttgaaaggtattttaacagtcaatgagaaaatgttttagtctttgacagaaaatggacactgtggatcagcaatgaagggacctgagaggcaggagagccttttgggagcactaaaggacaatccttgcaaatgatgactagttgatcagtgaaaagagtttagagaattgaggaatctggagtaaaatgtctcagctgacgaagaatggctgtggcctctatacaacgtatttcttatttgagccaagcctcatttggcaaaagtagataaattcttaaggaaccaaagtgcatgcgttttctcaggagtccacagttcttatgtgtagtcgtctagaaggcacaaaaagttccttgaagtagcccagcactgaggagtgggtgcacaggatgcaaaacaggcatcaccatgctcgcagctacagccccatccctagggacaccacatatgcagtgcatgctgtacattactcttctcagaaaggtgaaatttatattttagttcacataaacgacacctccttgagaaaggcactgtacgctgaatggctgaatgtggcatcccagaccaaatgttccctattcatgccgtttttattcaagtccctataggtgtatgccttcgcatggccaccaagatttatgccaagtaacaatgcaacttctagcccctagcactccccttttcaccctgccctgagtgagatattaacatgcagatttttgttttgttttgagacggaatctggcccagactggcatgcattggcgtgatcttggctcactgcaacctccgcctcccgggttcaggtgattctgcctcagcctcctgagtagctgggattaaagctgtgcaccaccatgaacagctaattaacacgccgatttttaggctgagcaatgatagagcttttcacttctcctctttttcagaggtgagttatccttgtctgaattatcccattggttttcctgtaattttgcttgtctcattaaaaatcctcaaagtctttgctattgtgaataatgccgcaataaacatacgtgtgcatgtgtctttatagcagcatgatttatagtcatttgggttatatacccagtaatgggatggctgggtcaaatggtatttctagttctagatccctgaggaatcgccacactgacttccacaatggttgaaaccaacccaaatgtccaacaatgatagactggattaagaaaatgtggcacatatacaccatggaatactatgcagccataaaaaatgatgagttcatgtcctttgtagggacatggatgaaattggaaatcattctcagtaaactatcgcaagaacaaaaaaccaaacactgcatattctcactcataggtgggaattgaacaatgagatcacatggacacaggaaggggaatatcacactctggggaccgtggtggggtggggggaggggggagggatagcattgggagatatacctaatgctagatgacgagttagtgggtgcagcgcaccagcatggcacatgtatacatatgtaactaacctgcacaatgtgcacatgtaccctaaaacttaaagtgtaataaaaaaaaaaaaatcctcaaagtcaggctaggctcggtggctcactcctgtaatcccagcaatttgggaggccaaggtgggcagatcatctgaggttaggagttcgagaccatcctggacaacgtgggaaaactcccatctctactacaaatacaaaagattagcccggcgtagtggtgggcgccggtaatcccagctactctggaggctgaggcagaagaatcacttgaacccaagaggcaaaggttgtagtgagccaaggttgcacctttgcactccagcctgggcaacaagagtgaaaatctgtctcaaaaaaatcttcagactcagccgggcatggtggctcatgcctgaattcccagctcttagggtggcccaggtggggagatcacttgaagccagaagtttgagacaatcctgaccaacatggtcaaacaaacatggtaaaacaccatctctactagaaatacaaaagtagccaggtgtagtggcttgcacctgtaatcacagctactctaagctgaggcaggagaatcacttgaaccaggaaggcagaggttgcagtgagcagagatggtgccaatgtactctagcctgggttacagagcgagaccctgtctcaaaaaaacaaaaacaaaaaacccttaaaattacagttaagtacaaaggaccaaccactcactaaagctttctgttgtcctaaaactccagctgtgctgcacagacctaaattccaacagaaaaaccacagaatacaaccacctggatgcagagaagtgcagaagagtcagagaaaactaggttagagagagcagaaatttaatttcttcttcaggctatgcagggggaagaatccatagaaattaatacgagagagagacgagacagataatgggctggaagacaggaaatgctattctatttctcttagctccatggttctttatcgttcatttat

SEQ ID NO: 1888933 - DNA, 4001 bp, Homo sapiens
aagtttgaacaacaatataataagtcaataagccatagagaatggttatgaatatttgtcaataccaagttttggtgatgatttgggcaactgtaactatgatgcattgttcacagaaacacaatatgtaaagccattctggaaaatagtcttcttaggtttcttaaaaaaatcaatttaaacaaacttttcatagacctagcaatcccactctagctatttataaatgtgaaatgaaacttgtcttctcacatacgtctgtatgcaaactttacagtagctttatgcataatcaccaacaactggaaacaactcatttcattcacatttgactgtaatactacttagcaattacaacagaatattagttcctacagaaacatggatgaattttgaatgcattttaagtgaaaggaaccagaccaaagaccaacatagcatgagactgcaattatgcagtctggaaaaagacagactataaaggtggaaaacagagcagtggttaccagatgttaggctgggctggggatttactacccaaaaggcagaatgaggtaattttgggggcaatgtaacttttctctatcatgatcatagtaatagatacagaactacaagtatttttttaaaacccatagaacaccccaccaccattgaagagtcttattttttttaaatgcttatttctcacaatcagtgtcccaagaacagaattctctctctgacacactctggaattcagggagagcatcagggcatgggacattttatgtcctagatgttttaaagatcagagaaatcaacagcaactaaatgaaaaaacacattttaaaaatttcaccaaaagccatacataaaacatccaaaaaccttgtgtccccaataacacatagcaaaaaataaatcagaagacaataaatgaaagaaaacaacacaaaatctgatcacaattaatgaactgtgatcagaagatatttgcggtgtggccatgataagaaataaaagagacatttctcctgtcttggtaagtaaatgttcacaaaggattgaagtatggtgatacatatgccttattgatgcagacaaaatatcacaaagagccatttccaactcaactccctgatcagaattaaaggaaaaacacaccagcttattttcttttgtccaacacaaagaagtaagatttgtgtcttgctccttagacacttttccagtccagctgacagcacccaagcctatggtacttagcatccccaactctctctgtagaaaaccaaaagatatcgaactttttgtgaagaaacaaataaaattatatcaaacagcaaaattatttgggtactacgcataagccctaataaactgatgacttgtagaggattcaaagatattttcaaaagaactaccatctgttgggcccacgaagaaagcagattcaacatcagaaagtcaaaaaactgagcttcagcagagtagataacttaaaagtgggaggccatttggagagggctaaaggagaagactttaaaatcatgaggggaactgttatgggagaacaggttaaaggatttgagggataacataggcaaaagcttttacaaaaagaaaaagaaaaagaaaaagaaaaacaaaaacaaaaatctaccacaaaggcaacgaggcacactgtcatcacactgaaagtctttttctcatttccatcaagcaacttgggaaaaggaatatgactcacagaagaaccatgggagttcctaggacttgcctctgaaaggcacttaagaggcttcccttgagggaggccagcactaggggtttgaagaggtattatacgtgcattttagagaaagcttccctctgtgtacaataaaacaccctcaatgcacccacagtgccattgtctgtcgtacgtgtcatgcgttactctactcacagaagtgtcaatcaaatttaattatacatgattgtcactctccagagtagggtaccacagacaacatgtttaaggatggaagccctccctaagcacccatttgtgcacttttgaaacaacttctcaatgctttcaggctgtgagtagacactgacagttgtccaaataacctatgcaatacccactcgtctttcttcattcatccctcgagtgctatcccctcatgtgtcatgggttttacatggcagttttcagaactttttgtctaggttctcttgctcatgaaagaaatattcttgcatgcttttatcgcaatgaatcagcagtatgcagtcctcagatccaacagttaagcagaaaatgcttaactccagtcttaaaagatctgaggccctttacctaagttacttacctctactctggaaccacaaagtaagtggtgaaaacacacaagatcctgaaagcaaaaagaaggaaaataatctgtgattgctgtggtggagataatagaaatttattttctttcttagaccctggagtaaaaagaagcccattttacttactggaagtgatctataagacagatatgagcttgtggtctagagatgccctcatataactcgcaacttagaaattttcttagtctattcctggagcaaggttgtttagagcatgtttttgcattttgttatccaacacacatgctatttggtgtctgcatttccctaggactactgaacctggtacaacaaattacagaagaacaaatatttctagagtccagggactgaaagaagttttaactccagcacatcttgtaggcttcttaaaaattgaatttttattgttatacaaatttcatattcatctaaactcacacaagtgtgcactaaaaagcagctgtattatgtatatgcatgttaattacatatatatgtaattgcatctatattatgtatatgcatatgtatttacatgttaattacacgtatatatgtaattggcattaaggggttagaaggaaattcaagtaaaaagattcacagccttaaattggagtttcttttagaacttagcagctacaggctgaaagtatttttaaatatggaagtgggaaagtttgagaaacatcaaccctagtttataagtttttattgaaacaacaatgaatactaaaggaaatcatctcaatgcctgaacatcttgaaatcttccttctttaatatgaaaaatacgaagcctatatttatagctgcaggaagcccagcatctttccaaaaagtactagtatttctaagaagatgtcaactcttctcagcattattaacccccatattcctcatcttagctgaatgccttaaggcccactggccactttttgcctctattttctctgtgaagcttaccaaaaagaaagaaacaccaccttcccctccatttctcaagggagagaaaaaaggttatagtagaggaagccccaatctcctgtggacactgacaagttttgttatcagagagcttgactgtaatctgcctgtccaattcacccttctctcttctcttgccaccatgttgtcttgtgctgggccattctctattccatccagtaaacatgcagaagcacatacatcagtcatcatagccatgtgctggctttaggctgatagaggataagaatttagattcattctttcagacatacctgtgcacagtcacaatcagtttaacaggcagctgcaacattttaagacaagaaactcatgttccagtctctgatccgttttccttgtggtcaaggatattcagtgctggcaaaagaatacattaaaatatcttcaatttcttactggcactttttggaaacctcccagggagagaaaaccccctccacctaaaacatcatggcaacagtcactgtcttctttttctcttcacctcatattccactgccttgggattatactacacagcttgacagagtctttgtctgtatgttgttctttccttttcacctctaaaaccaaagtgcctcaacagtcccctgaatttgtgacataaaatcccttggaac

SEQ ID NO: 1888934 - DNA, 4001 bp, Homo sapiens
cagaagaacaaatatttctagagtccagggactgaaagaagttttaactccagcacatcttgtaggcttcttaaaaattgaatttttattgttatacaaatttcatattcatctaaactcacacaagtgtgcactaaaaagcagctgtattatgtatatgcatgttaattacatatatatgtaattgcatctatattatgtatatgcatatgtatttacatgttaattacacgtatatatgtaattggcattaaggggttagaaggaaattcaagtaaaaagattcacagccttaaattggagtttcttttagaacttagcagctacaggctgaaagtatttttaaatatggaagtgggaaagtttgagaaacatcaaccctagtttataagtttttattgaaacaacaatgaatactaaaggaaatcatctcaatgcctgaacatcttgaaatcttccttctttaatatgaaaaatacgaagcctatatttatagctgcaggaagcccagcatctttccaaaaagtactagtatttctaagaagatgtcaactcttctcagcattattaacccccatattcctcatcttagctgaatgccttaaggcccactggccactttttgcctctattttctctgtgaagcttaccaaaaagaaagaaacaccaccttcccctccatttctcaagggagagaaaaaaggttatagtagaggaagccccaatctcctgtggacactgacaagttttgttatcagagagcttgactgtaatctgcctgtccaattcacccttctctcttctcttgccaccatgttgtcttgtgctgggccattctctattccatccagtaaacatgcagaagcacatacatcagtcatcatagccatgtgctggctttaggctgatagaggataagaatttagattcattctttcagacatacctgtgcacagtcacaatcagtttaacaggcagctgcaacattttaagacaagaaactcatgttccagtctctgatccgttttccttgtggtcaaggatattcagtgctggcaaaagaatacattaaaatatcttcaatttcttactggcactttttggaaacctcccagggagagaaaaccccctccacctaaaacatcatggcaacagtcactgtcttctttttctcttcacctcatattccactgccttgggattatactacacagcttgacagagtctttgtctgtatgttgttctttccttttcacctctaaaaccaaagtgcctcaacagtcccctgaatttgtgacataaaatcccttggaacaggatgcaactgtagtgggctgcagatgggtatggacatcaaaaaagatagacaggaaaaactgagattccctttcactgccagggaagaaggactgtcttagaagcattgagagattagagattggttcgactccttaacttaatacaaaactttgctccatagtgctttcctagagtagtcttctctgaccacctcatttgaaattgcacacctcttcctctctgccatactgcccaaacctcaattcgttttattgtttctctatagtacttaaagctataacacatagttaacattctattcagttattacttcttgtatatttgtaccaatagcatatcagctttttgaagacagaaagttttgcctctccctttacactactgtatttgcagcactgatatacagtatgatgtgcttgatgatttcctgttgaacaaatcagtggcctctgaaaggcacttaagaggcttcccttgagggaggccagcactaggggtttgaagaggtgttatacctgcactttagagaaagcttccctctgtgtacaataaaacaccctcaatgcacccacagtgccattgtctgtcgtaagtgtcatgcgttactctactcacagaagtgtcaatcaaatttagttatacatgattgtcactctccagagtagggtaccacagacaacatgtttaaggatggaagccctccctaagcacccatttgtgcacttttgaaacaacttctcaatgctttcaggctgtgagtagacgctgacagttgtccaaataacctatgcaatacccactccgcttgtctttcttcattcatccctcttgagtgctatcccctcatgtgtcatgggttttacatggcagttttcagaactttttgtctaggttctcttgctcatgaaagaaatattcttgcatgcttttcttgcaatgaatcagcagtatgcagtcctcagatccaacagttaagcagaaaatgcttaactccagtcttaaaagatctgaggccctttacctaagttacttacctctactctggaaccacaaagtaagtggtgaaaacacacaagatcctgaaagcaaaaagaaggaaaataatctgtgattgctgtggtggagataatagaaatttattttctttcttagactctggagtaaaaagaagcccattttacttactggaagtgatctataagacagatatgagcttgtggtctagagatgccctcatataactcgcaacttagaaattttcttagtctattcctggagcaaggttgtttagagcatgtttttgcattttgttatccaacacacatgctatttggtgtctgcatttccctaggactactgaacctggtacaacaaattacagaagaacaaatatttctagagtccagggactgaaagaagttttaactccagcacatcttgtaggcttcttaaaaattgaatttttattgttatacaaatttcacattcatctaaactcacacaagtgtgcactaaaaagcagctgtattatgtatatgcatgttaattacatatatatgtaattgcatctatattatgtatatgcatatgtatttacatgttacttacacgtatatatgtaattggcattaaggggttagaaggaaagtcaagtaaaaagattcacagccttaaattggagtttgttttagaacttagcagctacaggctgaaagtatttttaaatatggaagtgggaaagtttgagaaacatcatccctagtttataagtttttattgaaacaacaatgaatactaaaggaaatcatctcaatgcctgaacatcttgaaatcttccttcttttatttgaaaaatacgaagcctatatttatagcttcaggaagcccagcatctttccaaaaagtactagtatttctaagaagatgtcaactcttctcagcattattaacccccacattcctcatcttaactgaatgccttaaggcccactggccacttttcgcctctattttctctgtgaagcttgccaaaagtgaagaaacaccaccttcccctccatttctcaagggagagaaaataggttatagtagaggaagccccaatctcctgtggacactgataagttttgttatcggagagcttgactgtaatctgcctgtccaattcacccttctctcttctcttaccaccatgttgtcttgtgctgggccattctctattccatccagtaaacatgcagaagcacatacatcagtcatcatagccatgtgctggctttaggctgatagaggataagaatttagattcattctttcagacatacctgtgcacagccacaatcagtttaacaggcagctgcaactttttaagacaagaaactcatgtttcagtctctgatccgttttcctcgtggtcaaggatattcagtgctggcaaaagaatacattaaaatatcttcaatttcttactggcattttttggaaacttcccagggagagaaaaccccctccacctaaaacatcatggcaacacccactgtcttcttattctcttcacctcatattccactgccttgggattatgctacacagcttgacagagtctttgtctgtatgttgttctttccttttcacctctaaaaccaaagtgcctcaacagtcccctgaatttgtgacataaa

SEQ ID NO: 1888935 - DNA, 4001 bp, Homo sapiens
cagaagaacaaatatttctagagtccagggactgaaagaagttttaactccagcacatcttgtaggcttcttaaaaattgaatttttattgttatacaaatttcacattcatctaaactcacacaagtgtgcactaaaaagcagctgtattatgtatatgcatgttaattacatatatatgtaattgcatctatattatgtatatgcatatgtatttacatgttacttacacgtatatatgtaattggcattaaggggttagaaggaaagtcaagtaaaaagattcacagccttaaattggagtttgttttagaacttagcagctacaggctgaaagtatttttaaatatggaagtgggaaagtttgagaaacatcatccctagtttataagtttttattgaaacaacaatgaatactaaaggaaatcatctcaatgcctgaacatcttgaaatcttccttcttttatttgaaaaatacgaagcctatatttatagcttcaggaagcccagcatctttccaaaaagtactagtatttctaagaagatgtcaactcttctcagcattattaacccccacattcctcatcttaactgaatgccttaaggcccactggccacttttcgcctctattttctctgtgaagcttgccaaaagtgaagaaacaccaccttcccctccatttctcaagggagagaaaataggttatagtagaggaagccccaatctcctgtggacactgataagttttgttatcggagagcttgactgtaatctgcctgtccaattcacccttctctcttctcttaccaccatgttgtcttgtgctgggccattctctattccatccagtaaacatgcagaagcacatacatcagtcatcatagccatgtgctggctttaggctgatagaggataagaatttagattcattctttcagacatacctgtgcacagccacaatcagtttaacaggcagctgcaactttttaagacaagaaactcatgtttcagtctctgatccgttttcctcgtggtcaaggatattcagtgctggcaaaagaatacattaaaatatcttcaatttcttactggcattttttggaaacttcccagggagagaaaaccccctccacctaaaacatcatggcaacacccactgtcttcttattctcttcacctcatattccactgccttgggattatgctacacagcttgacagagtctttgtctgtatgttgttctttccttttcacctctaaaaccaaagtgcctcaacagtcccctgaatttgtgacataaaatcccttggaacaggatgcaactgtagtgggctgcagatgggtatggacatcaaaaaagatagacaggaaaaactgagattccctttcactgccagggaagaaggactgtcttagaagcattgagagattagagattggttcgactccttaacttaatacaaaactttgctccatagtgctttcctagagtagtcttctctgaccacctcatttgaaattgcacacctcttcctctctgccgtactgcccaaacctcaattcgttttattgtttctctatagtacttaaagctataacacatagttaacattctattcagttattacttcttgtatatttgtaccaatagcatatcagctttttgaagacagaaagttttgcctctcccgttacactactgtatttgcagcactgatatacagtatgatgtgcttgatgattttctgttgaacaaatcagtggcctctgaaaggcacttaagaggcttcccttgagggaggccagcactaggggtttgaagaggtgttatacctgcactttagagaaagcttccctctgtgtacaataaaacaccctcaatgcacccacagtgccattgtctgtcgtaagtgtcatgcgttactctactcacagaagtgtcaatcaaatttagttatacatgattgtcactctccagagtagggtaccacagacaacatgtttaaggatggaagccctccctaagcacccatttgtgcacttttgaaacaacttctcaatgctttcaggatgtgagtagacgctgacagttgtccaaataacctatgcaatacccactccgcttgtctttcttcattcatccctcttgagtgctatcccctcatgtgtcatgggttttacatggcagttttcagaactttttgtctaggttctcttgctcatgaaagaaatattcttgcatgcttttctcacaatgaatcagcagtatgcagtcctcagatccaacagttaagcagaaaatgcttaactccagtcttaaaagatctgaggccctttacctaagtttacttacctctactctggaaccacaaagtaagtggtgaaaacacacaagatcctgaaagcaaaaagaaggaaaataatctgtgattgctgtggtggagataatagaaatttattttctttcttagactctggagtaaaaagaagcccattttacttactggaagtgatctataagacagatatgagcttgtggtctagagatgccctcatataactcgcaacttagaaattttcttagtctattcctggagcaaggttgtttagagcatgtttttgcattttgttatccaacacacatgctatttggtgtctgcatttccctaggactactgaacctggtacaacaaattacagaagaacaaatatttctagagtccagggactgaaagaagttttaactccagcacatcttgtaggcttcttaaaaattgaatttttattgttatacaaatttcatattcatctaaactcacacaagtgtgcactaaaaagcagctgtattatgtatatgcatgttaattacatatatatgtaattgcatctatattatgtatatgcatatgtatttacatgttaattacacgtatatatgtaattggcattaaggggttagaaggaaattcaagtaaaaagattcacagccttaaattggagtttgttttagaacttagcagctacaggctgaaagtatttttaaatatggaagtgggaaagtttgagaaacatcatccctagtttataaatttttattgaaacaacaatgaatactaaaggaaatcatctcaatgcctgaacatcttgaaatcttccttctttaatatgaaaaatacgaagcctatatttatagcttcaggaagcccagcatctttccaaaaagtactagtatttctaagaagatgtcatctcttctcagcattattaacccccacattcctcatcttaactgaatgccttaaggcccactggccacttttcgcctctattttctctgtgaagcttgccaaaagtgaagaaacaccaccttcccctccatttctcaagggagagaaaataggttatagtagaggaagccccaatctcctgtggacactgataagttttgttatcggagagcttgactgtaatctgcctgtccaattcacccttctctcttctcttaccaccatgttgtcttgtgctgggccattctctattccatccagtaaacatgcagaagcacatacatcagtcatcatagccatgtgctggctttaggctgatagaggataagaatttagattcattctttcagacatacctgtgcacagccacaatcagtttaacaggcagctgcaactttttaagacaagaaactcatgtttcagtctctgatccgttttcctcgtggtcaaggatattcagtgctggcaaaagaatacattaaaatatcttcaatttcttactggcattttttggaaacttcccagggagagaaaaccccctccacctaaaacatcatggcaacacccactgtcttcttattctcttcacctcatattccactgccttgggattatgctacacagcttgacagagtctttgtctgtatgttgttctttccttttcacctctaaaaccaaagtgcctcaacagtcccctgaatttgtgacataa

SEQ ID NO: 1888936 - DNA, 4001 bp, Homo sapiens; identical to SEQ ID NO: 1888934

SEQ ID NO: 1888937 - DNA, 4001 bp, Homo sapiens; identical to SEQ ID NO: 1888935

SEQ ID NO: 1888938 - DNA, 4001 bp, Homo sapiens
agcaacgcagagaaaggtggggttttcctattttttgagatgaggactgctacttaatgtcaaccaacaactagaacgtattgctggttttaaccctcataataatgtaaccatgtaaaaatggggatatactttagcctcaaacctggatgtggtccagtaaatgaaaataatttaagtatctatatgtacgtacaaaaatttaaacctgctatctaattttatacccagtggctcaacctcaaggagacattagtagacaaacataaccagacatcgtgatgtcctctgatgagggctgaagatcctggatgcaagtgcactggattccaatccagatccttttcacccttccgacgtgaatacttgtgtgttttgtcagagcctctttgttttgtgagcagggccattatcaaagctctacataaggaactgtgagctgtgagctgaatcaaatgtttaatacattctagtgctggatttagaagaaaagaaactaagggagggcagtgagttgatgtaaaaaaggggacactgtagagtggctgcctgggctcaaatacaagctctgcttcttgatagctgtgtgatcataaggcatttattaaaattatttttcttgtcttattagtaaaatgagagtggatataacagctcctacttcataaggttcttgtaaagattcactgaattcctgtgcattaagagcttagaattcatcacataaacagaataaaaacaaaaactacatgaacgcttctacactgctggtgggagtgtaaattagttcaaccattgtggaagacagtgtggcaattcctcaaagacctagaaccagaaatagcatttgacccagcaatcccattactgggtatatacccaaaggattatcaactgttctattataaagatacatgcacgagtatgttcactgcagcactagtcacaatggcaaagacatggaattcacctaaatgcccataaatggtagactggataaagaaaatgtggtacatatgcaccatgaaatactatgcagccataaaaaaagaatgagatcatgtcctttacagggaaatagatggaactggagaccattaccttcagtaaactagcacaggaccagaaaaccaaatatggcatgttctcatgcataagtaagtgggagctaaatgatgagaacacatggacacatagaggggaacaacacacactgggacctatcaaagggtggaaggtgggaggaagggtaggatcgggaaaaataactaatggatactaggcttaatacctgggtgataaaataatctgtacaacaaacctgcatgacacatgtttacctatataacaaacctgcacatcctgcatatgtacaactgaatttaaaataaaagttaaaaaaaagaccagaaaagaccagaaataattaccaaaaaaaaaaaaaaaaggagctttaatacctgggagaaaaaaaatactttggtctttagtagggtaaggatctgagaagggagggaactgatggatgcctaaggggaaaatcttaaaaatgaagaggaatgtcgataggtggtaagttaagagatttgcaggctacggttgggaataggttcttacaaaagaaaaaacactttataggtgacaggaacaccatgaagacagtgaaaggcttgttaccattttggtcaagcaactttggcaaaagggatctgaatctcagaagaaactcaatgggaagtttttcctcagactttcagtttctaggtcttacgtctgataattaatttagagaattaactgagctagtccagaacagggagggtgtcagtagaaatgtctgcattctagggaaagtattatactgcttgcaacttaacacgccccgtgtatccaccatgccatgtcatatgatgtatatatcatgtgttactccactcacagaggtgtcaatcatatctaattacacatgattgcctccctcttgagaagagtaccacatgaagaatagaacacttaaggatggcagcccagcctaatgactgactcatgcacctttctttttatattttaaaaatatgtaattgacaaacaaaatttgtatatattcaaggtgtgcaatgtgatttgatatgtatatacatcgcgtactgattaccatagtaaaattaactaacacatcattcaccgctcttagttaccatttgtgtgtgtgttgtgggggtgtggtgaggacacttaaaatctgctctcttatcaaatttccagtaaacaattacagcattattatcactatgctatacattagatagccagagcttatctattacgtaactcaaagtttgtactctttgaccaacatgcatctttcaaaaacacatcattgttttcaatctgattggtgactggtgttcatacaaagggcctctgtagcatgcactacactgtctttcttcatccatcctttcctgtgttgtccaatcatggtttggagttatgacatggcaattttcagaactatgaaccattaagcttttctgctagactctcttgtgcacggaagaaaaatccttgcatgtcttatcctgtttattttttccattattataaagtgttagaaagcagtttacattcctcaggtctaatagttaacaggaaaatatactctatgtcatctatgctcgtcacctgaagatgagtccctctacctgagttacatccctcaactcctgaaccacagaataagcagggaaaacacacaagattctaggataggatggtaatcactgatgtgatggagagtagaaatgtctgtttctccttaaatcctagagcaaaaataaaaatattttacttaccaggaatgaactgcaaaacagaaaatgttcttggcatctatggatgccattaaacttcttccagtttgtgagatttctgagtctttccctcgagcgtggtcttttcaagcatttttgtttgcatttttctccatttggaaacatgcaactatgtgtcttcattttcctggatgaactaaatctgggacaccaaaatatagtaacacaaatatggtaaatggatgtcagagaactgggatggaagaaagaggtgattgtaagtagcctaaaatgtgaagttgctaccagtcaaaaattatggtatcttaatggaagaaacaagttcccagcctttctcatgcaccctacccttaattttgtgttgctgtggctaagcaacaggtacagatgttaggggcactgttcgtacactcagctcactttcgtagggtgtaggctttagtgtggttttggcaggttgagaatatggggtctctgatcatcatcaccccagaataatcataaaacagagtttcaaccctggaatgagcaggctgagaagaccaaaatctacgactaccaatcttcactctgtacataaagcaggagtgttgtgaaagaagcaggtcgctgcaccttcccaaagcttgagagcagtgagtcagagattctttttcccagtgtgagaagtgagtttgaataaaagatggtattatagctctcctaaaaaaaaaaataggactttatttatagcagagtcagggaaagctcaggcttaacgatgctccaggtaacaacacagattttggaggtaagtaagtaagatggatttggtagctgtatgagagcaacaagctaaaccacaggccagcttatttaccagagtatccgataaactgacagctaataagagccttcctgtatcagaacaaacctgaaagacttgcctttaaaacaacgtgttccaagtggcttaaattattttgatcaaactctgatacgtttttcccttaaaattcaaaaaaaacgatagagaaagtcagcattcagtgagaaaacctaacatctctgtgtgatacacagagaccactagctggacagagagatcaggaaaagaaacaaaaagaatgctactaaaatcactgtcatcttagagttactatgtgc

SEQ ID NO: 1888939 - DNA, 4001 bp, Homo sapiens
tatgcaaaactgtataggatgaatggcccactttcttccaacaaataaattataaggaaagaaaaaatatagatggaagggaaagatataattcaaagggacttaagatacatatcaaccaaatgcaatgcatggaccttatctggatcctaatttatgatatttctgagacaagtggaaatgggaacaacagatatgtgatgatattaaaaaattgttggcaattttttttctttttgagatgaagcctcgctcttgtcacccaggctggagcgcagtggcacgatcttggctcactgcaacctccgcctcccgggttcaagcgattctcctgcctcagcctcccgagtagctgggattacaggcacctgccaccaggcctgactaatttttgtatttttagtagagacggggtttcaccatgttggccaggctggtcttgaattcctaacctcaggtgatctgcctaccttagcctcccacaaagtgctgagattacaggcatgagcccctgtgcctggatggtaattatttttaagtgtgataatggtatgattttttttttaaaagcggccttagattttagagatacatagtaattatcagctttccctttttccattgtaacttactacttcccagccctatgcttctgccacaatggctctttgttgttcctagaacacagtaggcctttcctgactaccctatttgatatcgaaacttctccaccaccatctatgctgtaactacccccacccactccttgtccccttttcctgccttattattctccagagcacttatcaacaattggcacactatctattacttacttattttgttcactacctgcctcccctcactagggcagggattcttgtcttttggtcactggtgtatccctggtgcataggggagtacccaacacacagtagctgctcgataaatatttgctgaatgaatgagtggctcaccaaatgaatcggctgcaaatcctgggtctggggagataacagagaaaactcacaatctgactcatatctacatgagtgtctaagaagacagatcttcacacaccctcttgagcaaacaagtgtgcatatggaaaggcatggcacagtgagtggattctactttctgaacccaaaatgtgtgtgcatattacatctttgcatatggttatgatatagacacaattttcctcacaaactgggtttgtgagaattagctagaagactcccttttcatcatgccccatgtacaggagtcctgagaaggttctctctcctcctctaggtgccgctaagacagaaccaggtcaaaagaccccccttccttctctaggctgtgcctatccctgagtatgaggggctgcaccatgtgcaagagaaagctaagagaagtctccctctcctgcaggatccatgtaagactgagatgggagaaaggacatggctgagagtcattctccttcccaccacatgggtgtgtgtttttcttttggtgaaggagtgcgtatgtgtatatacacatgcacaagagagcaaggaaagctgaggctcgccatcctgcaaaccctgcatgtgggaggggttttcagaaagctcaccctccaccatgcaagggatgtgagagagggagcagggaagggcttgctctcttggcacgacatatgggtatgctctaggaggcaagaggcactggcctggggggtgcaagtgggcagcaagatagccacaggagtgctgatgggtaaactaggagcagtggccatggaagcaggacagtcatccagatgggatggctgctaacagtgtaccccacatacagagcacgtaagagagggtctacctccctttggtgtacctgtccatgtgctcatgcctatgcactggagagggaagagaaggctcgctcttctgcaagccttgggtgtgggagggtaattaagatgccaacggtcctacactcaaggcatggaggagagaaagcaagtcgggaggtctgctctcctgtatactgtgtgcatgcgtatcccagatgccttggacttctatgactgtgccccagacatgctgtaatgagaaggtgtgcttgtgtacattcacatatgtaccttcagaaatgttcactatctacaacatatttgttttccttccttctttcttttcctttatttttattcctaacaccagtatagtatttacatttgcagagcactgttttaagtgcttttcacacatagctcatttattctcataaaatatccatgaggtgatcattatccctattttacagatgaaataacacacatacgagaacagatggtaagaaagcttagaatctggcatgcaggtcattagaaagaggactcaaaaaaggaggctcaagctctcagccaccaaccactttgtgtccacacacacaccacacacacacacacacacacacacacacacacacagagagagagagagagagacagagacagagacagagacagagagacagacagacagacagacgcaagagaacttgcacttgtcagcccagggaaaagctggattagtgtggaaataatagaggaagtgagaagtatgagaagtggctgtgtggtcagattagacatgtattttgaaagtagagccaacaagatttgacagcagtttgtatttggagaatggaggggaaaaagtgtcaaagatgaatccaaaacctttagcttattaaaattctccatatccttggcatatgcaattgggaaatgctgtttgctgagttggagaacacagagggaggagtagggctttttgagagggggaggaaaaccaggacctcagctttggatgtgttaaagttttgagatacttattagacattcggggcagatgtccagtacatagttggacataggcatctggaattcaggagagaagtccaggctggaaatacaaacacagaaatcatccacataaaatggtacttagagttgcaagacaagatgagaacagctgaggactaatgagaagttaaaaaaaaaaaaagaagtctgaagactaagccctatatctctttaatacttagaattcaggaagaggaggagaaaccatcaagagactgagaaagagaggcttgtgaggtaagaagacaacctcatgagtgtggaatcctggaaagcaggtagagtctcaaggcagagggagtgatcaactgtgtgttgatctgtcaagtaagatgacaacattgcccagtaaattgggaaatgtgaaggacactggggaccttgaccagggtcatttaagtgctgcaggttacagttttacatggagggttttcaagagtaaatgggactaacatttaagtctttaatccatcttgaattaatttttgtataaggtgtaaggaagggatccaaggacagaaaaccaaacaccacatgttctcactcataggtgggaattgaacaatgagaacacttggacacaggaaggggaacatcacacatcggggcctgtcatggggtggggggaggggggagggatagcattaggagatatacctaatgtaaatgacaagttaacgggtgcagcacaccaacatggcacatgtatgcatatgtaacaaacctgcatgttgtgcacatgtaccctagaacttaaagtatacatttaaaaaaaagagtaaatgggagaaatagaagtagagatggagtacaatcagctccttcaaaaaaattttttttttttctgtaaagaggaacagagaaatgagtagaaactggaggagctttttgggtagagaaggtagtgctttttaatttttaaaattatttttagacaggatatgtggcagcacatctagatattggtacaaacactccagtatacaaagaacagttgatgatgcagtaaggagagggggatcaattgcaggagcactgtcactgaataggtgacaggggttgaaatctagtatacaagtggaggaactggtcctgg

SEQ ID NO: 1888940 - DNA, 4001 bp, Homo sapiens
gtgaccaaatggttccatctcttaccagaacaaggatcgcctaaattgaggtgtcacatgtgttctgcaacaccagagttactatggagctcagctgaatttgcgggaaaatgcagggggggctttacccgcatctgcaagaagttggctgagtggaaataacctaaataaggtgttttcctgacttgggcatatctcaaactggccaatgcgtcttgaggccctgggcgagcatccaagtaccaccttcctgaattgctactagaggaaaaggagcctgtttcagctttctatacttctttaaatgttactttgattagacatagatagcagtttgtttactaatattactattataactctgtcgtggttatattttttagttatactttctcttttctttgccaagagcaaatgaaaacacatttgcactgcagatccaactgaagttgtacaaaggtttcccagatatgtttgaaaaagtattctaggcccactgctggccaaataggaagtcttcccccacccttatgtcaggggttcatgctttaaaaaaaatacaaactctttttaaaaataaaatgttttattattgctataaaagcaatgcattttattgtttatgcaaatattacttggaaaatacataaaagtataaagagaaaaacaaacattacctataattttatactataatactgttacaagttttggtatatttcttcctagacttttctccatatgttgatacaaaactatggatgcaaaatgatcccaatacacttatattacatattcaggaacatattgcaaaaataattctgcatcttacatttatcacagaagtaaaccacagatagccgctgttagattttttgcttattccctccatcttttcatctgtatattgatacaaaactatacatgcaaaatgttcccaatatatttatagtgcatattaggaacacatcgcaaaaacagtttagtatcgtttttgattgcctatagtgacacaagtcagcgataaccacctctagacttttggtatacttcctgatagcctcttttccccatattattgatacaaaactatgaatgcaaaatgtccccaatacatttatattacatattaggaacacatcgcaaaaatagtttagcatctttctttggtcacctttataccacaactcagagataatcacaataaagtttttatatgtttcctcctagccttttatctgtatgttgatacaaaactattcatacagaatgctccctatatacctatattgcagagatgggaaaatattttgcaccttttttcaatcgctaaatgttttatcaggagcacattctcatgacatgaaaattactttcagaaacattattttacatgaaagcatcctattctattgtactagctagctacgctgtattttatttgtctaatcctttgttgttggtcattcaggatgttcctaacttccatccttaaaatattgaaatgagcatctttatgcattttttttaactggggctttctgttcatgtagtttttatggtttttcttgaccacttgtgtggactcaacatactaaaaatgaccctgtgtctgtaatgcttatagcaaagtgttttccagttgtttgcttgagcataaattctttattttagcattctagcacaagtataaaatcatataccttatgtaagtttcaattcattcaacaaacatttaaagcaataaagacacaaataaaggcattcccattacactcctatgaaaacacaactcatcctcccaccccatcccatagcaacccctttcttctttgcttagggcccactttcctcctgatcttttcattgattcgtcttgtaatacttaccacatgttttgctatgaagatgagtggctcccagacctttcagttatcaatctgtcacaagtgcacactggtatctcgtgacatgatgatccccgagatgtctgagatctgtgcatccttgaccgatcccaaatttctgtatcacccatgacccctaaagactttttagagaattatattttgacaacataacaagaaaacgtggcatctcacacacacacacacacacacacacacacacacacacacacacacacaaaaccatgaaaaagtagagaaagaagaaacttcagctctaatcccaccacccttaagtaacaagtatgtctgttttgcaggtttcctccaggttctgctcctatttttcaatcatggtgtccatgtgattttgtggccctgattttttttaagttgatatcataagcattttccaggtttctgtatattctctatcattattatttgcaatggctgaaaaaggttccattgagtgagtgactagattaagtcaacccctatagcttgacacttcatttgtttccttaagataatttgattgaatctacagaaaataacaaacatgggacagaggtttaaaatgaatttaaatcatgcttttttggtttgtgcagattgacttgtacacggctgggtaacttatagtcactatttagtaatcctggggccaatcttgggcctcacccaggaagtgtccaatgtataggccaaagctcatcataagactagccagtttcaccgggaatttttgtaaccaaacacattcacctccatttcctgctctggtcactactgcatagtcggttctgatgaacaggtaatgacataaggaacacagtatgaggcctggaggaagagcccccagagagtagcctcagacaaatccttaacctccagaggccccagttttcttgtctgtaattattttttggactgccttaactctgtttgtctttcaaggttgtcacaaattaaaaaaagaaaaaaaagaaaaaacaaagtatttggaaaagtatgtaaacacacgatacaaaggcaagatgttgggatactgatgattctgtggccacgcctttagaaggtctggtcttagggtaatagtcttgtctggatggcaggtgggggtggacatgggggaacaggtgagggagctgccttgggagactcaggcttcaaagcaacccagactctcactggcaggttgctgcagtgttctgagctccctgactccagcagtggagccaaggccatgtttccaaacacccaccaactgctcagattatagagctcagtagtggaagggggagtgctcaaaggcccaagcaaccacaggaagtggaagtctttcggggctcctccctcttggctcaatttactatccccacaggggttttaagcctggctgaacttgccaaagagatcagctgtggagctggggaggagggaaaaggtggcagataggtgaaatattatgaaagagctagccgatccttgtttattcactgaggagtaactaatgggtgggcctgagtgggatgtaggggggcagggagatacacgtttgctacacttgatgtatatatactcttttttgcttaagagtcatgtaataactctaaatacaaatgcatatataaaattctagggttatgagattaagtcatactgcaggccaatgggaaaaaagatctctaaaaacatatgccaacttgcatatagccagactcaagtcttttaacttctatcgataaactcattgatcttccccaaacatattttttgaacctagttttattttcatcttacacagcctcaggaaagctgcctataactcccatctcataggctcaggttttctgcaaatgttgccctgagctctatagcagtccaggattcagggaacgaacccagtcccccgctgccccatttgccttgatgagttgataggtatggtgttttaaaacaatcagcaaaacaatttgcactgcagagtccttaggagttttttttttaattggacagttgcccatattaacggaaatcaaaagcagcatacagtcattcaatgtcccagcactggagtacagcccactg

SEQ ID NO: 1888941 - DNA, 4001 bp, Homo sapiens
accactgtattccaaatgcctacagtattcaatacagcaacatgctgtacaggtttgtagcctaggaggaataggctataccatatagcctaggtgtgtagtaagctataccatctaggtttgtataagtacactcccctatgatgttcacacaacaacaaaatgacttaatgatccattactcagaacatatcctgtctttaagcaacacatgactgtatagttaaatgttaattataaaatctaggtgttgggtacatggcttttcaccgtacaattctttcaacttttctgtatgtatgtttgacaactttcacaatacaattttgggaaaaatccagcaagcagctttaaaaatatggctgtaagacctttccttctattatattttattcctaggatgatcctatccaacgagatgaacctattcagtgtttcctccattttgttttagatttagctttctcaaatatgactttgagctctccgactttttaatgaagtgaaatgaatcaacatgtattcataggcaggttaccaagatagtacatgtaaagttggggaggcacaaggggaggggctctaagctcttggaagtctaggctcactatctgtatacatctaaataaatgagtatttcagacaccccacttcttcatttaaaaattagtgttagggaccctctaaacatttgcctcagcttacctttctgccttatctcacattaagtccttatttcccatattctcattgcaaagaactgtgtaggaaggaggggggcaaggacgaaggcaccaaagcatgctatgtccacgtgcttcaagtttgaatataataaaaggtatttctagagtagaggttcaaagcttgatgttgaagggcagggtataactgactgactgcaggaccctgggggaggtcttataatcttctactttaaaacatgtcttagctggcttatctgtaaaagaggaaaaagacttgtcacaagcaatgacaaatgaagtaaataaatatgaatttctggtctggtgaatggaatgagaaatgaaaccatcactgtcgagtgatgatccagagtgggcacagatctttttctacaaaggctttgtgggccacaatgtctccaatatatttaatggcaaaaacagcaactacttttgcaccaacctaatagctacttaattgtgccactgggccgcaaaagcggccccaggtaaaacatcgatgaatgaacatggctgtgttccaatatagaatggtatttacaaaaacaggtagcccatgggcaataaagtttgcccacccttggtttagaatatggagtctggttgggtgcagtggctcacacctgtaatcccagcactctgggaggctgagggaggtagatcgcttgagtccaggagttcaagaacagcctgggcaccataacgagaccccttctctacgaaaaatacaaacattagccaggggtggtggcacacacctatagtcctaactcagaatgctgaggtggaagatcacctgagcctaggagttcgaggctgcagtgacccgtgttcgcaccattgcactccagcctgggcaacagagtgagaacctgtcccttaaaaaaaaaaaaaaaagaaagaaaaatgcaaagtcctatctaagaatactatttggatgattacctgggccctgaggatgaggccccaatctaacagttatcactcaagtcccaccaagaaagcaagtgtcagcaatagcaacagttgcaacatctgtaaatatcaaggactgaaatccaaacacaaaaatggcattgtctcatgagaaactcttaggaagatatatacagaaatatcaaatttctgaccacatgctttttgaagaaacagctgacaatccagagcctgtggagctcactttagcaggcacacaataaatgtttgctgatgagtcattcatttattcatctaataaacatttactgaggcctactaatgtgccaggctgggctctggagatgaagacaccttccttgccctcaaggagctcacagtctaactgataacaggaagagagacaggcatatacacagacaattacaatacaatctgataagtgctataacacttatcaggttgtattataatggccgatgtaaaatttcttcccagggggtgctgctccaggctgctgctggctgtaacatcaagagaggtgaggaacaaattatagaaatcaaaggttaaatgcttttcggttatttcaaatattcaggctttccctaacccgtggccatagacggaattgggaactagacactggcatgatgtaaaatgggacttccatgcacagacttccaataaaggaacttctcaatcccctcctctaaaatatgagcttttttttttcctttttgcttatactcctcttaacctccccaccctactacccacatgagcctggtttaatatctacagctagcaaaatgctgaaaaatgggagcttacaactaactggattaacccagtgtaaccggatagcaaaaagcagtaagtaatagctcatttggcacttctaaatccaataatcctcatccttcactggaaaaaaaaagttagaatgttattaaatacaaaatagataatatacagatcagagtaggaataagttagaaaagtttatttaataaacataattaaacagattctctaaactagaaataacattcagtttcaggaaaccagaattagacccctccaagacctttgagaatatctaattcacctatgtattataaacaagaaaaatgaaacagagagataacacactctgcccactcccttttcaaaatcatgtgagtgatagtaacagactccttgaggcaagattattactgtaatagttatttggttcagatggttttatacaaagataagatggcatttttctgtgcctcatacctttcttaataatacctaggtttttactggcttttttgtctctgaccagcaaatagggctgataacatcagcaagttgttgacagttatactgagatcactgttttgggacccaatgtctctatgaggctgttatttaataagcttaacatactattttcccctaaagttatttcactgctcttgcctatacactgttcctttctgccaattagcccactcctggtgccttctcacatgctagcgtgttcctattagcatttcacatccccaaagcatttaacagtatgtataaatgtggacacttcaatattgcccatatcctccctcagaccactcagaaatatttaaaataagaccagtccctgaatggatgggggagaagggaccgctgttttgtttcttgtctaaattagtttctcattagggacaaaatgttgccctgtcttctccccatgcccagagccaggaagcaccactgttgtacagtactcaaaagtgctttccttttagataaaaagaaatggatttctgtttaaaggtcagacaaggctgggtaaggtggcttatgcctgtaatcccagcactttgggaggcggaggcagaaagattgcttgagcccaggagttcgagaccagcctgggcaagacctccactctaaaaataaaaacaaaaataagatagaggtcagacaaatgttatctcaaaatggctaccaagaaccagacatgtatccacacagcagttatatttggaattgcaaacatttcttcagactcaatggcaacaaatattactgggagcatatctgcaacaaacgacatttgcaacttacaaataacattcaggcacaaattgaataattcacaaaaggaaataagagctagtaattaagatctaaaagtccagcctcactaataatcagagaactgtatcacaaaacaaagatatcggccaggtatggtggctcacccctgtaatcccagcattttgggaagccggggtgggaaaatcacttgagcccaggagttcaagacaagcctgagcaaca

SEQ ID NO: 1888942 - DNA, 4001 bp, Homo sapiens
tttcaacctggatagaatagtatttttgcaaaatacaatttaagtaaattagcagataaatgagacatgaaatacataaacattcaagtacaaattttcatcagattcaacagatttaaaattactctgtcaaattactataaaaatttctaaatgcttattcttaatttctttacttatataattgcaaaccagtaagtttacagacctgcactggtttgcaacccaaactttgaataaagctgtattagcctatcccaactgatacagtgttactgtaagagaagtatgaaaatgtattggatagatactatgagtttccaattgctgctgtagccaatcaccacaaacatattgtcttaaaacaatacaatgtattatcttacagttctgaaggttaaaagtccaaaatgagtcttgggagactaaaatcatggtgttagcagggttgcatttcttctggagcctgcaggagaatctgtttccttgtcttttccagcttctagaggccatctgcattccttggcttgtggctgttcctccaacttcaaagcccatcacctcagcctctgcttatgtcgtcacacctgcttttctgactttaactctactacctccctcttgtaaggatcattgtgattacattgggatcacccatctaatccaggctaatctctttatctcaagacctttcacgtaatcacatctgcaaagttttgccatctaaggtaacatattcacaggttctggggataaggatgtggacttctctgggagccattattcagtttatcatagatagctaagctaaactaggagtcagccatttaagtagatccctgtggatacttaggaattaggagatggagaaatgggggaagtatcccaggcagagtcttacaaataggaagatctggaggtgaggaagattatggcttttttagaggaatgaacttttgagtgtggttagaggatagatacgagagagagagatcagcaagggacaaatcatgaagggttttgtaaaccatattaaacaacttgaactcttaaagagcaaagggaagacatcaaagggtattcagtataaaagcaacaattatcaatttgtattttggaattgcatatagaagagccagattggaggcacaaaactatgatgctgatgaaccacggtggtgtcacctaattcacagcatgtctgaaacccaaatccattatttcccacaaaagccagcacattctccatcttccctattgttttcttctaggattcaattcttaacattatttttagcctctttctttctttggcttcttactctagtcagtcaccacaccttattggttcttgaaaattttttaaagacataatatatggttacatgaatacatccaaaataataaacaatatggaaataagtcccttttcatcccttctctgacccctaacaatccaactctcatcttcatatgcaacctgattcattatcaatatgtattatcctgtgccttttattatgcatttacatttattatgtacatgcatatatctactgcattgttttaaaagcatttgcattaaaaagcataattatcttgtctattttcagctcgcaatataacttagatattttccatgtcaatatatttattttaaatgcctcattttaaaattgaacatcggtattgctctcttttccagcttcgagagcttctaactctaatagattctaacagtttctaactttagactattacaaactttatcttataacttatttttcaaatctttctcttttgaaatttttattaaggctttctcttagccagcatttttaaaggtagaagtagtcttctctttaaaaatatcaaaatacacaatgccaagaaaataaacagtgatcttaaatattaggttggtgtaaaagtaattgcagtttttaccattaaaagtaatagcaaaaactgcaattacttttgcaccaacctaatacctttttccaaactgagagctctgtgaaaattcacagtggacattaaagactctgagaagttctgtagaaaaaaaaatatttaacttggtttaactctacatatccaaattttttgttgaactacatcacttgatatggtttggctgtgtccccaccctaatctcttgaattgtagctcccacaatccccacgtgttgtgggagggacctggtgggaggtaattgaatcatggaatcatggggacgggttttcccatactgttctggtgatagtgaataagtctcacgagatatgatggtttaataaagggcagttaccctgcactcgctcttttgcctgccaccatgtaagacgtgcctttgttcctcctttgccttccaccatgattgtgaggacccccaccccagccatatggaaatgtgagtccattaaagctctttttttttaaataaattacccagtttcaggtatttcttcatagcagtatgaaaatggactaatacagcactgttaacaattccatataatatctaataacatctcatgggatactgttgttccatgaagtcactgtgtggcctcaaatgtagtggttacaagcagggtccctgaaaccaaactattctgaattacttaccagttgaccttgggcaagttacttaacatctctgtgcctcagttttctcatctataaaataggaataatagcaatttgtttcattaggaagtcataaggattagttgaataagtgttagtggttattatttggagcattctgaggatactgctcttgaagtattggtatgaagttgatggcactgttagcctctctactgttatttgaagaatccatatcattgtgaaattaaaaaaaaaatcttgactatggcactcccatataatgtaccacacagaattgcccgtgtgagaagaaacagctctgttgcaaagaaattcctgtaattccatagcatctctctttgagtcattcagtttggggttcgttgtaaaagtactacttttttctctatccacagcatgacagttcttaccttttgacagtcttgtggactgctgtgcttgtggtaatccaatcacagctgctttgcaggatgactgctcctctatttgaaaggcatcctcaagggtattttgcgtatgtgatttagcttgtattctaagcatcctaaacatctctgtaagtgtgctgaaaattcatctaatttgtattgtcacatggtgacagtcaaacaggaaattaactttatttctattaatttcatcctaagagcactctcagaaacattctatatttaaagctgcatttcaagtacacagtaatgagatatattcagatataccctttcctttgattcaaatatcggcccctattatttttaggtgtgtgttactcaaaatagatgctttttaaacttatgtccctttgtgatgctatgagagtatttgactaccacatctttttgataatcagaagttaatgacttgtccaaagttatctatgctgaaaggcaatagaatgacatacaaagcatcttgccatctttctaaacagcttagcatagttcaacaaagttactggccacagagggaaaaatctacatctatatttaaagagagagatctgtttaagttaggaattgaacaataaaagaaaaatgaatttcaccctcctaatctgactagtgtttactagccccatttaactaaaagaatgaggatcaattactcatttttttctctacttgattaaaatgtgtaatgggtaagggattctccaggtgaggtatgaaatcgctgaaaagagacacacagtgatgatatatcctcaggtgaagtcattgcagtccagatgctggtcttcagtgcaaaggctgaaaaatttgatttggttagcacacagcaaacagatctgacatgggttcaaactaaaccaaatatggagaactccatagacaggaccagaacattcactcctgaaggga

SEQ ID NO: 1888943 - DNA, 4001 bp, Homo sapiens
aaaatatccccccaaaaaagctacacaagttaaaaggtggaagcaacccaaatgttcactgagggatgaatggataaacaaaatgtgcatatccatccacacaatggaatattattctgcattcgaaaggaaggaaatcctgtcccatgctacaatatggatgaaccttgaggacaatatgttaagtgaaataagccactcataaaaggacaaatactgtatgattctacttcaaggaggtatcgataaaacgagagagttccctgacccccctcacaggacgtgcaacagaggtatggctcatctgttcagccactgtgtgcactcaaatcccttatgggagggggagcacacagacgggcaggtgcaggatccagggcgaacacttttgggctccagccacacagtagtgtctaggagtgggtgcctgtgactccggaaactccactgggcttgctacagtgctcttttagctctgccgtccatagatggcttaagtgttaaccagctcagtgccttcttggtgcctgggttcttgtccggaattcagaaagaatcaggtcacacatgggcttgaaggatggtgaatgcggggattttattgagtggtggaggtggctctcagtgggatggatggggaggaaggagatggagtgggaagatgatcttcccctggagtttggccgtccagcagccaatctcctctccaatggtccccagccggactcctctccatgttcagatgctccttctcttctctccttctctgccacaccactcttctgctcatggagcctggggtttggggtttatatagtacaggatagggggcatggcgggccaaaaggcaacatttgggggtgaaaacaggaatgcttgttcttatttagggccacaggtttccaggcttgagggtcgggcctttgccagagaatcgccctcttctgcccagtatttcccggtctcctgtccatatcatctagagtagtcaaacccaaagaggcagaaaatagaggccaggcatggtggctcatgcctgtaatcccagcactttgggagaccaaggggggcagatcacttgaggtcaggagatcgagaccaggctggccaacatggtgaaactccatctctactaaatatacaaaaattagctgggcgtggtggtggacacctgtaatcccagctactcaggaggctgaggcaggagaatcgcttgaacctggaggcagaggttgcactgagccaagatcatgccactgcactccaatctgggcaacaaagtgagactctgtctcaaaaaaaagaaagaaagaaaatagaatggtggttgccaggggccaggggaagggggagttgctatttaatgggtatagtttctagttttgcaagatgagaagagttctggagactgtacaacaatgcaatgtacttaacacaattgaactgtacactaggaaatggttaagatggtacattttatgttatgtatattttaccacaattaaaaatttttaaaataaaaaacaaaaatcatccagccccactcttgtccatgatgccctcttgctctgactcaccctttattcaaacctcccactcccaccctttgcaacctggcttttgttcctgtgactttacagaactgctctctaaaatccagcaggtctgtcttcagctgccacccttccccttctgtgacctctgctcctccaggcactttttgccccatctacctgttcatcatcctcaactggggacccctgcccaagactgtaccctcttttcttctcccacattcgctcccctggaagctatcacccacatagctgtccactcccattctataccttctgatccttatctttcccccggtgccatatctcctatttccagggggctaaaggcaatcacccatagcatctaatacattggtacaaaagtaactgcagtttttgccattattttcgacggcaaaaaccgcaattacttttgcaccaacttaataaaaaagtaaaaccactacctgctgggcttcattacctcttttcttggtagaattgccttgcttttacacaaatgtcctttttgcaccagtgtcttaatttacttcacttttaagactacctgcaaccatgccttctgctaattaggcattttaaggaccagagccctctcgtatgtgcaagaatttgctgatgcttatctaattcagtgcttatctaattcaaagatcctaagaggctgcccagggtgcagatatttgttgtatttcgcttgcagagtgctggcaaacacacaatattttaaaaatgtaaataagttgccaacatttaaacgtcaggagattttacataaaactccagatttccagattttcttgaaaatttagaagactggcagcagtgaatccacagttcttgatacaactaccagctgtggaagtcacttctttgatggggcacatgcttgctgatttgccacagtccctaccactccttactgcctctctaactctaaggctcagtgtagctgctgctgattgttgagcttaagctgtggcatttctcacacctgcctgtctgcatgccctactggcctagatgctcagtgcaaaactgactcagtgcttgtgtctatccttaagctaaacccgcggtttcagactggctttcagaagaggcctggggtagggtcttcgctttctgcaccccctgctctccacccaccagacacccccgaaacctgcaaaaccttttctcaggattctcagtgagggcagcatccagctctgggagctgtttgggtttttctgcctcttctttgattaaggtccagccgtttggtacagtgaggtggtcaaagagtcagctcaatgactttctaacaagtgacctggatgagtgacttaactttgctaagattcctttcttttgtgcaaaatggtggctgggtcctaggggtgatgagagcaatgtcttaattactggtgtgcagaaagcaccgagttgcagccagccacagctggctcctttatttctcctttactttctcctatatttctcctttatttcttacttttgaattttagaatgtcatttctccaatttttataaaatatttcatttcttttagtatctaaactcctcccccttccctaattttatcttcctaatctgcttttatctcaattttttagtataatacatctgagttgaaaaatgcgtctttgcttttaactctatattatagcattacattctttttcatcactttttttgttctttttgttttgttttttaaaacggagtctcactctgtcgcccaggctggagtgcagtggtgtgatctcggctcactgcaacctccacttcctgggttcaagtgattctcctgactcagtctctcaagtagctgggattacaggcatgcaccatcacgcctggctaatttttgtagttttagtagagacggggtttctccatgttggccaggctggtctcaaagtcctgacctcaagtgattcacccacctcggcctcccaaagtgctgggattacagacgtaagccaccacaccccacctttcatcactttcatttgttttccatttagtattcttacctcattcttggcatctcttttcttagatcttatgcattggcaagtggggagctagcagccaagaaagacagaatagaaataaccttgcaagagcaagggaaagcctattcttccctcccactcccctagtgggacctcattcttaatgccaggtcactaaccgacgtttgccccaagctttgagaagatcacaggtcaatgctctcaaatatcagccacacttaaacagtgccttttctgtgccaggcactgttctaagggctcccgcatatcatttatttaaccctcacaagaaccccatgaggcggcgctcttatctctgtctttcagatgcagaaactgaggcgtggtgcgggtaagtagctccacatagccagagact

SEQ ID NO: 1888944 - DNA, 4001 bp, Homo sapiens
aatgaccttgggagtgagactacctccttggtttcagaggacaagtgctcccttttcaattccagagggtgggttcatttccttggttccagagtgtggggccatcacccaggattgtagaagtggggatgctaccccagtgagcccagaggacataagactgtggcgaagagaataattctgaagccttaaaatctaatgcaatttatttgccttgctaggttttggagttgcttgtgacccatgatcccccttttctttccaatttctctctttcagaatgggagtgtctatcctatacctatctcatcactgtattctggacagataacttgtttgattttataggtatacagatgcagaagaattttgccccaggataaatcaccatgatcatggatggatgaattacatccatatgaaatttagatgagattttggattagaattgatggtgctatgggataagacttttggggatgttgtgatgaggtgaacctattttgcatatgagaaggacaggaattttgtgggaccagagggcagacttatgggttaaattgtgtccccacaaaattcatatgatgaagtcctaaccctcaggacttctgaatatgaccttatttggaaatagggtcatagcagatgttactgataaagatgacgtcatactggattagggtggtcccctaatccaatatgagtggtatccttatgaaaaaggtgaaatttggacacagacattacacagagagaactccatgtgaatatgaaggcagagattggggtgatgcttctacaagttaaggaatgccaaagattgccagcaccctaagaggctaggagagaggcattgaacagattctctctcgcagccctgagggaaccaatgctgttgacaccttgatcttgaactctatcctccagaactctgagacaacaaatttcagtgtttaagtcactcagttgtggtattttgttatgggggccctaacaaattaatacagcttctacgataattgcttattttacagggtagagataacccaaaagaaaaaatatactttacatatacttaatacaaatgacttacggattagcgtgtgggccttgaagaattcttattttattgctcagacttaaatttgtagatgtagtttggaaatactgagaattcacaggctcatcatcttgatgccgtttaccatttctttcttgaatttctactctagctgcttgagaggtcgagggtctgttagcattctaaaaccaataatttagagaaaacactttaggctaattcacaattattaatctcataaaagactacaattttagtgtattcatttttcataatcaacagttctggcaaaacttcaatcataacagtgcttttatgaaaatgattgaatctaatccatctgctattaaaatattttttaaaaggaagacaaacaaaagtccttcttatactactatctgaaaagctggattaaacacttatttccatataaatagtagtagtcctggacgtagtgtttaaaaagataaactcatgggaaaaattaacttgtcttgattgtgccaatattccagaactggcatcttctataatactaaactatttattctagaagagttatagaacctgggtaagactactatgccagatatagagaaaacttcctatgaaagctttcctgtagtactggcctggacaaaaggtaggaaattaatatagtcatagataccacctagaaatttaaaacacccacaatagcctcaaattacacagaatgcaaaaacaggataccaagttttgagggccttgggaaatgtcaagaggctataatcattattggcctagtctgcccccaaataaatgacacaaaaaggaaacaaacaaaaaagtaaaaatattaggttggtgcaaaaggaattgcggtttttgccattacttttataggcaaaaaccacaatgccttttgcaccaacctaatgttttctcttaggcttacattattaagagtcaatacacgtgagttctgaataaaatgtaaaaggtaccaattgcaatcataatcacagtgctttcagagaaatactattaattctctggcaccatacccgaagtgtttctgatgctgaggcactttcagtcgcactgctatgggggatatactttatagcagtaattatcccctgaattgcaatgcgcttttgttccctatactgcaagtcttcaatctccttcctgacttcacttatagctgtcaagagcgactcaactgcaaaaaagtccaagaaaattgtaagttttaaagaactgaaatgataaaaataagaattagatttgcaatgtaatttcacaacacaaaattataaacttactacattaactgtgagacactgtgtttatatctggcatccttctatataattttgtgaaataggcaaaatacttttatcagttaaatttgaatacaggcttccactctgtacccctcatttgcaaaataaattttgcatattaaatgcaatttacatattatatttcaaactataaagtgttgcctagccactgcatagaaaaacacattttaattatttcaaacactattacatattgctagcattatgatgtataagaggatgccaatatttagatgatgataggtccgcattttaaagtttctctttttttccaaaaccatgcaattatctcatagctttttaaaaaagaacatgcttgtgctaaacttttcaactgtcatatattaattctactaaaaagtatattaatagtaggcttctcatcagtacttcaattccaaattcagcatctcatttattttggcatcatttcatatttaaagatagcactcaattgtgttaaacacaatatatatcattccacaagagtcgcataatacagttgtcagtctctgaatatcaagttacccagtgtctcctttagatatctttagtctttctgtataacatcatagcaattgagatctacaccaaggtcagatgtgatctcaatgacattaaataaagatatttataggttgaacatcccttctctgaaatacattggaccagaatatttcagatttctgattttctttattttggaatatttgtattatacttatcagttcagcttccctaatgcaaaattccaaaatctgaactgctccaatgagtagttctttgagtgtcacttcagtactcaagaagtttcaggttaggccgggcgcggtggctcacgcctgtaatcccagcactttgggaggccgaggcgggcggatcacgaggtcaggagatcgagaccatcccggctaaaacggtgaaaccccgtctctactaaaaatacaaaaaattagccgggcgtagtggcgggcgcctgtagtcccagctacatgggaggctgaggcaggagaatggcgtgaacccgggaggcggagcttgcagtgagccgagatcccgccactgcactccagcctgggcgacagagcgagactccgtctcaaaaaaaaaaaaagaagtttcaggttttggaacatttcagatttcggatttttggattaggaatactcaacctatatctccagttggttatcatctgtgttttctcttttcttccagtctgataaaaatcaaagtattaatctttagagcaccatgcgagatatagggaaaactatatagaaaatacgtgacatatatttttagatctgcattaagacaaagctattatcggtgaatgttgctaaactttagatcactcccataaaagaaaagaataaagatgactaattgaaatagcataagccatacatataaaatataaacatatttagaaggactggcaattacattagtacctttaatagaactactatacttggaaaatgtctctggcactggtggataggggtaatatccaccaataaccatattcttctgttccccggaatcagactttgttctaatcc

SEQ ID NO: 1888945 - DNA, 4001 bp, Homo sapiens
ctttgaccaacatctctccaaccctcagccccacccccaggttctggaaagcaccattttagtctctgcatctatgagttcaacttttttagattccacatgtaagtgagaaagtgcagcatttgtctttgctttctgtgcctggcttatttcattgaacacagtgtcctccagattcatccatgttgttgcaaataacaggaatttcttcttttttagggctgaatagtaatgatgcctgaattcccctctcttgctaataacaaaatagtactattatatgacgggtatttattgttctggttgacagtgtatagcatggacatgccacatgcattttggggctcagtgagctgatcttggtaatactgttccccacccacgattgatctcagaacccaggcctaaagccttttgtactataggcaccagcatgtgagggaaatgtggctggaagcctttggaaatgtttcctagaatgtaagtgagttataggcagaggaaacctttcttcttctatgccagagttactcagcactattgacattttgggttggatcattctctctggtggggctgtcctgcacaccgaagatgtttagaagcatccctggcttttactcacttgatgccagtagcacctctccacttgtgacaaccaaaaatgtttcccgactttgccagatgtctcctggggtggtcacccacagttgagaaacactagcttagacatcgtcatatttatccccaaactgccacaggttctgttgctatcagcctagaggtgacacttagagggacataaaatgaagagcactgcaggaaaaaggtcaagtcactggatgaaaccctacatacttatggattttggtgacatgagcctctaaaattcctaattatttaaggtggtttaaatggattttgcttttattataagccaagggcatcaaagtgatccaaggtccagaatcacaggccactgtacattgctttcttccagggcatcatactgcttggagaaatgacaccggccccaccttagagcaggattccatagtacagctttacatgaaggatggcaagtagaatggctcatttttccatttcataattattgcttatacactgttgttatggaattatagaattttagagcaggaaggaattttagggatggagaattaagctaaaaccaatgtctatgtttatcttcaaaggaaggccttcaaaagaggatcaagcccggtgcctccaaatattagggaaagtgccattatccacttcaaaacacatcctgagcatgacaagtcatgttacatcttgtgttaaaagcaaaaggaaatattttcttatagccacatacccttaaatattcccttctccataaatggaaattctatttggctttaacgtctacatcaattatctatttacagcagacttcctgtcatttccaaaagcagagttgtcatttaattctactatccagcaatattgcttttaatgtgaaaaatgatgaatagatacagctggcataattgctggactttaagttcatagcatagtggggaaaggaagaagataaaaaatacaatcaatttattttactgttttatatatatacatataaatctgcattatctttgcttataacagcaatttgagcttacaactaatgtaatcataaatataaaaataagcaaaatgagtaaaattaaaatcatccataatccaacaatcattgattatgtcttaatgaatattatcccctatattttttgcatattgaaattttcttctcaaaaagtatcatattattttgcaatctactatatttaaaacatccccttttatcagatatttagctgttacttattcatccccattgtaaacagtgctgcatatgaatagttggctgaaattattaggttggtacaaaagtaattacggtttttgccattactttccatggcaaaaccgcaattacttctgcaccaatctaaataaattatatatgcttagaaagaaaaatggaaggataaaacacaaatgaagaaattctgaaaaatggaccaatatgtaggatattgttggcttcaaaatcctgtgaggattcaactgttgatccagtccccaaagcaatcagatctaccaatggataagaaccagggcagacagcagctgccaagaagacagaggggagggaagagcaaaccagttttgcagtgaaggaaaccacccaggtggcagacttgatggaacaaacactttaagtgaacctaatggaaaatggttcaacaaatggaccaccagtagattttctcagtttataaatgatagacccattgcctagagaaaagaacagcttttattcaatcatataataagtaaaaggaaataatttgctcctctaaaaaagtcctgtgatggtaactccacatttctatatctatatctatatctatatctatgtctatctatatatctctctctcaaaatatctgtatttatatctgtatttgtattcatatttgtatttatacccatacctatacttgtacttacatatgtatgtgtcattgtacccacatatcttgccagccatccaaccatccatccatctacatagaagtgcttcttaaactggagtatgcatcagaatcctctggagggcttgttaaaacacagattactgggccccatccccagagtttctgattcagtaggtcttcaacagggcctgagaatttgcatttctaatgtttcagggtgatgcagctgctgatggttccgggattacactttgagaactgctgcttacacctgtacccctctcattctctctttctatctcattaccaaactctaatttaatgaacatacagttacccgcacatattttgattcattatcaattgtcaatatacatcacagtgttaaatactacacaaaatagatattatgctgatttcaaatttctctccccttaatttaataataaaattataagatacaaaaattattaccatgtatatttttcctcccaggagaatacttaaatcgtggtacatttcttgcttttacttggttttcactgcctttggcttctaacttgatgtatttacatcttaatggttcagatttattttccaaacagtgagatgaaacagggacaactcaaaggcagcttcattttgaaattggccaggcttttgtaaacaaacccttgacagagcaatttctaattctctaaacagctgggggggaaaatatcacacagaaaagcagatgttattcgcgtaacttctttttttcaggtctacaatcatcatctacagcaccggatccaccatatcacttcaagtaaattttgactttgctaggtttcaaccacattactcacattggagatgtgagtcaaagaataaagcttctcagagacagctctgtggatgcctcttcatgttaggttgacagcttttgatttaagcgttctgttagctcatgactgcagcatgcaataggaacacagttcctcagatgccaaccctaacctaaataaaagctagaccggcatctcctcagggtcaagttaaagaatatgggctgtgctgtctcagacctcagcggctaccaattagtgggagacaagacatgtataaaaggaaatttaattggtaattttaatggataaacaactgcagggttgagagaaagaggtcacttgtgctggtggagttggggaaagtttcatattccatgcattcagatcttgagaaacaaaggttatatctccagaaagcaaaaggcggacattgaaaagggaagcaaatctttacagatgaagtcacagcaaagacaatctggagccaggaattaacgtgtgacaagagagggaataatcccagggatgatgaattttactactgaaatgattataaattacagccacctacaacctattgtgaatggcttttatggtatcagaacagaatagttaa

SEQ ID NO: 1888946 - DNA, 4001 bp, Homo sapiens
gagatgtgttaataaacttctttattgtattagcttttacctcatcagaaatttatgtccataaaagcaacagaattggagggaaaatacaatagcaaggaaagaatcaaatgagagtgtggttatgaaggagaaagaaaggaggaagtatctgtatggttatctttcctgacattcctttgtaagcatatttttaaatgttgccattgtgaaaaaataactgcaaatgtatttctaatcatcctgctcatgctcccttatccccatacaaaataaccacagctatactctttgggaaaaaaaaatgactgaggcaattagaaaaggctggagaaaaaaagtaaaaaacatctatgagggtcaggtttggtagctcaggtctgtaatactagtactttgggaggccaaggtgggagaggatcacttgaggccaggagcttgagactagcctgggaaacataacaagacctcattccctgcaaaatttttttaaaagttaaaaaattatatataagttattatacaaaatatatgaaatataattatatataaaattatataatacttcatatagaaaatatcaaattacatataaaaagtgacatggtatggtaaaatagttaactgacagctcatcatcttatttatcacagttatctttcttcacattttataataattttgcattcacaaactaactttttataccctatctcatctagtatctttcagaggtatgtcagcctcatgacactattgctgttttacaaaactataaagtagagaacagaaaagaaaagtatattgccccagttcacataaataagtgtttgagaaagcaagcccttattccttaggcaaactggagaggattttatgtaaggcagaaatcagggcacgctattatctttgtatttttaatatttcttgttttgcataattgttgatggtttatgggataaatattatttcctagatgcaacttgaataatagtaactgtgggcacaaattgaagcagtctatttccaaaggaaaaagcacttttactgtcaaaaggaaaaaaaaataggaactaaaactaaacagagaagtggtttttaaaataactaaatggctaagatagtaaagtatacttttatcacaactaccagctggtctaagacactactgtgtcttaactggccaacttcactggcctaataactgtcctctcttcctccagtggccttcctgataggttttcttgacctatctctcacctacataaaatctgatggctttgtcttgcacttagtctagaattcaaagcccttattcaaagccctgactgacactacaatatgtaatcagtctcctacctatatttcaaccccatctcagacctcagccatctaacttaccaccctgcaactctacagtccccctggccttttggttcctccagcaagccaaactgtccctatttttgggcctttgcattagctgttcctaatccgtgaaccacacttccttgtgatctgcaaatagtggtaccttcttgtcattcaaatctcaaactaaatggtaccaaccttcaaagtcttacctggatcacaaagtctaaagtagcctcccctcaaccattctctatcacattacattttaatctcttcaaaaactatattcctatccggtatttttcttgtgttcttttttttcttggctgccagcctctacagaatatgtttcatgagatctggggccagaccttgtatgatcattattgagtctccagtgccattaattgtttttgataatgtattccattaatatttgttcatatagagagatatatgtgtattttatacgtatatatatatatatatatatatatatatctcacaatgactatatatcaaatataatttgatgttgctattaggttggtacaaaagtaattacagtttttcccattacttacaatggaaaaaaacatgattacttttgcagcaacctaatagtaagtatgttggtagataggattaataattgctaagtgtaaatgttcatagattttagtgataagcttatctgtatttacaagaagtttttaacttttgttatatcaacttagaaattatagcatagctttggatatacttaatatgactagacaaatgttaattatcatttctctaatcgctaaaccaaggcttaggcaggaaataatggcttccgactggatctatccaaaccctgtcttaggtagagagagaaaagaagtatcgatgaatccatttttgtttactagtaatcttctactctgaagtaatcatatatttagaaaaaaaataggtaatgctccaagttgaagctaatcattggagataatccattctcatgaccatgataatggaaactgaacaggttataatttatttgaagcattaagtaaaacctagattagttttttaaaaataatgacaataccctcttttcataatcacgttttttgtttcctctcacaaaatctttcaaaaatcaggttcagcaaagcttacataatggcttatcacattagaatttaataggttttatgcacgaacacatacatagtcaaagtggcaaggaagactgttatttataaactctcatattatttctgaatttgtgttgctcaaataatgctttgtatattcatttttaaggaattttccagaaaagtctatgtgatagaagtggttacatgtacgtgtctcattttaaaaactctgtgagatgttttagcaaaagctataccagctagaaggctctccttgccttcttaataattattctaaaagctgtaacacgtacaaaagctcttgaatcttccctaaggacaaactaattttttatgtcaatctcagctaggtggtaatactgccattttagcatttccattctctagtgggatggggatgaggaaattacacgcacagaagtctaggtgtctgtcatccttcacttaatggcagacatcccttgaaggggggaatttttgaatgaacatctttttaaatgttagaatcacagataaaagactttttttatgtttcagataagcaaagaaaaagttgcaattttaattccaggaggaattcatattttcttgcaactcaatttcacacagcaattaattaactgattagtatgaataattaatgccatattgttagttttattgaaaatggggagtgtaagaaaaatgagagcatttagcctccaggagaggatggaaacctagagtgcacaaaggagaagacactggtggctattatggcaaggacagtaaagaggtggttggattttcaaaactttctaattttgtttgaggttgctttaagttccacagatcactgcaaatagaagttctaacctgaagaatgttggcatatgaccacagaaggcagcttatatcttaatatcgataatagatggagtaaattagtggacctggtaaacactggggagtgggcagactcaacagttataatatgattattgtacctctcacatctaggggtagtgacaatcatcaccacgatcacagcaggcgaataatatcaatatgcatagattagtatctcctggcttggaatacatatatagttatgaaacctctatcttacatgtaccttatttattctttcaaaaggcctgagcttaaaaatgtgtttttcccctccataatttcacactataatttagtactggaataccaatccttctagcatatctaatgagtttccttggtccttttttttttttaacgcttttgaacttcataaataatagttaaataaacttaaggcatttggacaatttttttcacttaatgtattcaaatccacagttggcacttcatttcttttcatttaaaaataaatctatcttgtcttgataggctttacatgaatatacacacctaacaatataaatcaaaacacatatccagaatgatgagatctgcttgttacct

SEQ ID NO: 1888947 - DNA, 4001 bp, Homo sapiens
acaaacctccgaaagtcacatatgataaaatttgtcaagtattagaagtattccaaggccaggtatggtggctcatgcctctaatctcagcactttgggagcccaaggagggaggattgtttgaggccaggagttcgagaccagcctgggaaacatactgagaccctgtttctactaaaaaaaaaaaaaaaaaaaaagcaacactttttttttaaagaagagaattccaaacaaaccacaatgaatctattttaaactctagttattctctgtttaagtacttatttaaaggttgtgttcagaaagctgaaagtacaggctagcctaaagcctacaaacagaatgttgtgtcccatattaatagagattatggatatcacagcactatccacaagtgttaataaataaccttaaataatttttgagacagggtcttggtctgttgcctgggttggagtgcagtggtgtggttatggctcactgcagccttgacctcccaggcataagtgattctctcacctcagcctcccaagtagcttggaccacaggcacatgccaccatgcctggctggtttctttatttttttgtagagatggggtctggctggtctcaaactcctgggctcaagccatcctcctgcttcagcctcccaaagtgctgagattaaaggtatgggtcaccacacccagtataacatatttatatcttatactttcatatgttgaaaagttgttgtggttattattatttttgattggttcaaatttagttttccagagtactgcctgcctaccactgatgtttattcaaggcccaaggactctttagacagcgggtgatgaatcctgccagaactgggtccttcccttcagggctgcggattcccttctgacccagggtaggtctagaaatgttgtccaggagttagggcctgtcatgcgggcttcaggactctgcttgatgttttattatattgtggcgaagctggtatccaagttgtaagaaagacaaagtcctctttactcctccctctcctgtcatcaagggaaaggagtctctcccagagctgtgagctaggctgcctggggtgggcggatgggtgacacaagtactcctttggccactccagctggtgtctcactaggtcctgtgtaccccaagtccactggctctgagccaagcacagcaccaggacttgccagggaattgtagtctttgtgacttaggctgcctttcaaatctatttaggaccccactactctttagctagtgttggtgaggctagctggaacccaactgctgggacagatgactcccctccggctatcactgttctaaatgctccctccgtggacaccagctgaatcctgccctgtgttgctttccgctggacagggcagcactgagttccaatgagaagtcccacaagtacatagattctctctctgcaccacggagctggccgctgctggaggatgagggaggggtgcacatcagcaattcaagactgtcttttctgccctcttcagtgcctctttccttgatacaatgttaaaaccaggtactgtgatcactcacctgatttttggttctcatgaaggtgctttctcgtgtggatagttttttgatttggtattcctgtgggggtagaaagggaggatgatcgctggtggggtctattggccatcttgctctgcctcctgtctctataagagtcttgaatagactgtttctttcaagttaatgtccacaactcctgaatggtctcagatataactgattcctggaagcaggttccctcgggtctgaacaaaggttaattgagaactggaacacaggttctagttaccctgatgtgaaaagccccagggcaaggcaagcagccccatgcagagcacaccggcctgcactgccctgctcttataggttggtgcaataatatttgtggtttttgccgttaaaagtatggcaaaatccgcaattacttttgcaccaacctaacacataattcttttaaataaaaattgggatttcacagaagctccagcctcaaagggcaggagccaagctaggaataaagggaaaacaagccatctgtttaaaagagtattcacatggaaattccaataaggatttctagaagactcaaaataaaagctatcctgattacaactgttccaagttgagtattgggaggacatacacttgattgtaagattttggaatttagggcaagaatttgggaaacagcaaaatagtatagtgctgaaacaatgtgctttaagcaaaataaaaagttgtttaacaattattcaaacattacctactagagaatgtgaacaagaatttactatccaaacccactagccatctaaaaatgctgagctctgaattgctgtataatttgtaatacaaggtgctcatgccaatacccagagttactgcaaaacatttcttggtaatattgtaaaaaccagcagcaggcagcactgcttcaaatttcaccatgtgtacacttaccatctaccaaacaattctagagaataccccctcaaactgtgacaagactaacattatgaatgataaacaaaggacattttaaagtagccaaaataagcacttgcctatgtgctatgatttaagaggcattgggaaaggcacatgcctcaaactacatccttcattaatggttgaaatctcatcttaccaatttcttaatttaaagatttcaaagctggtatgtttccacacttctcttagccctaaattaagatgtaattgttgccgaggagggccaagggctgatctttttgcagtcattagttattaatatgtagtactttatcagatatactcacaaatatgaccactagttgagagaacttcattctatgttggaaagtgcccctagggcaagattacagctggaaatgatattaaaatgaaaaagagaaggaaaactttgcttacttcatttgtcattttgccaaaagttggtcctgcttatagatatggacaacagataaagcaaaattcttgtaaatgcagaataatagtagaattaaggacatggtgtatgagttaacattgtaatcaaaaaaaaagaacacttactccatagaagataatgtagaaatggtacttggtgaaaagatagagatttgagtggagaggagaaatatttgaagtgtctcatttatacaaacatctacttctcaatgtcaatgtaagcactacttagaggaaacatgacgaagatgaggttggagtttggggcttaacccttttcccgtttaccccgagaatatgcgctggcagcgcttgaggctggatcgtttaccctgagataactttgtcacaaaatacctcacttttattgttgttttcgcatcactctagtatatggactttggaaacaaaggacatcattctatttatagcattccgtttttagtggtgatatttccatttacaaaatatagtaattcaccgtcactgaaaatgtcaaatcctagaaaatgtagcattcctaacacatgatgttaacatctttctcaaatatttgttggccaaatattcatttaattaatctgattcttctgaaatggatgattctgatgattcagacaatgctgatattagttctgtttagaaataactccaagaaaaggttttatattttattttcacattgaaaattagtcagatttgcttcagcctcaaagagggtgtttatgtaaaattaaatgagcactggcactgagctgcacttgctttttataaacaggaaaaggatactagaaattgtttggaaatgtgatagaggtttacaaagaatctcaacttcctttggtgacccttgactgcctatatataggaatggagaaaacatacaagaaagatcagactactcatgacaaagtataatatgtttcacctgaaagctgtaattgaaccaatggctttcacatgaaggcagaaaagagctaatattgagaat

SEQ ID NO: 1888948 - DNA, 4001 bp, Homo sapiens
atcacagtaagaatgtcacagaggggtatatgcttttcatcaaacaacaaattgaaaattttttaactcttaaggactgattttgcttaactacaagttatgcactgatggtagtagcttcataaatttagaaaagttccaaaataatgcttagaaagagtagctatttaacttctcattgaacaaaattcagtgaatttctttgtatgtggggtgaattcaaaatctaagtgaggtaactaaagtatatcatacatatgaggtgatgaataaagaaaaataattttaaaggaagatataagtgctgatgataaatgagaaggatggaaagtaaaccaatatttattgttatcacatatcacaataaaaactccactctaaaacaggattatggatgaaggaattccccaccttatgaacttatttatattagagccacagaaatagctcaaaactatccatttttatttcattggtggctgaaatgatgcaaggaatgtggcagcaagcccacctgcgatttcaatgacaatattagcaggggtactctaaatatcttggtgcaaagaaacattaacaacctctatgacattctgttgggtataaaaatggaaagtgagatttaatgaatacaagctattgatcagaggtcagtgtctacattgatactgttaataataatatcaaaataacaaaaaataaactaaccactaccaccacttactgagttcctactatttgccaggcacttctttttatatacattatcttgcaatagccttatttatccctgtttttaaggctgaataaagtacaactcaaagaggttaagtaccattcccagagtcttacataagtaacagaactggaatatgaaaagcctcatgttcttttaagtgaataaaattttctcaaacttgcatttttaaaatattttcagggacatattcgtaggtatcccatgaaaaaagacccaataagcaaagagctgtgggggaaaaaagtcatactattgcatgagtctttaaaaaaatttccaagcatattagaagaataatggttctccatcttcttcatgatgtgcttatttcacattgcatgcctgtatcgaaacatctcatgtaccctataaatatatacacctgctatgtacccaagaaaattaaaaataaaaaaattaaaaaagagtaattgttctaagaaatcccacagtaaataactgacttaaataataaaataccaacctgatttgaacatataattcattttgcaaaaacatttattagtatatttgaagctgtgttctgaaaaccactgattcagaaaatctcattagtgaaatgaaaccaaaatatacactgaccacatcatgattttatatctgaattgcaatacacaactttcaaagtactttcaaaataattatctcatttaacgcttatagtaatctaaggcagacctgatggtaatggtattatcctcgctttcccaatcaaatattttcaagttcattgaggctatgagtttaccaagatcacagctactaaatggtaaaggtgaaagaagaactgtggtcttccaacttctagtccagtgttctttatgttatactatactacattgctaaggtactctttgcgcttagtctcaaaaattaaggttaatttacatgtttgaatttatactaagtaaaacattggtgataagatttgaaatgttgcttagttgtcaaaaaaagtcttataatttgttcaacctagagataagaaaaagcatcttaaagtccccaaatcacaaactgtaagacaaaattttatgcattgactatatcaagataaaatatttcagggtagtaaattactccagtcaacttactgatagtagatacttgccatgtctataattccgaggggctaatattaggttggtgcaaaggtatttgtggcttttgcattactttaatgacaaaaaccacaaatacctttgcaccaacctaatatctagaataaacaccaacaaaaaaaactcatatgaaccaacaagaaaataaaatcgtaaatttaagaaaatataagaataagcaagtcagagaagggaaaatctaatatccaataagcatgagaaaatatgttcaaaatcactagtaataaaaggtatattaaaacaatgctttgccactttccatttatatttgcaaagattagaaaattttataatgttatatattgacaaggatgagaaatcagatttcatttatcattggtgggcatgtagacatgtgcagccattctgaagagtagtgtgacagcaactaaccaaattaagtgcatgcatatgctatgacctattaacctgggttaatacagacctctcctgggtctgtaaccaagaagaattctcacataggatcataggagaatatatatttattgtagcattgcttgtgattatagaaagttggaagaaaactagatctctctctctctctaaaaacacagatgagtaatacatggtgaatgtcacttgtggtttctgctcagagatatagaaagttgaaaagaacattacacctcctatgcttacaataagaaatgtcagaaacactgaaaattaaggactttttgtgaacccatcagagaactaaagtcaaaggccaatttacccaaaaccttggagagattggctcctgcaaggaaaaattagactctagcactggcttatctggagaagatgtcagtgaatgttatacattgaaggagacgcagttaaaaagttttaacaaactgctaaagactaagaacatgagctaggattagagtgtaaagtctttaatggtgtaaatacagtggggttagcagcgcgctgaaaactttctcatcaggaactttaccaggtgatcacaaggaagtggggaaaatcccaagaaaattggcttcacaatactgcctaggggaaggggataggggaaattatattcagacccatctttcttaacgcacttatgaaaaaaaaaaagctttaatattcagtagggaggaacaacaaaactgtacccttaggacttcaaaacaaggaatgttatcaggtataaatagagatagtagataataataaaagaatcaattcatcaagaaggcacatgcttcctaaatacataaaatacatgaagcaacactcacagagctgaaaaaacaaatagccacatccacaattaaagttggaaacttcaacaattttctcaaaggtattgataaataagtaggcagaaaaactatatatataaactatatataatatataatgatatatataaactatatatatatacacacatatatatatattctgagcaacactatcattgatatttatggaacaatctacctaacaatggcagaatgaatatacattcttctgaaacgtacatggggcacaaacaaaggtggatgatattctgaaccataaaggaaagcttataaattaaaataaatagaaattatacaaagtgtgttctagactagacaaagtaaaaatccattacagaaagacaataggaaaattcaagaacatttgggaattaaatgccaaacttctaaataatccatatatcaaaaaggaagtcttaagggaaattaaaatattttgaactgaataaaaattaaaatataacatatccaaatctgtaggatgccactaaagtggtgcttagaagcaaattgaatgcaaataataattatagaaaaaaaacaaaacaaaaatctaaaatcagtagccaccccgagtaatagagaagaggagtaaattaaactcaaagtgaacagaagaaagtaaataatacaaattaaagcataaatcaattgaaaataacaaaactaggaaaaaataatgaacaaaaagatgtttctttgaaaacatcaataaaattgttaaaactctaaccagagtaactaaaataaaaagagagaagacacaattaccaatatcaggaataaaagaatgaa

SEQ ID NO: 1888949 - DNA, 4001 bp, Homo sapiens
actttgttatggatatgtacttggagttgcaactttaaattcagatgttagaaaaataaatctttttttttttttttaagccctgaagacctctagttgttccctggaaactgatttccaatgtggtccagacaggaaagcccagcataaatgccaaatagaacataggagaaatggtgaataatacccttgctataaggttaaagcttcagtaagatgttttcaatttacagtaactttggatctgtgacttcaacagccaatcgacagcaagggaaattcagtttgtgtttaaaatggcctgagattgaagcatgatttagacaaagtaaaagtcttatttggttctcccccaaacttctctatctgaagcttttcatcaggtacttgtttatggacaattctgtatttcatctcactgaagtggcatacattttaaggttaatgatatcgaactgatgagaccctgccttgggaggagatttagacagggtagaggctgagagctagaaggctccaggatacatagaggcagggcttcaaaaggagtgaagggcaaatagatggacagaggggaaggcctgggtagactgtgacctcacagcctggggtctggctctccttgttggggcaggttgatgtgtattcttattatcatgcatcccacaactctggcttagaaatcagaaacccagcaatcagggaataactaccctgttatttggtgcttcaagaaacatgactttaccatcaagaaggaccatgcaaattggataaaacatgatacacattttagatctaaaaatcattgcaatttaagacctgaacatttgactggagcagtaggtgtgctgaccgtctcttcagcttgcaaaacttgcatagtgagcattttgcttgaaccccctgcacttgcccttttaacaccttgccttcatttattcaccagcgacatgctgggtctcacaagttttatggcagtagacgctgatgttcgtgcaactgtaagagagactctaaatcatgtgtttcacgtggtttttgcccctttccacctgactgacttcaaataaaaatgtgttatgttgtgtctagcaaaagaataaagccacatttaatccccccatcacctggtgctttaatgacgagaagtctgtgatgagaattattggtccttcctgaaggaatggtaatttatgaggtattttctatgcatgccaggtaatgaactcaccctttaatgcatacattccttactctcagaggtaggtattgctctctccaggttgcagaggaggaaattgagccttagctagcttaccttagctagcttgcccaaggtcacccacgtcagtctggttctcaatgcccttgatcatgacactatcaatccaatcaggatgaggacccacccttttaattgacacaagtcccaggaggatattctaacttcctttatctaagtgggcaatgatgatctttgtttttgtctagtatttttatgctcttgtcatcttgtcacaagcaaactatgatggcagaaggttttgcataatatggaacatgtgggaacgatatcaatgttttctattgttttatagattttggatattatcaagttctgaccccacttatggtcaatccagatattttttaaccagccagagagaaggaggttggggcaggaacagactagcaaaaagaaggtagcattgttattcctaaaaatagctaacatgttagtgcttttatgggacctgcaactgtgttgttatcccatttaatagataaataacttaggatgaggcacatgctacctactgaaggacacagggacagtgagagtagactactgccctgaaggaatacacccctggtgagacagtcaggaggaatgtggatttggttctgctacactgccagtgttggtcgttatggaaagtcataaaaagaaaaacaaggcaaaaactttatgctcatctctgcccttcccaacctccttgaaatgatcagaggcctctctcggagttcctaacacatagtctgagaaacaatgtccaaggcaaattatggttccttggtttgcaatgtacaaaaaaatcagcaaaatacttaaaatctttgcatatatgcatatgtaccttgaaagcatttagaaattggcagtatgaattttaaaaatgtgagttacaaatctataagctaaaaggtgtacttattttgtggctgaagcctactggttgggtgattaataattaaagtttattgcattggaaatcacttaaattataattagaggagaaatttaccagcctgcttttgcccatcttagttcctttagattaaaaagaaaaccaaaaacaaacaacccagtcatactcattaagataatcacaaaaataattgacaagacagtcttctaaaataaatcatgccaagtatgatggcgtcagccacattttgtctgggaagagatctcataggaacccagaccttggttattggtagttatgcatgtccttgcctgagagatccactggcaattttgtggcagttcatggtatgacagataaaaacctaagggccctgatccaagtgcagggtctgagtttttacaaaattaccttcacagactcccttgctgtttcttctccagccgtagcagcaggccagtttagttccatagtgacagaccccaggctgacgtgccgatgctaacaacccgtgatgccttgcactgcagataaagaactacatgttagtattgagaaaatagaaaagacaacagaaactcttccctactactaaaagaaccagagatgtcaattacctggttaatttcaacgaacccgcagtaagtgctaaattagattttgaaaacctgaattttggggttgccagccttcctcaataattagtttcaaccatttccttcttccccacggttaaaagaatctataaaactagggcacatgaagatgtccaaagtatatgtttttgaaccttgtagagtgtcacttttcagatctgctctgtatacgcacagcaactatccagttctttgtctatttcagtcactttctaatcctgtggctttgtcccagaccagagctctgcacttttatcccactggcacctgggaaccattgaatagactggaatcaacatacactatagatgattaagagttggaagggctcgttcagcaaagccctcttatgttacagaggaggaaactccagtccaatggagtggagtcacatccccagcagagctgggtgttgggaattctagcccagggctcgttcccattgacctcctggaaacccaatttgctaaactgcttaattttagagcagagatcggcaaacattttctgtaaaaagccagatggtaagtattttaggctttgtagggccataagatatctgtccaagtacaaaagcagccataggcaatagtaaacagatgcgcatgactgtgttccaataaaactttatttatggacactgtaatttgaatagcatataattttcctgtgtcatgatatggtattctccttttgctccatcttctaacatttaaaaatgtaaaaactgttcttcgctcatgggctgtttataaagaggggatcacctagctttggccagcaggctgtagcttgcctgatctagatgcctgaaaaaggtgagccccctgtcccccaccaagtgcccccaagtagtgccgccatggatgaagctcactgcatgtttacctacttactgtcctggtattggacagggttgctaccagactttgaaggaaaatacttgcattgtatgtttagtggagggctgtgattatttccttacacatattaaatacactgtaaaaatgtttcctgggctctttaacagacaaaggaatgcacattttaccatgtgctttctgctacagaactgaacttcatgcaagttaataatatctaagtcaaggtcgggaagttaaacaaccttgta

SEQ ID NO: 1888950 - DNA, 4001 bp, Homo sapiens
tgagataatcatgcggtttttgtctttggctctgtttatatgctggattacatttactgatttgcatatattgaaccagccttgcatcccagggatgaagcccacttgatcatggtggataagctttttgatgtgctgctggattcgttttgccagtattttattgaggatttttgcatcaatgttcatcaaggatattggtctaaaattctcttttttggttgtgtctctgcccagctttggtatcagaatgatgctggcctcataaaatgagttaaggaggattccctctttttctattgattggaatagtttcagaaggaatggtaccagttcctccttgtacctctggtagaattcggctgtgaatccatctggtcctggactctttttggttggtaaactattgattattgccacaatttcagctcctgttattggtctattcagagattcaacttcttcctggtttagtcttgggagagtgtatgtgtcgaggaatttatccatttcttctagattttctagtttatttgcgtagaggtgtttgtagtattctctgatggtagtttgtatttctgtgggattggtggtgatatcccctttatcattttttattgtgtctatttgattcttctcttttttcttctttattagtcttgctagtggtctatcaattttgttgatcctttcaaaaaaccacctcctggattcattaattttttgaagggttttttgtgtctctatttccttcagttctgctctgattttagttatttcttgccttctgctagcttttgaatgtgtttgctcttgcttttctagttcttttaattgtgatgttagggtgtcaattttggatctttcctgctttctcttgtgggcatttagtgctataaatttccctctacacactgctttgaatgcgtcccagagattctggtatgttgtgtgtttgttctcattggtttcatagaacatctttatttctgccttcatttcattatgtacccagtagtcattcaggagcaggttgttcagtttccatgtagttgagcggctttgagtgagattcttaatcctgagttctagtttgattgcactgtggtctgagagatagtttcttataatttctgttcttttacatttgctgaggagagctttacttccaactatgtggtcaattttggaatagctgtggtgtggtgctgaaaaaaatgtatattctgttgatttggggtggagagctctgtagatgtctattaggtccgcttggtgcagagctgagttcagttcctggatatccttgttaactttctgtctcattgatctgtctaatgttgacagtgggggtgttaaagtctcctattatcattgtgtgggagtctaagtctctttgtaggtctctaaggacttactttatgaatctgggtgctcctgtattggatgcatatatatttaggatagttagctcttcttgttgaattgatccctttaccattatgtaatggcgttctttgtctcttttgatctttgtcggtttaaagtctgttttatcagagaatagaattgcaacccctgcctttttttgttttccattggcttggtagatcttcctccatccctttattttgagcctatgtgtgtctctgcacgtgagatgggtttcctgaatacagcacactgatgggtcttgattctttatccaatttgccagtctgtgtcttttaattggagcatttagtccatttacatttaaagttaatattgttatgtgtgaatttgatcctgtcattatgatgttagctggtgattttgctcgttagttgatgcagtttcttcctagtctcgatggtctttacattttggcatgattttgcagcggctggtacccgttgttcctttccatgtttagcgcttccttcaggagctcttttgcgtgcggccgggcgcttggcgccagaagcgagagcccctcagggctcgcccccccgcctcaccgggtcagtgaaaaaacgatcagagtagtggtatttcaccggcggcccgcagggccggcagaccccgccctggacccctcgcggggacaccggggggcgccgggggcctcccacttattctacacctctcacgtctcttcaccgtgccagactagagtcaagctcaacagagtcttctttccccgctgattccgccaagtccgttcccttggctgtggtttcgctggatagtaggtagggacagtgggaatctcgttcatccattcatgcgcctcactaattagatgacgaggcatttggctaccttaagagagtcatagttactcctgccgtttacccgcgcttcattgaatttcttcactttgacattcagagcactgggcagaaatcacatcgcatcaacacccgccgcgggccttcgcgaaaaattcttaacaaaatactagcaaatcaaattcaatatcacatgaaaaaaatgatacagcatggtcaagtggggtttatcccagggatgcaagggtgattcaacatacccaaatcaataaatatgatacatcaaatcaatggaaagaagaataaaagccatatgattctctctcaagttgcagaaaaagcagtcaataaaattcaatatccctccatgatagaaactctcaacaaacgaggcacagaaggaacatacctcaacaaataaagactacgtggactcttctctgagaactggaacaaggcaaggatgtcaactttcaccacttatattcaacataatactggaattccaaaccagagcactcaggcaagaaaaaataataaaagacatccaaactttaaaatagaaaattaaattgtctatctttgttgatgacatgatcttacatctagaaaaacctaaaaactccaccaatacacttatatctgataaatttagtaaagtctccagatatgaaattaacatacaaatcagtcgtgtttctttatactaataataaactagctaagaaataaattaagaaggcaatcccacttacaatagctacaaaaaataaaaatacctagtaataaatttagcaaaggaggtgaaaaacctccataaggaaaactactaaagtctaatgaaagacattgaagagagcccaaaaaatgaagagacactccatgcttatggattggaagaattaacatcatcaaaacaaccgtaagacccaaagcaaaccatacatttaatgtattctttatcaaaatatcaattccattttttgcagaaatagaaaaaaattcctaaaatgtcacagaacaaacaagattcagaatagccagagtaatcctgagcaaaaagaacaaaactagaagtaatacagtacctaacttcaaaatatgttacaaggttagagtaattaaaaatcatcgtattgggataaaaacaaacacatagaccaatgaaacagaataaaaaaaaaagaaatgaatgcatgtatttacagccaatcgatttttgacaatggtaccaagaccatacattggagaaataagcactctcttcaataaatggtgccgggaaaattgaatatccatatgtttaagtggtgggggggggaaaaggagagtttggttggtgagaacaagctttcacttagatggaggaaataagttctaattttctatggctgagtagggtcactatagttaggaatacatattgcatatttcaacatagctagacaaaaggacttgaaatattcccaacacaaagaaatgataaatagtcattattatgggtaccccaaataccatgatatctcattacaagttctttgcatgtaacaaatactcacatgtacctcataaatatgtaaaatagtatcaatcaataagataaaaatttttaaaaaatgcatgcactcctatgtttattgcagcactatccacaatagcaaagatatggaatcaacctaagtatccaccaatggatgaatggataaagaaaatgtggtatatttacac

SEQ ID NO: 1888951 - DNA, 4001 bp, Homo sapiens
ccaacaacaaaaataaacaacacatatacttcctatgttcccactgtccaaactcaatccatttatcacgcaaaagagatgtcttgaaaatgataataattcaatgacaatcagcaaagtcagcaacagaggagactttaaaaagttactcactgtttcctccatcaggaaaggcatcgctaagtcaaagtcagcccttaaaggagggaaatgagctgttaataccaatgttctgagaaatgaggaaggaatgacccaaaaacaggtggagaaaacaccacggccccacgtttctaaatacttcagaaaacgtgaattcctatcttctcatcactcttccctcaggtgaaaacagtaaaagatgagcatgagacagaaaaagagggagtaagagagagagaggagagagaaagagggggagagaggagatagaggagagaaagaggagagggaggagaggggggagagagagaggagatagatgagagaggcgggagagagacaagagagagaggagagagaaggagagagtgaggagatagagagaggagaaaggcgagagacaagagagaaggagacaggagagagagagatgggagagagaaaagaggagagagaggagaggagagagagaggagagaggagaggagagagagacgagagagaaaaggagagaaagaagagggggagagagagaagagggggagagagagaaaaggggagagaggagagaggtgagagagaggcgagagaaagaggaaagaggggagagagagggagagaggagagtgaggagagagaaaagcgagagaaagaagagagagaagagagagagggaacaggagagaagagagagagaggagaggagagagagaggaagagggagagaagaggagagagagaaaggaaagagaagagaggagagacagaaagagaagagagactgcagtatccataagatccataagaacgtcaccagggttgggggggaatcggatgccacctcttccccaggttcccctaaatttaagagtttgcgattctgcaaactgtagaaggaaaattaaaacttggaaccccagttcactctgccaaaataattaataataataataataaagctggaagctgagtcaggcaggaagctgtctttccttctgttcccaagcagacagtgcaataactctctgttgaccttatcttagtaaagtgccaatttagtgagcgcaagacaaatacataattgactattctacctgctgcttttcttttgcaacaggtgaattcggtaaaatgagccttcctccttctttcccctccagcgtgctttccccctttaaataccgaagctctcaatagtatctttggagaaaggcatagacccgtctcccgggctccttcctgatcttcgccgaatcaactcaaaaggattgggacttgtcccagatactttttggtttacgaaagaaacgctggctttttcctctgaaacggctcccacctggccccaggaagagcgctggggagaaagtgggcgcctcctccggacctgggtccccgtgggcacagcgcgtcccgccgggcacggaagaggggccgggtgtccccgcggggcgccccgcccctgcaccccacatccccaggcggatccccaggcccagcccgcgccaccccccgcgtcctcccacccggatcccgccgctcgctcaccggggcggccaccagacggcggagcaggccgaggagccgcagcgccagcacggccccgcgcgccacggcgcgcccaaggcgagcagagatcgtccgcgagtgcagcgcgcgggcgaaggcggcgggacggaacctcccccacgggccgggtggggcggagcccgcggaggactcgaaggggttgggtgaggggagcagccctgcaaactcagcccaggctgcgcctgccccgccccgccccaccccggcctccactggcgcacggaaggggagggaacgccgggcccggggaggggacagaggagggggcgggcggaggtggctcgggccgcgccgaggggaccacgggacgccctccttcccttctcaggaaactgtgagtgccccccgcccacaagcccgtcgccaggatgccgccaactagagcaaagtgaaacccccaacattctcgggaaagtgcgggtccctccctctctacagccccttaaatgcacgccccagggcggcccctacctggagccaagagaaaccgctgcccttcttggagaggtgtgggcctctccgcgcccgcccttgctgtcccctctctgttcctaacaggcaccccccccaggcagccccaacggggaggaaatgaaactcttcctgctcctctgctcggaaaactatggggcccccttccagctgctcacggggcgctcagggcgatccccaaggggtgcaaagtgcaatcccctccctgcttagaaaggcgtaggccttgacaggcagccacggcccctggtcctttctggagcgtccgagctgggggcgctcagtggtgaaagatggcgggggtggggggctttgagacacactgcggatacccgctctgcgcgggaccaaggacgttctgccgcaagctcagagacagggttgggagtgaggacttgtggtcgtggtttggggttgggggtaagacccctatctgggtcgcctggctgagtcctggtccttggcgactcaccccagcaggctgcgtcaggggcccttcggtaacactggtcttgtgctgtctcaggcctgcgggtgactccgtctctccccaggccacctgtgcccctggatcagacacaggcaaggccagaggggctggccccgcaccctggggcccacctcaggggtttgaggaatgcagcagtctaactatgcactccactcctggaggcagaatcatttttcttttttctttcttttttttttttttttggtctttgcttcatcctgaacctgcctgggataatgacgtgatggctggagtcccagcagccagttcgaagcaggaagtctcctacaggatagaagttgtctgtgtgttgtttgtttgtttatttgtttgttttgagatggagtcttgctctgtggcccaggctggagtgcagtggcacaatcttggctcactgcaacctccgcctcccgggttcaagtgattctcctgcctcagcctccccagtacctgggattacaggcatgcaccaccatgccaggctactttttgtatttttagtaaagacagggtttcaccttgttggccaggctggtctcgaactcctgacctcatgatccgcccacctcggcctcccaaagtgctgggattacaggcatgagccaccgcacccggccagaagttgtattctaagcatggcagaacacgttgagcaaaggtatcagggtggctgatgatacagcaggacggctgtgccagcccgactcacattcccaacttcttttacaggacaaaggagtacatttttatcttaccatttgctaaagttaggtttctatcagctttctttaaatcacttttatttctggttttcattaccaaggtctgagcccaacttagagacctcccgtgaggttcttgtgggcaaccaaagcacttaagaggtgtcagagcatcacacaccatgtctgctgcacagacgatcaaatgaagcttttgaagtcagtggatgatgggtggatagatgggtctgggggtaggaagtggtggatggatgaatgaatggacagacagccatctggatgcgtgaatggatggatcacttgctggaaggatggataaagagatagatggctggatgaatgaataaatgggtggatggatggaaagatgagtggatgattggatggatagatagttgggtggatggatgaatggatggatacatagatgaataaatggatgaatggatgggtgggtggaggaatggataaatggacagatgaataaatggatggatgaaagg

SEQ ID NO: 1888952 - DNA, 4001 bp, Homo sapiens
caggtccctcccacaaaaatgggaattatgacagatacaattcaagatgagatttgggcggggacaaagctaaattatatcagtatcttttgaacatatcatcttatattgttttcttagtggttgctctaggtgttacaatgcatgtaagtaagctatcacttctattaatggtttatcactttgagtgaagtgtagaaatcttactaccatttaggtccttttacctttcctaaattttaaatataatgatcttaattatttactctagatacattgagcatcacatctaatgatgtcataatttttgcttcaaacatcaaatatagtgtatgaaactcatgagaagactagtcttcaatatattaccccattcttactcattctgatgcttttctttcctttttgaagttccaagccttcatttgttatcatttcctttctgtttagagaacttcctttagcctttcattaagggtgcttttacttgcaacaaagtatcataagtttccttcttgtaggtttccttcacctgagaatgtctttatttcccgtttattcctgaagaatatttttgctggatgcagaattctgggttgatatttacttcctttcagtacttgaaaaatcttgcaccacgccttctaaattgcatagttttagggtgggaaatttactgcaattcaaggtggtattcctctatatgcaatatgttgtttctgtctgtctgcttttaattcttttctttttgtttagttctcacaagtttaattttgttgtgtctttgcatacatttttttaggtttatcctacttggagtttcctcagctttttgaatctataggatatggctttcactaaatttggagagttttcaaccattatttctttaaatgtttttgttcttctcagactctgatgatacaaatgttagatctttgttattgtcctaaaagttccctgatactttgtttattttctgcccggtctcttctctcccctgagttgttattgtcctaaagttccctgatactttgttcattttctgccaggtctcttttctcccctgagttgagataaatttcaaactgagtgcattccaataatctgtacttaagttcactgattctatcttcttgtgatctccaatgtactcttgagcccacctattgaatttattttaattactacacttttcagttctatgatttccattttgttcttttttataatttctatttctttgctgaggttttctatttttttcctttgtttcaagagtatatgtaattgcttgttgacacattttgatgatggctgctttaaaaaccttatcagataatgcgaagatctgattcaccttgctttcaaccaccttggtgttttatcagttcgttggttctttttattcatgctgtgatttttctgattgttcgtatagcaagtgatttttccattatagtctagacattttagatattacattatgagactatggatcctatttcatctcctctttttagcagacaattgcctgttcaagtgtagcatgaaggcagtttgccatgcatattctgtttccaactgaaccccaccaacactatcatgacaaaagtggggcagtgactcacattgcctcactacagataagtggggtagaggtttagccacacctttggccctgttaacaccatcttgatgaaagtaggacactgagtcacattgcttcattgcctctgagtaggagtataagctcgacttcccactggacactctgacaccagcaaggggtaaggagaggactgatgcatacctctttgttactacagatgggggcagaagctcactgtctgctaaaccccattaataccagggaagcacagggtttgagaaagcagagtgtcaaccagctctacatcctaccacctcattcagcttcatttatgcaggtggaaatagagggtcagttccctactgagccctactgacatcaaggcccagtggggagctgaggttcaactcccacctggcatcaatgcctggcatcaatgaaatgcttggtgacccaaatttgtactgccttcctaagtctcactaatcctgggtacagaggaggctcagctgcctgctggaccccacggccactacactggctggggaatcagaatactgcctgagacagccagggagaggcaaaaagaccaggtccctgctcagtcctgctaacactatcttggcagaggaattggagcacttcctggttctgctgaatggaagcagaatttcaactgccccattaacttgctgacaaaagtgctgtctgcttccaccaggcagcagtgggaagattagctccacatttagaaaattaggtccgtgctcagccccaccctaggaaaaggaaggaagaaattcgagtcccaccacctgctttcatagagtagggtagtggtgtgaaaatcaactccccactaagtttcactgaaatcccaaaagcaggggcatttttttctattgatgtttggctgagggtgtatgtattgccaaaaaggttttttttattgttgggacaccccatttctggtcaattagctagggaagaaagtactttttttggagttttcttttatccatggctattggcagttccgggttagatgcttctgaagagccctgtctgggatatatgggctatattaaggaaacgcagataacacatcaccgttttattcttcaagtcccaaggtccctaggtagtccacccctttcagcattttcctatgcttagtgctatatccaaagatctaggaaaatatgtatcatatgaaattcaagtgatatgtcaacttgcaacatttgaattaatttatattctagacaacctttttaggtcctcttaaaatttaagttgacagtgaagtgcccattcgagtgggtaaattttgatataaaaggtcagtgctactcatattttccctggaaaatcccctaagaatatcaaagtatttcttgttttcccccatatcttccaaacattttaatgcttctaagagctgattatggtagaatttttttaagtatacaatcgtctaaaaatagctctgattctatgaattaggaaagaaaaaggaaagagaaccattaacagtccaatcagatagttaaataaataaatttttgctagaaagaactgagaaagtggcatcatgtaactaacttcaaaataatacatggataaaaatatatattactaaaactataaatgtttacaaaaacgtccgttaaaaataaaaacaaggccagcgcggtggctcacgcctgtaatcccaacactttgggagcccaaggcgggcgaatcactaggtcgggagttcgagaccagcctggccaacatggtgaaaacccgcctctactaaaaatacgaaaaattagctgggcatggtggcacatgcctgtaatcccagctactcgggaggctgaggcaggagaatcgcttgaacccgggaggcagaggttgcagtgagccgagatcacaccactgcactccagccccggcgacagagtgagactatgtctcaaaaataaataaataaatataaattaattaattaactaattaattaaataaaatcaaaacagacaatcccggccaggcgcagtggctcatgcctgtaacctcagcactctgggaggccgtggtgggcagatcacttgagatcagaagttcaagaccagcctgggcaacaaggtgaaaccccatctcaactaaaaatacaaaaattagcagggcatggtggcgggtgcctgtcataccagctacttgggaggctgaggcaggagaattgcttgaacccaggaggcagaggttgcagttgagcccagatcatgccactgcactccagcctgggctacagagtgagactccgtcttaaaaaaaaaaaaaaaaaaaaaagacaatcactacacattacagttggaagtttcaaaaccattcccacaga

SEQ ID NO: 1888953 - DNA, 4001 bp, Homo sapiens
caaaataaacttctaaattgattgagacctgtctcagataccttttggtttatactatcttgcagaactcttaaggcaaatggaaatagcgtatgtaaaatcctttgcagaattcctgacatataacaggaacttaataaatactaaatattggtagatattggtatgctttttctaacgtcaaagaaggtttatagcagctataactaaataaagaagattgaaggcagccttagctctaaaataaagtccctctcccaagggaatttagggtctctcaggagagattagataaggacattcatgaaaacaatccagagccgtatggatatgattggaataaagggcttgaagaaagagttgtatgtaatcttaggatgcagacttcacttctggctggtgcaatcaatgaatgaatgctttgtggaggatggagcatttgagcagggccatgaagaaaggttgctatagacagaggtatcaggtacttgcaactagaaggaaaagaaccagtaccagaaagtggaaactataatgtatttaaaaaacaatgcaagacagtgactggttggggattccagttgatgtaaggccatgtctgggaaagaatgcacaggacagtattgtgtcctcaaagaccagctaagggccgggcacagtggctaacacctgtaatcccagcactttgggaggccgaggcagaaagatcacttgagatcaggagtttgagaccagcctggccaacatggtgaaatcctgtctctactaaaaatacaaaaattagttgggcatggtggcacacacctatagtcctgtggtcccagctactcgagaggctgaggcagaagatcacttgaacccgggaggcggaggttgcagtgagccgagattgtgccactgcactccagaatgggcaacagagcgagatcctttcttaaaaaaaaaaaaaaggaaaaaaaattggctaagaatttaggactttcttaaggagataaagggaagatatttaagactctcatagaacacaatttagacggctaaaaagctaaagatgaatgcaatgtatcatagcatcatcttacatgagtaggtcttggggcttggtttggtttgttttgcatttcacagtcctttaccagagagttgcaggttgttatcaacattttctgcagacttttggagataaactgttttatcttagagtgattcctcctgatacaatataatgagaggaatacaaacccctttatagaaaaggcacacatttcagcatacagcctaggtaaaaagtaagggttaactggcttagttgagattaattatatagatgtttatttcccagttgttatgtgtctgtaacataaaagtggttattgactaaaagtagatgtgcttcattaatatcagtgtgaggagaagagcaacagggaaatgcaggcacccatgccgtgtgggctggaatctggaagacgtggcccctggccaggtatgcgctgatgacaggtgacattcaccttgcaatctgccataaaatgggaatcataatacctgctcagtcctccagatgaaatattgactggaagtcatatataaaatcgtcaagcaaaatgcacaataaaattaaaattgctacttttcaagacataggaagtgtattaattgttttttcctgcttcttttctgtcaggatcaacgttgaataaagttttgtcaaacacatctcacttgatgcatctcatatcacttaaaaaataacattgggaaagtctttcctttcactttattcatcctgactcttctttgctaaatattctgtatacaaatttccacataacattatgtttagagttgtactatccacacaaaatggttcatatatggatctcttgaaggttgcatgtcagaaacacattaaactgtcattgccttttaggatacactttccttttgcatttttatttgaacaaaagtcaagcttatcctaaaaagcagtgatagatttctgtagatctagggaattgttaatacattttgttatctgtatcatacatttgtacacagctgctgagtaattcaactgtttagagttgaactaatgtttttgaacaataagtcaaattccacgatttaatctacatcacaagaatttcacttccatggcattatggaaaaatgcgcaatctgttgtcaaggttgaatttcatttctgctttcacaaataaattatgcctgtcatttccattagacacagtccttacctagatcgttacaaaacatctttgagaagcttagggcatctcctatgttccacttcagatagagatataatttactgaggggttagaaagaatggtcaataaagctgacaaaatattttagcatttggaaaaaaatttaaatgccttagtgcaataattcctggggaaactatggtcgctaaaatgactataattcttattcatgttcattcccggtttaggggccttccttaaagaaactaatttcagaatttatttaagtcataataaagggtcttaaaaccacctgatttcctgaagttttctttaccactctgatttcctggtgccttcctctcttccctgtgtctaggtggagagtgggaggtgcacatatgaggtaatgatgtgtgtgatgatgtaatgacgtgtctgattatgcaatgatgtgtttggtgatgaaatgatgaatgtaatgatgcatgagaggctcttgttgattgcagatgataagaataaaagacttagctcactacttctggcagggtctggtaagaaggcattaccaccctatgcattccaacagaaggaatctattgaaaatgaatcatttagaaaggggcaggagatccagaagaaggtagaaagggaaggtaagatggccaagagattaagaactgcagaaagctcctaccacttctgtgctgaaggagtgaaagagaaaatggtttcaccaagagcccgtaatcccccaccactgaggctctgagagtattcatggcagccttagaaccaagaccaccaccttgcaggaatgcaggagcccagggccctgatgctgtctcaggactctgggagcctgaagctgccagcccgtcaccaccatggcttgagccagagcctgcacctgccgtgccccacaggctgctgcatttgtgctcgacactgctgcctcactgcgaccacactgcctggggaccacgtgggagccagtctttcccttatggaggctctggacaaagggagggaacccaaaagccttccagttcctgtctgtgcttcccattggaagagccccatattccaatctcacacagttcacccccaccccgaccctttcaaaactcatgcaagttcttctctttggtaatcactaatccaacacccatactcagaggctccagactgagaaatgtatttgtaggatcccagcaccccgcgacacaggggatagcagcagagagtaggaaggaagctggaagcaagaagataaatgactggtgctcttggcaatcagtcacaatgctcctgggatagggctgcctgacttagtaaaatgacaggttacccagttaaatttgaatgccaaataaataacaaatcacttttagtttaagcatatcccaaatattgcatgggacatgcttatacttaaaaaaaaaaacacatttattgcttttctgaaatacaaattcaatgggttaacatgtatcctatcaggcaacttgtcccaggggctatctgacttactccttacagcactgttagactaaatggggctaagtttgccagccacctctgcaactttagtccagtaaggtagacaaagggcatacatgtaaaccaacaaataaatgtataccattgtgcatttgagggtgagggtggttactaaagaatttgagaactaagaatgctatttagggaggggttttgctcttctgtttgtctttctgagggagaaggttcatgagctttgaggcc

SEQ ID NO: 1888954 - DNA, 4001 bp, Homo sapiens
aacacagaaggacccaaaggacattatgttaagtgaaatgagccagaaagaaaaatatcttatgatgtcacataaatatgaaatgtaaattagtctaactcatagaagctgagtataaaatgatggttagctggggctggtgctgggaaagtaagatgttagtcaaaaagtacaaagttttagttttccaggacaagtaagtcctggatatctaatgtacagcatggcgactataggtgaaaatactgtactgtatacttaaaatttgctataagaatagatcctaagtatttccaacacacacacacacgcatacacacataaatgataactctatgatgtaatgcatgtgttatcttgattgtggtgatttccatatatatatataatcattaagttgaaaaccttaaatatatacattaaaaatagctaaagtattaaaaaaactcaacaataaaaagataaataaccttgaacagacatctctccaaagaaaacacacgggtactcaacatgcacatgaaaagatgttcaacatcattagtcatcagggaaatgcaaatcaaatccacaatgagatgacacttcatacccactagcatggccaaaatataaaaggcaaacacaagtgtgcatgaggatgtggagaaattggaacccttttatactgtcggtagggatgtaaaatgatgctgccattttagagaaacagtctggcagctccttgagaggttaaacatagagttatcatatgactcagcaattccactcctatacctgggggaaatgaaaacctatgtccaagggaaataaaaacctatgtgcacctgaaaacttacagatgttcacagaagtattatctgtaatagccaaaaggcagaaacaacccaaatgctcaccaacagacaaatggatacataaaatgtggcatatccttaaaatggaatattaattggccataaaaataagtgaagtactgatacatgctaaacacagatgaatctcgaaaacatactaagtgaaagaagccagtggaaaaaggtcacatattataattactcaatttctatgaaatgtccagaatagataaaatctatagaaacagaaagtagattaacaattgcttagggctggtgagtgggggaaaggtagggaggggggtgagctaaatcgtatggagttattttttggatgatgaaaatgttctaaatttgactgtggtggtggttgcacatatatgtgaatatactaaaaacattcaattgtacactttaaatgaatgaattatatggtatatgattataacccaataaagctgtttaaaaaacaaactttggatagctccttattgcttgataaataaaagtccaaattccttaattgggcattcaactccctcccctcctgcatcatcatttgacccccgaccagcatcattgctcactactcccttttacatgcttttctatccaaccaagatgaattatgcaccattacccatatatcccttgtggtctcccatctgtctttcttctcgctattccttccccctgagattctctcctcctgactcatcttcacatgttaatattctacttctttcacaaagcccagttcaaatgctccctcctatgcaaacccctccctgttcttcaaccctcacatagtaggcacttaaaaaactatttactgaaagaacgaaggtacgtagttctcctatatgatggctctcatttacagagaagataattctcccaaagccacaactttacttctttcttcctttcctggtcacagcagcagctcactgcttcagcccccttaccctgaggacaatcccaaactggtaccttgatgaagaaagtactgacattacattatgccagggccgccgagtacagttgtgtaggttgtgcactgcacaaccctagtggcgccattcaattatagtctatgtgaatggcaccctctcctagggttgtgcagtgcatagccattcgtggcggccctgcttggaaacattcctagtgtttgagaacaaagccaaaaagaacactcaatgagagaatcactatgttgtcgctgagaagtaggcaactcaaaaatcttgtcaagaaaaaagaaattcaagagaatagcatggccatagcacacaaacagcatttgcatggaattgaaaacaggaacatccaagagaaaaattgttactgatgtttctccagcagtggagagagaacaggacacacattctggtcacactacaaagctatgacagacatgcaaaaaggtacagttttccatggactaccaaagcctatatggtctcgctcatgagacttttcaactccattaggttctgattttaggttataaaacagtccctgtttaatttggcttcaggtaccttgatatcagaaagggctgatacacacaagtgttctcatctctataaaggtctctctctcatcatcaatcgacttatcagcctggtgatttattaagaagtgttttgtaatgttggggagtgtgacccaatccactagaaaccaacagccctgggtaagctgataaaaattaggctttgaacctacaaaccaagttgcagagttaggacccgtgtcaactccaccaaggcacagacaccctcaagctcagtcagagcagctggccaactagctggccaagtcaaaactgcagccagtaattcagggcactccaaaatggagagccataaaggactggacatattggtagtgacaacaggtgagctggtggtagagctcaagggtgccagatgttgcgtttgtttcttctttttgttccccactccagttcagttcagcctcccactttcatatttgctccacctggaatatttcattccacttcttctgtctcctctagagatttcctggataagtcacaaaaattaagcattctttttctgaactccattggtatttgttggtacttatacactaatcacttattagtctcatactgttgttagtaacaacaataatggcagtagttattccttactgagtgcttactaggtgcctggcactacagtcaatgtcttacacatattagttcatatattcttcatagcaatcctattatgtaagagattattattttcctcctgtttgcatacaaggaaactgagctacagaaaggttaaataaattgcctaaggtcgcacaactaataagtgagtcaaagagtcaggcctggaacccaaaactatctgattccagaggtcatgtttgttgccaatactaccttttgtctccaccataagataatttatcttttctggagttccctctgcctccactccacatagtgcctaacacaccatcggacatataaaagtcctccagaacacatgcgcacatctgcctctgctccctgtccagagcccagcccaggacataagctggaagagaagggaagacggtgtagttagcatgaaggggcttgacctttcagggagccacaggagtcctcctcctctgacccatttaagagaggatcatgctgctccttgacctcaatcccagaaaaatatgtagaacaggatgacctggttaccttgaaactcgtcaagaaaactctgaagtaacagagcctaggccaacccatgggagggatggatggtatccagttccctgaagcaagaggaccaattgtgtcagagtcaaagccacatgggacagctaatgtttgcagtgctccaccaccaatgaactctatggccaaagttggggtttttatgatggtgggggagaggtgtattttttttaaaagaaagtattttttacacctccttaagcctcagttttctcattgtttaaaacagaaataagaatacctaccatttgcagtgcttctaaggcataaaatgagaatgtaataaaagcacctatttcctggtgcctacatcagtttgttcttcctgaggttctgagcacacagtgatgcaggacataattcct

SEQ ID NO: 1888955 - DNA, 4001 bp, Homo sapiens
ctctttggcccccatcatttgtgcccgtctgaatttttcttctaaagctgcccatcagagagcacatccagtgattttgactctcgtttgtcactgcatccttaacactaaaaagagtatctgtcacactctagaaactcaagatataggaaggcaagaaaagagacatatatgcactcagtccatatatatacatataggtaggcaaggctccatctcattgaatccttggcttaatacttgagacagcactcacatctaggttggaaggaagtgagggagcaaatcagaaggctctggttcccgcccaccaccctgtgtgtggacagcaggtggggaacacagagaaagctcactgtctcactctggatacctgcatacatggacattatttaataaggacatttattctaatacacagacaagcccaccagagcacctgaagtccctaactattctgttctgtgcttccccaacacacacccatcactcaaaaactatgacaggggagggtgggaggggtgatgtctaggctctctgtccttcttggtacagttgagctccccctctctgaatccttgcccaggtgcattgcattgagccagcactagcacccagatagcaaggattagagagggggagcagggcagaaggcttgggcacctgccgtgctcgaagcagagaaggttctctgttacacagctctgtgtgagaacaggaatgagagtcttgcattgtgtatatgttgggagagggtgtcaataagaagtcccatgttgtggcccacactaactcagcacgtgcaggaatattaggtgacaaaaagtcaagtctcctacacatattctttgaggcaagaaccaagtccatcttgtgtgataccatatgcccactgccctggcagcacagcgttagcatgtactaagtgctcaatacttgtgaaagggaggtagaggggaaggagagggaggaggaagtgtgactcacaggcactttgtctgtctatgggcagaaaaaggcccctctgagagtcctggaataggtgctgcactgagacagcatgcacatttaggtggcaaggatacaaggggaagcagagcagcaggctcaggatgtgcacaccacatatatttgcacaggtacccatgtctgtgggagggaataaagaaaagcctgatttctggcaccctgagcccatgtattcacaggaagttggatgacatgaggatgcttattctccatgagcctgctagacagtaaggtcggcatctctgacaggttagtttactgtggcattcccaaacagcaggaattcagtaaatttgttaaagggatgaataaatgaatggaccaaaaacatgcacacacaaatgactgactgaaagaatgaacaaaggaaagagaagggatggacaggctctgtcctacacataggcaaggctcacaagctggtatccttgcacaagcccattgcactgctaagacagcacttgtgcctaggctgcaaggctaggagagggcaagcaaaaatcaaagtccaggcacctgcacaccaggcatgcatctgagtgtgtgtggcaaggaaacttgcaggcaagtttagataataaggctccttcctttcagctttgtacagaaatgtttctacacttacacatgtgtgtgtgcacatgcatgcacaatgtgagcatgtgtattcataagagaatgagaaggctcaattcctgacacacctgtgtctgttgcctaggcctggggaagtctaggcacctaatacctccactagataggaagtcccggagagagacactgtccattatttagcagggtactcccagcacagctcatggcacatcaaaagtgcgcaataaacacgggctacttggattgttcagcagaagattcacgatgacaaggctcaccctcctgtaatccatgcacacaggaggtgttttgagaattcacaactccgatatgcaatgggtatgggagaaggagcagttcattcttctgcacatgggaggggggtgggggaggagagagaaagaaagacagaaagagagaaagagagagagaggagagagattgattgattgattgagagagagacagattgagattaaagtgtcaggtgcacgcctggagaagcagtgccaagtctattccctaataaagtacttgttgtgtgttcacttagcctcatgtgctcactgaatgtgtggttatggaggaggtggagacagtaatgaaatgatggcttccctgccacagtctgcatggactcggcattgggaacgtacatgagcaatgcaggagctcattctcttccacccttcacctgactagcttatcactgcccctagctagcacttatactaaatcagtgattctcaaacttaagtgagcatcagaatcagttgagagccttggtaaagtacagatttccatggtttatggtgtagtaggtcagggatgagcccaagaattggcattttgaacaagctcctaggtgatacagatgctgctggcccagggaccacactgagaaccactgctctatacataacttaaagaaatgaaataatgggacatagaggggtgatgcaaagactctacacttttaaacatggatgagattccctctctgaatttttgtacaaggcaatggactggaatagcatttgtacccaactacgaagaatgaaagagagggacaacctgaatagaaggctcgagcatcttcaaatccattgtgtttgtgtgtatgtacaaaagaaacagcactctctggctcacaggtgattttcctatgaccatacaaaggtgaagtgtcttttcttcatatgcatgtgtgagatgactgacaagtagggccactttccttcaagctctggtggcataagcagcaagtagaaagcctattgccttgcacaccagacatgagtgagaagatgctgctaatgacactcattatcctatgcacactgtggctgcagctctgtgtaaggggagacacaccttttgtagttctctagctgagcactgttggggggttggagaggggatgatgggaagactcactctctgctacatacgtatgcatgaacaatgtgggcaacggaagttccttctcttaaacatgctcactaggcatgtgagtatgagttctgtgtctttcttgaccaccctgtctctccatgtctggtgcatgacaggagcgccacccctgcttgttaaaggtgggaatgaatgaaggatggggattataaacaggtgttcttcgctctatgcagaaaaggctcagccgtggaatgcttgcctgggtgcaccgcattgacacagcacttgcatccaggtaccaggattcaagagggggaacaggactgaaggcccaagcagccatacagagtatgtgtgtgtgcacgtgtgcgtgtgtgcacatgtgctcacatgggtttacagggaaggctcaccgcatatagtgtgttcatctgtgactgtacagaaaagtaatgaaaggatctctcctatacagagcagcaagaaggaaagtagcagtaagaagacttccctcatttaatccccatctataagggagttaaggaagctcactggcttgcacgctgagaatgggagagaggagagcacaacaggctccatctcctaccctttcagtaggtggggttctctgcatgcagggccatgtctctgagtgtgtctggtgtacaaggattggggacatttgagaatttcacttgagcagaacctgcacatgcttgtgcatgcagactgggtaacaaggaacatatagatctacttcattcttttgaacagtggcctattcatccacaacatttatgtatagtgtgtttatgagtccctaccagaatgtagggtagcaacctgtccattttgatccctgctatatccttggtgatgaacataatacctgctgtctaatagacacttgagtatctgtggaaggaagaggagggagagtt

SEQ ID NO: 1888956 - DNA, 4001 bp, Homo sapiens
gccacctcactgtgctataggtaccactctccgcacattacacacgactcaaaagtagtaaagaagactttcaggttttcaggttctagagactcacaagtattttcttttttttttttttttttttttaattttcaggcagaacctccctctgttgtccagggtggagtgcagtggcacattctcggctcactgcaacctccatctcccaagttcaagtgattctcagcctcccaaggagctgggattacaggcacgtgccaccacgcccagctaatttttgtatttttaatagagacagggtttcaccatattgcccaggctggtctcaaactcctgagctcaagcaatttgcctggcccggcctcccaaagtgctgggattatgggtgtgagccaccgcacgtggtccatattttcatttgaaacataaaaatagccttggcattccttaattactcctctctcctccttatgaggagaaagaacagatttactggagatccaggcaataacaggctcttaaagaacttgaaaacaagattactgagccctgttgaaccaatcacacaaaagtcttggtgcagaatttataggtcagtgggtacaagttaaggctacctctccagaggttcaatggtacccaatgcacccatctgcctcataccatctccactcacctagacctcttttgatcacattctcccctccctttacattcacccagaagccaatggtttgataaggagaggacatcacatttatgttgtccactgttttgtgactgagttttttcaactattatggtgccatctttcagtatttattacagcctatacacatacaaaaaatgtgaacatctatacaagatttgaatataaataattaccaactacaaacattttaaatatccagaaatttttatccctcaagttagagaaaaagacaatgttttaatttataaaaggccaactctctgatcatcataaaaacacagctcacagccttgatctcctgggctcaagctggtctcaaactccttcctggactcaagtgatcctcttgcctcagcctgccaaagtgctaggattataggcatcagccactgtgcctggcctaatgtgccttatttttaagtatgcctaccattaaacttttactttaaattaatatacttggtttggacttgaaaaaaataaaataaaacccaaggaaaacaataaaaagagcaagcctcatctttggagtacgttctttccaaatataaactcctaacccggaacttactgcactgtctttcataaccagccgtttatgagatgtcaacagcttttccaaagggtaaacaactcgccgcaggtaactctcatccttgtggttatcatacagccactgagcatcaagcacatcatgcattgtcaccatgtggtcctgaaaagcagccatgtatgaaaataattcagtttatttgtatctcagcccatcagaccccaaacttcctaaaactgaatgtcacttgtttactagtccaagctcattatgtcttcagcctcttcagtcctggctcttccaggcatcttttttttttttttttttttttttttgagacggagtctcgctctgtcgcccaggtgggactgcggactgcagtggcgcaatctcggctcactgcaagctccgcttcccgggttcacgccattctcctgcctcagcctcccgagtagctgggactacaggcgcccgccaccgcgcccggctaattttttttgtatttttagtagagacggggtttcaccttgttagccaggatggtctcgatctcctgacctcatgatccacccgcctcggcctcccaaagtgctgggattacaggcgtgagccaccgcgccctcttccaggcatctttaaccgttgaagtattagaccccaagcaggcatttttgtaggctgggaggcaaatgaatagaataatactttctacccaatcatctcccttagcccattttaatgtcccaaagtttaattaacagaacagggaagctgccctggactgaactcaacactttggaaagcatctttcccacgacatgaagcaagtggagtgccatcaaaggctggcagatggtaagaaccagctctaaaacttctagccccgtaacacataccttttcactcatgactccagaacgaaccctccgaagctcctgcatctgaccaccaactcccaataacaaaccaaggtgcacacataatgtccgaatgtaggtgccagcctcacaactcacccaaaagattcctaagatacacacacacaaaagaaaagcagcacctactgtaaatacatcactggttgagaaatgcagttatccttcatctgagccaccaagactagaggtgacagacacacttcttaaaatataagcatttgctgtaaagatctgtaattctggccaggcacggtggctcacgcctgtaattccagcactttgggaggcagaggcgggtggatcacgacgtcaggagatcaagaccatcctggctaacatggtgaaaccccgtctctactaaatgtacaaaaaattagccgggcatgatggcgggcgcctatagtcccagctacttgggaggctgaggcaggaaaatggtgtgaacccgggagacagagtttgcagtgagccgagatcatgccaccgcactccagcctgggcgacagagcgagactccgtctcaaaaaaaaaaaaaaaaaaaaaaaaagatctgtaattctgatattagcagaatttttaacacttaagttgcaggtatattcagcatggtatgtttcatggatgggaggaaaattggcattgtcttaaatttacttctgacaacagaaacttctaagcagtcaaaattgcaacaaataaaaaacacatgcaaaacatactttggtgaaaacacttacctttgaacaaagcaccgaactacacaaatgcagaatgaaaacatttcaactccagcagaagcagtcatcataaaaggtgtaaaagccatctcactttactaggcactgttcactttttcaacaaaagataacaaaaactatcgcccacagacaatatcccagctgtagggcaggttttagaaagtcttcaacttcaagggcatctacttttaataagagaacagaatcctgaagaatgtgttcatacccactcacaggcctaatgactcacctaatcttctttcaggatcgtattcaatcattttgctctcgtagatggtcctcactcggagctgcctctttactgcagcaataagtgggggtcgctggaataaggcacctgtcagagtttctagggcctaagaacaaacacaaatgaaaacaaacacctcatcagaatgtacatgtgcagtcactggtccaggctggctgcagcagccgactgaaaaggggacaaaaggagtcagtcaggacagctaacccatctccagatgtttaggggctcagagatccaagtcaacaaagggtgtcctccctacaattgcagacttaccctagaaagctgggtccccccttcaatagcattgtgcagccggacaatccccacatactctttgcctgaaaaatgacaaaagagtagtcaggtgtggccactgagttttctgttttccatatttcttatatgctcagtcactcccattttgcacagcaggaaaagcggcagtttgaccttgtgtttctataaaatttgcattaagagagatttcatggtgatgatgtgggaaagaatgaagacactttctcactgggaattcaatgtactaacagggacagttgggagtactcagtgtagaagctgcgtggaaaaagccttgcaagataagcaggcttttctcagataaaaatgaacgaaggatactttaggcagaagcggtagcacagagtgagaagcctggagtgacaagctgagagctgaacccggacaaatggatccagtcagcttgatgaatacatgctta

SEQ ID NO: 1888957 - DNA, 4001 bp, Homo sapiens
cctttcaaagctaaacttcatcaaaggagtatttccttaaccttttagctaagcccaaaatcaaagaacaaccaaaagtgagtgaatgagtgagtgagagagagttgtggaaggaggaaaattccattaaagggtgaaaattaagagaacaattcaatttacctcttcaagcatgtgcctattcaccatgtccaaggaaatccatattaaatggcttctaaataactttcagccaaagtaaatgtttaaagcctatgtgcactgtcttctcaataatgtcccgtacacaaggtagcagtgccaggcaatgatctgagttataatttctgttttaaagggatatgacaagagttaagaactacatgtttgaaaatcaaatctactttcttaaaagacagaatatcttggtggtaagtgcccaggccccacagggaaaggtttcctcactgactccagctccctggctgttttccagccttgctcagttcaggccctcaggaggccaggccattcctcagcttctttacaacaggcacacaacttttccatgtggactatgatacctcaaggcaccagagtaccctagtgttcaaagaagtggcagactgcagctgaagccagtctttttggcctagtccggggttgacaatctattctataaagctccataaatcttatcacacagcatcatttcacttaaagcattttaatgaacaatcattagttttactctgtcttcctcccaggtcagaacccagaaacaaacaggtgctttaactagtttcataattggttctttcagtcctaagaagtagaccatattgcctggccctgtctttggagactgttctgtctttggattgattctcctcttttagtaagtgagcacttgtagatgccctagggccagtttcattgcaagtacactggggacttactgacccaacaacggcacaatggaagctgctttgaaaagactaaatggtcagggtactactccagaatagctttttcattacagagaaaatgatattgaatcctcaaagcaagaaataccttccctgactctttgggaaatcaaatcagggaagctttaagtccaagaaatagggtactgacatcttttgataggtagcgtatctagttcctacatggtgacacaggatttcattcacactcaatcactgatttgataaaggaggaaaaaaaggataaaagcgagtgcctgtaatcccagctactcaggaggctgaggcaagagaatcgcttgaaccccaaaggtggaggtttcagtgagctaagattgcatcattacattccagcctgggcaacaagagtgaaactccgtctcaaaaaaaaaaaaaaaaaaaaaaaaaaaagaataaaaagaagggcagggagaagaacaaggaagaatgaaagaggtgaatcatcactgaagaatgatttcttgttcttcagaaactacaatactcaagaagataacatatgattgaataaaataacagacagacaatgctgaaagaatataatacaaaaatcgcactcttgatttttttcttctaactttagaaaatatatgacaagacagcaattttataaagtcaggaacttaccctttttcttgtttttaactgggcctataagaaaaataaaatagataattaagtcattggaaatgaacagaaaatgtttattttctaagatagtcactaggagggatccccaagacactgcaaatttgagggagtctcacagccaagggtcaggcttttggcaaggatccaactatcaaacctccccattctgtcttctgactcctgaggccacaaaagtttcaaggaagattcttccctagggagaaaaatctctctacttcagtctttggggtgagggaatgggtacttccccatagagatgaaatgcccagaaatgcacaactcaacaaccttaggacagcattccattaattctgcaagtcctgaggttgaagagtcatgcgttcaggtgagaatctgatatgaagtctcgtgttgaacttggaaggagcaaagggtcattttcatggaaagagcagagcagcagtgtttaacttttagtcacttccttatcatgatttaatttgttacttattaaaagtttgaccataatacactcttgagggccacatgcatttccattgtaatttactataagttaatggacactttaaaagaaatgtcggccgggggtggtggctcacacctgtaatcccagcactttgggaggccgaggcgggtggatcacgaggtcaggagatcaagaccatcctggctaacacagtgaaacctcgtctctactaaaaacacaaaaaattagctgggcgtggtggtgggcgcctgtagtcccagctacttggaaggctgagccaggagaatggcgtgaacctgggaggtggagcttgcagtgaaccaagatcacgctctacactccagcctgggtgacagagcgagactccatctcaaaaataaataaataaataaaataaaataaaataaaataaaataagacatgtcaaccatttcattggcagtgaaatcacaagcattttattggaaattacttctaaggaaaataattctaatcaattgaaggtacttagaaaacccaaggtgtttctaacatagttaggtgaccgcaactccccaaacagtttaggtcgctcccagacagtcattttttttttcccttctaggaaataaattctcttcattctgtatacggatttgactttctttaaatacaggtatttaaaatctgttccaaactgccatgaagacacagttatacattaaaccactgtcagtgccctcaagagcttacaaaaggaacaccaagcatttcaatattatagtttataaaacatatttccatttatcatctcatttgatatttgcaacaaacgtggaatgatctctaactataagagcaggccctattagagatcagtaaagtctctaacctggagggctgccagagtggccatcagagctttcacaggtcccttgaaaaaccaatgtctgtgtagacttttctggcaaagtaatttcatgtgcaacagtagctattgttatgtccaggggatgttttagattggagcaacctgctgtacttaaggtcatgaatctcaattctcttttccttctctcttctcctctcctctcctcccagttctttgtcttctttctttgttacccatcctttatgaattttttttttaacagcattgcgagttcttgaaaatgtgcttggaagttctgagaggaaagcacaactacatagacattaatgatatgaggcagcgactcaacctgagaaacgcctttttcttgaacaagaaagctgtttggggaaagatttacacagaaagggctcagctctatcagccagctagccaccacagcctaggagagtagtaggaagacagccattatggctaccctgccctctttgcaaaggtgtgctggcccggaccaagtttttgaccgtttcagctggttaagggtaagcactgttatatcagacttcaaaagcagactttgaagaaatcaggccatcaccagccaaccagtccttacagagtatgtgtatggaaggcagtaaataatgaaacgcaactcacaactctaccttcaagaacttacagttgaatagggaaatacaaaagatgagggagtggcttcaggaattatactggccacttaaggggaacaaatagcttcctggagaaggtctgacttaaatccacaagtgaaaagagagaaatggaaattttaaaatctttttaagcttctattattttcatacaaaatatacctactccttacacatacataaacgcatgcatacatacgtatatacatacaaaagaggagcaaaaggaaaaagagcttattaaagcacccccaaataatcactactaacatttcatgcacatctagaagtcttctatgtatataaat

SEQ ID NO: 1888958 - DNA, 4001 bp, Homo sapiens
accctaccaacctggttcatcttctccttcaagtctttcatttccctctctcggctctgaatgatcctcttgatatcattaatgcgaggcccaaagttggctagctcactctccagcttggatttttcctacaggcaatgggttgagaggacaaagcagaccaggctccttggagaaaaagctaccttgactgcattggccccacagtcaggaagggctagctctccacaactgagagaacctggcttagcactactgccctagtcaagcctccatgatgttgcactgaagccatcacatggcttcttccctggcatccagttcagccagcttcaatccacagggctggggacacagtaaacatcattaggtataggtcccagtctttgatctacaacccctgggggcagagttgtttcagaattcagtttagattttttgagtttagaaaaagatatataaatacacacactacatataaaacctctagggcggtctggggaagtagtcagtaaaaaaaacaaaacacattaatatacctagaacagtccccccccgccccgcccactaccacaagcagggactgaaatgcccatagctcactttcaaaaattcaaatttgttgaatgaataaattatgctaacaatagcacataacataaactgaacacatggtagtcttaagcactttacatgttaactcattcaataatgaccctataaagtaggtatcatttatttattttgagacagagtctcgctctgtcacccaggctggagtacaatggcatgatctcggctcactgcaacctccacctcccgggttcaagcaattctcctgcctcagcctcccaagtagctgggattacaggcgcctgccaccacgcccagctaattttttgtatttgtagtagagacaggtttggccaggctggtctccaactcctgacctcaggtgatccacaggtgatccaccgtgcccggccgagtaggtatcatcttaactcgcatttcacagataaagatgtgaaggttgacactgaaaggtgaaaatacttgcctaatgtcaaactcaaggcagagccaagctctgaacccctggctgtctgactctatgctatacctgactccctgcggcaggctgggaggagacggggaagtgaaacaagttccccacccccagagaaacctaggccaggaatgtgtggatggcctttggagaacagggctgaaggccaggccccacctgcagattcagggctagatgtcgtgtcttggtctgttctaggtcactctgggagtacttgagccgcatctgcagtccatgggcctgagactgcacctgacgcagctctgcctctttccgttttgccttcatctgctcctgaagggaacaagaaagaagggctaggtggtaaggtggtggctgacctaggcttaggactcccactgctaaaaacagcactgcctgtggcttactttcagctcctctgtcaagcgctccttcttctctttcaacttgtctactgctttctcatcccagcgccgtgccttggccttcaggtcactggccccaccagagatcactcctgacttctggaatagggttccatccagtgccactgtctacacacagcagggggaagagagaagagggggagaagctgaacaaatgaatctccagtactgagcctgtccagctccagcctgggcaagggaatccacaccttgtggcgctggtggcctccaaaggcaatgcggcgggcatcttccacgttgtcacagacaagggcattgccacaagcatactgcagggcctttttgatatgaggtggctcatagcgaatcacatcaatcactagcttggcccccttcagctcccggagtttctcatctgtaggcttcacctgtggggagaagctcagtcagtggcagaacacaaacagggagtactagaggaggggcccttgaacactggcctgacccaatccccaacaagcctcacctccaggtagtcaagaggcaagaaggtctcaggctccccacgctgctccttgatatactgaatacagtcccggcctgtcttctccgagtccacaataatggcatccatgttcttgcccaaaaccttggttacagcaatctgatacttcttttgtgtgggctggcataggtcaatgaggcggccgtactgagtaaagtaggaagggaaaactgaagtatgaagcttttggaagctggctcaggaatcctaattcccagtatggaaagggggacagactagaatctatatcaggaagtgaatgcaactgtattgcctagtggttaagataacccaataccaagcatggtagtgtgtgtttgtaatcctagctacttgggaggttgcaatgggaggacagcttaagcccaggagttcaagaccagcctgggcaacataatgagaccctgtctcaaaacaaacaaaaaagacagcccactagttctgtacccatgcaaccctaccctatctgaatgagactgtatggactgaggaggaggcaattgcagactagcttgctgtgtgcactccagatcagcacagtggccaatcctaacgtccctttgaaaggtggaaaagtttgggtaagagaagggaggtaaagaaatgaataaatgagttatgtaatgagggaaactcagtattacattaacacctcaaaagaggttcagagcaagagatgatattgtctcttagcacaattatcccagatgcctgaaagtatgaagctatgtttgccgagaacactcctggttttggaacctaacaagattgaatagaagcctgcaaacctgaatggcctcaccctaggagacatttttacatgacatgatcatggactagactaattattaattaatgactcagtgggattctagtaatgtgccagtatctttctactcttttttggagacggagtctcactctgttgcccacgctgaagtgcagtggcgcaatcttggctcactgcaacctccacctcccaggttcaagtgattctcctgccttagcctcccgagtagctgggattacaggtgcccgccaccatgcccggctaatttttgtatttttagtagagacggggtttcaccatgttggccaggctgatctcaaacccctgacctccgatgatctgcccgcctcggcctcccaaagtgcgaggattacaggcgtgagctaccgctcccagcatctttctatttattacatgattgttctgatgtaagggatctgtgtttgaagatcaaagtggactgtggttttatgaaatatatatttagtcttctacccgtgagttcctgacacacaactcctaaaacccttagaatctcaggaatgagcagtgtcttttgtatgttaatgagatgattatggctggaggcccatagatagcttctggataggggctggttaccagaaagaccaaggcaggattagatttgggactcttagctccacccctacaaccttcaggaggggagaggggctgaaggttgaactgatcaccgatggctgatgatctgatcaatcatgactacataatgaagcccctgtgtgggggtacctggagggtggcttgcccagattgggcatggaagcttcacatctcttctcccataccttgccttatgcatccatctggctgttctctgtatcctttgtaatatccttcataataaatgggtaaacataagtaaaacattttcctgagttctgtgagctgcactagtaaattaatcgaacccagggagggattctcgggaactgtaatttatagcaggtcagtcagaaccacaagtcacaacctgagacttgcaattggcacctgaagtcttggactgagcccctaacccacaggatctgatgctatctccagataaatagtgtcagagctgaagtgaattataggtcacccagctggtgtctgctggagaattgcttggtgtgtgaggaaaaaccc

SEQ ID NO: 1888959 - DNA, 4001 bp, Homo sapiens
ctcagcctcccaaagtgctgggattacaggcatgagccactgcacccggcctccagctcacttttgacccagacttggtgttccctctgcctggaacactccctcccgcatcggaatggctgacttcttgtcatttggatgtcagcttaaatgtctccacgccacaaaggccagctcatcttgttctacattttgttttgtttgtttccctctctgttttctacacacacagcccccaggaacgaggcccgggtgagcaaagtgggtgaccacccctggcacacactgatccttggtgaccttatctggttccagagcatcaaatagcctactcagccaaacacagtggctcacacctgcaatcccagcaatttgggaggctgaggtggcaggatcacttgagcccagcagttcgagaccagcctgggcaacagagcaatatcccatctctacaaaaaaaatttttttttaattctgttccaattttcatgtacataaaaataaaaatagctgggcattgtggtgcacacctgtagtcccagctactcaggaggctgaggcgggaggatcacttgagcccaggaggtgggggctgcagcgagctgagattgcaccactgcactccagcctgggagacagagcaagacccagtctcaaaaaaaaaaaagaaagaggaaaggaaggagaggggaggggaggggagggaagaaagaaggaaggaaggaaggaagaaggaaggaaggagggaaggaaaagaaaagaaagaaaacattagtctactctcatctctattcctagtgacgccaggtggctacttcccggccacgctgaatgagacactgggcctctgcactatcgggcaccatcagatctccacatttgccaggaaggggaggccagacccagggctggggtgatcctggccagtgaggggctatcccctgccctttcttcttggcttcaggccaggggaggaaacagggagctgtcagctggccttcctcagcctcctggagccaggcctgcctgcctcagcttagccaagtggaacttggggaatcagctgctgaggtggcagagtaggggtcctggacctacccccgatctggatcctgccccaagggctgtctgagcagggctagctagggcagggcaggcaagtgtcgagcacagggcaccacagcagaacgactgtgctgggacggcccacagcaaggaaggcaggatgggttttcgtggccacaggacggccacgtcccctacgggaaactcaacaggagcccaagggcctgggagagaggcctggggaggaacccccttcccacccaccagagccaccaccgcccaaggacaggtgcccacggtcaagaagcacagtgccacaaagacacctcagggatggtggggctgccacggtgacagactccccaggcacgtatgacacgtccagaacaggtcaatccatggagacagaaagcacatgagagcctggtggggggatgtgaggggaggagcctgcctatggccacagggcctttggagggatgagaatgtcctggaagcagaccagggtgatgactacacaacatggcaaatgtgctaaatgccaccaaattgtacagttttaaatggtcaaaatgacaaatgaatttggtccgaacacaaatggtttctcacaatgcaggcgctccagctctgacacgtgcacttctttattggaaaagaataaagcagtcactgatgtggcaggggcaggacacgagcagctgccgtcctcctcccagcgtgcctggcatggtcgcaggggagcgggtgcctggagtcccggtgacaccacggggcacactgagggagctgaggagccggggccgcgcagcctcctggatgctcagcggatctagtgtgaggacaaggtgggcagaggagacaaggaaggcgaggggtgagcaggggctggctgccgtccccaacttggaggggtccctgccagcccctcctcaccgtgtacttgtcccacttcttttcagggtcgtagggttcccagcggctggcgggaaagatgtgcttgttcttctcgtaccagctcctcagcaccaccttgcctgcatgggactaagggaggaagagggcacagggccgcctgctgacctccccttcccttggcttctcctccatagcccagggacacccgttccccctcacacggccccctacgctgtacctcatccttctccacagtggcgtcactgagcaaccgcacatcgtcatgaacatcaaagttgaagagtggtcctgcaggggagaagtgacagcccaatgtcccgctgctgccccagtgacaacatcggcggcaaggtgctatgggggcggctgggtcggcggcactcaccactcttcccccgtgccttggtgacgatgaagtcgtagaagctgtgatgctgggagccaagggcaggaaagcggcgtcttgatggtccatctcggcccctccccacaccccccgcctgcgcacactgcccccaccagcctgagccaaagcccagggtgctgcacccactgcgggtactggggctgaagggactcacgtgagggatgatcaagtcctccttgatgtacatgagctgctccacccctgcggacctgagggaggaaggcaggagggcgtgggcaagaggacagcacccctgcccagggagggaggagacagccagcccaggagagcccatgctggggctgggaagcagcggccagttggctgtgagggaagctccatggtttagtgagcacaggactggcgcccagcaccctccacctttgggctaaggaaccaaggcaggccgctctcagcaaagctctctggtgggagggaagggaagaggagcctgaccccctcttttgggaggagagtgcccagcacgctgcttgcttgcccagacagcgcccacatcacactgggtgtctggcacccaggctggagccacaggtgccacacacaccaccgtgcacacacgcacacctcacacctcagctcactgaagtctttccgaaggatctcgagcgccttctgcaggaactgctgcatggtgttgccctttctcatctgtatccgggaatccaggagttgggaagggaaggcggaagcctgcagaagggctctcaacaaggcagaggcccagagggccctgccagacgctgcagagcctcagccaggcctgggcctcactccccagacagggggccaggccctggagccagttatcctcaggatccctggggcttcccaagtcaggaaggtcagttccttcccacggaacctgagggaggctgggcccatggtgagcaggaagcaggctgcacgctgcctaccttgactgtccgccggtgcccagagccatcccagtagctgaaggtgatctcgatctcctcacctacaaggcagagctgcctcttggtctccagccccactgagagcagccttggggctcagcgcaccacccaggagactgtggacagggaagctggcttgggcccaggcccctcgcgtctgactccgcaaacactcactcttgatcttctcctgcttggcttcccactcctgccgcagctcttcccgaagccgattctcctcctcctgggagagggagcaggcagacaggtgaggcccagggctgctcagggtgcacgcagagcctggctccctaagcaagggtctccaccagggctggagtcgaggccggggtcagggccaggcagcctttacctcacggtctcgatcaggcaagaagcttgtgtcaacgtctgggttcttccccagttttctcttcttcgtggtgatctctggaacaaaaggaagccgaatatcatagcattattataaaaatgattttgatatggccgacgcccagggtcccccaagcataccttgagaacagtcgatctagaagacaagcctagggcgggcacagaggctcacgcttgtcaacccaacacttggggaggat

SEQ ID NO: 1888960 - DNA, 4001 bp, Homo sapiens
cctctccaacagggactgcagtagccctggactggagggcagtgaggccagggcctcacgagcctcagcctggtaggcctccacctgttccagaacaccctaccaggacacaggatgaagaacaaactcctcagctgggcccactgaggggttccaccaccagatggaaccttgtcccacctatcttcttaccctccaagcttttggggcaaaggagcctaacatgggctgagctctccttctccaagccctaagacagttggggttcctaacactgactgctcattagaatgccctggggaatttaagaatgcagattcctgggccccaccctgagagattcttaattaactaataattattaatctatgctttatttaacttttcagagggctctgttctcagggcaccaagagacctccctgccctaaaaattgctatgattagtcctcacataaacccttgtgctcaccaccctggggtctgttgccctctccatctcactcctcctccaccttcatgaatttccctccactttccaagcccaacaagcacccctgttacctccttctcctctacccctcctccaggaaaccttacctggactctgtatcctatacccatacccttgccacctgaccctcaaggcccatttctaacagacaagtcactagacccttgcctcacccctcccacctgttcttttctcacacgtgtgtcctgtcttgcctgaacactttaagcttttgaaaggagccaagcatggcctgctgctcaggtcccctggtccccttgatccctcatcagcactccaagcgtcctcaccttgacatccccaatctggtgcatggcgcaaggcaggttgttcatctggtccagaaaggcccggagctcagtcagggtcatctgtagaccagccaccctgtgggggctatgaagtatcacatgtgaggtttcaggtccaaactcagtgccttccctccatgtctatgctaagactgaacacctttcctcactacacctgtccaccttgatctcgcatatttcaaatttgccccaattgcccaggttagagggaaggttttaaattatagagcatgttcatattatgaggggaaagaattagaaactaatgggttgtaataagagctacactttgcaatccatcctctactgtgaactctaaagctgtgttagcagggatcaggtctatacatctttgtcctgttcttacccgtaagcctcccacaactcttccctgcccacaaaacccctcagcctctctctcaggccacttccaggtactgataaaaaataaacacttctagctttcttatcacagaggctctcctctcctttttaggtggcctggtctccttgtcccccccaacaccttccaggccatctcacactcttgtgcctggcagcttcctgctgatgtccattctgccaaatggtattcacagtctaccccttgcagcacttttcctcggtgctggatcctcagcaccttatgtgtgccctaactcctcacgctgtcatacccagcttcctggccgctgaccagtcccagagctcgggacacgcaagcctctgcctcactcaggcagttctttagttgctgcagcagctcactattaggaaacctccgctcacgggcttcagactctagtgccctcagttcttcaaggcctggaagaaaaatgagggcagcaaagagtaggcagtattgaatagaggcagaggaagggggtcagagtacagaagaaagggaatagaacttgcctgtggagtccctccatcccccccatcactcactgcgcttccgcccatcctccacctccagggccactcgcactttgttggcccaggtgtcaaaggactcagcccgaaccttcagcttatgcagcatggcaggaagctcatccaaggtataccgatacctggaggaagagggcaggcaagagcatgtctggcccagctctccatcctccttcttgccccacttcctccagaaaggcccatgctcaccgcaggtactgccggctactggagcacttgcagagatcattgatgtgggaaaggcagacaaggccgtctgggcagtcgtagcaggccagggctgacaggaaacacgtagtcttgcacttgatacactggcgctcatcatctgggagcagctcgaaagcctctcgctcagcctctgtgataccctaagggcatttaacctatgcgttatatataaccagaaccaggtagcaaaatcctccatctcagccaccaccgacccctactttagattcaaatctatgctgagggtcatggggtttaagaggccaaaccccagggagcatacctgccctttgtaaagtctagactctcaaagcttggggaatcagataaaccagggcaagatcagtgtgcgctgagtcagataattttatagaggaagaaaaatcaggtaagatccagatcagcagaaagggtcttgtgggtgagaagtgaggaaagtggtggaccaagataccagagaggtggcaatgagtgcaagtggccaagggacaggcctggctagttatgtgtactggggaacaatatcggcttccagttactcagagcccactgtgttccaggcaccacgctggccacttagtaggcaggagatacttgtgcacatatataacttagagaaattcaaccgtatgtgcttgtgttcagggtttaaagagatataataattttctcccaacaatatggtttccaaacctaatccaatgacttcatctgttgctcagataaagaaaaagcaatccatttcaaaaatgaaggaaaagctggctatattggagtaatcgagagacaacccagtgtgtatatctaatgggcaattttagggattttaatgggaaatgtcaactcttaacagtttttgtcttacataccaactttaacacctaatctctgcataagttatgagcccaaatcccactctgccacttatatgctgtgtgatcatgagtaaatcatttaacgtctctgggtctgtttcattatctagtaagatggagataaacagtatcatccttgttgggttgttatgaggattaacaaaaataaagcagctatggaatcagacaagtatctcagcacttagattcagtgttcatcaaatatttactgttattagctctaattttcagataagaatatatattccacaggcctatctcattttactaaggcagaaactaagtctcagggtcagtaacttgccaaactgagttaattttgactctaaagccagagaatattctaaggatgaagtctctagggtttttttggactacagactcctgagaattggatgtaaactataagtcctcttcccagaaacatacttaaatacacatacaatctcttacaggattccaagactatggtgtccagaatgcttctctgaggtaagggccaagtgtgaagaattctgaatgtcaagatgagaaggtctattctccccaccttgctttggctccttcccacagcttggcacagccacacggccatcatttaataacagtactgaacagagtgagaaaatgatgcctggaaaagcccagggactcaacaacttacaccacgactgagaggccccagacttccaacactactgtagctatagttctccctatagcccacactcacaggaaagctataaatgagctttaaaataagaaagtattaccctagataggcagcaagggatcccacagaaccagcactcctttgtaatcttatgaaagactctcacaaagtcaattccctaactgggcaagtgtgaaatttgaagatgatggctgaaactacacgagtggactttagagctctgtagcagcttccactcagctacacacacaactgacacaagcttacaagaaatcaattaaagcaggaccaccttcagcttggtaatattattgccctagctggagttaataaaccat

SEQ ID NO: 1888961 - DNA, 4001 bp, Homo sapiens
agctgccatatgctgtggttctcatccagggtcacctcgagcaggtccccctccatcatgagctcctccaagggggcccgggttgcctcaggcagttccaacacagggccagtcaactgtggcaacagcgaggacagcagctccagatctaggaggttgcaggaacaagcggcattagaggctgcccttggtcttatccccaccactacaacagagctgaggactacatgggtcactatggtgatgtgcagtcaacagcctacccacaccacacctagacctacctctcttacctgagccctcctccggggctaccttctcaggactggtcacactgtctccattctccagtaagccctggacctgcggaggagagcaagaataggtaggggcaactgaagtgaagaaccaggccctattcctcctccgccaaccccaaacttgagaccctccgccttctggaggaggagggaagacacaggctgccagcagggagcagagtctaggaatctggacagatgcagaatggagtaggaaggctggtccaaagaaaactgaaaattggagaacaaggggcagggccgagcctaaactggggtaggggctaggagacaagaatctgaggacaagagctgggctgagtagctcaccttaggcatatccttgccactgccctctctgagggggtcagaagcaggggctgcagggtagttaggaggctcctcaggtctaggttcagcctgtagccgttggcggagctcagccagccgtcccaaaagagcagtcacatcttcagaggccagagcctgcctggcgcggccttgccagctgatggccctctctgtgaggcactgcagggcctcgccctcgggcagccgcacaggcagtctctgcagggctaccagcagtgccaggatggtctccaggcgcgggcgccttgagcgcatacacagtggacacaggaatttggtgtcccattcccaccaggccagcagtggggatgaggtgggattgggcctcggagagctgaggaggcgaggcactgacacacaccgcccatggaaccagtcctgacacaggtcacactgcagagctcccgccccagccagcacctgcccacacacacagatagaggttgtagaggaggccgtgctcgatgatgccagtggactgggcttggccgaattggtgcgacgcagctgcaggataccctccttctccttctgttccccctccttgaaggccacgatctgccatacccaggacaggagcaaagtgggtcagcagcctaccccttcccttctctgggcccccccttaacacccccactcccaaaccaggagaactgaggctcaggggacaagcggtctgctcatggccacccagctcagacactctatcatcaccaagcccttctccccatctgtgtcgaagctccttaccacagagcctgggtccctgaggtcctgcgcagacagccccagcagctctgtgtcagatttgtacaaccccagctccttctccatccaccggctgcgcttggtgctgtctgagccggcatctgcacatgggcagagaacctggggcaggcagacaagagagggaatgactgggcttcccttacatcccccgcctccttccctccctggtgcccctacaaaacccatgttatctcatgagccatctcacagaagccagggcaggcgttaagagacgctgtaggtcaaggtcccaggcctcacctccagcagcgtgtagcaagaatttttcttgaggaaggtcttggaggccttctccctccaggagtgcgctgtcagtacctgtagctctagctgtctcagctcctccagccccacaggtaggtcccggcccacagctactaggccctccaagtcatccaggcaggggtagtggtcaccattctaaggccaagggcgagagacagctcagttcaacttgccaatgctattgatgcttactctgtgcctggccctgagctggaaagatgaactgggctcagtcttgagggattaaaaaaataggtgtcatcctaaggaacaaccacttggctctctcccacaacaccggcatctactgactggctcagccccaaatatctagtcagccttctgttgtggtttgcctcttctcctctcctccatgcccctgccctgctcagtcccataccacctgcttccctggcccaccaatctcatcctaaccagtgccctctcttccttcaggccagcctcacactcttcctctcaccctgctcatcaggcacatcttgcctcctgactacatgccatgcccccttcctctctccagccaacccaacccatcccagcaacccagcacatcccagtgtatatgccatctcttcccagctggactgaaggcctggggtgggagtggcagggtcctcacttggatctcatcaacatcagcaatccaggcccgggccttagcaagagcctccttgagagcctggatgttgggcaggtgaacagggatgttttccgcttcacggattatggcctcaagtgtggctggtggatgcttctgcctaaaggtaaggaaaaaaagaacgctcagtctgatgtggtctgcctgaccagaagcccagcctgaccaccagatatatctgcatgggccccttgggtgtctgttattcctgctgtcacttgggcctacttgcttgtattccacctaagggtagctgccagtccctgcttccccaagactgcatgcacccaacttcatcccttctgccacagctcttgcacctctgtttgtctgccagtctgctggcctgctagcaatgcctacatatacaacctgtattgtgtaatctgttgctgcagtttgtcaactgccctgtgtggggtctttctaccaacatctgcccatctgcctgtcacttgtgcttctgggtatgcgcacattagcctgtagggctagtcttctagataatctctatctgtccatttctgcttctccatcagcctctctttgcctttaagtatacagagttgttttttaaaaaaacgacaagatagacaacaaaagaggggagagtcaatacagtaacacaggagcgtgatacctaaggccacccatgggcatcctcttctgggtctccactcaactttgatgtttggaatagggcagggaagggaagcagcagctggacctacctggcctccaggcagaggtgggctttctcctcccagcgttcagcaatggtcagcagttcctgcagctcggcctgggctttatccacagcagggctaggggctacactggcacccgcgaccaacagtcctcgcatgacagccaaggtgccccttcgggctgagggggccagtgtgcgtttcacctcatccagccatcgcgcctgttccacctgccgctggagctgctgggcctcaggcacctccacccccagctgccgccccctctccaacagggactgcagtagccctggactggagggcagtgaggccagggcctcacgagcctcagcctggtaggcctccacctgttccagaacaccctaccaggacacaggatgaagaacaaactcctcagctgggcccactgaggggttccaccaccagatggaaccttgtcccacctatcttcttaccctccaagcttttggggcaaaggagcctaacatgggctgagctctccttctccaagccctaagacagttggggttcctaacactgactgctcattagaatgccctggggaatttaagaatgcagattcctgggccccaccctgagagattcttaattaactaataattattaatctatgctttatttaacttttcagagggctctgttctcagggcaccaagagacctccctgccctaaaaattgctatgattagtcctcacataaacccttgtgctcaccaccctggggtctgttgccctctccatctcactcctcctccaccttcatgaatttccctccactttccaagc

SEQ ID NO: 1888962 - DNA, 4001 bp, Homo sapiens
ggccaggtgagcctacctggcagtggagacggtcctccagggagccgttgggcaggaagccgtacaccaggcagtagaagccgttctgagcacagtagccagcaaagtccacaatgtttgggtgacgaaacctgtttgaaaaaggggagcactttccatcaggccagactgggtgggcagccctggctggggcctcagctcgcccgggcctgccaggcctcaggtgcccaagggagccaggtcctgtggtgtgcggtctgaagccccacgggacctggtgtggctccccctctggcctcacctggacagctgctccacctcggtcaggaagctctgcttcactgcagtccactccaggtcagcgttctgcagcccccagggtgcggtgggggaaggggcagggaagacgggcagcgtgaggctctcgaagcgaaggccttcgggccaccagtgccacctacccgaggcccagaaccaccaaggggccagggaccctacgccagaatgagggctgaaggagttgtgtggggaagcgagggggaaaggctggagaagtggtgagggttatctgatggccttccagggtccctgccagggtgcgacactcacctccttcagcctcttcacagcatacaccgtgttcctcatcaccgcccggtacacgcacccaaagccaccctccccgatcttgagctcctccgagaagttgtgggtgccccgggaaatctcacagaggggccagcaaaacggaaaggggcgggctccctgcaggagggacactgagctctctgggcctggctgtgggaagagagcctggatcaggtggggtccctgtctcttcccttctgcccaaggctccaggctctccccaccacagctgcctcccagctgacccagcttggctgactggggctctgcgctacatcaaaggctgaattccttcctccttgtctcgaatcttccctggggggcaggggacacctaccttggtagaagaaggggctggagatggcggtggaggccacagggaagcagggcttgggaccaggccgagctcaggccctgaatgggtctgggagcctggaaaagcttcataaagacaccagtgagaggcaggcagagaccagcagcagggtctacagccgtggccgtggtcaaggtgggctcttctttgggtccaccgagcctaacaaccgggccctcttacctggggagaggaaggtggaggctgaggatggcaacttccgggggctccaggcctcggcctcggcgggtgcagggatgctgctgggcctcggggcagtggtgcctggggacggaagcggggcgggagggtgccctgggacgccaaggaaggaaaggaaggttgaggcccgggtgggggagccccgtggggcccgccggcctcccagccgtggggtgcccggagtcccgcgctcacaggctgtgatgatgtcccgcgcacggagcagctgcaggtgcgtgaggatgtgcacgaggtcggccacacgggcgttgcggttgatccagggccacaggacgctggccgtgcgctgcccggagcgctcgcacagccgcagctcggtctggtcgcgcacgatcagggcggctgcggggcggggggcgtcaggcgtcggcgccaggagcccgcgcgcctcccgccccccggcagcccgccgccacccaccgaactggcaccagtcggcgggctccagggcgtccatcactttgtagaagcggcacatgacccagggcggcacctcgtacaagaagtgctgggcgccgggggctgcgggctcccccgggcccggccccccggccatggctgccgccgccgggccgggacctgccggggcctctcagggccgcggcgggcgcgggcctgggccggccgggtccgcggacactgactcacttccccttcgagccggcctcgtgcgacgcccggcggggcggaaggggcggtgcccgggcccgccgccatcttgcgcgccgcggccgcgcgctgggtcacacgggggcgccccgcgccggggagggcccgggtcccggcgggttccgcgagcggcgatcggcctcccgggctcgcccgggcggggctctggaggacgaacggcggctcccggcgttggggacagagggcagggcggaggcccgggctgctcggaaaggggccggggccgggccttccgaaagctcctgggcggccctgccggaaccctgctctccactgcggcctgcagggctgttaccaggagccctgcctgcccgccccacgtctagccccctgcacacggcagcagccttgagccattcagtctccttaggtgtcctgaaatatgccgagaacgctgcccgccacagccgtgagtgtatgcgttgctgctgccccagccctcatttggcaagggtgagctcaggcagctgtggtgaaggcttcctgagcccgccggcagagctcctgccaccccgtacctgtcccctcctgggcatcgtccttgattacttgtctggaccgccacccccggtccccgccctgagatggggaagaccccacaagcagcaacgcagacttactcttttgtttctccagctggatgtctcctccagcgacagttccccttgccctcttgatcctgacagcgaaggggttccccacccctagccctacagacttaggacttttcctagaaacgagaagtgcccaaggcccacagctggcccctgttggagtctctttcctgaagccaccaccactgtggccactcccaaggaagatgccaaccataccatgaaacccatggcttctcacgggacagactttactgagatgtaccaactcaagtatctgaaatgactgcacacccatgctaacctccacgggggcacttggtcctacttacacacaaaggcccatcagctcacggaacagggctggcatacgagatgctcaatgcatacaagttgacttttcaaccctgggatctacctttgaaggccaggccttccgagggtaccttctagcatgtgcatgtgaagctggactcctttgagcagttgtctcctccagccccttaccaacctggtgaggctgctcctgagagccaaggaagccagtaacaagggggccccctttgggcaaacccctcagcctgcccttgcctggtcagagaaccacgttagcagtcaacagagggcacgtgagggtcctggccagaatgagacacaggaggagccacagcctgcgggggtgggggtgtccaaaagcaccacagcacatccagacctagggggtgcccctaccatacgggtctggagcagggaggttgtgctgcaggctgactcatgccaggcccttcccgtcacacgctggagcagtgtgcctggagagcactggcttggaagaagctgaggggccagcgaggccagcatatggaggaggcttcccttggccgctcgtggcaggcctgaaggcagctacctgtgtccagggacagccagatccaatgaggaaacgcagcaccatgctgtcatgtgagctggagggggacttctgtcttataatgaaagcccagaccttgagtcactttcacagagagatttatcgagaatgctaacagcacaggatacagtacttcccaacaaaaggtgcaaacgcgtcacttagaaaggcatgctgagtattctttgctttcacatgtattaaaaaacttacaaaaataaaataaaactgcgtgctgcccatcttttccaatagtaaaagaaccttatgaaaaaatcacttgatttttacaacaaaagacacaaacggacatttttatgtaaatttataaggcaaactctttatataataaataggttacagggattcagtggggggggggtgtttttgaaacgtatacaggtacattcagacaggtttactgaaatggtacaaatttccttaataaattgccttttgtttttaaatatatcagtgctttcagtcatttggctataca

SEQ ID NO: 1888963 - DNA, 4001 bp, Homo sapiens
tttctccacttttaaatgagaatatactaatcaatgtcaccatatcagaagagcttctaacagagtacaggggtaaatgatttcatgttctaaaatataaggactatgcaaaagcagaaaacagttttaagagaaaatatatgcatctattcgtgaattttatatgtcaacagaatccagtggcatctgctaaagcagaaaatctactacgaataaacattttattcaagtttaagaaacaaggagaagcaggaggatggcttgagacagggagttcgaggttatagtgagctgcgattgtgctactacacttcagcctggtgtagacactgatgaaatacacagatgaaagaaagaaaagaaaagaaaagaaaagaaaaaaagaaagaaagaaagaaagaaaggaagaaagaaagaaaggagaaggaaagagagaaagaaagaaggaaagaaagaaaaaagaaagaaaaagggagggagggaaagaaagaaagaaggagggagggggagggaaagaatgaaggaaggaaggacaggaaggaaggaaggaaaagaaagaaagaaagaaagagaacgaaacaaggagaaacagcgcaataaaatagatgttgtatcacaaatccataagatagaaaggtcctacttttgaaataaggtcaagaaatctctattccccagactgtaagctacttgaatgcacagaatctgcttttgtcttcattacacttagcatagtgccctgtatttagtaagtcttcaaaagatgtttgtgccattgcaaaaatgaatgtcaataattttaaaaatatgcccaatttgttaccaaaagagccaaccattaaacatttactgtcaagcttcattgtggtatgtcatagcttgaaaacactctgtaacacacaccttttgtgtactatgagatttgagtcttataagatcaaaatgtggataaatctctacctgcagtgtggcaaatgataagatgtgattggcaaagtctttaatgttcaacttcccaatggcccagccgtgtactttattctaactagcattccgtgtcatataagaagcctcccttatttctaatcattaatcactcttaaagatatatgtgtttcattgttttcatttaaagtgaatgtaaaatacatttaagtagagatgtagagactgacaatatccaattctactttttatggttcgaggattcgttatcatcagtcaattgaagaaaatactacttccagtattagactgctaaaatgattatcattaaagataaatagattatgaatggaaaatacctttcatatattaagtattatataaatatgtgtcgaacaaaaaatgtatgaaaatttatatttcaatgatgattatatttactttgtaattactattatttcactattatagtatagcacaatttcttcaaatgtcaattttgaaagttataaagttctataaagcaatcttacttcctggcttaaccttaacctgtaatatacttcaaactcaaggacagaaagattgtaaaatacagtaataatatattaatcttcttacatctattcatacttttacaaaaattttccaggcagcattacacaaggttaaatacaaagttaaaaatcaagaatctcagtccctttaccgctgtttatttttgccaatggagtatatattttatcactgcaacattataatctgtgaacaacacatggcttaaacattatgttgtgttgtttagaagaaatggcctgagaaaagtagcttgcatttcaaaatctttaaatttcaaaacattaccactgtgttctaccttgaggagtttaaaatttcacagtcccactgatctgagagtcctcaatgcattgattacaaccagcgggtccatcttctatcccaacgaaattaatcatggtaacagttgccactatggcctcctccctgcattttccaagcatggaggaggacaagtgagcacctgcctcctagattttagattgaaaatatcacccgaacacaccaggattctttatactatggcagagtataaccttctgaaaaaggccaagagtctcctaatgagcacatccatacattgatcatgatgttttcctttaaaaaccaagttcctccaagaatttgtaaatggaatttagcaatatttacaatttactcatcaataaatggcatttgaaatatttatttcacattgttttgtcacatagtttaaaaatttgatcaaaatatttatagaactactttttgtaataggagaagccctttttcttttaataataaaaataatgtgccaagtaaaatattcatttatgaaactgctcaagcaaaagtaaaaccagaaatattcgagatcattaaggttatccattcttcttgtagaatattactgaaacctacaaaagtattacaagacacatgcacatgtatgtttattgcggcattattcacaataacagacttggaaccaatccaaatgtccaacaatgatagactggattaagaaaatgtggcacatatacaccatggaatactatgcagccataaaaaatgatgagttcatgtcctttgtagggacatggatgaaattggaaatcatcattctcagtaaactatcacaagaacaaaaaaccaaacactgcatgttctcactcataggtgggaattgaacaatgagaacacatggacacaggaaggggaatatcacactctggggactgtggtggggtggggggaggggggagggatagcattgggagatatacctaatgctagatgacgagctagtgggtgcagtgcaccagcatgtcacatgtatacatatgtaactaacctgcacaatgtgcacatgtaccctaaaacttaaagtataataataaaagaaaaaaataataaataaataaataaataaacgtattacataatggtcaaaaacatattacaaattatcactttaagaaggtttaaaattgtacaaggattccatttacaacatatttgatctatatgcttgctaacctaaagatcttggttatataacatctcatacctctgcatttcaaagatggacagtgacagacattgttaaattcctgtttgaaggtattaaaaatgacagactttgtttctaaattatgaatttccacattatattgaactctcgggctattttgttgctcgctctcaatttgtgtttactacattgtttggggcatgagtaggttttcactagctcatctgagaggaaactccctgtttctgaaattctttaagtaggtttgtttggaaaaatcagcgaagcattctgtttaacctgagtcatttctttctacattaagcaaagttgcctagtagttaggcaaagagcccagtcagttaccctgaaccacaatggatgcagatctattttcttattatttctgtccctgaaaagtttcatagctcctcagggaaaaaagacatacccaccatcttgtaggtctcaattaagcttcctttcttttaggtttacactcactctcccttagcgaattttgcttttttttcaattgcaaaaaacgaagccttcccattgcctgtttaaaacccagtttgccttgctcaatgtcatggcttttcaggttttctaagactggttactcactctgcacgtcagtgtgagtttgcattttaattttccttcctgcacctgatcctttacaatgactctgtaaggtgtcaataatctctgaaagttctgggatgaggcacagaatttggatcatgctcttattttgccacagtggtaattaaacactaacacataccgacacacatacacgatgagtagaggtttacgttgtgtttgcttctagaccctgaaataattgagctcattttcaaaataaataatctactttcaaatttggtctttattttacacatacacttagtcagagatgtctgcagcttaatatttcagcacattgtcaagcaat

SEQ ID NO: 1888964 - DNA, 4001 bp, Homo sapiens
aaactgaatagtttgtccataagagtttctcattgcctgaatattgcttagtgcacactcatggtgcagattcacatgttcctctgtccttgatattctcttgtaaattggaagttagagtgaaagcagggctatccaatagagctttctgcaattatagagatgttctatatctgcatccttcaatatggtagccactcatcctgtgtggctatgagcacttgagatggggccagtgagactgaggagctgcatatttaatttaatttaataatttaattaattatgtatttacttattgagacagagtctcagtcgcccaggctggaatgcagtggcgtgatctcagctcactgcaacctctgcctcccaggttcaagtgattctcgagcctcatcctccctggtagctgggactacaggcattcgccaccatgcccgactaatttttttttttttgaggcggagtttcactcttgttgcccaggctggagtgcaatggcatgatctcggctcaccgcaacctctgcctcccgggttcaagcaattatcctgcctcagcctcccaagtagctgggattacaggcatgcaccaccacgcccggttaattttatatattttttagtagaggctgagtttctccatgttggtcaggttagtctcaaactcccgacctcaggtgatccacctgcctcagcctcccaaagtgctgggattacaggtgtgagctaccttgcctggcctttttttttttttttttttttgtatttttagtagagacaggatttcaccatgttggccaggctggtcttgaactcctgacctcaagtgatccacccacctcagcctcccaaagtgctggattacaggcctgagccaccgtgcccagcctatttaattttaattcatttaaattcaaatagccacatgtggctagtgactattgaattggacaatgcagatctagaggcttgagcagagttgatttttttttttttgagatggagtctcactctgtcgcctaggctggagtgcagtggcgcgatctcggctcactgcatgctccgcctcctgggttcatgccattctgctgcctcagcctccccagtagccgggaccacaggcacctgccgccacgcccaactaatttttttgtatttttagtagagttagccaggatggtctcgatctcctgacctcatgatccgcccgcctcggctcccaaagattttgttttatgtttaaaactacttcacgtggtgatggtgacttccctcatccaccactgtatttagttacagagtgtttcttctggtctgcagtctgccctgatggtgtctgtgctttttatgcacttcccaataggccacagggtggcactgccagcttgatctcctctgaggcagccaccagcactatggatgcaatgacttagccaggacccagctacacagcaaatttccctcactgtttgttggacttcatcatgcttccttcacaaagcctgcaaaatcatggaattcgaatgtttcttcattttacagatgaagaaaatgaggcagggagaggagcagactgattctcaatgctgtgctcccctcctcagggaagagctggggaacccatgtggggataggaaagaggtaaaatgttacacagctagttaatggcagagcagagatggaacttaagtctgtcttttaatgcccataccagtgttatttctgttttcttctatcaacacagtgaatgtcatggtagatttgctgatgttgagccatctttgcattcttgcaataatcctgcttggccatgttttagtgtcttaacacactgctgaattcaatttgctattattttatttaggatttttgaatttctgttcataagtgagttcagcctatttctttcttatcttgatactctactttcttgttttaatatcaggattctcccatccaagtactaaccaggcccgaccctgcttagcttccgagatcagatgggtttgggtgcattcagggtggtatggccgtagaccaaatatcaggattctaatagttccataaaatgaattgggcagcttcctctcttttctattttttttttttttttttttttgatggagattcgctctcttgcccaggctggagtgcaatcactgctcactgcaacctctgcctcccaggttcaagcgattctctttgcctcagcctcccagatagttgggattacaggtgtgtgccaccacgcctggctaatttttgtatttttagtagagacggggtttcaccatgttggccaggctggtctcaaactcctgacctcatgatccacccaccttggcctcccaaagtgctgggattacaggcgtaagccactgtgcccagccctcttttctattttctgtaaccatttacattaggtaggatttcctattttttgaagattaggtaaaacgcatccatgaaattgtctgaacctggttctcttctttcctccctctttccctctctcccttgcttcctttcttttttctttcttttgtggaggtagggtgggggccttgggagagatttttggctttctgtttcgtatttttaaaaagcgttattggttattctgatatcccatttcttaattgatttagttattgtacatctagaagattgtctctttcatcaagttttccaaattaattggcataaagctgttcatagcgattgcatgtgatttttcagatctcttcagtacattttcctctccaccatgctgactgttgtccagtctcgtgccacaaggcctgcacaatgactttgtaatcattattctgaacgccagctgcaaatgtgcagtaaatgtatactgtccatttattaataagacagggagcattaaccagatatggagagaaagccacagttcgtagggcttgcaaagggcatttagtttagtttactctcctgccccaacacaaatctgcataaaatactgcttggttttgtcactgccttgcttaagaatgtcccactagcacagagtctaaattgcttggccaggctttcaggatcctatggagtcaagccctccataaatgactgtgtccagtatcagacctagagccagggagaatgccagagacaagggcaccttaaaaggggtgtctacagttagttgggaagtcaaaataacactatgaggtaaatctcatgctaatctgcaaaatactgctttagatacaaacagcagggagtgattgggtgaggggagagttggcctagtcccaggggccaggaagggaatggccaggcaggaaggagcacaaagagagttttaggcaacagaaactgccagaagaaaggcaaaattagtgggacaaaggtgcaggggcaaaaagcaccacaggatccagaatgtgagaggggggcctggcttaagaggccatctgattatagacatggaaggagagagggcctgcctgctgggctcttctgtgtcaatcaggaactaaaaccatccaatgaatttttgggagtgagaatcaacaagattcactgatattctttcatataagaatacattcttgccaggcgcagtggctcacatctgtaatcccagcactttgggagggtgaggcgggtggattgcccaggagtttgagaccagcctggccaacgtggcaaaacctcatctccactaaaaatacaaaaattagccaggcatggtggcagatgcctgtaatcccagctactagggagtctgaggcaggagagttgcttgaagccgagaggcagagattgcagtgagccgagattgcatcactgcactccagcctgagtgacagagtgagacactgtctcaaaaaaaaaaaaaaaaaaaaaaggaatacatgcttgtggagacaacccaaatgatgtccatgggtaaacaagtgcgatacatctatacaatggaatattattcaggcttaaaaagtaaggacttttttttttttttttttg

SEQ ID NO: 1888965 - DNA, 4001 bp, Homo sapiens
tcaaaaaaaaagggccttcatcccattaacaagggagaagccctcatggcccaatcacattttttttttttttttaagatgagagtttcgctcttgttgcccaggctggagtgcaatggcacgatctcggctcactgcaacctccgcctcccgggttcaagcgattatcttgcctcagcctcctgagtagctgggattacaggtgcctgccaccacgcccagctaatgtttgtatttttagtagagacaggatgtcgccatgttggccaggctggtcttgaactcctgaccttgggtgatccacccgccttggtctctcaaagtgctgggattacaggtgtgagccaccgcgcctggccaggcccaatcaattcctaaaggccctacctttttttttttttttttttttgagacggagtctcactctgtcgccaggctggagtgcagtgacgtgatctcagctcactgcaacctccgcgtcccgggttcaagtgatcctcctgcctcagcctcccgagtagctgagactacaggtgtgtggcaccatgcccagctattttttttttgagatggagttttgctcttggtgcccaggctggagtgcaatggcgtgatctcagctcaccacaacctccgtctcctgggttcaagcgatcctcctgcctcagcctcctgagtagctgggattataggcatgtgccaccatgcccggctaattttgcatttttagtagagacggggtttctccatgttggttaggctggtcccgaactcccgacctcaggtgatccacccgcctcggcctcccaagtagctgggattacaggtatgagccactgcgcctggtaattttttgtatttttagtagagacggggtttcaccatgttggccaggatggtctcgatctcttgaccttgtgattcgcccaccttggcctcccaaagtgctgggattacacgtgtgagccactgcacccagccccgacctcttaatactatcatactggccacacctgaattttggaggggacacaatcaaaccatagcaccacctttactgacttgtgtctaacttaaattcttcttgtacattgtaaagtacttaataatccaattggcgtgagttactttattcttatttcaccacatccattatacttgggaggctaggtgactgcttagcccagtgaaatacacactgtcagaactctttattcctcatctaatgataatattctgattgggcttggtttcctcccagggtggacagtgtttcccagttatgttagtccccatttcaggcccctgctggtgactgaacaagaccattggctgatttgctctcaagtcaaccactggtgattcctgtaaaagtacatggcaacaatggaaataccattgctgtctcagaggaagggatggacttgtgcctgtgggtcttcctatgaccctactgttcagccatgtgttctcactgggcccaaatgtcaattgcctttgtgggaaccaaaccccagacctcacaaatggacaattaatggagctcagtcaattaagtaactgggcctttttgctggtcctggccatgctttcagccattcaaagaacatcattaaatttaaaataacatagcaattcttagtattaaagtctacaaccttgagagatatcagagcatgggttgaaaatagcatgcaacaagacctcgctctcccttctcttccccctcaatctacaataaggttttctggagccacccataattcaaggtggtggcagggacctcattactctcatttcctgccacaaaaatcccccatggtgagagacaggacattgtacagtcttctccactcaggcaacagatttcttccgcttcttccaatccagctcctatgacaattggctggggtggctgaggctgtggggctggagtcaaatccaaaatgaaagaccagcaccaattcctcctaccacccaagcccaggtcctgaggatgcagcttcatacaccacggcttgtgtgaagactctggggacttttgacatagttgttcggtggcaggcaggctaagcaatcctctgtgtatatttgatagcaccctctttcccatcacagcgcatgtaacacaaaacactcacatgcaagctcctctcacaggcatgccaattcaggcacactagctgtgaggccactcctctctttcccactcaaaaaaaacccatagtggattagccgggcatggtggtgcatgcctgtggtcccagctactcgggaggctgaggcaggaggattagttgaacccaggaggtggaggctacagtgagctgaaattgattgcatcactgtactccagcctgggcgacagagtgagagcctgtctcaaaaaaaaaacaaagcacagtaggatgcaagggagtaagtggtgagtgatttatgatagggataatcctgaatccactggaattccctgctcctctcctctcctcccctcccctcccttcctccattccttccttccttccttccactggaattccctccctccctcctcccttccttccttcctttttatttctttctctctttctctctttatttactttctttttctttcctttcctttctctctctctttttttttttttgtgagacagggtgttgctctgtcacccagcctgcagtagtgcagtggctcgatcagggttcaccgcagcctcaacttcccaggctcaagtaatcttcccactttaggccacccaccgaccaagtagctgagactacaggtgtgcgccacagcaccagttaattttttcttttttgagatggagttttgctctggttgcccaggctggagtgcaaaggcgagatctcagctcactgcaacctctgcctcctgggttcaagcgattctcctgcctcagcctcctgagtagctgggattacaggcatgcgccaccatgcctggctaattttgtctttttactagagacggggtttctccatgttggtcaggctggtctcgaactcttgatctgaggtgatccacctgccttggcccccgaaagtgttggaattacaggcgttagccaccgcgcccggccactagttaattttttttaaatttcagtagagatgaggtctcactatgttgttcagcctcgaattttgtttctcaaagtgaaacacaattatgagtaataaaggacccagaatcccttcacagccataacagcatgcttgacaactgctgctgcctagcttgggggtttccagccttgaggttgagcctaccctaggcttagcaggaggccagagctgagctgagaacagagcccaggatgattatcactcctaatccatgaggtaccaagatgtggttctgtgtgacaccttgagatggctgagtactctcagtccctatttattcttagcaaagcaaaccacaagcctgcaagctgcttgatgacttagggcatcagtgttcagaaggtctctatggggactgatgtcctgaggtgactagacgcttccagacatcagtgcccgtggcacccagatgacacttctcgcgaggctcccgtttttctgcagactaggctgtctcttcataacagagcctagtttccatcaaaatgccctgacttctcgagaggacaagtgctaatcttttttattttttccatgcccacggccggtcagagaagacctatctctacctaccatgctccagatagccttacccttgagccagatttgtctaagatggtgatggtgataacaaacacatctcgggtgtactgatggacaggaagtcaggagagacaatgacttgctgccctgctatgctaatttgttggccaattcataggaggtggcagctgaagttgtaatgataacttagagggcagtggcagcaggaaagttttctaaaaatggcttttattacaaggctttcctgagtttggctatacccaggcattatgtcattaggaaaaact

SEQ ID NO: 1888966 - DNA, 4001 bp, Homo sapiens
catggaagaaaaactaccactggtgtttgagaatttaaccacaatacacaccaatatacactgaaaggtgagctatcaattatgatacaggtacaggtggaaatagaatagtagtcaactactgtgctattctttctcagaaagacacgatgaataatgaaatacaacacagcaatgaatgactttgccaaaggagtaaagggtatatgtgcaaaaggaaaaaccaaggtataacatcagacgaccatgctgaatggacagccaccaccagtaatttagcatgtgactaaggtacacaaccagacattctcagaatgcaagctaaaagtcatgataaagaataaagagacataatacaaataatataacaatatcagcaaatacttatcatttatatgtgtcaggcactaatctaagcattctacatgtgcatctttgaatcctcacaactctatgaggtattattatttattttacagtttagaaaacagaaacagaagggtgaaatgacttcctcaagaatttcaaactattaaataggagaactgggatttaagtccaagcagtgagcattgtgcacatacactgatggtgccatgcttcctcatatggatgtgatacaagattagaaacacagagcacaggaacaaatggctttggtccagaagcagacggcaatgtagcaaaagtagacaccgtagcacatgctcaaacatccgtggtgcatgagcagccaccacaggagtctgagcatttgaccacgatgcacactcaggttctgcaacagaagctgacatccaatatataggagtagatactgaggacgaagaaggaggcaaacacactgtatgacaaaaaatcatggtgcacaaaattatattcatggtacagaaaattccatttttagtacaatgtagacaacgatggtgcattttcacaaatcatgatgaatgagcagaagaccatagctaaagggcataagcacattcatacaaccatggaaaattagccagggctcacttagagccaagagacatcttatgagaaaataatcataagtggagacctcatagatggatatagtacaagatcaaaacatctcaatacatgaatgattatttcaaatgtaggtggcaaaggtgcatagaggacccaccgtgtaacatgttcagacaaaagttgatgaaagccattagtgatatttgactgtttgatcttgacttacacaggtacacaaaagtagtttacactattacgtagcatttatgccaaaggagctaagaggcatagatagatacagcacacaaacttgttttcggagaataaaaccatgctgtggtgcttacttagacagatattgtgccttatacaagagccacggtacaggggtaaacagctttgtccatgagtagatgtcagatatgtcaaaagagacctgacaccatatactcagatgaccattgcatgaacagccaccactagtatttgggcatttgactatgatggctacctacacaatcccacgacataaagtaaaagaatgatacaggagcaggtagacatgaaaccatgattaccaaaacggatatggttggtgattaaaaatcattattttctttagtctgggagaagatggcaatgattaaacgggtgaagttatgatatatgctgaaacagccatgttgcatgaacagccatcacatcataggcatttaagcatttgactgatgtacaattagaaagcccagtgacatgagataacatctgtctttttggaacagataaacaatgtgcagaaaaaggcagaagtgatctaagagtagagagtcatagaatatgagtaaatactaaactcatatacacgatgcataaaacactatttccctgtaaagcagtagacaatgaaggttcctgctcagaaaccatggggtatgagcagacaagcatgctgcatgctcagacaaccatggtgcatgagcaaaaacctacaatataaaagcaggtgggtgtgatacaagagtgaataacacaatgaggaatatgcccagatggacaggacatatgaataaaggaaacataacacatgaatacaacttatttaggcaaacagcatatgacaatgatgctggaggagatatcatggcacatactcaggcaatcatggtgcatgagcaactaacactaatatttgactgttaaaccacgatgtacacccagatatcccaacaaaaataagctgatgaccataatataggagcagatgaacaaggatattgaagaagatgctgataataaaatagcagaaaacgatagtgcagtagctaatagaatactacagatggcaacgattcaaatgactgccatggcatatacttatataatgatgctttaaacactatcacaagtatcagcatttgaccataatgcacacttagagaactccagaatttgagctgacaattattatacacgatcaagggacacagtatcattatcatcattgtcatgtcatcatcatcatcatcattgttatcatcatcatcactacctgccaggcagtattaaaaatattttatgtataatagcttatacaatcctcacaataaccttactactttttttgtcattttgcaggaaactgaagcatgaagatacgaattgatgtgtccatttcatgaactgatgtgtccaagatctcatagctagtaagtggataatccaggattcaaattcagtcattttggctccactatccattattgtaaatatgacaataaatgacaatatgctgtgattcttctgacagacatgataccagattttaaaacagagcagaaaaatgagtggctttgttccagaagcagatggcaatgttgcaaaagtagacaccatagcacatgctcaaacatccgtggtgcataagcagccaccacaggagtctgagcatttgaccacgatgcacacacagaagatctgcaacatgagctgataccaggttatagggagtagacagatgacaaaggacagagaaaactcatcacaatagtgaaagacatggtgtagaaattaatatacatagtacaaaatactcattcccagtacaagtagacaatgattgtgtattttcacacaagtgtggtgtttaagtttaaatacgtagtacaacttcaatcacagtatatgagcacaaattcattatgtatgtttatattatcatggagaataggtcaattcatacatgaaaaaggggatagatatggtatcccaggaaagaatcacagagtaaaaactgctcaggtgatacaaaaaatacgggtatgtatggcattttgtcaaaaagaagatcaaaataatacaggatgttcagatgaataagatgccaaaaagcatgttttaatatgtgttcatgaggtccagtcagacacctacaggacataggctatcaattatgacacaggtgcagatggacatgatatggaaataaaacatggtgtgattcttacttgggtagatatggtatgtaatcaaaaataaccatgcaagcaattaatgactttggcccaagagaagatgacagtggtacaaaaaaaagactcacatggacataatgactcataaaaaaaataaccatggtgattgactctacacatttgtgtttgggcatgatataaatccaaacgatcccattacacaaactaacagctatgatacagttagtaagcatgatacaggaacagacagcaaatatggagaaaatacccattctgcaggagccagtgaccacaattcaggaactaatattcatgttattaaagttatcattctccacacagaaggagattatgtttattttttacacattaatgatgggtgagcaatatctatgatgtatacacagagaatcaattagtatacacataaaatacacaagcagttggctatccttcaggagtggtatccattcagacgcatgtccctatccgatatccacaatactgaat

SEQ ID NO: 1888967 - DNA, 4001 bp, Homo sapiens
atgtgactactgacactcctactcatcttaataggtacaaatccttggtcttctaaggcaccacaaaaagtaacactggaaatgaacattactgagtatttagtatgtgctgggaacactttaataccttgatttgtttaatctcccaacagtatcttgtgaggtagatgactccaaagcaaaagaccacttacttgtgctgcctgcctattttatacagatccctctgtaacattgtcattaccaagggaagaccaggggtctgaatcctagctgaatctatcatccctgcagtggttgttaccattaaaaagtctgcactgaaagatctcaggcttccctctattatgccaatcacacaaatacctttatatcagcaaagaaactctcacagacactgcacaatcttgtttaagtccatccatccatctctccatccagccatgcatgcaatcatgactctatccatctatccatccaagaaatatactttaagagcttcaataggccatactccattaaaaagcctcagcatcattctataaggcagatcaacggactctctaaagggaccttcttcctaattttaacactatggttctctgtgacctcctccgggcccgaatgccacctttaggcattgtgtgacatgtttatcaccagctcataaataaaagcttgcagttgcatgatgcttttaatgcatctatttggctgccgaatcactggaattctcctcactgaccaacatccgagcactagaaaatatacaaatgatgtaaatgccacatacccacttgagtagtgcttcttaactcaatatgcatcacacagcaggaagaataataactaaagttttgcttgaaaaagtacaatttggggatgaattctcatatgtaggttaagacttccgtgtattggaccaccatctctccatctattcattcatttcctaatatcagtgagtacatttccgtccctatttatctaggtctatcttcttttttggacctaagctactataaatgaaaagcaacatgttcaacccacctcttactctggtgttcaagagttgtcatttcagcatccgctgaactcaagagcaactacacaagataacaaaatcagaagagccagcaatgtaatattacagtttttagttttcattttatttttttaattttcatttttattttaagttctggggtacatgtacaggatgtgcaggttcgttacataggtaaacgtgtgacacggtggtttgctgcacctatcaacccatcacctaggtattaagcctatggtgattcctcactgatctagaaccagaaataccatatgacccagcaatcccattactgggtatataccaaaaggaatataaatcattctattacaaagatacatgcacgcgtatgttcactgcagcactattatgactttttaaaagaaatggggcttcatctctcaggtgagacagatttagtatagagtttactctaaataaatagttgtgcatgaggctctaactgtaatgcaaatgtcaaaatcagccttgaaagaaagggtaggtaataatttttaaaagacaaatcttgcctcttcatctttcatgatctaccatgtgcctacattcccgcctcatcccaggcgtccccaatgtacacatttgggacttatgccacagtcactgtgatcctctagggagcaatgagtgctcctgagtacacatgtgtacacgtgtctctgcatgttcaaggacccttgtgacaaacacatctattgagagtcacgattccatgtctgtgggtggcctcccttgatacatcctgtcttagtttccactcctttgtttgttattctctggagtcagatggattaggcttcagattctcaggtaaccaactatggatctgagctgagtgacccagtgccgataagaagaatgttgccaaaacaacagaatccatacccctttccagtaccgaggccctcctccctccccctgcctgcttggatctcaggtgagaatgggaatgtgatgtggctaagagtgaggggatagatatgtggtagagggttcgaggagagaggtgaaatcttggggtccccacagaagggactaggggagggaccagagatgccaagaaagcctgctcctgggcactgagaccctaggagatgactatgaaagtgcagtggttctaacatgtggttctatgaatttccccagcagtacacagagctgcgaacattttctgactctaagctccagggctcagaccatgggaaatgaggcctgtgttggcaaagggcagtggagcctggaatcactagtggagggcagctgcaagccttgaggaggccctgctcacctcagcaataactctcatcagtaactccactctgtgtgtctctcttctggtcttctctttctgtgctctgttgtcagggtcaatatatagcaggttaaaattgtcctgggttaaaggagaagaagaggcaaggatgtcccaatcccctcttccactgactgataagacagtgggcagagggggagctggaagagatggtatgcagagaccacaaattaattcgtgcttctcagaccagacgggggtctggtgcatttacttgctaaggctgatttgattttcattatgagtgcataacctctgtactggacagtaaggtgagaaaatactggagttatgtctaatctggtgtcagctgatgctatcatgtgaatggtccatttgtataaatgctcagcctgttttgctgaaaatgatcagtctctcagatttccaccccacctccctactcctttccaagacgattaatggtgtgtatggctttcgagtcttcatggtgatatgggaaggggcctatgacatcttatgttgactgcagtgtccttagttgtttatgagggaaggctcaatcttctctctcaggttctgctgacgatgctgatttgctcacccatttctctggctggtgtaacttgcatttttgtctctctcattttggtcaggatctggtgctccctggctgactcagcctcagcccacctgtgctggcatcagcagacccctctgaatcggggcctcatcctccttcccacatctgggcagggctgtccatagcacagcctcagctgcagggtcacctagcacctatctgggttatgcttgcttcatggtaacactcctggctcttgaatcagccacttccacattcccttctcagagaatgtagcgccctgcaggaacaaagatcagctccaaaaactgaaattcttgaactccagccatttctctaaccaaggatcttgctatttatttctgcagaagtaaactgagtcctaaatttcagctgggcaaaaaatctctttatttgggactcccttccacttctctgacacacctgtcacatgtaagataaggcccatagaagagagactgtgatgagagtctcttacctccatctgacactgtctccatgccttctacacccccaaggctggaacagaacactcttttattttctttatctttcatgttgacataaggattcccatagtaaatccagatcataaagggaagtctttaggatttgtactttctcttgtagaattcaaattcatttgaaatgtttgaaggaaattgactaacagataaagaaactcaaaatggaagggattaccaaatacaagtcaatacatcatcagtagcagggcaagctctctgtaaaaataaacttggagttcaaagggagttgtattagtcagggttctctagagggacaaaactaatagaatatatatatatatatatatgtgtgtatatatatatatatgtgtatgtatatatatatatatgtgtatatatatatatatatatatatacacatatatatatgagtttattaagtagtattaactcacacaatcacaaggtcccacaataggccatctgcaagctaaggagcaaggaagc

SEQ ID NO: 1888968 - DNA, 4001 bp, Homo sapiens
cacccaccatcacgcactgcaggtttcatcactcccctcaacacagcaggctgcctgagccctgaacacatttattaagtcctagagaagttccagcccactgccctccaacttggcatgcctgcctcaatgaagaccttctcacttgatttatgtttccctggatgatggccaagacgagaagaaaaaaaatcttgttcccgttctctcttcttcttttaggaagtatctttatctcttctattattaccttatctaacctgtaggtgctcacattgttagaaatggatcattaaaatcatcttgaggatccctgagttccaggtggcttccaaatctctcctgggatcaatgaaggcagttgaaggtgcttgcaggtctgtctcctcaccaatctgaacgccatcacaaaattgtacctggagaatcttgctctacccagaaaggagctggaaacatctaatctaagtgactgaccccttttggagtagggcactgcccacaacatggctaattgtgggggtgctgtcccatcttgcatgttctccccctgtagcttccatcactcctgagcacagcatgatgcctgaaccctgaatttatttattcaacagtcctggatcatgtctaacccactgccctccaatgtacatgcctccctaaatgaggaacccctcacctgctctatgtttacctgggtgatcgccaagaccaggagaaagcaagattgttctcattctatttttctagtaggaattatcttcatcttgtctttctcatctataacctgcatgtgttcatgttgttagggacagacgatttagaatatctcgacgatgcctgaggtccacatggccaactaaggtctcctggtatcaggaaaggtacctcaaggctcttgaaactccaccctatcatgggtccaaaggccactacaaacttatacttgttgagccttacactaccaaggaagaaaccagtgatgtataatctaggaaactggcacatttctaagtaggacactgcacacagcatgtctgatagcggaggtgctggcccatcttgcaaggtcaacccccgtccaggagaatgtccagtctgctgccctccatgacgcatgtctcactcaatgagacatgctcactgctccatatttgcccagatggttgccaggaccatgagagaacaagctcgttttctgttcttctattaggaagtatcttcatttcttctatctttctattctctgaaaaataggtatttccattgttagaaatgcatcattgaaatcaccttgagaacacctaaggttcaggtggccagctaggatctcccggccttactgaagacaactaaagcctccagcaactccactgcatcacctgtccgaaggtcaccatgaacttgtacttggtaagacttactctactcagaaagggaatagttacatgtaatctaagcaactgatgcctttccaagtagggcacttcccacagcatgtctgattgtagaggtgctgccccatcatccaccatcgtgcactgcagctttcatcaccccactcaacacagcaggatgcctgaaccctgaacttaatcttaattcctagagaatttccagcccactgccctccaacttggcatgcctgcctcagtgacgaccttcttatctgatttatgttcacctggatgatggccaagacaagaaaagattgttcctgttttctccttttaggaagtaactatcttttctgtcattgccttctctaatttgtaggtgctcacgttgttagaaatgatcatcttgacgatgcctgaattccaggtggtttccaaggttctcctgggatcaatgaaggcagctcaagttgcttgcaggtctaccccctcaccagtctgaggaccaccacaaaagtgtacttggtgagccttccttcacccaaagaggtgtcagtcacatgtaatctaagtgactgacagctttttgagtagagcactgcccacaacatggctaattgtggaggtgctgtcgcatcttgcgtgttctccacctgtagcttccatcactcctctgagcacagcatgatgtctgaaccctgaacttatttattcatcagtcctggatcatgtctagcccactgccctccaaggtatatgcctccctaagtgaggaatctctcacctactctatgtttatctggatgattgccaggaccagaagagagcaagattgttcccattttctatttttctagtaggaattatcttcatcttgcctttctgatctataacctgtaggtgctcatgttgttagggacaagccacttaacttatcttgaggatgcctgaggtccacatggccaactaagatctgctggtctcagggaaggtacctgaaggctcttgcaactctacactatcatgggtccaaaggccactacaaacttatacttggtgtgccttactctacctggaaaggaactagtgacatataatctgggcgactgacacatttctgggcagggcactgcacacagcatggctgattgtggaggtactgccctatcttgcacagttataccctacagctttcaccactcccctcaacacagcatggcgcctgaaccccgaacttaacttattcataagtcccaaagaatacccagctcattgcccttcaacttgcatgcttccttcagtgagtaccctctcatctgctttgtttagccagataattaccaagaccagtagtgaacacactttttccagatttctcctcttctacaaaacatatattgatcttttatcttttgcttccttaacacataagtgctcatattgtttggtgtgcaccatcgaaatcatcttgaggatgcctgaggtccacgtgaccaactaggatcttctggcattcgagaaggcagttgaaaggcccctgacgctccactgcatcaggagtccaaaggccagccaaaagttgtgtttggtgatattactccacccagaaaggaaccagttacatataatccaagtgactggaactgttctagaaaaggcactgcatacattatggctgaatacggaggtgctgcccagtctcgcatggttgctcccagcagctttcatcactctcctaaacgcaacagaatgcctgaaccctgatctcatttattcatcactcctagagaatttccagctcactgccctccaatttgcgtatctcactcagtaaaagtactctcacctgctcggtgtttgcccagatcacacccaggagcaggagagaacaaacttgttccattttctatttttttttttttttttttttttttttgagacggagtctcgctctgtcgcccaggctggagtgcagtggcgggatctcggctcactgcaagctccgcctcccgggttcacgccattctcctgcctcagcctcccaagtagctgggactacaggcgcccgccactacgcccggctaattttttgtatttttagtagagacggggtttcaccattttagctgggatggtctcgatctcctgacctcgtgatctgcccgcctcggcctcccaaagtgctgggattacaggcgtgagccaccgcgcccggccatcttgttccattttctgttcttctattaggaagtaacttcacgtcttctatccctctcttctctacaggtgttcacgtcttaaggatgcctgaggttcaggtggccagctaggatctcccggcattattaaagacaactcctgcagctccaccctattacctgtccgaaggccaccacaaacttgtacttagtgagccttactctacgcagaaaggacacagtgacatgtagtgtaagtgactggcacctttctgagtaaggcactgcccacagcatggctgattgtgaaggtgccgccccatcccccaccattgtcccctgcatcttttatcactcccttcaacacagcaggatgcctgaatctggaacttacttattattaagt

SEQ ID NO: 1888969 - DNA, 4001 bp, Homo sapiens
tctggaacatattatggacgaatggggaggggctactccatcgtgcaatgtgaatccccatcctagagaatgtccagcccactgccctccatcatgtatgtttccctcagcaagagcactctcacttggcttcatgtttacccagatggttgccaggaccacgagagaacaagcttgtttttctgttcttctattaggaagtatcttcacgtcttctatccttctcttctctatcatataggtattctcattattaggaatgaaccactgaaatcatctagaggatgtctgaggttcaggtggccagctaggatctcctggcatcattgaagacaacttagggctccagcaactccaactcatcgcctgtctgaagaccaccacacacttgtacttggtaagccctactccactcagaaaggaaacagtgacatgtaatctaagtgactggcacctttctgaatagggcactgcccacagcacgactgatagtggaggtgctgccccatcacccaccatcacgcactgcaggtttcatcactcccctcaacacagcaggctgcctgagccctgaacacatttattaagtcctagagaagttccagcccactgccctccaacttggcatgcctgcctcaatgaagaccttctcacttgatttatgtttccctggatgatggccaagacgagaagaaaaaaaatcttgttcccgttctctcttcttcttttaggaagtatctttatctcttctattattaccttatctaacctgtaggtgctcacattgttagaaatggatcattaaaatcatcttgaggatccctgagttccaggtggcttccaaatctctcctgggatcaatgaaggcagttgaaggtgcttgcaggtctgtctcctcaccaatctgaacgccatcacaaaattgtacctggagaatcttgctctacccagaaaggagctggaaacatctaatctaagtgactgaccccttttggagtagggcactgcccacaacatggctaattgtgggggtgctgtcccatcttgcatgttctccccctgtagcttccatcactcctgagcacagcatgatgcctgaaccctgaatttatttattcaacagtcctggatcatgtctaacccactgccctccaatgtacatgcctccctaaatgaggaacccctcacctgctctatgtttacctgggtgatcgccaagaccaggagaaagcaagattgttctcattctatttttctagtaggaattatcttcatcttgtctttctcatctataacctgcatgtgttcatgttgttagggacagacgatttagaatatctcgacgatgcctgaggtccacatggccaactaaggtctcctggtatcaggaaaggtacctcaaggctcttgaaactccaccctatcatgggtccaaaggccactacaaacttatacttgttgagccttacactaccaaggaagaaaccagtgatgtataatctaggaaactggcacatttctaagtaggacactgcacacagcatgtctgatagcggaggtgctggcccatcttgcaaggtcaacccccgtccaggagaatgtccagtctgctgccctccatgacgcatgtctcactcaatgagacatgctcactgctccatatttgcccagatggttgccaggaccatgagagaacaagctcgttttctgttcttctattaggaagtatcttcatttcttctatctttctattctctgaaaaataggtatttccattgttagaaatgcatcattgaaatcaccttgagaacacctaaggttcaggtggccagctaggatctcccggccttactgaagacaactaaagcctccagcaactccactgcatcacctgtccgaaggtcaccatgaacttgtacttggtaagacttactctactcagaaagggaatagttacatgtaatctaagcaactgatgcctttccaagtagggcacttcccacagcatgtctgattgtagaggtgctgccccatcatccaccatcgtgcactgcagctttcatcaccccactcaacacagcaggatgcctgaaccctgaacttaatcttaattcctagagaatttccagcccactgccctccaacttggcatgcctgcctcagtgacgaccttcttatctgatttatgttcacctggatgatggccaagacaagaaaagattgttcctgttttctccttttaggaagtaactatcttttctgtcattgccttctctaatttgtaggtgctcacgttgttagaaatgatcatcttgacgatgcctgaattccaggtggtttccaaggttctcctgggatcaatgaaggcagctcaagttgcttgcaggtctaccccctcaccagtctgaggaccaccacaaaagtgtacttggtgagccttccttcacccaaagaggtgtcagtcacatgtaatctaagtgactgacagctttttgagtagagcactgcccacaacatggctaattgtggaggtgctgtcgcatcttgcgtgttctccacctgtagcttccatcactcctctgagcacagcatgatgtctgaaccctgaacttatttattcatcagtcctggatcatgtctagcccactgccctccaaggtatatgcctccctaagtgaggaatctctcacctactctatgtttatctggatgattgccaggaccagaagagagcaagattgttcccattttctatttttctagtaggaattatcttcatcttgcctttctgatctataacctgtaggtgctcatgttgttagggacaagccacttaacttatcttgaggatgcctgaggtccacatggccaactaagatctgctggtctcagggaaggtacctgaaggctcttgcaactctacactatcatgggtccaaaggccactacaaacttatacttggtgtgccttactctacctggaaaggaactagtgacatataatctgggcgactgacacatttctgggcagggcactgcacacagcatggctgattgtggaggtactgccctatcttgcacagttataccctacagctttcaccactcccctcaacacagcatggcgcctgaaccccgaacttaacttattcataagtcccaaagaatacccagctcattgcccttcaacttgcatgcttccttcagtgagtaccctctcatctgctttgtttagccagataattaccaagaccagtagtgaacacactttttccagatttctcctcttctacaaaacatatattgatcttttatcttttgcttccttaacacataagtgctcatattgtttggtgtgcaccatcgaaatcatcttgaggatgcctgaggtccacgtgaccaactaggatcttctggcattcgagaaggcagttgaaaggcccctgacgctccactgcatcaggagtccaaaggccagccaaaagttgtgtttggtgatattactccacccagaaaggaaccagttacatataatccaagtgactggaactgttctagaaaaggcactgcatacattatggctgaatacggaggtgctgcccagtctcgcatggttgctcccagcagctttcatcactctcctaaacgcaacagaatgcctgaaccctgatctcatttattcatcactcctagagaatttccagctcactgccctccaatttgcgtatctcactcagtaaaagtactctcacctgctcggtgtttgcccagatcacacccaggagcaggagagaacaaacttgttccattttctatttttttttttttttttttttttttttgagacggagtctcgctctgtcgcccaggctggagtgcagtggcgggatctcggctcactgcaagctccgcctcccgggttcacgccattctcctgcctcagcctcccaagtagctgggactacaggcgcccgccactacgcccggctaattttttgtat

SEQ ID NO: 1888970 - DNA, 4001 bp, Homo sapiens
ttaaaaccattagatttgtaagggtgggagagaacaaagagacactacacaaagtacttacttcacaaaccatcagtattaactatcaataaataacggaaaaacaagaatcttagcaaaaagaaagacgaatctgtagaagtgcccaactgtatactcagatctccgaaacatacaaacatttccaagaggagacttcaggatggctaacaacttaaagcccttaccagatgaattaggtggagcaatgctttactgaaaactatttaaaaatcctataggtgtaaacatctcactagaatggtctcaaaaataatgaacgatatcagaggtaagatggtaatgaataggtaatatgtaaaaattatgagctttttgtacataggcctctacatgtctaaggatttccaggctcttaccatttggtaatcggagattactgtttccagatcagatgaaggaatagtgaccaaattaatctgctgtctaaaacaaagaaaaaccagatatatacagaaaaacatgtctttcagacactgtagagtgatctgtgagagaggggacacattagaacagtccgtccattctcctgccaacttctcagagagagaatattgactccagtgcaaagaatgggaacccaggcaaagcctggcaattttcaatattaacagattaaaatggaaaaaaagagatcatttcaattgatgcggagaaatatgtgactaaatctaacatccatatctaaaaataataacagcaaatcaggcatagaatcgagtatatcctcaattggttgaagggcttctatgaaaacgcacagctaacggaagacttaattgttaacatttttatgtttgactcctaagatcaggaaccaggtgaggatgtcccattcaccatttatatgcaacaattatgccaaattaaagtaaatgatcaggtaaggacataatattttataatttgcaatcatggatgaataaaatcaagtctgtcatcttcaaccattaacttccccttacctgtgtttgcagtggcgtcaacgcttgcactgcaaataaattatctctatgggcatagatatccacagggtattctagaaaaatatgtaaattgaatcataaagcagaatacattacaatatgtatatgaaaaaccaccaatgaaatcctatgagtgataactgatgatacccttcttagtactaatataatagcagtgttactaggactgataccattagttatagtactagtactgcttgcagtagtactaacaggacaatttgcttaatgactacatgcctggcagatatgtacttcagattttcatatgcatttccacattccataactacaacaaattgttcccaaagaaacgatatccgaaagttttgatttgtcagtgattgaggacatgtatataacgtacatttgcaaatggaaaaagacacacagaaatgcagagataatcacagtaatcacagataaccatataatcacagaacagttttgatttgtcatagcaattgaggacatgtgtagaacatacatttgcaaatggaaaaaaccagaaatgcagagataatcacagtaatcacagctaatcatgtgatcatagaacaacattaagactgctacgcagcgttaacctcacagaaaccatccacattaacctcagaaaaacagaaaataagaagaaattcatcttgctgctacctgtcctctgatctctgacctaataaaaggtgtttattgaacatgctgtcatttttaccaaagtactagtaatacagtctctaccgctatgattactctactaccagtgtcactacaaggaggtgaaggagaagcagcagtagctacataactgatgacttacatggtttgcagtgtccatgaggcctgtagagattatctcttttgaccctcacaacaaacatgtgccactgagtattttactgaatcagtggctcaggttcgttgcaaggattaaggagacaacatttgtagactctttgggaacctagaaaaaaacaaagaagctacgtaattataatatgactatgcaacattgaatacctaaaataaatgacatactaatttactattcacaacctgtgtaactatcagcatgtatattttctttcccatttgtattagtgataatttcctggttctgcagttggaggatgaaaatcttgaaggggctggtagtaaagctctaccaatccattgtaagaattccgacttcccaaaatttgcaaatcactgattatgatactgaatgaggctatctataccgaatgcaattctacaaatatagacaatgattctcaacccagaaatacgtaaaatgtgacaactacaagataagtttatactgggaagaaaaaaagacagattaaaaagaatgacaaccttctccaaacaaccagcgataattgagtgaagactcgttgaaaagctaaatttctctaaaaatatacatatgtatacatatattcacagatatccatgcatacataagataatgtccctgaaaagcacacacacaaaaaattgaagggattatgtaattcaggctttattcacaataataatgagcaagccctatattgttcatttctctcaaattcattgcctgtccatatctaactctatttttttaaagaattttgataaaattcttctactgcttattgcctaatgaagttcaaagatattaataaaaagatatatgaaggaaaaatgtggagaatctaccacaggagttcctaaatggtattcttaacagttctataataataatcaacactaggtaattgccgtttacaaattcaaactttccaagaaaaccaagttggtgtctgatatgacacgttaaatgaagcaaatggctgtgaaacttatgttgagctgacagttcatacaaattcatgatgtgataggccagttgtacaattagaagtaactcttggtgacttaacaactctgtttatgcaggatattaatttattgaatatttaattgagtatacaaagggaggtggttatctttctggaatcatctgaaaaaatgatgagaactggttggaaatggggcaagaattaaagacaaaaaatgacaaaattatctttcctgttttccagccacaatcatacatcaaaaaaagaatgtattccaaacaaaaataaatcaaaaattgctaggacaaataaagttttcacagatatagacacaaaactatttagtttcctttagtagacataacataggtttgcctggataagtatttttcataattttaaatgactaggggccaggcatggtagctcacagctgtaatcctagcattttgggcatccaaggaagatgcatcatctgagcacaggagttcacgaccaatatggggaaaccccatctctactaaacacacaaaaattagctgggtgtagttgccggtgccattaatcccagctacttgggaggcagaggcaggagaatcccttgaatctgggaggtgggggctgcagtgagccgagatccccccattgcactccagcctgggagatgagggtaaaactcaaaaaaaaaaaaaaaaagctaggatggtaacatttaagtaagaagaacctgcccaggttcccaatcaagcctgtttatgcaaatgaagtactgaaacttaaaactcagttctgattggttgatacaccagaccctggattggtggacgtgagtgacctttaattggttggtttaggggagtcctgaaagtcccaatgttaaatagtgtaggttttcagggaactcagagtgcctctgtgactcctagttagcaaatggccactttgctttatttgaaatttaggcctagtgacccactcaggatccatcttgaagaattagctcaaacatggcagcacacagcacttcctttcatcacagcaccagcaaactgctctgggtccatctagtcccacacatggatcccagtgg

SEQ ID NO: 1888971 - DNA, 4001 bp, Homo sapiens
acccatgaggcggagcttgcagtgagcagagatgggctactgcactccagcctgggtggtagagcgagactccatctcaaaaaaaaaaaaaaaccaaaaaaacccaaaacactagattagtaaggttgggagaaaacaaagagatactacactaaatacctccacaaactgtcagcattagccatcaatcaatattagaaaaataagaattttatcaaaaaagaaagatggatttgtagaagtgcccaaccgcatactcagttcttggaaaatacaaacccttccaagaggagacttcaggattgctaaggacttaaaccccttaccagatgaattaggtggtgcaatgctttactgaaaactattttaaaatcctagtcttgtaatcatacaactggaatggtctcaaaaataatgagccatatcagaggtaaggtggtaaggaatagataatatgtaaaaattatgagcttcttgtacataagcctctacatgtctagggatttccaggctcctaccatttggtaagtggagactacagtttccagatcagatggaggaacagtgaccaaatttatctggtgtctaaaacaacataaaacccagatatatacagaaaagcttgccttcagacactgtagagtgatctgtgagagaggggacacattagaacagtccatccattctcctgccaacttctcagagagagaatatcgactccagtgcagagaatgggaacccaggcaaagcctggcaattttcaacattaacagattaaaatggaaaaaagagaccatctcactagatgcagggagatatgtgactaaatctaacatccatatctgaaacataataacagcaaatcaggcatagcacagagtatatcctcaattgcttgaatggcatctatgaaaaaacacagctaaattaagacttaattgttaacgttcttatgcttgacgcctgagatcaggaaccagatgagaatgtcccactcaccatttctgtgcaagaattataccaaattaaagtaaggaaatcaggtaaggacataatattttatagtttgcaatcatggatgagtaaaatcaggagtctgtcatcttcaaccattgacttccccttacctgtgtttgcagtggcttcaatgcttgcactgcaagtaaattatctctgcaggcatagatatccacagagtattctagaaaaatatgtaaaatgaataataaagcagaacaaagcagaacacattacaatatgtatatgaaaaaccaccaatgaaatcctttgagtgataactgatgatatgcttcttagtactaatgtaatagcagtgttactaggactgataccattagttatagtattagtactgcttgcagtagtactaacaggaaaatctgctgaatgattacatgtctggcagatatgtagttcagattttcatatggatttccacatttcatacacacgacaaatcagtaccaaagagacagtatcctaatgttttgatttgtcatggtgattgaggacatgtgtagaacatacatttggaaatggaaaaaaaccagaaatatacagataagcatagtaatcacagataatcatgtgatcatagaacaacattaagttaagactgctacgcagtgttaacctcacagaaaccatccacattaacctcagaaaaacagaaaataagaagaaattcatcttgctgctatacgtcctccagtctgacctaataaaaggtgtttattgaacatgctcttatttttaccaaagtactagtaatatagtctctactagtacgactactctactaccagtatcactacaaggaggtgaaggaaaagcagcagtagctacataactgatgacttacatggtttgcaatgtccatgaggcctttagatggattatctcttttgaccctaacaacaaacatgtgccattgaatgttttactgaatcaatgactcaggtaagttgcaaggattaaggagacaacatttgtagactcttttgggacctacaaagaaacaaagaagctacgtaattatagtatgactatgaaacatttaatacctaaaataaatgacatactaatttactattcacgacctatgtagctatcagcatgtatattttctttctcatttctattagtaataatttaccggtgctgcagttggaggatgaaaatcttgaaagggctggcagtaaagctctaccaatccattataattgtgacgtctcaaaatttgcaaatcacagattatggtacagaatgaggctgtctgtattgagttcagtctaaatatatagacactgattccccacccacaaatatgtaaaatgcgacaactaacagatagtttaaagtgggaagaaaaaaggacaggttaaaaagaatgacaaccttcctcaaaccaccagcaataattgtgtgaagacttgttcaaaagttaaaattccctaaaaatatacacatgtatatacatatattcacagatatccatgcagaaataagaaaatgtccccaaaagcacatatacacgaaattgaagggattatgtaactcagactttatccacattaataatgagtaagtcctgtattgttcatttctagttcattgcctgtccatacctaacactctttatattattttaaaagaactatgataaaattcttctaatgcttattttctaatgcagatcaaagatatgaataaaaagttatacaaagaaaaatatgtggagaatctaccacaggagttcctaaatggtattcttaacagttacataataataatcaacacaaggtaatcatggcttacaaattcagtttccaaaaataactggtggctgatatgacatgttaaatgaagcaaatggctggaaaacccatattgagctgacagttcataaaactcatgatgtgataggtgagttctacaattagaagtaactcttggtgacttaacaactctgattatgcaggctatttattaaatactgcaattcattatacagagggaggttgttatctttatggaattatctgaaaaatgaagagaactggttgacagctaaggaaatgaggcaagaataaaagacaaaaaatgacaaagttattttgcctgttttccagccacaatcatacagcaaaaataagattgtattcaaaacagaaatcaatcaaaaattggtaggataaataaagttttcacacatatagacacaaaactatttggtttcctttattagacataacataggtttgcttggataagtatttttcttaattttaaacgactaagggccaggcgtggtggctcacacctataatcccagcattttgggtggccgaggtgggtggaccacctgaggtcagaagtttgagagtggccgatacggtgaaaccctgtgtctactaaaaaaacaaacattagctgagtatggttgcgggtgcctgtaatcccagctactcgggaggctgaggcaggagaatccctagaacctggagctagaggttgcagtgagccgagatcgcaccattgcactccagcctgggtgacatgagtgaaactccgtctcaaaaaaaaaaaaaaagactaggaagctaacatttaagaaagatgaatgaaataaattaatacatttgaatattgaatatattttcctaggttccccaattatggttagacagcaaaacatttattacgaaaaattaagacaaattcatttcatagaaagagaacagttccattaattttctgtggtgacttgcaaaacgtttctacactcagcaatgaattccttctgtaaattatatttgctcaatttaattaataaatacagtagcaataaagataattattaacatttactcaatgttgatttaattagattatataatatatatttggagattttttcatttgatccagaaaacacctatattatataaaaatcattattaatttgatagcacagattg

SEQ ID NO: 1888972 - DNA, 4001 bp, Homo sapiens
cccctcaccagtctgaggaccaccacaaaagtgtacttggtgagccttccttcacccaaagaggtgtcagtcacatgtaatctaagtgactgacagctttttgagtagagcactgcccacaacatggctaattgtggaggtgctgtcgcatcttgcgtgttctccacctgtagcttccatcactcctctgagcacagcatgatgtctgaaccctgaacttatttattcatcagtcctggatcatgtctagcccactgccctccaaggtatatgcctccctaagtgaggaatctctcacctactctatgtttatctggatgattgccaggaccagaagagagcaagattgttcccattttctatttttctagtaggaattatcttcatcttgcctttctgatctataacctgtaggtgctcatgttgttagggacaagccacttaacttatcttgaggatgcctgaggtccacatggccaactaagatctgctggtctcagggaaggtacctgaaggctcttgcaactctacactatcatgggtccaaaggccactacaaacttatacttggtgtgccttactctacctggaaaggaactagtgacatataatctgggcgactgacacatttctgggcagggcactgcacacagcatggctgattgtggaggtactgccctatcttgcacagttataccctacagctttcaccactcccctcaacacagcatggcgcctgaaccccgaacttaacttattcataagtcccaaagaatacccagctcattgcccttcaacttgcatgcttccttcagtgagtaccctctcatctgctttgtttagccagataattaccaagaccagtagtgaacacactttttccagatttctcctcttctacaaaacatatattgatcttttatcttttgcttccttaacacataagtgctcatattgtttggtgtgcaccatcgaaatcatcttgaggatgcctgaggtccacgtgaccaactaggatcttctggcattcgagaaggcagttgaaaggcccctgacgctccactgcatcaggagtccaaaggccagccaaaagttgtgtttggtgatattactccacccagaaaggaaccagttacatataatccaagtgactggaactgttctagaaaaggcactgcatacattatggctgaatacggaggtgctgcccagtctcgcatggttgctcccagcagctttcatcactctcctaaacgcaacagaatgcctgaaccctgatctcatttattcatcactcctagagaatttccagctcactgccctccaatttgcgtatctcactcagtaaaagtactctcacctgctcggtgtttgcccagatcacacccaggagcaggagagaacaaacttgttccattttctatttttttttttttttttttttttttttgagacggagtctcgctctgtcgcccaggctggagtgcagtggcgggatctcggctcactgcaagctccgcctcccgggttcacgccattctcctgcctcagcctcccaagtagctgggactacaggcgcccgccactacgcccggctaattttttgtatttttagtagagacggggtttcaccattttagctgggatggtctcgatctcctgacctcgtgatctgcccgcctcggcctcccaaagtgctgggattacaggcgtgagccaccgcgcccggccatcttgttccattttctgttcttctattaggaagtaacttcacgtcttctatccctctcttctctacaggtgttcacgtcttaaggatgcctgaggttcaggtggccagctaggatctcccggcattattaaagacaactcctgcagctccaccctattacctgtccgaaggccaccacaaacttgtacttagtgagccttactctacgcagaaaggacacagtgacatgtagtgtaagtgactggcacctttctgagtaaggcactgcccacagcatggctgattgtgaaggtgccgccccatcccccaccattgtcccctgcatcttttatcactcccttcaacacagcaggatgcctgaatctggaacttacttattattaagtcctagagaatgtccagcccactgcccaccaactgtcatgcctgactcagtgagaaccctctcacttgctctatgtttacccagtgattgccaggaccaggtgagaacaagcttgttaccgttttctattactctattaggaacgatcttcatctcatctttctcttctttaacctgtaggtgttcacattggtaggaatgcaccactgaaatcatcttgaggatgcctgaggtccacatggccagctaggttctcctgttatcagggaaggcagcttgaggcttttgcagctctactccaacacgggtacaaaggccaccacaaatatatacatggtgagccttgctctacccagaaaggagccagtgacataaaatctacataaatggcacctttctgagtagggcattgcacacagcatggctgattgcggaagcgctgccctgtgccccaccattgtcccctgcaggttttatcattcccctcaatagaacatgatgcctgaacaatttgattcataagtcctagagaatgctcatcccactgctctccaaactgcatccctccttaagtggagacccactaatcttctccatgtttacctagatgattgacaggagcaggagagaataagcttggacatgtttccttttcttaagaagtatctttatcttctcaaacttctaaaaatggaagttttttatatatatagcatttcatgtggtttgatctccctaaagtttacacaaaaaaccctccaatacacccaccacatccttcttttctccatatattccttcattccaaatacatagaataaaaatgacaagaattgcaaaaattcctaagtgaagctaaagtacattagagatgtgaaagacagaaacttattttcttcatccatcctttgagaggaaactacacttttaactcataacttttgaattttcctacaggccttttgtgctctgattttccctgaaataatctgaatcagagggaggttgtaagacaatatgtggggagatacctgaccccaatccagttctcctggccatgattggaaccttgcactcactcccaaccatgaaattaccaatacctacgtgatcattcatctattattctgctacaaagcgtgacacaaaggtagcaaagtttcatatcctttattcaccaaaacaaacgtaattgttgataggagcagcagagaagaaatatgcccaatatctgggacccttagtggtctagaaaagctgtgagagcaaacttctgaaaaatgatgcctattttgacccagttgtgccagtatttatttcttgcattggccttaggatgtttatctcacacagatgatgataagctgtttaccacgcaagaacaagcactgaatacaccagttggcatggagtcagagactactatgtatctccttatatttcattgccttatttcataagttatgtgaaaaaataaaggtaaatacaaataaaaggacaagagcaacaacaataatttatatttctgaaatgctcacttacaccacatcaatgtacttgggaattttatgtgaatcttctcatatgtcctcacaatcttttacatactgacacggatttgtcatgaagattaatgaaaaaacatgtgaagatacgcttggatcctcaaatataacacaggagatattatgcttatggcaacataaaaggcacatctagagaagaaaaattacctatgaaatttcctatttacaacctacttaaccatctataagtatgtgggtagttctatcacgtataattcaccagcgctattaactgtctttctttacaccaaatggtcccgagatcttgataattctgatgcatgagagagcaatacag

SEQ ID NO: 1888973 - DNA, 4001 bp, Homo sapiens
actatcatgggtccaaaggccactacaaacttatacttggtgtgccttactctacctggaaaggaactagtgacatataatctgggcgactgacacatttctgggcagggcactgcacacagcatggctgattgtggaggtactgccctatcttgcacagttataccctacagctttcaccactcccctcaacacagcatggcgcctgaaccccgaacttaacttattcataagtcccaaagaatacccagctcattgcccttcaacttgcatgcttccttcagtgagtaccctctcatctgctttgtttagccagataattaccaagaccagtagtgaacacactttttccagatttctcctcttctacaaaacatatattgatcttttatcttttgcttccttaacacataagtgctcatattgtttggtgtgcaccatcgaaatcatcttgaggatgcctgaggtccacgtgaccaactaggatcttctggcattcgagaaggcagttgaaaggcccctgacgctccactgcatcaggagtccaaaggccagccaaaagttgtgtttggtgatattactccacccagaaaggaaccagttacatataatccaagtgactggaactgttctagaaaaggcactgcatacattatggctgaatacggaggtgctgcccagtctcgcatggttgctcccagcagctttcatcactctcctaaacgcaacagaatgcctgaaccctgatctcatttattcatcactcctagagaatttccagctcactgccctccaatttgcgtatctcactcagtaaaagtactctcacctgctcggtgtttgcccagatcacacccaggagcaggagagaacaaacttgttccattttctatttttttttttttttttttttttttttgagacggagtctcgctctgtcgcccaggctggagtgcagtggcgggatctcggctcactgcaagctccgcctcccgggttcacgccattctcctgcctcagcctcccaagtagctgggactacaggcgcccgccactacgcccggctaattttttgtatttttagtagagacggggtttcaccattttagctgggatggtctcgatctcctgacctcgtgatctgcccgcctcggcctcccaaagtgctgggattacaggcgtgagccaccgcgcccggccatcttgttccattttctgttcttctattaggaagtaacttcacgtcttctatccctctcttctctacaggtgttcacgtcttaaggatgcctgaggttcaggtggccagctaggatctcccggcattattaaagacaactcctgcagctccaccctattacctgtccgaaggccaccacaaacttgtacttagtgagccttactctacgcagaaaggacacagtgacatgtagtgtaagtgactggcacctttctgagtaaggcactgcccacagcatggctgattgtgaaggtgccgccccatcccccaccattgtcccctgcatcttttatcactcccttcaacacagcaggatgcctgaatctggaacttacttattattaagtcctagagaatgtccagcccactgcccaccaactgtcatgcctgactcagtgagaaccctctcacttgctctatgtttacccagtgattgccaggaccaggtgagaacaagcttgttaccgttttctattactctattaggaacgatcttcatctcatctttctcttctttaacctgtaggtgttcacattggtaggaatgcaccactgaaatcatcttgaggatgcctgaggtccacatggccagctaggttctcctgttatcagggaaggcagcttgaggcttttgcagctctactccaacacgggtacaaaggccaccacaaatatatacatggtgagccttgctctacccagaaaggagccagtgacataaaatctacataaatggcacctttctgagtagggcattgcacacagcatggctgattgcggaagcgctgccctgtgccccaccattgtcccctgcaggttttatcattcccctcaatagaacatgatgcctgaacaatttgattcataagtcctagagaatgctcatcccactgctctccaaactgcatccctccttaagtggagacccactaatcttctccatgtttacctagatgattgacaggagcaggagagaataagcttggacatgtttccttttcttaagaagtatctttatcttctcaaacttctaaaaatggaagttttttatatatatagcatttcatgtggtttgatctccctaaagtttacacaaaaaaccctccaatacacccaccacatccttcttttctccatatattccttcattccaaatacatagaataaaaatgacaagaattgcaaaaattcctaagtgaagctaaagtacattagagatgtgaaagacagaaacttattttcttcatccatcctttgagaggaaactacacttttaactcataacttttgaattttcctacaggccttttgtgctctgattttccctgaaataatctgaatcagagggaggttgtaagacaatatgtggggagatacctgaccccaatccagttctcctggccatgattggaaccttgcactcactcccaaccatgaaattaccaatacctacgtgatcattcatctattattctgctacaaagcgtgacacaaaggtagcaaagtttcatatcctttattcaccaaaacaaacgtaattgttgataggagcagcagagaagaaatatgcccaatatctgggacccttagtggtctagaaaagctgtgagagcaaacttctgaaaaatgatgcctattttgacccagttgtgccagtatttatttcttgcattggccttaggatgtttatctcacacagatgatgataagctgtttaccacgcaagaacaagcactgaatacaccagttggcatggagtcagagactactatgtatctccttatatttcattgccttatttcataagttatgtgaaaaaataaaggtaaatacaaataaaaggacaagagcaacaacaataatttatatttctgaaatgctcacttacaccacatcaatgtacttgggaattttatgtgaatcttctcatatgtcctcacaatcttttacatactgacacggatttgtcatgaagattaatgaaaaaacatgtgaagatacgcttggatcctcaaatataacacaggagatattatgcttatggcaacataaaaggcacatctagagaagaaaaattacctatgaaatttcctatttacaacctacttaaccatctataagtatgtgggtagttctatcacgtataattcaccagcgctattaactgtctttctttacaccaaatggtcccgagatcttgataattctgatgcatgagagagcaatacaggaacagctggcagcaggtactttcagatttatgatgggaaggcagagttctcctaagtgcctcgcttgggacatactgactgtgatgatgtggaatgagaatttctttaatacagcaatgcattaaaaatggagatatcactgtctatctagattgattaaaacattaaaaccactagatttggccaggcgcggtggctcacgcctgtaatcccagcactttgggaggctgaggtgggcggatcacaaggtcaggagatcaagaccatcctggctaacacgatgaaaccccgtctctactaaaaaaaatacaaaaaattagcccggcgtggtggcgggtgcctgtagtcccagctacacaggaggctgtggtgggagaatggtgtgaacccatgaggcggagcttgcagtgagcagagatgggctactgcactccagcctgggtggtagagcgagactccatctcaaaaaaaaaaaaaaaccaaaaaaacccaaaacactagattagtaaggttgggagaaaacaaagaga

SEQ ID NO: 1888974 - DNA, 4001 bp, Homo sapiens
ccacttccatcaccagtctgaaggccatcacaaacttgtacttactctacccagaaaggacccagtgacatgtaatctaagtgactggcacatttctgagtagggaacttcccacagcatggctaattgtggagatgctgccccatcttgcatgttctctccctgtagctttcatcactcctccgagcatagcatgatgcctgaaccctgaacttatttattcattagtcctagagaatgcccaagcccactaccctccaacttgcatgtatgcctcactgaggaccctctcacttgctctatgtttatctggatgatttccaggaccaggagagaacaagtttgttcctgatttcgcttcttcttttgggaaatatctttatcttctgtatcccgtaggtgttcacattgtagcaaacgaccatgaaacttattttgaggatgactgagttctagctaaccaccaaggatctcctgagatcaatgaggacatctcaaggtgcctgtaactctataccctcaccagtctgagggccaccacaaacttgtacttcgtgactcttattccacccagagaaaaaaccaattacatgtaatctaagttactggcactctattagtcaattgtcatgctgctaataaagacataccaaagactgggtaatttctattgaaaaaagaggtttaattgactcacagttcagcatggctggggaaacctcaggaaacttgcaattacggtagaaggggaagcaaacacgtccttctttacatggcggcaggaatgagaagtgttgagcaaagcgggtgaaagccccttataaaaccatcagatcttgtgagaactcactatcatgagatcagcagcatgggagtaaccgcccccatgattcaattacctcccactgggtccctcccatgacacatggggattatgggaactatgattcaaggtgagatttgggtggggacacagccaaaccatatcagacacctttctgggaatagccctgaacacagcatggtcgaaaggggaagtgctgccccatcttgcattttcataccctgcagctttcatcactcctctgagcacggtatgatgcctgaatcctgaacttatttattcatcagttcaaaataatgcccagcccacaagcccccaacttgcatgtctccctcagtgccctctcacctgctctatgtttacctggatgattgcccagaccaggagaaaacaagcttgttcccgttttctattcttcaactaggaagtatcttcatctcttctatcactttcttctttaacatgatggagtctacatcattaggaatgcaccagtagaattatcttgaggatgcctgaggtccatgtggccaaataggatctcctggcatcagggaaggcagctcaaggcccttggaactccacatcaggggtctacaggcaactatatgcttgtacttggtaagccttagtccactcagagaggaactagttacatataatctaagtgactggcacctttctggaacatattatggacgaatggggaggggctactccatcgtgcaatgtgaatccccatcctagagaatgtccagcccactgccctccatcatgtatgtttccctcagcaagagcactctcacttggcttcatgtttacccagatggttgccaggaccacgagagaacaagcttgtttttctgttcttctattaggaagtatcttcacgtcttctatccttctcttctctatcatataggtattctcattattaggaatgaaccactgaaatcatctagaggatgtctgaggttcaggtggccagctaggatctcctggcatcattgaagacaacttagggctccagcaactccaactcatcgcctgtctgaagaccaccacacacttgtacttggtaagccctactccactcagaaaggaaacagtgacatgtaatctaagtgactggcacctttctgaatagggcactgcccacagcacgactgatagtggaggtgctgccccatcacccaccatcacgcactgcaggtttcatcactcccctcaacacagcaggctgcctgagccctgaacacatttattaagtcctagagaagttccagcccactgccctccaacttggcatgcctgcctcaatgaagaccttctcacttgatttatgtttccctggatgatggccaagacgagaagaaaaaaaatcttgttcccgttctctcttcttcttttaggaagtatctttatctcttctattattaccttatctaacctgtaggtgctcacattgttagaaatggatcattaaaatcatcttgaggatccctgagttccaggtggcttccaaatctctcctgggatcaatgaaggcagttgaaggtgcttgcaggtctgtctcctcaccaatctgaacgccatcacaaaattgtacctggagaatcttgctctacccagaaaggagctggaaacatctaatctaagtgactgaccccttttggagtagggcactgcccacaacatggctaattgtgggggtgctgtcccatcttgcatgttctccccctgtagcttccatcactcctgagcacagcatgatgcctgaaccctgaatttatttattcaacagtcctggatcatgtctaacccactgccctccaatgtacatgcctccctaaatgaggaacccctcacctgctctatgtttacctgggtgatcgccaagaccaggagaaagcaagattgttctcattctatttttctagtaggaattatcttcatcttgtctttctcatctataacctgcatgtgttcatgttgttagggacagacgatttagaatatctcgacgatgcctgaggtccacatggccaactaaggtctcctggtatcaggaaaggtacctcaaggctcttgaaactccaccctatcatgggtccaaaggccactacaaacttatacttgttgagccttacactaccaaggaagaaaccagtgatgtataatctaggaaactggcacatttctaagtaggacactgcacacagcatgtctgatagcggaggtgctggcccatcttgcaaggtcaacccccgtccaggagaatgtccagtctgctgccctccatgacgcatgtctcactcaatgagacatgctcactgctccatatttgcccagatggttgccaggaccatgagagaacaagctcgttttctgttcttctattaggaagtatcttcatttcttctatctttctattctctgaaaaataggtatttccattgttagaaatgcatcattgaaatcaccttgagaacacctaaggttcaggtggccagctaggatctcccggccttactgaagacaactaaagcctccagcaactccactgcatcacctgtccgaaggtcaccatgaacttgtacttggtaagacttactctactcagaaagggaatagttacatgtaatctaagcaactgatgcctttccaagtagggcacttcccacagcatgtctgattgtagaggtgctgccccatcatccaccatcgtgcactgcagctttcatcaccccactcaacacagcaggatgcctgaaccctgaacttaatcttaattcctagagaatttccagcccactgccctccaacttggcatgcctgcctcagtgacgaccttcttatctgatttatgttcacctggatgatggccaagacaagaaaagattgttcctgttttctccttttaggaagtaactatcttttctgtcattgccttctctaatttgtaggtgctcacgttgttagaaatgatcatcttgacgatgcctgaattccaggtggtttccaaggttctcctgggatcaatgaaggcagctcaagttgcttgcaggtctaccccctcaccagtctgaggaccaccacaaaagtgtacttggtgagccttccttcacccaaagaggtgtcagtcacatgtaatcta

SEQ ID NO: 1888975 - DNA, 4001 bp, Homo sapiens
taagtctcttttcattaagatttcacttcatcactaacaattaaaatccatccccccagccgccaccaccagagaacttacttaacccacatatccttgaggtagaccaatgttatcactgtatttcccctaatgaggaaattgaagccttaggcaactagctcaagattaaaatgcaattcagagagagttcctcttactgattaaaatggactgatgttatgaggaaaaatcaaaagggtttcaaaattagaaaattccatggcaccaggaagtaagaatgacacatactgataccatcttttagtttggcagcacctttttgatgagaactaaatgttcatgttggcagacagtaaaactaccacaagcctcgtttcttcatttgccaaatacatgatgttaaagattaacattaaaatatgaaacatagaactggaaagcaagccagtccctgcttcgagttcttttaattttatgaagtttaaaataaacaacttcctttgttaactttgtcctagaagctgtcgttagctgttttcgagcagtggttctgcaagtatggtgtcttgaccagcagcatcagctcctagggaaaggttagaaatgcaattccttacctgtaatgccagcactttgggaggccaaggtgggtggatctcttgaggtcaggagttcgagaccagcctgaccaacatggtgaaaccccgtctctactaaaagtacagaattagccaagcgtggtggcgcacgcctgtaatcccagctactcaggaggctgaggcaggagaatcacttcaacccggaaggtggaggttgtggtgaatgagagatcgggccattgcactccagtctgggcaacaagagcgaaactccgtctcaaaaagaaaaaaataaagaaatgcaattccttaggccccatccagacctattgaatgaatctctggagatggggttggctggctgtgtcttagtaagtgctaaagttttaagaaccactagaggatccaaataacttttggtgttcagtctcaaaccactaattagctgcgcatgagaaatttctgctttaggttagtcaccctatggagcccccgaaccctaaatattaacagtaggcccacatccaggtttccatctgctagactccaaagcaaggcagcagccatccctctcagtagccctgccaccaaatcctcttctccgagaaccccaaaacagagtttgattgacaagttcattcttctctcctgtcagacctcaaaatgtgcccagttccttaaaggtatgtgtcccattggtttacaactcttcattcccttcctaagaatgagcacgtgtactaaaacaaaattagtacatgtcatccaaatattgtcagggtaataaaattcctaaaattaggcatcttggtgctttatgtagatgcaaacttgaaaagcagctatgtccaagttttcctttaggatcctcccaagagatattttacaaactcctctagcattgctaattattttttttaaaaaaaaaagagtcattttttcagatctataaatttcatttattttgaggttcattcacattcagtaacaatctgatcattcaccaaagttccaaaacacatactttataaattagctatcatagtttttagaaatccaaatatatttcaaattattttttaatagcagcaactagagaaaggattttttaccatctagcttactgtagcgctgatcaggaatgtcgccaacaaaggtcctgcggtttacagatggataccgtgcaatttttctcctatgatactcatcaaaattgcatcgtgatccacccgacaacagcaaaacagatcattttacaatgactaaatatcagaacttacggcttttaaaagttaaaataagaagacgataaaaatcctcctttcttccacaggccgggacaagtgcaatactttatatagaacacaagtaatgcaacaaatccccacccagggatgaatgggcatgagtgctggagatacgcatgaaggtgtgttcacacagacgtaggaagcacacattatcacaatcagttttgcatggatttgcacagccacatatacatatatacgctgaaatgcaaacctgcaaaactaattgtaagtagcaatgtctttgaatattctctccatcaacaagagatttgttatccaagagtactggaagtgcccatactacagtagagtcatgccaaaactacctgcactatgagcactttggtactactaggacccaatcttatcctctgtacacaactgtacactgcacagtccccaccatctgttcccaacaaacaataaaaaggcaaaaaacaaaccactgaaatgtgtcctattcaaattactactcaaggcatacttttaaaatgctgtatattaggcagcctgtgccagaaggggcatttagggcagtagattctaagctgcttcactaactgcactagatgcaccttaacacaagagacacattataagaagcagctcaaaagcatcaactacttaattatgcacaaactacagttctcagtagccattgactaaatcaccatggtaatgtaagaagtgcttacattgcagtagatctcaaaaagctacctgcactgtaagcacttttacatggccaaggcctattcctgtagcaaaattttaagtcttccaggagctcttcttttccgtcctcacagatccatgcagactcacctggttaaaacaacaaaacaaacacacacatattagaaactaaacaagtaaactactagttaatattcctgaaacaggctttcctttggcttacagagtctaagctaggttttgtggtttcaaccaaatcctgagaaatattaataatctcaattatttacacagaattgaacacgaataacactggcaactgcaaaaagtccaattcttatgtataagcagattttggactccccctctccatctaagaaaatttgatatctgcatctcagtaatttgcaggcacattctatccaccctgattttataagaggaggacctagagaaaggagcatgtaaaacccaggatgagtattcgagtcttcagatcattcagagcttttgggctccatacggaaagtgactgttagattaaatgaatattcccagcccccaccccattaatagaaaatgagagaaattttagagctggtttaagaaacacagccttacagtcttcacataatgcacagatggctgagagatgtcacattttgatctatttcaaagggctctacttctgtttaaacatttatggacccattttctccattaaaccaaagtaggcagattagctcttcttcccttcatgtcattatcttccataagaaaaccttctcccatttccaagtgcttattttacctaagaacatacagcaaggaagtgagcctctatgtgaaaaaggctcacagggtcccctatctcttccatgatggggtaacttttgtttaaaagaaaaacaaaaacgtttgggacagaatctgtaatacgttaaacgagtgagggaattttaaatgttgaactttcgtcacgatatcttatgccactaaatgagtctttagaagtctttacaaactaaactgatttataaaacttatacatcaatctggaatcaattttctattagggaagaatggatttagtatagaaatgagaaaaataacatttttccccttaaattgggtttctacacctgtgaagatttcttttccattaaaaaaaaaatactccaaacttgactcaaaatgcatagtatttgccaacccaacctggccaaactgagccccacagccatcagacagggcgcccttctagttactaccttttgctaattagcggttcatctggcatccctcgcgcacgctgggcagtcactctccaatccccttaaattgcaaataataataataataataaggaaaagaaagaaagaagtccttc

SEQ ID NO: 1888976 - DNA, 4001 bp, Homo sapiens
gtgaactcatgtgtggtaaaataatctcaccagtgactaattttcactgttgtatacttgatttaacttggaattgtttctgataattttatgacactgtgagagcaaggagataatactgcatctgccacttgctgctgtgtgatttaaggcaagtcctttcacctttttgagatccagtttcttcatctataaaatggggatattcattcattcaatcactatttactgaatatcggttgagtaaagcacctaggacatattcacatacacctcacaaggtcatggtggggactaagcaagatggagtatgtggtatgtggctcatagtcaacacccaatacatgttgttgttgctgttagttttagtctatgaacaattttaagcatcaagttatcagtaattctgagactcacaataaacaaatgtagaaactattaacaagtactcaggaaacaccacaatccttgcctttcataagttagaaggccagcagaactcatttccttgggcagggacttatgtgatgcctgccttggctatgctaaggcttttgaaccagctctaaatgaatctcctcatggaggcatggccaattaatcaccagggttggtttttgttttgtttgtctctcacacgaaggcatcaaacagaataatttttactacattggaataatttttactacattactacattttcttactgtttccttgttaaatgctcttttattgtttccagcattcactcattcatttattcaacaaatttgtataccactgtgcaaggtgctagggatacagtggtatacctctcaaagtctcagtcctcatggggttgacattctagtggggtctatagattgccctcacccctacttcacaccagactgtcaaatgcctgagatcaggggctgtggtagtggctcttcctttggatcctctctatttttattttttatggagatgagggtcttgctatgttgcccaggctagtctctaactcctgggctcaagtgttcctcccgccttggcctcacaaagtgctgggattacatgtgtgaggcaccacacccagcttgagtcctctcttaaacacagcacacagagcacagcttggggaacacaggatgccctccaaaaagaattcttgatggtttaatgtatgccaacgcttagagtaatgtgccagccattattctaagcattggtatacattatttcatttactcctcacacctcacccaatgaggtgggcactattttatgcttatttgacaaaaatgaagcaactggggcatgaagtggttaagaaatgtgaccaggttcctgaagcaagtaaataataaagctggcaattgaccctgaacccaggtcatgaagatcctcctgtcattccacccagattgtcctcttttgtaagttcccactgacaccactttcaaattgagtgtggagctcagagtcctggcctcatgcctcagttgacattttcactgactgcagagtcctggggtggccctatgtactaggctgaaaactgaacatctgggacacagcaagctaatcctcatcctcatgaatttcttaatttttctgggtcaccttggctatttcagttaagtccagctcaggttaaaaaaaaagaaataaataaaagaatactaggctgaaaactgaacatctgggacatagcaagctaatcctcatcctcatgaatttcttaatttttctgagtcaccttggctacttcagttaagtcaaactcaggttaaaaaaaaaagaaagaaagaaaagaaaaaagaaactaaggagagtttcttctatagcaaaataaaattttacaagataggaagtgcatatactcttttttgaggctaaaatgaaacaaattctatctatgaaaacactgagtgatagaaataaggctcccgtccattactggagactctgggttttatactaccagtgtctccagtagtagacagaagccttatttctcaagttcgttctcaggatacagacacacaccatcaaaggctggcccagatacctactttcatttggaaggctggtactggcagatccacgagatacatatagtttcttatctagaaaagaagaagaaaacattattggaactgaaatttctaggactaggttagagagtgcccagtagcattccaggggccccacattgcctggccctaagtttatgaatatctagcatattctctcatatcagatgctacaaaaactgagaagcttctgttttaaaggtccaccaccttccaaggcagtgttcctgattaagggtcactgacttcctcaacagatcctggacttccagtcaccaattaatacaactcatgtcaacatgagtagagcatgaagaccttggtgataaccatttgtttgtgaatgtgtcttgagatttcaggaataggacaatgcctgcattagtttcaccatgatgtgccttgcttacagtagatgctcactaaatatttgctgaattggacttgaactgtaaagagttgctaagtttggaaggtgatgatttcagccatctgtgttctaacctactgtcgaaacagggctttgctgtgtgtatgcacaggcatatatacaagcacagttggcctaattttccctgtgaatccagtaggaaaggacttttgaaaaagagtagaggggtaggaaatttcacaggtttcccaaacatgacacttctatgatttactccttaagtacattcctaatcaaattctggaaatgacagagtggtattttaatgggaaatttgttttccacattagaatagaacacagtgcctgacttaggtaggctatgctgaacaggccttttgtttactatatgcttagttcagtgtaaagatggcttctagtaatttctttcaggcatggaacactagaaccacactatgtatggacaaggaagctgcaaaagaaaattcgtccagagtacagaatggcagaggatgcagacttggttccatgaaactataaaatatatatttataagtgtttcatattaaaggcaaatcttgcaacagagtaggttgattttttggtggaagtataattaatgccaattcttccccgtccttttacaaagaagggagccttgttttctgatggatattttgcatctggtaggcgcaaattaaatatttgctgggtgaatgagtgaatgaagaggtgagtaagccttaagggtgtttttagttcaggggaggggtggtggtcagggagcaggaacccaagggaaaccaagcaggaggatcccagagtgcaggagcaagccaaggacagtcaggcactgttaggtctccaagcagcaatggggctgcctcctacagtcgctttgaattttaatgtgtggagcagatggttggtatagattgcccttgttgtttgcctggagcctgacatcactgcaagttgccaacctgtttagaggctacagtttgagcctgtaggtacgtcacagagctctgttctgcaaatggcttatttaattgctcccaatgaggtaaacacaggaccctgcgatattacgcagcagcccatcatttttctaaggtaaggccaagttgacaggctagggtgagtacttcgggccaagtccatctggctggctatctatgtaaccctttagctattaaactgtgaatgtcaatgaagcctagtgaagatgtatggaacatttaagcagaacatcccttccctcagcagccctatgtccagagtggcagcaattagtcttggcacctcatctcatgccaactcactctcaaccacaaccaatcagaggcacccctccaagtatctgtaggcatttccttacagtgaactgagccgggaggcaggttgaagagcaaccctgtgcttccagctatctggccagggttgccattctccctggcggcagattcctgaggacgggctaggcatctgtcttgctggaggagacttagg

SEQ ID NO: 1888977 - DNA, 4001 bp, Homo sapiens
catacccagctggagagttgtttttaaataataagcctggggtgatagcccagaaacagagtaattgcctcaatgaactgttggtatcatcaccaatatcattagacattcaactatcaccagttcaggacctcaacttcacttaagaaagtgaatgcgcaagacgagatcttattatttgagaagttgaactcctactatttctctcaagcaaaagagcaaagagaagctacaaagacatcctttcttccctcttgtttcatcctccccaaatgttgaaattctactcacttatagtgggagctggggataactccatctgagttgtttctgcttccccacttggccttgtgggacccaattcctctggctctacaggcatcaatagctgtgtagagctgcccccttctccagctggagactgcagctcctgaggaacctctcccaaagctggtggggttgggagtgttggttgctgttgtgaggattgcagagtgccaagggtctccttggactcagatgtagctgcatcagttgaagatggggttgttgggtagctgtcaggcataggcgtcccatctttctcggaaagaacaataatagtggttaaggggcaaccagccaatgatgaggggagccaccccaatcagcaaatgtggcctgataagtatcccacccagccagtgatcatccccacaacaaaaatactccaaggaacatctctggtctggtatactaaggatgaaggttaaggcacagtgctatctctgtcccaagaatgcaagaactggagctctgactctgtggattctaagaataaaatcctttctgtgccctgcaggtggaagggggaagatttcaggccatatagggtgaggctaaatgtctctgacctataggtacacagaaaatctaactaccaaaatcctattgatcctcccacttcatctatttggagcaagaaatggtcagaatttcgttcaaaactctatttgttttttttggagacagggtctcactgttgcccaggctggagtgtagtggcacaatcatggctcactgcagccttcacctcccgggctcaggtgatcttcccacctcagcctcccaagtagctgagactataggcatgtgccaccatacctgactaattttttgtatatttagtagagacagggtcttgccatgttgcccaggctggtctcaaactcctaagctctagcaatccacccacctcggcctcccaaagtgctgggattacaggcgtgagccactgcgtccagcccttcaaaatcttttttttttttttttttttcctgagacagagtcttgctctgttgcccaggctggagtgcagtggcgtgttctcagctcactgaagcctccacttcctgggttcaagcaattctcctgcctcagcctcctgagtagctgggaccacaggcgagtgtcaccaagcctggctaatttttgtattttgagtagaggcggggtttcgccgtgttggccaggttggtctcgaactcctgacctcaggtgatccacccgcctcggcctcccaaaaatgctgggattacaggcatgaaccactgcgcctggcccaaaattcttaaagtatgctttccattcccttgcacacattcctgttctattactaataaaatgcaatcattacacagttgaagaatagcaaaatgagttcatgcccaaaggtaaaataattatatgctccaattaatgaaagacaagtcactttataatgacatctgcctcaccctaaacaccatctgtccccttccatgtctcttttcttccagtccaaattatccaaggaacatctacaactttgtctgatggaggcaacactgctaagactaagtgtgaatatgccacacaccagggaaagtagtaagttgtatagttatcttctaattggggcctaatatccctaccccacaacaatacaacttactacctcaccctggcatgagcagaatcctctaataagggcagcaggcaaaaggccattttacatggtgacagactcttttaaagatcttttgctagattaagggtaccaaggcatctaccctacttcactgctttaaaaaatattgtgcaggctttggtacaatcattttccaactcaagtgcgaaaggagacaggtgtagggaggcagaagaatgttctgaggaaatatgggtgggggagacatatgatatcacatgaaccaactgatagaatcacaaaatggctactgaccattgttaagaagatcagagggaataggaaacatacggcagtcataccactaagcccagagagctaccttcatgaacagcacactatccaagacaatgttcctagacttttagattccatggaccaataaaatttaattaaaaaaagaacaaaaagtagagactaatgtaggggttgccaacttttagtttagccatgtaagaaaaaacatccaatcaacatcatttaataaaaatattttggtaccacagaattaggaatatgatctctaaatacaaaaacagccttttaaatggaataaattcagctttatgaaaaaggcattaaagctccttgattttgttcgtttccacagaggactggcatttgagaaccactgtcatcagttattctcatgaagtgccacaccatggtggtcatcaaaggaccagccacttcaaagatgtacatgaacatgctgtttcagaggacagagttgcagtcaggaaatgaacaagacacatgacctcattacccatgccagaacaaagtagataataaccagaacaagaacctgaacagagccagtcggagaagaagtgtaccaccgtgggaaagacagtagactgtatagttatctccaagatggggtatgaccctaaaactatacaatctactacctcatcccacagagcaccagtgtccatcttcagcctatgtgggccagctactcggaactatcaggataaagaagcaaccaattgattagtaagaagggagaaagggaaggagagttacctgagagattctgttcagtggagtcatttgacttagatgcagtacactgcaaaaagaagggatagaccaatgtgggactttgcaagcacctaagatagaggtcaactgtaatagtcaccatcctccacccagaccatctaggagttcagtgatctaatggagaatgctttggccatgtgaccaaaggaaggtgatcatttcactgtgcaaatatatgaccaatttctctatacatactcaggttcaagaattgtttggggctgagggggaaataaatatggaaggaaaggataataaaaaccccttagggatgggcacgatcatgatcattctagcaagaatttcttggtttcatctatgtattttttcccttcatggggcttattttttattttgtccactctagtcttttcagtcacaggctaggttcacttatttttcatcctatatcaagtttgaaacaatgtgtgtattaggtaaaaagttctatataaagatatttgttagatcaaccttgttattttaactgaacacttcactacccttatttttaatctacctgattccttaactgctgagtagggtatactaaagtctttcactctcaagtcttatttctttgtatttctatcagtttttcccccttttatatcaagtgatacactgtaatgtataattctatcaacatttactcagacatttaaaagatctctgtctgaggtcccagaagtttcagaaaaaagtaggtaacttccttctaaaccaaaattgtattagtgattttatacatgtgagccctagaaaaaatgacatgtggtgatggggttcagagtacaaacattttctctgatctgacacctaggctgatcttactcaaatgacggaatggggtcatctcggtaagattccccacactggcagttcaccgacagaaatggaagtgggcgactaagagcatgga

SEQ ID NO: 1888978 - DNA, 4001 bp, Homo sapiens
atcctcccacttcatctatttggagcaagaaatggtcagaatttcgttcaaaactctatttgttttttttggagacagggtctcactgttgcccaggctggagtgtagtggcacaatcatggctcactgcagccttcacctcccgggctcaggtgatcttcccacctcagcctcccaagtagctgagactataggcatgtgccaccatacctgactaattttttgtatatttagtagagacagggtcttgccatgttgcccaggctggtctcaaactcctaagctctagcaatccacccacctcggcctcccaaagtgctgggattacaggcgtgagccactgcgtccagcccttcaaaatcttttttttttttttttttttcctgagacagagtcttgctctgttgcccaggctggagtgcagtggcgtgttctcagctcactgaagcctccacttcctgggttcaagcaattctcctgcctcagcctcctgagtagctgggaccacaggcgagtgtcaccaagcctggctaatttttgtattttgagtagaggcggggtttcgccgtgttggccaggttggtctcgaactcctgacctcaggtgatccacccgcctcggcctcccaaaaatgctgggattacaggcatgaaccactgcgcctggcccaaaattcttaaagtatgctttccattcccttgcacacattcctgttctattactaataaaatgcaatcattacacagttgaagaatagcaaaatgagttcatgcccaaaggtaaaataattatatgctccaattaatgaaagacaagtcactttataatgacatctgcctcaccctaaacaccatctgtccccttccatgtctcttttcttccagtccaaattatccaaggaacatctacaactttgtctgatggaggcaacactgctaagactaagtgtgaatatgccacacaccagggaaagtagtaagttgtatagttatcttctaattggggcctaatatccctaccccacaacaatacaacttactacctcaccctggcatgagcagaatcctctaataagggcagcaggcaaaaggccattttacatggtgacagactcttttaaagatcttttgctagattaagggtaccaaggcatctaccctacttcactgctttaaaaaatattgtgcaggctttggtacaatcattttccaactcaagtgcgaaaggagacaggtgtagggaggcagaagaatgttctgaggaaatatgggtgggggagacatatgatatcacatgaaccaactgatagaatcacaaaatggctactgaccattgttaagaagatcagagggaataggaaacatacggcagtcataccactaagcccagagagctaccttcatgaacagcacactatccaagacaatgttcctagacttttagattccatggaccaataaaatttaattaaaaaaagaacaaaaagtagagactaatgtaggggttgccaacttttagtttagccatgtaagaaaaaacatccaatcaacatcatttaataaaaatattttggtaccacagaattaggaatatgatctctaaatacaaaaacagccttttaaatggaataaattcagctttatgaaaaaggcattaaagctccttgattttgttcgtttccacagaggactggcatttgagaaccactgtcatcagttattctcatgaagtgccacaccatggtggtcatcaaaggaccagccacttcaaagatgtacatgaacatgctgtttcagaggacagagttgcagtcaggaaatgaacaagacacatgacctcattacccatgccagaacaaagtagataataaccagaacaagaacctgaacagagccagtcggagaagaagtgtaccaccgtgggaaagacagtagactgtatagttatctccaagatggggtatgaccctaaaactatacaatctactacctcatcccacagagcaccagtgtccatcttcagcctatgtgggccagctactcggaactatcaggataaagaagcaaccaattgattagtaagaagggagaaagggaaggagagttacctgagagattctgttcagtggagtcatttgacttagatgcagtacactgcaaaaagaagggatagaccaatgtgggactttgcaagcacctaagatagaggtcaactgtaatagtcaccatcctccacccagaccatctaggagttcagtgatctaatggagaatgctttggccatgtgaccaaaggaaggtgatcatttcactgtgcaaatatatgaccaatttctctatacatactcaggttcaagaattgtttggggctgagggggaaataaatatggaaggaaaggataataaaaaccccttagggatgggcacgatcatgatcattctagcaagaatttcttggtttcatctatgtattttttcccttcatggggcttattttttattttgtccactctagtcttttcagtcacaggctaggttcacttatttttcatcctatatcaagtttgaaacaatgtgtgtattaggtaaaaagttctatataaagatatttgttagatcaaccttgttattttaactgaacacttcactacccttatttttaatctacctgattccttaactgctgagtagggtatactaaagtctttcactctcaagtcttatttctttgtatttctatcagtttttcccccttttatatcaagtgatacactgtaatgtataattctatcaacatttactcagacatttaaaagatctctgtctgaggtcccagaagtttcagaaaaaagtaggtaacttccttctaaaccaaaattgtattagtgattttatacatgtgagccctagaaaaaatgacatgtggtgatggggttcagagtacaaacattttctctgatctgacacctaggctgatcttactcaaatgacggaatggggtcatctcggtaagattccccacactggcagttcaccgacagaaatggaagtgggcgactaagagcatggacttagataaggtttttctccttgtcttgatgctgtccttggcggtagagactatgcagtgtgactgttgagtgagaagccattctgcttctggctccagtttttcccttgacacttgagaaatctcccctctaggtttgaattctttcccctaaaaaccaggtcaatgtatggtgaatttgaaataaaaaatttcccaggttcaacgtgaacgttctaggattcttcagtgattcctggtgccatgtgtatgccaaaaccacattacggcagacacagtcaaagatgaatcctcccagcccttgggaatcacctgtgcactctgatccctgttctccttatcttctttgcctttatcagttatctttgtttcttcctcagccagttgtttcctgcgcttctctcgcctttcttccagctcctcatccctcaggaattccaggtgattgacaatggacactttaaccactgtttcaaagaggcaaaaatcaaaggctgctctggtggggtcagggaggaagccaagaggcagagcttgtagccacagagaaccagggaaacaactctccacacgtttgccctagctctggaaggctcactattgccctgataaccaagctgccacgcacctgaaacacagtcatgcatgctctcagcatcgagaactttgcattcttctgtccagcgggtcagggctgtggggatgctggacagggttcctgtagggacagcaaaggggaatgagattcttggccttgtcaagcattaactgatccaccgatccaaaaattgcagtatttccctaaaaggacccaaggtctatcacaatgtttagaacataacaagtacctagagacaataaagtttttgttgcccatggctaagtcactgagtggttctggctcctataaaatgggggttttctatagggcag

SEQ ID NO: 1888979 - DNA, 4001 bp, Homo sapiens
ataatttgacatatctacacattagtttttaatctgtaaaataggactgataatatagagggtgtctgaaaacatatactgtgcatcatttattattttgctttacattctgtagcaccctctagtggtgtgtacaaaaatatgcattgcatttctactctccaaagcagtggctctcaaacttcagtgtgtgctggaatcactgggatagtttgtaataacacagattactaaaccccaccctgcgaacttctgattcattaagtttgaggtgggacctgagaatccgaatttctgacaacttttcaggtgacgctgatgtttctggtacatccaggaaacacaccttgggaaccactgctctaaaaaaatccctcctgtgtggtgtacaagtatataagatagataattgaaaggggtatgatttttgttgtttgactttgatccagtagtgctcatctaataaggacttggtgatgaataaaaaaatcaacgtgaacgatataacacagcatctaaaatatagaaagcatacaaaaaaactgaggatcacaaaacataaatcatttgcccagggtactgagactagtaagtggtggaatgaggtttacaattaggtctctttctcttactccaaagacacaataaagtttaccaataccactacagaaaatagggtgcaaaaacacatatctgatacaaatttcaagagaaaaggaaaatcagttttcaataccagggtccaggttttactgatgagttcttatctatctttactgacggaacagctatctgtattttcagtttgggtgagttgcgagcatttgaaaaggtgaggaaaaagggttaggatcttcagcatcagtgcttgcgtcattcattaactctttgattaaacaaggcaaggacaaaagaaaagagggatggagaggggcctttttttttttttaacccaaggagaaaaggaaagaaatgagcaaaattatttggatcttgggtcacagtcccctgcctactagtgctatttacagaagttgattttattttttcctaggaatgaacgatatccatgatgcctatagatattaccgttcagcaaatcagaaaggggaggggggagggaaacaaaatcccagaatcccagggaccaaacagccaatcctttgctgggatttggcggcatctagtggcagactcgagaggtataaaccttactcacagaactttctggaaaattaacagtgcgtatttgcctgaagaaggtcagtgtgcttgcttggagatcaggacgcaaaggtaagagcgcctcagtcgccacagaaatccggagtccctaacggaggggaaggctgtcgtagatagatattctcacaggaaaattgtatttgtgccaagagaactgcacgcaaccttgaagggagggggtaggtgtggaggaggggagggaggacgatactagagaacttgaaagaagcctccctttggagttgctaatgcggcgatggaagggtttggctctgaatcattggagggctgtggtttacgataggattttggcacggaggaaaacgtaggaagtgtatttttaaagtaattaaatcagtacggaaagccaaaatatttctgacagtgcccctttatctgttattgtcgcctttccttaattatttattttccttttcattagaacattttcaaatataacacagaaatagataacaacctgcgcgcagtagcaaacccctccctgcaccgcccccaccatcacgcacgcgcgcgcgcccgccgtggctctcaccagtcccgacgccaggggcgcacgcctgcgcaaacacagcacctcccgagccacgagggccgctcacacagcaaccccagcaccacgcgagcctgcccgcgcactaacacactggccttaatgccttgcgcccgttgcactcacgaccctcacttgcaaacacagcagaacccccactgcgccttttttttccgtgttcggggagttgcgccacaggactgggggcgtggccccagatttgacctcgcgcttccccactcgcgggaaccttagctcatttccgcctatcctatttccgcaggccacgtagacacttcctctcccagtggggggggaaaaaaaccacaaacccataatgcctccctgcaggaaaaaaaaaaaaaaggaaaaggaaaaaaaaaaaccctctggtcagaggaactctgggtcgtgaaataggccacgtgaacattctgccctgtagacttatgacccaacggctgtcacgcttttggagggcgggctaaaaaaaaaaacctaagagggcgaacgtcattggccggaactcgtactaacggaggaagaggattggtttgctgtagaccttaacagtgaagaagcaggttgctagcacccgcctttactgcggcgaagtgtcattgctgacgtgggggtggttgtccaatcatttgattatggaacattctaaaacttagacaagacgattgtgattggctgaagggcatacgccctcctccagggtgacgtgtctgcctatggatatcagttgccagagaaacctggctttactatggcggttggaggaacggcagtgatcacacgtcggctgctgggaagatctggattctcgtttcaggtttcggggtgggggtggggagaaagggtcgatgatttccttttttcgtcgggtatagacgggattacctagtgccttcacaatcggtcagagctggattcagattcctgctcgccaacgcccagcttgggcaaggctcctgttctttctgtgtctcggtttccatgtttgtaaaatggtgataataatagtatctacctcagagacgtgtactgtataatagtgcgtataaggcacgtaatgtgaagcctggcccctgaagatattagctattgttatggagataaataatacgcgtaatagaatgagaaaaattataaattatataaattcgctaattgtagtgccctttctgccatcaacttctttcctagaataaattaaagataaaatagatataccaatttttaccaatgaaataatttgttatttgggaattgcctcaaaatagcagagattgtaattttcctatattgaaaagttaaataaaaggtggggggggggggagtgcaagaaagaaagagatggagaacgagagcgagctggagatgaaccacatgcgatgagtaggccttgtttggatcctgaatcgaacacaccaactgtaaaaatatgtttaagacgcatcgggaaaattgggacacggattcgatatttgatgttttttagggaattgatgtcagtttttttaggcgtcacagtagtattgtgattatgttttcaaattgtccttttttgtagagacatacgaaaatatttacggattaaataatgtctgggattggcttctaaatacattaatgactaggatttgcttcaaaataatctcagcggtagggggaaatggggaggggtatagatgaaacaaaattggccctaaattaataatatttttttgctgagtgataggcagtgggttgcgtatattaatctgctttccttggtatacgtttaaatttttctataataaaatacagaagtcagatattccggtgagcttgaaaaagtcgggggtgggggggagcagtgggtggggttatagatgaaacaagatggccttcagttggtaattgttgaaagctggatgatggattcgtgtaggtttataatactatttcttttttatttcatccatttgaaattatatttaaggaaagttaaaaaacaaatttgtcagaaattatacaaatgtacaataaattaaatttgaaaatgtggccacaagaaaggaaaaagaaacacttgtacattatttatcagctttggtgtcctttgtgtgtgatgaaattgcattggctgatgtagaagaaagccatatctcatatctttttattttatgttctttct

SEQ ID NO: 1888980 - DNA, 4001 bp, Homo sapiens
tagttacaagttctggtaattttccatagatgcagactagtagcaacctgacaaaagccatggattcacaatagtaaggtcttcacatacgttgagaattcactgcctaataaaattgttgacaaagtttacaccactggagtgctagatgaaatgcattgttaaatatatttggacataattttaaactgagactaccaagaagagacacgttaagactgtaagtaacgaatgattaagttttggttattgtaaaagccagttgttaacctggaggcccacatactccaaccattctgcttcaacaatcattgacttctgcctgggagtttcggttttggcctttagcaccataaactgcagtcacccaattctcctgagtcattctgtcataaaccggattattacattccctgatcatcgtatcttgctctgcctcaagggcttctcctgtaaagtgtaacacagctcttgggatgacaaaagtgtgcaaggtgtgagcgatgaagaagtcttcctcatcctcattagcatctaggccccactggagagcattgaagaagggactcttggggaaattcctgagtggcggtacacatcagcccccaaaaactgtgtctctcttcaggaccgtttgcacagtgacgttctttcccttcttccattctatcatgctgccaaagcaacgctctaccgcagatcccctgaaggggtgggggtcagactaatcgagcttagacttgaggatgtatgtttctttcggtcagcacctcatttgtgaagtagtcgttgggttcagagtgaaattccagcgtaaaagtgagtggctagtttgattttgaaaacttgactttcacgtcttgcaagagcttcagaatgggctcgtcatatttttgttgttgttgtttcgttttttcggaatatcgctctgtcgcccaggctggagtgcagtggtgcgatctcagttcactgcaacctctgcctcttgggttcaagcgattctcctgcctcagcctcctgggcagctgggactataggtgtgtgccaccacccccggctaattttttttttttttttttttgtatttttagtagagacggggtttcactgtgttagccaggatggtctcgatttcctgaacttgtgatccacctgcctcggcctcccaaagtgctgggattacaggcgtgagccactgcgcctggcctcgtcatatttcttaatcagcggggcaacctcctgggcattctataaagccgtgagccagaaatcggggatccctgtaggattatctttttctccgtccacattatgtccctcgattccttcatactccccaaacacctccccgacatcctcgaaatcctcctcacgatcctccaccaagtcctcatactccggattctcctctgcaccatacatctgagcattagaatcaccggccacctcattatactcatagtcctcaaccttggacttcacctctcacactcctctttcgtgggctcatacagtgcattggtgatctgccgtctcttttccaataagggtccatagatggtggcaaacttcctctcgacagaatgaaattccctcaggtacttggcctctagcacggcacatttggcctgaagctttttgagagtgtacactcggtacttaaccaccagaggcaggctctcaataaaatctgcgtctgaggagtactccatcaaagactgcggagaggctgtggctgccacagcgccgagtaatgggcccatttcaccggctgtgctgtgttctccgagcccttccatcattagctttttggcagggaaacactcaccgaactgtaggcgatggcttggcccgggccgccggcacctgggggtgctaagacggaggcggaacgaagcagctacagctgctgtggaagctggcctggggtggcggaagccgtggaaggcaagagtagcgggctaaagggctttccccactagctgccatggcaaaaggaggaggttccacaatccgattgcgcagaagatgactctctaaactcttttttgcttaagagctcaccctatttgctgagtagctgtgattgacaaaccgtcgtccaataaatgattagatccatcacattactagtgccactcaccttcctggcggtagcagctcccaaagtttctagacgggaggggcttactgcaaatcatctggtcggggagaagcggtcggaaactgttttaagcctgagaaaactttaatgtagaagagcaaagaaatgaggcgagaggtgtttttataggccagaaacgtgactcaaagccttatatttaaatacgcgaacaaaaaagaaaagggggaaaaacatcaaaatattagccgtgaagagctttagatgatgtgactccccattaaccttttattttctaattttggcttttcaaaatctctatgaagggcgtgcattcactttagattggttcaaccctgttagtatttactggggtgcagggggatgagatggcatggcaatggagggaaaggaaggcttatggtgaccagtgcccacagtcatatgtatgacaagttcacacttgacatctgggttatcaataacccagagcactgctgctgaattgccaattaccctttctcaatgctggctcttttggaggcaaaatggaaaggatgctcatatgtcaagtgatgttactgaaaagcaaaccatttgtcttgaaattctgaataaattggaaatacttgatgacccagcactagagaatagatgaaagacataatatgatttattcagaacagggaataccatgtgacattaaaattacctatactagggaaaacaggtttttattttttggtgatatttcaatatagatcacctataatttaaagatttcaatttttaaaaagggtttgttattatattacagatataaagcgttttttaaaataacagtttagtgtaacaatcacataaatacagttagggttttagtgtatttgtttccaggtttttagatgtgtgtgtgtgtgtgttagttttagaaaattataaatgtattattggttcagtgtttctcactctacctcagggccaccctattagatgacgggtttctagggactggtgattggttgttttcttatgttagatgtggtgcctttgccactttcagcagatccagatttccacttaataaaacccctagatgataatgacaaagaagaggggaagagaagaaatgggagtagaaagaggacaggggtgaaattcttcccactaggctgaaaggctcgtgttagggagtcgcaactgataggtcctgaaggctgtcttgtgtggagaatggacagaagagcttaaatagaatataaagaaaagatgttgttttcctcagtaaatatcctatcaatgtttaaccactcctattgtgtgtgtgtgtgtgtgtgtgtgtactgtgtgtgctttattaaaacacatctcatttaaaatacactgaaagcagaaaactcaaataatacgtgaagtttcagtaaaggttcaggtacatgcctcagtcccatagttccatagtcataggtcctaaattgctttgttttctttttttaaattctataattacaaaaccttttttctttttctaataataaatataatacaagcttactttcaaaaatttggaaaatgaaggatttatagtgaataacagaaaccactagcagtctcaccatcctgagagaattagtgtgatcgtatcagtacattttcttcttctttatgtgtgtacaacaaatgcacaacttaaaaaattaagatcattgtattgacttttccatacctgccctcttaggttcctatcatgagcatcttcctatgtcaataaatggtcttcaaaattattatgtaaaatattatttattgatagttaagtgacttagtttaataaataataaatgaataaaaaataaaggataggttcatttagatgaat

SEQ ID NO: 1888981 - DNA, 4001 bp, Homo sapiens
tgtgtgtgtgtgtgtgtgtgtgtgtattcaagctttctctaaagacagagaagacccctctgatggttaccttggcagtccagatgtgtgagagagttcaaataccctccaagagccatccacttaatgatgagagtcagggtgtaaatatcccagctcctttgcctctgggagaatatttagtgacagagattctgtgatatatatatatatatatatatcttgcatttcaatttcagtctggttccagagagcatctggagaggaaggaggggaaagtgatgaaggtagaatacaaggaaggggctttaagtatctttgtaatttgtttttttctaaggctgcatgctacatgggccatacacaagtattcaccaggttattctttatacctttttgcattagttgtctatcactgcataaccaatcaccccagagcttatcagcttaaaacaacacatatttacgatctcacagtctctgtgggccaggagtttgggcacagtctaactgggtcctctgctccggctctcaccggcagcattaaggtgtcagctgggactgtagcatctcaaggctcaactggggtggatttgcttgcaagcttgctcatatagctgttggcaggcctcagaaggtccacttcgaagtttacacacatggttgttggcaggatttggattctcatgggccattggaccaaggcctcagttcttcactgggtgttgcccaaaggcctcccttagtttgttgcaatgtgtcccacctcatagggcaactcacaacctggcagccagatttatcagggtgagggttttgagagagagagaatagtcacaatattttataacctacttacaaaagtgacatcccatcacttttgctgtattttgttcattggaagtcagtcactaggtacagccgacactcaagtggagggatttacacaacaacatgaataccaggaagcagggatcattgggggagcccttagaggcttgcctagtacaatatgtctgaaatatcttacaataaatttttaagagaaaaaacatatttaaaggtgaattagaactgattcctggcgttacaaactccttaatcctcagtggcagcagccacatttctggctgctactaaatctttcctgtgcctcctgcccccatctcattctccacaatgtacatcataatcaatgacaaaattaattaaggatattttctcattactagatttagagagatgtcagtatcatatcaaaagtgcttttatttcttcaactatacctttgtggagtcaatggtaacagtacctttcagaagtctgttttccaagagtgcccgttggctagagtcgtaaagaaggcattgtggaacagtaagacgtacatgggcttcgtagccacagagctaagttctgacccctgctccacctgttaccagctgtgtgatttgctgacagatacttacagtcttaaaaagctagtcttctgatctgtcaaatgagaggaatggtacctatctcaaagcttcctggaggattaaatatacaagaaaacatgtgctagtcctagggcagtgatcagcacaaagtaggcacctgacaaggtgaggaaagtttcctccaggtctcttaccttccaaaatgctatgtaccccttcatgagcaggctgtgcaaattgttttgaagggtgacagttttgggatgccatgaaaagaatggatcttcataatttctcatttgaccccaagattaatttcctattataaacttaaagtttcatgcattcattgattcatttttacattcatatacacattcattcaacaaatagaatttcttaaagaaagtaaagaccaatcttcttcaaaactctaatgcctttttatctcccaggggtggataggataatccaagttatatataagcagtttctcatgtccagggtagcaaaagcatcagatgtggtgcaaatctacctgttttctatgtggctccctgagagggctgttccatcaagggaagatgctccaatgtatgctagcctttgagattttggcttagtagaggagaggagctagtgcctagaaggaaatacaacaccatgagatagaggtccatgtaaacatgttctttgtggaggcctgcctgccactaggatacacaccatccccactggttgatttactgctacatactggcctttgcatccaagaaagattgtagtacttgacttcagagatctttaagcagaggcttgattcaagcctcctgagtcagctgagatgaggcagggtgcttttagctggaacctgggctaaggcattggcctccgtgcacccccattgaagaaaaaaagtagagcaaaaatccatactgtttatttatgaattatatgcacgtgttgctgtattaataagttacttactgtaacagtttctaggcccctgcccatatccctaacctttcacatttagaggaagccttcttttgatagccaactgccagattcttcatctctttgcctgcagtctttctctaaagatggagaagacccctctgctggctccctgggcagtccagacatgcaagggaattcagacacctcccaagagccctcatccacttaataatgggaaccaaggtgtaaatatcccagctcccttgcccccgggagaatacttaatagcggacattctgtgcttcttttgcagcttctccctgtgagactaagctccagttactcgctaactctctctttattgacttccttctcttccctgttttacttccccatcgccctatcagggttccctgcagctctgaagtaaactctttaccctggaatccttgtatctgagtctgctagaaaaacccaatttatatttaaaaaaacataaaaacagaccgtttaacagtacataaatatacatacatatacacatagtctaatgtttttccttacccctagagtgcacactctgcattttgaaggccgcttgtttaaggaacttagaggctcccatttcagtcttgtaatctgatatctcgaggttgatatcagagccagccctctctcctttgggctgcctgcttccaagccctgtttaacttactcagggtggcttggcatactttcacgttgattcatggtagtgatttctgggtcacaggctagccaactggaaggagatcttcaggattggatttcctgcactcctctatttgaaagaataatttctgtatcttggacttccaatgaggaaaacaaaaacaaaaacaaaaacctgcaagttcagagttggacaaaagtttctccacaggcactttaccccactttgggacctcatagtttctctcagttcagctctctgtgtatgggagaccaggcaacaggtacatcattgccaccttgaatcatcctgctattacatgatgggcagccccatgagatcgggatggtatgaatattctgacttgttgtcatctttaaccccagcacatggttcagcactatgtggacatataaacacacttcaaacagccttttgctagaaaacagactctactggccccagcataaagatttgcaagaaccgaatgctcccttattttctctctgcctggaacaaagcctcctattgtttttcaggtgatcacattctttagacattcaagtttaagttgttcctcaacaactgaattcaaagctagaggcttactctgctggctgtgcctgcacaagcaaacggtcccacccaaaggcccttttctccagggcctcccagtggcctttaaattattttggtcttcaacatcacagtctcccagaatgcttatcagaggataatgtcaccccctttcatgcctgcccaccatttctactcaaaagccactcctatttctctacagatagctcattctctcagaaacgaacctacagcaaattaatgtccagtgaggcctggcttgtagggaaagtcttgggtatccctatgct

SEQ ID NO: 1888982 - DNA, 4001 bp, Homo sapiens
caaagggtgggaatccttccctcatcaacatggtgaatagcagacaattataacactccctgctgctacctggttttatctgtgccttaagataaattatttatcttctatgtgcacaaatgcaaattttacccaagttgttcttatatgttttggttaggattctaaaataagaagttttttgattgacacaaactgggaggacctttccatcccaaaggcaggagcgctcctcagaggacaggtgcagtagtttcactcacctctcccacatgggcaaaaaatgtgtatctgtaacctaactcaggactgtttttacttcctctgctcccaggcatgaaactctaataaccaacacctgtgaaatgcttattacgttcaaggcactacatcattacaataaccctaaaaacgtcagtactatttgtatcccccttttacaggtgaaaaaataatgaagcttggagaggttaccaaggtcacataggtattaagtagcaaagcaaggcttcaaactcagaaagtctcaatccagaggctgtccttctcatcactatgctttattacatcccactagtggaagaaaaagactcatcaagacatctcccacctgttggaatttcaacctacccctcaatacctgtaatgttttaaaatttctcattttttaaccgtagtgcatgtaaggcactcagtatagtacctgacacattcaataaacatttgatatgagtacttacacagcaataattataattattttccttctcaaaccatctacttcccactccaatattcactctcattagaggaaaactcatctcactctcctctcattcttcaaggtcaagattgagaccacttaagaccttcctgaaggtagccacatctgcagtttagcacatcactttgcctacattcatccagttatcttgtctcagaggaaggtatttctcctttccaatttaaacccttaatctcaaccctttccaactccctacaaggaatttccacttagttagcctgttaggatctcaaaccgatcattcactcaacacacaacactttcagtagattgagcccctattaagtgccaggcactgcaaattctgtaatgaataaaataggggtcctcctttccacgagctcagtctagtggagaataaaaatatgttcacgaacgataacacaaaacaaataaatgctatacgtaggtctgtgacccttagccgtgtctgctccgagatcagaggcgaaagagggtggagggagaccggggcaccctacaaaggggcccaaggatgagtgagaatgtgagagaggagaggggcgaacaaggagctgtcgtggatagattgcagaaaaggatgaaaatgggcgcggtgaaggtagaaggagcgaaatgcaaatggtcagaagcgggctgaaagatgaagcggactcgctgaaggcaagtgggctccttagagcgaaggtgcagccatgatctcactcacctctgccacggattcacctccctctcctcgtcccgtaggagcgtgagtagttgccgcaataggcgcaagagcaggcagaagcgaaagtgatggtccacggcgcagtcagccgctcttgagaatgcgaccacaactgggagcggcagggctggtttcgggagccttggctgagcccattccattccccagtcagagaacaagagttccagtgagagttgcgccccagcggggaacgggcggctttgctgggcttggggctcttggacaaactgcaacacattcccccgcccggagcccgaggcctccctctcggcactgcagaaccggacaccggagctactgcagcctcgaaaacgggacattctcaggagcctcagcagtatccgttgcctttgctccaaaaacccagcccgcgcaaccgctgggagcaaaggaaaccatgggaactattgcgagtacgttggcaaaacatttccccaggtctgtgtggcctccggccaaggtgaagaggtgtgtgtcttggtgtaaataaaccgctactgcaaccgatttcgctcatcctttggttccgcattgaggctcgccagggtctaaatccgcacagagactaggtcttccttaggcttctacttgaaataactgaagggcaggacgagagtccactggagacatttcacagaatggccatatcaacaacatagacaattctgttcgtgtacgggtgctttccgtgaatgtgtgtattacatgttctataatattgggcgcactctgtgtcgtgtgtgtgtgtataaaatatgtacatttggttatgtgtgtatatatgtacatatataataaataggactggctcaaacagattcacatattttttcggagtctatttgaattaaaagaaaaatctgagatgggaagaaaagggacaaagtattcaaagtatttcgtacacaactgaaagtgtttatttcagtgttgtcagatttattaatagcaaaaagaaatatacagtaggccacttatctttgaatttcaaataaagaataatgttttagtataagtatgttccatacaataatacagtagaaagtgactactttctattaaagatgaggtgatagccacggttgtacttcttcctctcctactacttctaaaatttgtttcttatattctttttttgtttgcttgttttgttttgttttgagatggagtctcactctgtcacccaggctggaatgcaatggcgcgatctcagctcactgcaacctccacctcctgggttcaagtgattctcctgcctcagcctcccaagtagctgggattataggtgcccgccaccacactcggctaatttgtgtatttttagtagagacggggtttggtcacgttggccaggctggtctcgaattcctgacctcaagtgatcctcccacctcggcctcccaaagtgctgggattacaggcatgagccaccgtgcccggccttgttccttatattctaaggcttttcgcttgctgtttgagaaagggaagtgggagcagcccctgatatccacaaactgacctcgcactcacaattaggcatgttcttctcttgttgaacataaactcacagaacaccaacccaagacaagatcactgggagcctgatcaagtgagacaaaacaagaccacttcataagcttgtctaagcacagacaaaaacaagctcactgtgacacccagaaaacaccaaacaccccttcttggccaagataggtcactgctactttgccagttaatgtacagctttatcctccctctagtctgccctccctataaataagatttattgaaatgtgcaatcatacaattgcccctgctttctgatgtatctgagacggaactcctgattcctagaccttcccccaaattgtccaaatcctataataggttcattctaacaacttcttattgaaacacatcatagttacctatagtgtgtgttgtccctccctggagtaagagtaataaactcaatctgtcaactatgggtatgtttctggtagtctttggttgaagggcaatgacacattccactgcctaaaatgttcttccccagatatttatatggccctttcccttagttcattccattctttggccatacatcatcttttcagagaggctgtgcttgaccacacaatttacaataacaccctcatcattctctatccctttgctctatttttcttcatagcacttactactttctgtttttgtattatatatttatattatatatatacaaatgttgattgtatgtctcttccattataatgtaagttccatgaagaccaatatctcaacttgatgataattatatccacagtgcctacaacactgcctacaacactgcctggcacagagtaaatactaaatgatatatgtttaatatgtattgaaaaaatgaatgaagtttacagtgtcgggctttataagtttcattgtcacatagtcataatc

SEQ ID NO: 1888983 - DNA, 4001 bp, Homo sapiens; identical to SEQ ID NO: 1563928

SEQ ID NO: 1888984 - DNA, 4001 bp, Homo sapiens
gcaatccagcctgggcgacagagcaagactccatctcaaaaaacaaacaaagaaacaaacaaaatttacttaacagaaagaacactgcatatgacagcacatgcaacatttcagaacagattatatgctgacctataaaacaagcctcaaaaacgctatagtggtaatacaatctactttgaatggctgctgaaaatttgagggtattggtgggttatctgcccctcctccacccctagtataaatctcaaaaatgttaatttccaatatccctcacctcaggtgacactcctcactccccaaatcctggaccagagaggatcacaggactcagacctttcccctaaaccaggggaacatctcggctcagccatttccataaccacaggaggggaagttttccatgtggagccactatggatatgtcaggacccactagggccaagacctcaagagagtgggaaacagtcagcctgggcttttgctacttcccatttaaaggagagtccgctaggtgtcatgtgggttggaatggaggtggggagggggctcagtccctcctgccctgtagggacctaaagccaaggcttcatgctgaccaactcacccatggtgtgtccttaaggcagtgacctttcaccagtgtccacacagggctctcttaaggggaatctgtgtggtctagagctcggggtttgcagaagtttggggagggcagctgaggaaggtgagagcaagtccaaagcaactttgttagtggacaagatggagtccttacaggaagtcccttcttcaaaggcatagagaggagacctctgggggctagaggagactgaatttacttttcttactgccccctaagttcgctaccagcctaacccccagggagccgtttccaagggaaatactcttgcagaattggttagctacaatcagggcctcagacccaggtacttgttacaaacagagagctcagctattcagtctttgtccaatgcattacattgtattcctttatggaagaggagaaaacttatttgcagaatcaccagctacttgctgtccctgaagtttgcctaattataaaatattcaacactatagaatgtatattttgaaaataaagtcattctgcactttctatcaatatgatcacctcacgatgacctaaagatagtcactgtaatctatttaccaatctggcacacactttctagacatgcaaggcagatgtttacctaccttaaaatatttgtaagtaacaaacatacatatatatatactatacatatatattcttttaagaatttgaagtcacataattttctgcaaactgattttttcacatattgtgacatcttttaattctcatttctttaccaaatgtggtttggatgcagatgtttattatagaatcattttgcttttcagggaaattaactgttgatatttgttacagtttctcctggtaagcaaaagtcctttagcacagggatattaacacaaagtctgcaatattgttgcaaatatgttcttccagcttttccgattttaatatttttttcttttggcaatatagaaagtatttctaaacttttattaaatttatgacttagcaataagacaggtaattctttgggagtagagtgggaacggaagaacacagggtgaataggaagggaacaaaaggggtcagggaagctgggagagttctgagagggagcccagccagggggaaggagcagtgggggatttggggaggggactctacagacactcaccttctttcaacacaccgtagacagaaaagtagagcatccatttctgaaagggaagagctccagtgctcaggatcccccttaacctcctacccacctctggctctcagggcctgtccaagggagtaagcaggtgcttgccttctggtaacacatgtccaccaggaaggagctgaggtcatgctgagttttggacaacacactgagggagtccacaatgtcatgttttgtgtgcttcagcagctgcccccacaggtctgtagaggagaggagaagcaaggttttttttggggggggggtgctgccacactctggcccttggcccctgtgattgctcccatcacacccccttaccttgcccagtcttccccatcacaagcttgagagtttttatatttctgctatccttgaagtacttgcacaagctgctcctaggagaaaaagaagagcagcagtgggtggtctggccagtgagggcatttccaggagctggcctgtgtctgctggggatcctatttcttgttatcatcctgatgtgcactataatttaccctcaacccaaatttgatctggccctttcttgtcacctcatttttggagaggttcaggatcttgactttcggggccttctttataatgttagacaggtcatccagccagcaaactttgttgttgtgcaaattcaaagacaatagcttctggggaagaagagttagataataacagagtgatcgttactatttaggacctcaacaacagaactctttccttttttttgcatgtcattgatgtgctcatttccttgcccccattctttaattgttttaagaagattgggaatgtcaacaaaaataatgcctactgatttctctggaggctaattaggaaaggtgttcagaagaataaatagatgttaatctgttggatagagcgctagagtaagaaacagacccatttctctttacagcaccttaagtaggccacatcccttatcctgtattccactggtacataggatgagcaacacacattactacatgtgtgtgtttgtgtgtagtaatgaagattaagaatattgctgccattgctgagttaaggaagtaatcatgattgctttcttctttgtattttgttttgtaaattaaatagtttataatatttgaatttcacaatatacatttgtttgaaaaatattcaccacttacattttacacaatttacagacctctgaacttgcagcatcatttctaggaattcatcatatgagagattcttgttgcatggatttttaaaatgttattatgcactatttaaattataataaaatttattatgaactatttaacatataccaaataatgtcagaatatttttagttattccagatctaaagctttcctttgatgtctgttgttttgttaacagacatttaatgggcacctctctgtgttaggctataatgcttagtgagagatgcaaagatgagtaagatttgatgatttctactctcagtggaaattacaaaagtatgtataaggcaaatacataagcttataatgatcttgtagaaaaactgcatttgttttgcattttcataagcagcatgagtctaatattgatgaagaattttggagtcaccctgaaatgtgtaaaacagtttcacgaactattaatcctaaacctttagtgaattcgaaacctaacttctggcccgggcgggcgccgggcacaggagccggggttccggcagcagctcggctgggagactgagcgacccagcggctgggccacaggtgagtccagcgtcgccgcatccccggaatgcggccgtgagaagcaacgcggggccaggtgatagaagcccctagaagactagcattctcgtgattatggaggcccttctgtccttctgtgacggaagcaatgcggacctcggtttcctggacccattctgactcaggagccttcatgtatatgggtcccgccatgcctcccagtaagatgccagaaagctcaggagttagtgtctccagtggactgagtcagtgttactggggcagtggtttctccaagccctttaggaagatgatgacctcgacttttctctgcctgacatcctattgaaagaggagaccatggaagatgaagagctgaccaacctgagctggctgcatgagagcaagaacttgctgaagagctttggggagtcgatcctcgagtgtca

SEQ ID NO: 1888985 - DNA, 4001 bp, Homo sapiens; identical to SEQ ID NO: 1563934

SEQ ID NO: 1888986 - DNA, 4001 bp, Homo sapiens
tccctgcctgcaagcaacctagacccccaggagatggctcttaacagcggtgacagtgatcaccttggtcaggcatgcgctgtacagcaggcttttcctaggtctctgtcccttgcctttgccggcactagccctgcctagaggcagagagctggactttgcaagctggagaggtacatgtctgtgtatctgcttctcagccaccttgggatgctttccagccagcgacgaagagttctcactgcctcgcaccccacagtgactcagtcacttcctcaggttcacggttgttctatcatgtatgactgccaagatccagccatcactgcaaccacagaaaacagctttacttacccaaagaaggcagaggaggagaggatgagagaatacgtgctgggcaggtgaaattctatggccaccgtcgtccaatcacatagcacttacagtcctctgctgacacttctgttctctgtgggggcagactgagctttagcagagtgaaggcatcctgagggaaggcactatggttttctctttttaaacatctggccccactggctcacggtaaacgtgagacccctatttatggaatgaaaaggaatagagggaaggattgttcagactctttttgaattggtcacatctgactttcttccttgtgttctgtcagccctgtcttggttttgtacatgcgtgtacatgtaaatgtgcacttatacatgcacattgatgtttaatttgtactcattctaaagttctcatcatactgcttccctccttgaacatgctgagtggtccccgtgaccttgggtatacagtcgaagcaccttagcttgattctcagggccccacaccttccagccctgtctgctaccatgtgctcttggagaccatgagctctgtccctgccagattattaggcatggccagaagcgaccaagcatgtgctctcatgacaaagggccttgggcacagactgatccctctgcctggagtgccttccttcctgccttgacatggtggactgctcctcatgtttcagagcccacctcggtggttctgtctttggtgcagcctcacctaattgctactaagaagagttagtggctggtcctcctctctggaggaagtgggactgtagcttctgttacactcaactctcatggttgctcccttgtctatacccccagcatttggctctgtgtggcctctctgctctcactacacacacactgctcacctcttctcaccctgctccacacctccaacacatcaacagtccctgctcacttaccacattgcgggccccttagcccccagcaccaagtacctgataagctttccataaatattagatggtgaactgggaccaggcacttcattctagagagagagctcaggttttgttttggtttatcctttgaacctgaatatgtacttcttggtccaggttgggaacctcagcgccttgagagcagagtcaagaataaacaagcgcctggctctggaccaggccctgttcccagtcctgggtttggctttcctcaccttatcattgaggacagtactagagacagggtgctcttgattcccccacttccagactgcatgtactgaggccttgagtgtattctcaaggccaccccaccctctcctgcaaggtacttgatttaaccatttaaacgttccattatgtggagaggggataaaaataacgctcccttctgaatcgaacccttatcccttcggtctacagcggagccctttccctggcgtccttttcataaatatccaggcgacccgagagactgagcactcccactcccgctcccgctcccgcccctgctcccgctcctgctcccacccccgtcatctcccaccgcccgcagcccggcagccccgcagccccgcagccccgcagccccgcagccccgcagccccgcagccccgcagccccgcagccccgcagccccgcagcagccacagggggaaccaaagagacagaagccttcccagctgcccggacgacagacgccaacaccccccgccccccaccacacgccgcctgcccgcccgcaccccgcaccctgcgcgctagcccacgaccgagcggcggcggcaacagcagctggctgcaggctgcggcgactcgcaccggcgcgctcctggcagcacttgccatcccaggtgacttgaactcgccagttcggatcccctgcgccagctcccgctcgcgcatcgggtctgtgttcccgcacccacccgccctcctgccctcccgccctcccccgcctctccgtcccccagctcgcgggaagggaggtcgcggcagcggcccggcggcagcggcgaccgtggcgacagcagcgacagtggcggcggcggtggcggcagcggctgcggcggcggcggaggctgcggcggcgaccgtggcagaggcggtggcggaggcctccgtggcggaggcggaagcagaggtagaggctgaggtggaggccgaggcctcaatagaggaggcagcatcggaggccaccccgggggaggcggaggccgcccgggtggcaacggtggtggcggtggcggagggcagcgcggccgaagccgccgccgcagcggaggctgcggggccccccttgggggaggcggaggcggatgcggatgcggatgcggatgcgaatgcgaaggtggcggccgaggtggcggccgaggtggcggctgcggcggccgccgcggatgcagatgcggatgagaccctcggtgactgtgaggggaacccagattttcagatggcctccctgtacgtgggcgacctgcaccctgaggtgaccgaggcaatgctgtacgagaagttcagtccagctgggcccatcctctccatccgcatctgcagggacaagatcacccgccgctcattgggctacgcgtatgtcaactaccagcaaccggtggacgccaagcgggccctggagaccctgaactttgatgtcataaagggcaggccagtgcgcatcatgtggtcccagagggacccgtcgctccgcaagagcggggtgggcaacgtcttcatcaagaacctgggcaagaccatcgacaacaaggcgctgtacaacatcttctcggcgttcggcaacatcctctcctgcaaagtggcctgtgacgaaaaggggcccaagggctacgggttcgtgcacttccaaaagcaggaatctgcggagcgggccatcgatgtgatgaatggcatgttcctgaactaccgcaaaattttcgtcgggagattcaagtcgcataaagaacgagaggccgaaaggggagcctgggccaggcagtccactagtgctgacgtcaaggatttcgaggaagacaccgacgaggaggccaccttgcgatgaagacatcccaggagctagccagccagcagagccaaaccttggctcacacccggtttacaaccccccacccccagccctcccccgccaacccaccagcagtgtatttattgtattgagagtgcaggtctctctctctctctctctccccttctctctccccgcttcctattttctccctccacctctcctctccttcccttcctctcccccgcccacccccaccaagggcgttgtgaataatcttactaatctgtgccatttgtaggttaaaggctgcctcttctccctgtggtttggtttaaaaagcattttcattctctctttgtttactgcacaggtggtacaatttcatggtagaatcatcagaaaggagaaggatatcagatgagggaagaaacaagagagtaattgctcccctggtcctactccccagagagaaccacttttacctttttggtgtgctgcttttccaggctctcttctctccctctctctcctttgctcacccccaccccgccttcccttttaacacaccgttatagaatggttcatgtatgtggtgtttcttaacctgctttttcagcaactaaaaccaaacaaaaatcaacccat

SEQ ID NO: 1888987 - DNA, 4001 bp, Homo sapiens
ctccctgcctgcaagcaacctagacccccaggagatggctcttaacagcggtgacagtgatcaccttggtcaggcatgcgctgtacagcaggcttttcctaggtctctgtcccttgcctttgccggcactagccctgcctagaggcagagagctggactttgcaagctggagaggtacatgtctgtgtatctgcttctcagccaccttgggatgctttccagccagcgacgaagagttctcactgcctcgcaccccacagtgactcagtcacttcctcaggttcacggttgttctatcatgtatgactgccaagatccagccatcactgcaaccacagaaaacagctttacttacccaaagaaggcagaggaggagaggatgagagaatacgtgctgggcaggtgaaattctatggccaccgtcgtccaatcacatagcacttacagtcctctgctgacacttctgttctctgtgggggcagactgagctttagcagagtgaaggcatcctgagggaaggcactatggttttctctttttaaacatctggccccactggctcacggtaaacgtgagacccctatttatggaatgaaaaggaatagagggaaggattgttcagactctttttgaattggtcacatctgactttcttccttgtgttctgtcagccctgtcttggttttgtacatgcgtgtacatgtaaatgtgcacttatacatgcacattgatgtttaatttgtactcattctaaagttctcatcatactgcttccctccttgaacatgctgagtggtccccgtgaccttgggtatacagtcgaagcaccttagcttgattctcagggccccacaccttccagccctgtctgctaccatgtgctcttggagaccatgagctctgtccctgccagattattaggcatggccagaagcgaccaagcatgtgctctcatgacaaagggccttgggcacagactgatccctctgcctggagtgccttccttcctgccttgacatggtggactgctcctcatgtttcagagcccacctcggtggttctgtctttggtgcagcctcacctaattgctactaagaagagttagtggctggtcctcctctctggaggaagtgggactgtagcttctgttacactcaactctcatggttgctcccttgtctatacccccagcatttggctctgtgtggcctctctgctctcactacacacacactgctcacctcttctcaccctgctccacacctccaacacatcaacagtccctgctcacttaccacattgcgggccccttagcccccagcaccaagtacctgataagctttccataaatattagatggtgaactgggaccaggcacttcattctagagagagagctcaggttttgttttggtttatcctttgaacctgaatatgtacttcttggtccaggttgggaacctcagcgccttgagagcagagtcaagaataaacaagcgcctggctctggaccaggccctgttcccagtcctgggtttggctttcctcaccttatcattgaggacagtactagagacagggtgctcttgattcccccacttccagactgcatgtactgaggccttgagtgtattctcaaggccaccccaccctctcctgcaaggtacttgatttaaccatttaaacgttccattatgtggagaggggataaaaataacgctcccttctgaatcgaacccttatcccttcggtctacagcggagccctttccctggcgtccttttcataaatatccaggcgacccgagagactgagcactcccactcccgctcccgctcccgcccctgctcccgctcctgctcccacccccgtcatctcccaccgcccgcagcccggcagccccgcagccccgcagccccgcagccccgcagccccgcagccccgcagccccgcagccccgcagccccgcagccccgcagcagccacagggggaaccaaagagacagaagccttcccagctgcccggacgacagacgccaacaccccccgccccccaccacacgccgcctgcccgcccgcaccccgcaccctgcgcgctagcccacgaccgagcggcggcggcaacagcagctggctgcaggctgcggcgactcgcaccggcgcgctcctggcagcacttgccatcccaggtgacttgaactcgccagttcggatcccctgcgccagctcccgctcgcgcatcgggtctgtgttcccgcacccacccgccctcctgccctcccgccctcccccgcctctccgtcccccagctcgcgggaagggaggtcgcggcagcggcccggcggcagcggcgaccgtggcgacagcagcgacagtggcggcggcggtggcggcagcggctgcggcggcggcggaggctgcggcggcgaccgtggcagaggcggtggcggaggcctccgtggcggaggcggaagcagaggtagaggctgaggtggaggccgaggcctcaatagaggaggcagcatcggaggccaccccgggggaggcggaggccgcccgggtggcaacggtggtggcggtggcggagggcagcgcggccgaagccgccgccgcagcggaggctgcggggccccccttgggggaggcggaggcggatgcggatgcggatgcggatgcgaaggtggcggccgaggtggcggccgaggtggcggctgcggcggccgccgcggatgcagatgcggatgagaccctcggtgactgtgaggggaacccagattttcagatggcctccctgtacgtgggcgacctgcaccctgaggtgaccgaggcaatgctgtacgagaagttcagtccagctgggcccatcctctccatccgcatctgcagggacaagatcacccgccgctcattgggctacgcgtatgtcaactaccagcaaccggtggacgccaagcgggccctggagaccctgaactttgatgtcataaagggcaggccagtgcgcatcatgtggtcccagagggacccgtcgctccgcaagagcggggtgggcaacgtcttcatcaagaacctgggcaagaccatcgacaacaaggcgctgtacaacatcttctcggcgttcggcaacatcctctcctgcaaagtggcctgtgacgaaaaggggcccaagggctacgggttcgtgcacttccaaaagcaggaatctgcggagcgggccatcgatgtgatgaatggcatgttcctgaactaccgcaaaattttcgtcgggagattcaagtcgcataaagaacgagaggccgaaaggggagcctgggccaggcagtccactagtgctgacgtcaaggatttcgaggaagacaccgacgaggaggccaccttgcgatgaagacatcccaggagctagccagccagcagagccaaaccttggctcacacccggtttacaaccccccacccccagccctcccccgccaacccaccagcagtgtatttattgtattgagagtgcaggtctctctctctctctctctccccttctctctccccgcttcctattttctccctccacctctcctctccttcccttcctctcccccgcccacccccaccaagggcgttgtgaataatcttactaatctgtgccatttgtaggttaaaggctgcctcttctccctgtggtttgatttaaaaagcattttcattctctctttgtttactgcacaggtggtacaatttcatggtagaatcatcagaaaggagaaggatatcagatgagggaagaaacaagagagtaattgctcccctggtcctactccccagagagaaccacttttacctttttggtgtgctgcttttccaggctctcttctctccctctctctcctttgctcacccccaccccgccttcccttttaacacaccgttatagaatggttcatgtatgtggtgtttcttaacctgctttttcagcaactaaaaccaaacaaaaatcaacccattgaac

SEQ ID NO: 1888988 - DNA, 4001 bp, Homo sapiens
agaagtgattattttgaaaacgtgtattataacaaatcaattctaactataatcttagagaaaatatgtacaaataaatttgaatatggacaacatttagttggttacaggaacagatgaaaatattgatttgaatcaatgatgagattgtggaaattggatttatgttgttattttactattttcaataaggcagttttaaaaatgagaaaagtccaaaacagactagaattctaacccattgttaattacgcataaaagaaaatatgtttataaaaatatattcaaaatgcaataaactaggcagatgttcacaagtgtttccacatgttggtcactctggtcacactgtaaaacccatttattagtctataatatcattgttcatatttgccttttctcaaaatctccatgtcttagttaaccaagaacactagaaagcaagcaaaaaaaaaaaatagtaaagaaaattactaagtttttgagtaaataatgaggtttaatgtcaactctacagtctaatagacactataaaatgtataaagtgaatgaatacgttaatttagcctcttattctgaggacttattaggaaaacacccactaaggtaatgtccttctcttgcaatctttttttcccaggatcttttccagcctaagagtagtgatagatgttttgtttggatttttctggaggggtaggaattgtggaaggagcctcttgaagtgttgtttgcgcatgctagatatcagtgaatttctgaaaacacggtcaaaatttctctccaaaagggtttctcaaatactctgaagagagatattgttgagaaactgctgagttgagtccagtctgatggcactgtttccttcaagggtttcaagttgacaactcatgatgaaattcataattgtgtaaagtgcatatatcttaacatgtttatttcatctgtaaatattaattacatattttgtattgattctgtggcttttatctctttaactgagattttgtaactgtaattctcgcggcagctcaacagtttcaacgttttgtggcactaaacaccatcaaaagccattatatggctctccaatcattaaaaccttagtattatgggatcagagaaaagatctctttgcctaccacctgaggaaaatattaccattatgttggagattaatgaagtaaggctaaaggccaaaggcaacatggtcctgtgttctacttgaccctgtgatcctttagcactggattgggaggccaggacatttgtaaactttgactttccaatgcactcaggaaagtatgcaacctatccttttccctaagcttaaatgattttgataattagttttttaaaacttattatttttgcccaggtcgtcatcttcttatgtgatttttagatgttcggcttaaatatagtgttttaaataataaataacatttaaaatataagaaacatctaaaagccatcttagatttttctttctctccttctctctctctctctcattctctccccttctctctctctctctctctctctctctctctccccccttctctctctctctttttttttaaatcttggtacagaggaagcgggaagttacttagcacggttccgggtttctcgcgccccgcctgtcccccctccctatcactgctactggctcttggtccctccgttggactgtcctgcggagagaaaccccagcccatcggtctgcgctgggaccgcccgccgcgcatctgcccttcttcgctgactccgccccgcatctggccagacccgcctcgcgtcagagctgacccactcactgcgcgtttgccagtcagtctctccggacctgcctcgagcctcaggctgctgaaatcaccgcgcctcactcggtccgtacccagtgggcatcttgggtatctgggcggtcttcgatcccccgcgcgtgtgtctgtctgtctgtctctgtgtcctatccgctgcctgcagcctgcctgccggtcttatcgcaccaagtgtctggtgtaccctttcgcagacgctgagtgcggagaggccttagcgaaaggctagccagcccgagactggccaggcagccggcggaggaatacgcgctcggtccctgcccttgttgatatcattttaaaccaacaggagctctaggcctatatttatgcagaaagcgggtcgggaggcctctgtctgcaatgctagttgtggggaaccagccagctgcttggtggcttctcacaatttcacggggacaggaaaattacgtttctggtactggcttttgaaactgattttaaatctgaacgggtgacaattttaagtccccgcagggagaatagattcgtatttggggcgcctttttgtctgatgtgtttgttctgagcctgctgaccagctgtttctgaacttcattttctcagcctcgacagtgattctgagtctgcttttagcttccttttgcctgccttggctttttctgttcgtgaacagctgtttggcccatagcttagagaaagcagccttttttctcttcaaagagaacctcctcccagtgctcagagagatggggagcggggagcctaatcctgctggcaagaaaaagaagtatctcaaggccgctctgtacgtgggtgacttggacccagatgtcaccgaggacatgctctataagaagttcaggcctgctggccctctgcgattcacccgaatctgccgtgatccggtgacccgcagccccctgggctatgggtatgttaacttccgctttcccgcggatgcagagtgggccttgaacaccatgaattttgatttgattaatggaaaaccattccgccttatgtggtctcagccagatgaccgcttaagaaagtctggagtgggaaatatattcatcaaaaacctggacaaatccatagacaatagggccctgttttacttattttctgcttttgggaacattctgtcctgcaaagtcgtatgcgatgacaacggctctaagggttatgcctatgttcactttgacagcctggccgctgccaatagagccatctggcacatgaatggagtgcggctcaacaaccgccaggtgtatgttggcagattcaaattcccagaagagcgggcggctgaggtcagaaccagggatagagcaactttcaccaatgttttcgttaaaaacattggagacgacatagatgacgaaaaactgaaggaacttttctgtgaatatgggccaactgagagtgttaaagtaataagagatgccagtgggaaatctaaaggctttggatttgtgagatatgagacacacgaggctgcccaaaaggctgtgctagacttgcatggaaagtccatcgatggaaaagtcctctatgtagggcgagcacagaagaaaattgaacgcctggctgagttgaggcggagatttgaacggctgaggttaaaagaaaaaagtcggcccccaggggtgcctatctatattaagaacttggatgagacaatcaatgatgaaaaactgaaggaggaattttcttcctttgggtcaattagtcgggccaaagtgatgatggaagtggggcaaggcaaaggatttggtgtggtctgcttttcctcttttgaagaggctaccaaagcagtggatgagatgaatggccgcatagtgggctccaagcccctgcatgtcaccctgggccaggccaggcgcaggtgctgagaataagaatgctcagtttgtttcagccttagttggtgcctccttagtttgggctcctttgtgataaggggttattttatgctaattcacaagtttttttttgaagtgaattcttttgaaaaaaaaatgcaaaactagaaaactttattcattttagaatagaacataatttctaactgtaaaattgtcattttgtactttttttgatgtaatatccttagaaatctgtagaataaagtgtattcctccacttttttttcctgaacagtcaagg

SEQ ID NO: 1888989 - DNA, 4001 bp, Homo sapiens
tgtaatatatatatcacataccatatatagatttatatctcgatgcaagctagtttaatccaaagtgtgaattagtgtggatatgagatatatatacatatatataatatatatatgtgatctataatatatgtataatgccttagcactctacgcatgctattaaaagttgcttaaacttttaatataattactaagaaggacagacaatattctaagatcaagtttaactagtgaaatagtatacaatttggagtaaaattaaacatagtttccctggatttgctaatgaaatgctctggcaagcataacaagtaagtcttgaaggtcgaatgcattatactaagggactgcccttggctgtaaactatgccttcttcacttttccagccaattttcaggaaatgtttgagatctctttctattgcttttttcctccttttacttccatatcataatacatgatatatacatacaccccctccattcataggcattcttcctctcccacgcttcaccttggaagtccagtgctccctcgtctctctcttgaccaggtgtataatcctgactttcaattggtggttcctcttgttgaagctggtcattactgggcagctcctgggcctaggaatatgagtgcgtgtgcaaataaaaaggtctgttattaataatgcatgtcaataatatacatatactcaatatacaaatatatcttaccataaataagtctaaagacatttttttcctacacaattctacatatacttattcttaatagttactacaagagaaagttacccttaaaaacttgggaagctatttgaatccaggctggaattgatgtatacaatgtgttatgaataagcaggagaaggaagccatagagaatatttctggggaatataaaaacatagccatccaggcaacattagaatgcaaacatccaaatctatgtttacttcacgagattcaattattaccatttacaagcatggaaaaccttattaatatatcaatattagttcaacaacattttcacaaaaataagtttctaatagaaaatatcaaatgttaaaatactcacaaccacagcccctactggatgattagagtcttgatcatctcttctttctctagatctggatcttgttctttgatgtccactcatgtttcactctgaaagtggcatactgtgattcagaaaatgtacataagagtgtatcatttgaccttttccatggctaaattggaaagcatgcaagctcacgattaccctgggacttaattttaagatgttttcaaaaatttttaggtatcatctaatttagccaaatatggctgcttgcaaagtcattaatgttatggctatggtagcaggcaaggctcatggcaagatagaggacttctctgtgagttttggtttcacaattagactctccatcatgaagatatctaggaaaatataggtagagaattggaaccggagtgactactgcttttgccccactctcatttactcagcccatttaccccctaaaatcaagttttattggaacgcacagcctctcccattcctgcccgagatgtcagtggcggaggtgtgaagttgcaaagccgagtgaagggcatgctcctcactctctgccaccgtggagcgctctacagacctcggggcagcggttatcagcccgcagtgttcctagtttccaggccccttccttactgcccacctcgccctgccactgcccggttaagaactggggaatctgtcctccctctcagggttccaggcctttcggcactcagatacctccaacagcacgcccagcactcgccccatcttcacgtgattcctcccctctacggtccaccttcctccgtcgtcctggcccagaaacgacgacaaaggcccatggggcgtcgcgacctgggaggagccggacgtcgacggcgaggcccttttctctcagaagccacggactgtggtttctgtgccgcaggacctgtccaaagcccgctggctccccttcacattcactcacaactaaattcccaggaggactgatctgcggacctaccagctgagtcccagtcagtgagaaagaatgaagaggacaggaggaccacctctcagggcagagctctgagcgcagacagcagacagcagacagcagacagcaaggcacatgcgcaataatggacatgcccagcaacggacatgcatagggatgcagcttgtgttacgtaggctgaggttttcttgcctctgttgactaggagccacaaggtttcttgagtattgaaaggggcttgcacagctcttttacttttccttcctaaactttttgacatctaaagtaagggtccctgaggctcgaggtcaaattaactatcatgcccaatacaactctcacacttccctcataaatagagggaagagggatcataaatacatgacatttaactgcaccccaggcccagcccaaggacagccttacacaggatggcaagtgaacaagagggcacctgtacctgttgatcctttttcctgaggtctagtttgtattaactaactcttgccttttgaaaaacaaacactgttatctgaagtttaatgtgaacctttaaagatgcattgtttttagacaaaaaggacatatttgatatgggccactagggttaccacaaaatacatagttgttgatgaaatgtaatttgcatctttaatgtaatgagcaacgaacagcattttaaagaaacacaataaaataaaatagaaatcatcagaactgcatttaggatatacacatagcctacacacacacacgtacaaacatacatgtttacacacatatatttatgttcagtccacatctcctgccctcaagctgggatttacaccatctgcttccctagttctcaggccttcggatctgaattgaagtacatcactggtttctggtctcctgctagcttgtaaatggcagactgtgggacccagtcttcataattgtgtgaatcaatttttcacacaatgttatatatatatataatacacacacacacacacacacacacacacacagataaggaaaagggccaggatatcagccctactcacttctcttcagcactgtcctggtgaatctagttagtgcaatgagacaagaaatgaaataaaaggcatccagattgaaaaggaagaagtaaaactgtatgactcatagataacataatctttcgtgtagaaaatctgatagaatctataaaacagttactagaaacaagtgagttgcagaattaaaaatcgatatacaaaatttaattgtatttttgtgcatcagcaatacaaacttggattggcatttttaatagtatgcattatagtatcgaagaatattaactgctaagggatgaatctgaataaggaaattcaagacctataacatattgaaaagtacaaaagatggctgagtgaaaatttcagacccaaataaaattaagagatatatcttgttcatgaatcaaaagagtcaatatgcttaagatacagtttccccaaattgagctatagattcaaagcaattccaatcaaaatcccagagggtgttctttttggagaaattgataaactgatcttctaaagtaaagagaaagtttttaggcagaatcagacaagtgcagaaacatatatacatgagtacaaccactaatcagacaagtgcagctgctctgtctatggtgtagccattattttattcctttactttcttagtaaacttgctttcactttgcactgcggactcgccctgaaattctttcttgtgtgagatccaagaaccctctcttgggacatggggtcgggtcccctttcctgggacatatttctggccaccacagaagggactatagtgaagaaaccctgacccaatggctacctttgggtaagtgttggggtcctgtaacatctctctggtgaccaccgaagtgattatact

SEQ ID NO: 1888990 - DNA, 4001 bp, Homo sapiens
tctctgggacttttctgaacagcctacctccaacatgtttcctctgcctctgctaactggagataggactttaggactttgctccagctttgttcctcggtttcagcttttttgtttcctctcactgaggtctgtgcatctttctatttgctcatgagctaaccatgcctgtctcaccccaaccctaatacccagctcttgatgactttggggaggacagtaatgttcattgtttttttctaattataagactaatatagggttggtgcggtgcctcatgcttgtaatctcagcaatttgggaggccgaggcaggcagatcgcttgagctcaggagttcaagaccagcctgggcaacatggtgaaacaccatctctacaaaaaattagccaggcgtggttgcgtgtcctgtagtcccagctacctggaaggctgaggtgggaggatcacctgagtctgggaggtcgaggctgctgtgatcacgtgactgcactccagtctgggcaacagagtgagaccctgtctcaaaaaaaaaaagaataatatatgctcatttttgaatatatatatatatatatatatatatatatatatatatatatttttttttttttttttttgagatggcatctcgctctgttgcccaggctggagtgcaatggcgtgatctcggctcactgcaacctccgcctccgaggttcaagcgattctcctgcctcagcctccagagtagctgggactacagattcctgccaacacgcccagctaatttttatatttttaaaatagacggggtttcactgtttggccaggatggtctcgatctcttgacctcatgatccacccacctcagcctcccaaagtgctgggattacaggcgtgagccaccgcgcccagccttgaatatttgttaaaggcagaaaaatttgttttaaagtaaaacaaaaatcttccataaccccacagtttaaagatttcacttttagcatcttgatatatttccttccaatgcttttttctgtgcatgtacatatgacataattgggctcatgtttttggaatcacattttgcagcctgcttttctaacactataatgctaacacgtgcccataacattagaatttcttcaaaaacatgactcttagtgagtgtacaatactatattatatggacttatttttatttgaactattcctactattgctgtaagttgtatcttttttgccttttataaataattctgcattaagcatctttgtacataattatttgtgtgcttctctatttcttttgggataaattaccaagtggaatccctaggtcaaagggtatgaatattctaaaggctgttagcatatactgacaaatatcctctatggaatttctaatgaagttaacacatgcatggattttttgaaatcattaccataatcaagatacataatgattcttggacggccacagtggctcacgcctataatcctagcactttgggaggccgaggaaggtgaatcacttgaggccagaagttccagaccagcctgggcaacacagtgaaaccctgtctctaccaaaaatatagaaagattagacaggagtggtggcatacacctgtggtcccagatacttgggaggctcaggtgggaggatcgcttgagcctgggagacagaggttgcagtgagctgagattgcaccactgcattccagcctggcaacagagtaagatcctgtctgaaaaaaaaaaaaaaaaaaaaagctacataataattccattaccccaataaactctctcctgctatcccttcatagtcatccccttcataacccttatggaatatttagctctgtagtgtggaattaactgatcattcttagctaattgtcttgatagcattacaatgcccccaagttaaaataactcactcaagtattatcaagaagtttctgagtcaggttgtagcagctgccaggactggtctccaaagtgggtggatctgttaaggactcctctcagagtggtgcctgaaagagcctatttctgccattaagactgcaagacatgctgagattcaatcacaggactgtggggagaggagcaggaagaagccaggactaggctggagcagaattagtgggaatggaattagttatagagctgaccctcagggcagttagacagaagtctaaatttcaaagttcaaggacttgggatgagtaagtgtcaggtgtgacggacttagcacaaagtagcactgaaagctaaggatttgatgtgggtaatacaatgaagatatcctaggcaaaggcagtatcttggttcaatgggacaggggaggattaggaggagaagaaggtgaggaagggagacagaagatattgggagtctaaaggaatggcctaggctcttggacaagagttcacaaggactcagctagacatcagaactctttaaaatgagcaggtgaacaggtgaacctctcattctggagagagaattaggtgaccaattaggaaccaaggggtggctcagtggccaagaatacagtggggtttaggtgctttccaatgtgaacagtgactctaaggtagtggtttgtaaactttagcgtgggtcagaatgcctcccaaaccaggaggttttgattcagtaggtctggagtgggaagccagaatttctgattcagtaggtctggggtggggatccagaatttctgacaagtgaccagggctgctgctgcacttcttggagaagtacactttgagaaccactgctctaaggcaaaaatacatatattgagattagaataaccatgtcatttgcacgtcacccagtacacgtaggaaaagggctcctaaatgtaacacagggcttggctcttccaggtgatgagctggtagagttaaacctgctgctggaagtgttttgtgcttccaggagggcaaatagggtaggaagcatcactggaattctcacaacactggagttctgtcctgtataggtcataatactcttaagtgatgttattctgacttaaagggccagcatctaaaactgtcaaactgtaattctctgctacagaatccattttcttcttcttttaggactagccctctttgcttattgaggagtaataaaaataatgtccccttatattagcatagcacgttctaattcaaaaagtgcaatgacatgatatctcatttgatctcctttctgtgatggaggcaagcccggtatttttatcccatcctttgggctactgattctcaaagtatagttcccagacctgcagcattaacaacacccagaaactctctagaaaagcaaattctgaccccaccccagacttactgaatcaggtccggggtctggcagggggccaataattcgcatttctaacaagttccctggtgatgctgatgttggtgctgctggtcccagaccacacttgaatgaaaaccactactgtagataaaaatgaaagatgtagaagcccagggacttgtcctaagaggactcctgcctagatccttttcttactacacctgctgcatccctggtccctacgcgcccgcccccaccacctcgcccttcgcaaaaaaaaaaaaaaaaaaaaaaaaaattccttcaaatcccagctgcattattttagaattttgtgaatgtgaatacctgtaaaatgaggataacaataggatctacctctttgggttctcacaaagattaaacaagaactaggtaaagtacttagcaccgtgcttgtgcttaataaatgccagggatcatcatgattttttattaatattaaaagtgacaattcacaatgaataccttggtaagttctttggatgtgtgtcttcagaatgctcctcttaaaatgtgaatgtccctagataatgtagacattaaagcacctgatcgttaacattccatctctgattgccatgagcatttggctgagagcagggtacttcggaaatgggacccacgactggtaaa

SEQ ID NO: 1888991 - DNA, 4001 bp, Homo sapiens; identical to SEQ ID NO: 1563982

SEQ ID NO: 1888992 - DNA, 4001 bp, Homo sapiens
attacgcccaagagttttaacagtttaaaaacctgacagtgaaaaaaattccaggtacatgaagtaaaaagacatttgtattcagaaaccgattgttttagtcaatttacacggtgctataaagaaatacccgagactggataatttatagaggaaagaggtttaattgactcacagttccacacggctggggaggcctcaggaaacctacaatcatggcggaaagtgaaggggaaacaggcaccttcttcacaaggcggcaggagggaagagtgagagttcaggaaaaaactgccacttttaaaaccatcagatctcatgagaactcactatcacaagaacagcatgggggaaactgcccccatgattcaatcacctccctcccttgacatatggggattacaagtccctcccttgacacgtggggattacaattcgagatgagatttgtgctctctcactttctctccccctcaagccccgcccttttctttttctgacagtgacttcagtccctcctccaaacctcagctctggagtggcaggcagttctcctctactctcctaagtgatggtaccatcacctcctcccttctgtgaccctagacacaggagtcgcagctgtgtactcctgtgactctcacagagccaaatcatatcactgatagagaaaatgaataaaacccaccctaaaaataggtaaaggatgatatgatagattgtaatattgtcactgagggcaatagcaaaaagactgaagtattcctggtacacaatgagactgttttcagttttaagaaacatgtagataaggactgctataggacctatgagaaatttctggtaatacgagctctgagcatgagaggctgttacaaatgaaaaacagcatgctgcatttgagacaggtggagatatgattcatcaggcacaaatgcaaaaggaaagaggagcgagattacctgatggatcagacgaaggtcaaggagaaatgttgaaaattgaagttgggctcatgtggaaataaaagcaaatgagatagaattaagaggtaaatatgcaaaggaatcagaaattttttaaggatgacaaggtaaactgaggtactcagcaaagcatttccgaacaacaatcttgtagtttttgaaaagaacaggaagaaataaaatgccctttatttgaacccccatcaacatgcaggaaagcctgttagcctaaaaaggtaggcatgagcccattttcaaatcagcctaataaagtattccatttcattgattcttaatagaaatagattcaaaagtgagtctctcccaattttggaaatatttcagtattagccaggaaagcaaaaagcacactaggtattttaaacaaggaatttaatacatgaaatatgttggaaggcaagaagagggaaaaatgagataaaccacagattagtaactttagaaagcagctgcgactcctgtgtctagggtcacagaagggaggaggtgatggtaccgtcacttaggagagtagaggagaactgccactccagagctgagctttgcaggaggaactaaagattcttccagagttattgtcagaaaaagaaaagggagggagtagagggggagagagagtgagagacagcaacacagcacccttttcccttctgcaacccactaatttcctgtagtgcctcctatttgcaggaagctaattggcaaaggagcttgagaaacagttttcagattcccagtccccagcattacggaacagagtgaaagggtaggcatgtagctgaaaaactacaggtaaataactggcactattaaggacgttactaaggaccaaagtcagaatcatggctggcctccatttacttaggagaattggaaatgagaaaattttcagaggccaaagtttctggtgagtgatacacacatatatagacataaatgtgcatatagggatatgcagatatgtgaacctatgtaagattctctgtggtgggtctggtctactttggccagtgaaacactagtgtgtgtgtgtagtgtgtgtgtgtgtgtgtgtgtacatgacagagagtgccactctgcaagagtgaggtgatattcagatggaatgctagaatgctgcagaaaaagaggttgttaaaatattaaaataattctttactatttgttaaaaaacacaaaacattgcgctcagctctttcaagggacccctggccatcatggcactggagagctaagggtgggcattggaggtgggacaccctggtgccccccaaccttccagccaggcctctgtaactctctcacattggccttcatccagactgttccactggtcagagcagaccaagaccagccccagtgtggagatgggacatctggttccagtgctagtgtgctggctggaactccctcagacccaccttcacatagctgtttgtaggaattgcatcctccatggtacactgtatatgtggattattaaacattttgagcatcacctcagtatatattaggttggtgcaaaagtaattgtggtttttgccattactattaatgccaaaaactgcaattacttttgcaccaacataataagtatgtctacatgtatagacacacattacttttgggcaaagccatctaaacacaccaatcttgcatgttgctttgttgtttgaataaggggacatgtagatataaaatacggattccattaagtattcagaaaatcctttgggtgcctaacataaagtctttctaatagatatttggatatatctctgagtatctttaaatggatttaaattaaatgaaaggtatcctagaatttacacttcctactggcacagtaaggaaagtaccacaattagtgcttcagtatttttcatctgcctattcctacatgtaggccgaagactatactacagatcatttgcattcctatgtactgccttataaacatgtacttatcctacagagaagctgaacacatttccttgttctgcgcttattacaggttctccatctttggggtggtggtggtggtaataactttattcttccatttagtctgtggatctgggataggatattcaagaagagaaatgtaggctctcctgaattttatgatcgggacagctgttcctgggaaatgacacaagaatcccaattaattccccaaaggtcacgcaattgaaaagtcaagagatggaattgattgaaagtgatcatcaacttgacctagactttttccagtaactgaaaggacaagaggcttttgagccaagtattgtctcttgccaaatttaattttttcattttggagattacaagcggctttaaaatattcatgcgaattcattcttgtttctacttctagaaaaaatagaactttctcaatagttgctgggtttcaattctttttctcatccaagggccttttgaaatatttaaaattatcaaaatattattacaattagcaagtcttctaaaagtaaaaactgatcccactgatattattttttaaaagttaatatttttgaaggaaattcttctgagaaaatttcccagaaagtgttctgagcccaagaacatatctgaattttctatcagttataatcatattctgaaggttttggcagaaaatttgggaactagagaaaacgcactcataatattgctacataatatatacttctgttacagtttattaatttgtttttctctatttctgtactgccgtaattgatgtttacatataatttggtacaccaacctttacagtaacatattgttttgctactgtctttatagcctttgttaccatgattttaactgctgtatagtatttcaagtaagttgtatcatgattgatttaatcactgcttctactcccttcctcaatctcactttgtccttgaatcactggttctcttattaagaccaacgaaaataacattggagtcagagccaaatgacttggacggtgtagctttg

SEQ ID NO: 1888993 - DNA, 4001 bp, Homo sapiens
ctagtggccaggaggtgcgctctgtctggttgagagcaatgggctagattatggtggactctgcctctgcctctgaaacagagatgaggctatgggatcatttcctcggacatctgtatggagatgcagagatcaacgtgccctagctgcttcgagtgggcatcgtgatgcccagtgcccctcagagccaagatgcagtactgatggttattcctgaagcggaggagaggcaggtggcctcaggtgcctgacagcttcctggcagagtcctctttgggctgagtcaaaccctttgcagtctagaagggtttggtgtgcaggctctgcccacatgggacttccatgccgtttccatttcttccaaaccataatgctctcccttgcagaggtgcagagtagttaggtaaaggaaaatcccccggagtctctccatatctgctacagtgggcttacgcgtttcttgcattttgggggcagatcccagagacaaggagggcggcacatgagcagacatggcaccaggcccctgcccccttgggtcaccctgttccctccccatcccacaacagccgctgaccagagcagctcttccctcacaagccagtttgctccctttgcccctgaggctccacgggctgcagcttcccaggtctggggggtcgcattttcatagcctttgcatgtgtgtgtgtctttaagacatgcccgacagaaacaagagtcttggagatgacacgtaattcacctgccccgtggatcatttcaaacagataacgtgggaaaggtataagaaggtataagtcatgaaagttgttcttggaaaaagctcaggaagagttagagccctccagaatgagccaggtgctaatttagaacagtcacctgcctgccaatgatgatgacgtgctcagccaccaagctgcgggccgggagaggagccgtaataagcgattccaccaagccttccagccactcctttgaaacctctttaaaatgaaatcctgaaataggaccgcatttccacaggcatcaagctgtcagcttcaaaggagaacaggcttctgaggcctggccccttcagcgcgcagctgaggcccccctccccgaggagaggagcagatgtttgagggcagagggcctgtcctgacagcacctgcgtggaggtggcaggaggggattgtttctaggccaggcgagaggagcctggcagcccctggagcctcgagccgggggtggcgggggcaggaacttctacctccctgctcagagccaagaagtcaatttgaacctttgctggggctcggtattaacacgttctgccttggagggcaagccggtggggccaggaataagcattccttttaacaacttcagttgaaaagcagccaccgccccacccgctgctgtccctggctctcatcaggtgaattcagcattcctgccaccctgccagtgcctctgtgatcctgggcatgagttgaccactatgtacctcagtttacccatccacaaaaaatgcaaaaggccaggactaagcatgggggcgtgacgtgaactcccgctcctcctctggtcaagggcttcatgcttagaggaaaccagataagccctattgcaaccccacctggagtggagtgggggaggatgaggaggagggggagaccctaccttccacaggcccagggactcgaggggtggggctccattaggagatcagtcggggcatggtgaaggggaggagaggttgtcaaggctcagctgcctggacagagaggatggaaatactccctgtgtgaaaaaagaaaaggaaaagaccccagatcaggaggcaggaaatgcagtttggcagagttggttgatgccacttacttctggacaagaagactggaggcttggccacccttgatggaaattgcagcagaaccatctctctattctgttgattcccgcaccaggctggcaaatagcttttgtcttttctgcttccttgttgcaaaagggtacaaaagcctcccacccaccccacccccaatcgccctttgtgccattatctttcaaggtgacttagcttttgaagtccctgccatctgctctgcaggcctgtactttgcaggatgtgagagcaccgcgttcccagaatgccttctgttctacccgacgtggctactgatagctctgcctgtgaggggaaaagaaagctgcgctgtggcccccttaaagcccagtccctgctgtctccctcaaaaagccacttaggaaagccacggccttgaggtaccaagagagttctttgagaaatgagagtggaaactgtgagagaggctgctctgcagtcgagtgctgggcacgtctgacgatgcctgggagaggaaaaaattccatcaaaaaactaccatggttttctttagaggaacatatgtgcacttttggcaaaacatgccttctcaggagagctggaatagttggaaccaatgaactctgaagtcatgtgattcgtccctctgtcttcgtgcagtccttaaactattctgaaaaatgcatgaatccaacacgaatcctagcatttctgccatgcccactgagggccaggcaggcatacagcctggttggggggtgggagggtgaaaagtatctctttttgtgcttgaaggcccctgaggaagcccctaggctcccgtggtgagtgttccctgcgctggcctagcagggtgttggtgtcttgagcccgaatcctgtgcagcattggcccaacccttgcaggtggccgccacccctttcccctgcagctggcatagccaaggtgccaggctctgcaaagggtaagctgcatctgaattgggcacgaggggatggttgtgccttccacatctccttttgtgaaagatcttcccagatgcaaacccaggatggacttgccaaagagaaatcccagtaactggctctaatctctgtgccaccagctgccattgtctcgaagttcatttgcaaacaacagaaaccaactgtggctgggttaagtgggaagtttattaaacaatattggataggtcacatggtcaccaggctaagcggctccctagccaggaccaagatcccatgtcattctccagtactcccaggttcataccccaggacttacaccacagacacccccaatgctgggcactgtcactgggaccactgcctctgctcttttggaaactaaatgtagaggcttctacttgtcaccaaaagggattttaaacagccactagctgccacttcaaggtctcaggcaagcatactgcctcggctgagggagaggttagaaaaaacagcatccagccaggcgtagtggcttgtgcctgtaatcctggcgctttgggaggcctaggcaggaggtctcgagcccaggagctagagaccagcctaggcaacaatgtgaaaccctccctacaaaaaataaaatcagcaaggcacagtggtatacacctgttttcccagctactcaagaggctgaggtgggaggatcacttaagcctgggaagtcaaggctgcagtgaaccgtgattgcaccactgcactccagcctgggtgacagaacaagaccctgtctcaaagaaaagaaaaaagccgcatcttgagaattctgccttccaaagtggaggtccccacttcataacatggggatcccctgaacacaggaaggaggttcaaatgccaaacatctgaaactcagtgtccgctccagctggaatgcttgcttttctttcctctgcccataaaagaaggacctgtgccctcgccagggtctgccctggagagctgacgcaagaggcacatttgcccctgaggaaggctgtgtgtcaggagtgaagaggggcgtgcaggcaacccctcctcaccccaggtgcatggaagccatcctggtacccacctctgggatggaggtaggacaattaattacatgttctgtctttgggtagaaatgctactgagccataggggctggatcaccactg

SEQ ID NO: 1888994 - DNA, 4001 bp, Homo sapiens; identical to SEQ ID NO: 1563994

SEQ ID NO: 1888995 - DNA, 4001 bp, Homo sapiens; identical to SEQ ID NO: 1563997

SEQ ID NO: 1888996 - DNA, 4001 bp, Homo sapiens
atcctatatattttattttagtaatcctatgtattttattttatgtattttaaaacattgctttcagaagaaattgataggtttcatcaaactgccaaagggattcacaggacaaaaacaataaagaaattctcagcagatgtgttcctgacagatgggctaattaaagtgttagttaccctcaatatataatagtggcttagtaacaggtgtgtttggggccccaaaattctttccaattgttctattggtgatgtagcctagtagaatatgataccaactccatctgcatctccccaacactccctgtgcatttagccattagaataatcttgtttgcaggtatccttcagaaaacactgtttgatggacctcaaaagacattcaggtgtaaacaggaagctaactggaaagagaaatggcctgatggggctgatggagagttgtgttgacagtttttcctctgcctcagtggccaatcaacattacgctaggtgaaataagccaggcacagaaagacaattactgcatgatctcactcatatgcgaaatctaaaaaaatcaaactcacagaagcaaagagtagaatggtggttaccccggctaggggatgggaggatatggaaggagagatgttggtcaaaggatgcaaaatttcagtcaggaggaatgagttcaagagattcattgcacaaaatggtgactatagttaataacaatgtatactcgaaattggctaagagagactttaagtgttctcatcacaaaaaaataagtatgtgaggtaatgaatatgttaattagcttgatttagccatcccacaatatagacacctatcaaaacatcattttgtacatcataaatatatacaatttttatttgtcaatttaaaacataactaaaaaaattgaacccatcaaaaatgtagatcagcactcattgaggaaggccaggagttttttaaaaccctataaatacatttcaaagattaaaaagttgagaaagtaacccttttaaagcttaagttgagcaacaaagtagcatgaaaattatcagagtagagtttaagagggacaaaccagtctcacttttcaaaatggaatccatctctgtaatgtatttcttctattagaaaatgttttggggatctgatatggtgctaggggctgtattccctgggctatgaccaccatctgatacctttctgtgcatataagacttatttcccccacaaatcccaaatttcccatattcaaatgaaaacattctctaaagttgaaagacatctacctaatctataatcaccttctctgagagctagacccatctacacgtgtccctcaccagacgtctacagagttgggtcccagcagtctctcagtgaatctaaatccttggcaacggcagattggccagcagtggaggcctgatctatgctcaaccaatcagattctctctcctgggaatttggaattgagaatcagagttactccctggtgctttgaagtgtgggcaaataaacttaggggctgtgtggtgggcatgtttggcgatatgcatgctgaggcagatagcatgtcagcccagggtggcacaccagtgtgcagagagaagcagagacatttcctgaagctcagctgcactttctgcccaagacctctgtattcacattacagaaaccccctttgggctggggctggtttgcccccaattgcaaactttaaagtttgcacttatgcactccacaggccagctcacgactatcttggccccctcttcccaaaatcaccatcaacatcccaccagtcccttctgaaaagaaaacaaggagcagccacccaactagcatacctcgggtctgccaatgcttctccggaccctcgctccaaccccttccgactgctcccggctgagcactgagagagtaactttcttggaggaccccatatcggagtctaaaaagagagtgttctgatgctgagctgtagaggatggagggctaaaggaaggacaacaaaaaaaaaagaagtcataaaggagggaacatccaaggactacaaaataaatgatattaagattagatgcgcaaaatagtagcagctacaatttgttgatgtcttactatgtgcagggcctgggttaggtgatttaaaacaaccataatgatggtgaacatgtatgcatacctactaggtgcccagtaccccaccaattatttacaactatctcatgtaatcctacagtaatcttgtgcgaaggttagcgatacagtcatgtgcctgccacataatgacattcaggtcaacattacacagtcaacaatatatggactgtatgtatgacagtagtcccataagactataatgccatatttttactgtatcttttctatgtttaggtatgtttagatacacaaatactcaccacggtgttgcagttgcctcagtattcagtacaggaacatgctgtatgggtttgtagcctaggaacaataggctataccatatatcctactacacacctaggttataccagctaggtttgtctaagtgtactctaagatgcttgcacaacgacaaaatcacctaacaatgcatttctccgaacatatccccatcgttaagtgaagcatgactttagcagctctgttggccccttactaaaaatctccaatgaacactttgtctttcttacttcactgaattctctcgatctcccaccccttccccagtgccactcatctgtcagcctcactggtagcacccatgaggtagttgctaccaatgaggctgacagatgggggcaggtttgtgtggcgccttagagaaaatggagaaaaacaaagaggtccctaactcttaccagaacatgctgaagatcttggcattaaaagagatcttcgagggtcattgaattcaaagacccatctattcctgaagttcagggccaacattttgggcaagaaatctttcagcttactcatgaagtctcctagagcataggcaagtcatggaccagctgttcttggcaatgtatctcatatttcaggacttacctatagccagagtttgttattcgaaagtcttttcctctttgggaggtctaggttctaatggactatcccagaaggaatataatctatccctattccacttcaagtgtttgcagacagtacccccaatcccttaaatcttttcttcaagtgaaatatacccaattccttcaaagattcctactgaaacgaagagaggtgctttggcaaaaagcagactctggaaccagacagcctaggtttgcatctcagcttcaccacatatcagctgtgtgacctgaggttttctgtggctcagttttatctgtaaaatggaatgataagaccgcctacctcaaaggggtgcagttagtgctatgagaatgttagctgctgttattcagaagggctctactccacaataccctccacttagtcaaggcctaccctaaaatgtatcctccctgaatagtaatcgataaatatttattgggtgataggttgcaaggcgcagaaacgagcttaatactcaaagcagtacaggccggtcatcacctacatcgaagcaaccagaaagtatctttatccccatctagattatgtctgggtccttccagactcctacgattaaattgtatgcatgtgaacaactgatgaggtacttagatctcagtgctttgcagaaagaaaagccgtctaccattttcaccaaatttcgtagtacaatttaagtatctcttgttatctcccctaggagtctaaagtgagctggggaaggcaggattttgcaaactgaccgccagcattccctcacctagtggacccctgcaggagccccaggtactcacgctgcggtagcggcacctggagccttagcggcgggggtgacgcgaagagccgccgggagcgagtgcagggagggcaggttaagagagtgtgggtccagtagcctcaccgtgactcagcgct

SEQ ID NO: 1888997 - DNA, 4001 bp, Homo sapiens
gattccatccattccggctactgtcatactccctccctcccatcacagtcccttcccccgtcacagtccctcccctcccgtcaccttcatcatatcccaggtcccctgaccactgaggggtgtcccctcctgtccccacgtcccccgacccctcccctcacatcccaagtcccctgaccactgaggggtgtccactcctgtccccacacctgtccccatgtcctcctgagccctccctcacatcccaggtcccctgaccactgaggggtgtccgctcctatccccacacctgtccccacattccccctgacccctcccctcacatcccaggtcccctgaccactgaggggtgtcccctcctatccccacacctgtccccacgttccccctgacccctcccctcacatcccaggtcccctgaccactgaggggtgtccactcctgtccccacacctgtccccatgtcctcctgagccctcccctcacatcccaggtcccctgaccactgaggggtgtccactcctgtccccacgtgccctgacccctcccctcacatcccaggtcccctgaccactgaggggtgtccactcctgtccccacgtgccctgacccctcccctcacatcccaggtcccctgaccactgaggggtgtccactcctgtccccacacctgtccccatgtcctcctgagccctcccctcacatcccaggtcccctgaccactgaggggtgtccactcctgtccccacgtgccctgacccctcccctcacatcccaggtcccctgaccactgaggggtgtccactcctgtccccacacctgtccccatgtcctcctgagccctcccctcacatcccaggtcccctgaccactgaggggtgtccactcctgtccccacgtgccctgacccctcccctcacatcccaggtcccctgaccactgaggggtgtcccctcctgtccccacacctgtccccacgttccccaacccctcccctcacatcccaggtcccctgaccactgaggggtgtcccctcctatccccacatctgtccccacgttccccctgacccctcccctcacatcccaagtcccctgaccactgaggggcgccccctcctgtccccaggtcccccgacgccttccccacacatgacaaagtggagcaggaaggagccccgggggcggcccccactcccagccacctctgccatctcgtccggacggcacagcggagtggggtctggaggccgtcccacggagcactgacccttcctgggggaggtcctctccaccctggccttcacggtcgcggcgggacagcgcagatgacggacgggcccagacgcccggtgacccgccaggcggggtgagacacctacaccttcccgcccgctgagtcctcgggagactcacgtcccagaggcgtgagtggccgtgacgcgcacattcaacgcacggggtgaatggttgctgggtgaatcaacggaaggacaggggtgctcagatcccagcattcccagtgccccaacatccccaccgtcccagctgtcccgacccgtccccacgcaggccccggcggcagggtgaggacgtccaaccggccaagcaagtcgtggcccccgggctcatttcataaccgtcctgggctgtttccacactggctccgcggctctgacccggcagagaattcacggtctgcaaggggtgcaggccgcctgtggctgccaacgtccaggccacagatcccaggcgaccctccccctgaaccccctgcccgtgcccccagctaagggtcccaggaggaggagaaggagcctcaatgacggaagcgcgggttcctgattcccagcccacaacaggcacagacggcacccgccacgtcccccgtaggggacttgccatcaggagaacggggtagacacactcaccttccagccgctggaatcccagagctcctggcagctcccgccgggtctctgcgggacactcttcctaaaacacacccagtccgctgcgattggctgtggcgcggacactcctgccaccaggaggagggacagcccgcccccgccacggatctgtccccaccgcaggagcgggaccggctgggctgcaaacaccgccctgaactcccacggggaccccacagaccaggactggggaccggaagacccctcccaggggaccccacggtgtgtcccaacaaggtgtccccggggtcccccggtcaggggcttagagacagcaaggacgtcccagaggtgtgtgcccacgggttctctgtggtcagaggggcccttgcaggggacattgaggtgtctgactgacgggccccactcgggccactggccgcggctgcggtgggtctcccggagcccccaggacggggtgaacaggtgctttcatctcggccctggggtcaacgcatggggccggcagtcccaagcctgcaggctctgagcgccttggccagcaaacccaccgggatcttccccctgcaggttccgacctctcccgccccgcgtggcccggaccctgggcagcccgtgccgcctccgtcggtggaagtggctcctcccagcgcagcccacgcctgcgatctccccccccgagccaacctggagctgaccaggagcccaggtcaggggtctgtccagggccccgttcctgcctcctcctggctgcttccggtccaccccgcaggtgctccccacgcaccccgctgtctcccaccccgggctggactccaggacagggccagtgtgggcttcagagagtgcacggaacgtttgggggccgcagtggacggctcaaagggctgccttgggatcccatgttcccgggtggaattctcccgcatagccacggctggggcttctctccctgcaccccatttctgtcccggctccctgtttcctccctcaccccagctgtggggtaccttgagggcggctgctgtcctggcacagggacatctggtcggcctacaagccacaggccaccggcctctccgcctctttccatcctaactcaggccccgtcacctccccacactccgccctcccccctgctcctcctccccctcctccttcctccccctgctccttctccatcctctccctccttcttcctgtccattgagactccccctctctgcccaaagccccctgtggcttcctcttggcccatctgtttcctccctccccctcctccctcctcctcctccctcctcccttcactgaggccctgcggggacaccagcctcctggttcccgcctccttccacagccctgggagagtctataaaatgacctgtgccctggtgtggcacgggagcaggaagcggcttccacgcctcctcccacagtcacagggcccggcccttcctcccgctgtgccccagagtcatgaggaccagaggtcacagggcccggcccttcctctgtgtcctggtgtgatgtggactgtggtcacagggcccggcccttcctctgtgtcctggtgtgatgtggactgtggtcacagggcccggcccttcctccgtgtcctggtgtgatgtggactgtggtcatgaggcccggcccttcctctgtgtcctggtgtgatgtggactgtggtcacagggcccggcccttcctctgtgtcctggtgtgatgtggactgtggtcacggggcccggcccttcctctgtgtcctggtgtgatgtggactgtggtcatgaggcctggcccttcctctgtgtcctggtgtgatgtggactgtggtcacagggcccggcccttcctctgtgtcctggtgtgatgtggactgtggtcacagggcccggcccttcctccgtgtcctggtgtgatgtggactgtggtcatgaggcccggcccttcctctgtgtcctggtgtgatgtggactgtggtcacagggcccggcccttcctccgtgtcctggtgtgatgtggactgtggtcacagggcccggcccttcctctgtgtcctggtgtgatg

SEQ ID NO: 1888998 - DNA, 4001 bp, Homo sapiens
ttaggaatgttccccaacatgccgttattcttctcacgattctgggagaaactgtacccctcccccatagacttatataggtggcattcaaattcttgttcccaactttttcatctttttattaatcccacaagattgtgtgaatgtgtactccgagccaggcacgttggacttctaacttcctcttagcccaagtaggaaggggagactcaggcgctggggaccattctcctctccctgcagcagagttgcagtccctatccctcctgggtgcccatccccgtgcctattttcctggatccccacccagttgatgtgacaggctcgtggcccaatccccttcctggttcccaggccgactgctagcaccacccgagccaatggcggcggccgaggggcggagggggctggcaggaggggagggagcgctggctttagagccacagctgcaaagattccgaggtgcagaagttgtctgagtgggttggtcggcggcagtcgggccagacccaggactctgcgactttacgtaagtgctttgtaggcgccggcgggcactaggggagcgggtttcctgggcgtgggcaggagtgggtcccggggagagcatctcggttaagctcagcaggaacgtgcggcgcaccgtggggcgggggttgggggagagggaggtcggagaaatttcagttggagccctcgggcgcccgggcgatcggtcgcaaccgaaatgggtgtgagtgacggggagtttccctactagcatccgccgcagacacgttttctgcacttcactgtattaagtggtgttttcttactagttgctcttaacttgttgccagtcttgggctggagtcctagacgccagcccttgccctgattcccctccgcggctgcggccccgaagtggaaagggagcgcacaacttccctctgtcgtccttctccagctactgccatcccctcttccctcccgcccggactcaggaaatcccggagccagcagcctgctactcctccagcccccacacgcccgcctcgggtgacctggctggcttaagccgaccctggggctctggagagggggggccgtggccgagggaaggcacgaggtttgggttgcctgccttctgcctgcttccctcccttgtccttagcgagggcgtcgcgaacgcacctagtctccctatgagtaagcactttttttcctttcagtaggagaacatctctgggctagtaggacagtacctttccgttctcccctggccccacaccccctgtccttttttcagctcctttgactttgcggccccgggcgcgcggtcggggcggcggcagtcccggacctctcccgactcttggagagggagaggcaaaggggcgacgggagggaggtaatagtctacccccccgccctttccccgcacagctgcacttgcctgtgtttacttttctccacccgcagtacttaagcgctgtaatgagaggcccggggacgccgaccacccccgccctggcttctcgccagtcccaaagttgctgccgccgtcgctgctccagtgtgctggcggttccgaccgccgggctccgggacgtaagatgatcccagcccgggaggtggagtgggggttaatggcatctgactctagccttatgcgatgctccttgcctctcacctgagctgcacgatatccccagtggtgcagaaggttgaacttttgcagaaggttgagcttggagctaagtgggttggagagcctcgccatttagcgtcagacagacgggatgctgggggcgcccggcctgttaagagggattgggaggagggaagggagcctggctaacagtaggtagaaaatgtagggaaaagtaaaaaccattgaggggcaagcacttactccactttgctggatgtcacaatggactggggagcctaaacttgatcctcgagatgcagttcatggtgaattccaactaagtggctggagccccacacataccagttggaatcacgtgccccaagtctctgatggtcacatgacgtctttttactttaaagctggaatgtaatggttgaggcccatattccaaaaaccacctctacgtttgaaaaaaaaaaaggtggggaggagtgtgaactagcttctaatcaaggaagtctactaggattttggatgaggggaccagaaagggaatttggtgctcagcttttatccaaaacaaaaacaggagctgtttttaaaataagggattgaaatatatgtgagctgggacatgtatctcctctcttcttcaatctcatggtttttctaaatttaaaaaacatcttactaattattttctagggaagtcatcctattactcatgcctcattttgtccctgaatactagatttgaagctaaatcccacaagatagtgttaaaaagtaaggctctgttcatcttccttggtctggcctatattctaattgaactgttccctattttaggcaactacttaaaggtagtaaataacctcttgactaaaattaaccaccagttatttgtggttttcaattaactggattagaaatcatgcacaaaaacagtggatagtaaatttgatacatcgagttggttgggtttttgcctgtcagtggtttggtagaataatgagaggacactgaaacaactttcccatattgacctatacccgcccaagtggcccaagttaaggttgcttctgggaaaacgtggcaatttggctattcagattatatattacagagtatagaagagaggcagaggagcctctgaggtcaggagtttaaaagctttgcttatctgaaaaaaaaagaaaaaacggacctggttgatgcatattcagtcttgaaaacaactagggcagaagatatttaagagattctgactttgtattcttttgccaaaaaccctttgtctcctgcagcagcctctgaatgaccggagcactccagtttcttgctgttcatccgtttctgagcctgaaaactagaacaaccttaaagcacattgttctgaccccaaggctagccttgtggcacagatgagctggaaatggatttaaggtgcacctgagttactagagttaactacactggtagatagacccctctagtggaagtgaggtgataatataattttagatcgaaataataaatgtttaacctcaaaaaaaggaagttattaccactcaactaggttacagtggtagggggataagttcttttttaagtattgtgaaatcatgtctaaacagaatcatcgctaggctctagtccacagcttttcattgtcttgggatgcctactcattgaacaccacccccaatattgctgactttttttggtggtatgatctaatgagcccaaatttttattgaaattagggggctgggagtcaaattcttgatttttactgttagatctagcagatagcaacccctttacctgaggtggggagctattaataaataaataacactttgccttgacttaatacagacgatcaacattgaagtccaaagtctctagtctgatgtaaccatttagattcaattgataaaaatgactaggcttatggcattttgggtagaaggattaattataactagtgagtaataatttgggtgagattaagcctcttccacaagtggttacacgcacattagactttgactgtgactgtttatactggcagaatgtcagtatctagggcactatcagaaacccaatgagatttttctcccaggagaacagaattctgttactgaaaataaaagggcagcttggccatggtgcttgagcaccaaagtggttctttttggtgacactgagagggtacaagaagaaagtccatttgccattatcccatattctgttttaggcattatttctacttggattttcatgaaatgtactgacagtgttcttagcacatatgataaattcatgagtttgctgttgtgtttgatctagcataatctat

SEQ ID NO: 1888999 - DNA, 4001 bp, Homo sapiens
atcaacattcctccaagaaacaaacttttctttgtttaccatgttcatgaacacaaaaatagttgataaggaggcaatggtgacaaaaagaaagctggaatctgcctttcaataagcaagaaatagtcctctcatccaggtcatgtcgtccacattccattggcaggtattgtcatatctgcatcctacattgtgaggtcaccaaggcaacctattaatcattctagaatctacctcttgaagattacaaatgagactgggaaaccctcttcaataagacctgtgtgatgatagattgtgtcctgagcccgcaggtcaggctgaaagagtcaacaaccagcaaagtgaagatctaggagtctgttccccttgaacctgtgtggacctgatcaaacctcgagggaaaggtaagagaagagcacttagtggaccaggtgaatggagtatgatccgggtaggcatgggacaatgatcgaaagttaacctgtggcctctgtctgtttagttgtttagcccaactcttgtggtctttatgttttatgtatgaagtttgttaaaagctttaatatatatgtatagggtgaaactgggtcaccttgatgtgctggtcactgagtcacaggactgtgactttggggaggccacctaacttctctgggcgtggtttcctctcctataaaatgaagatgtctgaggacctttctagacaagtccgaaggatcagagtatcttaccacatttcagcctcacctgttacagagctctgggcagagaacctcatgatggtcttgcaaggtgactccattctctgtctagatcagttttgcccaattcccagtgctttaacatgagagggagttgcatcagtgtgtagtctttgttttacttttgttcttggaatggcagattgtagctcctgtagaaggaaaagaagaagaaataaggaattagcattgctctacattgactcatgctagatgtcaatctgagatacatgtaaaacgtaagcacatacaagataaagaaacagattgtggcaatatttaaaaatatcctagctttctaaattagaagcagttctgataagcctatttggaattcatgcaaaacatccataactctgacagtctgaattgtacatggcaaaggtaaattgcttccaggcagtaattctaggtgcaggtttagatggactatacggtaatcaagtctccattgctttacagatagccctcactccttggcctcttactttccagattgcttctttgttagcctccctgttggctccttcctcttttcattctctttaatgtctctattccccagtgttctgcttttgcctctatagctttactctataagctctccctggctattttatcttctctaatcacttcagctattgtcagcaacctgatgacctatttaatctgactctctggtcctgatttatttcctgagctccaaacccaggcttctcctgcctgtgggatatttcaacagtgaggtctcacaagtactgaaatttagcacactgctgactgaactcacgatttttctccaccataaactcgcttgtcccccttcatgtccgactcttgtaccctttaataccctattgcaatgaatatcatcatctcttagactgtaaattataagaaggcagaaaccatgtctatcttgtccaccccttgtaaccacagcacctagcatagtgcctggcacatggtagacacccagtaaatattgtcaagtgaatgatgaatctatttattcttccaaactaaaaaccctggaatcctcctcgatgtctctgtctccctcactctccatgcccagtctgagacctgtggggtttgttacataaaacccttttacatttggctccttcttccccttcatccccgctgccatgactttaattcagcccttaccatctatctcctggattattgcaggagcctcctcattggtcttcctgttacctgcttttccccattcatcaccatctgatccccagagtgatcttgcagcttgaatctaatcagcttaccctcaggctccccttgacttaaacagagtttgcaatctggcagctttaagcggaatccacgcagtctgtacggcattttgagaaaatgagaatgactgtattttgttgattctaagatgcatttttttttcacattttagcagctctgatattgggatgtgtcttgaaatggacagtgacatagtttgatcagtggtgttctctcttattggtacataaaacagcagtgtaccctgtaatcagtggcttcataaatttgctgaaaaatactcatgctaacatttaaaaataaggagatcgtacataaaactatcttcagcttctcttggaaaattacatcaggcaacactgggctgcgatttctggatagcagccgaagatggagctaccagtaagtagcagctacctcatttagacaaaaactcgctacagtgtctcatggtttccacccaggctgctttagtcatttgtattatctgccccagcccattaagcatttgaaaggacaatccctgactgataagttgaagtccagattctttgttgtgatttataagaacacaggtggcaccaacctacctcccccaggttaatgctcccaacctttgctgtgtactctatgtatcccctaatctcaaatataacagactcccatgttccctggaatgtctttctctatcttttatgccctacgaaacatttcctggtgttcccaggtcgagctcatttctttctggactccagtagtaagtatgtgggcgtatctctgcaaaaaccgcagttacttttgcactaacctaaagtacagttctgtgatttattttttatttttattttttcgagacggagtttttctcttgttgcccaggctggagtgtaatggcgcaaccttggctcaccgcaacctccgcctcccgggttcaagggattctcctgccttagcctcccaagtagctgggattacaggtgcctgccaccacgcctggctaattttttgtgtttttagtagagacacgttttcaccgttttggtcaggctgctcttgaactcctgacctcaggtgatccacccgcttcggcctcccaaagtgctgagatggcaggcgtgagccaccacgcccagccagttctgtgaattttaacacatggatagattagcataaccaccatcatcatcaggatatagaacatgccccccaaaactccctcctgctagccctttgtagtcactcccctccctcacccataaacccctggtaaccactgatcagttccctgtcactatagttttgtctttttgagaatgcgatataactgtctgtatccctttcagcatggcctcttccactcagcataatgcctttgagacccatccaggttgtgtgtatcagcttcatttgtttttattgctaagtagcatttcattgtatggatgtcccacagtttgtgggacactcacggaaggacatttaagctgttttcaatgtttgaccgtatgaacctgcatacacgtttttgcatgaatagaaaattttatttctctaggatagctacccaggagtaggattgctgtcgtatggtaagtgtatgttcaactttataagaaagtaccaaactctttttcagagtgactgtaccactttgcattcctgccagcaaagtgttagagttcgagttgctccacattctagccagcactggatattgtattaaaaaaaaaaattttagctgggcacagtggctcacgcctataatacaaatactttgggaggctgaggcaggcggatacctagagaccagtctgaacaacgtggcaaaacccactccctacaaaaaatacaaaaattagccgggcatggtggcatgtacctgtgatcccaactacttgggaggctgaggtggaaggatagcttgagcccagaaagttgaagttgcagtgagctgtg

SEQ ID NO: 1889000 - DNA, 4001 bp, Homo sapiens
cctccctccctcatgtagaaccatgtgttactccctccaatgttttcatctgcttatctccccacttgtgagtcatctattatttttccttatcacttctgcaaccccattcctcccctaactgtagccaaatgtgagctgggtttccttctcttctgagcaagaacaggtcacgagggctgagctttctgtcttcaccttcagacagaaggaacttgaaagaaagaagaacgcatctgcaggcagctgttcactccgcaggcatctggaaaccacttctttgcattcaaatagttatgtaaccccacatgttggaaggctgaagagaccatcatactcaaaatggaaatgacactgttgcaacacatagaatatctgagagaagaaagggtttctaatgtcttgactatctatgatattccataaagttaagggattgatgtgcatgggctgggaggactgaggaacaaaggacagaggttgaggtaggtacaaaaagggtctactaactactttagaatttgaaaaaactattgataccaaatctgcccaccctctgtacaaaaaacaaaacagccattggtgcaattttaacctgataatgcatgaaaaatggctatttttgacgagaaaaagttcagtcatttccttgtaaaccaaagaaaattaagagaaactgtcaagttactacaagaaaattcaacaagaactcttataatatattccctctcaattaaacagcaaatcaccctaatgtgtttttcagcctgaatatttatcagcctagataatctactttaacaattatgttttgcatttttaacaaaaccttttctgcaaaagttagtataactagaagtgaatataaattagttacctttcaagtctttaacatattaaaaagctatagaatatatacattaacccatggttttataaaaggaatatggctttataaaattaaaagcaatatcaggatctgtatttgtgttaaataattacaataacatcaagcagacatttcccacttaatctatgactctctaagattaccatttaattctgcattacaatttaactaagtaatttagtactcgacgcatgcgctacagaaaacaagaagcagtgtattacagtaacaaggtttgtatttcacaaacaattgcaagggtgaagcagatatcttctaagcgtcacatattcacaaacaattgcaagggtgaagcaggcatcttctaagggtcgcatgactgggtttgcagtccaccggtcagaggagcttcctctgattcttccgcagcagtcttctcttcgttcgtgccttgtggcgtttcttcgttttcattatcttcactttgtagctctttccacattaattgtctagctaatttgatgttcaattcttcgttgtagtgaagccttcttctcatttcgaactgccgctttttctcctgtttgtggaggaggatttttctcatgtaggcctcactgctctcttgctcgtccacctcacagctgtggtcggaagcatcggtggcttcctttccttcgacaccacgcactgaatcttctccttcgacatcgcgcactgaatcttccccattatcttgcacactcatgtaggaagtgccgggctcatttgccttcattaaatcgtaatctctgtacgttgcgcggtgtgccgcaaggatgcttgattcgtcccacttttgggatttctttctcttcacatcttgaatagtccctccagactgctgaccggaagtcgccaccgaggaacccgacgagcttttgtttttcaggatccccttgatgggccggtgcgaggaggtggaggctgacattttgcggagagaagggctgcgagagagttgggccgctgagtagccgtccaccgccctccagtctgaaactgcagggcggtctgtgtgggcaacaggtcccaacgccctagttaaagcaccagggccctggtgtcacaaagggcgctgcgtatgacgtcactatggtcgccgcctccgccaccgctgccgtagttgctacggttaccgctatggttaccgctaccgttgcagtcaccgttgccgctaccgctgacgtcaccgctaccgttacagctaccgttgcttttgccgttgccgctggctgtaccgctgacgttaccgcctcgtggcccatgctaacgtcattttttttctcttttaacggaaaataaggtaggaaataccctttggttgtacatggaaaggggaagcattgttttagaaacttctatacaccctgtctgcccacaggaaagctatgtaaaatatttctcattgtgggtcactgtcaaaactttgaaagccacgactttggttggaaagatgagaggcctcagctagaaggtgatgaccttctgctcctccctcctgtgcccatccacactctccctccaccacgcataccttggtcctcctctcttctccctgtcttggtgaatgaccccaacatagagctaattatatcagctgggaatctgcgtgtcctcctcagtcccttcatgttgcccattctccaatccagccctcggatgtgacctaaatatttcaagaggcttatttgatctcttctgccaccaccgtgtttcaaatcaccattttctcttatggcaacttcactcacagtcattgaactgggcccccagtatctcctcctcctgctgtccaatctcttatccacggtcaaaacacccatcagatcttcttcatctctctttcaaacccttcaacggctgcccactgttcttgacataaagacccaaattcagaagaggctgaaaacagctgttatgatatgctcagtttactcacgtgtctatctgcagccttctccccttaaattcttcccactctacctccagctttctattctgatcttcccattgtgggagcattcatgaaccttcctgtccaagaggttttttttttttttttttttttttttccaggttcttcatgcagcctggagcaccctttcagatttcagttcaatcatcattgactttcagaggccatttcctgacccccaacagcaaatagacctcgctttgctttcatggtgtctcttattctctgtgacagcattttgagtcatttgtaatttcttatctgtgtacactagatgacaaacatcaaaacataaaaggaagtgacaaagattctctcctttgaccaaactttaatcaggctcctctaagccctctgctcgactaggcctaaacttgggcttgtagaatccagtttgagcaagaatcctactaagttaatttagtgaaaattccccaccactgataactgacttccctgagtagctgatcaaattcctcatgccccacactagatatcttgtcaccctgttgggtcagtctagcaagaattccccttagccctgatgtttcctttcagtaattttctattcactgagtctccatcctgccctttacctattcttgttggagtggcagtcaatgccaattttattcccctacacggaccccattgcagtggttcgtgtatctactgtgatagtcctccatggaatagagtctttcttaccatctttaacaagtgtcatgaataatttttttaacagttgtgttggctgtgactcagataagatcagattcaccattggacccctggagctctcatccagaacctgaagtatgcacctttgaaacctttgtcttcactcttggctgactgatcaggaatccattggtaagcccaactcttgagccagtgctccagatggcagtctgttgaagcatggtgaggatacattttgattcttatgattctgagtatactctctgaagctgcgttagagtctgaagctttttatgaaaggcacctgagcttcctgcactccagcctgggtgacagaatgagaccctgtctcaaaaaaaggaaaagaaaaagaaagagagaaagaaggcacctgttgggctggaagtcttt

SEQ ID NO: 1889001 - DNA, 4001 bp, Homo sapiens
ctacaggcctgcacaaccacacctagctaatctttttattttttgcagagacagagtctccctattttgcccaggctagtctcaaactcttggtctcaagtgatcctcctgcctcagtttcccaaagtgctgggattacaggtgtgagccaccacactcgcctgcaaagtcttactgataaaagatttgaaggaaggatgtgtcagagaacttcttttttcttataatatttacttaatcttattggtttggggaagggcaagagaatcccagttatctagatttttctttttcttaaaggagtatgtttttacttgctaactctctttgtaaactgttacttcttaaagatgctgaagggtgatcccgcattagtgtataggtaaaaatgatgtctccatttcatatatactgataaggtgactttattaagccttgtggtttgttgatgttgattttactgagacacttgtggaacagatgtattttcatacaaccttacacatctcagtagttttccccactcgtgcagtaactttttctcccctgctttctctcctcctctccccacctcttcttccttcccctcctctcctcgtcccttccctcctcttctcatttgatacaaagccctaactctcttcctctacagatcatcctacccatggttgaaattgcaacttcccctgcaagccaagtgaccgaacctgagatgtttgtattgtcagggcttgcgtattctacatgcctgtgtaatcctcaaagttctttcattccttgcttctaacctacccaaatccttctaatctcccaccatggttaattatctctgatgctcctgaaaggtgacctgctgctacattgtgacaaggtgatgcattattcttaagaggatctgtgcagattattatcccagagtgaggtagatgggggaggatacaggatatatccaaaaatgtgttgcaagctaattgatagagagagagagagtgtgtttgtatgtgtgtgtgtaagcatgcgtccatctttttcttacatatttgagccatagggaagtagagccatgtatattctcttcaaccaaattaacagttgtagacagtggtcttgctattgctttgactattaatggtattttcaagagctcagtgttacccccaaatgttcagtatcacaccttggctggtcagtcgtagctaaattttccttccaccttgcgccctgaagaaatttagaaagtcaccagctgacacagaagtttattgtaaaagttcactagtacgatagtatttggaccttggaaaatatttccccaccagaacagtgaaatcatgaaatcatggttgtcttctaagctcatccacaaaagtacagtttgactgtcatgcatttgagatgccatgtgcttaatcacgaaatattactgagaggaacactcttgcccaaccaataacggtgcaaagcagaaaaacagggcatttagctgggagaaaatgagtcgagatgtcagtgataagatggaaggaatgtgggtatgtgctgggtcttttagaactccagcagattgctctggaaaacagccactacataccaaaagtagccggtcatggtggcatgcgcctgtaatcccagctactcgggaggctgaggcgggagaatcacttgaactcgggaggcggaggttgcagtgagccaagatcgtgccattgcactccaagcctgggtgacagagcaagactgtctcaaaaaaaaaaaaaacaaaaaaaaaaacaaaaaaaacaccactccaacaaaatacttctccttcctcatatagtgtccctgcttccctttatgcctcaagaccacacattttgaacttgctgagctataagaagtgaatggagaggtgggacacaggtgcacagccttcagtaactgaaggaaaaaaaacagaagaaatgtctaaccctgagcttcctgagctcccttcagccacccagctgctgaggggcaggaatccagcagcaaggtggagagcagaaggcattcctgcaacctgtatgtgtgggtcattagtcccccacctccagcatcattgcagaatctgcaaatttaaaagtgcgttaggtaagagccttttttataagaggcccatatttttgctaatacataaaaacattgtgattagtcaaataaatgttcatttaaaattcacagtagcatgtgtctatttttttttttttttccttttagaaatgaggtcttgctctgtcacccaggttggagtacagtgatgttgtgatcatagctcactgcagcctccaattcctgggctcaaatgatcttcccacctcagcctcccgaattgctgggatgccaccatgcctggctgattcttttattgtagagacgggatcttgctgtgctgctcatgctgctttccaacacctggcctcaagtgatcctcctgccttggcttcccaaagtgctggaatgacaggcattgagccgccgtgcccagcctatgatttttcttagcattaatctctgtgtcattgcaagctgtctcccacgtccttgccttcattctacattgttttggtggaatggcctgtgctagcagacaagaccatccggtcgaccttgagcatccttccctgtcctcagggaaggtttcctgggcctcattttgttttctttgtataccagcggggtgcagctcatttgaatgagcttgcaggggagcatctgtgatagcatcatgatcagatgagacaaaactggcacgggtcctggtcatggttgaagacctttatgctcctgattctattgggtgtcttctactggtgaaggctcatgtgctcatgggaacacgggcatgctggtgtcttccgagtcctctccaaaaacaaagcccaggtcaggtacagtggctcacgtttgtaatcccagcacttcgggaggatgaggcgggaggattgctggagccctggagttcaaaaccagcctgggcaacacagtgagaccctgtctctacaaataacagtaaataaaaattagccaggcatggtggcatgcacctgtagtcctagctacttgggaggctgaggtgagaggattgctcgagcccgggaagttgaggctgcatgagccttacctgcaccactgcactccagcctggcagacagaataagaacctgtttcagaaacaaacagaccgggcacggtggctcatgcctgtaatcccagcatttctggaggccgaggcgggtggatcgcctgaggtcaggagttcgagaccggcctggccaacatggtgaagccccatctctactaaaaatacaaaaattagctgggcgtggtggtgggcgcctataatcccaactacttgggaggctgaggcaggagaatcgcttgcacccaggaggcggaggttgcagtgagccgagattgcaccgttgcactccagcctgggcaacaagagcaaaactctctgaaaaacaaacaaacaaaaatcccaaagcccttagttccaaatcttgcctcataccccacccgtcccatctttaggtgaaaacgttctttcattatcagtgcgtatctctccaaactgtatttgtaacttgtgctgagatgttgaatgcacagacgcacctcagtatcttctgttccttctttcatccctacccccaccttcctcaatctctcattgctgcgttttcttccattaatcaacacctttgtaaggagaagcacctcaggcaagctcccacaagcaagtgcttcgaaatacttcatttggggctttttaaaagggctaccttttcctagcaggtttgggatgcagtctgctagtttattgttaattctcaggcttaatgatagttccaggttactgaatcaggtgtgatctctgaagatgtgtgtgttgtaggttagttagttagtgctgccataacaaagtagcatagacggtgtggattaaacaacactgatttattgttttataatttttgagg

SEQ ID NO: 1889002 - DNA, 4001 bp, Homo sapiens
acgtactttatctgctccgtgatggccctagtggctatgccttaggctgggtgtctttccttgcttctgattggtctgcattaccagggcctgttcttgctattcctgaggctactcctactcccagaaccagccccagggtggtacatgccgttttctctttgttctcaaacacttccttgacctcctcgtagctgcagatctcctccatgcactctcgctcgatggtgccctggcgcagctcctccaggaactcattggcacgagggaatcgtttcaggaccgaatgggcatccttggcctccagaaacactgaggagagagccctactgaggcctggaatggggagatgcccaggggctccttcaaaccaggcccagcccagcaactgaagcataattatgcagggaaacaaggccgagtgagcaggcaagacaccaggcttctgatcaaaggacatggccggccctttgtgaaagggatggaagggctgacattctatggtgccatgatacacctgtctagaataccacagccccaacaaggtttaggtccctggctacatggaagaaaatggtagccaactgcaaggaaagtgcacgttgcacaggaacaagaaagaataagaattgtaagtaggcaatgttcagtgactaaagctccagtatcttctgcatcaccttgaaaagtgaaagttggagcccttgcaatgagaatgtattcctctttaaggctgatactggtggaactaataccagataatcctagaagactctaccagggtggtgttcctccacctgaacatccacctgtgccaccaggtggtctggcatcaatagtcttgttcaagaaagtctaatgcaaagccagcctaggctagatcagacaagtgggcatacacgagcctaagagcacctctggggatgggaagtagcagggttcagatggagagtctaagcttttacagacggggcacagaatctccctacaataccgtctttggatggtgggcatatctacttattccagagagagacacccagctacaaacaggctgaccagaatagcttgagctctgcacccacataagcctaagttgagactgtgaaggatgaaagaagaggtgacgtttgctcctgttgttcacctagaggtgggacttcctggttcccatgtaaagcaactccccctggatgcccaagctggcatgtctttgccagcaggcaggcacccttccccaggccctatggcctgtcacgttagtgtcactcagggaagcctgggtaggtacacatctacaagtgacatatacttcagaagggagccaaagagttgagagggcaaaactgctactcagccatttggaaaatggctacaggcccacttggggggtagggggcagggaagctgggaaggacttgaaacctgactcatgaacccctaggcatggccctccacggctctgcccaggcctggaaaaactcacctgccatgatgctccctcagctgcagggtctcacttctctggagtaagagaaaagcaaagttgcagtgaaaccacatctagaaatttacagggcacactcttggctctgggatgtgcccccctcccactggcgtggtcaaaaggttgaagcagcaccttgtggggtgcgtcgtcctccatgcagccacccatggcttccgctgcttctcattctgccccaagctcttctccagagacctccccaggcccagtagggcccaaagcaaacctttcagcgttttcccccaagaacatgttctgagcatctataagaaccaagggttgacctttttcttttaaaaaggaaagctcctaaaggctgaggctcctccttccttgctcccctcaatgaatctttgcaacttccaattggaaaggacctcagagatagatgaggagatacagcccagagagacgggctcagacaaggttaagcaaatcaacagtgacagtggcaggaccagaattcacaactaattttgagcacaatggtgagtcacagatacctccaatgacaagcatgttccctgaaaacaaagcttaacacagcatcaaccatctcaaaagtcactgccctgctgggactagcctatagcaaccttcagtggacacatcttctacagggtctcatcctccatgcacaacaatgctgcattcttcatattcccaggcataatcagaaggcccaaacccaggtgacccgctgtgttcatcttcaccagacaaagaggcaagatacctggaatcttctggaaccaggcctctcttctctctttgcattaaagcccatggcagtagagtgccaagacatgaatttagatgcccgacactgagacgctaactacaagagttgcccctaatgtgagctattgtcagaaagcctttctcctgctaaggagctatccagccagtacttaaaccatggtcacagcacactgctccctctgtccctccccacaatacacacgcccactcatacacacattctagagcccttgctgagctgtccacatctgggagcaatcaccccactgctcccctccccaagcagaagctctggtttgatgactaactggatgcaagacacgtgaactgtggaatccattgagccctcctttttgcctaggctgccaggaagttcagcgtcactattgccagtcaagcacaggcaccctggaagcccagctgttaagcacatatgcttctgtcctgcgatgtggtatacagctttctatttatgtttccagtgtcctattgtgcatttataatatgccacctaatccttttggcaaacaggtaggatataaatcaataatttaggctggtcgcggtggctcatgcctataatcccaacactttgggaggctgaggcgggcggatcacctcaggtcaggagtttgggactggcttgaccaaaaaatggtgaaaccccatctctactacaaatacaaaaattagttaggcatgctgcggtgcatgcctgtagtcccagctactctggaggctgagacaggggaatcgcttgaaccagagaggcggagattgaagtgagctgagattgcgccactgcactccagcctgggttacaaagccagaaagaaagaaagagagaaagagagaaagagagggagagagggagagagggagggagagagggagggagggaggaaggaagggagggagggaggaaggaaggaaggaaggagaagggaagggaaggaggaaggaaagaaggagaagggaaggggagggaggaaggaaggaagaaagaaagaaagagagaaagaaagagagaaagagagaaaagaaagaaaagaaaattaaaggtaaaacagcagatctgacatctatttgtggaaacgccacatcaaggggctttctcttttgaaccctgcaacaatctccctcaaaactatcaacatgtgaatttgtcaacagatggcctgccttgtgagacagttggccctcaatgtttgtcagaaccaagatggaatatgatctcaaaattctgcttgcattatggatacctgagctttatgtggtgagggtgtggatatagtatgcctcatggcaaggattttttgcttgaagaaaaatggagctgttgtatctgggtttgagaagaatgcatatagtcttaataagggaagagagaaaaatatgcttatcaaaggaaactgcagtggttttttaaaaaaatggagaaaaatttacataatagattacatatatccatcttttgtcccccacacacctagccttggtcaaaggtggctatatgtcacacctatcatagacccgaatacatgttatcctgacgcacctgctaaagtcaccagttcatttttaagcttcagtcgagccaggaacacccccaaaacagttcccatggcatggcccactccattagcaattctgtagccaccttcactgctgctgctgcctgccacgaggcctcttccccctccctccccaa

SEQ ID NO: 1889003 - DNA, 4001 bp, Homo sapiens
cttagcttcttaaacgcaagggttggaattttgtctggttttaccgactttgtatccacagtcccaggcacacttgttgactcaaagtaggggcttcataaatgtccattgtacaaatcaaagcatttcatagagctcctcaattcctaggactgtctggttagcatattaccatatgcttcctggtcactctcataagcaccatgtataaagaagcattttttaaaaaaagtacatgtattatatccttgaaagaggcatgaaagagggcaaaaaaagttgaggatgatttgctactctagacaagcagcacatttctaattatcttggttacctaggagtaaagtatagtctcaagtcttacagtagaaatgagaaggaaagaaatatttagctgcttaaacctaatgttaagcaaaccatattccatctataactagatgcagtaggtttttcatttattcccaacatgtttgatgaatggttcaccctgataggagaaaacgctaagttcctactataaaggacaatgaaaggccaacgaggtaacattgggattccagaaggccctttactgcgaataatttacattttgaggctactgtttgtttttctcttttataaaattaaacataattatctgtactccatacctgtcccattgggagtttggaggaattaatgagatgatgtttgcggagtgctcagggcccctggaaacactattattagaacagttaagtaaaatgttgcttatggtaacctatggggtgacttccagacaagcaaggctgacatcagaataaaaaatagcaaagtgaaacaagaaggacaaaattactatttggtgattttacagtaatgaaaatcatccactttctgaatttctaactgcactctccaatccagtagccactagccccatatggctatttaatttaaaccgatgaactaaattttaaattaaattaaatttcttaaaattaaaatataaatagcctcatgaggccagtgctttctccattggatagttcagatatagactatttccatcatcacagaaaattctactggacggcagtatgaatctgagggggtcttttgactctttgtatctgaatcctgttatttgacactttcaaagcctcacccagagtagggatttggaactttatcagctagaagagagattactcatcgagctgaagagaaattattcttcaaagacaaatggtttcctttcaaacgcgttttgccttttctatgctgcctccgcctggttagcactaagaatatgtgcagtgtggaatgggttaaatgtttctcttttttccctatctcatatttctcagtgccccatctatatataagtgctgaagtctgggcagagagtaaaccatctgagtgaccatgaacacagattcataactaaaaacctgctatatctggttgcccacaaaataagagacaggtcattaatacattctcgttgggaacaaatcccctcttgtgtgaaatgctgctgcatctcatttttctctttatactattttaatcttgtgggattagggggtggggtggggaacagaaacgagcccagcgcattctaactttgtgtgggtgtctccctggcttggttaccaaagaaaccattatgttccatactattcaaataatggctctactagcgccctaaatactttcttcttttctaacctgactgcactgcagatttagagccaccatctgttggccagcaaaagagaagggtttctggaaatgtcacggcccttcccacactgtttgaagcctcagtctcaagactgcaacctaagaagtctgcttctgaagccaattatttccttaccaggcccaagacgctgtctccatgcaccactgcactgccaaactgcataagtgaaaggtatttgcaggcatcctgtgaggctgccaagcctcctgccacccatgctgccagcctcttctctcgctgcagttgtgagggccttgctgcttcacccctgaagcatgctgggggatctggctgggatgagtgcttccctgccaccctgggccctggagtgagtcacatcaccatcccatggatgcctattgctgatttacagagcaacaaatccagcagctgggaccacctgttttcatggctgccaggatgggttgtgcccttcagaggctcccgcggcaaagcagaagccgccagcccaggatgtgattgccccgggagagaggtgctggaaaaggacctggttttcacgctccactgccatttgcccttccctacccagtctttagatatacagaggtacaatgtacttggcaaattccctatgaattccaggcagccaggaactaaggaatgaggtgttcttgtaaacctccaggtctctgccacagacgattctgagttactctcccaagcagtgtggtcactctttctgaggttttacacaggaagttgaagggcttccaaatgtctcctgtctgggcatctaagtataaatctggtgaaattttgcagtctgttcaaccaaaagagtgttagtgattgcaacttaagaaccacgggctgggcgtggtggctcacgcctgtaatcccagcactttgggaggccaaggtggacggatcatttgaggtcaggagttcgagaccagcctggccaacatggtgaaaccctgtctctgctaaaaatacaaaaaattagctgggcttggtggcacgtgcctgtaatcccagctactcgggaggctgaggcaggagaatcacttgaaccctggaggcggagattgcagtgagccgagattctgccactgcattttagcctgggctacagagcaaaactctgtctcaaaagaaaaaaaaaagaacaaggaattattcttaagatcagtagttgcttccattaagaccaacatgcataccacatcttttctaacgcagtactttaagccaggagtctccaaactttcggggtcaagcatcctattcacatacaacatctttgcacgcctccaaatacacatatctctatttacaatgtgcatatatatatatagatataccttctaatatactactgtattatcacattacaaaacatgctcccaaaattgaaatcttaaaagcgttcaaatgaaaatgcaatatttttaaaattaggtttaattttgtttcatttattaaaggcacaaaagtcacttttactctcactggaaaaatctgacatttttaaggagagaaatattatcaaactagcgcttttattttttgatttagtttaatttagaggtattgtgctaaattcagtttcttttgatacttggtttttaaagctgtgacagcccccacaaaaagaaagagagagagcgagagagatcccacaaagacgcatagatccaaatggaacaagtgaggttattttacaacctcataatacctgtcataaaaaactaatatctgtataactatctgtgataacaacatgtgtaaaaaacatatatctgtatgctatatgagatacacacaaatataagacatatctgtatctacgtatatgtatatctatgtttctgtataagtgaatatgtccccattgggacatacactaaaaaattgtttacgtaaaaattcaaatttaactaggcctcctatactttatctggcaaccctaaactcgtgaagtttatttttttcttatttttttaaccataagtaaatataaataggagttctaatattttctttctgcatacttagcaatggagatcatttctaagaagctgccaccagagtccctggccaaaccagtgtcctcctcgaagagctaatacagccaaatgctaataagaaacccctcttcacttaagttccttaaaccgtcccctcctcaaaccctccttaccctgtagtagcatcgtgcatcaatgctatgactgactgatatagaaccttcttcatttttctggccaatacatttattcaa

SEQ ID NO: 1889004 - DNA, 4001 bp, Homo sapiens
actggaggtcttggctttttttcatcataaaggaaccccctcgggtggctgaatggtcccctgggctggtgccaaagtagtcactacccccaagttccagtctgacttggttcatagtgcctgggctgccctggggatgcctctagtgggcatctgtcaggacgagaagcgagtgcccatttgaaggagactgtgtgtatgtgggggtgtgggggcaggtggcttctctgggcttgtaagaggcagagaaactgggatgccaccatcttacaattctctgccttccagcccacccctggcttctcatgttcccgtttgagaagaaaactagcctccatactgtccccttccgtattgtccccctcccaccttgccacccctctactgtaacaaaggcatgtccacaccacattttcaaagttgtcacaagtctctcggtccaccaacaaccaattctgatgactccaaaggagcaagagagacatccagaaaacggtgggaaagattccctgggaaaagcacagaaaaccttgcctgatgcttgcaaggctaagaattgttttctccctgctggctgcttttctctctgttctaaagagaagcttccaagaatcagttaaataaagggatcacaccagaggatgcgagataatgctaaaccaacaaaaacaaagacccaaatgaaacagacagagccatgagaatacgcggttatcaaaactttgtttggccatatctatttatcatcgctgcacacccgggctctgcggaatatcattctgttgatgtcacttatcctcagcaaaatatttacacatccttaaaaacgccagatgaggggggccggcccgcgcactgccgcaagccgcccctcaaaccccatcgctgggttctgaacagcccacgacataggggcacgacggtgggtggcaccagcgggcacaggtgagagctaccaacagttccgggaacacggtcacccagacgctgcgccgtgccctccccacctctcccctacctgactctgcaagcagcagccacatacccgatatggtgtcggcgcctccttgtcctcctctcctgcctttttcattgattaagttctcaaaccattgttaaagctgggttgctttttccttggaaaactgggctaaattcattaagcttccctctgccacaaaaggaatattcataaaagtttggcaggcagaaagggagactgagtgagtgccatggtgtgggtaacaacccgctcctccaaagccaccttcttcttccgtgccccatccctctctccatccatccgtcgtgccccaaacctactccaaggacttctgatagggaaacacaaagcagcagctgtttggcaacatttctacccctcgccagcaactgtggtgggatgccatttccccacccaggcggagcttatcctgaacaatagtcgggctttaaatggcaaacaagcaaacacacagagcacaaccccaaccccgaaaaagccaccgcggagagaagcaataactccctccgcagcaaaaggcgccactgaaacgcacgcaaaaatgcagcgagaacgttgctcggtgcctaacatggcagaaagcccgagctggtgcggccaccccggggctgggcattggggggcaccggggctcccggggcgccgacgcacactcacccggctccgggggggatgcggggctggccgcgcgtcacaaagaggagcccggcgcaatctggcaaaacccaactttccaccaggctcgccagggccgccagatacgtcaacagaatccatctttcgaagggcctggaaggcgccgggttttccgggccggggcagaacggcagatccggagactgcccggtgcggtgcctgggcgcggagtccgccgtgcaccgccctctgcgcccgatgccagtgcgggcggcggcccgaaacccacttcggggcccccgccccgccggccggcgccgcctccccggcagtccccggccccgccggccagtgcgcggcgccgggaacgggagcggggccccggcgcgccacacgggcggcggcctcggcccgcgtccccgcccccgcccggccctcccagccggccccggcctccgggcgccgtcctgcccccgggagcaggcccctccccgggcgccgggccccgccaggcgcgcccagcccggcgcgccccctgcgtcccggtggcagctccgcgcggggagggcgggggtgaccccggcccgcacgggggcgccgcggccactacctcgcaatcgcggccgccgcctccaggaagccgcggggtggtcgagtgtgctggaactctccggtctggcctcgccgccggccgcctgaagggggtgcgccgcggtgggagccgccgtcgccgctgtcaccgagtcgctgtcgccgccgccgctgctggttgtgcgtgagcgtgtgtgcgcctgtgtcctggcgagtgtgtgtctgcgtgcggcgcccggcctttactatatacaccaaggggtgggaggaggcggggaaggggagggcttgggggaggcggcggaggagggggagcaggaggggggcgaaagggtacccgaggaggcggcggcggaggagggacaggtgatctcgcccacggggagggcgtggccgtgggcggcgcggggtgccaggaagaaggggtgtcggggcggggaggaggaccttggggggagcgccgggggagggccggaggagctgggaccctactgcctcccggcgggctggggaccattccagaccccaggatggagaagagcgaggaacagagcccagaagggaggaagtggctggctgatggaagcgggggaggtgggaagggctcagcgatcacccgaaaatgccaattgtgataccggtggaggatgcttctcacaaggtgggagattaggaaagatcaaattagtccacctacgtaatgtaatttccatccaagaggtgattcatgtatcaatctaacctttattaagcgcctagtgtttgccagatactgggcaaagaactggagttacagggacggtgactgtatgattgctgaccagtaaataagtagtaggtgtcagttgtactattgatcattttaaaactgaaaacaataaacccttagaattcttgagacagccaaggaagcaaccaaattggtttaatgattctccaaagatgtaaagatttttttctattaatcaaaacaggatgaagatatttgagagagaatagcagagcagaaattatttaatcagagcagagaataaaatgaatctagttgttcttggtagtctcgagccccctgaagttccaatactgtgtgtattaaacatgactttcctcttatcaaatctgagttttataacacagtttataattagtatgggagcctgaacttgtgtttgaaaggctgtattctaactatgttgtgttgcaagcataaggtggtagtaactgaggctgaatgatgtctgtcttgagcacttttgcctttgtggactccttcctccgtagaaagatattacaaattacattttacaattgcatttgtgtaaagatgaatataatagcattatatattaaaacagtttcttcaacctaaaaattcattttttcttctgattttaaaagaaattaaaagatttatgtgggtccctaaacatgagccccaggcactgtgtctactatgcctaagggagaagtcagccctggtagtaccattccttgatactgaatttcctcttttgaaaaagaagagttaaattaagaagtacccagaccacacaggggtggaaagacacacagtgcaagtttaagaattgataataatgaatatcaacagaaagtgtcagtttctacttgtttcaatcaggttttggggggtttaaaatcagccccaactaattaatgatacctgtggaaatatttatgaatgtgtcttcaatcatttcagcaaccaaagacttcctctatagatctcata

SEQ ID NO: 1889005 - DNA, 4001 bp, Homo sapiens; identical to SEQ ID NO: 1564049

SEQ ID NO: 1889006 - DNA, 4001 bp, Homo sapiens
gggtagggaatttgtttaaattgggcggacctgtccactgacccctagacagtcaggattttttttttttttttttacaaaaccaagatcaacaactttcttttgttcctcctttaaaaatattataaagttatatttacttcctttttcccaattattgtttataaattaaaatatggagaaataaaagccatttcataatagtcctcacccataattactttgtttcagatttgaatggctatgtaactattacacacctgcgttttacataaacagtagcaactagacatttgttcagtatcttgctttttcagccctacaatatatcttggccatctttttatataaacacttacaaatctgcttttctcttttaaagtagctgcataatatcctattctgtgaatacagataggtaggtaggtaggttggtagatagatagatagatgatagataatagatatagagagctatgaaacttttaaaaatcacctactgaaggacatttaagcttcttccaattgtttgatttcctaatcaatgctgtaatgaatacccttcctaagaaagtttagaaggatctttagactgagtgtaatatttgtccactgtagttgacgagagtgaccccacaggacgctgtactgaggggaggagtatgtttcactgcgtggagaaacaaagaactctctcctaagcatgaccaacacattcagagatattagaattgccaacaggtgggatgacctgaaaaagaactccttgctttgacagtttagtaatagagcaaagacttgccacgattgctcaacactggctggatcagaagaggaatttccagactcagttacaagcacggctggtggagggctgtgaatcccaccagacagtctggagacagctaggcagggagatgagcagcagagctccaaatcaggcaacagcacgtgtgaaaggagcagtgacctgtggggaaactcataactcacagaccaaaccccttccagcagagggcagtgcctctgatacgacacagggcccaggccagctggagccagagctggggacttcgctggagagatggcaccggcctgaggtcaaggagaaattgaactaaactctcctttgaagactgtaagtgacattggggaatactcagggagggacagtgggacctcacactactatgattcgcctgtgttctaatgtccaacaatttaggctgagtaataaatctctttatagagtttggccatttagggcttgtaagtaagggaatttggagtcatttttgctaggctggccactgagtctcgcaggtttctgggtacatgcttgaattgaaaagaaagtgacacacctaaaatacagcctagactcctggccctggggctctgtggatccgacacaaagtttacaaatagaaagctagcaaagggaaagatagtcggaagtaacaattttatctaaaaatagaaacttagaatctaacaccagagttactacttgcttttgaatttcaaagactacataggatggcctttaaaacaaaacttcagcatgtaagagccagccaagcaaattgttatacataatcaacgattaaaataaattagtctttaggcctaaaccgtttccaatcaaatctttcttgaatattggttaccttttctgccgtgtagtggttggaatcaaatgagaacatagctgagcagagtaccataaagtctacttctaatgctgctgttttcgagccttgtgatttttttttaagtgactttagtattcgctggtaaagtcaaggcggatctaccagacggtaaaagttctgtgtgtttgtcaggcacggctaagtaaaacgcactgcatctgaaagtctaagggtagtttgcatgcatctctcagcaaaatagcaagtggaagaaataccagcaaggagaataaactttctgggctgtttgatttcccctgcaacttctagtccagggatgtttggcgttctcccggtcgctagattattagcccgcaggttccgcaccggccagggagccgctcaagtcctagggccgggcggctggaggttgcaggtcggaggggcttctacgggtttgggggtgggacggtccgcggcagccgcgggcgggtaaggactgacgtcgcaggtttccagaggcccgttcccgaagccggagtcccgacccgaaaccgtccccggccggctcgctcgctcagcagggcgcggctccagcgccacccggctcgccccgaagaggtgggactttccccaccggaagtgatcccgtccagtctcggggaactggggcacctcagccagtgtgtcagggaaacccttccgggtgtgtgcttggtgggggtgggggtgggggtgggggtgggggtggggggtgggtgagaaaaaaaagaggtgggttcgcctggagtccctgcggccgccgcggaaggcccccgcttctttccccgcggcgagcagcagcgctggggcagcggagagacagaggagccagcgggtggccatggccttggcgtgacagagcctccccggcggccgggcgggtgcggacggcggggtaagcggcagtagcttgatccgggtgggagttgggggaggcggcggccggcgccgcaggttcggggcgggggtcagccgggtaatgtgcgtccttctccccttcacaggccggacgacccccgcgggagccggggcccagaaacccgcccgggcagcggtaactggaacggagccctcaggcctgagccggctgggctgcgcgagcaggaagcggggtccctgggcccctttgtgtgaagggcgggggaggagtgccgggcagccccgggctgcgggctcctccgacgtccgcctcgccgcagggtcccctcgccgcagcccccaccctttccctcccgggggcacgcgcctcctcgccaccctcgccgggcttttcccaggctcgccctcctccccacgccccctgctcgggctgcagttcctataggaagggcattaccatcccttccccaccctccccgactctacgctctttcccctccccctcctgtaacttcctcttcttccccggttgggccctctgctcctctgcactctcctccccagttcgcagatttccgcccaccttccgcctcgtctagccgcgccacagctagcggggtgatctttccccccctctggtaggagttggtgaaggtgagactcatgagggaatacaaggtagtggtgttagggagtggaggggttggcaaatctgcccttactgtgcagtttgtcactgggactttcattgagaaatatgaccccaccattgaagatttctaccgcaaagagatcgaagtggactcttccccctccgtgctggaaattctggacaccgcaggaactgagcagtttgcctccatgagagatctctacatcaaaaacggccaaggtttcatcctggtttatagcctggttaatcaacagtcttttcaggtaaccaaaccaagtcttgtaatttgttagaagggggtgtggtaatccgacatcgacttctgggttgcttgaaccgtgcattaatgactgtgctttgcttttgaaagttagacatgacgcatttttgaggttactcctgccatggaagactatcgggttgtttctatagagcgtagtaaaaagtaacaagcgtcaacaaatattttaaagctatttttaagtgaaagaaaagtgaaaaagaaatgtcagtctgtgtatatttcgcctggaatataaccttctgaagttgcttgctcaattcaacaagtattgattaacttacacgacaaaacatctaacaaataatctcgggtaaatagagcactttgaaaaaattatttggagccgattatctgttgcacagataagtcctctgtgtctgtcccacccacaccttcccctcccaccccccaacaccccctcccgccgccctccccttctctctcaagt

SEQ ID NO: 1889007 - DNA, 4001 bp, Homo sapiens; identical to SEQ ID NO: 1564056

SEQ ID NO: 1889008 - DNA, 4001 bp, Homo sapiens
ccgggtgtattggctcacacctgtaatcccatcactttgggaggccaaggccagtggatcacttgaggtcagcatttcgagaccagcctagccaacatggtgaaaccccatccctactaaaaatacaaaaattagccaggcatggtggtgcacgcctgtaatcccagctactcgggaggctggggcaagagaatcgcttgaatctaggaggcagaggttgcagtgaatggagatcgtgccactgcactccagcctgggcaacagagtgagacaaaaaagactggtctcataacaatggccttagcttctatatttagaaaataagacaaaagagcaaattaaatccaaaataaacagaataaagaaaataataaaactgaagcaaaaatgaatgaaatagaaaacaaaaatatactaaggaaaatcaatgtaatgaaaaggtagttcattgaaatgattaatataactgataaacctctagccagatcaatctggaaaaaacatacacattaggaatgctagaggtgccatcactaaagttccacatctattaagtggataacaattgaatgtcataaaaacctttatgcaaataaatgcaacaactgaaatgaacgacaaataccttgaaaagacaagctaccaatgctaacacaaaaataaatagataacccgaatactatatctaaaaacagaaatgaaatttttaaataaaactttcacacaaagaaaatttctggccagatgactttgcataagaattctaacgaatatcaaaagaagaaataataccaaatctgcacaaaatcttctagaaaagtaaaaggagagaatgctttctaattcattatacaagcccaacattaccttgatgccaaagctagacaaagaaattacaagaaaatcacaaactaatgtcccccatgaacaaattcaaaaatttctaaccaatttttactaaaatgaatagtttacagaatggataacatatccatagccaagtgagttttatgtaatgttgaattaactttagaaaaatagtatcattaacaattaacagactataaaagaaaacatgatcatcttaatagacacacaaaaagcacttgacaaaatccaacatccattcttttttttttttttttttaatttttttttttttattatactctaagttttagggtacatgtgcacattgtgcaggttagttacatatgtatacatgtgccatgctggtgcgctgcacccactaacgtgtcatctagcattaggtatatctcccaatgctatccctcccccctcccccgaccccaccacagtccccagagtgtgatattccccttcctgtgtccatgtgatctcattgttcaattcccacctatgagtgagaatatgcggtgtttggttttttgttcttgcgatagtttactgagaatgatggtttccaatttcatccatgtccctacaaaggacatgaactcatcattttttatggctgcatagtattccatggcgtatatgtgccacattttcttaatccagtctatcattgttggacatttgggttggttccaagtctttgctattgtgaatagtgccgcaataaacatacgtgtgcatgtgtctttatagcagcatgatttatagtcctttgggtatatacccagtaatgggatggctgggtcaaatggtatttctagttctagatccctgaggaatcgtcacactgacttccacaatggttgaactagtttacagtcccaccaacagtgtaaaagtgttcctatttctccacatcctctccagcacctgttgtttcctgactttttaatgattgccattctaactggtgtgagatgatatctcatagtggttttgatttgcatttctcaaaaaaatatggaacgcttcacgaatttgcgtgtcatccttgcgcaggggccatgctaatcttctctgtatcgttccaattttagtatatgtgctgccgaagcgagcacccaacatccattcttgataaaacctctctcttagcaaattagcattagaaaggtaattctcccttctgataaaaggcatctataataaaccttcaacagcatacttaatgataaaaggttgaatgctttcccaagataaggaaaaaacaaagatattagtgctgactacttgtcttcaatgttgtattagaggttctagccaatgtaataatggaagaaaaagacataaaatctttccagaatgaaaaaagtaacagtgcttattaatagacaacaatatcatctaaattttaaaaaaatgttacaatctacaaaaaattttctagaactaataagtgaatttatcaaggttgtggaatctaagatcagtataaaaaatgatatctctatatgctagcagtaaaaattataaattaaaattttaaaactgccactaacaaaaatataaaatatttaataataaatttgacaaaaatatgcaagaactgtagagcagaaacaacaaagtattgtaaagagaaattaaagaaaacctaaataaattgaagcatattaccatatataatatgataggggaaatatcatatattcatatagcatatgaacagtggaaagggttaataggtcccttttgggttcaaaaggggcttattgagggtttgatggctgaatattgttataatttcaaatcttccccccaaattattaatagaatcaatgtaatctcaatcagaaacctagcaggcttaagaaaaaagacaagccagttatagaatatatgtggaaatacaaaggaatcagaatatccattaaaaatttaaaagtaaaaacagaaatgaagaactaacattatcaacattagctgatttatagacttgtttttaaaaaatggttatcaagacagacagatatatcaatggaatagaatattgagtccagaaattgacccacacaaaaatggtctgttgatttttgacaaaggcctatgtaaaatttggtgggaaaggatagtcatttcaacaaattgtgctagaaaaattagatattcatatgtaaaataatgattataataaacttcaatccataccttataccatatataaaaatttactcaagatggaacttagatttagatgtcacatctaaaactataaaatttctagaagaaaatgtcagacaacatcttcatgaatctggatttggcatagatttcttaaatacaacataaaaaatccaaaatatgaaagaaaaagtcgataactatcttagtctatttgtgctgctatacaaaataatttagactgagtagtttataaagaaaataaattaaccttttgtaattccagaggctgggaagtccaagatcaagataccagcaggcttggtgtgtagtgagggttgcacactttgtctaagatattaccttgttgctgcatcttcaaaggggagaaatgttgtattcacatgtagaagaaaagcaaaaagggcttaagttagttccttcctgcccttttataatgatctgccctcctgacttaatcacttcccaaaaggcctcaccttttaatatcaccaccatggggatgaagtttcaacatgtgaattttggaagggacacattcaaaccatagcattccaccactgatggcccgaaattcatgttctcctcacttacaaaatacattaattccatcccaaaagtgttaactcattccagcataacctttaaagtttatatccaaagtctcatctagaacatgcaaatattatctaaatcagatatgggtgatactcaaggtgtgattcattcggagtcaaatttgcctccaactgtgagcctgtgatatcaaaccagttatatgcatccaaaataccatggcgagacagtcatgggataggcattcccattccaaaagataaaactaggcaagagaaaaggggtaataggttgcttttgggttcaagacaaaacaggacaaacaatattaaatcttaaggcct

SEQ ID NO: 1889009 - DNA, 4001 bp, Homo sapiens; identical to SEQ ID NO: 1889008

SEQ ID NO: 1889010 - DNA, 4001 bp, Homo sapiens
ctatagtgtaatactctaaaaacttgctagaatagagaaaagctgttgatttaaaaaatatttcttatgttccaccaccttttctaatttgctgattgactttctaatttttaaatagtcccttgttttttagaagaatacaatcattatcagttgtaaatataaattaattttatcttttcccaattttacactatttcttatcttattgcaatagttataatctcaaaaaacacttgaataagaatggaaattgtgagtaacagtgactcgtttctggttttagtgggaattactttggcatttcatggtctgaatgaggattgctgttgattgttggtaaaaagtgcttttaatatttaagtcatccccttctatttctattagtgtctgttaggattagctgctgattttttccctagtggcttttcaacatctattaacagaatcatgcactttttctcctttaattttttttttttttttgagacagagcttcgcttttgtcacccaggatggagtacaatggtgcgatcccagctcacggcaacctccacctctcgggttcaagcaattctcttgcctcagcctcccaagtagctgggattacaggcatgcaccaccacgcccagctaattttgtatttttagtagagatggggtttctccatgttggtcaggctggccttgaactcctgacctcaggtgatccactcacctcggccttcccaaatattttatgtaattaattatattgatagaattcctgggggaaaaaagacactatctgtctcaaaacgcacatagaaaaaaaacttttttagaaaagagaattcagcctgtagtcccagctatctgggaagccgaggtgggaggatcacctgagcctgagaggtcgaggctacagtgagccgtgattgtgccattgaactctagcttgggtgacagagtgagacctgtctcaaaaacaaaaacaaaacaaaacaaaaaacaaaaaagaatttggtgtttgactatttatttttgcctttgtggatctatccctatcaggtaatagtacagtttttttcttgctatacttctgagatctgtttgtctacatattttagagtttgttaatattttattttttttatgtttatcattgataactgcttatagttacctttttatgtactatctttaacagattttggtctcagctttgctagctttataaaatcattagtgaactttccattttttcctgttttctggtagagtttagataacattggtattatcttttccttaaaggttagttagaacccaactgcaaaacttttggtttgttttacaatggtaaatctacaaacacatttccgatctcatctgtagtaattgttctagtcaaattttctatttcttgagttaatgttggtaacttctattctattaggaaattatatgttatctttagattttcaattttgatgtcatatgtttgtgtgtaaaattataataataataattataatataataataaattactcatgtgatttataataatcacatctatttgtgtggttcaaccctttaatcataatttgtatgcttttgctttccctgtgttttcttagtcatactcatgatgtttatgtattttattggtgatttaaaaaaaaccaactttttatcactttttaaattacactttaagttctgggttacatgtgcagaatctgcagttttgtttcataggtatacacgtgccatggtggtttgctgcacccatcaacctgtcacctacattaggtatttctcctgatgttatccctcccctagccacccacccactaacaggacccggtgtgatgttcccttccctgtgtccatgtgttctcattgttcaaaaatatatggaatgcttcacgaatttgcgtgtcatccttgcgcgggggccatgctaatcttctctgtatcgttacaattttagtatatgtgctgccgaagcgagcactatttatcacttttacaattggcttttttggtcattatcttaaactttaattttactaatttcttctactgcctttggattatttctctcgtgcttttgaatttcttcaagaagagtgtgtatttcttttatttatggttttattgaataataatggtaattatgactatgggtttttctctgggtatatcttcagccatgccacagtacagtttgatatgatgtgttctctttttctttgctttccatataacttgcaattttatttttaattttctttttgacgtaggggttattttggagaatattgctatattatcaggcaattactatgatcatttttattattaatttctaattttattttgttaagaggatatgcctatatattctctcctttttggaatttattaatgtatttttatgtttttgaggacatgatcgatttgttaaaagttttatacatgtaagaaaaaagatgcacattctctccttatatcatgcaaatttctttctattgagttaatatcattggttgattatttagatcctctatgtctttgattatcttttcatctaatgggttggtcaaattccgatagaggtgtattaaagttctccttgtaattctaacagtttttgctttatctgtttagttgcaatgctgtttggtacatacaaaagtattacttataatttctttagttgtgccatttttattcatacaaataatgatttaaattgtgttttagagcttcctttggcttatattaatattttcaaccatgttttctttttgcttgcttatgcctgatatctcctcactcactgatctgtttcaacatttctttgttgctatgctgtaggtgtgtttcttgtaaagaacatatagttggatttttaattcactatcatggtctgtgcccttttacctttagtgcaacagttaatacccttgattttattctcttcattttgttttatgttcctattatttttactattaattttattttgtcgagcccccatttcctttctctaatttattttttttagtttattcaaacttctattcttacacattcattatattgtgaatttggaaaatttactatgcttttctacacacttcattccatgaatgctagcactcaaaatcaaacaatgtttctctactgttgaatccaaatgagataattataccacccactgaggcaccttattttcccactgcccccaactccaaaaataggaaacctttagaaacatttatacaaagtccaagtagcattcaatacatagtggttaaatttgtgatctcagaatgacagtggctgagttagaagctatttatttaaaagctgtattttcttgggtgagttttaaatcactgtctatataaatttctttatgtgaaaatgaagttaagaattggattatctcataaggttgctgagctgatatgtaaagatatgtaaagtgcttagagcagcacctgacaagtactaagtgctcaataaatgctacctgtgataatttagacatggattgtattctctctgaatctttgcatgcttgaatatatcctacttcaccttgacttgtaatgattacctaggttgggcacacagttttggagttactactctttccttttagtagtgtgtggagattatttccttgttttcttacctccaggatggcaagtaaaaataatttacctgtcggatattttccctttttatgtaacttcttttttataatattctctgtgattggaatttatgaattttataatgatacttctaggcatttgaacttttaaaaactaatggtgtctggaacttggggtatctttttattgttcaacctcaagattttctttagattagagaaatttttcttcacaatttctttacctatcacttttccatctgtttctcttcctcgtcctagaaattcattaatgtattgggccttttggatccgtcctccaagatt

SEQ ID NO: 1889011 - DNA, 4001 bp, Homo sapiens; identical to SEQ ID NO: 1889008

SEQ ID NO: 1889012 - DNA, 4001 bp, Homo sapiens; identical to SEQ ID NO: 1889008

SEQ ID NO: 1889013 - DNA, 4001 bp, Homo sapiens; identical to SEQ ID NO: 1889008

SEQ ID NO: 1889014 - DNA, 4001 bp, Homo sapiens
acaaggcttttgaattaacccaatcagacataaataaagaagaaacaatcaaaggaaatgaactatgtctccaagaactataggattatgtaaaatggccaaatctaagaagaaatggtgttcctgatggagaagagaaagcaaaaagctcagaaaatttatttgtggaaataattgagaaaaatttccctggccttgctagagatttagatatccaaatacaaaagctcaaagaactacaaggagattcactggaaaaaggtcgtcaccaaggcatacagtcatcaggctacctaaagtcaacgcaaagaaaagaatcctaagagcagtacgacaaaagcatcaggcaacctataaaagaaaacctaccagagtaatagcagacttctcagcaaaaaaacctcacatgccagaagggaatggggtcctatctttagcctccttaaacagaataaccctcagccaaaaatgttgtaaccagaaaaactaagtttcttttaattttttttttgacatggagtctcactcaggctggagtgcagtggcgcaatcttgactcactgcacccgccacctcccaggttcaagcgattctcatgcctcagcctcctgagtagctgggaccacaggtgcataccaacacacccagctaatttttgtgtttttagtagagacagggtttcactatgttggtcaggccggtctcaaactcctgacctcaagtgatctacctgccttggcctcccaaagtgctgggattacaggcatgagccactgtgcccagtgaaaaactaagttttataattgaaggagaaaaaaagttattttcagacaaacaaaagctgagggaatttgttaccatcagacaaatgctacaaaaaaatgctaaaaggagttctaaatcttaaaacaaaagctcaatgtgcaccaaaatgaacctcttaaaagcataaaattcacagggactataaaacaataacagaatgaaaaaaataacaaagtatctaggtaacaattaacatgataaatggaacagtactttatatctcaatattaacattcaacataaatgtcccaaatactccacttaaaaattgcagattgtcagaatggattacaaaaaaagaaaagtcacaaaccagacatctgctgccttcaagatactcatctaacatgtaaggattcatataaacttaaggtaaaagggggaattcaacctgcatgccttttacttacctatcctcaggctagttccttgagtggacaaatgcaaggcccttcctgccctttcatcttaagaattcagtgatggaccccattcacttggcttactctcagggctgcttcctgagtataaacatggcaggcctcttcttgtgcttaatcttcgaaatcctgcatttaaatatagcaccaactgataatctcatcctgaaaatgtaaggtgtgaatctcccttgcttggttatgtattcacctagttctttctttgccccagaatacttccaaagtgcaatataggatgtctagaggtcaatatctagatcccaattcctagtactacccaacatacaatgtctgtaaatgtcaacaatcctcagagctcagagacaaggaacaatgcatcataataaaacagtgtcactgtgtcagctcttgagcatctgtggttttgcgagcagcatggttttgtgctatggggatagagatcttcatgctcaaaagtcaaagatttacaacctgatccagcttgcagaatgtgcaacctagaacatgagcatcagagttgaaaaacccactttaagtcaggttattccttaggcacactaagaacagatagaatatcctatgatgctgtggaaaaaaaaacacaagaagaaaaatcagggacaagggaaagcaggataaacaaatgaaaagtcatttgactatattttccccaggagaccattggctcatcactgtgctactgttttgtcctggcagccttgtgaaacaatcaaaagaagaatgactgacctgaaataatacctccaacacacagggtacaaacaatgcaatttgtaaactcaagcattcttgattcagggtatttttttttgcatttttttctcttacacaacagttatttttggagcaaatagatagcttgttttgacaggaaatgggatcattactttgccagctgatggtagtgttcaaggtcaatttctttctgagtgaaggaaagtgagtccctgcagatgtccatgtgctgcttcagaggactcataagttatggtgaaatcccaatcctgccaagcagacatgcaaactgtagaagtgcacatctacatcaccctggcactacaatatgggtatgctttttgataatacattttgttctctccataacaggcagcaacataagtttcctcattctaactgtaacagaaaaaaagcctacttcacatgctaggggtgtaaatatggtaacagtagtttcaataatcaattcagcatttctatgaattcccctatcagtactgcaagactatccagccctcccctcataggcacatcaccaggatcatcccactcctggtatttggatggagaatatttactggaatattgtatgctgtggaaattacttcagtctagagctgaaacaccactagaaggtgagtgattctgcaaccaccactcgctgtgaagccagagaccaatgtctgtgcctagcaatctagggagacaattcccaaatcttcattgccctgccaaggtcattcaggtaagcagaacccaccagttttgactaatgctattgcaaccttatggtgtcactgttaaaaacaaagtggttttggccgggcgcgttggctcatgcctgtaatcccagcactttgggaggccgaggcaggcagatcaggaggttaggagatcaagaccatcctggctaacacggtgaaaacccatctctaataaaaatacaaaaagttagccgggcgaggtggcaggcgcctgtagttccagctactcaggaggttgaggcaggagaatggcgtgaacccaggaggcagagcttgcagtgagccgagatcgcgccactgcactcctgcctgggcaacagagcgagactccgtctcagaacaaacaaacaaacaaacaaaaaacaaaaaacaaaataaaacagaaaaacagtggtttcaatagccacatatcatttctgtaatacagtaatacctctcctggtcgagttgtggctgctcaggttttatgattttgtttttgctttttttggttcctattgttgtggtggtgattttggaggtaagaggtggggagggaatgggagaatgtggagataaaatgatctattttctcccactgttacagtgagctgtgactactgcataccatcatagcctcccaacattataacccgtcattttactattaatatacagatgctcctttacttaccatgtggttacctcccaataaactcatcccaagtggaaaatatggtaagttgaaaattgaatatacctaacctaccatacatcacagttatcgtagcttagcctagcctgacctaaatgtgctcacttacattagcctatagttggacaaaatcatctggcaacacagtacactgtagcgtatcagtttttgattgtgtggctggctgggagccacagcttgctgctgctgctcaaccctatgagcaggtgtcataccacatattgttaatctaagaaaacatcaaaattcaatttcaaagtactgaatgtgtatcacttttcaccatcatgaagtcaaaatataagtggaaccaggctgggcgtggtggctcatgcctgtaatcccagcactttgggaggccaaggtgggtggatcacgaggtcaggagatcgagatcatactggctaacacgatgaaaccccatctctactaaaaatacaaacaattagccaagcgtggtggcgggcgcctgtagtcccagctacttgggaggct

SEQ ID NO: 1889015 - DNA, 4001 bp, Homo sapiens
aagatgcaggaactgggaagcacaagctgtctgccacttgcagcccttggcctggtcaatgcctctactcagtatatggagctgccttatggctcttagaattttagggatgaattttagagtctagtgccatttagtacttttctgggaagacaggttgcctggtgttgtctaagagattctgtcctttacctatcagacgaggttgtgggccggcctaggagcaaagaaactccaaaccttaaaaggttagaaatgcaggacctagggaattcggggaaacagaccaatgaaagtgcttagcaacatcccaggaccaatgcgggtgagcccctctgtttccatgagacagtcttgattttcattggccatgaacatgatactgtctccctgaatgagggtgagggagtgggggttgtctgcagctctgtttaggtgtttatacctgtctatgaagggagcttaagaaaactgggggagttcccatttgggcccttggcactgggaagttctcagtcatatcagaaaaatgaaagcagtttggcagacttttactgttgccatatccctgcacaaatgcaaattgtgcgggccataggtatgcggtctgtacacaatacgaaaaggcacacatggtcatcttaaagctctgagtgaataaaaagctatttatatgtcagtctctgcctggccaaggcctgtctccgtaagcagggaaggtcaaagcccttcttcctgctcaactggccctgctctggaatcagagtgaatccagtctgaccggggactggggggttccctcctcagaaagtggtataagagggggactgcaaatagtgtatgctgccctgggtgatgcctctgagcctggaagcaagctgagccccagaggccacgggggcctcccacctcccaccacccctccacccctgccacgaggggctggttttcctgactggccactgtgtgtcgggccaacatccttggtctctccagcaaccccaccacaagggacctggcacctagtcctgagcctcagctggcagctggggagccacgctggtctgtctggctcctgccagcccctccttccctcattgctgggactctgctaatccctcccattgtatgcccaggactgctatttcaccctgctcccctgcactccccaagtacagtcatctgtagcagacctgccttgagtgtttcccacacccctgtgactcttgacattgtattcagactgcttctcatgccctgacttgggctgttatgtgtgctagatgctgggaaggctgctgggtcttagttgtctccagctcctcttcccagtgtcagcttggaccctgatggccagatagctccacgtgggggcttctagcatgctatgcagccagtgccacatcagttagaaaattaccttgggccactcttctttttttttttttttaagtacaatttccattttatttttctccagagaatagcctgtcttcagtctttaagaactcagctccttacatgggctttggtgggggacgtggggcagcacccgcaggtctaaatcggggtgggggtgttcggtccttgcaggcttcacgagatcgattcctgactactttgctgtgaattgcacaactcacacagtaatgtagcttcacatacagcttgggaagcacataggcatcgaagacgctcacttcagaaatgtccctgactgctgcggcctccactatgtttcgaatgacgaatttcttaatggccttgtctgtgggcacgcatcggacacagttagtgcagcgaataggctgcacgtggccgcggccctttttggcatgactgttgttccttcttttctttgtcatcttggaggcatggaccggagagagcgggccactcttcttatgtaatcattagagttctgtgggatcccaaaccatccaggaatgtagaggaatgggggccacctgacaaggatactggttgatgctcatgctgaagtggttgtaagttcttgtttaggagcaggaccttccctgccacttgattagggggaagaattccaaaaattgggtggaatctggattcagtcagctgccctaaatctggttgtctcaagtgagccccaagcaagcaagaatccaaaaagccacaatgtcctccactgtagccatattggccctgaacatctgcttccacttctttaggttcctgatttgcactcgctttgcccactgtgccagtaatcctgccttgggttctagtctgctgggcttaacattgacctgtgtttcctcagctccatcctcttctctcccgtgaccacagcactggccatgtccctctgaaaataactccccaccgtcctctcaactagcctggtagctttcaggacagggaccaagcttcatttatttctgtatccccaatataacacagggagtgtatgacataaaggggagtccaataaactttggcagaacaaacccacaccttcatgttctcacgtaggactcagccggtttcctcgtggcttggtcagtttatttagtacttgcagaatctccactcctgtctaagaaatagcctacctaaaacttgaatttccagttgcctggagagggggaaaaacaagggctcaggaaagtagaacccaggtaaaatggagggtaaatatttgccagaataatcaacatgtgtggctcaagagggacagggaccacatcggccaagaggaggtctcagggtattttgatgcatggcagcccctaagaaaagggtctgtactaaagaagctgtttctgagggagcaaagtatcatggaaagagtacgggtttgaggctagagtgcttggggtcgaatcccggctcagccatttactgtgtggcttcaggcaatttcctaaggaaacttttcattacctctctttccttgtgtgtaaaatggggatggtaacattgtctacctcatggagttagtacaaagattaaaacaatatgtagaaagtacctggcaacacaggacattctcaataagcaatatatattaatattaataatatcattaataacatttagcatgtgattgatactgatgtccaaagtttaacctagttcaatttgcagagacctcaagcagtgtcttcagggtgaaattatgtgtgtgcatgggttatattttctaggagtttcattttagggtagtaaaggaagtgctagtaagttggctgtagaaagaggtagcaggtctgcaggagttgagactcacaaaagtcaggaaacagcgcattgcagctgtgtgtggccatgcccatcttccccacatcaattgtgggaacctcagcggcaggactgagtcccactcccctctctctttgcctcgccaccctacatacctagtccaggcctggcacagaacagatgtgtggggagtgagagggtaaccaaaaacttctgaacaggaaagctacctgacttgggtgtgggagaaccttaaattacatgtctacacctggttcattccttccttcatttatttattcaacaaagcacctacaatgcaccgggcacacaatataggcccacatcttccatccaggcccaaggctccttgcttactctacaaagtccttgcagctcctttttttttttttttggctcagggattgtcttcttggccagacactctgcttttcagcctcttcccaagagtctgcctcttaaatcctctgcctcaagctcctcccattactgccgacaattaggtgtggtccagttctaaccccccttctagctccaggacacaccaccctagtctagcccttacaccccaggcagctactggcctgaaaaagagtggggagctaggaccaactcacaagcaaagaagacagagaacaactgagtcctgtcttcagagaggaagtggacatgaggcagggtagggcgtgaggaagcagtgaggccagaaacttagctggtgactggttcatcctagaccc

SEQ ID NO: 1889016 - DNA, 4001 bp, Homo sapiens; identical to SEQ ID NO: 1564090

SEQ ID NO: 1889017 - DNA, 4001 bp, Homo sapiens
tccaataagcaaaatggtggtgggcagaggctaaataatattaattatcaccatgctggcacagtagcagaacagagctcaaatattaattgaatgcagtcataccttttggggatgtctacccagtatcttctctgtaaaagtatccactagtcccacagaaaggtccacccttagcagccagatccgtgccctgtgaacctactcttgtggtcacaggtaacggggacctggagtgctcaccaacctaggcaaacctatcagattctctcttctgggaatatgaaattgggattgaaaaacaggtcctaagcttgcggtgagaactgacatataaattcaggagctagagggcaaacagacatcttctgccatgtattaaaaaaaattacaaaaaagaacaaaatgtggtgtatgtgtatacacctacacatacaccacacacgcatataaaatggaatattattcagcaacacaaacgaataaagtactagtacattctacaaaatggatgaaccttgaaaacattataagtgaaataagccagataccgaaaggccatataatgtatgattctatttatatgagacgtccagaatacacaaatctataaaagcaaaaagattagtagttgcctagaggtggaagggatggggattgagggaggtgacagctaaaaggtttctttggggaataatgaaaatatcctaaaactcattgtgatgatggttgcaaactctgggaatacactaaaagccactgaactacacacttcaaacaggtgaagtatatggtatatgaataataccacaataaaactattttaaaaagacacagatcttccttctttaagcaatttttttaaactcaatttcaagagtcccaggttaaatacaaacctctgtaactttctgtgcctctgaagcaactctttgtactgttgtaaaacaaatgttaaattcctgaatgatggaaggatatagactgttgaagtccagaagcaaaatgaacttatcataaaaacctgaaattaaaaagccacgtcataaaaagtctaaagaaaagcagaattgtcaaaacatcattattaaaagcactgtaagtatattagaaactatatactatccatatacactacccagagctgtgaaacagacaaaaagggaaaaaaagaatcaactaccatttcataaaatgatgcggattagtgaaaagccagatcacaaaagaagagggagaaaaagatcctgtctctctttagaaccagctacaaccagtcctttccccagctgtccccaaagcacaccattattatgagcaaataccttcccaatcagctatctgagacgtgtcacatccattaaaaaaaaaaaaatgttcaactctccttcaaagcaagaattctttgaagaatcctcctacctactctcccaccccccaccccaaataaaaccaagtgagtggtttatttttatttttatttttttttttgagtcagagtctcactctgtctccaggatggagtgccatggcgcaatctcagctcaccgcaacctctgcctcccgggttcaagtgagtccccttgcctcagcctcccgaatagctgggactacaggcgcgcaacaccgtgctcggctaattttttatattttagtagagatggggcttcaccatgttggccaggacggtctcgatctcctgacctcgtgatctgcctgcctcagcctcccaaagtgctgaaattacaggcgtgagccaccgcgcctggtagagtaatttattcttttacaacagcttcaaaaaataaaatggacggcacatttacctgtacaaaaactgagctaaaatcaaacaagagacacatatatataaatgtcagtagtggaacgacccaccctttttacttgcaaaggaagaacagaaagctactatatttctgtaggacatttacaaagagttatcttcaccttgagaagaaactgaataaaaataaatgtccactattaagacaataataattgcaaacatataggatagtttattctgtgtccagcactatactaatttatccttaaatccctgtgtggtagatattactcttaactctattttacagaagaaactgaggcttacagaggttaaacaggcagcccaagatcacactgaattcaaacccagacctacataacaccaagtactactgctccatttcattataactaataacaaaatcacttttgtcaaaaatgtttcctactcagaactaacttattagataaaattcacattaattccttcacagcaatgtgaatattcttaacactactgctgaactgtacacttgggaagggttgaaatgtttttttatatatacaaaaaaattagctgggtatgctggcacacacctgtagtcctagctactcaggaggctaaggcaggagaatcgcttgaacccaagaggtgaaggttgcagtgagtagagatcgcaccactgcactccagcccgggcaacagagtaaaactctgtctccaaaaaaaaaaaagaaaaaaagaaaaaaaaattatttctagctctgtgtaccacaaaacatctttgccattcatgacaatagggaaaaagatattctcctattaaagttaaatttggtggttattgtctgcacgtccttcaactttgctgtcaactgaactggtcaggacaaacagctatctatgtactggacagctatctatgtattagacaaactacggctacagaccaaatccaacctacttatttttgtaccacccatgagcttaagtatggtttttacatttttaaatggctggaaaaaaatcaaaaacaatatttcatgacatatgaaaactatatgaaatttaaatttcaatgtctataaataatattttattggaacacagcataacaaaattcacattaagtctatgtcaggtgactggcaaccaagattttcacgtgaacgaaagataaaagtcatgagacctattcgctgatctataagatataattcagtcttctagtttctcaagcctagatccacattaagaaattccttaatactgggagaaaaccaattcactgcccagccttaccaactttggggtccaaaaccaagcctccagcataagctgctttcttacgtcctttcttgtatttattggtatctccatcaatttcttcatcttcatctccctaatatcaaatggaaagataacttcaccagccagcaactaattaactaatttaaaattttgatgattctctcttttccaattgcaggacttagttctaacaaacatttcagttagtggtcctatctgttgggaaagacagttattgtaatatgttcacgaatccaaatgaatcccaagcatagtaatttcttaaacaaatactatatcctgagttaacaaatatgaaaattctatttttatgtgtttttgaatttacagaatttcatatttttaaatcaatgaatattgaaaaataccacttttcatgttatataaaatttgagattataaaacagccctcttaaaatcactactctaacattcgtgatgtaaaaacataaaatacttcatgcaggtattatcattatccctattattaatatggacaccataaaacaagtacatccatatactgaaaatccattcctaagtagtttattactggccaacattcaatacctcagcagaagttaaagtcctctaaatgaatatgccctataccaattttgataatgtacattaaaaaacaagcaaatatgagaacctgaatcaaattctaacattcaattcccatttctgaattaattaatatcagtgctaataaaacagtagctaaactaagttttagttccaaagtgatggaggctacttcagaaacctgactgtgggtgaccttggtcatactagtacagaaaaatgcaacacaaaaataaaggctcataggtttaagaaaataaaaagtttaact

SEQ ID NO: 1889018 - DNA, 4001 bp, Homo sapiens
aaaagaaaaaaaaaaagaaaagaaattaagagattttagtttgggctggcattgtggctcacgcctataatcccagcactttgggaggccgaggccggcgggtcacttgaggtcaggagttcaagaccagcctggccaaaatggtaaaaccttgtctttactaaaaatacaaaaattagcgaggcgtggtggcgcatgcctataatcccagctactcaggaggctgaggctggagaaacacttgaatctgggaggcggagattgcactgagccaagattgtgccactgcactccagcctggatgacagagtgagactctgtctcaaaaaaaaaagaaagaaaaagaaaaaaagattttagtttgggaatagaaggattaacataccaaattaaaaaaaataaatacaaaatcagagttgggacttttagtcaacctgattaataaatctgcctgaataactactgtgatggtgaattaatcattactttccaaggcagtccattcacgatgacattcaagagatgcaacattaatacaatgcttatataactcatattcaaattttctgaatgtacactttacagctatatgtccaattcctaaatcagaatccaaacaagggcaacctactccatttaactgtcaggtctctttaagtctccttgcaactagaatagtaccccagcttttttttttttttttttttgaaactttcatgacagtaacattgcattaagagctgggccatctggctgggtacagtggctcatgcctataatcccagcattttgggaggccaaggtgggctgattgcttgagctgaggattcgaaaccagcctaagcaacatgaagaaaccccatctctacaaaaaatacagaaattagccaggcatggtggcacaggcctgtagcccctgctacacgggaggctgaagtgggaggatcacttgaaccaatgagggtgaggttacagtgagcccagatcatgccactactctacaggctgggtgataagagtgagaccctgtatcaaaaaaaagacaaggaaaaaaaaaactgggccgtttgtttttgcagaatgtctctcaatttggactttttgggcaggaatacaatacaagtgatacaaatgcttctttaacattagaacctgtataaaattaccattacagaccttgctattttacttataggtaaatcactgtttaccaaggtaagtcttttgggaatttccaaaaatgaagtccatggacagttaaaaactgtagagggattttcccccttaaccaattttatattaaagtaaaacaaatcacacctaccttttttctcaattttcctctgatgtgacataacctctttacaccatcgaaacacattgcttctagccgtccatttcccaacattttgattacctgagcatactctagcggggagaaaggaaaagggtatggaatattgttcaacttttgataacagcaacttaaagtccacataaaactgtcaagagaataaagttgcaccagttgggaataaatacatatagtaaaactataaacaaacataagggagtgataaacatcaagttagttaacggcagagctagaactaagactctatgatgacatttctttctttctttcttttttctgagctcaggtcaagtgtagaaaacttcatagttacaaaggtcagtcgtaaaacctttacatcattgcccagaaatgattaggctttcatagacatacatatgcaccccctcacccccaatctcattcattcctacaactgctacctttataaacacgtgtgcgtgcacacacacacacaccccccacacacacaccagacatatgcccttattgttttacattgttttatagttctgcttctcagaactgtagagatcatgcatcaggtagaccggaaagccttctgatgctcagatttggctagtttcatcattgatccacttcagtaaaagcagatctcagagaatgtaatgccatttctataatatactgtctctgctattagacatgtttaaattatcgactcattctgaataagtagattgactaccccacttttggctctcctttacctcagtacctttaggtgcaaatctcataatttttagttcatttagcaaacaaaaacaaacttcaaacaatgtctttgttgaattagaatatgactaatccccagagaggatgtccattaatttgtaaatatactgagacttcattttgaaaggctcaacagtggggatgacttgtggaagtcaattactcagactacagtgagtttagcacccatctaccacctcaacatggttggtcaactcaaaggcagcctttcttctgaagtgagggaaaaagtaataataaaacagtgtatgcccaagtcaagtcagctgctattttagaggcaaggatgaccaaggctaagaaaccaaaggacttttagccagaaaacgtatctcatgtttactggtttatatgtatggcgtaataaatccacccaaagttctattaaaagctaaagtactggaaataattggaatacctgaggaaatatggagtatatactagatattatatcaatgtcaaattacctgagtgtgataattctcttctagttatataagaaaatatacttgcacttagaagatacatgatcaagtaagggaaaagtaacatgatgtctctaaatttcaaatggtcctgaagaaatcctacatatggggctaggtgcggtggctcacgcctgtaatcccagcactttcggaggccgagacgggtggatcacgaggttaggagatcgagacccatcctggctaacacagtgaaaccccgtctctactaaaaatacaaaaaaaatacccaggcatggtggcgggtgcctgtagtcccagctacttgggaggctgaggcaggagaatggcgtgaacccgggaggtggagcttgtagtgagccgagatcgcgccactgcactccagcctgggcgacagagcgagactccatctcaaaaaaaaaattaaaaaatcccacatatatatttctttatatgtgtgtgtacagatgaaggatttaagggagtttgttgcactaatactgcaactttctgtaggtttgaaatgactcgaaataaaagtaacaggaaagggcaaacgatccagttaggatttatttgactagtgctatgtatcttggtctggcacttacaatattcttcagtctaataaaatcagttaactgttcagtttcattttattgtagtttacgaagttatatgctaatggcactggagaatggagaggtctataagggcctcaggctcatccttcaaatgtccatggtctactcaacatattatatgtaccattcactaccagaaatgctaatcatagaactgccaactaaatcacagaactgtcaaccatagctcaattccctctgaactatacgacacattcttagttcccagtactttgggaggtcatggtgggagaatcacttgagcccaggagttcgagaatagccagggcaacatatgaagacctcatctctatacagttttttttttttttttttttttttttttgagacagagtctccctctgtcacccaggctggagtgcagtggtgtgatctcggctcactgcaacctccgcctcccaggttcaaacaattctcctgcctcagcctcctgagtagctgggattacaggcacgtgccaccacacccagctaatttttgtaattttagtagagacggggtttcatcatgttggtcaggctggtctcgaactcctgacctcgtgatccgcccgccttggcctcccaaagtgctgggattacagacgtgagccactgcgcccagcctaaaaaaatttttaaaattagccagacgtggtggtgtgtgcctgtagtcccaaatactcgggaggctgaagtggaaggactgcttcagcccaggaggtcatggctgcagtgg

SEQ ID NO: 1889019 - DNA, 4001 bp, Homo sapiens; identical to SEQ ID NO: 1564093

SEQ ID NO: 1889020 - DNA, 4001 bp, Homo sapiens; identical to SEQ ID NO: 1564103

SEQ ID NO: 1889021 - DNA, 4001 bp, Homo sapiens; identical to SEQ ID NO: 1564106

SEQ ID NO: 1889022 - DNA, 4001 bp, Homo sapiens
acactatgtgttcagtgtgcaaaggcctgctggcattttgcctatgggaattctgaagtctgggcacataaggttcagctgcagttgcagttttcaacagtcgtccttatttttataaacattgttatgattattcagacacggaacttgtgattacactatttgctcctgttctgaacttgagggagtccacttaagctaacaagtaggtttttgaggacatgtgtggcaaatgcttacccagtgaagggattaaggggctcagtaagcacttgtccattggcacaatggctgccaatctaattctattgattcctctaaatgtttctggagttcagaaatctattcaatccaagggcactttacctggggtcctgggagccaaatgttaacgtagttcttaaccttcctaagcctcttaaccttctgggtacaacctctatatttgtcttctggctaaaatcatttccccacccccagcccagtcctttggactctcccaggccaattcctggcaagatctttgtcgaactgtatttgcaaaccagggtctggggcacggtggcagttccttcgtctgctgttcccttaatttcgtctggtttcactggctccaggacagcacacggtctagagtgggaagagtgaggcattcaccttggtgaaaaacaactcagtaattaagacaaatgatttttcatgtactattttaaaaaaatcagaagcaatgcaaaaatccatgatgaacaaatgatcaacatttgaaatacagacaggatcccaacctgcacttgcatgaccttgtctcgcttgcctcaccctaaacccagccttgacactccaattaaactttatttacaaaacaagggggccggccagtaggatgtagtttgcccatacgacttttttaaagtatcgcattgactactgtttatctcgatgactgaagggttcttttggcatccctgtagcaaatgcgtctcaccctagtcctggtcctgctccaagggtttttgtccaggcacatcgtgacctcacccttcctcccctctccgaggcctctctcagggtccagcgttcaagtcccgggtgttctctggacccgccccttcctctcgccgggtcaggtgccgagggcgagcacgggcggcgcggagagcagtcccggcccgccctccacgactcctcctcctgcgagctgggccactcagcggctctgccgcccagcgcgccggggcccagaccccgccccggccccgcctccgacgcctgccgctccagctccggctccccctatataaatcggccatttgcttcgctccgccccgcagcgccggagtcaaagccggttcccggcccagtcccgtcctgcagcagtctgcctcctctttcaacatgacagatgccgctgtgtccttcgccaaggacttcctggcaggtggagtggccgcagccatctccaagacggcggtagcgcccatcgagcgggtcaagctgctgctgcaggtacgtcctgggatccaggagcccaaccaggaagtggggggaagggtcgcacagaaggcgggcgcccgaggggtggcggggagcgaactctaaagacatggccagggaagcggcttaggagaggccagagcggggcgcagaggcagaacagaagtcaaactggtgggaggcgcctttagtgacctgaagtagtgagtctaggaaggggccgggggcagagggcaggaccaggctctcggcatctccgaggcggcggactcggatggagcagtttctgagtgacggcctccccgggcctgggcgtcaagggcgaaggccgaaagccggcgttagaaagaggaacgccagttcttaccgaagacctcaaggtcgcggcaaggagataactgcccgggggaggccatgcgcccgggtccagcggcctcccagcccgcggacgcgctcaaacctcgccgggccggaagccggcgccgggaagcgcgtgtgccttttacgtccgcccccgcgcagccgcggccgctgccgccgcgtctccgcctgcctccctgcgccgcgcgctctccagtgccggctctagagggcgctcctgggctagcgtgtagggctggcggcggcggcgctcgggtcacctctgggagcggagtgggggcggagcgagacggaagcagctcaggagacttgaggcgtaggctgcggtccccaaggtgaccgcgccctatgtgggactcgccctaatgcctctgaacctgggtttgaggtaatgacctttctcctaggtctgaaggtcacgggtccgctggaggatgccccctctccactcagaggggtggaggcttaatgctactggtgcagatcacctcttcccctgtgacagcctcagagggttgggagggtccagccagtatgatatacgaagactagatttgagagaggggagcctaccttaaagggcattgatcgagatggcataagctcttctctttcccttccccatggttataactgtccctgttggcttccttcctgtctgttaggtgcagcatgccagcaagcagatcactgcagataagcaatacaaaggcattatagactgcgtggtccgtattcccaaggagcagggagttctgtccttctggcgcggtaacctggccaatgtcatcagatacttccccacccaggctcttaacttcgccttcaaagataaatacaagcagatcttcctgggtggtgtggacaagagaacccagttttggctctactttgcagggaatctggcatcgggtggtgccgcaggggccacatccctgtgttttgtgtaccctcttgattttgcccgtacccgtctagcagctgatgtgggtaaagctggagctgaaagggaattccgaggcctcggtgactgcctggttaagatctacaaatctgatgggattaagggcctgtaccaaggctttaacgtgtctgtgcagggtattatcatctaccgagccgcctacttcggtatctatgacactgcaaagggtaagtttgctgtgggctttaacgttgtgttcttaggagacagtttaaaagagcattgtaccaacctaacagtccaagagctaaagagttgtttttttaattgctaaaggaagccaagatcatccaatgcaacccttgtgtacagatgacgtgtttaggggatgtggggaaaggaagtcagtaaaactctgctttttggtaaaagcatctctttcctattcccaggaatgcttccggatcccaagaacactcacatcgtcatcagctggatgatcgcacagactgtcactgctgttgccgggttgacttcctatccatttgacactgttcgccgccgcatgatgatgcagtcagggcgcaaaggaagtaagttccacttgagcagaagataaagttgtagtcgtggggcaatctgctgccacaaactggtgatacatacctttaaaatggctgtctgtccaagtcaagggatggggttgatagcatctgtgtctgttccacaactgcctttgagctggcccttcagatgcctatgaatgagggtgcttaaatggtgttagaggttaagaccaatgggtagtctgtattcctgtggtcatagcattaatatttcagtgttgcccatgctaatgtgtgaatgttggatttaaagctgacgttcttagaggtggggctctgctttatttagcctagtgaatcttaggatttttcatcggccttcagtcactaactccatgtctttattctttgcagctgacatcatgtacacaggcacgcttgactgctggcggaagattgctcgtgatgaaggaggcaaagcttttttcaagggtgcatggtccaatgttctcagaggcatgggtggtgcttttgtgcttgtcttgtatgatgaaatcaagaagtacacataagttatttcctaggatttttccccctgtgaacaggcatgttgtattatataacatatcttgagc

SEQ ID NO: 1889023 - DNA, 4001 bp, Homo sapiens
ctgtctctctctttttcatatttaatcttcaatcctttgaatgtctgaacatattcaatcgattcaagtgtgttataaaacttttcaactatatgtgaaacaagaggcttgatattttccactcttatgtattcaaatagctcaagaatagctgaattcaacatattgtaccgagttccattatctagaagagcatttacaactggctcaaaaagatttcccttgatgatgtaattattataagcttcatcattaaggcaaatcatccttctcataaagcgaagaacacacaaaatcaggtgagtatgctttgaattcatcaatatcaaggcctttcttagcaagtctttgttcaagatatagcttcttatgtagaatgtatgatgttgtatacaaaatgtaagtagctctaatatcaaagcaagcagttgtgctgtttgattatcattggggcaatttttgcttttgtcatatccagctatatcatcctcctcacagttgtgttctgaggtggcagccaaaagtggtgctgtaaatttatgcatgcaatgtttgtagaagaaatgtagaaattcacttctttcacttttctcaggtgttgtcagcatgttgcgtggatcaagtagagtatgcagaactaccatcaaatgaacagcacctcctaactcaggatcagtatcacagatcatttgtttaattattacattaatgaaaaggtcactatctttgcacacgtgagcttctgaaattataaattctcggatcctggatggactgtactccactagataagcacatataactgcagcagctgaccttacttgcaaatcatccctgatcattacgattttaagagcaggaagaactcccaactgtatcaacgtttcaaatagtgcatccttgctttgaggctgtaatgcctgagaaaatgaacataactccttgaaaaaaaatagcaattcacaccgtctatcatcatgtgtagtctcatcctttaactgtgcaaaaacttcatacaaaaatttgtgatctttctgcagcatgcttactatctcagccttgttggagaaaataaaagttgtaagtgtagaaagaaaattatcttcaaatatggaaggcacaggcaaaagaatgtcataaatgtactgtaatctgtatgtctgatgtattttttgcctaagttcagagttagttattggtataacttccttgaacttcgcatcgttggtcaagaagtccctatgcctttttggctgatccaaagcagggtcatactcaaggcatcccaccacatccatgatacactcgtcagaaaacattatctcaaacagacatgcctcgttgaggaacaaaattcccttaataatttcatacaaatggtgtaaaccttcagtattctctagattttcacaagtgtggaacagttgcagtagttttggaatataagcctcatttttcaagatctcagccagtctttccctatccgtaacaggtgacgagaaaactgaggtaactatgtcagcaatttgatcaagtgtattgagttcacagtcaggcagcacaaccatattactaattactgacatttcattaaagtcttcctctggttcatctgaaatgttcactgtggtttggatagacggatccttaccttgagcttggcaaatttctttccaaatatcctggcagccggctgggtcctggaattttagcaccaaaccctggttctcagcttcataccaaacaattagtgtctcttggtatttcccatagggcctgtctggaggtatctgtgaccgcaggatgaccgacccatctgaatctgaccgaacaagcagcgacatgccctggaactgctcgtcataggtggatgagacctgaccggtgcctagattgttccattcctcgtcttcgttcaggacatagacttttacactgtacctcaggcctgccatagcgtcctctggcctcgccccgtcaggtctgttctccacggcactgcttccggtacagcatggaagccgctgttattttgaaaacgatggtggccgagagggcacccctgatagaagactgccaatcaatagtggctagaggggcggagccaaggctctggagaggccagagggcggcagggttccctcctattccctctggaggccctgttacctctcactttcccccacctcaagcacactgaatcttctctccattgccccccaacaccccatcccctactgtctcttaaaaagcgagtctcaggccaggcgcggtgcgctcagacctgtaatctcagcacagcactttgggacgccgaggcgggtggatcacatgaggtcaggaggtcgagacgagcctggataaagaggtaaaaccctgtctctactaaaaatacaaaaattagctgggcgtggtggcaggtgcccataatcccagccactcgagaggctgaggcaggagaatgctttgaacccaggaggcagaggatgcaatgagccgagatcgcaccattatactccagcctgggcaacaagagtaggacttagtctcaaaaaaaaaaaaaaaaaaaaaaaaaaagcgagtctcttggactgttctccattgtctagaaaagcgtcgctctggcaggaatcttgtgatttccccagaattctgccccaaaagattgtgcctatgtaaccattactatacttgttaaaaggagctgccacccagcttacaaatggaagcctagaaattagaatatgatttttttataaagggttttgtttctctgaaacattttctctcatcaggtatttgggaatggaaacttaggaactttgataaaagagactgtaatcacctgtgtcctgacaaagttcctatttcacattctatgtcaagaaaaggctggtccaaaaaagaagcaggagcaagtggcctatagaccattagcaaaaatcagagaaatggtattcaatcttcccaataaggcttggcatgaatctgtatcattcacttagacatcctttggggaggattgttttaagaaggagttggttaactcctctggtctgtttagctcatcctaaagctctatcttttagcacaatggggaaaacatttccccaaattttcccactccataaggacactcgtcattcgtaggtaaggactgggccagaggaaaactgtgagttgaaattagccgagaaagtattggccatcacagatcaattattttcttttcttaataatgataataataaccacaacaactaataatacttgattacttattattatgaagaaaggtaataacataactgatcaagtctaataatacttgaatgcttattatgttcaagacactgacaagaatgttggagttactttcttacttagtttacataatgatccaatgatatagaagtattagtaatctttttaggatcaggaaataaacttagagaagttaaataaattgccaaaggtcacacactaataagttgaggaactctgtgttcaacatgtctttctgcttccaaaattggttttctcagccattgaactatgctatccccttcttttcttggccgtcattacactttatttcacatttcttccatctatataatttgtaatcaacataaaattatcaagacaagatggaagtcacgcacttcctcctttagatccacatctgtgtatagccaactgaaaaatagaagcttggatatggcaactctgttaaatataattttaatagtagccaagttgatttttgatgtagcagcaagttttgcagttttcttttaaaatatatttttccaaaacattaaccctgttattgcaagggaaagcaagaattggggcacatcaagcacatttggacttgaagagtcccatttgtagcaatcacttcattttacatagcactggagatatgtgataattctcaagtagaaaagaaaaatttccacacacctcttttgcaatgtggcctacagtagagtata

SEQ ID NO: 1889024 - DNA, 4001 bp, Homo sapiens; identical to SEQ ID NO: 1564129

SEQ ID NO: 1889025 - DNA, 4001 bp, Homo sapiens
gtccagtctcctctacttacactttctgctctagacttgccgacctcaagcctctccttcaaagtgtgtcctctgtaactacaatctcttgaactccaccccactaaaatcccaccaccctgaaggctagacgtgatgcccaatctatcccagaaaggtgtgttaatctcgctcctgggaatccaacaattagacgtgaggcccaatctatcccagaaaggtgtgttaatctcgctcctgggaatccaacaatatcacctcaaactaaacacagactgaggtggaaactttcccaactcactgatttttaaatgtgataccaaaatgtgacagcccgccaaaaaaagcaataaactcagaaatggcaaatagatttaatgcagagtgtcaacttcaattgattgatagtggctgcctagagtgctgtgttgagtaggtttctgaggatgcaccctggcttgaagagaaagactggcaggattaacaatatctgaaaacacaagtaagagaaaataaaagggtcaattgacatccagcaaacagaaaggaataaaatgccaaaagcagtgtcttggcacactctccacatcattctccaacttgggccttcctagaatcatccagctcctcatcccagccccataagccccagatgtccccactgaaaccaaggcagatacctaaaatctcacttgtaggagaaaccacaggcaccagagctgccactggtgctggcaccagctccaccaaggccagcgaagagcccaaatgtgagagtggcggtcaggctggcaccagcactgaagccaccactggtgctggcactggcactggcactgttattggtactggtactggcaccagtgctggcactgccactctcttgggctttggctttagcttctgctcccgcctggatccgggctttggcccagggtccgatatcagcttcgtcccagttgcagggcccggcagcattctccgagccgagcccaatgcccattcgagctctaatctcggccctagccttggcttcagctgcagcctcagctgcagccttcaaatccgcttccatcgcctctcggtactgagctgcccattccttgggatccttcttttgtacctgaaacaaaaataaccatcagaaggagcatagagggattaagccatagtaataatacagtattactatgtaaataaccatcagaaggagcataagaggattaagcatctacctttatgctaggcactatgctacatgcttagtataaaaagataatagtaataatacagtattaccagtaattatgcacctaatattccatccctgctctgacacttcctagccccatgactttggacatgtcacctaccaacctttctgggcctcggttttctcatctgtaacagggcaatgacatatcaggttgtaaggcttaaatgattcagataaagtgcctgttacagtgttttgacaattaacagaagcaccaaaacattcagatttgaactgcaggctgctctgcacacagcctgccccagccaggggcaccccatgctcttgacttgccaagctcaaggagctctccaattaccttgcaggcaaacttgaggactttcatcttgctggtctcatagtaagagcgcaggccccagaagaactcatattcagggggattgctattggggactctggcatagtccaggtaccttggaaagagaggttcaaagcctttatttctaagaccattcatggcctacccatgcatagactggacaggctccagatggcaacatcatccactaattactacagtctttcttccaatattgagccctgtcccactggtcttgcccagaagccacatagaggtgttgggggacgtttgttcatagggaagccacaagtttgacgccctcatcacaatgaccccagattcctgttgggtgtgttgtaaacagaggagccattctttgggccccctgctctgagcacaccccactgcaagtgtcttggcctcagcctggccaagcccagaaaggtccaccacagaaaatgaccagaaagactacagaggaagaacagccaatagcagcatgcttcacacatgctgaattcctgaccctttgtgtgtgtttctgtgtgcacatgcgtgtggctgtgtgagtgtttgcatgtcctccaaggaccaaggataggtgagctttggccagaaattcaagaggactgggctccaggcccataccagctgtgggccatgctcagatctcccttctcggagccccaggtccctcaactgtaaaacggggatgggatgacagctgcagggtagttatgaaaatgaaatgagatgtacaagtcaactccccagcatggtacctggttgcctgaagctaccattctatgtcatttctttacggaaattaatttctatgaagctctagttagcagaataaaaagaactaaggctttggagccaagttctaaacataactcttctacttgctacctgtgtaaccctgaccaaatgacttcacctctctaaacctcagtttctgcatacgtacaatgatggtaatgataatccctcccttgcagaactggtctcaagacaaatgttgaggtatatgtaacagatcaggaaacatgtgctgctcctgtttcccatcaccgcccaaggaataatcccacctgcatacatgcaaatatgcaaatacatacacacatagacacatgcatccatgcaccacggctttatcactcagttctgaaataggccaaatgcatgggacacatgaacaccagacagagatacttacttctgcttcacaaactcatcagtgatgagcttcttcacgtccccaaagagtgaatgatgtatcctgagagaagaaaaagaaaaataaataaacaaataaattcactcaaggctatggcacttcccagatgtgggcagaggcatttccaagatggaaaagaggtttccagcacaagagggaagctccatagaagcccaagagacactgagagagggagcagagagttcaggaccattcacccatcatccacccaggtcagaaccctgggccctctacccagtccagcaccccacccgctccaccagaccaccagactgatgcaatcctaggaccgtcctctcttgccaaaggacaacacggacagcaagcgctgagagagcccaatcatacccagggcgcagccccaacttgcgcagcacctcccagatgacagctgcgaggggaggcaagaggagacagggacagaaattgaacacatggaatctagaccacagccacccattcagctgcaagcccagccactcaccctcactggaccgatttccattcatgaagatgatgctaagaagcaccatgagcagacccagcttgggtgagtccttagtcctagagaaataacaggacagagaggtttatgttcagcagccatctgcaacagacacaccagccaactcactaggctagcctctcccagattcctcagatacagaattctacccagtctctgcttccagctctatgccacccttggcaaggcacttagacttgcaagcctcagtctactcttcagtaaaatagaaaaaatcatattttcccttccctgggtttccaagaagatggaagaatggctgccaacctggtacaacacaagcactcagtcaatgtgagtcccttctttctgtcccagaaccttcagccccactgacactcctgcgcttcatgcatcctgatccacccacaccaggaagccctccttgagaaccactctgccaaagccaggccaggcacccagtaggaagaggcaagcaacgacaggcctgctttcctgggaagcttctacagagacagcaaacctgacagcaggaatgtcccactccaggctcctacaccctccagtcaatcataatcaggtgccaccactgtaagcagggctccaactatgcataggaactgggacgggg

SEQ ID NO: 1889026 - DNA, 4001 bp, Homo sapiens
tcactgcaacctccacctcccagattcaagtgattctcctgcctcagcctcccgagtagctgggattacaggcatgcaccaccacacccagctaattttgtatttttagtagagacggggtttctccatgttggtgaggctggtctcgaactcccgacctcaggtgatccgcccgcctcggcctcccaaagtgctgggcattttgtgcaggcatgagccactgtgcccagcccaagaggaaatcttatacaagacaaagaagcactactgcagtcattcaattctgtctttttgatggttctcccttcacaaatcagcttccctttggaagctccttaagaagcagcacagcagtttgaggcacagataggaagactgactatatccaaggtatgctcatcccgtggggacactggatccctgttgggaacaatactttatccatttctagtcatctggatattgactagcacttccttatttagtaatgctcctcccacacaggcttctttgagaataaaatcatcagaaaactcaaattgtgcaccatctaccaactcagaaaaaaatagaaccagccagaaaaagagtgctggaaaagcatgaagacatcaaacaggaagggaagatagactgaagattcaagaggatggtaaagatgaaaatacgtggaatgcaaattctactcagtggtagcgagacaagtacagtacaatatgcaataaccactgcttccttttatttttctttgagacagggtctcgctctgttgcccaggctggaatgcagtggcatgatcttgggtcactgcagccccaaccttctggactcaagcaatactctcacctcaacctcccaagtagctggtactacaggcatgtgccactacacccagataatttttgtatttttagtagagacggggttttgccaagttggccaggctggtctcaaactcctgacctcaagtgatccacccacctcggcctcccaaagtgctgggattacaggcatgagccactgtgcccgcccttcatcctgtagtttttaaaatcttacttaaaaactgaatgagaccaaggagagagactggggaacatagggagacctcctatctacaagaaattaaaaaattagccaggcatggcgacgtgcgcctgtagtctcagctagtcgagaggctgaggtgggaagatctgcttgagcttgggagattgaggctgcagtgagctgtgatcaggccactgcacttgagcctgaccagcagagcaagactctgtcttggaaaaaaaaaaaaaaattaatggctcccagctacttggaaggctgaggcaggagaatcgctagaacccaggagtcagaggtcacagtgaactgagatctgccattgcactccagcctgggcgacagagcaagactctgtctcaaaaaaaagaaaaaagaaaaaaaattaatgaaaaaatcttttcaaatgacaaatagccacagaagacctgtaatatcacttatgacaaggttgtaattgaaaatattgtttccggccgggtgtggtggttcacacctgtactcccagcactttgggaggccaagggcggatggatcacttgaggtcaggagttcgagaccagcccagccaacatggtaaaaccctgtctctactaaaaatacaaaaattagccaggcgtggtggtgctactcgagaggctgaggcaagagaattgcttgaacctgggaggtagaggtttcagtgagctgagatcgcaccactgcactccaggctggacaaaagagggagactccatctcaaaaaaaagaaaagaaaatattgtttccatcatccgtatgaagatttaacaaaagatttctttttttcacatgtggggcatttgttcatagagaggtcacaagttttgtgccccccgtcacaatgaccccagattcctattgggtgtgttgtaaacagaagaagcattcttcaggccccctgctctgagcacaccccagaggatttcttgacactcaagtattaggaactgctgcatgcagtggctcacacctgtaatcccaccaactcaggaggctgaggcaggaggagtgcttgaggccaggagttcgagactagcctggacaacataatgagactctgtctctacaaaaataaaaattaaaaaattagccaggcatgttggtgtgcgcctgtggtcccagctattcgggagactcaggtggaagactctgactcaaaaaaaaaaaacaaaaaaacacatagccaggcacagtggctcaggcctggaatcccagcactttgggaggctgaggcgggaggatgacttgagctcaggagttcaggaccagccagggcaacatagacctcatctctactaaaaatcaaaaaaattagctgggcgtgatgacaagcacctgtagtcactgctactcaggaggcttaggtgggaggatcacttgagtgcagtagttcgaggctgcaatgagctatgattgtgccactgcactccagcctgggagatgaagcaagaccctgtctctaagaaaataataataataaagtaataaaaaaatttaagtatcaggaactctccactataaaggaattactgatttctctgtagaagcattgtaattctctaagaaaataataataaagtaataaaaaaatttaaatatcaggaactctccactataaatgaattattgatttctccgtagaagcattgtaattctttttttttttttttttttttttgagacagagtcttgctctgtcacccaggctggagtgcagtggcacaatctcagcctcctgtgttcaggtgattctcctgcctcagccttccaagtagctgggattacaggtatgtgccaccatgcctggctagtttttgtatttttagtagagatgggggtttcactacattggccaggctggtctcgaactcctgagaacacctcagcctcccaaagtgctgggattacaagtgtgagccaccgcgcccgactgaggcattgtaattcttgattgcagctcctgctctgctgtgtcttcctagaatatacagattaagcaagacttcaggaccaggcatggtggcttatgcctgtaatcccagcactttgggaggctgggatgggcggatcacttgagctcaggagttcaagaccaccctgaccaacatggtgaaaccccatctactaaaactacaaaaatcaggctgggcatggtggctcatgcctgtaatcccaacactttgggaggctgaggcaggtggatcacctgaggtcgggagttcgagactagcctgaccaacatggagaaaccccgtctctactaaaaatacaaaactagccgggcatggtggtgcatgcctgtaatcccaggctactcgggaggctgaggcaggagaatcacttgaatccgggaggcggaggttgcagtgagctgagatcgtgccactgcactccagcctgggcaacaagagcgaaactctgactcaaaaaaaaaaaaaaattagcagggcatggtggtgcacgcctgtagtcccagctacttgggacgctgatggacgaaatcgcttgaagagaggtttcagtgagccaagatcacaccactgcactccagcctgggcaacagagtgagactccatctcaaaaaaaacaaaaacaaaaaaaagactgcaaagttttcttgttcagtaggctcagtaggattgctgacaggcatgcctactttctaaaacttgtattgatattttcttcttttttttcttccttttattctaatacgtatttatttatacttagaagcatcctaaaatacacaggaaacaaaggcaacaagcaaataaataacaaataaataaagggcaaattgggagccgggtggcgtggctcatgcctataatcccagcactttgggaggctgaaatgggcagatcacttgaggtccagagttcaagaccagcccggccaacatggtgaaactc

SEQ ID NO: 1889027 - DNA, 4001 bp, Homo sapiens
gtcctggtgagagccttggaccctgtccctcggcgggaggggcagtggcaccaagctgcaattttccaccccgcccctgctgtggccccgactcttgccatgtccctggggctgctgagcaaggtttgtagaaaatcacataacgatgagcactggggcctctccaaactcctgctcacgcactcaggcgtaaccaacctccgcacctcccagcatcccacctgtccctgtgggcctttttggcagaggtggggcccacctaccccagagagcctgaagaagtttccttgctacaagcccaagcgtggccaggtatagcaatgggtgtgcaggtaaaggaagaaacatccaaattaattttgcaactttaatgtaacactgatacccaaaacatgaaaacacaaggaaaagcacaaaatgaaagcaggaagagcaaagagagcttcatcttgcatgccacctccgactgacaggaagaagccgcctagggtgctgtgtcgagaaggaatctgagaggaggcgctctggcttggccagtaagatcgctgcagttcgtcaacggtgcctataaaagcacaagaaaccaaagtgacaacatccgtggacacacgcgaaccagggaggggtgtacgtaacaaaataagtgtccgtccatgctgttgccgttgcccccagcgcccccaccctggccctccctctgacatctcacccccctccgcagccctcctgcagagtctcatttctctaccgaaactcttactggatccaggagaagaagctggcgccagctctggcagcatttctggtccggatggtggagctggtgctggggccatctaggacgctggtgctggcccctccattggtgccactgctgacgccagctctccacgtggccctcctgttggcacggttgctattcagaatgtactgatggtatctggcccagaaagcaaaggggatcctggcccaggcatcgccaaaatctccgtcctcatcccaggtcaggagctcgacttgtatgtcatcccagctccaccgtccaatcagcgcttcatccccgatattcatctgggccctcatctgggccctggcatgttcctcggccatatccacatccattgtcttgaaagcatcatccacagcctccaagaaatgagccttccattcccgggggtctcggttctgattctgaggaggaaaagggcaggcatagacacagagctaccccacactggctgagcacccgcggcccgcctcaccccctcccgtgtgctttgtgcaatgatggcaaaaatcaggaccacagggattgggggctcctactctcctgtgccagacctgggattttgccccatctgtgaccttgtgtagggtgctcaggtgcctctgtgagtgtttggtaccctcactggaatacggggtaatgggaaggaggcctcgaccaagaaacaagcaaggtgtggagagcaccacccccggtgccgggcacccaacagaggcgctcccttacctgggcgatgaatctcaggaccctcatcttgctggtctcatggcgggctcgcaggccccagaggaattcatactcaggtgggttgctgttggggatcttcttgtattccaggtaccttggcatgagaggaaagtaaactttgctgctagccaagcagacctgttgctgaacggatgggttccagggggcccctcctcaacccgatgccgcagctcagctcctggaagaggactgtcctgcccctccagcccttcactcattcccaaacccactcccaggacttctgcctgcaaaagtgaggccttcaaagccttttgccattggtcctccccggaagccatgcggaggtgcagggggtccacatgtagggcatttgtctgtagggaggccacaagtttgtgcccctcatcacgatgaccccagcttcctgttgggtgtgttgtaaacagaggagccattcttcaggccccctgctctgagcacaccccacctcgagggtcttggccacaccccggcggagccctggagaggcccaccagaggaaacgactggagaggaagaaacagtcagccaggagaagcgtgctccaggcatcctcctcaagtcctgaccctttgttggtgtgcatgcgcgcctgtgcgttggcaagtcctccagggacggggagagggtggcccctggcctgaaaatcaggagagttgggctgaggcccttaccagctgggagccatgctcagaggcgtctcctctctgagctccgggttccttaggtgtaaaccagggggaactcttgtgtcagtctacagggcaggtgctcaaggtgatggcggccgttttcacaccccacaccgtgttctcaggtgacgtgagctcccttttcccaagaccgccctggccttcggctccccacacactcgcataccccccactgccactcactcccaggtcagaggcacccatccctccagttgaagatttgggatagggaactgctttctcagccagaccagcacacaaaggatgctcgagtgagagccgcagttagctcaggtgatacttacttctgcttcacaaagtcatctgtgatgagcttcctcagatcgccgaggaatgggtgcctcaccctgagggcaaggaaaggaatccatgagcagagacggtggcaggggccctccctagcatgactatgacttcccagcccccggggagtcgctgtggaggcctgggcatgcagcagaggccagaggactgttggtcagggacgccccaggtagggatttgatggaatccctgactctgactgtctctcttagatgtcatctggggccacagagcagagagagggctgagcagcgtccagcaccgcttccccatccgccctggtgagatcctttgctctctaccgagcccagggcaccccacgcccttgcgccagaccaccaggctattgcaatcccaggacctctttggccagaggatagcaccgaggggaggagctggagaggccaatcatacccagggcgcagtcccatcttgcgtagtgcctcccagaggacagctgcgaggggagaggaggtacgagagtttggcacccagaagatgagactatgggcagccccccagttgcaggtccagccactcaccctcgctggcacggttgccattcatgaagatgacgcccagaatcaccaagaggagactcagcctgggagtgtccttggttctaaaggtgtggaaagagaaatcctgtttagcagctatttgcctgagagacaccaccaggctctcccaactagcctctctcaggtttcccagcttgaggggaactcttcccaggacaggcacagttcactagctgctgacagaccattcgcacctccgcctgagacttaatcgcctcctctataaaacatgggtactaacacttccctgacagggttctgcagaggacagggcgaggcagggagccgaagctctgcaaatggcaaacgtgtgcccagagatggctccagacctttcctgccccttccacatcagcacctacactgaagaggcagctctcccctaggccagctctgccaggcccaggccaggcaggcaggaggaagaggcactttcctccgaagctttggggataaagcccggcagcagcttggggagaactgatggcagcaaggcctcaccccaggctatcattcctttcatccagcagtcaccaggcagccctcgctgtgtgtgggagcggtgcgccgcactcaagccccgtcttcctgcttcactgaaggggtgtgggcagggaagggacaccaccgaggaaggccacgacccgctttccctttcttactttccaaggaggcgagctgaggagtcccgtgtgcagacaagaatatacaggtgttcttccttgtcgatctccttcaggtggatcccaaacttctacgtgggggagaaaacagagtgtgagatccaaaccccatgctgggcatcct

SEQ ID NO: 1889028 - DNA, 4001 bp, Homo sapiens
ggtcctggtgagagccttggaccctgtccctcggcgggaggggcagtggcaccaagctgcaattttccaccccgcccctgctgtggccccgactcttgccatgtccctggggctgctgagcaaggtttgtagaaaatcacataacgatgagcactggggcctctccaaactcctgctcacgcactcaggcgtaaccaacctccgcacctcccagcatcccacctgtccctgtgggcctttttggcagaggtggggcccacctaccccagagagcctgaagaagtttccttgctacaagcccaagcgtggccaggtatagcaatgggtgtgcaggtaaaggaagaaacatccaaattaattttgcaactttaatgtaacactgatacccaaaacatgaaaacacaaggaaaagcacaaaatgaaagcaggaagagcaaagagagcttcatcttgcatgccacctccgactgacaggaagaagccgcctagggtgctgtgtcgagaaggaatctgagaggaggcgctctggcttggccagtaagatcgctgcagttcgtcaacggtgcctataaaagcacaagaaaccaaagtgacaacatccgtggacacacgcgaaccagggaggggtgtacgtaacaaaataagtgtccgtccatgctgttgccgttgcccccagcgcccccaccctggccctccctctgacatctcacccccctccgcagccctcctgcagagtctcatttctctaccgaaactcttactggatccaggagaagaagctggcgccagctctggcagcatttctggtccggatggtggagctggtgctggggccatctaggacgctggtgctggcccctccattggtgccactgctgacgccagctctccacgtggccctcctgttggcacggttgctattcagaatgtactgatggtatctggcccagaaagcaaaggggatcctggcccaggcatcgccaaaatctccgtcctcatcccaggtcaggagctcgacttgtatgtcatcccagctccaccgtccaatcagcgcttcatccccgatattcatctgggccctcatctgggccctggcatgttcctcggccatatccacatccattgtcttgaaagcatcatccacagcctccaagaaatgagccttccattcccgggggtctcggttctgattctgaggaggaaaagggcaggcatagacacagagctaccccacactggctgagcacccgcggcccgcctcaccccctcccgtgtgctttgtgcaatgatggcaaaaatcaggaccacagggattgggggctcctactctcctgtgccagacctgggattttgccccatctgtgaccttgtgtagggtgctcaggtgcctctgtgagtgtttggtaccctcactggaatacggggtaatgggaaggaggcctcgaccaagaaacaagcaaggtgtggagagcaccacccccggtgccgggcacccaacagaggcgctcccttacctgggcgatgaatctcaggaccctcatcttgctggtctcatggcgggctcgcaggccccagaggaattcatactcaggtgggttgctgttggggatcttcttgtattccaggtaccttggcatgagaggaaagtaaactttgctgctagccaagcagacctgttgctgaacggatgggttccagggggcccctcctcaacccgatgccgcagctcagctcctggaagaggactgtcctgcccctccagcccttcactcattcccaaacccactcccaggacttctgcctgcaaaagtgaggccttcaaagccttttgccattggtcctccccggaagccatgcggaggtgcagggggtccacatgtagggcatttgtctgtagggaggccacaagtttgtgcccctcatcacgatgaccccagcttcctgttgggtgtgttgtaaacagaggagccattcttcaggccccctgctctgagcacaccccacctcgagggtcttggccacaccccggcggagccctggagaggcccaccagaggaaacgactggagaggaagaaacagtcagccaggagaagcgtgctccaggcatcctcctcaagtcctgaccctttgttggtgtgcatgcgcgcctgtgcgttggcaagtcctccagggacggggagagggtggcccctggcctgaaaatcaggagagttgggctgaggcccttaccagctgggagccatgctcagaggcgtctcctctctgagctccgggttccttaggtgtaaaccagggggaactcttgtgtcagtctacagggcaggtgctcaaggtgatggcggccgttttcacaccccacaccgtgttctcaggtgacgtgagctcccttttcccaagaccgccctggccttcggctccccacacactcgcataccccccactgccactcactcccaggtcagaggcacccatccctccagttgaagatttgggatagggaactgctttctcagccagaccagcacacaaaggatgctcgagtgagagccgcagttagctcaggtgatacttacttctgcttcacaaagtcatctgtgatgagcttcctcagatcgccgaggaatgggtgcctcaccctgagggcaaggaaaggaatccatgagcagagacggtggcaggggccctccctagcatgactatgacttcccagcccccggggagtcgctgtggaggcctgggcatgcagcagaggccagaggactgttggtcagggacgccccaggtagggatttgatggaatccctgactctgactgtctctcttagatgtcatctggggccacagagcagagagagggctgagcagcgtccagcaccgcttccccatccgccctggtgagatcctttgctctctaccgagcccagggcaccccacgcccttgcgccagaccaccaggctattgcaatcccaggacctctttggccagaggatagcaccgaggggaggagctggagaggccaatcatacccagggcgcagtcccatcttgcgtagtgcctcccagaggacagctgcgaggggagaggaggtacgagagtttggcacccagaagatgagactatgggcagccccccagttgcaggtccagccactcaccctcgctggcacggttgccattcatgaagatgacgcccagaatcaccaagaggagactcagcctgggagtgtccttggttctaaaggtgtggaaagagaaatcctgtttagcagctatttgcctgagagacaccaccaggctctcccaactagcctctctcaggtttcccagcttgaggggaactcttcccaggacaggcacagttcactagctgctgacagaccattcgcacctccgcctgagacttaatcgcctcctctataaaacatgggtactaacacttccctgacagggttctgcagaggacagggcgaggcagggagccgaagctctgcaaatggcaaacgtgtgcccagagatggctccagacctttcctgccccttccacatcagcacctacactgaagaggcagctctcccctaggccagctctgccaggcccaggccaggcaggcaggaggaagaggcactttcctccgaagctttggggataaagcccggcagcagcttggggagaactgatggcagcaaggcctcaccccaggctatcattcctttcatccagcagtcaccaggcagccctcgctgtgtgtgggagcggtgcgccgcactcaagccccgtcttcctgcttcactgaaggggtgtgggcagggaagggacaccaccgaggaaggccacgacccgctttccctttcttactttccaaggaggcgagctgaggagtcccgtgtgcagacaagaatatacaggtgttcttccttgtcgatctccttcaggtggatcccaaacttctacgtgggggagaaaacagagtgtgagatccaaaccccatgctgggcatcc

SEQ ID NO: 1889029 - DNA, 4001 bp, Homo sapiens; identical to SEQ ID NO: 1889027

SEQ ID NO: 1889030 - DNA, 4001 bp, Homo sapiens; identical to SEQ ID NO: 1889028

SEQ ID NO: 1889031 - DNA, 4001 bp, Homo sapiens
tctaaggaggcctcctctaaggaggccagtctctggaacatcaagacaaggaggtttatataaaggcacgggccaatttctactcccattccatatcacccacatacttgatgttcacattccttttattcttggttcaatagcattgataaagattatagttgaaagaattataatgtttaaaatatataccaaactatggcataaagaactcattatattaatccttgccaattgtcaggaaagatgtgtcatcttttttactgggttttacatatcaatcagtaagtatttattgagatatatatttttaactgatacattttgtctcaattgtctgaaaatagtaagattgtaaatgaaatgcagattgtgtacattcttttgctacctgatctgatctgatttatgatcagaacataaatatgaccttgggttaatgagggccatgtcctttttgtgggagtcccccctcaatacatttcctaggaaggcaagtttaccatccataattttaacacaagaatagtatgaggtgaggtcttccttcaaaataattattttttacttaccttatcctggattcaaactaatcttttctaaattttaaatgagttttcatcctgtattttatcacgtaaaacagtaccttgttttatacagtgctaaaactatgacattcaatcttctaaagcttgcctccagttttggttacaaaaattgatggctgacttcatagataacttacattaatttatccagcaatagttatttatttagcttctactttatgaaaggcactgggataggtgctgcagtaagtactaagatttatgagaagatagacctttcaaagggtttaccaattagttaataagctaacaaggtgaatgaacagaataaatgaaaaattgatcatcgtcaaattatgtggtagagagagagagattagtggggacttgagtatttgaaggtgtcatgatggacaaaaagggggccaggaatgagccttgaatgtagttctaacttataagaaagaactggaaagggaattctatcagcactaggtctaagctgactgtttatatacagagaatgaagaggctggggaagcctagcttgtcaggaagctagtagaaatgtggggcaaatacatgggtgccatcatctataagataattataatctcattttcatcacatcaaaaggagaaaaccacttatctctctgtcttactaacacttaatgagcaaattgcccagaaatttaaatggatttatcttgtcatgtaatcaccatgacaatcgtagatcattccagtagtgtcaaccttattttatggactaggacactgagtctaagaggggttaatgtaaattgctaaaagcttcacagctagtaatgattatgataatgtaatagcgaggataatatttactgagtatcttctattaacctggtacggacatagtcacttttttttttttttttctttgagacggagtctcgctctgtcaccaggctggggcagtggcgcgatctcggctcactgcaacctccacctcccaggttcaagggattctctggcctcagcctcccgagtagctgggactacatgtgtgcgccaccatgcccagctgattttttttgtatttttagtagagacgggtttcgccacgttggccagcatggccttgatctcttgaccttgtgatctgcctgcctcggcctcccaaagtgctgggattacaggagtgagccaccgcgcccggccagacatagtcacgcttttctagtaatagcagttactgagctgcctggatctgtctctccactctctcactttttttaggcaggtcataggacccaggagatatgtacccagctgcatgcaggagtagcccacggtgtgactctcccagctttgagagggatttgcttttgcaccgcttgatgcccagttggtcaagatggagcccaatgggtcacttggcagtgctgtagacagcagagctggggttggggccccatgctctgtatagaagaacaagcttaaaggagggagtgggtaggtgaccagaaacatctcagaacccattgcttcattcactcaacatggtgactgcaaacgtaggtcaacttccagtgaagaaaatgtgagtttagaatcaggcagatctgggctcagaatcccagcactgtcactgactagctgtgggactttggtaaactcactcaagttcttgtagcctctgttttcatatatattaaatggaatcagtaataactacttcattgactgctgtgagaattggaagaaataacttgcaaagagtctagtccactacctgacattagttgttaaacatttaataattaatagctattgtcataactaaaaatctccccactcaccaataccaactctcttttttattttttcaaattaccatttgtgcgggatctggtaaaaaaatgttggaattttttttagttaataattctacaattttctattcttcttataatttccccttacaaaagaaaagttgctttagatccaactattttatgttggcatatatgttgaatgactattttaaattgcctaatatttcctgacaacaaatttgtagatcactatccttgaattgtttgaaggacaatgatacatctttcctgtgcctctggaaggaactcacattctctcaaatgtacaaaacagaaaactatccatttgatgtacctcttttttttttctcttggttatcgctgaaaatctgccacctcaagcagccattggcaaataatcgttacctttttcttcattgtttgcttcattaagtcagcaaatattcatagataaaattttatgaaccaagcactactctaattaatagtgttcccaccaaaacaagtgcctttctctatacccccttgacttttgtcctagcctggtatgctgccttaccaaatgatgctgcttaggtgctcagccatccttgaattctaggaataatctggcctctagtgcacagaactggattaattataacccttggtgtatgaatcaccattgtcatgtctccacatatggctctatagatataattaattaattaaaaattaaaacaaaacatcatatacagattgtgaatgttcgattttaagagataatgccaactttttccaagtaattttacaaatttatatttctgctagcaatgtgtaagagatccagttggttcacgttcccacaaatgcttggttcttacaataggtataaaatgtcccattactttcttgcctgtcctccctgtatggggaagtttcatgtacaaagttgaggtttggaacttttctcagacatttgaagtagaatggaatcaaataccagaaacttctcagcaaaatgagaactacaagtgatatcctagtcccttcttggctaacggcttttaaaaaatgaagaggaggaaaacaatttaaaagtaagcattacccactttaggagtcggggaagaaagtgtactccagatattaaagggcacaggcttttctgtgactcataaatgggcatattttctcccctaaaattctagaataatagcaaattgaagggaaagatacaaattaacccgtttctgtttttccaatggagacccgtttctaaactgttgggtaaccagagtatagatactctcttaaatgcacagatcatttcacagatataaatataaaaagatggaaaaataacatgtgactagttgtttattaattgtgggttttaatagtttacattgggccattcacttatgaaggtgtggttccatctaattcatcattccgaaaaatacatgttcattatttgacagttttgaaaagcagttgtagtacccaaaataattgttttatatgtaagtatgatatcaacagccttaatcctaaattcttatattgctctcagtgtgcatacacgtcaaaatgcatctttgtagtac

SEQ ID NO: 1889032 - DNA, 4001 bp, Homo sapiens
tttcaggttttcaggttctagagactcacaagtattttcttttttttttttttttttttttaattttcaggcagaacctccctctgttgtccagggtggagtgcagtggcacattctcggctcactgcaacctccatctcccaagttcaagtgattctcagcctcccaaggagctgggattacaggcacgtgccaccacgcccagctaatttttgtatttttaatagagacagggtttcaccatattgcccaggctggtctcaaactcctgagctcaagcaatttgcctggcccggcctcccaaagtgctgggattatgggtgtgagccaccgcacgtggtccatattttcatttgaaacataaaaatagccttggcattccttaattactcctctctcctccttatgaggagaaagaacagatttactggagatccaggcaataacaggctcttaaagaacttgaaaacaagattactgagccctgttgaaccaatcacacaaaagtcttggtgcagaatttataggtcagtgggtacaagttaaggctacctctccagaggttcaatggtacccaatgcacccatctgcctcataccatctccactcacctagacctcttttgatcacattctcccctccctttacattcacccagaagccaatggtttgataaggagaggacatcacatttatgttgtccactgttttgtgactgagttttttcaactattatggtgccatctttcagtatttattacagcctatacacatacaaaaaatgtgaacatctatacaagatttgaatataaataattaccaactacaaacattttaaatatccagaaatttttatccctcaagttagagaaaaagacaatgttttaatttataaaaggccaactctctgatcatcataaaaacacagctcacagccttgatctcctgggctcaagctggtctcaaactccttcctggactcaagtgatcctcttgcctcagcctgccaaagtgctaggattataggcatcagccactgtgcctggcctaatgtgccttatttttaagtatgcctaccattaaacttttactttaaattaatatacttggtttggacttgaaaaaaataaaataaaacccaaggaaaacaataaaaagagcaagcctcatctttggagtacgttctttccaaatataaactcctaacccggaacttactgcactgtctttcataaccagccgtttatgagatgtcaacagcttttccaaagggtaaacaactcgccgcaggtaactctcatccttgtggttatcatacagccactgagcatcaagcacatcatgcattgtcaccatgtggtcctgaaaagcagccatgtatgaaaataattcagtttatttgtatctcagcccatcagaccccaaacttcctaaaactgaatgtcacttgtttactagtccaagctcattatgtcttcagcctcttcagtcctggctcttccaggcatcttttttttttttttttttttttttttgagacggagtctcgctctgtcgcccaggtgggactgcggactgcagtggcgcaatctcggctcactgcaagctccgcttcccgggttcacgccattctcctgcctcagcctcccgagtagctgggactacaggcgcccgccaccgcgcccggctaattttttttgtatttttagtagagacggggtttcaccttgttagccaggatggtctcgatctcctgacctcatgatccacccgcctcggcctcccaaagtgctgggattacaggcgtgagccaccgcgccctcttccaggcatctttaaccgttgaagtattagaccccaagcaggcatttttgtaggctgggaggcaaatgaatagaataatactttctacccaatcatctcccttagcccattttaatgtcccaaagtttaattaacagaacagggaagctgccctggactgaactcaacactttggaaagcatctttcccacgacatgaagcaagtggagtgccatcaaaggctggcagatggtaagaaccagctctaaaacttctagccccgtaacacataccttttcactcatgactccagaacgaaccctccgaagctcctgcatctgaccaccaactcccaataacaaaccaaggtgcacacataatgtccgaatgtaggtgccagcctcacaactcacccaaaagattcctaagatacacacacacaaaagaaaagcagcacctactgtaaatacatcactggttgagaaatgcagttatccttcatctgagccaccaagactagaggtgacagacacacttcttaaaatataagcatttgctgtaaagatctgtaattctggccaggcacggtggctcacgcctgtaattccagcactttgggaggcagaggcgggtggatcacgacgtcaggagatcaagaccatcctggctaacatggtgaaaccccgtctctactaaatgtacaaaaaattagccgggcatgatggcgggcgcctatagtcccagctacttgggaggctgaggcaggaaaatggtgtgaacccgggagacagagtttgcagtgagccgagatcatgccaccgcactccagcctgggcgacagagcgagactccgtctcaaaaaaaaaaaaaaaaaaaaaaaaagatctgtaattctgatattagcagaatttttaacacttaagttgcaggtatattcagcatggtatgtttcatggatgggaggaaaattggcattgtcttaaatttacttctgacaacagaaacttctaagcagtcaaaattgcaacaaataaaaaacacatgcaaaacatactttggtgaaaacacttacctttgaacaaagcaccgaactacacaaatgcagaatgaaaacatttcaactccagcagaagcagtcatcataaaaggtgtaaaagccatctcactttactaggcactgttcactttttcaacaaaagataacaaaaactatcgcccacagacaatatcccagctgtagggcaggttttagaaagtcttcaacttcaagggcatctacttttaataagagaacagaatcctgaagaatgtgttcatacccactcacaggcctaatgactcacctaatcttctttcaggatcgtattcaatcattttgctctcgtagatggtcctcactcggagctgcctctttactgcagcaataagtgggggtcgctggaataaggcacctgtcagagtttctagggcctaagaacaaacacaaatgaaaacaaacacctcatcagaatgtacatgtgcagtcactggtccaggctggctgcagcagccgactgaaaaggggacaaaaggagtcagtcaggacagctaacccatctccagatgtttaggggctcagagatccaagtcaacaaagggtgtcctccctacaattgcagacttaccctagaaagctgggtccccccttcaatagcattgtgcagccggacaatccccacatactctttgcctgaaaaatgacaaaagagtagtcaggtgtggccactgagttttctgttttccatatttcttatatgctcagtcactcccattttgcacagcaggaaaagcggcagtttgaccttgtgtttctataaaatttgcattaagagagatttcatggtgatgatgtgggaaagaatgaagacactttctcactgggaattcaatgtactaacagggacagttgggagtactcagtgtagaagctgcgtggaaaaagccttgcaagataagcaggcttttctcagataaaaatgaacgaaggatactttaggcagaagcggtagcacagagtgagaagcctggagtgacaagctgagagctgaacccggacaaatggatccagtcagcttgatgaatacatgcttagtatgtggaattccaaaaagcgcggaccaccaagatctggcaggggacagaacgtacacagaaaccaa

SEQ ID NO: 1889033 - DNA, 4001 bp, Homo sapiens
tagcagctaaaatgtgccagaactcttcaccctgtctaggacctatgttccactctctcagcaacaaaaggatctataacatgttttctcaataaggctttagtttctcctccagcttcaagtggccttcactactcagaaaccaattctacctcttttgctttcttcttcttcttcttcttcttggtggtatcactgtcctagaaagaaagagaatgaaagctcacagataccatccactaacaaagctatgactctcccagaaggaaatctggtaaaggtccacagtcaagcaagcctttttcaggacctgtaaggatattttgggttaaatgctgcatgtgacacaaagttctgtaaacctttcagtgacaccctagtggtctacttttggaagtggaaacattcagatcaccatcctacacatcctctccacccaccatcaatagagctctaagtataagtggtagaggtcgggtgcctctatctgtccattccacagggagggcaaaagcactccaggaacatggggaagcactaaaggcactcggtggcatcccacccccaggccacagctcctccaagaagagtaacaaagctggtaccacctgggtaattctttccccacgcagggactaagccagcccaaggaacctgaacgtgtttccacacaccccatctccaggctcggccccgctctccagaccagctttggccttcttgtccttcttactcttcttcttttccttcttgatcaactgaggagctgctggaggagtctcgtcactttcactctcactctctcgcttccgctgagatgaaagcaattggttaagtgttagatcttgggcaataatggacaagaaaggttcagtgagtcaaaaggtagcaaggcaccaagaaagatcccaactgaatctaacaggacgttttctgactacaaacccggacagggccttagtttactgaggatttgaagacagtctcatcccccaaatccaagaagccttgaggcaggcacaagagaaggagcacagcagcagcacggggcttggggtggaaaggcccggaggagctgtttctctcatgactgcaaggacctctcacagaaagcaggcaaagcaggaattcacatctgacaagtcagaagctcctcccacacagcctgtgcaggatactcagtaccgcccccggtttctgagtgcagacctgtcattctgtgctctaatgccagcagctccatggggtggagttgccaacccatgcttgactgactctttcaacactgggtggtgccaggttaagatgcaattctgctctctgctgaattttgtatggcctcgaatgtccaacagccatggcctctgatttcaacacatctgtcctaccatttgacccagggcgggggccagaattgacacacacaccaccacccattccatcactgtgttgctgccatagctgaggtaggagtcgaggcccatctgattcctgagcccacattcctcctcccagcagataggacagagaatacaaatcagaggagcctgcagagcccaaacaagcaccccagggtatgaggcagcattacctgtgtatgcgctgcacctctgatgctagcgtatatggctggactgcggacagtcacaaagtaagacgaatgccagtgcctcttaggattatctccctaagcacattccaaactgaggacagcatgccactcaccttcgcagtttttgctgcttcggcaactacctgcggggcttttaccacttcagcaaccacctcttttttggcagactcactgaaaaagaggtagcaataggtcaaattcactgaatggctttccagggcagtactgatgttatgtagtgttatctggcaagtctaaagccaccatcaaaatactgacgctggacagaagaactcaccacttactgttgcagactgactccctctagagtcccacgagccagactagaaagggataactgtctgccgtgcaggcccacacccctaactggcctgggcagccaaaatctcacgggagctgaagagctggttcctgtggtcctgcatttagcaagtttgccccaaaccaagtgactccccctcccctgggctctacaacctccatgctcacctgttcctcacctgttgtccatgtactcctgcgtccagatggcaagtgggctctaccttcccatcctcacctgttgttgacatactcctgcatcaaggcagcaagtgtgccgtctctacccaccccggctctgaaacatcctgccctcacctgtagtcaacatactcctgcttccaggtggcaggtgtgctgtctgtgggcttcccatgcttgtccagaaggccctgcttgatcatcagcttcttctgacttgcctggtggaacatcaaggtgtcaacattagaatggtgtcaatgctggaagcgggcatggtgactacaaagaatagaacaaggttcctccctggtgtattctcagcagggcctcaaactcctctccagagcattcagaatttgcccactaactccaacacacacaggacttgttgaagatcacaaagcttattagtgagagcctctgcagacataacgtccccaccgcagccactctacttttttgcctttgcacatgctgcttgctcccaatgccctgaactctcccctcccctcttcacttcaccaacacctaacccactcttcacaccggtgtggcttaacagacaatcccttgaccagactccttgaccactgtggacactccaggtgacagacacctctctgcactccttggtagccactaacgtgcatgaaattcgccattccactgtgtgattacgtgagtaatgcccaactgtttcccctcattagactgaaatctctaaggcccaagacagggcctgtttccactcatcgacaacccagagcccagcacaatacaaggctgtggtggtgaaacacaccaagagctgcccaagtattcaacaatgccaaacaaaagaacctggcaggagccgccccatccgggagggaggtgggggggggtcagcccccccgcccggccagccgccccgtccgggaggtgaggggcgcctctgcccggccgcccctactgggaagtgaggagcccctctgcccggccgccaccccgtctgggaggtgtgcccaacagctcattgagaacgggccaggatggcaatggcggttttgtggaatagaaaggcgggaaaggtggggaaaagattgagaaatcggatggttgccgtgtctgtgtggagagaagtagacatgggagacttttcattttgttctgcactaagaaaaactcttctgccttgggatcctgttgatctgtgaccttacccccaaccctgtgctctctgaaacatgtgctgtgtccactcagggttaaatggattaagggcggtgcaagatgtgctttgttaaacagatgcttgaaggcagcatgctccttaagagtcatcaccactccctaatctcaagtaatcagggacacagacactgcggaaggccgcagggtcctctgcctaggaaaaccagagacctttgttcacttgtttatctgctgaccttccctccactattgtcccatgaccctgccaaatccccctctgtgagaaacacccaagaattatcaataaaaaaataaatttaaaaaaaaaaaaaaaaaaaaaagaacctggcagggcacgcaacccagtaccacttacctttggacctaaaccccacttccgagggtaagtgtctctctccatgatcactctcttgatcttggctactataccatggtcgcaggtagagatgaccgctgtggtcattaatgcaatagctacaggcattgaataaagaaaagaattatttgaagggtgaaagaattgataattgatgagccccaattctactgttgtatgccactttaaaacttttaaaactctgagctactactttaattggggttacct

SEQ ID NO: 1889034 - DNA, 4001 bp, Homo sapiens
agctcttcagtaagtcaggcaatagcattacctgttacaatgtcaacaattaacctagattttttttaaacaagtgaactcgcttgaatccaggaacaggggtgggcaatctttttgcataaagagcaaagtagtaaatattttaggctttgcaggccacattatctctgtgcacaagggtgcatttatatacataatacgtaagttatgcatatggctgtgaaacaagaacattttatatggacagaaatttgtatttcaattttcagatggcataaaatattctttcaactatttaaaaatgtaggaaccatatagttcacagactgtacaaaaacaggcagcagatggctggacgcggtggctcaggcctgtaatcccagcactttgggaggcagaggtggtggaccacctgaggtcaggaggtccagaccagcctggccaacatggtgaaaccccatctctactaaaaataaaattctgcgattgctatttccctgcactagacgtgaatgggggagttgattaattgtaaaactcatgtgaggccgggcgtggtggctcatgcctgtaatcccaacactttggggaggccgaggtgggtggatctcaaggtcaggagttcgagaccagcctgaccaacattgtgaaaccccatctctactaaaaatacaaaaattagctggatgtggtggggggcgcctgtaatcccagctactcaggaggctgaggcaagagaattgcttgaacccgggaggtggaggttgcagtgagctaagatcgcaccactgcactccagcctgggcaacagagccagactctgtctcaaaataaataaatacattaaaaaaaaataaaataaaatttacagaatcagtcctttacactaaacacacttcaagcacatggtagccagagaacatttctatcattgcagaaagttctactggatagtgttgttattaggtttggcagggaagggagaattcagtaattgacaaaccacaatacaacagcaattaaaaagaaaggccttacatatttattactgaatccagccaaccaacgtgttcataacagattcagagaggaaaacacgtcgaaatctccagatagtggtgacattttcagcttgatatggtaacatgatcgtgaccttcagacagcataaatatgtgtgccatctcatgtgcaattccttatagacccagcttggttcttctccaatgtctccttttggagttgtacctacacagaaaaaaatgtcaagttacaaaggcagtctgacagcaatgtagctgttcccattcacataaccttttaggtaccacaaaatacaaagggtactgcttttctctcctctaacaagtttggagttctttctggagagtaaaaaaaataattccctatgtgtttaaaaactagccaagtcaagttttatcctctcaaaataatttgaaggctaggctcttaactaggatcagagtagtggcgaagcccactctctccaagtgtacttgtacccacttttgattcaatggacctggaggtacacagacatactctgaaccccctcataatgggtcacaaacatataaaagctcccgcatgatattttttttgagacagagtcgcccgcccccccaacaccacccagctaatttttgtatttttgtatttttagtagaggcagggtttcaccatgttggccaggctggtctcgaactggctggacttcgagatccacccgcctcgtcctcccaaagagttgagattacaggcatgagccactgcacctggcctcgcatgatctttacaatcgatcaactcctccattcacgtctagtgcagggaaacagcaatcccagaattgtccatgtcaatctgtcatgattttaccctcataaaggcaaaatcaaaaatgattaacacggcttttctttcagcaggataatggcagtacttccacaaaatgaagcactgtaattgcaacctgctttcaaaaacatttttaacgctggaagatagctaaaacaatgaaaatcattccattgggtcaattatctgggtcaagggtatataatcttacgtacaaaataccttcccaattctaggagaccacagagtttaatagcaggttatttattgaactaggcgttgagttttacatacatttttctttttttgagacagggtcacactgttgcccaggctacaatgcagcggccggatcacagctcactgcagcctgtgaattcctgggctcaagtgatcctcccacttcagcctgctaaatagttaggactacaagcacgtgccaccaagtccagctaatttatatttttggtagagatggacgggggtggtctccctatgttgcccaggctggtctcaaattcctggcctcaagcaatcctcctgcgttggcctctcccaaagtgctgggattataagtatgaagcactgtgcctggtttatatatacttctttcactcttcacaagcaggtcccaccatcaggcaggacacagagaaacccacgttcaagtagatgtatcaaataataaaggacagtgtctagtatccagtaaacaaatggtaagcaattaactagcccataacattacaatgggtggcaattttcacatctaactagctaaatgaaccaaggaaataggccctcaactttagccctaagaagccacccctttaagtcttcttagcaaaccaatcccactagctttgccatacaagtcgaatcaagttctggctgggcgcggtggctcatgcctgtaatcccagcatgttgggaggcagaggcgcgtgaatcacgaggtcaggagttcaagaccagcctggccaagatggtgaaaccccgtctctactaaaaatacaaaaattagccaggtgtggtggcaggcacctgtaatcccagctacttgggaggctgagcaagagaatcgcttgaacttgggaggcagaggttgcggtaagccaagatcacaccattgcactccagcctgggcaatgagagcaaaactccatctcaaaaaaaaaaaaaagagaaagtgctttgactagcctgggcaacatggcgaaaccccatctctacaacaggtacacaaattagccaggcatggtggtgaacgcctgtagtcccagctactcaggaggaggctgaggtgggagggttacaccactgcactcagcctgggtgagagagcgactgctgaaccttgggcaactcttgctgattcttgatgctcccttcaaaacctgtctcaaggcccatcaggaccaaagagcgatgggctgaaaaagccatgcaggagactgtttcaggcctagctttccctggagttagtctagatgaccttggaggtccttcatagcaattctagtaatgtttttcctttgagatcaactacttctgcagtagaggacagttttccaatcttttctagtctctttttagaaaagagaaacatctaaaagactgggctaggtgtgatggctcacgcctgtaatctctgcactttggtagggtgagacaggaggattgcttgagctcaggagttcaagaccagcttgggcaacacagagagaccccatctctacaaaaaatttaaaaattagccaggtgtggtggcgtgtgcctgtagtcccagctactcagagagatgaggtgggagggtcacttgagtctggtaggtagggagaggttgcagggagatagtgtcaacgcagcatgtaaaacagaacaagatcctgtctcaaaaaacaaaaacaaaggccgggcacaatggcttatgcctgtaatcccagcactttgggaagccgagaggggcagatcacttgagctcaggagtttgagaccagcctggccaatatagtgaaataccatctctactaaaaatataaaacttagctgggcgtggtgacgcacgcctgtagtcccagctactctgaaggcggaggcaaaagaatcacttgaacctggga

SEQ ID NO: 1889035 - DNA, 4001 bp, Homo sapiens
taagccccaatagctacaaggagggtggttaatctgctatatcaaactccttccctgaaaccagcaaacaccgggaaacattttggctcattataatccggtgaacaatgcagtcaggcctgttataaccgctgagcagccacactcgcacctcctgggtgctgtagtctgtgttggtacaggcttctgcatgcctggtaaagtccagccaaggctggtcaaggcaacatctccacacagaaaatctgcaccagttatgtaagctaaaaagctgtgtgaacccaggtgtcccggaaaggggctgcaggacacagcaaaatgccagcagcatgccggacccctcccttccatcctcctctccaaagaagagaggtcaggaaaaacactggctgggacgctagaagggtcatgtgttaactataatcacatttatggtttggaaccatcaccccaaggtaaaaaaaaaataaaaggtattcccaggtatgtttggcaaaataaaataaaggtaattaaaaacctaagaaatggctgtaaactgagattacaaaaaaccagaggccttttgggagccacaggctgggggctggggccaacataccccagctctgggaccaaaagcctttggagtcctgtccctggatacagatgctcaggccacccacctagcactcctctcatttttgctgctcccccaaaagccagcgctgttctacaatagttcaggtcagacatctaagatccccaggccaaaccatgccacacacgtgtctgttccgaggtcttgttacaaatgaccaaaggttagcctagacctttggtcaggtggtgaaggccctgggaatgcaggttctagaaggggtgggggcatggggcccaggaggttgctagagataggaaatggggcaaatcgcaggtgacctcagcagtacctggatgattcccaccaaggaggaatggccaaaccagatgggtgagaacaagcccaatgtgatgcacacctacccttgctaaataaacgctgctggtcagcctctagcccacaagcccctcttggtccgcatgtgttgtaataagcaacacaactgtaggctgaccccagcctgggattgcaaggctttgctgcagctgtgcttcatgaaaagcacttcagtgtttttcaacctactgcctaggacctggggaggtccaagtcaagctccagagtagacaactgacataaggccaccagtcccagccctttgcagggtttgctgcctcatgagcagggctgagttgtcaacctgtttctgaagtgaaagggcaatgacccaaaggttcccagaggaagttccttccccgtcaagaatgtagatacaaagacataggtggacaggaagtagaatttattggtgagtattaagaggggggcagcacattggaagccctcatgagtgcagggcccgccacttgtccagagggccacgactggggatgtacttgaccccacagccatctgggatgagccgcttttcagccaccatgtcttcaaattcatcagcattgaacttggtgaagccccacttctttgagatgtggatctaaggagcaatggaaagaactgagtcaggaggcctggggcaaaggtgggagaagggggctgcagcactacataccttctggcggccaggaaacttgaacttggccctgcgcagggcctcaatcacatgctccttgttctgcagcttggtgcggatggacatgataacttggccaatgtgaaccctggccacagtgccctggggctttccaaaggcacctcgcatgcctgtttggagcctacattggggtagtgcaaggtcagaaacatgaacatccacctgaaaggcctgtctccaaggtcccttagagcaacccatacaaccaacaggctgcgtacactaccaaggaagctgctgtgtgcagccatcgcacactgggtccccatgaggaaaggaactcagtcggcttaattggctgcggagcatcccaagaaccactgaaaaggcgccactgggctcctctgccagcttcagctacctgctggcaagatggttgtcattcagctaaaagcaagaagagctactcccatcaccagtgtttcccctaacctgtggggaagagcttgctaagacttactcatgctttgtttgtatctgcaggaaggggtcctgagtgaccactgaaagtcacttgccagcctggcttttctagtagccatagtggctgagtcactggggccacctctatgctctgataaaataatgcaagcctaataatgtagagactccaactgccttaaaaggcccagaccaagctcacctgtcagccccagcacaggacaacatcttgttgatgcggatgacgtggaaggggtggagccgcacccggatatggaagccatctttgccacaactttttaccatgtacttattggcacaaattcgggcagcctccagggctaggtagggagaagaaaagcagcaaagtgagagaagataatagagaaacattcaccacgactatctccagctcaggggaactgtgttggctgagttttgtaaggctcatgtttcatcaactcccaattccagtgcagtgtatgtgggtggggttgagggagcacggaggaaggactggggggtgacgaacaaagaatcctgccttaccttcagaggacagctgctcatattcatctgacaccatgtggccacaaagcggaaactcatccacttttgcctttttccgccccaggtcaaaaatgcgaatcttggcatctaaaaggattgggtaagtgtgcagggggtgtcacagacggacgcggagtccgcagagccaaccagtgcaggggctcttccactacttaccagggacacctcggcagaagcgagactttgggtacggcttgttcttacaataccggtaactgcaggggagtgaaaaaacacaggttaggtgaggttcacagaaagcccaacaggcactttgcccctcaaggaacaacccaaacgagggacgggaaaagggtggggaatgcacgtccacttctaaaccgtttccattcggggaaataaactacaaagcaacagttggctgctgcaacacagacaacacccaagactagaaacaacagacaccatcttccgttactttgtcttacgcttcctataaacactttgcaacaaactttcctagttaaaaattctctcttcaagacactgcgtactacaaaatcgccgcattatcattgcacagctcaggtcacccaatttaagactttcgggcacgtggcactaaatccacctccaagccgagtggaaatgcgtctggcgccccctgtaggacacaggaggcggccgcacccgtttttcccggactgcccttcacgtccgacaacgcacgcggcacgtcgcccggaaataagacagagaacgcacacaaaggccccaagagcgtatctagcgcccgaaaatgcggtgagcttgcaggacacaggcagagatacgagggaaccgtcgcttccacaccgacacgggaacgaaggaacagacagtaatattgcagactaaaaaatagccgggaggtgtaaaacatagggtcagttcccaagacagggccgccgcacgggggaggctccaccccacaattgttttcagcggccataggcacttctttccccgcccgtttcccagcagtgaaagtacacggattcaagactcaccaacgggcggggcggcggcccatggcgacaccaggatcttcagtggctgcaacgaaaaagagagagtcggaacggaagacgagaacagacctaaaaggtgtgagaaccagcaacggcaccgcaagagacgacaactgcgcttactcaccacaccgaagggaaagaggcgctcctccgcctgcgcatggcttatataggcggtctgtctgcgcgcgtaagaaccatagagtcctgtcgaagacgggtggacgctctgtcagac

SEQ ID NO: 1889036 - DNA, 4001 bp, Homo sapiens
tggtgagccaagatcgtgccactgcacttcagcctgggcaacaagtgctaaactctacccccccccccccaaaaaaaaaccattattgatttgggtagtctagtttcacttgtacttgatggagcatgcactgcagtcatagaaactggggaaataagaactgaaggtagtcttaaaaaactttttttttttttttttgagagggagtctcgctgttcccccaggctggagtacagtggcacgatctcaactcactgcaacctctgcctcccaagttcaagtgattcttctgcctcagcctccgtagtagctgggattacaggcacctgccaccacgcccagctaactttaaaaaataaaaatgatttcattttcatgtccaacaccctggcctatcaatttttaaatgcctttcctacagagtgaactacttggacaagaagtaacactgtccacggtttaacaccataatctaaaacatgcttcccatgctttcaattggcaatcactttggtagatgaacaagtgttgtcaatttcaaaagttggcacctttcctcaaggacttaaccaaagcatccacttggtgtgagcttgcagtccctaacttatacaccaaacccgaggtccacgcaagttattacccatgtgtcctccccgtgagggaggtcccctggttcctccacttcctcctcttccacctctaagacctcttggagggcctctacttcttggaggtggaggcggtccacgtctaccactttcaaatgatggtttggtggcttgttccaccttgatggcttttccatctaatgactaaaaaaaaagatacgattaaattaaatcaagatttaaaaataatttgcacatctactatgcactaagacactaactggtccttcaaaatgcagttatgggtaagtgttgctcattagtctaagaaaaaacactgcaaatatagtcagtttacataaatggggcttttccgcttaaaattcttaatacttaaaaccgatactgatgatctggattgaaacataaggtgaacccactgcattattgtatggtaaaatttaaaacaaggccaagtaggtatcagcttgttatcaaaactagtagccaaaaccaaaagccaagttatcaaaatatggcttatggatctcaagataaaatgtatcatgttggctgggcgcagtggctcgcagtgtctcacacctgtaatcccagtactttgggaggcggaggcagctggatcacctgaagtcaggagtttgagaccagcctggccaacatggtgaaaccctgtctctactaaaaatacaaagttagccgggcgtggtcgcgcatgcctgtaatcccagctactgggggggggggggggggctgaggcagaaaaatcgcttagaactcgggagacaggctgcagtgggcactgcaccattgcactccaggctaggcaacggagggagactatcaaaaaaaaaaaaaaaaaagtaccatgtaatgccataattattctgaactgagagaatgttacgagcataagatataactcactactagatttggttctgcaattacagaatactctttggaacaggatcacaaacaggatgagtggatcccagacaggtatatactgaaaaacaacgaaaactcaaaagctgtcctagaccagacttggacaactacatgttattttatgcactagtaacaggttatcatccatcgtgtagacaatctcacctttccattcatgtctctggctgcatccttagcgtctgctgggctttcaaaggtgacaaaagcaaatcctcttgatttgttggtttcacggtctttcatcaagagtactaaaaagtagttttcagaaaaataaagtgttaccctaggtcaaatgaaataaccaaagtaaatgtgtaaacagaaagctcagaacttcttagaggacaaaaatacattatcatgtcagacgatcaatgcaatcaaattcatcatagcttatattttaattataatagcccagcctgtactgccagacaactcaccttccactattcgtccatatttgccaaatactgcttcaagagctttctcatttgtttccgtattaagcccaccaatgaagagctttcctgggcgatctgcttcaaccatgtttttttttttttgggccggtgagtctgttgaaaaggaatagtattacctcactgcaaaaagttcctcaagtttattggacacttttactttcgcacatttctcatattttccactaaaaccattgttccttaataactaaagaaaacgataacgagctaagcctcagccacagtaggaagcaatttgaactaagtagtttagtaacactgcaatttacataaaactggttaaaagggccaacttaacttttaccactacccttgatcacccttagctgttcttaagcaacagctgcttaacatttgaaaaagcaacttttagttccagtcctcttgcctttgaaagattcaattactcatcacacccttcctaacgatggttttaaaagactcccaaggtcacaggctagacacaggaccttaacaccaagccctcttccaacgactcctcttttcctcattaggattccctactaaatccaaggagaaatgtgaagtttaagccaagttatgccgcccctcttcttcaccggcccccgccctaccgaaaattctactatccggccaaaaagataaaaacaaatcgtcaacatcgtttgctattaagtaacggaacgcggacgcacacactaacactcgacactccgtgactgcagcggaacctaattaaaactcgtcattaaaaaccgcgtgtaaaagacaaaatggcgacacttggattcaacccagaaccaccgacactggtcaggggactaacttttaccaccaacattggctgggaacattcagagggcttcttctccggggccgccaatgaatacgaagcccgcagcccgcatggaagtccacatgcccatcattagcgccagcgccataccaatgcaggtatcgccgtggtgcggtcgctcctcgccccgctccagcctacaaagccccgacctccgctaccaactcccgcagatggcagccaaactttctcgagaagcatacaaccaaacgggccccctcatttgttttccctcgaccccctcagctttatttaaataggtcggaacctttgggttcttaaaatggcgcccgccacccccatctccagggagatataatccccagtcctaacacggggagagtgtcacgaaaaacggactgaggaaaggagacacgtaccggaggggtgacaatgggttcaagctccaacgagctcggcgataggggcttcctagcagctcagcaccagtggcggctgccgggtgcgaggaccgaaccgcgaagccgctagcactactgcgcaacgagggcgaacaaaggagacagcaaactttatactgcccgggaacgaggctgaaggacccggatggaaacggagcttagaatttgaaacgcaaagggaggggggaagtagttcccagtctccccattggctggctcctctgtcattcacccttctctcctccctttttcccgggccctcggtgttgggtcgacagacctttctaaccgttttctctacccccacccgttctttacaaacgcgctttttttgctttacgctaaaatggtgcacaggcttcctttaataaagaactgaagtttattgagcgtcctagtgggccgggcacggtgcaaaactttacttttacttttccattaactcttctaattgtcaaaatgtgatgagggtagatactcctactataccaattttgcagaaacggaaaacaaagaagttttggcaatataatatattttcaaaaattgtctttaacaagtgtttttagtgagtgtgggaatttctgataaatacatgtaaatttcagatgagtaaaaaacgtacaaaacagca

SEQ ID NO: 1889037 - DNA, 4001 bp, Homo sapiens
ctgcctcctaggccacaaattcctcccctctaaattaagagaattgggtctgaatttgatttagtggagcagagctaaaactggaaaataaaagatacataaagaaacagatggctaaatgtttgtatatacagaaagtatttcttatttccctctacaaaatgtctacataatgctttctctgcagagtttctagatttactctatcttgtttttagaaatgaactactagaaactatttttgtttaaattatgtttttctgatgaaaatctgccaaagtaaaatgaatataatttaattttctctttatgaatctggttcatctttaaaactcaatataactgggtcatttgttactgtacaccataacaacagtgctctcgaggccttggcaagaaaaaaatgtgtgggtttggaaaagattacgatatgaccactgacaattataagcttggaaatgtgaagatatgagattgtctctaccttcaagagactgtgtaacacacagactggcaaaatttccagggatctcatccgtgtgttctcttaagttaggatatactataaaactgaatgaaccacctcttgaactgaattggaatttagaaacctggtctacaatcccaaattagtattacttccccagacccatcaaaagtgtgtctccaaggtataacaacagttctctgtgacttatgccaataaatatagctcctaaaatgcaaaattgaagtaatcgttaattaatgagcactatttcacagttctctagaacataacatattacaatggccaacagcttgggttctggagtcagatatacttgcatttggatcctggctccactatacattagttgtgtgacatttgggcaagtctcttaatctatgccagccttcatttcctcatttatgaaatggagatcataacagtacccacctaatggagcaactgtaacaaataaaataataataactgcacaagtgcctttactaacctactcaataagtagtggctgtcaaagaactctgattgatcatccgtctgtccacagggctgccccatattatggctctggtgaaagaaagggagccacaggactaagctgtgctgtgggaagaactaaacaagttatcttctctaggaattaaatgtggccatctcgggggataatgactacctttccaggttctggtgttttcatttcattttctttcattttcaaaataagtattaaacacccactatttgctttttattatgcaaagagccatggagaatataagaatagattactaaataatatatggatatgtataaaatacgtgttaaaatcatgctataggactgctgagaggaataatcagagcaggttagcgctctttttgaaaagatctgttttacaatatgctactggtttactggttaccaactgactcagagttacagggagttttacagaaataaaaaaaagatatatatatatttttcagaaacaaatctacatcaagtaaggtacatcttcatcaagagtttccattatactgcaggcagggattcatatgctgctttgaaacagtttcttagttttcttgaactacagtttttaaatcttttgggcaggaattgttcttttacttctgtagaagaaatgtttatcagaaataaagttccctaaatcatgtttgatggatttagatatattactctctatcctactattcatactatagcaaaatccttaggtaaaaaacaaaacaaaacaaaacaaaaacaagaaaaatgatttctaagcagcagatacagaatgagagatgagagattccataggcagcaactgctttcctcatttaaaatagcagtctccaagctgtttttttttaaaattagtttttcgttttttaaattaaaaaaaatccatagaatcccttcagaactgcaggacatgtcctcactaccacatggggattggctgacaatgtcgtctgtcatcaccaggatccaaacagttttgattgagtattcttatcactaaaaaaagtttgagcacacatcctcaatatgtatatttataaagtatatacttgtactactatgacaggctaatatatcaaagcatgatacttagagtaggctttgttattaaagacagtgagtataaattaaataatgctcttgatcctttcttgttttggggctgacatcttgtcagatttgattagattatttttgttttcacttcatgacttggctaaattaagaggaaactcatagaagtgtcagctagttcaccattttcttgcccttgcattatcactgttatcatcagcccatttttttccttgcaggaatcttcctaagccacttgtccattctgcgtgggttagtttatctagctttaactgacctacacacaatagtcaaacagcttaagaagattcctgcaaagaaaccacaggatgaagattatataggttggaatatcccttattcaaaatgctggagtctagaagtgtttcaaacttgggatttttttgtgatttgggaatatctgcattatactggttgaacatcccaaatccaaaattctgagatctgaagtatttcctttaagcgttacattggtactcaaaagttttggattttggagcaattcagatttctggatttgggatgctcaacctgtactaagaactagaaatctacttaactaggtacatgtaaactgaaatatgttacaatatgcctaaagtgagcaaaagaatgtgcatgccaccatgaactctcaccaaatcaagaaatctcacacttttctcgggatccctcatttagagtatatgacagtgactctccaacatggaccaaaggagagcatcagggtcaatccacatgttaaacattagtggagtttaaatactttcttatattttatctaaaatgatataaatagactttctaatatttttatctcaccccacaatgaatccttcaggtgcatccctctttggatggcctaaagctcctcatcaagctctagaagactggtcctaagatatttagacatggcactatgagcaaaagcagcttaaaatctcagaaagccaatatctgctaagtacctactgtgagtaaggtactatacatgcattaagttgtttagtcctcaaaacaactccattttgtagaggaagaagctgaggttcagtgatgatcagtgagattaagtaacttgccaatggttctaaaaacaggtaagagagctggtcgggcgcagtggctcatgcctgtaatcccagcactttgggaggccaaggcaggcggatcacgaggtcaggagttcaagaccagcctgaccaacatggtaaaaccccatctctactaaaaatacaaaaaaaattagccgggcatggtggtggatgcctgtaatcccagctactcaggaggctgaggtaggagaatcacttgaacccaggaggtggaggttgcagtgagttgagattgcgccactgcactccagcccaggcaacaaagtgagactccatctcaaaacaaaaacaaaaacaaagaaacaaaaacaggtaagagagctgacatatgaaattaggaccgcctgcctctaaatcccattctcttttcatagtaccactttcagaatgtcagcaaatcaacataaatgtatatacatttaatcagtattaaggaatttttccccaattaatgcttccgttcataggatttaactgaaagtattaagtataaatgtgagcaggttctgaaaatgcctaagaaaaatagtacctttttaatgaaagtgttagcttgtttttgttctcttctttctccattttgatcttggtgactcagagctgctaccattgaaaaacatctgttttatctaaacttaataagccttattagtgggatgctaagccttcccttattccgaagccctttccacagtttgaaacttaatctgctggaagtcataataggttaccaa

SEQ ID NO: 1889038 - DNA, 4001 bp, Homo sapiens
tttttcacgcacacagtgaacatttacaaaaattgactgtgctctgggtcagaggtctgcgaattttttctgtatacaatcagatacgtggctgggcgcggtggctcacgcctgtaatcccagcactttggaaggccaaggcagacagatcacgacatcaggagatcaagaccatcctggctaacacggtgaaaccccggactctactaaaaacacaaaaaattagccgggtgtggtggcacatgcctgtaatcccagctactcgagaggctgaggcaggagaatcgcttgaacccgggaggtggaggttgcagtgagccgagatggcgccactgcactccagcctgggagacagagcgaaactcagtcgcaaaaaaagaaaaaaaatcagatatgtagtaggctctgtgggttataaggtctctgttttacaaatattcaactctgccaatacagtacaaaagcagccacagataatacccacacgaatgagcgtggctgtgtgccaacaactctttacttataaaaatttgccaatgtgactgtttcacctcataaaaaattttcagcttggtcacaatggctcacgcctgttatcccaacactttgggaggccaagaaagatggattgcttgagctcaggagttgagaccaacctgggtaccatggcaaaacctcatctctgccaaaaaaaagaacaaaaattaaagattagctgggcatggtggcatgtgcctgtagtcccagctactcacaaggctgaggcaggagaattgcttgagccttggaggtggaggctacagtgagctgtgatcacaccactgcactccagctgtggcaaccgaataagaccctgtctcaaaaaaaaaaatctaaataaatttaaagaatttacatcttaggcctcatttacacacacacacaatacacacacacacacacacacacaaagaaagtagaagtcagaaattaaaagatgagtttacatttttagaaattagcaaattgctctcatattactcacatattagaaaaagcatcatactggaatttacaaaatattttaaactaaataataaaaacccacacataaaatgtgtggctcttttctttcaattagatgtaaaaggatggaagaagttttttcaagagattaataaatttgttaatctcccaataaaactgaaaacaaaataagagaacatacaaattcccaatgtcacgaaacaaagaggaacagcactaagagacaggactagctggatttcctagaccgactaagagttcctaagcctagctgacgaaggtgactgcactcacctttaaacaccgggcttgtaactcagctcacacccgaccaatcaggtagtaaagagagctcactaaagtaccaattaggctaaaaacaggaggtaaagaaataccaaatcatctatcgcctgagagcactgggggagggacaatgattgggatataaaccccaggcattcaagccaggagtgggcaacccccttgggtcccctccggttgtatgggaactctgttttcactctattaaaccttgcaactgcacactcttctcgtccatgtttgttccggctttcgctcaccgttcaccaccgccgaaagccgtccgtccaccaacgccgaaggccgtccgtccaccaccgccgaaggccgtccgtccaccaccgccgaaggccgtccgtccaccaacgccgaaggccgtccgtccaccaccgccgaaggccgtcgtccaccaccgtccaccaccgctcaacaccctccgtccaccaccgctgaacgccgccctcgcagacccgccattgacttccactcctccagatccagcagggtgtcctctgcccttctgatcagtgaggcgcccaaaggggctcgccattgttcctgtgcagctaagtgccggggttggtcctaatctacctgaacgctggtcgctggtttccacgcttctcttccataaccccgggcttctaacagaactgtacggatcaccgcgtggcccaaggttcccttccttggaatccgtgaggccaagaaccccaggtcagagagcaagaggcttgccgccatcttggtagctctggacgcaaagacacgcccataacagcactaccggccctactgaaagtgaaataatactaatggaatatgagagcaagctggtcgtgcacggtggctcacgcctgtaatcccagcactttgggaggccaaggcgggcggatcacctgaggtcaggagtctgagaccagcctgaccaacatggtaaaaccccgtctctactaaaactacaaaagtagccaggcgtggtagcgcgcacctgtattcccagctacttgggaggctgaggcaggagaatcacttgacccagggaggtggaggttgcagtgagcagagatcatgccactgcactgtagcctgggcaacgacagtgaaactctgtctcaagaaaaagaaaaaaaaatgagagcaactttatgccaataaatttgaaaattcagactcaataaaaaaattacttgaaaaatacaacttacaaaaactaatataagaatgaattgagatatacaaatatacaaacagcccaaaatctgttaaaaattgaacttttaaaggttatatatgttatattatgtatatgtaatttaactcccctccacaaaaagactccaatgttttcactagtgacttctgacatatttaaagaaataatacctaatttacataaattctttcaaaaacaggagaaagaaatgttcctcaactcattgtatgagactagcaaatccctgatatcaaaatctatcaaagatattattagaaaagaaaactaaagatcaatatacctcatgaatgcaggcacgaaaatcattaaaacattagccaacaaaatcaagtacataaaatcaagtaaacaaaagggtaatttatcatgactgtgctaagtgtccccaagtccaaaaaccagccttggtgattcactagaaggacttacaggactgactcaggatatagacgttgtattcatgcctaagatgtaataaaatgaaatgatataaagcaaaatcagcaaggagaaaaggtatggagggaaccaggaataagtttccaagtcttctcctgggagagtcacataggacgcacttacttcttgcagcaacaagctgtaacaaaatgtgtgaaatgttttctaccagacaatttctttaaagactcagtgtttattagaggttgattatgtggtgactttctgcctagggcataccaaaattccagtcccccgaaagtaaagtaggtgttcagtataaaccacattgtacggtttaagcacagtaagccactcttatcagttcgtttggggagaagtctcccaaaatccaagttaccggacaccatccaatggccaaacttgcaagcaagcctttctaatatctaggcctacaatattaacatttttctgaacaatgaccaactgagttttattctgagaataaaaagaaaatgttttaacaattaaagtccaaccagtgtatttcaccatcttaacaaaataatccaaataaagaacatctgattgtttgaatagatgcagtaaaactacttggcaaaattcaacattcttgataatctagttatagacagtaatttcctcattccaataaaaatcatctataaaaacttatggctagtatcatacttattgtgaaattgtaaacagtttgcataagacttccaaagaggaaatggttttacaggcagtcctagacagagcaataaagcaagaatattaaataaaaggtcgacattttagtatgaaaagagttaaaactttattagcagacgacacggtcagttgcacagaaaattccatgtaatatacaaaacaactagtaaaattaaaaagttaatctagcaaatttacagcatacaaagttgacgtaaaaagactattgtttatgtaccagcaaccaaaattgcaa

SEQ ID NO: 1889039 - DNA, 4001 bp, Homo sapiens; identical to SEQ ID NO: 1564154

SEQ ID NO: 1889040 - DNA, 4001 bp, Homo sapiens
agctatggaagaaaaagaaggctgtagagaattttaacaatgtaattattatgtttcaatcaacaaagaacaaagaggataaatcttaaaaagtggtcttgctatcgttacagaaggtgatcattctttacactacaagggaaaactcaaactctacaaaggagaaatttcacagacaacaatctctagtatatccatacctggggaacagaacaaaagactaggtctagactagaagacagagagaaaccatgtcagaccagagcatattgatggctcatggtgagtgacccatggcctaaaggtgcttgtttagggcccaggagccactcacacaggcagagcagcttactccctatgaaccaccaccagcacccctccctgcccggtgatgtcacccggtgggctgggctggaacaagtccagatgcctttgccccgccttagaagggccacaaggagcttcctcctctatccccaagttctccacttacacacagcacctgacacgaagtttggcaactttcccccaggccatgacttcacaatggctacccccggcctctgtggcctccgagagaggactccaagacagatcccagccctacagggaaagggaagcaacactgccgttgaccttgaagggatcaccgtagggggctatagaagggattgtgacatttattgttctgaaaatgccatcaaagatagtcgtaaagtctagtcttatacacacttggcaagacatagccaaaagaggtaaattcgaaattagaaaaaatgtcagcagttattacctggagtttgactgaaaatgccatcagacagttgcaaattctagtcttgtacacccttggcaagacatagccaaaagaggtaaatttgaaattagaaaaaatgtcagcagttattacccggagtttgaaattctgacctgttacacagtaggatacctcaacctccgtttcagtttatttaggtacttattaggtagcttgcaaaattactagaaaaaaaattcctagaggacatcttgaaaatgatgaagtagcaggaaaattacaaagatataacttatttacaaagtccattgaaaaataccattggaaagcttcaagttgaaggtaattcgttgaaaatgcacttaaaacaaaaatggaattataatttttctgaactttggatactcttcaaatttccggaggtaccgctcatgatgctcttttgctctaccagataaaaaacaaaatgtgaagaaagcaaaagtcgcgccttggacagaccagctggccagggcatagccacgccactccatgatttctccaaaatagttgcctgcagttatgtattcaaataagcctccccttggtattttgtatccagtatctcctgcttttctgagattccttaggatatgatctgaatggatgtttatcaacatgcccgttaaccacaagccaaaatttattagaaaacggggatcttttactcagtcatcagcatacactgcacaatggctcaagtatctgctttgcaaatagccattacaggtacagaacataatcgccattgtgcacgccaacagtggcacaggctttcctcctcgcatcagaaatgggtaaattaagcaccgatgccagtagtggacgaggaacatggccaggaggatgcagctgggcgcgctgcggaggcgcggggtggactcactggtgtactggtagagcggcagggccagtgagggcagcttctgcaccacccgggtggcccgcgccggcactcggagcctgcggctgggtggcgcgtggcggctgtacactgagttcgtctgacgattccgagcgaagaccgcgcagcccacggcgcactgaaggtaggcgaacgcagccagcaggcgctcctccaccaccgccgtcgccgtcgccgtcgccatcgccagggctgggccgcgtgctccatgccccagaggccgaggcaggcaacatatagggcgggggcgggaggggagtgatctgaatcttttttttttttttttttggcagtatgtagagatattctttattctttttttttctttttttaattattattatactttaagttttagggtacatgtgcacaatgtgcaggttagttatatatgtatacatgtgccatgctggtgtgctgcacccattaactcgtcatttagcattaggtatatctcctaatgctaaccctcccccctccccccaccccacaacagtccccagagtgtgatgttccccttcctgtgtccatgtgttctcattgttcagttcccatctatgagtgagaacatgcggtgtttggtttttttgtccttgtgatagtttgctgagaatgatgatttccaatttcatccatgtccctacaaaggacatgaactcatcattttttatgactgcatagtattccatggtgtatatgtgccacattttcttaatccagtctatcattgttggacatttgggttgtttccaagtctttgctattgtgaatagtgccacaataaacatacgtgtgcatgtgtctttatagcagcatgatttatagtcctttgggtatatacccagtaatgggatggctgggtcaaatggtatttccagttctagatccctgaggaatcaccacactgacttccacaatggttgaactagtttacaatcccaccaacagtgtaaaagtgttcctatttctccacatcctctccagcacctgttgtttcctgactttttaatgattgccattctaactggtgtgagctggtatctcattgtggttttgatttgcatttctctgatggccggtgatgatgagcattttttcatgtgtctgttggatgcataaatgtcttcttttgagaagtgtctgttcatatccttcgcccactttttgatggggttgtttgttttcttcttgtaaatttgtttgagttcattgtagattctggatattagccctttgtcagatgagtaggttgcaaaaattttctcccattttgtaggttgcctgttcactctgatggtagtttcttttgctgtgcagaagctctttagtttaattagatcccatttgtcaattttggcttttgttgccattgcttttggtgtttttgacatgaagtccttgcccatgcctatgtcctgaatggtaatgcctaggttttcttctagggtttttatggttttaggtctaacgtttaagtctttaatccatcttgaattaatttttgtataaggtgtaaggaagggatccagtttcagctttctacatatggctagccagttttcccagcaccatttattaaatagggaatcctttccccatttcttgtttttgtcaggtttgtcaaagatcagatagttgtagatatgtggcattatttctgagggctctgttctgttccattggtctatatctctgttttggtaccagtaccatgctgttttggttactgtagccttgtagtatagtttgacgtcaggtagcgtgatgcctccagctttgttcttttggcttaggattggctagcgtcttacctcctctgcctgctgaacacatgaaagaagagtcaagagaaagaatgaagacaaaatgcaatgtacaatgaagagattgtttgactccattaggtgctcttatacctcctacattcagaaaatctgttgtttaatttatgcactttgtaaattcaattcaacacttttgagtgcccagtagttctaggcacacttaacatatgtagggatattccaagtatacagcaatggcaagccatgggtgggagtgttgctgcacgtttgagaaagagtgaggaggctaaagaggctggcatggaatgattgaggggaagaaaagtaaaatatgaggtaagagaggcaacaaaaagccagatcatagataaccttgtgggccattataagaacttttacttttaccctgattaaagtgtggtaccattgtagagttttgggtaagggagtg

SEQ ID NO: 1889041 - DNA, 4001 bp, Homo sapiens; identical to SEQ ID NO: 1564160

SEQ ID NO: 1889042 - DNA, 4001 bp, Homo sapiens
catggcaccaggagcactctgacctgcaagagaaacagcctgagtctttccagtcctgcggagggagaaatctgtgaaggccggccacactcagtcacctggaatcaggtgttgcatttctgcatccgggacttatctgcccgtgagtaaggacatggggagaagtcagatgaaaacagggagccaggggtctctgggagaagtattgattggggatgacaagtttcctatggacatagcagccttgagtctttgggagggggttggctaatgttgttagcagtttccctggagccaggcttaccctgaaagacgtacagacccttgttggggaggcagggacatgactgtgtaattttattgagtgggggcgttctgacaccaccactcaataaattaaggaagggaagtgagtcccagagataacatggtctctctggtgatggatctgatcaggcagagggatggggggttctgttctgttgatgagaaatgagcatggccaatatgaacggatttagaggctattactgggttatttgtaaatcattagaaggaagagagctagaatctccaagactacaagagcccgccatcacttagagagaatgtggggcatttcaagttgcagcaatcggccaggcgtggtggctcatgcctgtaatcccagcattttggggggccgaggcgtgcagatcgcttgagcccaggaggtcgagaccagcctgggaaacatagcaaaacccccatctctacaaaaaaaaaaaaaaaaaaacccaaaaaaaattagctgggggtggtggcacaggcctgtaacatctcagcactttggcaggccaagggaggggcggatcgcttgagcccacgaggtcgataccagcctagccaacctagtgaaaccctccactaaaaaataaataaataaataaataaaaaatattagtcggggcagggtggtgcgctcctgtagtcccaaggccgaggcaagaggatctcttgagcccaggaggtccaggccagcctggccaacatagcaaaaccccatttctactaacaacaataacaacaaaaaaatagcacgggcaaggtggctcctgcctatagttctaaggccgaggtgggaggattgcttgagcccaggaggtcaacaccagcccagccaacatagtaaagccccgtctctactaaaaacaacaacaacaacaaacaaacaaacaaaaaacaaacaaacaaacaaaaaactagcaggggtggaatggcacacacttgtagtcctgaggccaaggtgggaggatcgcttgagcccaggaggttgaggccagcctggccaacgtagtgaaacccggcttctaataattaaaaaaaaaaaaaaaaaaaaaaagcgtgggcaggttggtgcacttctgtagtcccagggccgaggcggaaggattgcttaagcccaggtggtcgaggccagcctggccaacatagcaaaaccgtctgtactaaaaaaataaaaaataaaaaatattagtgggggcagggtggtgcgtgcctgtagtcctgaggccgaggcgggaggattgcttgagcccaggcggttgaggccagcctggtcaacatggcagaactgtctctactaagaaaaataaaaaataaaaaatattagtgagggcagggtggtgcgtgcctgtactcccgaggtcgaggcgggaggattgcttgagccccccgtctctactaaaatacaaaaataaaaaaatatttccaggggttggatgacacaggcctgtagacccgaggccgaggtgggaggatcctccatgatgatcctcctgaaaggcattagctgtctttcagtcctcaagattttcagaaccccgagcactcgagggccctacagaggcttcctccttttctatctgcccccattagcccatctagggtgtcccttcaagagaacctacctcagagacaaagcagtggtggcgaggtcggcagcagttggtgacaaagtgtggttggaggaggagaaaatattctgcaatgtcactgccccaggatgatggaccaatcagggcagttagtgaactccatttggccaatcagaagtcagaacagtaggtgggaggagcgaaggtgatgtggggtctatcagttgaggctccagggacacaaccttctcaaagtgggggcggagactctgattttcccgcctaaagcatcccctgggattggctactccaagttcagagtatgcatgctctgatattctctttagattcttccaaaatcagagtactcatgtgctgattttctctttccatttttttcctatccctccctacccccccgcggtgcatttgttatccagttttaataagtagtgtatatgaagcaggtcgtcatctcaaatccttcctgtcagtttctaactttttcaggtatgggatttttcctaggaactctgtagtaacgtcagaaatttgggccgggcacggtggctcatgcttgtagtcccagcacattgggaggccacagctggtggatcgtttgaacccgggaggcagaggttgcagtgagccacaatcacgccactgcaccccagcctggacaacagagcgataccctgtcccttatctctacaaaaaataaataaaattagcgaggtggggtggtgtgcctgtagtcccagttactcaggaggctgaggatcacttgagcccaggagtacgaggttgcagtgaccatgatccagccactgctgcctacctcggccacagagcgagatcttgtcagaaaaaaaaaaaaagagaaagaaagaaaaatttcaatgagccagtcccagtggctcatgcctgtaatcccaacaccttgagaggctgaggcaggaggtggaaggatcacttgaggataggagttccagaacaatctgggatgcatagtgagacccccatctctataaaaaaaatttaaaaaagaaattcaaactaaaaaaaaaaaaaacttctatatatgtttttttctagaagaccaaagaaccagaaatatattttacccattgatattaataatgtttatcgtaatagtattaaaaagagtatgtaattcaggcccactgtgttcatcagggagctcataagtcaatttgtccaagaagtttcccctacccccatccctagtatctccaacatgaccccgttcctctctgggctttccatctacagccctgatctctctaagatcctcccaggatgacagcaagctctcttagggcagggacagggcaatggccctttagtccagcacaaagccctttatgtgcatcttccgattagttttcacaaccttctctggagttaaatactattatcatccccagtgcgcagatgttgagactgaggctcagagaattaagcagtctgctcgaggtcacatagtcagtgggtgacagagctgggattcacccccaagatgaattgagtccaaagtctgtgcttttatttatgtatttatttatttttaattaaaataattttttaagagatggggtcttgctatgttgtccccgctgatctggaaggaactgctggcctcaagcaatcctcctgccttggcttcccaaaacactgggattataggagtgaaccatcccacgcccggcctcaaagtcggtgcttttaattactcttctatattgcctcgactatttgttgaatgaatgaatgcatcttacaactgcaaaggttctttaacataatttacataactccttacaatcaccccaaattccctctggctgctgtaacaaattaccgcaaactttgtggcataaacaacatcaatttattctctcacaattctggagcccagaaatctgaaatcagtttcactgagttgaaatcaagttgtcggcagggctgtacacctccagaggctctaggagagaacctgttccttgcctcttccagcttcccgtgattgccagcatttcttggcttgtggcttgatatggattg

SEQ ID NO: 1889043 - DNA, 4001 bp, Homo sapiens
tggtcctatggagggagaaatcagtgaagcccggccacactcagtcacctggaattaggggttgcatgtctgcattcggggcttatctgtccctgagtaaggacatggggagaagtcagacgaaaacagggagcctggagtctctgggagaagtattgcttggggatgacaggtttcctagcagccttgagtctttgggagggggttggctagtgttgttagtagtttccctggggctaggcttaccctgaaagatgtacagacccttgttggggaggcagggacgtgactgtgtaactattcagtgggggcgttctgacacccccactcaataaataaagggagggaagtgagtcccagacataacctggtctctctggtgatggatctgatcaggcagagggttgaggggttctgttctgttgaagagaaatgaccttcactaatatgaacagatttagaggctattactcggtgatttgtaaattattagaaggaagagagctagaatctctgagactagatgagcctgccatcacttacagaaaatgtggggtgtttcaatttgcagcaatcagctaggcacagtggctcatgcctgtaatcccagcattttgggaggccgaggcatgcagatctcttgagcccaggaggatgagaccagcctgggaaacatagcaaacccctcatttctacaaaaaaaaaaaaaaatcacaaaatttagctgggggcagtggcacaggcctgtagcatctcagcactttggtcaaggggggcggattgcttgagcccacgaggtcggtaccagcctagccaacctagcgaaaccctctactaaaaaaaataaaataaaataaaataaaaagtattagtgggggcggggtggtgctcgcctgtagtccggaggccgaggcaagaggatctcttgagcccagaaggtcgaggccagcctggccaacatagcaaaaccccatttctactactagtaataacaacaaaaaaataacatcagcgaggtggttcttgcctgtagttccgaggctgaggtgggaggatcacttgagctgaggaggtcaagcccagtccggccaacatagcgaaaccctgtctctagtaaaaagaacaacaacaaaactagcaggggcagaatggcacacatctgtagtcctgaggccaaggtacgaggatcgcttgagcccaggaggttgaggccagcctggccaacatagtgaaacacggtttctactaaaaaaaaaaaaaaaagaaaagcgtgggcaggatggtgcacttctgtagtcctggggccgaggcggaaggattgcttaagcccaggcggtcgaggtcagcctggccaacatagcgaaaccatctgtactaaaataaataaataaataaaaaaatactagtgagggtggggtggtgcgtgcctgcagtcccgaggccaaggcgggaggattgcttgagcccaggcggttgaggccagcctggccaacataacgaatccctgtctctactaaaatacccccccccaaaaataccaggggtgggatgatacaggcctgtacacccaaggccaaggcgggagaatcctccatgatgatcgtcctgaaaggcattagttgtctttcagtcctcaagattttcggaaccccaagcacttgacggccctacagaagcttcctccttttctatctgccccgattagcccatctagggtgtcccttaaagagaacctacttcagagacaaagcagtggtggcgaggtcggcagcagtggtggcgagttggcagcagttggtgacaaagtgtggctggaggaggagaaaatatcctgcaatgtcactgctccaggatgatggaccaatcagggcagttagtgaactccatctggccaatcagaagtcagaacagtaggtgggaaaagccaagctgatgtggggtctatcagtccaggctccagggacagaaccttctcaaaatggaggcagagactctgattttcccgcctaaagcatcccctgggattggctactccaagttcagagtacgcatgctctgattttctctttagattcttccaaaatcagagtacgcatgcgctgattttctctttccatttttcctatctcccttacccccccagtggtggattgttgttcagttttaataaggagtgtatatgaagcaggtcatcatctcaaatccttcctgtcagttcctaactttttcaggtatggaatttttcctaggaactctgtagtgacgtaagaaatttgggcctgagcggtggctcacgcttgtaatcccagcactttgggaggccacagctggaggatctcttgaacctgggactcagaggttgcagtgagccacgatcatgccactgcaccccagcctgggcaacacagcaataccctgtctcttttctctacaaaaaaataaaataaataaaattagcgaggtggggtggtgtgcctgtagtccgttactcaggaggctgaggtaggaggatagcttgagcccaggagtacgaggttgcagtgagccatgatctggctactgctgcctacctgggccacagagcgagatcttgtctttaaaaagagagagagagagagagaaagaaagaaaaatttcagtgagccagtcccagtggctcatgcctgtaatcccaacactttttgagaggctgaggcaggaggtggaaggatcacttgaggccaggagttctggaacaatctgggatacatagtgagacccccgtctctataaaaaaatttttaaaaaagaaatttaaacaaaaaaaccacttctacacttctatgtatgtttttttctaaaagaccaaagaagcagaaatatattttacccattgatattaaaaatatttataataatagttttaaaaagagtatgtaattaaggcccactgtgttcatcagggagctcataagtcaatttgtctaagaagtttcccctacccccatccctagtacctccaacaagtcccctttcctctctgggctttccatctacagccctgatctctctaagatcctcccaggatgacagcaagctctgttagggcagggacagggcaatggcccttgagcccagcacaaagccctttatgtgcatcttcccattgattttcacaatcttctcttgagttaaatactattatcatccccagtgtgcagatgttgagactgaggctcagagaattaagcagtgtgctcaagttcacatagtcagtgggtgacagagctgggattcacccccaagatgaattgagtccaaagtctgtgcttttatttatgtatttatttatttttaattaaaataatattttttagagatggggtcttgctatgttgcccccgctgatctggaaggaactgctggcctcaagcaatcctcctgccttggcttcccaaaacattgggattacaggagtgaaccaccccacacccggcctcaaagtcagtgcttttaattactcttctatattgcctcgactatttgttgaatgaatgaatgcatcttacaactgcaatggttctttaacataatttacataactccttacaatcaccccaaattccctctggctgctgtaacaaattaccacaaactttgtggcataaacaacatcaatttattctctcacaattctggagcccagaaatctgaaatcagtttcactgagttgaaatcaagttgtcagcggggctgtagtcctccagaggctctgggagagaatctgttccttgcctcttccagcttccggtgattgccagcatttcttggcttgtggcttgacatgggttggctctgtgtccccacccaaatctcatctccaattgtaatccccacagattacaaatccccacggggggggcgggttttccccatgctgtttttgtgacagtgagttctcatgaggtctgatggttttataagcgtctggcatttcccctgcttgcacttctgtctcctgc

SEQ ID NO: 1889044 - DNA, 4001 bp, Homo sapiens
atgctcatgtgtccccagacttgtctgtacctagaactttctgttacctagtttagtcatggcctcatactttctcttcatatacacatagatgattttctccgaggatttcatcttttcccactctttcttagagaagtatttggcaatatcatcgaaggcctaggaaaagataaaaaaggaattttgtcagtgactcagctagacacgtctgccattcagctggagccgcctcctgtgtgctggatctgggaagtggggatgatattccgtcctggttgatgccatggctaactgacagaacatgagggacctttcctagcttcacccctgccacacagtagggctttaatgctgctggctggctctcttcccactttccagaatggactgagattcaccaaatgtagtgcacggtcacagacttgtctccaaggatgctagttgatgatagagcgaggatgggaggctctcaagggtccagatctcccccaagaccctgctccttgtctccagtatctctatcctcccctcctcagaaaccggtcaccccacactgtcccctgggccactactttgccccctccaggtcacctcaccttttggatcttctctggtatttgagaaccagccctaggtctccttgcaaaggcatcgtctccgttcatggcaccgggagcagtctgtcctgcaagagaaacagaccgagtctttccagccacagcagctttggtcttgtggagggagaaatcagtgaaggccggccaccctcagtcacctggaatcaggtgcttcatttctccatctggggcttatctgtccctgagtaatgacatggggcgaagtcagatgaaaatagggaaccaggggtctctgggagaagtattgatttgggatgacaggcttcctgtgggcaaagcagccttgagtctttgggagggggttggctaatgttgttagtagtttccctggggccaggcttaccctgaaagatgtacagacccttgttgggaaggcagagatgtgactgtgtaattttattcagtgggggcatgctgacacccccactcaataaataaaggaagggaaatgagtcccagagataacatggtctctctggtgatggatctgatcaggcagagggatggggggttctgttctgttgaagagaaatgagcatggctaatatgaacggatttagaggctattactgggtgatttgtaaattattagaagaagagagctagaatttctgagactacaagagcccgccatcacttaaagagaatgtagggagtttcaaggtacagcaatcagccaggcgcagtggctcatgcctgtaatcccagcactttgggaggacaaggagggcgggtcgcttgagtccatgagcttgagaccagcctggccaacataccgaaaccatctctactaaaacaacaacaacaacaaaacacacacacacacacacacacacacacacacattaacagaagcggagtggtgtgcgcctgtagtcccaaggcctacgtgagaggatcacttgagcccaggaggaaagatttgagtgagattttttgtttgtttgtttgtttgtttgttttgagtcatggtctctctctgttgcccaggctgggatgcagtggtgtgatcatggctcactgcaacctccgcctcgtgggttcaagtgatccaccagctgtggcctccaaaactggagttacaagcgtgagccaccgtacccggcccaaatttgttaagttactagagttcccaggaaaaatcccatacctgaaaaagttagaaactgacaggaaggatttgagatggcgacctgcctcacatacactccttattaaaactagataacaaatgcaccgcggaggaggggaggggtaggaagaatggaaaaagaaaatcagcgcatgcttactctgattttggaagaatcgaaagagaaaatcagaccgtgcgtactctgagtatggaagaatcgaaagagagagaaagtcagagcatgcatactctgaacttaaagtagccaatcccgggggatgctttaggcgggaaaatcagggtctccacccccagttagaaagttctgtccctggaggctggactgatagacgccacatcagctttgcttatcccgcctactgttctgacttctgattggccagatggagttcaccgactgccctgattggtccatcatccttgcgcagtgacattgcacaatattgtctcctcctccagcaacactttgttgccactgggacaaagtgggtggtcctcaggcgccgtcagattttgaactctctgaagaccatgcctggatctcgggttaaaaatctggattctagtctgaacagcgagaagaaaaaaatagtcggatctgtgatttttctacttgaaagacacaatgttttccagactagcacatttgcagagctttgctgtacttagtcgtggctttcattcttcagtggcttctatatctgttgccactgaaaaaacagtccaaggccctccaaccgctgattacatttttgaaagggaatctaagtgtggtgtgcacaattagcatccttacctgtagccctggagagacgaaaatgtatttacttaacgggatgtgattgtggtattggttacatccgccttggccaatcttcccgcctcggtctcgtgactacaggcgggaaccaccccacccccactcatatttttcgttttttgattttttaaaagagacagtttcgctatgttggtcaggctggtctccacgtcctgggctcaagcgatcctcccgcctcagcctcgggactacaggcatgcaccaccttgcccaggctttttttttttttaagtagaaaccatgtttcgctatgttgaccagactggcctcaacctcctgggctcaagggatccttccaccacagcctcgggacttcaggcatgcaccacccggcccacgctttatttatttatttattttttagtggaaaccaggtttcgctatgttggcctgggctcaagggatcctcccgccttggcctggggactacaagcatgcaccaccctgcccaccctattttttttttttttttttttgcttctttgtttgtttctttctttagtagaaaccgggtttcgctatgttgcccaggctggcctcaatctgctgggctcaaatgatgctttcacctcggcctcaggaatacaggagtgtgccattcttcctgctcattttaattttatttacttatttataggaaagacaggctttcgctttgttggccaggctggtattgacctcctgggctcaagcagtcctcccaccttggcctcggaactacaggggtgagccatcccacccacgcaatttttttgttgttcttgttgttagtagaaatggggtttcgctatgttggccaggctggcctcgacctcccaggctcaagcaatcctcccgcctcagcctggtgactacaggctcacaccaccccaccaccactaatatttttaatttttctagtagagacagttttgctatgttgtcctggctggtccctacctcctgggctcaagcgatgctcccgcttcggccttgggactacaggcatgcaccaccctgccttttgctatttttcccaggctggtcttgaccttctgggctcactcaatgatttgaacctgggaagccgaggttgcattgagctgagatcacaccactgcactccagcttgggcgacagagcaagactgtcaaatagataaatacatccatacatgaaagaaagaagaaagaaaagaaagaaagagaaagaaagaaggaaggaaggaaggaaggaaggaaggaaggaaggaaagaaagaaagaaagaaagaaagaaagaaagaaagaaagaaagaaagaaagaaagaaagaaagaaaccagctgaatctccgtaaaaacagtaagctttgtggtatattaacttaccctcatcccatctcgtg

SEQ ID NO: 1889045 - DNA, 4001 bp, Homo sapiens; identical to SEQ ID NO: 1564187

SEQ ID NO: 1889046 - DNA, 4001 bp, Homo sapiens
aggagggttattccaattaagagagagctaaggaataaataggtaaagtggtagagttcgagtaggcattaatttgacaaagaggaagaaagaaataagggagatggctagatgggggcaggagtttcagggtgtgcttaaaatgcagactatgaaaaaggaacctggaaggccttgaaccgtgtttaaactgcagggactctgggcactgccagctagtagctggctgaccttgtgagagtcacttaagctctctggggaattattttcctcgtctgtaaaaacggcctaatagtccctacaacgtaggacttctgtaagcattaaatgagtgaacatgtttaacaaactcagaaaagagcctggcaaagttgtcacactgtaggaccgagcagggaggtctcctctccccggccctcgacttgtgttttcccaacgcatattcccgcacgctctcacggctccagcctccgggccggaatggctgccggtgagactgtggtacaacccgctgtgcgcaggcgcgtggcgggcaaggagggggcgcgaggggcggggctgcagccgcctgggctgttccaacgagcgcgcgccgcccccgccgcgccccgcgccgcccttgctagccgagcctcccgccccctgcattgctgatgctgctgctggcggacatggacgtggtgaatcaggtacgcgctccagcaccgtggacagagcccgccgccgcccggctgcctaggccgggtcgctcaggccagccgactctgggaggtggtggccagggtctggcagcggagacccggtccccggcgctggggatgggggtctgcggcaggtgaaggggaggaagggggaggtggagaaaaggagtgcgctctttgccgcagcgagggccgtcctcactgccgcagcgggggcccccggagccccgtttattactggcgaccgcgaggggaggaataggggcctgggggctggagtgagggcaagggacaaggggaggggagagtggaaggaagatggggggtgctgcggataagctaggaaatagagcgacagaaggtgtgggggcggggatgggggagagggctggcacccgcccctcccaaacagagactgtacccccataggcgaccaccccttcccccagagcacacctaggggacaatccggttttactccttccaaaacccccagcctcctcacccccaacacatagcgactgaagccgtgtcccagccctcccccaccttaatcagtccagaccctctccgccatgtctctcgtctttgccacctcagaaactcacccccaatcagtcccaacccttccccatccccatcacctcaaatatctaccgccaccgccgtctaacacacctttacccctgcagacccttcccccacctgagccaaaccgactcctgccccgttatgactcaccttcaccatcacaacccccccacccgaatgcaccccactccatccccattctctacccgaaccccttccccatccgactcgcctttacgtttcaaacctgctccccctccttaactagtcctgacctcatccccatctccctcacccccgacttcctctgccatctgactcaccatctcttcagaccttcccaccagtccttggaccctggggctcacaccatccccaaggtgtcactttctccttctcaccctctccccgaggtcacatgctccatcccctggggtcattgatgggcagccttgccgctcacctccctgtacctccaacaaccccaccccttccccactgtttctctcctcagctggtggctgggggtcagttccgggtggtcaaggagcccctcggctttgtgaaggtgctgcaatgggtgagtgtggtccgggctgttggggcagagtgcagggagagagggaggtcatggggtccagaagagcaggggtggagtaggggcgagtagccagggatgagtgcgggggttgtaggggatgggggaattgggctccagggtgaggtttcaggggtctgaagccagaaaacagatgagctgtgacgtcacatagggctgagggtacccccgttgtgaagtgggagactgtgacgtcctacctcctctcttgaagtgagggaggggtgggggaggtggagcctgtagcagatgctgggtgagagatgcaaagtcagagaaacccagagacagtgaaggtgacagagagaatgagggacagggaatgataaagacagagatggaaatactgagaaaaaaaaaagaaatatggagatgagaagagatacagacataagagagaagagacaaacagaaacaaagaaaaaggagacacagaaaacagatgcaaagagaaacagacgcagggagagaggcaggaaaacagggtgagggagagagagacacagagagaaagagacactcagaaaaaagagaaaccaacacacagaggcaagagggagacagagagagaaccatccggagaccgagtgagagacaggacagagagacagagacaaacagaccaagaaacagaaagacacagacatacaggcatacacttacacagacagagaaaaaagagacaaaaagagacatcgacagatcagataggcagaggcagagaggatcagagacacagagagacaaagagacatctgagaaagacaaagacacatagagaaacagagataccgagagaaacagagacacagtgagatacacagagaacaacagagacaaacagagaagagggaggtcagcatggaaaggcagagacagagagagacacagagagagaaacaggaagagacagccatacccttgtaatcagcttgtccttggtcccgatgagccctgattagggggtgggggtggggactgctccatctgctgctgcctgtgctgggcccccgatctgtccagaggagggcacctccctcccacatgcacacaggttcactgtggccatccccatccctgctgcccaaggtcttcgccatcttcgcctttgccacatgcggcagctacagtggggagctccagctgagcgtggattgtgccaacaagaccgagagtgacctcagcatcgaggtcgagttcgagtaccccttcaggtgtgctcccaccctgggataccaacagacctgggagaggaaggggcagggtggaaccggccaatacctccccccgcaagtagctcctgcccagctcccacctcgaggctacatccactgggatcactgagcacctgccttgtacctggcactgctctggactctaggactatgtggtgagcaaggcagacataggctgtggccctctggctctgttccagcgaaggggtaagggacaggcaataaacaagatacaaaagtaagacaggtgtatatacataccttaacccagtaggtacccaattaatgttagccaatattattatttaatccccattcattcattctatacacatttttgagaacttattttatatctggtactactcaaagtgctggaagcatgatagtaactaaaacagacccaactcccgccaggcacagtggctcacgcctgtaatcccagcactttgagaggccgaggtgggcggatcacctgaggtcaggagttcgagaccagcctgaccaacatggagaaaccccgtctctactaaaaatacaaaattagccaggcgtggtcatgcatgcctgtaatcccggctactcaggaggctgaggcaggagaatcacttgaacctgggagccgaaatcgcgccattgcactccagcctgggcaacaagagcgaaactccatctccaaaaaaaaaaaaaccagacccaactccctaccttcatggagcctacattataacaaataaattaacaaagaggataatagcagactgagagaaactcgaggagatcctcatgtagggttttatggtagagaatagaataatgaggggtgctgcttagatatagggaaaaattaaaccc

SEQ ID NO: 1889047 - DNA, 4001 bp, Homo sapiens; identical to SEQ ID NO: 1564195

SEQ ID NO: 1889048 - DNA, 4001 bp, Homo sapiens
ataatgctaaaatttgtttgttttgagacagggtcttgctttgtcacccaggctggagtgcagtggcacaattgtagcttactgaggcctcaaattcctgggctctcaaatagctgggactacaggggagaatcaccaagcctaactaatgtttaaaattttttgcagagatgggggtggaggtggaggtctccctgtgttgcccaggctggtctccagctcctagtttccagagatcctcccacctctgcctcctaaagtgttaggattacaggcatgagccactgctcccggtggaggtgctgtttttcttaactatgaatctggagtatgtcacagaatttaccaaactttctgacctctagtgccttacacagggttgaaaagcacttccacaagtaaccagcaaagcgcttctacagaacaacgcctgggcaaaagctgaaaaccttgcgacatttctacttcttccaactgaaagcagagattctggaagagcaggaaagatacaacagcagtgaatgcagagctatttgacagtgtctgagaaaacaatctggccttttgggccatgacttaagacattgtaacaaggttttagctacagagagcacatttcataagggctagagcgtgtttgcttggagacatgccaatcagatcacgtgagttttaagcagaaaacaaagtaagagttagctcacgcctgtaatcctagcactttggaagtccgaggcgggcggatcacgaggtcaggagttcgagaccagcctggccaatatagtgaaaccctgtctctactaaaaatacaaaaaattagccgggcatggcgcgcctattgtcccagctatttgggaggctgaggcaggagaatcgcttgaacccgggaggcggaggttgtggtgagccaagatcgcgccactgcactccagcctaggctacagagtgagactctgtcaaaaaaaaaaaaaaagttaaaatgaaagtaaaaatacttgcagtggagcacagtgagaagggcattgcgcttccagccgcggagcaatgccggaggccgggccgaggctagggctgggggctgggggcctgggctgcagcttgggcggcccgccccgccccggcgtcccgcgacaccggctcgcagaccgtcacatgccacacctctgcagaccggagggtgcggccgcacatggctggggaggcgtgagttagccgggcttgcggcacggagactttcctggaggagaccctgaaggacctggacaagtgctatgagaaggtccgccgcgacacggactgcgcgcagaagccgcgggtgccaccctgcgcccagcgggccctgatccgcagctaggagccgggcgatcagaagatccagatcaagagccagagggtggagctggtggagagcctcacgcggcaggtagacagccacgtggagccgttccacccgcagcaggagcagggcgacgcagcgcgacggcggcaaggtcggcccggacaggcccaggggcgaggcggacgcgcaggcggagaagtccaacagcaaagcgttctcggcggcagcgcaacaactagaaccgtgagaacgcgtccagcaaccgcgaccacgacgacgtcacctcgggcacgcccaaggagaagaaagcccagacctctaagaagaagcagagctccatggccaaggcgtagcggcaggcgtcccccgcagacctccccatcgaccccagcgagccctcctactgggagatgatccgctgcgacaacgaatgccccatcgagtggttccgcttctcgtgtgtgagtctcaaccataaaccaaagcgcaagtggtactgttccagatgccggggaaagaacgatgggcaaagcccttgagaagtccagaaaaaaaacagggcttataacaggtagtttggggacatgcgtctaatagtgaggagaacaaaataagccagtgtgttgattacattgccacctttgctgaggtgcaggaagtgtaaaatgtatatttttaaagaatgttgttagaggccgggcgcggtggctcacgcctgtaatcccagcactttgggaggccgaggcggtcggatcacgaggtcaggagatcgagaccatcctggctaacacggtgaaaccccgtctctactaaaaattcaaaaaaaaaattagctgggcgtggtggcgggcgcctgtagtcccagctattcgggaggctgaggcaggagaatggcatgaacctgggaggtggagcttgcagtgagccaaggtcgcgccactgcactccagcctgggcgacagagcgagactccatctcaaaaaaaaaaaaaaaaaaagaatgttagaaaaggagccattccttttatagggatgggagtgattctctttgccttttgttttcgttggcagacatgtgtaacaacaaaatggtctgttatcaacattttagaaactacaaatataggtttgaattaaacagtttaaaaagaatgccgttaaagaaataatgacaatacaggaggtgctgccaccttcacaagattggaaaagaggtcagaactaatgtcagagccccagatgcttccctttcctccacacacacctgaacctgtttttcccactgtttgcttttcttggagccctttccactataaccactggaacccctgctcagtgagaaacaaactcccgtacatcctggctttcttcactgaactttcccttctacctcctgccttaactggattgggctctctcccgaggctcccgcttccccacagcctgctccaggcttcttctgtcgcattctgcctatgaaaaagatgggctggctgatcggagtgcagtggtgtttacaactaattgatcacaaccagctacagatttctttgttccttctccactctcactgcttcacttgactaatctaaaaaaaaaaaaaaaaaaaaaaaaacaacaacaacaacaacaacaacaaaaaaacccagcttggtggctcacgcctataatcccagtcctttgggaggccgaggcaggcagatcacttgagttcaggggatcgagaccagcctggcgaacatggcgaaaccccatctctactaaaaatacaaaaatggtggcacatgcctgtattcccagctactcggcaggctgaggcaggagaatcacttgaacccgggaggcagaggttgcagtgaactgagatcgtgccactgcattccagcctggtgaaagagtgagactctgtctcaaaaaaaaaaaaaaagagaaaatgaagttcgttgtagatgcatggatttgtttctgggttctctattctgttccattggtctatgtgtctgtttttaatgccagtactatgtagttttggttaccatagctttgtagtataatttgtcaatttcttgactttctcaactgcctttaagaaaatattcaattccttgggaggctgaagcgggagaatggcatgaacccgggaggcggagcttgcagtgagccgagatcgcgccactgcactccagcctgggcgacagagagagactccgtctcaaaaaaaaaaaaatccaattccttagtataacagacaggatccttcaaatatagtcacctgtctatttcatttcctgacatgatttctgtctttgttttgtgctgctataacggaatacctgaaattgggtaatttttaaagaacaggaatttgtattcttacagttctgaaggctgggaagtccaagatcaaggagccagcatgttagtttgttggtgagggctgcctcctctgaaggaaaataattctgtgtcctcacaagacagaggtggcagggcaagcaaactgaatgctctgtgaagcctctttttttcccatccagaaacttttatgggcaaatttttatttatttatttatttttggaacaagtaggaggggaaagtggagggggtggaggaggagggaaaagagtttttaaaaagcctcttttctcctttctgaaggcct

SEQ ID NO: 1889049 - DNA, 4001 bp, Homo sapiens; identical to SEQ ID NO: 1564199

SEQ ID NO: 1889050 - DNA, 4001 bp, Homo sapiens
ttaaaagaacatattaagaagaccttggtagaattacatgtaccaagaaacaccaggccttgcacagttgctcacgtgtgtaatctcagcacttcgagaggccgaggcgagtggatcacaaggtcaggagttcgagaccaggctggccaatatggtgaaacccccgtctctactaaaaatacaaaaaaaattagccgggcatggtgacacatgcctgtaatcccagctacttgggaggctgaggcaggagaatggcttgaaccccggatgcggaggttgcagtgaaccgagatcgcgtcattgcagtccagcctgggtgacagagtgagactccgtctcaaaaaaaaaaaagaaacactggacttgggcacaatggagatatggctgactttcttttgaaaaaagaagtagttttttgggagagggcagggcaaagaggtaagaagtagttagttctgtaaggaaatgttagagaccgttttggaaatgtattcattattttaaggcaactaacaaatgatcatctttcagttaggacattgtagcagcagcctttacgggtcatgaaatttgcataatatctaaaattgtatttctggaaataggtcaatgtcgattaatagtagctttgtatagaaaggcagatgccagctagcataaaagtggtagtacgtgcagacggtggtagttctggagtcctggaagccacgaggtgctcatccatcacaaggccatcacagccgggtagaaatgcctgaggaaagcagcggagctgaccgtgccagcatttacacagggaacacttcttgggcagccaggtgtcatggggcacagacccacagttctctttgcgcacatcgtgctcacagttccgtccgtagaaggagggagggcaggcacaaaaggactccagcatgcaggttcccccattcaggcagcaggttctgtttagctccttactgtgctgtattcccatgggcagcacacgctgggaagaccgaggccgaattgcaggctcctcctggggccaaatgctgtcatctctgaaggccaggtctccccgagatggacgagcaaattcctgatggcccagcccggcaactaatcccagttcaaaggctttagaaatggccatgatccaaatcacactgtaagagaagcggaccatcttcctgcagtccatagcttttaacaattagggggaaaagaggcgttagcatcgctttaattcagagtcattgccaaaacagccaaaggaaaacattcatctcctaaagcgaaaatggcaatttaagaagaaaatgagaaattcgcgttccccagaaggtcgtagcagaagcaggagcaaggtgtccaggggaaactggagggctttcggccttggacgttttgaccttgagctggagactcagcctttccggggattctccttcttcaacaacaaaccccagtcggggcggggagacctttcaggtgggcgggacgcccaccagcatgacaatggcccacacgcggggagaggagtcttgtaaaactgtggttaactagccctaatatctctatcattagttgcaggctaaaatgatcagatgtactcttttgggaaaaaaaaaaagaaaaaagaaaaatcagtttctctaaccaagttggtgattccaggttggaggggtggtggaaagtaattgctttaattaggaaaacctgaaaatgtatgggtctcaaggcattcgatattttattttatttcaggaagttttacttcctgaaatttgcttccacctttgtttctccaaaagggtgttttgagccccgtactccccctgggggatacccgggtggccaagaaaggggtgctctccgcctgaggagctaggtgtgtgtgtcgcctgctaggtattttcaatcaaacattgacaacattgttatatgtaaacgggcagacaaaggaacaattggattgctatagaatcagtcactttaccttacatggcgcgcaagcttatcccaaaacaaatcacttggagcaattgtcaaagacatcaagggtttattctgaaagtgtcagcagtttcagtcactcattcttccctggaaattattccagatgaagaggatctgagcagttcattttcacgtggtagaaccagaaagcacattattcactggcgagatgagctgactgtattttatccatcaacagttattccccaggcagattatcagaatgcagctgttgaagtaatcatggaaaaatgtattcccacacatgtaagataggtcatcttcagatgaaagaccttgcaactgaggcagggcttatttgagaataagcactcagagccccgttttaagaaagctcctatattgtttgcttaacaaaggatctgaagtggtaatgggggcaccagggaaaaagttaccccagacattacggcacatacagcttgccaaagagatggatcaattccacctattttagagaatgaaatagtgggtattttcctgccattatgtagtagcaacttttccctttcaccaaattttgactgtaaatgagaaagaaataggccctttcgaaactgaaggcaattaattcctgcaagcaaagtttccaaaactgtttccatgaccttccctatgatccctaacaacattgctcattctagaaaaaaaaaaaaaaaaaaagtcatttaaggaccaatgttttccatctgctctttgagtactcacactgatttaataggctttggtagagttaccactaaatttttgaaacgcaattaattttgatcatttcccacatgtgtgaaggaaggtatcccactaggatgttggacttaatcaggataatggtctttggcctattctttgggaagaagaaaagtcactggattgtatcatgactttatgagacaggtaaagtagggtttgaatgctagccaaaggagtttgggctgagcttacccctccacagacatactctctgattcatttatactgattgtcttgttgcccttctaacttttatgcttctaattcctatatttcctgtgctgtttctctacttggaattattttcctctgtttcctttgcctatgaacatcctaatacatttcaaaacctagatcaagttctctgtctcctgaaaaaccttccttgactgcctcagactaaggccatctctctccataatcaataatactcacactagcatttagctgtatacatcttgtattgctctatgctggtttcttaagtcttagctttgcccccctaatttgattataaagtgctcaatggcaggaatgatatatgttatgttgctcattaaatactttttcttctacacacacacgcacacaagaatgtcttcacataggtgacaataaatgttaatcatctaatgtgtcagtaagagatcattgaaggctcttctgtaggtagataggattttaatgagagcaaaaacctcagaattattttgaaacaaatttaaggaaacataaaatatatcgtattgctttccaaactgataaatcatatcccagcacaattagttaaattgattcatcctacatggaaaatttgtacagatgtgtctacttggaggaagggtgataatttctgttttctttgttcacatgtacatgtagtcattttggttggatagtcaatcagttaagtgactgtgatttatgggccattatttccttcttttcaaccagtggttataatgtcaaacatatataaaatctctgtggtgagagtgcctgccataagagccaagctagcccagtgatataagcggtgtcaccacagtcaggatggcagcctggggaataaaagaactctgaactggagaaccaggaaagtcatattcaagtttagtccctgatatagctaggtgactaattaattaatcactttacatctctgtgtctgttttctcatctataaagaaaggatcaatagctcaaaaaagccaagatgataaagagtc

SEQ ID NO: 1889051 - DNA, 4001 bp, Homo sapiens
attgttttacacattggtctctccctagtctctgtgcccagtgcaacttgtcccaaatcttccttctttccctcccgcctgtcccctcagtcccaaccccaagtgttgctgagtctttctaatcttccttttctacagacccatctgacctctcccctcctccccaggctgctccttgccaggccgagctaggtcccaattcttcctcagcctccgctcctccaccctataatctttttatcacctcccctcctcacacccggtctggtttacagtttcattccgtgagtggccctccccgacctgcccagcaatttcctcttaaaaaggtggctgaagctaaaggcatagtcaaggttaatgctcctttttctttatcagatgtctcccaaatcagtgagcatttaggctctttcatcaaatatgaaaaacccagcccagttcatggctcgttcggcaacaaccctgagacgctttacagccctagaccctaaaaggtcaaaaggccgtcttattctcaatatacatgttattacccaatccgctcctgacattaaataaaactccaaaaattaaattccggccctcaaaccccacaacaggacttaattaacctcgccttcaaggtgtacaataatagagacagccaagtagcaacatatttctgagttgcaattccttgcctccactgtgagacaaaccccagccacatctccagcacacaagaacttccaaacgactaaaccgcagtagccaggcattcctccagaaccgcctcccccaggagcttgctacaagtgccagaaatctggccaccaggccaaggaatgcccgcaacccaggattcctcctaagccgtgtcccatctgtgcgggaccccactggaaattggatggaaatcggactgttcaactcacctggcagccactcccagagaccctggaactctggcccaaggctctctgactgactccttcccagatcttctcggcttagcggctgaagactgacgctgcctgattgcctcagaagccctgtagaccatcacagatgccaagctttaggtaactctcacagtggagggtaagtccgtccccttcttaatcaatacggaggctacccactccacattaccttattttcaagggcctgtttcccttgcctccataactgttgtgggtattgacggccaggcttctaaacctcttaaaactccccaactctggtgccaacttagacaatactcttttaagcactcctttttagttatccccacctgcccagttcccttattaggccgagacactttaactaaattatctgcttccctgactattcctgggctacagccacacctcattgccaccttttcccctagctcaaagcctccttcacatcctccccttgtatctccccaccttaacccacaagtataagacacctctactccctccttagcgaccgatcatgcaccccttaccatcccattaaaacctcatcactcttaccccgctcaatgccaatatcccatcccacagcatgctttgaaaggactaaagcctgttatcactcgcctgctacagcatggccttttaaagcctataaacgctccttaccattcccccattttacctgtcctaaaaccagacaaggcttacaggttagttcagaatctgcgccttatcaaccaaattgttttgcctatccaccccgtggtgccaaacctatatactctcctcaatgcctccctctacaacccattattctgttctggatctcaaacgtgctttctttactattcctttgtacccttcatcccagcctctcttcgctttcgcttagactgaccctgacacccattaggctcaggaaattacctgggctgtactgccgcaaggcttcacaggcagcccccattacttcagtcaagcccaaatttcatcctcgtctgttacctatcttggcataattttcataaaaacacacgtgctctccctgctgatcgtgtccgattaatctcccaaacctcaatcccttacaaaacaacaactcctttccttcctaggcatggttagtgtggtcagaattcttacacaagagccaggaccgcaccctgtagcctttctgtccagacaacttgaccttactgttttagcctagccctcatgtctgtgggcagcggctgccgctgctttaatacttttagaggtcctaaaaatcaaactatgctcaactcactctctacatttctcataacttccaaaatctattttcttcctcatacctgatgcatatactttctgctccccggctccttcagctgtactcactctttgttaagtcccacaattaccattgttcctggcccagacttcaatccggcctcccacattattcctgataccacacctgacccccatgactgtatctctctgatccacctgacattcaccccatttccccatatttccttctttcctgttcctcccccgatcacgcttgatttattgatggcagttccaccaggcctaatcgccacacaccagcaaaggcaggctatgctatagtacaagccactagcctgcctcttagaatctctcctcattttctttccattgtggaaatctatcatcaaggaaataacttctcagtgttccgtctgctattctactactcctcagggattattcaggccccctcccttccctacacattaagctcgaggatttgcccccacccaggactggcaaattagctttactcaacatgccccgagtcagataactaaaatacctcttagtctaggtagacactttcactggataggtacaggcctttcctacagggtctgagaaggccaccgcagtcatttcttcccttctgtcagacataattcctcagtttagccttcccacctctatacagtctgataacagaccagcctttattagtcaaatcagccaagcagtttttcaggctcttagtattcaaggaaacctttatgtcccttacggtcctccgtcttcaggaaaagtagaacggactaaaggtcttttaaaaacacacctcaccaagctcagccaccagcttaaaaaggactggacaatacttttaccacttttccttctcagaagtcagacctgtgctcagaatgctacagggtacagcccatttgagctcctgtatagacgctcctttttattaggccccagtctcattccagacaccagaccaacttagactgtgccccaaaaaacttgtcatccctactatcttctgtctagtcatactcctattcaccgttctcaactactcatacatgccctgctcttgtttacactgccggtttacactgtttctccaagacatcacagctgatatctcctggtgctatccccaaactgccactctaaactcttgaagtaaataaataatctttactggcaaggctatgctgaacctccttaggcactctctaattagatgtcctaggtcctcccaattcttagtcctttaatacctgttttctccttctcttattccgtttagtttttcaattcatacaaaactgtatccaggccatcaccaataattctaaatgacaaatgtttcttctaacaaccccacaatatcaccccttaccacaaaaacttccttcagcttaatctctcccactctaggttcccacgccgcccctaatcccgctcgaagcagccctgagaaacatcgtccattatctctccacaccaccccccaaaattttcaccgtcccaacactttaccactatttcgttttatttttcttattaatataagaagacaggaatgtcaggcctctgagctcaagctaagccatcatatcccctgtgacctgcacgtacacatccagatggccggttcctgccttaactgatgacattccaccacgaaagaagtgaaaatgacctgttcgtgccttaactgatgacattgtcttgtgaaattccttctcctggctcatc

SEQ ID NO: 1889052 - DNA, 4001 bp, Homo sapiens; identical to SEQ ID NO: 1564240

SEQ ID NO: 1889053 - DNA, 4001 bp, Homo sapiens; identical to SEQ ID NO: 1888823

SEQ ID NO: 1889054 - DNA, 4001 bp, Homo sapiens; identical to SEQ ID NO: 1888824

SEQ ID NO: 1889055 - DNA, 4001 bp, Homo sapiens; identical to SEQ ID NO: 1564257

SEQ ID NO: 1889056 - DNA, 4001 bp, Homo sapiens
ctctgtcacccaggctggattgcagtggtgtgatcttggctcactgcaaactccacctcccgggttccagcaattctcctgcctacctcctgagtagcacggattataggtgcgtgccactatgtctggctaatttttgtatttttagtagagacggggcttcaccatgttgatcaggctggtctccaactcctgatctcgtgatctgcccacctcggcctctcaacgtgttgggattacaggcatgagccaccatgcccagcatgttttctagcaagataacaaagaagggtgcatttggattcttgaatcttattccaagatcaactgagaatttagccataagtattttggaaagttattccacctccttcaaattgggttctctaccttatatattacataacaaatgaacacactttgatacttttcccaacaaagcctttggatagaaaccaagaagcttggtttgctattttcatgcttatggcatttgctcacctaacttttagttatgacctcaaaagaaaaggccctcctctcttcctcacactactttgctcattatatgtgaaattcaactgtccctttgaggccaactactaatttttcctttctgcttcccaagaaaattagagaaatttcagaattcaaatatgacaacttttacaagtcataggccaaccatcaagttgtcatctgtgatatggaaaggggaaggggatggatctaggttcatcaagccatggatttggcactgcttgacacaataagccttccagatgtctttagtgaattcataattaaaatagtcaaaaggatcaatacctttgaagaaacaatccaagctccaaggggcagaagtaggctgagtagtcactttaaattcaatcaatacatttaacaaatattcattgaatacatattaaatggtagtgttaggcactggctaataaaccaacagacattgtaccttatcaaatggaacttatgatctattgagggagacaggcaataaccaaaaaaaaaaaaaaacatataattatacattgtgataagaaaattaaagggaaagaaataggatgcaatgactaataatgaaaaacagcatatttactttagaaagagtgattagagaagaaatctgtgaaaaggtagtatttaaagccagatgtgaagggtaaaaagaagccagccagccgggcacggtggctcacacctgtaatcccagcactttgggaggccgagatgggcggatcatgaggtcaggagatcgagaccatcctggctaactaacacagtgaaaccccgtctctactaaaaatataaaaaattagccaagcgtggtggcgtgcacctgtagttccagctattcgggaggctgaggcaggagaatggtgtgaacccaggaggtggagcttgcagtgagcagagatcgtgccactgcactccagcccgggccacagcgagaccccgtctcaaaaaataaataaataaataaataaataaataaataaataaataaaagaagccagacattgaagccatccaagtttgcactttccatgtaatgtaagtaaagaaccaattgaggtagatagaggtcaggaaactgcagctaatgggccaaatctgacatgctgcatccttttttatagcctccaagctaagaatgatcttttacatttttattgatttttttttcgagttggagtcttgttctgttgcccaggatggagtgcactggcgcgatctcggctcactgcaacctctacctcctgggttcaagtgattctcctgccacagcctgctgagtagctgggattacagtgtgcaccatcatgctcagctaatttttgtatttttagtagagacagggtttcaccatgttggccacgctggtcttgaattcctgatctcgtgatccacccacctcagcctcccaaagtgctgggattacaggtgtgagccaccacacccagctgatcttttacatttttaaatggttggaagaaaaaaattatagaatatttcatgacaaacaaaaaatatattaaattcaaatttcaatgtccattaataaagttttattggaatacagcaaagctaatgcatttatatattgtctatagctgcttcgtgcttcaacagaagagttgtagttgcaacagagaccatgtggcccaaaagcctaaaataatgagtatcaggccctttataagaaaagattgccaactccttggctggagtatagaaaataaggagaatggcatgagatgtgtttgaaaagatagaaaaaaaagacagcaaaaagacccaagatcatgcaggatattacaagcaaaagaaaaattttgaattttattatttttaaagtttgatgtatgattagaaaccactgaaggatagaaagcaaaggagtgttatgatccaatttatgtttcagaaaggttattatgacatttggctttgggtcagaatgtagaagatagtgaaagaccattattcccactgtaacaactagaaaaaaaactagataactacaacacaaatggacatcagggatttctgggttccacataggatgtagaaaactggcaaaggcagccgggcgtggtggctcatgcctgtaatcccagcattttgggaggccaaggtgggtggatcacctgaggtcaggagtttgagatcagcctgaccaacacggtgaaactctgactctactaaaaatacaaaaattagccaggtgtggtgtcatgcaactgtaatcccagctacttgggaggctgaggcaggagaatcatttgaacctgggaggcagagattgcagcgagccaagatcgcatcactgtcctccagcctgggcgacagagcaatactccatctcaaaaaacaaaaacaaaaacaaaaacaaaaaacctggcaaacgcagtgtcctccacataacaataagaaaaataccgataaactaaaaaatcataacttgaggccaggcatggtggctcacacctgtaatcctagcactttgggtggccaaggtgggcagatcacctgaggtctaggagttcaagaccagcctggccagcatggtgaaatcctatctctactaaaaatacaaaaattagttgggtgtggtggcatgtgcctgtagtcccagttactcaggaggctgaggtaggagaattgcttgaacctgggaggctgcagttgtggtgagccaagatcatgccattgcactccagcctaggtgacagagtgagactctgtctcaaaaaaatcaaaacaaaccttgaatttattgaagagctgagggtgcagggcaactaactagcctgaactctaaggaaagatggactttttcaagaaaagacagaacatgaacactggctcacctgtgtcaatgggaagataaggcctccatataagcaagtatgaggaattcgattaaaagttaaacatctaaaggccaagtgtgggctagcatgagtgcatagagcccttggaaaccacagactccaggggaattcatactcttacaggcacatgccaccacattcggctaatttttgtatttttcataaagatggggtttgaccatgttggccaggctggtcttgaactcctgacctcaagtgatctgcctgcctcggtcacccaaagtgctgggattataggaatgagccctgtgcctggctatttcatttcttaataaccatctaaagatttctacccttctaagatgagtcctttgactccccttttgcctttctcattttttttggttaattatccttatgttttattagcacctgtaagactcatgaggaaaagctgcaacagcatatttgataaggcttcttgaaccattgtttgattctgtaggagtaatggcacccaggatacccatgtagaagggtccctttgaaccgtagcatttaccatggtctgggtaatgggcatattcagtgggcgaatatcatggtaaagccagtccaacatga

SEQ ID NO: 1889057 - DNA, 4001 bp, Homo sapiens
atcttctgctttctgccccttggttttgggtgatggtgcaacaaccgccaagggtgggccctgggaggacctggtcacgtgggcggcagagctgggctcataagtcctcttgtcctttcctgggtttggctttttctttttctgttcatctagaatgtgttctgtcactctttggacaatttcatcaatactcaatcctgaaagtgagttcttgtttttgcttctcacttttttaataaaaccagcaagctcagtgctgttgtaacatgggaataccactgacaggtgctcaataatactattgaatggcttttttggagactggcttgaacatgcagcacaccctggaggaacaggctgcttctgatcagccgcagggctttgctctgacagagctgcctggccagccccttttggccctggcagctgagtggcttcaggctgagaggggggtggccctggcaacagtgcagaaggagcctcccctggggaatcgccggcagagaacacactgggatccctgtgaagtgctgcttggtttccagtcacatcgcttgcggaagtcataaacccttggtcatcatggcctgaagactcagggagtaactcaggatgaaccgtgttacaggcaggaaatgaaagctcagaaatctgcactttagaaagttcactgagccgagaaccatttttaattgccttaatttgttcttcaaactgatactttgctttctcagtttcttttgtaacattagaaagaaacaattcccatgaacatatatcggactccatgtcaggatatgctgcaggatcatggctaatcagctccagcttcttcagataggcttctgcttgtgactgcatgatctgtagcttatacacttcactctccttccagttttcaagtacggatacctctgcagccacagctctctgatgactctcttcataatcctttttccctttctttatacactcttctattttcattttctcgtttgtaagtgtgttgctgatttcaagggactgatccagatgtaattcatgttccttatcgtttccatcatttttctgggtatacatttcattggcatttgaaacctttttaattttcttcttcagtgattttagtgttttttggatttcttttttttcctcttgccattttttaatttctctttccaaatcttgaagcaaccaatctaattctgtctttgatatcttgttttcttctaagtgccttttcaacttttcttccaggtccctggtctcttctaagcccttaagttttatctgctcataattttcatacgcttctttaagttggtcttgtaatacttggtactccttttcaatccgtgaaatttccccttgttgtttctcaaaaggattatatggctcagtattgacttcttggtgtgttatgttccaagatacctgtatggcaaccatctgcacctgtggaatgtttgttactgcactggtgctttctggaattacttcacatttgttgttagaatttccacagtgcccatcttttctgttagactcactcaggactgtatgagcatcacctgtgctgcactgtgactttacagatattaacgaagaatcctcaaggatctgtgtttcggaggcaatctggtgaccagcagcattctcagcattcaaatgatgaccctcaaaataggcagtagcatttttatctgctctgtcattggctacaaaagacggcaccactggtactgatcttggtagctgatattcaggagaaaggctgaccaagggtgtatatatgctggtgtactggggcaaacctggtaacacatttatgtatgctggcgatgtccgggtgttatcaaatctctggaaaggaagatacgtacagtatcctgtgaccaaatgggattgagcccaataagttggtttcacatcctcaagaaccggtttgggagaattagaggagactcgcttgtaatttgcatcctcagagcctggtttgggagaattagaagagaaccctttgggtttcccatcctcagaaacttgtctagaagaattatcggatactggtttggccttcacatcttcacaagctggcttgggagaatttgcagacaaaggtttgggtttcacatcttcagaagctggtgctgaagatgaacctgatactggtttagactttacatctggtttaaattccctagcagctgaattaagtggtagtttaacttgtaaatactctcctgcttttgaaatgtcttctacttttgttttaatgtttttcttctttctttttttcttgagccgtgatgcaactttcttcaatgcaatacagttgtcaatcacaacaaaacggggacatcccaagagaaaagattttaaacctcctgctttttctagtattggtcgagtttcttctgggaaaaactcatattcttcagagaacatcttgtgactcatgtccaagggaccatgttcctccaacaactgagagaagtaatcatatagagttgaacatttttgttttgggttcatgtcccatagcttcttattgcggacaacatattcattactgtgttggtcatagagagcttcaaattcttctacgtcttgccgaagatggtcaggcactgcaaatgggcctgcagtatctgaattttgattgctatggtcttcacttgaagtgatgatctcattatttggagttactgaagttgttccagacccaactaacataggctttgaatcctttggtttctttttcttgcctttgtttttcaccttggtagaactaaacggtgcttcgccactgtcttgtttccttaacacagtacagcggctgtccattatatcaaagaattcatctaaagcactatgtaatgctgggaacttgtctctgtgttcttctagcagccatattaaacagcgggcttccttcgatgatgttggctcaaagaaataatcaagttgctttccttctatagagtctagtttgtgaccatatttctcattccagaggaaagtcatgatgctaaaatcaagctgtttaagagatgcttcataccgagaaaagaaaggtcctgtggcatctaagccaaagctattaagttttcggatccaggcggctaatttgggctccacttctttaagctcactcaaaacatgcagaaatattcttgtctttactctgttcttttcttgaatcaagtgacgaataacatagtccactgcttcatttagaaaatttctgcttgaaaaacaggttgtatagtcctctgtgctcaaaactttccaagaaagtaattctttgagaagcgtggctgtattccatatgccggatttaatcttgtcagcatactgctttatacactgtagaattctgtcatcaaggaactgacaatgctgaacattgtctacagtttctttctgctcttcgtttttgggtggattactttctcttaagtcctcctccattctttcttgtgctaatttttttgcttcttttttttggatctttctcttcaattttttgtcttctttcagtcttagtttctctaggctagaacatttctgtttcagaataggtcttggaggaaccttttcttttatgaccttgtgttcaaattcacatttaacttgaccaccactgctgaagatgataatcttagaaatgacaccttcacagtcaggggtaagacatattccttgtagaaaatccttgtcaattttatcattaaaggttgtggtttttaacttcttccagcaattcatgtgaaattctattttacagtactggcaacagctgatgcgtataaaacccttaaagtctggatcagttatgtatatctggatcttagaatatccacagcacttctgatagcaacaaatggcatctggcactggagggaacttgcattcttcaacaaatttctctaacagcatctttattttttctggctgagactcttcaataatcacattacttgtgggccaagttaaca

SEQ ID NO: 1889058 - DNA, 4001 bp, Homo sapiens
cccctttcaaagactgggggttcctaaacttaagttctctcaactgtgacccaaacccactgtgtgtgcaccactcacctggtctgatctacctctcctccttgggacttgagggagcaagggaaactgatgtcagtgaagctcatgctgcctgctgtgctatgactcctgcctctaacccaggactctctgtcattttgccagcctccaccaaactgtgacaagctaacttgtagcttgcaggctgggtagaatctcagaccttacatggttctcgagaaaacatgacaagtaagagctagtaggtatgtcctgagaagtcacaaacaacccaactctgggcgtgggagagaggcagagtgggcaaaaaggtggaagatgaaggtgtgggggctgtcggaaactgggaacaaaatacattttatattgtaacaactaatccatttcattttgggccagttaaatctgaatctcaaagtagaggatgggtaatattattcatggtcaaaatcaaaacaacttaagacacaggttcttcagaataaaatgaatacgagctttattaatcttcatcttgcttttcccaactgatgtcagttcaaaacagactgcacatcaaaaactttcccagccagggtcgtggctcactcctgtaatcccagcactttgggaggctgaggcaggcggatcacgaggtcaggagttcaacaccagcctggtcaacatggtgaaaccccgtctctactaaaaacacaaaaattagcagggcctggtggctcacgcctgtaatcccagctactcgggaggctgaggcaggagaatcgtttgatcccgggaggtggaggttgcagtgagccaagatcatgccattgcactccagcctgggctacagggcgagactccagtctcaaataaataaatacataaataaataaaattcccactagtcagtggaactgttctcaatcttaaagccaccacccccttgttcttgctttgtttcacaatcctaaatcaacaaataaatctttttgtcaaaactaaatgaaaactgacctgtttgtcttacactccccacacaccctcacttcccactcggccacaccctccaccaaccgtgcaggcccctgtccccaacccccagaacctcaccacttctatggcctccactcattgcctgctaagaaaagcgcgtaaggcgtgcccagaagaatgaggagactacccttcatagaaagtaatcaaaacataaccaattaagtgaactgccactttctgcatctttattattaaggcgatggaattatattttgaaattacatggtacactactgagtccagtctttagctattctgccatactccctcctgtcgcgtatttccgttaacgttgatggtaaattccgttggtaaatttgatcttgggtggtttgaataggtagtcggagggaaactttaggaagaagacccctcccaggtaggagctgtcgttgggcctcgttatggtggcctgccagtggagcatatcgtcccacactggccctgctgagcagtggggctgggggtcgcgggccagttcgaggaactccttgtggatgagctttagggccatagtccgcaacccttggcggccagtcctcggcaccgggcccggagcctggtagagggcagaggtggcgatccctgggtgggatgggcagcaagggtatgcctcggcagatgaaggggctgagggcaagctccggggtcggcgggggcgtcgggggaatcggacggtggcgtagagggggactgaccacgataagcgccggacgctccaccacacgcgatggcctgcaggatgcctgtagcgtatggtgaccgaggccgcgctgtccggcgttggagattttgtggtttggagcggccgctcctcttgctgggggcagcctgccccagcggctagccccgactgcccacatcggggcgctggacacccgcgctgatctgctctgtgagatcagaggccactggggcctctagccacccccacgccctgtgacgttgactgacgcgctgcgcagcgttgccaaggtccggggccatgggagcggggtggggctggaaaggaaggtgaaaggttggggggaaggggcggggcaggatgttctgactccgtgcctgtgcctgggccggcaagtaggaccccaggcactgcccttcgcccagagtgacctcaagaaatagcagttcaatgaatgcctctctgccccttacccacagtcaacttcccttcacagtttacctcagaggccttctcctcccctccccttctctcaccacttgtgtatttccagagacattctcttgtataaataagtttagtagatttactatcaatataatactttttaaagtaacttttgacaatgttttggtaaatttatttttaatcaaggtttaaggccttcaaaaaattcaatttggagctaaaacaacttcaatcgttgagggactcctgacaataagaagaaagggagggcaggaagaaaggaaaccagtagtccctctggcatgtatgaacacttcagttattgttgtttataaaaatgatcttttttttaaaaaaaaaataatggttccaataacaagcataactgcggaacagaatgtctcattcttgaggctttgcagtactaatactgattcacatgaaaccttcacttgcttatatgtgggaatgtaaagccaaataagtacctttaaaataggttggcctgtcagccatatcaattcctttccatgaattaagtaagaattcaataaggagttcttaagttttggtaagaaattacagtatataaactaggtcatagttttatttataagatactggatatccttcagttatgaaaatttcttgctgcaaaattagttaactaacatacctattcaaccaacttgtgaaggcaagataattatttgacagtactttacaaaggtgagaatgtagatatagaagagtgaatcttctaacagtaggttaaaatgtctaactaattgaaaggaactttcccaaatctgttgggttatctattaccacagaagaacagggtttgtgtgcttctgaacaaatgagttattcctgttactgtggtgaaataccaaattttctttttgtttatttatttttcttgtgcaacagtttattcttcctgggagaccaatgagaataacaagggatagagatcaattaaaaacaaatctctgcaactacatgtgtgctagtattttaaattacattttcagtagttttagtttatattttttatttcaatagcttttggagtacaagtggtattttgtcacttggaagaattatatagtagtgaattctgagattttagtgcatccatcacctgagtcatgtacattgtacctgatgtgtagttttttagccctaggccctctctcatcttcccacttttgaacctcaaaagtttattatatcactctgtatatctttgcatattcatatcttagctcctacttataagtgagaacatatggtttttggttttccaatcctgtgttaagtcacttagaatagtggtctccagctctatccaagttgctgcaaaatgcattatttcattccttttaatggctgatagtattccatggtgtatataagccacattttctttatccactgattaattgatgggcacttaggtttattccacatctttgtaattgcaaattatggtggaataaacatgcaagtgcaggtatctttttgatgtgacttattttcctttgggtagatacccagtagtgtgattgctggattgaatagctctactttcagctctttaaggaatctccatgatggtttccatagaggttgtactaatttacattcctactagtagtgcataagggttcccttctctccacatccatgccaaaaactactgttttttgactttttaaataatggccatcctggctggggtaag

SEQ ID NO: 1889059 - DNA, 4001 bp, Homo sapiens
ggcactgagtacaaagcttccaatttggtggtgaaacctgcaggatgtgatacttaagagtaattgacaaccatgttccctggctcatggaggaagctagtattttggggaaaaggtaaagacaacaggcagagaaaaggtcaaaaaataatttaaatagggtttgtcatggacactctcagcatcccaccatgagccctctgataatccctttaatcatcctgcgtactccttccccagcttctgtgtgctttgtctctaatggtccatacctgtgattcttttaggatgtcatctttggggctactagagctctttgccctgataggtggagagagaagtgcttgggggttatgtttccccaggtgagagtggggtttaactaactggtgcaggtgtatgaaaaccaaactcccttgcctctggttggagcaaactctgagttataatttacacttcagaactcccttgtaggatttggttgacgctgagacttggcttggaacagcctcttgcttggcttcgtacccttttctgtcatgcttctcatgctcccttacttgtttctctaaggagcactaaaaacacaaacttagatgctcttcaagcaagtttctgtccttaataatccctgggacccttcagtacacctcagaagtttggttactaagattcccagtgccatgtctttaattttttaaaaatgttttcaattcaagaattggtttatttgtgctagtctttagtaatcttcatagccacatttttatttcatcaacagtcatctcagacacaccttctaacaagaccgacttaaaatattacgacaggaaactatgccttcaggagcatgtttattgtgtttgagatgatacatccggtgctctctgagctacaaagggtaaaaggaaatcctctcattacaaactgacaaaggtaaaaggtaaaacatttttcacaacagcatgaaccacatactcagaaattgatctgggtttaatacaaatgacataattcctagtcatctacagctacttttataagttcatacagataatgcattaggctaaaacgcactataatatttggtagacttcaggaccagtatccttagtacatcacaaaatacattttgatatcccaaagaagcaagacttgcaagtaggcgttttcaacataactaatctacagctacaaagttctactcttgatagcatttacctttttggggagtctcccaggctccaaaggataaaagcagagtagaatcagtataacatatacacagaagtccgtattgtaaagactataaagatttgcagcacagtgagaagatgccttctgctccttcacactgcatacaaattatgtgaattacgttgcgtatctcttggtcctctgtctggctatcctgtcgtgttctgctctgttggtcaaatactgagtggctatgcttccaaccagaggatccacagggttgcagtccattaaaagggaacaaatagacagcaaaacctttgaaacagtcaaagcgggactccagttgtctttaaggatgtccagacagatgactccctgactgttgatgttgcagtgatcgattctggtgcggaaagtaacctttggtggcttaaatggataatctgatgaaaatgtgatatccagaaaaaacacaccaccttcatatacagaacccagtggaccaagtatagttgatctccattcacaaatgttatctcctttaggcccagcactgcaattaggaggaggatcaagggttatttcagctagctccttctgaatttttttagcactagtggataacttagcagtggttttgctagagagtttggtgtttttcttctgctgggtggcagaaggttttctttcctcttgttcttcaggctctggagcggctgggtctcgctggtccgcatctgaactgccactgctggtgctggggctctcatcatcggacctttgcctatcactggacatcttggtgaagctaactcttggaaaactcggccggccacccgcccggcccgctcgcgcgccgctacggtgtgagggagggagagagaaaaaaaaacccttccttaaggaaatggacgcagctgttgggggaggggaggggggagagacaaaaagaagctgaggaggctctggcctggccggggagtgtggaacattgaaagtcggagggggttgggcagtgcctggctccggccggagggtggcgccgcccagcgccttcggaaaaaagggggtggggtgggagctcggctgagcgaaggcgctagctccgggcgaggcggaggggacgcgggagacccccgcgcgctgcagcctcccgccaccgccgccgccgtccggttcggctcccatttcttttaattttgaattgtaaaatgacaaattatagttgtatatatttatggggtacaaaatgatattatgatttctgaatacaatgtggaatttttgaatcaagctaattaatatattcatcacctcaaatatgaatcatattttgtggtaagaacatatgaaatgtactctcatttcaatcccgtttcctcttcataaacaagttcaagtaggggttctgtcattttcaaccaaaagagatctgactaattcaataactgagacaccaagttcagtggaatatgatgtgattcaaaatggttattttgctagatatgttaatattaacagaacatttgtaggctcaactaaataaatggtttggctggtctttatttttgagagttgattactgaaccctatgaaaatgatcaaatcaatttgtacatctagatatagatacatttaccacttaactgcctttgagacagcacagtacagaaaagttggctctattgatccatgcagttttacaaaaactactgtagcaaaatactgagcaggatattaataacatttccaatcttatgattatagacaacatgtgatttgcaatgaatttcaaaggcccgagagaagtttactgatgctaattataagaaacattttgacagccaccatctggtgcaatgcttaagtgaatataagctgctaaaaatgagtttaatatgataaccagtttattgggcaggttacagaaatatctctttacaaattattcaacagggattgagatcgtttgctcttacttttctaatatttccctcccagtttgaaaggagaaagcacaaccaccaaagacccagcctaaatgagttatagagttgggactaattggtgcctgattaaagctattcagccatgaccatgttgtaaagtagaagcaaaaatgggaccctggcagaaaagcccataattactatgacaaagaaagagcaatctcagtgctaaattaaaaatggaattgttttacattttcttgagaaaggaggttccataagactgcctttgactcataaataatatgaaattattaattattaaatttaatattggaaaaagaggcttgtgcatcattcacacataatcattaaccattaattaatctactaacttcaaaataattaactgacagcatagacacaatgccaattcacaaactcaagctacacgttactgactttcaggcatgcagactctaatttccgtaatatttctaacaagaattggggagggaggtgagtgtggtcatcttcctaatgtgtttgactcagaaatagccctcccaggaaagcagatttaagttattaggccaatgccctatatatgtttcatttgcaaatgaagtaccttcatgtaaagatttctttcggttcttcatgttgtttttcacaaggatttcacaaggaaggaaaacacattcgatggtactaatgcatttcagctatttgaattgtgcttctatttatgatctgggctgctacttattcattcattccctaaatcaacatttagtcacccatattttgcaggcactggagatgccataatcactaagacagggcttccct

SEQ ID NO: 1889060 - DNA, 4001 bp, Homo sapiens; identical to SEQ ID NO: 1564276

SEQ ID NO: 1889061 - DNA, 4001 bp, Homo sapiens; identical to SEQ ID NO: 1564280

SEQ ID NO: 1889062 - DNA, 4001 bp, Homo sapiens
ccggctccctacacaccttgacagtgctctttgagatgcctcagttctagtctccttgtaattgtgcacagtagatgtctgaacaaatagaccagagtcctgcaaaagtgatcttgaaatcacaattaaaagagactttggagagatctactcaggaaaattttctgaatagacaaatgcttttaaagggggttctagacagtccgtcttttctgcctccttctgcgaagtagggctacactaaaaccttgtcacaatgtgacctgagcaaaaccattatcaagtgatttagttgtcttgaaccagacaaaagaaaattgacatgatttcaagataggtttagaaaaataatctgactagcaaaaaaaaaaaaaaaaatggggggtggttcctagggaatatgagacttgatattttagcaaaaatttaaatatgctctttatgatacacacatttctcgttgctttacaaattttaaatgtaacacaaatttgtttttcacactgttttgttagttgaggtaaggcattcctgccgcacgcagcaatgactcgtcctggaaaaccagggaggctgcatatcctactgttccttctctactagctgtggctccacactctcacctccaccaaagaaagcatttcagaatttaggggtggaaatgatgacaacattgaataattctatttttttcttttttttgagacagagccactgtcgctcaggctgaagtgcagtggcgcaatctaggcccactgcagcctccgccccccggggtcaagcaattctcctgccgcagcctcccaaacagctgggaccaccggtgcccgccaccatgcccggccaattttccgcatccctagtagagacggggtttcaccatgttggtcaggctgatctcaaattcctgacctcaggagatctgcctgcctcggcctcccaaagtgctgggaccacaggcgtgagccaccacgcccggccaatgattctaatttatatttttaaaaattaccttataatcttaaaacttttaactgatgagtatccaacccttaaactttataacaatcatttccaaagtggaaaagtcactgggatatggggaaaagtatgatttgtttttgtacttctatttttctaatgtctactttttgttttctagtctacatgttagcacaggagtatatatattacttaagtatacctatgttggagtgcatacagaatttctttttaaatgataggatgcaaaatcaaatctatttggatagcagtgaagaggctgtttttcaatcctggcaaactagggggtgcatacccccttttttatttagtagcttccataaggctataactcatggaagttacatccttacataaactgatgggctatccaaccagtgaggaaaactgataaagtggcctctgagctccaggaagtagttaaacactactaaaaacatcttgaaaatttggaaaaaaatttaacagtaaatggattcagtagttattcagtataaggtttggaataactccagccattacaatagacatttatttaaagtaaaacatctgcagaccaaataattcttaaaattgtttgtttcaagtttaaccatcttcataacagctgcatccacagacttcaactacatgattacttctttgcccattcttctctttcttttctttcccgaataacctcttgcacatacagttcaaggtagaaattttcctcttcatatttggtccactgctctttaggcaagatctgatgcttcatggtcaggtccaatgcactcttaatgtgacacatcctgtcattataaaggttctcaggaagccttcttatggcttcttttatgtcttcatcctcatatattgtatcatctctcattaaccccagtttattgaatcctgcagtattgtaataccattttcgaataccatccagccacttgcctgatgctgaaatggcctgcttgccagccattttgacctgctttaattttttttaatccttcttataacaagatacaaaaattatacactggctgctcatcccaacagaatttggcaatataaaacattttctttcattaaatacatagaaaaagtgtggttattgatatttattgatgtagttattattgaattttatatttgtgtttttaaaatttttatttttatttaatttcacacttgaaaaaccaggaatattacaaagaactcccagaatgtcctttacccagattcaccaattaacattttatcacgtttgccttatcattctgtttttctcttcctctcctccttctcctatttgacagtagtttgcaaatatcattctcctttacctcttaatatgtcagtgtgtatttcctcagaatgatgatttcctcttatacatcctcagtaaatgtgtcacaatcaagaaatttgacattgtttcaatatcataatctacgccatattccaatgttatcagttgtcccaataatgtcttttgtggttattttctttccttggtcaaagtgctaatccaagatgatgcattacatttacttgtcatgtctcttcagtttttaatatggaacaattccttgacctttctttgtcttttatgtttatagaaaaacaaacttagtttctctcattatattctcacaaccccacttctgacactgattgtgtggaaaaaaagtttttctttggctcttgtaccacagcaaccaacacagaaagcttgtgaacaaatgtattgggattttttctcaccgacaggcaagtaaacaattctgcagtggacaccagctgggtgttctccaatccaattcaattctgaagctatctccctacagaaagtatcagatcccacagattgagggcttagtcccacgagactgcctcaactttagacatcagtttcaaatctgggcctctggaacttttaactgaccagcttcaagttagggttcccgcaacctctctctttaggctcaaataatttgctagaacaacacacagaactcagggaaacacttacttacatttacccattaacagccagatgaagagatacatagagtgaggtctggaaggctactgagcacaggagcttccattcctgtggagttagggtgtgccaccctcctggcatgtggatgagttatttgtcacctttctgaaatcctccacaaattcagctgtactttgtcctcttgtgctttttatgaagactttatctgataggcactaatgaagcatgaacaaccatgtagaaatgtgactggactaaagggtatgatctaataccaatagacttggtggagaaacccagcaaggcttgtctgttcagattcttcttggtttctctgtgcagcattccttcctcctgggtatggggcaggactctttctgaaatgggagtcttatgacccacagtcaaactaggtaggtcagagaatttctttacgaccagctccaagccagaaagctgggtgaagattagagtatatttttagtttctatggcttgcctttgggagaaaaaaaaagcaggtaaaaggagggcaggagaaagtcagagagagattctgttttgtgaagcctaaagtgccccaacattatacatatatatgtgtgtttgtgtgtgtatatatatatatatatatatatatgtatgtatatatatatatttttatatatatatatatagagagagagagagagagagaaactgtctctcacttttatttctctgaagctgtttcaaagctgcttcaggaaccaaagacaaaagaccaaatactttaacaagagatatgcttatttctttagtcacttaggaaataacaagagatttgggagttataagccaggaaccatggacaaaaaccaatatatatatatcacaatatcacacatcgacaattgacacttgggtaaatacaggacacttatttcatagattgtcctttaatttaaatttgtgtgccattt

SEQ ID NO: 1889063 - DNA, 4001 bp, Homo sapiens
cagtagccctggagtaagttggagtgctgtgtccacagctcttggtacatctggccctcggtcagtgcagaataaacatttgttgagtgaatggtgacagagccctccattttcagaacacgctggcctgggcagagtccaggtggacctatgggcttctgcaggaagttgatcactaagtcaacaagttaccatggctaatcttcaatggtagacagtcccaggtacacagagatctttaggtctttttgttgtcagtctggaggtgggatgagagtatcctccaccccctcatccatgacctcggttgtttttagcagcagcagcagcagcaggattccttcagtgagtgtgctagttgcagttcctctggttgcaggccacaaagggcaggcatttattgaaaggatgctggggtgcttcaaggaattgaagcaagagctgactcaggaagggtagggcccagggcaaccctcagttttatgggaaccacgcatcctcctttcaagggctcctgattcctgaggcccaactcctgctgctaaccctaggaggcctccccatcccctccctagaggaaggggccaggtggagagctgatgtccagtgctgagcaaggagaatgttgctagggtatgtatactcaggcagcacagccacacaagccagacagcgtgcactaggctacagccagccaccaccaggattaggggactagactcttcctagaacactctttctcctcctactcctgtcctgatgcctgccctgggctgcactctctgggaccagcagctacagcccgacaccctcgagccatgacccaggtctgagccacttgctctgggcacactcctcgtgggctctggggtgctgctgcccagtgccagcagccccttggcacaggggttcccagaggcctctcagcctcatgtccgactccctctccctgctggcagctccacaggcttctttccacttccacctgctgcccccctcccccgggatgctgccagggcttaagggtcttgggagtgtgtcctgtagtttaggccccctctcagctgtaggggaagtgccagctgtagggatggccttgtcgtgcctcgtccctccagctggccttggagagaagaggtggattgtgccatcgggctgctcagcgtctgctgggccaggaggccggctgtcaagccattaacccacccgtggccttgggagcccaggaggacgcgagcagcaggcccagaccctgcagagcgctgataagatgggccagggacgcgcctctccaggcccagcggccttggtagcccggcccccccggagctggggtccaggcctccccagaactgcagctggagcttcatccttttcgggaagcgcaggacctggcgtgggaagggagacagggacgaggctagaggcaggctcggccgccgaaatgatggcctgtcacggcttctgcctgcgctccctaggacccccctcagaggggacatttcacagcctcagaaacatttctggacttggcacccgctcggcccccagccccgcagtggccgagggaagcctgcatagacgaggggaaggacgaggagaggggaggagacgatgaagggggtcagagcagcgattggagccgagagctggaagcgccttaaagagactgcgcggtccccgccccccttcccgccagcctcaatgaattagagctgtgtttcccaaacttgcctgatcataagcagcctctggggccctagttagagatacaggttccggagtacctcccttcgagattctgattcagtaggcctgcgggtggagccaaggaatctgtaattttaacacgctccccacgtgattctcgtgaacaagcaagtttggaaaatactgaattaaaggaaacggggcctggctgcagaagcagcctccactagggggcttcggcgggaggattcccgggggcgtcgcctgcttccgccgccgcctccttcagtgaaagtcccttttgggtccagctgccacagccaccgcgctccctcaggccgggcgggggacaccccaggtctgcgtggcccccgcgccgccacgcccagtggccgcccgagccctgcgagcagggggaggagccgccgccagtggaggcggaggaggtagaggaggcggagacggcggagaaggcggagaggaaggtggaggcggaggcgaaggtggaggggaaggcggaggcggcggggaaggcggaggcggcggggaaggtggacgccaccgagaaggtggagacggcggggaaggtggacgccgctgggaaggtggagacggcggagggtccgggccgccgggctgagctcaagctggagcccgaacccgagccggtccgggaggcggagcaggagccgaagcaggagctggaggatgagaacccagcgcggagcggcggtggcggcaacagcgacgaggttcctccccccacccttccctccgatccaccgcggccccccgatccctctccgcgtcgcagtcgtgcgccgcgccgccgaccccggccccggccccagacccggctccgtaccccgccgcagcctaggccccggcccccgccccggccccggccccggcgcggccctgggggcggatgcctggatgtggattttgccgtggggccaccaggctgttctcacgtgaacagctttaaggtgggagagaactggaggcaggaactgcgggttatctaccagtgcttcgtgtggtgtggaaccccagagaccaggaaaagcaaggcaaagtcctgcatctgccatgtgtgtggcacccatctgaacagactccactcttgcctttcctgtgtcttctttggctgcttcacggagaaacacattcacgagcacgcagagacgaaacaacacaacttagcagtagacctgtattacggaggtatatactgctttatgtgtaaggactatgtatatgacaaagacattgagcaaattgccaaagaagagcaaggagaagctttgaaattacaagcctccacctcaacagaggtttctcaccagcagtgttcagtgccaggccttggtgagaaattcccaacctgggaaacaaccaaaccagaattagaactgctggggcacaacccgaggagaagaagaatcacctccagctttacgatcggtttaagaggactcatcaatcttggcaacacgtgctttatgaactgcattgtccaggccctcacccacacgccgatactgagagatttctttctctctgacaggcaccgatgtgagatgccgagtcccgagttgtgtctggtctgtgagatgtcgtcgctgtttcgggagttgtattctggaaacccgtctcctcatgtgccctataagttactgcacctggtgtggatacatgcccgccatttagcagggtacaggcaacaggatgcccacgagttcctcattgcagcgttagatgtcctgcacaggcactgcaaaggtgatgatgtcgggaaggcggccaacaatcccaaccactgtaactgcatcatagaccaaatcttcacaggtggcctgcagtctgatgtcacctgtcaagcctgccatggcgtctccaccacgatagacccatgctgggacattagtttggacttgcctggctcttgcacctccttctggcccatgagcccagggagggagagcagtgtgaacggggaaagccacataccaggaatcaccaccctcacggactgcttgcggaggtttacgaggccagagcacttaggaagcagtgccaaaatcaaatgtggtagttgccaaagctaccaggaatctaccaaacagctcacaatgaataaattacctgtcgttgcctgttttcatttcaaacggtttgaacattcagcgaaacagaggcgcaagatcactacatacatttcctttcctctggagctggatatgacgccgtttatggcctcaagtaaagagagcagaatgaatggacaa

SEQ ID NO: 1889064 - DNA, 4001 bp, Homo sapiens; identical to SEQ ID NO: 1564287

SEQ ID NO: 1889065 - DNA, 4001 bp, Homo sapiens
agggtatatgagtgttcactgtcaacttttctgtaggtttgaaatgtaaaaataaagttggaaatacatttttaagtaaaaaattcttttttgtgaaatataagttaatagacttacacagactcatctccagcccatcagaattgtgttctctgttaaataaatatgtgtcttcttttctctcttttcacaggaaagtggtatagattaactagataatatttttctacctagtatctattccaatcacactcaatgtaatttaaactatatgtaacatgagatttacagaccaaaaaaactaatctcaatgttttcattttacaattatctcgttctaagggcaaagaaaagcttaacttggccaggtgtgctggctcatgcctataatctcggcattttgggaggccgaggtgggcaaatcacttaagcctaggagtttgagaccagcctgggcaacatagtgagactctgtctctacaaaaacttttttaaaaattagatgggcgtggtggtgtatgccagtagtcccaggtactccagaggctgaagcgggaggatcacttgagcctgggaggttgaggctgcaatgagtcatgatcataccactgcactccagcctaggggacacagaccctgtctaaaaaagaaaaaaaagaaagaaagagagagagagagaaagaaagagagagagagagaaaagaaaggaaggaaggaaggaaggaagggcttaacttgcttgggttttgagcatttgaaaaaaaaaacttgcttttacatatgaaacacaaattatctgggaagacttccttggtaggggtgggtgctctaggctctacagatggaaatagcatttggggattcatcccatggtctggattcttctccaggcaaaggcccattcttgctgggttataagttcttgtttgaaaatctaacctgaaaaataaattcactcagtcactctagtgcataagaataaattcacaaaaaccttaccatttaaataaaaacatgggaactatgcctaactacaagatggccaatcttcggcagaggacttcagccaccctctccatttgactatcaaacgaggtgattagacagagagtgttgtcaatttccacttgagcctcacttatgggttgcgagtgcagagctggagttatcaaagatgaattttagaaaacctgtctctgtttaaaaccttttaaatgcttatactcagtcccattgccaggagtgaaatccaaacctcccgtgtgaaaaatcaatatccaggccgacagatcacacgggatcttccttatagaccagaaccatagtcaatttttaggtccttttaaatattaaactcttcacttcctctacctccacctgtgcgtcgcgcctaccttagaacccgccaaatcccattaaatcccacccccaccagccacacacggtctccataggctccaggcgccgcttttgcagtcccccattggccggtttattgccagacggcccctgctcgcacgccctagtcttctttgatctcctcggattccgtgaagccctgcccttctcttctcccctttggcccgtcttcttccactcaggcccgcccctccccaactggctatttggttggccagcgcgcttgccacttacgtcattcacccgcgccacccggaagccgcggttcctaccaaccgttcttattgctggcggcctgaggtaaaggccgcgcttgggtgtccctgggtggtcgggtccccgagttgggaggggcggaaggctgaacctccagcttgagccggacaagccgattcccagcgttgagagggtagagatgaactgtgtgtgaggccaaactggatcggtcaacatggtcttccccctccccactccccaggagcccatcatggcgacgccccctaagcggcgggcggtggaggccacgggggagaaagtgctgcgctacgagaccttcatcagtgacgtgctgcagcgggacttgcggtgagtgacagtgcggggggcggggcgtttggaacattccacgtggtgggtggggcgttcaaagttagggccaaccctttgaattggcgggcgaggcgttcagagtccggccccgcgctccttggagcgagaagtggggacgacatccggggtgcagtttggctgggacgtggcgttcatagcaggggcgtgtcagcgcatgcgcggcctccgatgtttaacagattaaggcttgttttctggagccacagttctcgggttcgaatcctggctcggccattcttcatccttgtgaatacgtcctacctcgcctttctgtgccctataaactttactcttctgtgaaatggggagttttctggaaccttccccatgcagtggttttgagtttttgatgtgtcccatctttgtcaagaatttagcatggatgcctgaaacatagtagaggttcaatgagtatgaagaaatattattgcaatctttgttaatctaagcaggaaataaggtgttcagaactaggcctatgagcatcctaaaagggatggaggatttttctagggtgaggatgggacattatgattggagttcagtattgggagtataataatagtaattataactaacatgtatatagagagtttaccatttgataagcattattctagatgctttgtagtaaacgctcatttaatcctaatgactctacaaggtaatactgtcatctgtattttataaatggggaaactgagtcccaaacaggttatttacttgccaaagtcacacatctataaaggatagagcccagatccaaacccaggcagtctgacccagagccgaaaattaacttatgcactaaaaagccttttcagtgtatggtgacatgagagtctcagagggtcatgatatgaggtatactaggaggaatggggctgcctattggtcaccattgtactttcgtcccatcagaaaggtgctggaccatcgagacaaggtatatgagcagctggccaaataccttcaactgagaaatgtcattgagcgactccaggtaaagactatgggattgggtaccatttttttggtatgtgtgggcaagggagggaaatgggaagagagactccagacccaaccctgtcacctgacctaagagttcaccactgacccctacctctttttccctggccccacaggaagctaagcactcggagttatatatgcaggtggatttgggctgtaacttcttcgttgacacagtggtgtgagtgtctacccgcccctctgagcccacagggttcagcttaccccttccctcatgcaacttatatttttttgagtatcttctatgtaccaggcactatgcgaggttttatatcccagtaggatataagctaggtgctggggatgtgacagtgaataaaataggacaaaatccctgccttcccagagcctcaatttggggaagggtggggagcaaaacataaactatgctaaacagtgataaggacttctccccacttcctctaacctctctttcctcagcccagatacttcacgcatctatgtggccctgggatatggttttttcctggagttgacactggcagaagctctcaagttcattgatcgtaagagctctctcctcacagagtaagtccattccatgaggatagtgtgtaaaaacaccaccatttccaacactcttctccctttacccatggctgcctggaatgatacttaaggactcatctcccctcctcttcagagctggggctgaagaaatggggttgcaaagcccatgtgtagcacataataagcactcaaaaaatgatctttgtattgttcattcacgcaaacatttattgggcatcttctgtatgccaggcactgtgcttagcagtgggaatgcagcagtgaacaagacagaagagttccttgaaggcttacaatctagaaggactatactgttatacataaatacaattatgaccagatccatg

SEQ ID NO: 1889066 - DNA, 4001 bp, Homo sapiens; identical to SEQ ID NO: 1564288

SEQ ID NO: 1889067 - DNA, 4001 bp, Homo sapiens
gtatattatctgatgcaaagtgttcatgcaataaaggttcaaatgaatgaacaagtaatgctactctttattcacagcctttactaaagatacagaatacttatggtttgatcattgattacgattcagttctacatgccttgagaaagtagaaataatgtgtattgagtgcctagctaccaaacaatgcttatgtagtaagattcattgcatttaaacatgcatatttatgagggcatgaaaaagacacattaagattcattaattcactcatttttcagagagcatacattaagtaccttagcagacattattctaagatgaaaggatgaaaaggaaagtaggtcacagtccctgccttccaatgattcatggtatgtttttgagcaacgaataactacacgacattttcttttacttatacaaaatgattccattatccttacttcacatgtgacaaaatacacagagatttaataacctgtcaacagtcaaataatttttaagtgacaacatgaggatttaaacttaaatttaccttactccaaaatttgctttcagctactgcagattacctgtattgtcctcagaaataattgtttcaaagacatcaattgttaggaaatgttctaaggttaactctatgttaccatttaacattatcaacaaggttaatacaattaagtacatatgcataggtctgatcattctagaaatctaacactggttgttttttgcatgtttctatgaagaaaaatgccattaatgccaacagttagagcctaccacaattcttgtacccttcatattagaaacaccattaagcaaaatttccattttctaactattctaactattctagagtagcttaaattgtagaacttaaaaacgtatttgaggtatgatacaactataatttttttcctttcttacctgaggttgtattatgaaagcacatgctggttgtaaacacttccaacaatgcagaaatgagcaaggtgaaagtggaacttgctgtggacacggccacaggaccacgcttttgttcttgttgggatgcctgggtcggtttcacaggtcgcctcgcagtcctgcaggctgaacccgtctgtctgggcgccccgcgctgcctgcctcctgggcactctggggcaacatggatggatgcccgcttgtctacggttcggtgcgtgcagtcaggaatctgcaccaagaatggtccgtcaatgagggagagtcctccctgggaggggcttccgtgcctcccattctgggcacttctagactttctgcaggaagtgctgtccttgagtcattctgttttgtcctgaggctgctgcgaggagggggacaggtgaacacatgctggagggtggggacatgcgggacggcttcagtccaggcacagccgcaggtcccccgctgccccgctttccctggcccgagaaagcagcccttagcaggctgcgggcacagtcccggctcaagcacagcctagagcgcactgcagggcccgagcatccccgccttaattttcacctttgttccctcctgctttccagctttggagtccttgttaagagggactcgaaccacaaggttataaacacgacacctgcattcccttccaatccttcatggttttcttttttacacacaaagcttacaacctttactttttccaagtagaaaaccagtttttccaacactttaaaaaacaaatatccttttatcatatgctgaaagccctacccataacaagcccacttctgcgtttgactctgttcactgacccttcatttacttcctaaactgacccttttggtaactttcagtgaagaggtggctttaataaatatattctccagaaatctccagaacctttgcgtgggtcagggtgagaggtgccgccacgatgtaaacagaacagctgagtcctccgggtaggcgcctggtgttagctgcacagaccgcgtgtgtgggaggcatggagtcagaggcgcttcctcaaaatgcatccccccggtctccagaagaacacacaagccccacggccccctggagagggctggtcccagcgtatgcacgccacttcctgggcttggggagtggtacgccggcggcggaggatgcccgtagcaggaagcccacgcagaggctagggcctcttgttccacttggcagagaccccagaaggagccagggggcagcatcagagcctggggcctgggcaggggtgtccaagggcatagcagctgcaggccattggcaaggccagaagacggtgagtgaaaagccgggggcgcgtggagagaccccgagaaggggctgtgcagctgggagtcctgcatttgccggctccagagggcccaggtactggtggtgccggaagacgccctccaaggcgtcgacctgccccatggtgaaggcagccactgtcctctccggcgcaggccgatttgaggacctagcctccttgatgctgaccgcctgacggggctccgggtgccggatgtctggcccgggccagggaggctcccaggggagacgtcggcaggcctggtgtaggtcggccccgagcagctgctctgagagaatcaatccatggagccaaacctggagggctgctgccggccgcgaggtggggaggaggcgagacgcatggcggtcagctgggccttagggaaggccgggcggggctggccaggtgcattaagtgactaatgaaagatcagagctactgtgagaacagtttggggattgaatccacgcttgctaacacccactgctaactccagagagtgtgaaaagaaatattgaagaatcaccgcctagactgttttcaatatatcacttgctggtttttatttcctaatgattctcttatgaagcctttttcaaaatgactggcaaaagccaaaaaatattccattaaaaataggtgtgttttgataaataggaaaatagtagacattctagaaaagtaagatgagtgaaagtggattctttttaaagttgaataaactatgaatactatgcagcactaagaaacaattaattagttgcatatagagtctaagaatacattttaaaaaggccttattaggctgggcacgattgctcacccctgtcatcccagcattttgggaggccaaggcgggagaatcacttgaatccaggagttcaagaccagtctgggcaacatggcaaaaaccctgtctgcacaaaaaatacaaaaaaaaagccatgcatggtggcacatgcctttggtcccagctactctagaggctaaggtaggaggattgcttgaacccaggaggtggaggttgcaatgagccgagatcatgccactgcacttcagtctgggtgacagagcaagaccctgtctcaaaaaaaagggggggtgttattgaaaaaaaaaagtgaagaaacacaagaactatagcagaatattattcgttaatattaaaacaaataatatatttgtcaaggatacaaacatgtattaggatataacacaaaatagtaagtaccatggtggtaatatatggtggggaggaagtgagtgtggacattgagacaaatgagcaaacataaaatagtattttaaaaattaaataaaaaagaatggagccttgcataggctgctaatatgagaaataggagtaattgagctctctgcacctgaggtccaaaaagcaaataaaatatattattgttgacattctttaataaaatcaacttatttttaaataagtaattacaaatatgagtgataaatacaatcctgcccaatttataaatagaataaatctttaatttttggaatttagttacatttacgaaaatgattttataagacttcttttatttattttcattttaagttccaggggatacatgtgcaggatgtgcaggtttgttacataggtaagcgtgtgccatgatggtttgctgcactcataacctaggtattaagcccagcatacattagctatttt

SEQ ID NO: 1889068 - DNA, 4001 bp, Homo sapiens; identical to SEQ ID NO: 1564301

SEQ ID NO: 1889069 - DNA, 4001 bp, Homo sapiens
tagtggttcatgcctgtaatctcagcactttgggaggccgaggtcgcttgaacccaagagctggaggtggcagtgagccaagatcatgccacaacaatccacactgcgtgacagatgagcctctgccacataataaaaaaatgtacatttctatacaccaaattaaatggtttcaagtgatttagtaaggactgtattttcaagcatacaaaatccatctcgaagaacaagagaagattcattatatccagggacagcatgaagctgcaaactatactctcccttttccagccaactttgagcaaatgtttggtatcttttcctaatgttctctttgctcctgttactgctcatggcataggccacaatgcacacatagaccttctcccgccccatagacatactttcccttcccagcacctgggatctcagctgtatcctgatcttcttctgtctgctgcccaggtgtaggatcccgactttcagctgctggttcttctttttggggctctccattactgggctcctgggactggctgtgtggttctgtgtttgtgtgtgtctagataaaaagttttgttattaatacatgtcaataatataaatatacagaatacacaggtatgtcttattataagtatgtctagagacatttctccaacactaccccgtatacctaatcttcataacactattcttccctcagagaggttactcaaagacagatatcctcagggactttggaagccgttttaatcaatgttgggatgaatgtgtgtaatctgttctgaataagcatgaggaggaagttatggacaaaatctgggcacacacgatcatccacccacacaaaacccaaatataaccctctggactaatctttccttcatgggatgccatgatcattttttatcagcatgggagaccattatcagtgtatccatactagtccatcaacactatcagaaaaataactttctgctaagagaaaacatcgaatgttaagacattcacaagcagaggcacaatgagctcaggaggttgtgaacttcttggcataggcctatatgttgatcgtcctcatcaacacatacttcactctgcaagcagaatactgcgattgggaaaatgcacttgacaggacaactagatttgaccgctttcatggtcaaatgttaacttggacattttttttttttttaatttagaaatactctgaaagtccccgggcaagtataagtgtatgcaccttttgaatcgaatgcttgcaaagccacttaagtaggtctagctagctgagcgatgtcttaaggctcctggcaaaaaacacagggcatttcccatgaggttggtttcacaactggacactccatcagggagacaagtaggaaattacagctacagaactgaaactgcagtgaccaccaattttgtcacataatgatttgctaggcccacttcccccccaccccaaagtcacatttttaggaactcagggccccgcccattggaatctccacagtggagttgagaatttgctacacagcagtgggcactcctcacaggacccctatgccaggcactctacagacctcggggctgcggtcactagcccgcagcatgccccgtctccaggacccttccataccgctcatgccgtccctctcctggtcccgtctggggagtccagaatcttctgtcggggttccaggtgcttctgggactcggatacccccaacagcaccccagcttcgcctgagcccctccactcctcggccctccttcctccctagttatggccgtgacgagacaagaaggtccatgggcgtggcaccgcatgagagggacgacgacttcgagggccttctcactctgagtcactgaccacacaaccctccggaagcctgctggttcctcttcactctcactcacacttcaactcccagttggatctgcctgtggacctacccgccgtgtctcagtagcggagaaagaatccagacctcagggacccgagtcgccggctcacagctccgccgcgttccccacactggcgaaggggccgatgggaagacgcccagtgaacatgcgcactgaggtgggcaccaaaggagcatgcgcagtgaggttccctcgtgccttaagggctgtggtgcccctccttatcccgccttgccctgtcctatgctccttcccaggtccccattaacgactttggaatccctcctctctgtgtgtgggttcccccccaccaggactcaaatacctcaaataaagtcagccttcaaaactcactccatgaccgggcgcggtggctcacgcctgtaatcccagcactttggggggcggaggcgggtggatcatgtggccaagagatcgagaccatcctcgccaacatggttaaaacccgtctctactgaaaaatacaaaaattagctgggtgtggttgtgcgcgcctgtactcccagctactcgggaggctgaggcaggagaatcacttgaacccgggaggcggaggttacagtgagccgagattgcgccactgcactccagcctggtgacagagcaagactccgtgaaaaaaaaaaaaaaactcactccatgctcacctgaccctcctccccgctatggccctccttcgtcccatgcccgggaccccacaacagcaaggccatggcagtatcgctgagttttagtagaaagatgacgacctcagaggccatggaccaagtggcacaacccacaggaagccccccacgctccccctcacactcactcacacttcactttctgggaggactgatctgcagacctactggctaagtcatagtcagcacgaaagaaggaagtcacgacgtctcctttcacagttgtggagggacagaagttagagagcaaggcgcataggcagcaaggaactttcatagaaagggacatgcacattgagccagggacttttcagggcagggtagggttttccgctgttcccagacccgcatccccatggcgtttgtagtagaaaaagggacttgagagctttcgtctctctttgtccaatctcatgcattcagaaacgttgggaacagacagtcccttactggaggatgtgtctcaggaagaccttttgtggaagaaataaattattttcatatctttatttataaagccgtttttatttatttttttttccagacagagtgtcactctgttgctcaggctggagggcagtggcatgaccatacctcactgaagcctccatctcctgggctcaaacaatcctcccgatgtagcctccccagtccctgctactacaggtgcagacaccacacctgggtaattggtttatttattatttatttattttttagatagtggtctcactgtgttgcccatgctggtctcaatttcctgggctcaagtgatcctcccaccttggccagttttataaatgcttttattaatcactttgttctctggttctgggttttctgccatgcttccaataaacgtaattgaataaattcttctgtagaataaatacattcacacctgtttactcttttctttttaggttgtgttacttcacatttaaatctctggactggtaactgatttccctgaatatacctgtaggtcattcagacagtatatgtttcagaaatagccatagattctgactgtaggctctaggctcagttatgaccagaaaacaagtcctgccagtctcctacctcaaatgtatgtttgtgtattgacctgatccctgggacaagtttcccagactgaaatcatggtatcataaagctggacgctttcttgaggggatagagtaacatccatattttcaatccgtgtgtaaataaattaattaatggatgaaaagatgtatgcaataatgcaaagcagaataacaggtatttgattaatacggcatcaccaaattttgctttaacagatctgatcgtaattatttcagtctttgtgggtcatgtagtttctgt

SEQ ID NO: 1889070 - DNA, 4001 bp, Homo sapiens
agtggttcatgcctgtaatctcagcactttgggaggccgaggtcgcttgaacccaagagctggaggtggcagtgagccaagatcatgccacaacaatccacactgcgtgacagatgagcctctgccacataataaaaaaatgtacatttctatacaccaaattaaatggtttcaagtgatttagtaaggactgtattttcaagcatacaaaatccatctcgaagaacaagagaagattcattatatccagggacagcatgaagctgcaaactatactctcccttttccagccaactttgagcaaatgtttggtatcttttcctaatgttctctttgctcctgttactgctcatggcataggccacaatgcacacatagaccttctcccgccccatagacatactttcccttcccagcacctgggatctcagctgtatcctgatcttcttctgtctgctgcccaggtgtaggatcccgactttcagctgctggttcttctttttggggctctccattactgggctcctgggactggctgtgtggttctgtgtttgtgtgtgtctagataaaaagttttgttattaatacatgtcaataatataaatatacagaatacacaggtatgtcttattataagtatgtctagagacatttctccaacactaccccgtatacctaatcttcataacactattcttccctcagagaggttactcaaagacagatatcctcagggactttggaagccgttttaatcaatgttgggatgaatgtgtgtaatctgttctgaataagcatgaggaggaagttatggacaaaatctgggcacacacgatcatccacccacacaaaacccaaatataaccctctggactaatctttccttcatgggatgccatgatcattttttatcagcatgggagaccattatcagtgtatccatactagtccatcaacactatcagaaaaataactttctgctaagagaaaacatcgaatgttaagacattcacaagcagaggcacaatgagctcaggaggttgtgaacttcttggcataggcctatatgttgatcgtcctcatcaacacatacttcactctgcaagcagaatactgcgattgggaaaatgcacttgacaggacaactagatttgaccgctttcatggtcaaatgttaacttggacattttttttttttttaatttagaaatactctgaaagtccccgggcaagtataagtgtatgcaccttttgaatcgaatgcttgcaaagccacttaagtaggtctagctagctgagcgatgtcttaaggctcctggcaaaaaacacagggcatttcccatgaggttggtttcacaactggacactccatcagggagacaagtaggaaattacagctacagaactgaaactgcagtgaccaccaattttgtcacataatgatttgctaggcccacttcccccccaccccaaagtcacatttttaggaactcagggccccgcccattggaatctccacagtggagttgagaatttgctacacagcagtgggcactcctcacaggacccctatgccaggcactctacagacctcggggctgcggtcactagcccgcagcatgccccgtctccaggacccttccataccgctcatgccgtccctctcctggtcccgtctggggagtccagaatcttctgtcggggttccaggtgcttctgggactcggatacccccaacagcaccccagcttcgcctgagcccctccactcctcggccctccttcctccctagttatggccgtgacgagacaagaaggtccatgggcgtggcaccgcatgagagggacgacgacttcgagggccttctcactctgagtcactgaccacacaaccctccggaagcctgctggttcctcttcactctcactcacacttcaactcccagttggatctgcctgtggacctacccgccgtgtctcagtagcggagaaagaatccagacctcagggacccgagtcgccggctcacagctccgccgcgttccccacactggcgaaggggccgatgggaagacgcccagtgaacatgcgcactgaggtgggcaccaaaggagcatgcgcagtgaggttccctcgtgccttaagggctgtggtgcccctccttatcccgccttgccctgtcctatgctccttcccaggtccccattaacgactttggaatccctcctctctgtgtgtgggttcccccccaccaggactcaaatacctcaaataaagtcagccttcaaaactcactccatgaccgggcgcggtggctcacgcctgtaatcccagcactttggggggcggaggcgggtggatcatgtggccaagagatcgagaccatcctcgccaacatggttaaaacccgtctctactgaaaaatacaaaaattagctgggtgtggttgtgcgcgcctgtactcccagctactcgggaggctgaggcaggagaatcacttgaacccgggaggcggaggttacagtgagccgagattgcgccactgcactccagcctggtgacagagcaagactccgtgaaaaaaaaaaaaaaactcactccatgctcacctgaccctcctccccgctatggccctccttcgtcccatgcccgggaccccacaacagcaaggccatggcagtatcgctgagttttagtagaaagatgacgacctcagaggccatggaccaagtggcacaacccacaggaagccccccacgctccccctcacactcactcacacttcactttctgggaggactgatctgcagacctactggctaagtcatagtcagcacgaaagaaggaagtcacgacgtctcctttcacagttgtggagggacagaagttagagagcaaggcgcataggcagcaaggaactttcatagaaagggacatgcacattgagccagggacttttcagggcagggtagggttttccgctgttcccagacccgcatccccatggcgtttgtagtagaaaaagggacttgagagctttcgtctctctttgtccaatctcatgcattcagaaacgttgggaacagacagtcccttactggaggatgtgtctcaggaagaccttttgtggaagaaataaattattttcatatctttatttataaagccgtttttatttatttttttttccagacagagtgtcactctgttgctcaggctggagggcagtggcatgaccatacctcactgaagcctccatctcctgggctcaaacaatcctcccgatgtagcctccccagtccctgctactacaggtgcagacaccacacctgggtaattggtttatttattatttatttattttttagatagtggtctcactgtgttgcccatgctggtctcaatttcctgggctcaagtgatcctcccaccttggccagttttataaatgcttttattaatcactttgttctctggttctgggttttctgccatgcttccaataaacgtaattgaataaattcttctgtagaataaatacattcacacctgtttactcttttctttttaggttgtgttacttcacatttaaatctctggactggtaactgatttccctgaatatacctgtaggtcattcagacagtatatgtttcagaaatagccatagattctgactgtaggctctaggctcagttatgaccagaaaacaagtcctgccagtctcctacctcaaatgtatgtttgtgtattgacctgatccctgggacaagtttcccagactgaaatcatggtatcataaagctggacgctttcttgaggggatagagtaacatccatattttcaatccgtgtgtaaataaattaattaatggatgaaaagatgtatgcaataatgcaaagcagaataacaggtatttgattaatacggcatcaccaaattttgctttaacagatctgatcgtaattatttcagtctttgtgggtcatgtagtttctgtg

SEQ ID NO: 1889071 - DNA, 4001 bp, Homo sapiens; identical to SEQ ID NO: 1889069

SEQ ID NO: 1889072 - DNA, 4001 bp, Homo sapiens; identical to SEQ ID NO: 1889070

SEQ ID NO: 1889073 - DNA, 4001 bp, Homo sapiens
gagatcccgtctctacaaaaagttttaaaaactagtcaggcacagcggcaaatgcctgtagtcccagctactctggaggctgaggtgggaggtttgttcgaacccctggggtgaagactgcagtgagctatgatggaaccaccgcactccagtctaggtgacacagtgggcccctccctcaaaaaaattaaaacacattaaaaaaaagaaaatattttatgttgtaagtgcatttaatacaactaccctaccaaacgccatagcttagccttacctgccttcagagtgctcagaacacttttcatcagccaacggatggacaaatcatctagcacacagtcaactttataatgaggtgttgcatacctcacataatttattgaacattgtactgaaagtgaaaaacagaatggctgtatggggccgggcatggtggctcacatttataatcccagcactttgggaggccggtggatcaccagaggtcaagattcaagaccagcctggccaacatggtgaaacccagtctctactaaaaatagaaaaattagctgggtgtggtggtgggcacctataatcccagctacttgagatgctgaggcaggagaattgcttgaacgtaggaggtggaggttgcagtgagctcagattgtgtcactgcactccagcctgggcaacagaatgaaacgacacgacatctcaaaaaaaaaaaagaaaagttgtatgggtactcaaagtacagttttcgtttgtactgaatgcataccaattttacaccgttgtaaagttgaaaaatcttaaattgaaccatcatgtcaaaccatggtaagttgggaactgtctgtatccgcactttgtagaagttgatttgcccaaggggatatggttaacctttggctcttactgtgaatgatacaaactcctggaagtacttttctggggaggtgggtttactgttgaacatctccctgtaaacagaagctaatgaatgcatggccacattgtccacttactaggtgagatctgaagacagcacagaataataaaaaattctcactgcagatcctagactatgtccaccaggatctatccatcccgacaccgcctccgcccataaacaaccaactccaatcttaatgacgtccatgtctttaaataggataaacaggaaatgctgccacagggacatctgaatgatgtgttttaactcctaacagaaatacttctctctcttaagatgcgcccaggtgttcccttctctgaaatcgccacatgaaaatgaccaaagaaacttactcaaccgttgttcaaatcctgtactttatgagttcattggagtttcttaaagaggtcctcgtacggaactgaaaaatctaatcttggatctgggacagccagcctgcaagtttatatcgaagtttttgatgtgaacaattcaggtggttttaatttgcaagaatgaatgacagtgtttaggaaaagatttaaaaatctgaataaatgcaacccttccggcaaacgaatctctggtaatctgccccacgggatgaagtagtttcaactctacttttactgtatggaaatggtcagaactaatttttaaaatcagaaagaaatgactgacattccacacacacccagtcatgcttgaatcatggagttaaataggtcattttttaaacgcttgggacacatggatcaaaacaggaaaatatggcgaatatctagatggtatcagctaacatcctgcccttctggatctaattcccagattccaaatgggagcagcccgtcttctccctcccctctcagccacccatcgctcttagtctcctttctaatcccattgggcaaattatccccattcacttcatagcaactcctttggaaagagtttcttaaagcaagaatagaaaaatccatgcccaggcagatctccctcaaagcaaaatgcctcttacctcgggcgtgcattagaaaacacaggaacgcaagacagggaagtccccaccagctctccatggtttgcttcaggatgcaagaacctcagtggactccccagccaagcggattgtgagacccggcctctccaccctcctgttgttgacttctggtctcccagcttggaaggaagggaggcgatgtcttcaagtggaaaatatgagcggaactgccagaaacaaatgggctccaagctcagatcccaaactccacagctgaaaacctgtgggaccagtgtaggcacactcagtcgtgtgtcggagccagcctccccgggctgccccaaccaatctgcagcagcacagacgatggggaaactggggtggttcccaagcaccaatgggcatctcaggcttctggaagccggcacacttgcttggcaactctgctcgctgcgggtgtgggagctgtagcaagttcaaagtcaccaacccagaaaccagagaagacactggccgcctgtaatcttcctcctgcaggacatgattgtacagtgatacccagtgtggggttaatgtacacatcagtgcaaagacctcagttgaagtcttggcttttatacctaacaaactcagtgacttccaagaggcattttttatcctcagccttcagttgtctttgtaggtggcagaactaatatttcagcagagacggttgttcaggaaaaggagatatgtggctttttgtgtctttcatttaaatctgagacattttatgtaactaccaaaatttacatcttctgtttgaaatctccttggagaagaaacatgactggatagctgagttcgatgatgactcctgctttcacaatggttttaattatattcttccctgcagatctgtgagtgtgtctaatttatccatatacaactcgtgggttaacccttacactctacctaccatgaagcagtaggcaagcacttaaaaagttaccatttgcaaacagctttgaagtcctctggtaaatagattaactgcaggagaaaggggaaaatcagtcttagttatgagggcagcttctaaattcccagagaagcaggattcatggcaaacagacccaaaaggagaaataaaccttggacttttctctctgcaaatttgagcatctggagtgttaagtctgttcatgttgttgacctggtgtttgggagttgtcttctatgaaatatcttccttttttttttttgagacagagtctcactctgttgcccaggctggagtgcagtggtgtgatctcaactcactacaacctccgcctctcaggttcaagtgattctcctgcctcagccacccgagtagctaggattacaggcacccgacaccacacccggctaatttctgtatttttagtagatacagggtttcactgcattggccaggctggtcttgaactcttgacctcaagtgatccacctgcctcggcttcccaaagtgctgggattacaggtgtgagccatcgcgcctggactgcaacatctttataaaggtaagttacttggatggattaagttcctgtgcacacaggtgtgtgtgtgtgtgcacgtgtctgtctgtgtgtgtgtgcgtgtgtgcgtgtgcatgtgtgcgtgtgcatgtgtgttcatgtgtgtgtgtgtgtgcatatgggggaaatgctctaaggcagttagcttgtgcagtcctaagctctgagtggcagagtccaggaagcagttgatgcatttagaaagatatttccttcaaagtcccctgaccctaaagaggactgacaccgtgacatctgctacaaagtggatggacgtcaaaaactggatgctgagttagagaaaacagacacagaagaacgcattgtgtaggattccatttctctgaaatgtccagaacaggcaaatctgcagagacagaaagcacattgccggttgccaggggctggaaagacgtgggaatggatatattatgagttgcattttttctcccgcaaacttcatatattgaagcccaacccttcagtacttcagaat

SEQ ID NO: 1889074 - DNA, 4001 bp, Homo sapiens; identical to SEQ ID NO: 1564320

SEQ ID NO: 1889075 - DNA, 4001 bp, Homo sapiens
gggttggggggtggggggggaggtatacttagccttaggtgaggcaccaatacagaggaatggagggaggttcagaccacacagccagatatccagcactgcaagaggcagcactggacaggaggggacaaataagaggggacagaggtggaaaggctaaatgtccttgaaaagaccttgaaaacacctggtgtaccgcccactgggagacatacacgtggcccctccacttctttctcctgactggctaaagacagctgcgaagtgccatgctaattcacccaggtcttcgctgagtagctggacagtgtgtcatcagtctaattccatcttctgctctaattggctgtgatcaattccacccccatttctaattggttgggttatgcagcaatccagcactgtccatcccaccttttctcccgctctgcgtggcactaggcggcaaaacccgccatctttaacaatgcggcaagcccgccatgatgtccacgtgacaaaagccatgatatacatatgacaacgcctgccatattgtccctgcggcaaaacccaacacgaaaagcacacagcaaagacaaagaggcccgccatgttttacactgcggcaagaccttcagccgccatcttttcctgtgtgaccgcacatgtccaccaccatgctaaccacttaacaaagcctcgcccatcatgatgtggccttcccgccacttgaacactgcgacagaactggatccgccattttggacaacctaacaaagcacagcccgccatgctgagcaatgccgcaatgtcaaaatcgccattttaagccctgcaccttagtctttcctaaccttccatttttaactagtcccttgtactgataaaagatgattcttactgcctcccgatacaacaatcacgcaaagctcctaacaagccccaaatcaattcattcagataggtttagctcatgcaatgcacatgacttcctctgcctgacctgctatcatccatcttgcctccctagtttaacttagcacaaacgactagccctaagccgagttatgcggcaagtctaaaatggcggccacttttcctccacaatctgaacacgcccttagcttaactgcagagtcattctctgccaaagcggtaggtacactcacacaccaccaaatgatcagcagcaaaaaaaagtgtagatattccagagagtgcaacaacccacaaaaccaacattttttcatccataaaaagcaccgatgggcgatgaaaaaaaaaaatcaaagcaggtatccgcggccccgatgggccagaaaaacaaaaattaaagcaggtatccgaggccccgatgggcaaggaaaaataaaaaaaaaaaaagcaggtatccgaagccccgatgggccaaaaaaagaaaatttttaaaaagcagatatccgtcaccccgatgggccagagtgttgggggttcagaggggaagggaatcagcaggtatccgataccccgatgggctaaggaaaaaaaaataaaaagcaggtatccgcggccccgatgggcgaataaaaaagaattaaaaggcaggtatccacggccccgttgggcaaagaaaaaataataaaaccaggtatccgcagccccgatgggcaaaatatagaaaagagagtggaagagtaaaaaactgatccacaaaaaacagagatgtcaaccaaaaatgattccaaagaaaaattccttaaatattaaaaattgcctcaaaatattccaaatactttctttaaaaaaatatggaggacgtgtcaagaagacactaggagaaagtatagaatttaaaaaaatattttatggaatttaggtgatttttttaaagaaatacgccataaagggtgttgggggactagaaaatgttctagaaagaaccccaagtgcagagagatcttcagtcaggaagcttccagccccgagagagtaagaaatatggctgcagcagcgaattgcagcgctttaagaactgaagggggggctgagggcggagagagcataagaggcgtggcctagaagattgaaagccggacatctttgtgatttggttggttcaaaatttacccagtaaggacaaaaaagggaaatttcaagaaagcaaagacataccagaaagaacattaactggaagtagacttcatttctagaccaggagtcacaacttcaatgggttttccagttctcatctataacatggggacattgagtaaatcaagcaataattaatgctaaaatcctccataaactgcataataaatgtaaagatgttaattcagcttggttttgagaatgggggaagggataggtagagctttgatgtgttgataaagtatccaaatatatcattcaaaccagaatttgtaactcctccaccaaacttttgaaccaaagaagctagaaaggagtaatacattgaggttagtaccatcttcaagggacttcccattccattatcccatgtaatagataatggaatatgtattgcatagataataataaaggattattcctgttttatacattaaaatagagtcctatagaggttacatcatgtgcccgaggtcacacaccatgattcagagtcaatgtagtttttactccaacactctaccttgtatggctcccaaccataagagaacggaagtgcttacgagtcaattggtgagcaagagagaaaaaggaaagaaagacatttcatagaatggctatttggttcctaaataatcaagaaagagtactgtttgtgacctgtttgtaattttttaactatgactccttaatctttactattttcctatttcctccatgaatctgaggaacccaacattggaccaaccatatgacacagtagtgaagttgaccctctgtcagtaactgataagtggtaggaagaaaaagctcatataaaagccaaagctgccctcagaaacctggctatttcagtaggaagcaattaatctcataaactcttctatgtcattcgagaaacaacagagaaccagaagggagacaatggcaacttaagtattatagagcaacttctagaaagtcaaaggatacattaccctcccactggctgaactggaaagtgtaactatcgacccaaatctatcaggtaagcttgctcttcagtttccagaaaaataataaagtatgcaaattttcttccttaagaaataccttccatcttctaagtgtccttggatcaaacaaaaaaagtaatctgacttgtcattccaaatgagggttattgtattgtaaagtggtgcaatacaatggtacctttgagaaaacaatgcttaacaaagagagaaactacctacagtgacacctatgaagcagctatcagaaagactggattaccaaacctctaatacaactttatctactagaagtttctacaagtgtggaaatgttctatacttttaagaaatttggttggccgggcgcggtggctcatgcttgtaatcccagcactttgggaggccgaggtggctggatcacctgaggtgaggagtttgagaccagcctggccaacatagcgaaaccccgtctctactataaatacaaaaattagccgggcatggtggcaggcacctataatcccagctacttgggaggctgaggcaggagaatcacttgaatccaggaggcggaggttgcagtgaaccgagatggtgccactgcactccagcccgggcgacagagcaagactccatctcaaaaaaagaaaaaagaaatttagttggggaaaaattttctaaagactcaagtagcatcaaatataaaagattgataaatttgactctgaaattaaaaccttttgtttcacaaaaataccttttcaaataaaaaggcaaaaagacaatttataaactggttgtcctgggtttctgtgaccaggccctggttccaggtgggcagccacgctagcagatcactctcattggttgtcattggagttttttaaatggtaa

SEQ ID NO: 1889076 - DNA, 4001 bp, Homo sapiens
actcatacattgatttctgcatctgtcacccctgagacagtaagacaaagttcttctcttcctcctcctcctcagcctactcaagatgaggaggatgaagatctttatgataatctacttccacttaattaacagtaaatatattttctttatgatttccttaataacattttctttcccctagcttccttttttgtaataaaacagtatataatacatataacacacaaaatgtgtgtcaatcgactgtctatgttatcagtaaggttattggtcaacaataggctattagtagttaatattttgggaagtcaaaagtcatatttggatttctgactgtgcaggaaaggtcagtgcttctaattttctttttttttcagtagacaatgatgtcgtttatttaaaatgtttactccaagaaatatatatataaaaaaataagacaattacagcactaaaccaggcaccttcgaccaaatcacaacctcctctttgattccccttcacactaagcctctttcaaattctttttcctgagctggaagaccagtcagatgcccgcagggtcgcgccaagcacgttcccagccggacaactgtgtacctttctctaggagtgcgtgacacccttcccccacaactccttgttttaaaggatttaacctattaggaagcccatttttcaatctaagccagaaggaggtgcgggacaaggcagtcttcactttgaaggtccttttcctgctccagtccctgggctagggttctagaagaggctggctgccggatttacatgaggccaccgaagatccgagtccagctccgcccagggcggctcctgcaaaggctgggacctcgggtggtgcgtcctcaaccctctcggtgaccacgactcaaaggagagacctcaagggtgccaggagcacaggtgtctgggctgcattccaggaaagagacttctccagggaaatggatcaggctgtcacatggaagcttgagtcagagatggtggttatggggtgatttggacaaattaggttagtttagcaaagctctgaagtagcagaagcttctcccctggactactgattgaacacagaacaagagatgtgcgtggcgtcagactaagtcttagagagatgcaggccagtctcctcccacagggccttgggactggcaggacagatactgctacatgccctccaagggcaggagtcacggtaaggagcgactggggtggaaaatagggaaaaaagcaacaacaactagatcatttttggcattttaacatggagacagtgacaagtggtaacaatagcaaaagaaaaaaaaaaaaacttgaagagaccaataattaactttcccatccacccaagtctcacacttaagttctagtcccatctcccccataagcaccactgaactaaatatctattttaaagcacccaaaccagtccagaccctctggaaaccaagagccccagccacagctgtcgcctctcttgggtccgggcgagaggagggttccgggaaaggcacctcataactcaatcagcgcagcacacacggcggcggcgagctcgggcacaggcacttgacggggacgcgggtggcagtcacagcatctgtgctgacacgcgaggaaggggactcttcggtaatcccaactatttggtaccagagccaagcaaacgtgactaaagggagctgggtcagcagaacggtaccccgagtctcagcaacaggacggcccgcgcgaggcaggatccaagcaggggagaaaaagagaccaaagcacaaggcgatcgaggctggcacagaaaaggctgatccttcttgcaaggactggagaatgcatttgactgctggctgatcaatctctaattggcgagtgcgcgtcacaaggctcagccctggctccacagggagccacgaagctgacttaactgatacaaatgttcccacctctgccccacccccaagtccccatggttccaccatcacctgattttcatttggacttctttaacagctaaagtagatataaatggctaaacacagatccccaatcccccaccaggcgggacacggccaattctataatgttgcagccagaaggctgtgggcttacaggcagccaaggggagaaacagaacccacaccggcccaggccgatctgcaagaaaaagtgggaaaggagtgactcggatgcttccgaagcacgcgagcgtgattttggatggaggccggcgggcgactttgcctagctgctgccggttcctgtaagggacatttttttctgagtaaatggcgattcctctttcatgtagcatctgcttggatcacgatgctaattgtaactggaaaggggtgttttggggagtgtattcaggagaggaagaaagaaaaaaaaaaacctagattgctcaaagtttctgcctcttttataggacgtagagcacacatttttcccttaaaaaatatgtttttgctattgtgaacactgctgcaataaacatacgtgtgcatgtgtctttatagcagcatgatttataatcgtttgggtatatacccagtaatgggattgctgggtcaaatggtatttctggttcaagatccctgaggaatcgccacactgacttccacaaggggagagggatagcattaggaggtaaacctaatgttaaatgacaagttaatgggtgcagcacaccaacatggcacatgtatacatatgtaactaacctgcacgttgtgcacatgtaccctaaaacttgaagtataataaaaataaaaaataaataaagatatgttttgctatggattgaatatttgtccgctccgaaattcatgttgaaatgtgagttgtaacatactaagtaatgtacgttgtaacagtactaagaggtgggatttttaagaggtgattagaccaccaggtctctgccctcatgggtggaatttatgccattattaaagagtgaatttggccctctcttgctttcttttgccctcacgaaagctttcatgagatgtgagcctccaatcatggacttcccagccttcagaactatgagccaataaatttctgttcattgtcaattactcggtctgtgatattttgttatagcagcacaaagaaccctaagacatgtttcaacagagcaatttttagggaaatggaggaatcagagaataagggtgaaatatgtatctagactggttgaaatttgtttcatcagtaaaatccttttagctacatacacatggtcaagagtctctcagtttatagtactggccccttgtaccagtgtagaatgatgataacttgtttcaagaagccctaccacctcgtattacacaccttttgctttaggtactaatcttcacttcccaaaacaccagtactcttatattccaccacaaagcatcctacttaggattcccagtattttagtgttgactcttgtttctcacctctatcaaaacatgcttttcataaatatcatgcctttgagaacctaagcgaatagtttctctaatgaactcatccaagtttaagcactaatggcttaaagtttatccctctttaataacattgtgttttctttaagtacttacatcaaaaagataggcacatgaggtctagagtttgagaccagcctggccaacatggagaaaccccatctctactaaaaatataaaaattagccgggcgcagtggcaggcgcctgtaatcccagctacttgggaggctgaggcaggaaaatcgcttgaacccgggaggcggaggttgcagtgagccaagatcatgccactgcactccagcctgggcgacagagccagactccctgtcagaaaaaagaaaaagaaaaagataggcaattaaaagacattgaagacagagaaatatttgaggtcaggagaaaggtctctcaaaatataccatttgatttactgtctgtttcatctatgcctaaagaaatgccatttaatcaaata

SEQ ID NO: 1889077 - DNA, 4001 bp, Homo sapiens; identical to SEQ ID NO: 1564333

SEQ ID NO: 1889078 - DNA, 4001 bp, Homo sapiens; identical to SEQ ID NO: 1564337

SEQ ID NO: 1889079 - DNA, 4001 bp, Homo sapiens
acaggactgaaccagggaacctggcctccattcttgccataccgtagcatcacactgaggcccttggaaagtacttaaacgctgattatcaatgttttgaaatattaatgtgggcggccgggcacggtggctcacgcctgtaatcccagcactttgggaggccgaggcgggtggattacctgaggtcaggagttggagaccagcctggccaacatggtgaaaccccatctctactaaaaaaatagaaaaattagccaggcgtggtggcaagtgcctgtaatcccagctactcgggaggctgaggcaggagaatcgcttgaaccccgaaggcagaggttcagtgagccaagatcacgccattgcactccagtctgggagtgcaagaaatattaatgtgggcacacaagctatttctcatttttttttattgaaacaacattgcttagtttcatttacctttctgtgaaatgtctttctgtgaaagtctatcacagcctgatgtaatttttataaacaatgaatacatgctgttactatttttgaaaggaaatttaatcgcttggaaaaattcagactaaagccccgagaggaaaattatcatccagtgcatgctcagagatttcttcttactctacttttgtttttcctttttgaaagcatttgtgattgagagatgtctgagggaagggacaaattgcattctgggagttttaaagagttatgtcaggcaactaaaatacgtggcctctgtatttaaagagatttcacaccagtatactatttgctttataatttttgtgtttcttattgtttaaaaatgcctttaacatttagtgctgtgttaaaggatagcatgccagattccagattaatgtaaagactccactatttaacttttccctagtaactttaaaacagagtttgggttccaagttcagcatggaaagatagcataaacatttaaactaagtaaagtgcgaaatacacatttttgaagttggtaagtgctgtttaatcattttccccttctctcccaagtcttttgaaacttcaaaaggcttgtttaagcagtgtgtttaaaaaaaaaaaaatccatacccaattgggctcctctctattaaggaatgtggaaaattcatgatttatgaaacgatgacaccagtcttacatttcacaggctcccaagctctgaaacacgggtacataggaaaatacacagaaaattcctgttctttgcaacgtgcgaaacgtttcaaaatgcaactttgctcatctccctcccccgtacaaactaataaaatcagtttggctctgactgcttatttttaaaaagtagacggcctggtaggtgctctagggataacccttctccccccactccaccccccttcccgcacacccatttagactggcaagcccgttttcattttatttcaaagattttttttttttaagcgaaggcaggggacggcgggggttgctaaatttatcttcctccccagccacggggatgaagaaaacacatttactgcgggcgggggtctgagggcctgcaaacaactcgagctggagcctcggccaggaccggcgcgagaggcggtaggtctccagggaggcccccggggggcggccgcggcccacgggacatggtggggggcggccgggccgcctgcctctccgcggggtcggccgaccgcggccccgcgcgggctttacggccgaggcggcggcggcagcggcgcgtgtgtggcggcggcgggcgggagcgcggaggaggtggaaagaaggggggcgctgtcacggagactccggccgccggagaccccgccgcagcgaggccactgggctccccggtcgcggggcgggagcggcgccgacacggggtgccaggaggacccaccgggcggaggagggggcctgtctacccttccgcattttcctgggtctctctcccgggcggtgacgtgacgtgctgacggcgggcccgtgccggggagctgggccgctttttgtcagctccgagctcggcccctcctccctccctccgcccgccccaccagccggagcccggcccagtgctccagagaaaggccggcctgcagcacccgccaccgtcgccggccgcccgcacgtccgtccggtgagtcccgggtgccgccgcggccgcggggcctagtgcgcgcacagcggcctggtctcggcctggtcggcggcccgcaaggcgccctcccgcgctaggccgggcggcgtggcgcgcggcgccgagcaggccccgaggaggccgcagttaggcccggggaggagcccggctgccccgagcggcggcggaggcgcgctccgtaagcgggcgggggttgggggagggtcgcccggttgtgccggaggcggtcgaggggccccgggtcggctccgcggccgacctggggcaccgcgccggggtgaggcctggcgaggaggcgaaggctgcaggcgtgaggtgaaggccgcaggccggccgggccgattttcgctatgtaaatatcggtgagggggggggagggacgggggacaagatggcggcggctcggcgcctgctgcaggggacgatagagggggttgccgggagggggagccgccatcttggaggcggtgtctggagagaaaattccgctacagcccgtgagggggggtgggagagcgggcggcggcggcagcggcgccggtgacgggccccggaggcccggcgcggcggcgtgtgcgcgcggaggggcgtgctcgctccccgtggcggccattgcccttgccgccatgatgagcgctcgggctccaggcgctcggcggcagcgccaccttcctgccttgcctcccgcagccccgtgactggctgcagtttccgctgcgtttcagctgagctgccgcaggcggccaccgccgccgcccggacgccgggaccgtttcaccctcagcgcccctggccctgcgccttcccccgcgcctgtagccacccgagggcagtcggggcaggtggcattccggacacctgggcttaccagggcatacgggaccccaggaaatgttatttttgcttaagtcaaatcatatgtggctgctaaggtgctttcgatgcagttgtttttccaacaatctttgccgccccgagtatctgaataaaggaagaaaaataaagattgatgggaaagtttttgccattcttttgtcctatagggaaaaaaattgcacaacacgagagcggaggaataaaattttgaatcattcgtactcatttatgtggaaacaactttcttgaaaaacgatttaagtagtgatctgttggtggtatttttttaaatcgaggaataagggcagacttttttattttcttattggaggacaacttagtgtggtgcatatttattgtgcatttgcctgtcatggtatttcgatttttcatttgtgaagttttaaggcggagtttcatcccctaacgtacttttttgattgcacactgtgcaactttcttgataaactcggagcctactgttagcgatgcaccgtgctagatgctaagaaacattaaaaaggttcttgtaatgcagacggtggctgcaagaagtctcatgtttagaggtaggtggggcaaggtgaaatgcagtaaagtgagaggtacaactaattactgggatttccgagggaagcaaggttgccattggaggatcagggagggacgggttcctgaagtattaataggtggcattttgagaaggttaccgagggatgggtaggactttgttaggtagaggtggaggtggagaaaggacgtttcaagggtgaagcttcttcagtaaacagtaagtatttacagtttggcaaaagtggatggtataggtaggggagtggtgggaattcaggctagaaaagttagattgcagaagggcttgcttgccaggtggaggggcttatactcaatggggtaggcagcgggggtgccctcaactagaagagtgatggcacacctgagctgc

SEQ ID NO: 1889080 - DNA, 4001 bp, Homo sapiens
aatattttcaacatcacaaatatggaatcaatttgctcaccctcaaactgtctcagccctcttcacagaataaatgtatctggaagaattagcactactttggtgttgtttggtcattaaatgctttatagaattctcttgtgaatttatttgggcatggtgcattatttgaagggtatctctttgtcatctttctctattttttccatatttttctgtttagattatatatgcatttatgtatttatttattttgagatggagtctcgctctgttacccaggctggagtgcagtggcgtgatcttggctcactgcaacctccacctcctaggtttgagcgattgtcctgcctcgccctctcgagtagctgggattataggcatgcaccaccaggcccggctaatttttgtatttttagtagagatggggtttcaccatgttggcaaggctggtctcgaactcctgacctcaggtgatccacccacttcggcttcccaaagtgctgggattacaggcatgagccacagcacctgacctatatatgcatttagattgagatattgatatatcaatatatagatgtagaaatatggactctttgtaatttttaaaaatcatgtatttcctcaaggttcttaatatatttgcataattttgggtaaagtagtctcatgattaatttcctttatatctgtggttatttctccaacatagttctcatagagtgtatttgtgattttttccctcaattaggtaaataaatgctaatattttatttcttttactctccctcacctgtgttgcagttcatgcattttttgccgtttttctattttctaattatgcatttatgcttttatttcactaaaatccttccatctgcttttaattttttttctttttctaacttctttagtttaatgtataattcaattaatctcactctttctggtttattataggtatatttggattatgtatcttaatctgagaactactttagacattgtggtccaatctgagagtattctgtttttcagtaggtaaattctgttgttcagcccaattttgtttgtcagtataacaaatctatttggtcttaggactcccagcatatttcctgttgtgcatcctgttttcattgctttattgtcttttgacccttcatcttgtggtcctgatttcacttgtactgttttagatgtgttacttttgttccagggtataacaaagagagggagtctcccagtgggttttcaggaagctaagcataatcctgatatccttaatcttgataacccataatacctggaaggtgggagtttaagctgcaaagaagcatgatggtaggccagtggctataaatgttcagagggcatttttacctttccacttagtgccaagattttagatggatgattcccttatcgtttatctcagttcactttgtacctctacaacagaatgcctaatattggtaatttatgaagcatagaagtttatttcctactattgtggagggtgggaagtccaagatcaagacactagcatttgggctggtgagggccttcttgccatgtcctcacatggcagaaggcagaagggcaagctaataagctagtgagctaactgaacacttcgtgaatcttcttttaaaagggcattaatccattaaggagggagcagcccttgtgacccaatcacctcttaaaggcccatcttaatactagcacattgacagcatctgaattttggaagggacacattcaaaccatagcacagtcccttgggcagaggtggttttatttcaagctcattctttcactgaaactgaagccatttttgttcccagatttatgtcagcagtctttacccaccttgagcaggccatgttcttgagaattgcagcttcagtaatcttggtttggcagatactctcaaagtgaaggggtagcaatagtggatgcgtttgtgtactcccaaaattcatattttgaaacctaattaccaaagtgatgatattagaaggtggggcctttgggaggtgatttgatctcaagggttctgccctcatgaatgggattagtgacctaataatagaggcctgacggagcttgtttgccccttccaccatgtgaggatacatcaaggagatgccatcaatgataaatgggccctcgccagacaccaaatctgctggcaccttgatattggatttgtcagcctctagagtcgtaataaagaaatttctgttgtttataagttactcagtttatggtatctttgttatagcagcctgagcagactcagacagtggagtgtctgttttgttgaggttgctgtggccgagcttctgcggtctgatttcctgtgaagtcagtgcttgcagcaagccacaggaacagtgaagaatttcctaaaaatctcccagagtgtggatggacattgtttttttgtttgtttgtctgcttgttttgagacggagtcttgctctgtcacccaggctggagtgcagctgcgcgatctcagctcactggaagctctgcatcccgggttcatgccattctcttgcctcagcctcctgagtagctgggactacaggcgcctgccaccatgcctggctaatttttttttgtatttttagtagagatgggctttcaccgtgttagtcaggatggtctcgatctcctgacctcgtgatccgcccaccttggcctcccaaagtgctgggattacaggcgtgagccactgtgcccggccagacattgttttttcatgttcagcaaacctttgttgagcatgtactgcatggcagaccccattgagttgttttttttgtttttttttttttttttttttttttgagacggagtatctctctgtctccaggctggagtgcagtggcatgatctcagctcatctcaacctctgcctcccgggttcaagcgattttcctgcctcagcctgctgcgtagctgggactacgggtgcacgccaccatgcctggctaatttttttgtattttagtggagacggggtttcaccatgttggccaggatggtctcgatctcctgaccttgtgatccgcccacctctgcctcccaaagtgctgggattacaggcgtgagccaccacgcccagcctattttgagtattctacagtgaacaaagcagaaaaaatagttcctgctttgtggggacatggataataaaaaggtgatacatagatagttataggtttctgttgtgtgcatgtgtgtgtctgtgtgtataagtattcatcctctggtgatgaatgaaagtaaatcaagataggggaacaaggaatcacctgtggatgtggggtgggcagggaaggtctcaataatagggtgccatttgagcagagatccaaaggaagtgaaggaggatttgaagtaggtcatgccaggcagagggaatagcaagtacaaaagccctgagccagaggattagctgccatcatgcttctttgcagcctcaagtcacatctccagtgtatcagcaaaacacctcaaggatttacttgaaatggtcccaggttgtagtgacccaagatgcctgagagaagtaaacataaatccactttggtgtaagccacctttcaacccacagataaaatttcaaaatataggaacccacagtgtaaaaactcatagtgcacacaagataacaagacacaaaacactattagcaagattcataaaaaacgacagtcaaacctatacaacttcagatatagaagttattagacatagaccgtttagtataggctgggtatggtggctcacacctgtaatcccagcactttgggaggccaaggtgagaggatgacttgaggccaggagttcaagatcagactggataacataatgagaccccatctctatgaaaaataaaaaaattagccaggcctggtggtatgcacctgtagtcctagctactcaggaggctgaggtaggaggattgcttgaacctcaga

SEQ ID NO: 1889081 - DNA, 4001 bp, Homo sapiens
aaaaaaaaaaaaaattggctacatgcagtgtttttatcacattaaccggtattatggtgaagttaccttttgaaaagtcatctggcgaaaacaactgttaacatcagatgacagtgactttgacaaagcattatactactagggtaaaaatgactgaagagattggcgcaaaatgaggaaaggggcttcgtttctgagaataccagctccactcaacactggatactctcctgcctatggaaatccacaggggcagttgcagagagtgctgcatgtttcatagtgttgggataggacaatgaaaactaacatttaccaggtgcctgccacgggctattcctgggcttgaggctctaaagatgtccctttgaacaataacaacagccatctaggttaggtggtccttagctatggcagaaaagaggggactgaggcccaagaagctagtaagtggtggattccagtcttttcttccaatggattagtagacaccaatggcccaggaagggtgtttcttgatttttgaatactaacatcatgaatagcaaatgctggcatggcaataagggcatgccctgcatctggtcacattcaaatcatcagtcccttctctttctgcataaacacttgatcttacagaatcaggatatggagagatgctggccagggccacagatcaggtgcttctgcagtttgcaatttctttactctcctcaggacatattaaccctatcatactattaacccttttctgcctactgatagtgatatctgaaaaggttatcaaatcacctctcctctagaaataaataggttggtatctctaaacctggccatcagtaacacatacacatgaaattctgaatgagcagtaattcactgctcacatgtccaagggaaaacaggctcttttcctgggacttgtacaggaggcttggagagagtcacttcccagggtctggctgtattgagtttgcagatttaggttgtaactcatccaaactatctggggaatgcaagttaacctgagaggagaaagagaaagaggaaaaacactcatgttcaaatggaaattaaatacgtgtctgatagattacacaaatgtcttggacacatctatgaacagtgtctggcaccagctggctctagcacagaagggtttgctgtgtacctgagggagactctgtcatacttgacccaaagaggcccgcttggtgaccaggcaggcatagtaagcatggagaacaacacttgttctctttctcccagacccagacaggaaacagaaaactttcctcaagtttactacaggcctttttagcgggccatgttgccactggctggcattctcagagaaaacacctctccgctaaaaagtaaaatccagattctcccagggtgtctaagatcctaggaaccggagccccaccactgggtagagaacaatcagaatgaggctttcttccctcacttcgggaggttgctggctctgaagcccggctccaaagcccctcttccaggccacttccccgactgagccagacctgttgctcttaggacgctctgagccaggcctagggccccgctccatgtggcctgcctggaccctagagggccgcgctctggagctgccacagatgccagaggcgcgactctttttcctattcctaggagcggaagacagaaacagtggccttggggacagaggggtgggaacaccccacgtccactgcaagagaacgaagtggaagaagggatttcggcttcggagccggcaggggcctgggcactggaaagcccgcgcggagttctctcgcctctcgccgcccaggtacgcctccccggaccttttgtacgacttaccgttggaaatggtcacacattccttctccccttagagcgaacactgtcataaccactgaagcgcgggccgaggagcgccacatcggccacaggctttgttgccccgccttcaaagccactgcgcgtgcgcattgctttgacttcacgttcccagggggctgtgggaagcggaaatgctcggctgacccggagggtggcgcttcgttcacactggctgttgtcatccgcccctgaggtttcaggctgtcggcagtgaagtaagcgggagggtgaggtggtgatggttttgatcgggggaaggggggacgggaggaatgacgggagtttacggggccgtggggtcatggggccacgggtgagcgtccttgtggggattgagtgacacaggcggtgggcgtgagtgttgggggcgaggttcggggccagcgagtgactaattgattgagtcactcagcgcttgtatcctcacccggtggtaactgccagacactcttgcaaatgtttcacattagcaggagccctgtgaggtgttacgatgattattttcatgttatagagagaaaacggtacagtgtggcttggcaacctgtccaaagtcccgtaggtagcaaacccgaggaatcctttttctttttcttttcctgtactttgtttatcatgtttattgtttccagtgtgtctcttcctccagactagaaatctggagctgggaatttgagattttgttcactgatggatttgcaacacggagaaccggctcatggaaggcaatcatttcttcagtgaataaaagtggcacagcagccagtcagttgattccaaagcccggactcaggaaggcagggtttcgctcactgaggataattgagctgtgcatgaatgttaactcttaaaactagaatgaggggttgtccctcttctgttgggtaaaaacctttgggtttcactcaacttcactgcatggaagggagcataggtgttgctaattgaatctcctgtggtcattgtgtttccagggtcagagtgcagacctgagaccactgctcaccgatttcagactccagtttatctgtgcctcggcttccccacttagtcgcagaagacttaggctgaggccccaggaagaggtgagttccctgggtcacaggcagagatctagtgctatagtgatggccccaactggggtgtgtttgtctctgaatcccttggtcctgccgccttggacacaagagaggtacgctgagctgaggcgagttggaggagaagcctcagcaagagcccagacccagatcctcagagcaaaggaggctcacgggacagcaggtcctagaagagctggacccgtagtggcctttgtccctcacttcagctgagacagagcaaagctggctctacttccaggtgccatggaggaccatgtgacagtgcagtttgattcctgctggaggagggacaggtgaaagtcacaggtggatggaggcatggatgtcccccatgggggcaggtgccctgctgtagtacctgcaaaggcgggatgaggctgggaaggatcacagccagccacagaggattggcctctcctagcacacctatttgtgcacccccatgcttccttctcttgccattggctatttctgaatttgagtcagccccacaccatcaaccaggcacctgcttccaggggaaatgctgagtgtccgttcatcctgaccaaagtgcagaaaatatatttttagtttatagaatttcagagtagtctctaggtatgctgtcatccagctctgctgccttatttcaatgcttaatgaaagtgggccaggggacatgacctgctaagctacacggagctgaaccctgttgtcctgatggtatcacagtgattgctgcagtatgaaatggttactctgcacagaatctccttgctggaactttcttttgaaaatctgccaaagaaggaggagcatggcaatcaaaatgcaaatcatgggaaaggaggaagtggtggggtgggagcagggtaggtggccagttagagaggtggatgcagggaagcaggcacagtggttttcagcccctcacagaactgacagtgcttggctgttacccacccagccccacacctctccttccctgcggcc

SEQ ID NO: 1889082 - DNA, 4001 bp, Homo sapiens; identical to SEQ ID NO: 1564368

SEQ ID NO: 1889083 - DNA, 4001 bp, Homo sapiens; identical to SEQ ID NO: 1563134

SEQ ID NO: 1889084 - DNA, 4001 bp, Homo sapiens; identical to SEQ ID NO: 1888721

SEQ ID NO: 1889085 - DNA, 4001 bp, Homo sapiens
atcacctatggtcggaagtttgagaccagcctggccaacatgataaaaccctgtctctactaaaactacaaaaattagctggccttggtggtgggcgcctataatccaagctagttgggaggctgaggcaagagaatcgcttgaacctgggaggcagaggttacagtgagccaagatcatgccactgcactccagcctgggtgacaaagcaagactctcgtctaaaaaaaaaaaaaaagaaaaaaaaaacacttgccaaagagcatagtgctaagggttaagagctttagaaccaatgtctaaaccataaaatgatcctatttagtggggaaaaaaaagattcagtcctttcaatatgtactcatttaaattacaaagaactgacataaagggaaagaggcaaacccagagaaataacctcagtggagagtattaactggtcagtcccaggacactggcatatcactgtcagagggaatagtagcagcaagaaatgaaggcgcaatccacagaatatgactggttagctaaggcacgatttatccttaggacaataatgtccctagtgttctttggtcctaaagatggatgactgttcaatcttaacaaatgaaaaacttactgaggctggagggccctaaataacttatccgtaaggacaaaactcaagctcaaacgtagaagtgcacagagaaggcaattgctggtctaatttttccacttgaaatcattattttctcacgccgtatccttgaggaaatttggaagacttccctaatactcctccctaaataacagtaaaaagataccatttcagtcctagaaactaaattcacaagaagccttgaacccagtttctcttacctgcagtaatcttttagcacgttttaaaatttcatacttttttcctatatcccactctctactatgaaattgacctccctggtgtgaggtcattagttcccagaagaccccactttcccttcctccaggagcccagaataggaagagagagaaaaaaaaaaggtaggttggctactctcaggtctccaactcattgttagaaactaggctttgacgctctagttttgccacgtagtgaacaaatctatctgccttgggctaatgtcttcaaaaagtacttttacactagtcacagggctgaagcaaaactaccagagagggggaagggaagcaggtgaatgaagagactaatgggagtggcttgcaagccaggtactgtgccctacaactctcgcgctgccacaaaaagccaattaacgaagcaaactgttttatcttttcctctccccagaagttcgccctagaaatcaaaaaccactgaagcttaggagtggcaaacatcggttcccgttccgatgtttgttcccacactattcccagtttctagttctcatggacgctccaatgcccagggttaccgccagctcggctccgtgaggccgcgcagggggcaccagatcctcggccacctctattggttttccagccttggaccgcttgcttctcctaaccccaaaactccagatgtgcgaaatggctccgctgtgcgacccagcagttagcggcaggagggacagagggatgatgtcaactcgttttgccagccgagcacgccgtcgtggcccggcagccctggtctgcgggccagccctccgcaagtgacttttaaagactttctagcctcgataatctgacatagttccgacctcaccccgcaccgagatctgggtggggtgggccttccctctcaacccctctcatagcatcccaacacctcaggagaggggacgttccgcccaggcactgcgagacagaactcaagttgctgacttcccctaacacacccagtcttacttggtcctcgtagagtaggaggattcccaaagcgatcttctaccaaccgagcccgggagctcggtgtcagaattgcctacaaatccgaccgtccagtcctacccgcggcgcgcatgcaaagtgcaccgcaagttcgcgctctctcggaagtgtctatagcttccggaagggggaaggagagggagcaaggcagaaggaggctgcctaaaaaaaataaaaagtaaaaagtaaaaaactcttgcgataaaagtctattgtattcctgtcatgatagctagagctctgaagaacagaaattggtgttggaggaaggtgccagaaatggtacggagcgacccctactggccctataaatctacccctgtggcagttactattagcattaaaagaccctcctttcttcaaagcaatagtgccttttcataaccttcccccacctaaaatggtactcctccccacattctgaaatcacaaggacaaacaacacctcgaagttgtgaccccggggccggacgcggtggatcacacctgtaatcccaacactttgggaagccgaggctcgtggattacgaggtcaagagatccagaccatcctggccaacacggtgaaaccccgtctctactaaaaatagaaaaattggttgggtgtggtggtgcgagcctgtagccccagctactcaggatacaggcaggaaaattgcttgcacccgggaggcggaggttgtagtatgccaagatggcaccactgcactccagcctggcaacagagcgagactctgtctcaaaataataaataaataaataaataaataaataaataaataaataaataaataaataaaataaagtggaggcctctgaatctcttggtgatctcacatgccctgctcctggcaccccaatctggagccctgatctgaaactctttacctagcagttcctctagttgcacataaacaatgaaaatatagtttagcttcaggttttcaacattagcaaaactctgtatccatgcaaatcaatatgacaagtacgacctaaaagctctatctgccctgtgtcgatgtacattaatcattcccccccatcatctttgagatcactagttatgttttctgctaggttaaagatcttcggacagacttgccgccgaatctaatcgccaggagtgagcaggcgatgctggttggggtgacagggtgctaaaaaataaccaagggagaacagctcgattattaaaacccacaacgactctcactcgacaaaaattcatacaatcccttggcagaatgtactggggacaactgccaaaagcagtctagatagctgtagaccagggcaatttgtccacctcagggactgacaaaagaggccagtcactctgaccagaacgtcttctcatggctcagctacctgtgcctcagcaaagaacagactttccagagggaatcgggaattctggccaaaaacactgaagaaaaaagtcagtatgagtggtagccaaacttggcctcctgccattctgactagatccctagcagggctgagacataacagcaggcacaagaagccctgatgcaggagggtcccctcttgcagagaaaagagctcacctgccccatgtgtggtcctcaacgcactcatgcacacatgagaattgcactgaggcctaataaaggaccttttgggcaggcacggtggcttaagcctataatcccagcactttgggaggctgaagtggggggaatcacctgaggtgaggagttcaagactagcctagccaacatggcaaaaccccctctctactaaaaatacaagtatcagctgggcatcatggcaggtgcctgcaatcccagctacttcggaggctgaggcaggagaatcgcttgaacacaggttgtggaggatgcagtgagccaagattgggccactgcactccagcctgggcaacagagtgagactccattgcaaacaacaacaacaaaagggacttctgagctccttcaggcctggggctggtgggaggtggggaacaggggtgaagaaggggctattgtatgagataccacacctcaggcgtaaacgcacaaaagcccttgcccctcccatgtttttcaaaacct

SEQ ID NO: 1889086 - DNA, 4001 bp, Homo sapiens; identical to SEQ ID NO: 1888726

SEQ ID NO: 1889087 - DNA, 4001 bp, Homo sapiens; identical to SEQ ID NO: 1563279

SEQ ID NO: 1889088 - DNA, 4001 bp, Homo sapiens; identical to SEQ ID NO: 1563285

SEQ ID NO: 1889089 - DNA, 4001 bp, Homo sapiens
gatctgagccccaggctcacacctctgcccacaggccccagcagctgcttcacctctgactccatcccccaccaagcactgcccctcaccagctactggggtgccactagtgcccctacatggtgctccctctctagacccttgggtccagctgtagcttccttctggaagccacaccccaagaccccagccctgctctagggacctgtatccccaacttcctgcatccttctccctccttctgggaacatgaacttgccccaccagcctgatgactcctggagggcaggacaccagggccctggaccatggcaggcccgggagtgtctgctgacagtgatgctggagctggtgcccatgtccacatgatgtccatagcacagtggccacctgaggctgggcgcatctgagtggtgactgcagagtggggcccttacctctccctgagtgaagttcaccaggtcctcccctgtgaactgcccccaaactcacattcctgttctgtgcctttgccaggaatgttccttttgcctggaataccactccccattccctgctccagatggcctgtgctcttcagagcccagcccaaacactgcctcctcccatgagaccttcctgatgccagatctgctggctcaccgtgggccccacgctcagatgcagaccagaagggtctccgaaatgagcagtgtgggagagtaaggctgagagtgggcaaggactggcctgaggtcacagggcatgtcagtgagatctctggaaggcctgtggctggtctgtggggttctgtggggttcctggatgagcagaagcccttgacagaccctcctagtcctggtctgggctctgagaaaaaagcagggtacacaggggtctgaggggcagtggcctgtctccacggccagcaatcccaaaagttcaggacccgtgatgccttcccagggaactgactgcaatgcagattctcgggctccacttcagagattctgtagggctgggtggggtccaggaatctgcatgctcagccatgccatggacatgagtgggcaccacctctagaggcacacacaactccccggaggatgggtgtacagcaagctccccagaaactcttgggaacacaacatatatgggagcacatctgaggcacgtgcacacacgcaacctgggaccaccacaggcacagcccaagtcacatgtgttcccggcagggaggctgggaggaaggccctctacctggtccacacccccactcaccacccccagctcctcacctccagctggtcccttctgatctcagctgcctctcccaggaagatgtagatcttcttgtgccaggccagcttcagtggggctagtgggccctctagggcaatggtcacttgtagagtgcaccgtgtgcactgtctgtgtgcactggccccacatccattgagaaggccccacatccattgagaaggccccacatccattgagaaggccagggtgttgcgggagctgaggctgccattgtggccaaagagaacggccccaaccagcaggtccttctgggcgaaggctgtgctggctgagtggcctggagcaactgtccccagcaagggctgtctgtgatgtggtagtggacctcatccccactgcggatgtcgaggttggtgcccaggtggagctcggccatattgatggtaccctggtctccttgagggaccttgaggccggagccattggccacatagaggtaaggctccaaggcctgcacctccagcaccaagatggcctggtgctgcctgtcggacacatgcagcaggatccagccatggtcagcctgagtgcgtgaacaggactcgcctcttcctgaggcccctcctggatgaagcagaagatgggctgcatgggctcatccgtggccatgatactgccagacaggaggtccttgtgggtcagcaccagctgggcatccacaaagcctgaatcagcattgctgaaggccatgttgtgtggagtcagcagctgccacctaccccaggccacatggaagacgcagctgatgctctgcacaggggcgtggtcattcacagtctggatggccactcagaagacaccccgtacctcctcccaggccacatcaccactgctctggtcctggtggcagcagcaaatggcatatcatcttccgtgatcttggagtcatcatgctgctagaccggctggccatgcaacagatctccattggtgaaggaagtcaccatagtggtcttgtcctgtgccccacaccaagtcaacctcccatggcggggccactacatggcctcatagaggtacctggcactgttgaggctcttgacgaagagctggtcagcagagaggacacacccaccaccctcgggcaccaagaggacattggtgaggacaggcatgtctgggtcaccgccagtatggatggagaaagtacagagtggggagaaatatagtggagctgtgacatggaaacagaaggtgtcctccactgccactgaggcatgtgccatggccctataggtcacctctccagcctgtacatcatcctgggtgaagccctgaccatctgacagtgtcgtgccctgtagttgaaggttgcctttcctgggagcctgaaccacctcagagtggaaggttggggggcttgggcctgcctcttccagggtggcctccaggtgggctgtggtgagggcctctgctgggtgttgagtgtgcagtggccgcagctgcagcatccacacagtggctctctggatggtcactaggaaggacagattgctcaggatttcccagctcacctgcacctgcagatccaggttcttcacggtgtcctcggcatagtgctgtgggttagtgctcaggtacctcatgtggccctgctccacatcctgctggtggaatgactgtgtggcccaccactcagcaccctccaccccaccagccccctgcttctgcacctccctgaactgcaggcctctggtgacacagaacaacacagtcacatcctgccccacggtgctggtctccaccgacaggttggtaggcaagatgggcatggcagagtcctgggccagatgcagccctgtgctgcagtggatctgtatggccggctggatggccaccaccttcagcatggacggggggctggcctgcagtccattgctgacccggaacgtcaagtcctatgcagggccactgcagtggacatagactaggctgtcggcctccaactcccagcaggagaactgggtcaccggctccccagcctggtctcagtgctccacagggaggccagaggaggtgccaaggagctggaaggtgaggccctcacaggcagagtccaggtcataggcctggaaaacctcaggccccagaggcttctgtgtgtgttccaggatcaccataaggctgccacatgggaagatgatacggggtgggtcattgacagggttgacctggatgggcaggaggtcagtttggcccctccgcaggcatgaaggcatgggcacccaagccatcaccaacacctccagcaccagggccatcatggatgaagcagaccttgcagttcaccatgtccaggagggtgaacatttctcatgcctgggcacccaggatgtccagctcgagttcactgtagtgtgcccctcaggtcacgctgaacagcacctgggatttatgcagttcagcctccatcagggccagcatgggctgcacatgccaccactcggctgtgccaccctcggtcaccaccactgggctgatagtcagcagctgggtgaaattggtaaagacaggaggcagccctggctcaagcatgcatggctcagctagatccatggacagccaagccctgggggccagggtggagaaagcttcataatggccataggtattgtcctcatactcctccacctcctccagtctgcagcctgccgccatgttgtgtgtcagcaaggcttcccgaagcccccacctctggc

SEQ ID NO: 1889090 - DNA, 4001 bp, Homo sapiens
tgatctgagccccaggctcacacctctgcccacaggccccagcagctgcttcacctctgactccatcccccaccaagcactgcccctcaccagctactggggtgccactagtgcccctacatggtgctccctctctagacccttgggtccagctgtagcttccttctggaagccacaccccaagaccccagccctgctctagggacctgtatccccaacttcctgcatccttctccctccttctgggaacatgaacttgccccaccagcctgatgactcctggagggcaggacaccagggccctggaccatggcaggcccgggagtgtctgctgacagtgatgctggagctggtgcccatgtccacatgatgtccatagcacagtggccacctgaggctgggcgcatctgagtggtgactgcagagtggggcccttacctctccctgagtgaagttcaccaggtcctcccctgtgaactgcccccaaactcacattcctgttctgtgcctttgccaggaatgttccttttgcctggaataccactccccattccctgctccagatggcctgtgctcttcagagcccagcccaaacactgcctcctcccatgagaccttcctgatgccagatctgctggctcaccgtgggccccacgctcagatgcagaccagaagggtctccgaaatgagcagtgtgggagagtaaggctgagagtgggcaaggactggcctgaggtcacagggcatgtcagtgagatctctggaaggcctgtggctggtctgtggggttctgtggggttcctggatgagcagaagcccttgacagaccctcctagtcctggtctgggctctgagaaaaaagcagggtacacaggggtctgaggggcagtggcctgtctccacggccagcaatcccaaaagttcaggacccgtgatgccttcccagggaactgactgcaatgcagattctcgggctccacttcagagattctgtagggctgggtggggtccaggaatctgcatgctcagccatgccatggacatgagtgggcaccacctctagaggcacacacaactccccggaggatgggtgtacagcaagctccccagaaactcttgggaacacaacatatatgggagcacatctgaggcacgtgcacacacgcaacctgggaccaccacaggcacagcccaagtcacatgtgttcccggcagggaggctgggaggaaggccctctacctggtccacacccccactcaccacccccagctcctcacctccagctggtcccttctgatctcagctgcctctcccaggaagatgtagatcttcttgtgccaggccagcttcagtggggctagtgggccctctagggcaatggtcacttgtagagtgcaccgtgtgcactgtctgtgtgcactggccccacatccattgagaaggccccacatccattgagaaggccccacatccattgagaaggccagggtgttgcgggagctgaggctgccattgtggccaaagagaacggccccaaccagcaggtccttctgggcgaaggctgtgctggctgagtggcctggagcaactgtccccagcaagggctgtctgtgatgtggtagtggacctcatccccactgcggatgtcgaggttggtgcccaggtggagctcggccatattgatggtaccctggtctccttgagggaccttgaggccggagccattggccacatagaggtaaggctccaaggcctgcacctccagcaccaagatggcctggtgctgcctgtcggacacatgcagcaggatccagccatggtcagcctgagtgcgtgaacaggactcgcctcttcctgaggcccctcctggatgaagcagaagatgggctgcatgggctcatccgtggccatgatactgccagacaggaggtccttgtgggtcagcaccagctgggcatccacaaagcctgaatcagcattgctgaaggccatgttgtgtggagtcagcagctgccacctaccccaggccacatggaagacgcagctgatgctctgcacaggggcgtggtcattcacagtctggatggccactcagaagacaccccgtacctcctcccaggccacatcaccactgctctggtcctggtggcagcagcaaatggcatatcatcttccgtgatcttggagtcatcatgctgctagaccggctggccatgcaacagatctccattggtgaaggaagtcaccatagtggtcttgtcctgtgccccacaccaagtcaacctcccatggcggggccactacatggcctcatagaggtacctggcactgttgaggctcttgacgaagagctggtcagcagagaggacacacccaccaccctcgggcaccaagaggacattggtgaggacaggcatgtctgggtcaccgccagtatggatggagaaagtacagagtggggagaaatatagtggagctgtgacatggaaacagaaggtgtcctccactgccactgaggcatgtgccatggccctataggtcacctctccagcctgtacatcatcctgggtgaagccctgaccatctgacagtgtcgtgccctgtagttgaaggttgcctttcctgggagcctgaaccacctcagagtggaaggttggggggcttgggcctgcctcttccagggtggcctccaggtgggctgtggtgagggcctctgctgggtgttgagtgtgcagtggccgcagctgcagcatccacacagtggctctctggatggtcactaggaaggacagattgctcaggatttcccagctcacctgcacctgcagatccaggttcttcacggtgtcctcggcatagtgctgtgggttagtgctcaggtacctcatgtggccctgctccacatcctgctggtggaatgactgtgtggcccaccactcagcaccctccaccccaccagccccctgcttctgcacctccctgaactgcaggcctctggtgacacagaacaacacagtcacatcctgccccacggtgctggtctccaccgacaggttggtaggcaagatgggcatggcagagtcctgggccagatgcagccctgtgctgcagtggatctgtatggccggctggatggccaccaccttcagcatggacggggggctggcctgcagtccattgctgacccggaacgtcaagtcctatgcagggccactgcagtggacatagactaggctgtcggcctccaactcccagcaggagaactgggtcaccggctccccagcctggtctcagtgctccacagggaggccagaggaggtgccaaggagctggaaggtgaggccctcacaggcagagtccaggtcataggcctggaaaacctcaggccccagaggcttctgtgtgtgttccaggatcaccataaggctgccacatgggaagatgatacggggtgggtcattgacagggttgacctggatgggcaggaggtcagtttggcccctccgcaggcatgaaggcatgggcacccaagccatcaccaacacctccagcaccagggccatcatggatgaagcaggccttgcagttcaccatgtccaggagggtgaacatttctcatgcctgggcacccaggatgtccagctcgagttcactgtagtgtgcccctcaggtcacgctgaacagcacctgggatttatgcagttcagcctccatcagggccagcatgggctgcacatgccaccactcggctgtgccaccctcggtcaccaccactgggctgatagtcagcagctgggtgaaattggtaaagacaggaggcagccctggctcaagcatgcatggctcagctagatccatggacagccaagccctgggggccagggtggagaaagcttcataatggccataggtattgtcctcatactcctccacctcctccagtctgcagcctgccgccatgttgtgtgtcagcaaggcttcccgaagcccccacctctgg

SEQ ID NO: 1889091 - DNA, 4001 bp, Homo sapiens; identical to SEQ ID NO: 1888737

SEQ ID NO: 1889092 - DNA, 4001 bp, Homo sapiens
tacctacccaggcacagaattttttataactgtctgcatgttctcctcatgtgggggaaaagcagcatcagcaggcagaggaatcctttgaagctggagggagaggttgcagtgatctgagagtttgccacttgactgcagcctggatgacacagtgagactccaactgaaaagaaacaaacacacacacacacacacacacacacacacacacacccccaaaattgataagtaaaaaaaaaatccatattcgaaaacatgctcacaggctaactcccatatctaacacacacacacacacacacacacacacacacacacacacaattccttgaaaacgaaagttccacaagggcaaaacaagaaaacaaatttaacaccccccaaagaaagtacaaagagtaacctcaaaagaaccgcaggggaaaacaattcaaaatttacaagtatctaccctaaaagaagctgaaagtccctcaaaaactttccagaggccatgtccttgtattacaaaaatgatcataaaaactggcaggagtagacgaatagaaatgcatcttaaaacttgctaaacccttcaagtctcccataagaattgtaatggaaaatggatcggtcggcagctttttccatacaattatgaacaaattatatttcttcatacatagatttgttttttcaatattctaaggaattaacttttatattaatagtaggtgatgtaagaaagcaggcctttatcaagataactgacactggatgtccataccattactcaggtgggccttaattcccagccgggttccctccctggacacacactgaaggtccccagccatttggcaatctcttcacattcccagccctggaggtagccctaaaatacatgtacctgaagaaaataaaacattgcctcacactggagcccagtgtggtcctccagattccgtgtgaggtggactaacttatatgggaaggcagggcagcgggagtgaggatggcagagaggattacacatgtcaaggcagccggggtcatggaaacaaaacatgactggcctgggagaaacactgtgaaaggacacagacctaggtgggcctcaggtggacatcctcatggagaaaaagggggccctggttgatctcaaaatgagccccaggtggtagcaggtcttaccgcagggcagggagctggcgagtaatgatgagacagctatcccttaagccctgcttgtcacccactgactttagccacatatgcatcatagtggcttaaggtgccccgatcctgaaatgtgggtgttacatgtccctgatgggcctctctcccccaacccacggattgcctgggattgctcactgcagtctcctcccggatccttgggttctccatgtggggcccagatccaggtcaaaaggcctctcagttcccagcccttcccagccctaggctgctcgcctggcctcctctctgttccgcctctagggctgaccctctctccatgggatagaactgcaatggattgagccataggccctggctgatgatctaggggactgcagaagtgggtccaggacagttcaggtgacagttcaaagccaattccccagagaccaaggaatgaccagctaggtcctttcccatgatgccccacggcgaaccccacctcagcaatcctgccaaaacccgggcagtcatgttcagccaaacagctgaatgagctcaggtaggaggtgtactgcctgcagctggaggcttgaccttcgtgatcccagaaccgctggactgcagtggaatgagacaccctgtagcctgcagggagaggagtcaggaaggttcatgccagtcccaccctcccacacaccagctcccctaccatgctgggaggcattccttaccgaggatgccaacacagtgctccttcatgatgatttcactgtggaaataaaggttgggatgaaaggaaatcatcctgccaccggtaaccgggatggctgagttcctccacctgccggatcaaggagaaagaggatggattcaatgggaccatctcaactagctgggctgaggtggcctactagctgtagtgaaccatgagtttccccttcccagctctcccactgagacaaccctggtccccagggggacctcaaactgactcagacactggactcctcccacagacccaggctccccagcctgacctgcaaatccatcacgtagcaaagcaggacttccgcatgctttccgacccacgccgacatctcgggtgtgccaaacaatctacctctgcgcaagaactctccagaggattgggtgggcaagcctcgtgacgccttgcaatttcgcaagaacacagacaatgtggaacagggccatctcccagacatttggccagtcacccttcattgttggccctctatctctgtctggcgaggaggcaacgccacaactgtggtggtttttggagtgggtggaccccggccaagacggcctgggctgaccagagacgggaggcagaaaaagtgggcaggtggttgcagctgagggacgggaggggccgggggtggtgtgaggcggctgcttctctgggtttctgagatgcaggaggcctttgtgtgctgggtgctggacatgctccgctgatgtccgggtgtgtggtgtcctcttatcctagtctccctgaggggtgggcctgtccacctgagggaagccttgtagttagaagccacagcagggtcgtgcctggcgctctccaagggaattgcgtgggtccagaggaagttatacaggctcagggcctacacgcctttgagtgcagcgcctgcagttggatgaatgcgcatctgcggagctggtgcccgccgtcaggtggtcggcagccccatgcgccgcgaacccgtcttaagcaccttgtgtttctggggtgagcctgctggaaacaggcaccgagagcaggggtggttcaatggctggtaatggcatacagattccccgtcctccagggacgttcccagggaaacgcgtccttcgaatttgggctgtgcgcaaagggaccttggcgccgcgattctcccttgtcagtgctggccctggctccccttccctaccacgtgctcccagggctgctacaagcgagctgccctcacagctgcgggaacgtggcctcggctcccacgctgtcccccatcccctgcctcctggctgaccccacgtgcctcccacctggctcctccccgcaaacagcccccataccccccgaggcccgatgactatcccctgctgcccgccatcccaaatcggcagccgcaaggatatggctctggctcacaaggcggagatgctctgtggcctggggcattcacggagcccagctccaagtgaaggacctccagcgagtccattgacggccccggtgtgctcggtccagggccaggctgtgcccgctggccctccttctgccaccccacgtcgggctccacctcaaccaccacctccacctcagccatgatgtcttccaccttcagcaccgcctcctcttccaaggccgcctccttgctctgtaccccggccgtcctctccagcattgcctccagcctgaacacggttttctcctgggtgctcccacagaccctgggcctgcgcagcccagcccagcccagcccatgccccgcacccgtaggctctgggggcccgctccccagcagacccgctccctgcaagacccacgggcgtcgccctgctgagaaactggtcccacacctacgtggacccaggtttcctgaggagctccgctggacccgcagatcccgcactggccaaagggctccggtccccagcaggctcaactgcgcacaggagctcgggagccagaggccccggccctgggcttgcagagccccaccaacaggcaccgcaaccgctgctgcgggtgcgggagcctctgggtcgtcaaggcagcgcacaacagcgtgcgcgcaggccgacaatggccaaccctg

SEQ ID NO: 1889093 - DNA, 4001 bp, Homo sapiens
tacccaggcacagaattttttataactgtctgcatgttctcctcatgtgggggaaaagcagcatcagcaggcagaggaatcctttgaagctggagggagaggttgcagtgatctgagagtttgccacttgactgcagcctggatgacacagtgagactccaactgaaaagaaacaaacacacacacacacacacacacacacacacacacacccccaaaattgataagtaaaaaaaaaatccatattcgaaaacatgctcacaggctaactcccatatctaacacacacacacacacacacacacacacacacacacacacacacaattccttgaaaacgaaagttccacaagggcaaaagaagaaaacaaatttaacaccccccaaagaaagtacaaagagtaacctcaaaagaactgcaggggaaaacaattcaaaatttacaagtatctaccctaaaagaagctgaaagtccctcaaaaactttccagaggccatgtccttgtattacaaaaatgatcataaaaactggcaggagtagacgaatagaaatgcatcttaaaacttgctaaacccttcaagtctcccataagaattgtaatggaaaatggatcggtcggcagctttttccatacaattatgaacaaattatatttcttcatacatagatttgttttttcaatattctaaggaattaacttttatattaatagtaggtgatgtaagaaagcaggcctttatcaagataactgacactggatgtccataccattactcaggtgggccttaattcccagccgggttccctccctggacacacactgaaggtccccagccatttggcaatctcttcacattcccagccctggaggtagccctaaaatacatgtacctgaagaaaataaaacattgcctcacactggagcccagtgtggtcctccagattccgtgtgaggtggactaacttatatgggaaggcagggcagcgggagtgaggatggcagagaggattacacatgtcaaggcagccggggtcatggaaacaaaacatgactggcctgggagaaacactgtgaaaggacacagacctaggtgggcctcaggtggacatcctcgtggagaaaaagggggccctggttgatctcaaaatgagccccaggtggtagcaggtcttaccgcagggcagggagctggcgagtaatgatgagacagctatcccttaagccctgcttgtcacccactgactttagccacatatgcatcatagtggcttaaggtgccccgatcctgaaatgtgggtgttacatgtccctgatgggcctctctcccccaacccacggattgcctgggattgctcactgcagtctcctcccggatccttgggttctccatgtggggcccagatccaggtcaaaaggcctctcagttcccagcccttcccagccctaggctgctcgcctggcctcctctctgttccgcctctagggctgaccctctctccatgggatagaactgcaatggattgagccataggccctggctgatgatctaggggactgcagaagtgggtccaggacagttcaggtgacagttcaaagccaattccccagagaccaaggaatgaccagctaggtcctttcccatgatgccccacggcgaaccccacctcagcaatcctgccaaaacccgggcagtcatgttcagccaaacagctgaatgagctcaggtaggaggtgtactgcctgcagctggaggcttgaccttcgtgatcccagaaccgctggactgcagtggaatgagacaccctgtagcctgcagggagaggagtcaggaaggttcatgccagtcccaccctcccacacaccagctcccctaccatgctgggaggcattccttaccgaggatgccaacacagtgctccttcatgatgatttcactgtggaaataaaggttgggatgaaaggaaatcatcctgccaccggtaaccgggatggctgagttcctccacctgccggatcaaggagaaagaggatggattcaatgggaccatctcaactagccgggctgaggtggcctactagctgtagtgaaccatgagtttccccttcccagctctcccactgagacaaccctggtccccagggggacctcaaactgactcagacactggactcctcccacagacccaggctccccagcctgacctgcaaatccatcacgtagcaaagcaggacttccgcatgctttccgacccacgccgacatctcgtgtgccaaacaatctacctctgcgcaagaactctccagaggattgggtgggcaagcctcgtgacgccttgcaatttcgcaagaacacagacaatgtggaacagggccatctcccagacatttggccagtcacccttcattgttggccctctatctctgtctggcgaggaggcaacgccacaactgtggtggtttttggagtgggtggaccccggccaagacggcctgggctgaccagagacgggaggcagaaaaagtgggcaggtggttgcagctgagggacgggagggaccgggggtggtgtgaggcggctgcttctctgagtttctgagatgcaggaggcctttgtgtgctgggtgctggacatgctccgctgatgtccgggtgtgtggtgtcctcttatcctagtctccctgaggggtgggcctgtccacctgagggaagccttgtagttagaagccacagcagggtcgtgcctggcgctctccaagggaattgcgtgggtccagaggaagttatacaggctcagggcctacacgcctttgagtgcagcgcctgcagttggatgaatgcgcatctgcggagctggtgcccgccgtcaggtggtcggcagccccatgcgccgcgaacccgtcttaagcaccttgtgtttctggggtgagcctgctggaaacaggcaccgagagcaggggtggttcaatggctggtaatggcatacagattccccgtcctccagggacgttcccagggaaacgcgtccttcgaatttgggctgtgcgcaaagggaccttggcgccgcgattctcccttgtcagtgctggccctggctccccttccctaccacgtgctcccagggctgctacaagcgagctgccctcacagctgcgggaacgtggcctcggctcccacgctgtgccccatcccctgcctcctggctgaccccacgtgcctcccacctggctcctccccccaaacagcccccataccccccgaggcccgatgactatcccctgctgcccgccatcccaaatcggcagccgcaaggatatggctctggctcacaaggcggagatgctctgtggcctggggcattcacggagcccagctccaagtgaaggacctccagtgagtccattgacggccccggtgtgctcggtccagggccaggctgtgcccgctggccctccttctgccaccccacgtcgggctccacctcaaccaccacctccacctcagccatgatgtcttccaccttcagcaccgcctcctcttccaaggccgcctccttgctctgtaccccggccgtcctctccagcattgcctccagcctgaacacggttttctcctgggtgctcccacagaccctgggcctgcgcagcccagcccagcccagcccatgccccgcacccgtaggctctgggggcccgctccccagcagacccgctccctgcaagacccacgggcgtcgccctgctgtgaacctggtcccacacctacgtggacccaggtttcctgaggagctccgctggacccgcagatcccgcactggccaaagggctccggtccccagcaggctcaactgcgcacaggagctcgggagccagaggccccggccctgggcttgcagagccccaccaacaggcaccgcaaccgctgctgcgggtgcgggagcctctgggtcgtcaaggcagcgcacaacagcgtgtgtgcaggccgacaatggccaaccctggc

SEQ ID NO: 1889094 - DNA, 4001 bp, Homo sapiens
tttcatacctacccaggcacagaattttttataactgtctgcatgttctcctcatgtgggggaaaagcagcatcagcaggcagaggaatcctttgaagctggagggagaggttgcagtgatctgagagtttgccacttgactgcagcctggatgacacagtgagactccaactgaaaagaaacaaacacacacacacacacacacacacacacacacccccaaaattgataagtaaaaaaaaaatccatattcgaaaacatgctcacaggctaactcccatatctaacacacacacacacacacacacacacacacacacacacacaattccttgaaaacgaaagttccacaagggcaaaacaagaaaacaaatttaacaccccccaaagaaagtacaaagagtaacctcaaaagaaccgcaggggaaaacaattcaaaatttacaagtatctaccctaaaagaagctgaaagtccctcaaaaactttccagaggccatgtccttgtattacaaaaatgatcataaaaactggcaggagtagacgaatagaaatgcatcttaaaacttgctaaacccttcaagtctcccataagaattgtaatggaaaatggatcggtcggcagctttttccatacaattatgaacaaattatatttcttcatacatagatttgttttttcaatattctaaggaattaacttttatattaatagtaggtgatgtaagaaagcaggcctttatcaagataactgacactggatgtccataccattactcaggtgggccttaattcccagccaggttccctccctggacacacactgaaggtccccagccatttggcaatctcttcacattcccagccctggaggtagccctaaaatacatgtacctgaagaaaataaaacattgcctcacactggagcccagtgtggtcctccagattccgtgtgaggtggactaacttatatgggaaggcagggcagcgggagtgaggatggcagagaggattacacatgtcaaggcagccggggtcatggaaacaaaacatgactggcctgggagaaacactgtgaaaggacacagacctaggtgggcctcaggtggacatcctcgtggagaaaaagggggccctggttgatctcaaaatgagccccaggtggtagcaggtcttaccgcagggcagggagctggcgagtaatgatgagacagctatcccttaagccctgcttgtcacccactgactttagccacatatgcatcatagtggcttaaggtgccccgatcctgaaatgtgggtgttacatgtccctgatgggcctctctcccccaacccacggattgcctgggattgctcactgcagtctcctcccggatccttgggttctccatgtggggcccagatccaggtcaaaaggcctctcagttcccagcccttcccagccctagctgctcgcctggcctcctctctgttccgcctctagggctgaccctctctccatgggatagaactgcaatggattgagccataggccctggctgatgatctaggggactgcagaagtgggtccaggacagttcaggtgacagttcaaagccaattccccagagaccaaggaatgaccagctaggtcctttcccatgatgccccacggcgaaccccacctcagcaatcctgccaaaacccgggcagtcatgttcagccaaacagctgaatgagctcaggtaggaggtgtactgcctgcagctggaggcttgaccttcgtgatcccagaaccgctggactgcagtggaatgagacaccctgtagcctgcagggagaggagtcaggaaggttcatgccagtcccaccctcccacacaccagctcccctaccatgctgggaggcattccttaccgaggatgccaacacagtgctccttcatgatgatttcactgtggaaataaaggttgggatgaaaggaaatcatcctgccaccggtaaccgggatggctgagttcctccacctgccggatcaaggagaaagaggatggattcaatgggaccatctcaactagctgggctgaggtggcctactagctgtagtgaaccatgagtttccccttcccagctctcccactgagacaaccctggtccccagggggacctcaaactgactcagacactggactcctcccacagacccaggctccccagcctgacctgcaaatccatcacgtagcaaagcaggacttccgcatgctttccgacccacgccgacatctcgtgtgccaaacaatctacctctgcgcaagaactctccagaggattgggtgggcaagcctcgtgacgccttgcaatttcgcaagaacacagacaatgtggaacagggccatctcccagacatttggccagtcacccttcattgttggccctctatctctgtctggcgaggaggcaacgccacaactgtggtggtttttggagtgggtggacccggccaagacggcctgggctgaccagagacgggaggcagaaaaagtgggcaggtggttgcagctgagggacgggagggaccgggggtggtgtgaggcggctgcttctctgagtttctgagatgcaggaggcctttgtgtgctgggtgctggacatgctccgctgatgtccgggtgtgtggtgtcctcttatcctagtctccctgaggggtgggcctgtccacctgagggaagccttgtagttagaagccacagcagggtcgtgcctggcgctctccaagggaattgcgtgggtccataggaagttatacaggctcagggcctacacgcctttgagtgcagcgcctgcagttggatgaatgcgcatctgcggagctggtgcccgccgtcaggtggtcggcagccccatgcgccgcgaacccgtcttaagcaccttgtgtttctggggtgagcctgctggaaacaggcaccgagagcaggggtggttcaatggctggtaatggcatacagattccccgtcctccagggacgttcccagggaaacgcgtccttcgaatttgggctgtgcgcaaagggaccttggcgccgcgattctcccttgtcagtgctggccctggctccccttccctaccacgtgctcccagggctgctacaagcgagctgccctcacagctgcgggaacgtggcctcggctcccacgctgtcccccatcccctgcctcctggctgaccccacgtgcctcccacctggctcctccccccaaacagcccccataccccccgaggcccgatgactatcccctgctgcccgccatcccaaatcggcagccgcaaggatatggctctggctcacaaggcggagatgctctgtggcctggggcattcacggagcccagctccaagtgaaggacctccagcgagtccattgacggccccggtgtgctcggtccagggccaggctgtgcccgctggccctccttctgccaccccacgtcgggctccacctcaaccaccacctccacctcagccatgatgtcttccaccttcagcaccgcctcctcttccaaggccgcctccttgctctgtaccccggccgtcctctccagcattgcctccagcctgaacacggttttctcctgggtgctcccacagaccctgggcctgcgcagcccagcccagcccagcccatgccccgcacccgtaggctctgggggcccgctccccagcagacccgctccctgcaagacccacgcgtcgccctgctgtgaacctggtcccacacctacgtggacccaggtttcctgaggacgtccgctggacccgcagatcccgcactggccaaagggctccggtccccagcaggctcaactgcgcacaggagctcgggagccagaggccccggccctgggcttgcagagccccaccaacaggcaccgcaaccgctgctgcgggtgcgggagcctctgggtcgtcaaggcagcgcacaacagcgtgcgcgcaggccgacaatggccaacctggcggct

SEQ ID NO: 1889095 - DNA, 4001 bp, Homo sapiens
catacctacccaggcacagaattttttataactgtctgcatgttctcctcatgtgggggaaaagcagcatcagcaggcagaggaatcctttgaagctggagggagaggttgcagtgatctgagagtttgccacttgactgcagcctggatgacacagtgagactccaactgaaaagaaacaaacacacacccacacacacacacacacacacacacccccaaaattgataagtaaaaaaaaaatccatattcgaaaacatgctcacaggctaactcccatatctaacacacacacacacacacacacacacacacacacacacacaattccttgaaaacgaaagttccacaagggcaaaacaagaaaacaaatttaacaccccccaaagaaagtacaaagagtaacctcaaaagaaccgcaggggaaaacaattcaaaatttacaagtatctaccctaaaagaagctgaaagtccctcaaaaactttccagaggccatgtccttgtattacaaaaatgatcataaaaactggcaggagtagacgaatagaaatgcatcttaaaacttgctaaacccttcaagtctcccataagaattgtaatggaaaatggatcggtcggcagctttttccatacaattatgaacaaattatatttcttcatacatagatttgttttttcaatattctaaggaattaacttttatattaatagtaggtgatgtaagaaagcaggcctttatcaagataactgacactggatgtccataccattactcaggtgggccttaattcccagccgggttccctccctggacacacactgaaggtccccagccatttggcaatctcttcacattcccagccctggaggtagccctaaaatacatgtacctgaagaaaataaaacattgcctcacactggagcccagtgtggtcctccagattccgtgtgaggtggactaacttatatgggaaggcagggcagcgggagtgaggatggcagagaggattacacatgtcaaggcagccggggtcatggaaacaaaacatgactggcctgggagaaacactatgaaaggacatacacctaggtgggccttaggtggacatcctcgtggagaaaaagggggccctggttgatctcaaaatgagccccaggtggtagcaggtcttaccgcagggcagggagctggcgagtaatgatgagacagctatcccttaagccctgcttgtcacccactgactttagccacatatgcatcatagtggcttaaggtgccccgatcctgaaatgtgggtgttacatgtccctgatgggcctctctcccccaacccacggattgcctgggattgctcactgcagtctcctcccggatccttgggttctccatgtggggcccagatccaggtcaaaaggcctctcagttcccagcccttcccagccctaggctgctcgcctggcctcctctctgttccgcctctagggctgaccctctctccatgggatagaactgcaatggattgagccataggccctgggtgatgatctaggtgactgcagaagtgggtccaggacagttcaggtgacagttcaaagccaattccccagagaccaaggaatgaccagctaggtcctttcccatgatgccccacggcgaaccccacctcagcaatcctgccaaaacccgggcagtcatgttcagccaaacagctgaatgagctcaggtaggaggtgtactgcctgcagctggaggcttgaccttcgtgatcccagaaccgctggactgcagtggaatgagacaccctgtagcctgcagggagaggagtcaggaaggttcatgccagtcccaccctcccacacaccagctcccctaccatgctgggaggcattccttaccgaggatgccaacacagtgctccttcatgatgatttcactgtggaaataaaggttgggatgaaaggaaatcatcctgccaccggtaaccgggatggctgagttcctccacctgccggatcaaggagaaagaggatggattcaatgggaccatctcaactagccgggctgaggtggcctactagctgtagtgaaccatgagtttccccttcccagctctcccactgagacaaccctggtccccagggggacctcaaactgactcagacactggactcctcccacagacccaggctccccagcctgacctgcaaatccatcacgtagcaaagcaggacttccgcatgctttccgacccacgccgacatctcgtgtgccaaacaatctacctctgcgcaagaactctccagaggattgggtgggcaagcctcgtgacgccttgcaatttcgcaagaacacagacaatgtggaacagggccatctcccagacatttggccagtcacccttcattgttggccctctatctctgtctggcgaggaggcaacgccacaactgtggtggtttttggagtgggtggaccccggccaagacggcctgggctgaccagagacgggaggcagaaaaagtgggcaggtggttgcagctgagggacgggaggggccgggggtggtgtgaggcggctgcttctctgagtttctgagatgcaggaggcctttgtgtgctgggtgctggacatgctccgctgatgtccgggtgtgtggtgtcctcttatcctagtctccctgaggggtgggcctgtccacctgagggaagccttgtagttagaagccacagcagggtcgtgcctggcgctctccaagggaattgcgtgggtccagaggaagttatacaggctcagggcctacacgcctttgagtgcagcgcctgcagttggatgaatgcgcatctgcggagctggtgcccgccgtcaggtggtcggcagccccatgcgccgcgaacccgtcttaagcaccttgtgtttctggggtgagcctgctggaaacaggcaccgagagcaggggtggttcaatggctggtaatggcatacagattccccgtcctccagggacgttcccagggaaacgcgtccttcgaatttgggctgtgcgcaaagggaccttggcgccgcgattctcccttgtcagtgctggccctggctccccttccctaccacgtgctcccagggctgctacaagcgagctgccctcacagctgcgggaacgtggcctcggctcccacgctgtcccccatcccctgcctcctggctgaccccacgtgcctcccacctggctcctccccgcaaacagcccccataccccccgaggcccgatgactatcccctgctgcccgccatcccaaatcggcagccgcaaggatatggctctggctcacaaggcggagatgctctgtggcctggggcattcacggagcccagctccaagtgaaggacctccagcgagtccattgacggccccggtgtgctcggtccagggccaggctgtgcccgctggccctccttctgccaccccacgtcgggctccacctcaaccaccacctccacctcagccatgatgtcttccaccttcagcaccgcctcctcttccaaggccgcctccttgctctgtaccccggccgtcctctccagcattgcctccagcctgaacacggttttctcctgggtgctcccacagaccctgggcctgcgcagcccagcccagcccagcccatgccccgcacccgtaggctctgggggcccgctccccagcagacccgctccctgcaagacccacgggcgtcgccctgctgtgaacctggtcccacacctacgtggacccaggtttcctgaggagctccgctggacccgcagatcccgcactggccaaagggctccggtccccagcaggctcaactgcgcacaggagctcgggagccagaggccccggccctgggcttgcagagccccaccaacaggcaccgcaaccgctgctgcgggtgcgggagcctctgggtcgtcaaggcagcgcacaacagcgtgcgcgcaggccgacaatggccaaccctggc

SEQ ID NO: 1889096 - DNA, 4001 bp, Homo sapiens
tacctacccaggcacagaattttttataactgtctgcatgttctcctcatgtgggggaaaagcagcatcagcaggcagaggaatcctttgaagctggagggagaggttgcagtgatctgagagtttgccacttgactgcagcctggatgacacagtgagactccaactgaaaagaaacaaacacacacacacacacacacacacacacacacacccccaaaattgataagtaaaaaaaaaatccatattcgaaaacatgctcacaggctatctcccatatctaacacacagacacacacacacacacacacacacaaacacacacaattccttgaaaacgaaagttccacaagggcaaaagaagaaaacaaatttaacaccccccaaagaaagtacaaagagtaacctcaaaagaaccgcaggggaaaacaattcaaaatttacaagtatctaccctaaaagaagctgaaagtccctcaaaaactttccagaggccatgtccttgtattacaaaaatgatcataaaaactggcaggagtagacgaatagaaatgcatcttaaaacttgctaaacccttcaagtctcccataagaattgtaatggaaaatggatcggtcggcagctttttccatacaattatgaacaaattatatttcttcacacatagatttgttttttcaatattctaaggaattaacttttatattaatagtaggtgatgtaagaaagcaggcctttatcaagataactgacactggatgtccataccattactcaggtgggccttaattcccagccgggttccctccctggacacacactgaaggtccccagccatttggcaatctcttcacattcccagccctggaggtagccctaaaatacatgtacctgaagaaaataaaacattgcctcacactggagcccagtgtggtcctccagattccgtgtgaggtggactaacttatatgggaaggcagggcagcgggagtgaggatggcagagaggattacacatgtcaaggcagccggggtcatggaaacaaaacatgactggcctgggagaaacactgtgaaaggacatacacctaggtgggcctcaggtggacatcctcgtggagaaaaagggggccctggttgatctcaaaatgagccccaggtggtagcaggtcttaccgcagggcagggagctggcgagtaatgatgagacagctatcccttaagccctgcttgtcacccactgactttagccacatatgcatcatagtggcttaaggtgccccgatcctgaaatgtgggtgttacatgtccctgatgggcctctctcccccaacccacggattgcctgggattgctcactgcagtctcctcccggatccttgggttctccatgtggggcccagatccaggtcaaaaggcctctcagttcccagcccttcccagccctaggctgctcgcctggcctcctctctgttccgcctctagggctgaccctctctccatgggatagaactgcaatggattgagccataggccctggctgatgatctaggggactgcagaagtgggtccaggacagttcaggtgacagttcaaagccaattccccagagaccaaggaatgaccagctaggtcctttcccatgatgccccacggcgaaccccacctcagcaatcctgccaaaacccgggcagtcatgttcagccaaacagctgaatgagctcaggtaggaggtgtactgcctgcagctggaggcttgaccttcgtgatcccagaaccgctggactgcagtggaatgagacaccctgtagcctgcagggagaggagtcaggaaggttcatgccagtcccaccctcccacacaccagctcccctaccatgctgggaggcattccttaccgaggatgccaacacagtgctccttcatgatgatttcactgtggaaataaaggttgggatgaaaggaaatcatcctgccaccggtaaccgggatggctgagttcctccacctgccggatcaaggagaaagaggatggattcaatgggaccatctcaactagccgggctgaggtggcctactagctgtagtgaaccatgagtttccccttcccagctctcccactgagacaaccctggtccccagggggacctcaaactgactcagacactggactcctcccacagacccaggctccccagcctgacctgcaaatccatcacgtagcaaagcaggacttccgcatgctttccgacccacgccgacatctcgtgtgccaaacaatctacctctgcgcaagaactctccagaggattgggtgggcaagcctcgtgacgccttgcaatttcgcaagaacacagacaatgtggaacagggccatctcccagacatttggccagtcacccttcattgttggccctctatctctgtctggcgaggaggcaacgcacaactgtggtggtttttggagtgggtggaccccggccaagacggcctgggctgaccagagacgggaggcagaaaaagtgggcaggtggttgcagctgagggacgggagggaccgggggtggtgtgaggcggctgcttctctgggtttctgagatgcaggaggcctttgtgtgctgggtgctggacatgctccgctgatgtccgggtgtgtggtgtcctcttatcctagtctccctgaggggtgggcctgtccacctgagggaagccttgtagttagaagccacagcagggtcgtgcctggcgctctccaagggaattgcgtgggtccagaggaagttatacaggctcagggcctacacgcctttgagtgcagcgcctgcagttggatgaatgcgcatctgcggagctggtgcccgccgtcaggtggtcggcagccccatgcgccgcgaacccgtcttaagcaccttgtgtttctggggtgagcctgctggaaacaggcaccgagagcaggggtggttcaatggctggtaatggcatacagattccccgtcctccagggacgttcccagggaaacgcgtccttcgaatttgggctgtgcgcaaagggaccttggcgccgcgattctcccttgtcagtgctggccctggctccccttccctaccacgtgctcccagggctgctacaagcgagctgccctcacagctgcgggaacgtggcctcggctcccacgctgtcccccatcccctgcctcctggctgaccccacgtgcctcccacctggctcctccccccaaacagcccctataccccccgaggcccgatgactatcccctgctgcccgccatcccaaatcggcagccgcaaggatatggctctggctcacaaggcggagatgctctgtggcctggggcattcacggagcccagctccaagtgaaggacctccagcgagtccattgacggccccggtgtgctcggtccagggccaggctgtgcccgctggccctccttctgccaccccacgtcgggctccacctcaaccaccacctccacctcagccatgatgtcttccaccttcagcaccgcctcctcttccaaggccgcctccttgctctgtaccccggccgtcctctccagcattgcctccagcctgaacacggttttctcctgggtgctcccacagaccctgggcctgcgcagcccagcccagcccagcccatgccccgcacccgtaggctctgggggcccgctccccagcagacccgctccctgcaagacccacgggcgtcgccctgctgagaacctggtcccacacctacgtggacccaggtttcctgaggagctccgctggacccgcagatcccgcactggccaaagggctccggtccccagcaggctcaactgcgcacaggagctcgggagccagaggccccggccctgggcttgcagagccccaccaacaggcaccgcaaccgctgctgcgggtgcgggagcctctgggtcgtcaaggcagcgcacaacagcgtgcgcgcaggccgacaatggccaaccctggcg

SEQ ID NO: 1889097 - DNA, 4001 bp, Homo sapiens; identical to SEQ ID NO: 1889092

SEQ ID NO: 1889098 - DNA, 4001 bp, Homo sapiens; identical to SEQ ID NO: 1889093

SEQ ID NO: 1889099 - DNA, 4001 bp, Homo sapiens; identical to SEQ ID NO: 1889094

SEQ ID NO: 1889100 - DNA, 4001 bp, Homo sapiens; identical to SEQ ID NO: 1889095

SEQ ID NO: 1889101 - DNA, 4001 bp, Homo sapiens; identical to SEQ ID NO: 1889096

SEQ ID NO: 1889102 - DNA, 4001 bp, Homo sapiens
cacaggccattttgaatctgttgtcaccatgctcaattggtgccaaagaagggtaggcttctgtgccacccatctgtcatcaccacccttgtcaaatataattgcagggtcacgactgcacagagatctctcaacccactgaatgcatccgtatttttatgagccccgttgggagaataaacaggatatttagaaaagtactcatcgtgcgttatttggtctcccatgtctcttgtgaaaccaaacaaatttatgggccatttttttttctttccagcacttgaccatccatacagtacctaaataaaagaagaatgaatgcattttatgaaacaaggagaaaaacaacgaagcgaaagtctcagaggcttgtgatacacaggggtatacagaatgaggagacttccagaatccaaacaaagacagacggagggatgggaggaaacgaattgagaaaagagacacacaaaaagatgaagaaaaataaatgcaaagaaaaagagacagagatgtaaagggaagaaagataaagaaaatagaaagacagagaaacagaaaaagagaataagaaatgacagaaagaagggaggaagaaaaagagagagaagaaagagaaagaaaagaaagaaaatgaaagaaagaaagaggaagaaaaaagaaaaataaaggaaataaaaaagagagaagtgcatcaaggtttacacctgtaatcccaacactttgggagtttgacatggaagaattgtttgaacccaccattttgagaccagccctgacaatacagtgagaccatgcctctacttaaataaaataaaataaaataaaataaaataaaataaaataaaataaaataaaataaaatataataatgttagccgggcatgatggcaggcgcctgtactttcagctcctttggagcctgaggtgggagcatcccttgggctcgggaggtggaggctgcgttgggccttggtcaggtaatgcactgcagcgtgttgtccaggctggtcttgaactcctgaactctagccaactgcctgcctcagcctccgaaattgcacctgccatattcaacggccctgggggtatcagtgacagactttagtaagcatggttgttatgccatattgcccaggttggtcttgaacttgaacccgggaatttgaggctacggtgagccaaggtcatgccactgtactgcagtctgggtgataaagcaagaccccatctctaaatatctaattaataaaaacaataacaataatataaacaataatacaaataaataacaaacaacagcaataataataaacaaactagtgagagtgaaaaatataaaaataaaaaaggtaatttagatcacaattaattgcagtaatttcaaggagttatttctttaacctgtctctcttactttctgaaacagggtctttctctgtcactcaggctggagggcaatggcgtgatcatggctcactgcagcttcgacatcccagaatcaagctattcctgcaatctcagccacttggaaggctgagatggcaagaacacctgcgggagcccaggaaggttgaggctgtgatgagccgagaatgcaatctcacactccaacttttcaaaaaaaagaaaagaagaattagaaggagaagaagtaaacataaaacaacagcaacttcagtgtgtagaaaggggagtaagaaaagtaaaaggaaaaagaaaaacaaaatgaagagcagctgaaaatactgtggaaacagttggagaggaagaaatgacgtggtgaaagagcagcctctagtggatgcaggtggtagtgctgctgaccagagttacccgttctaccttaacaatcccaagttgacggtcaagtccagcgctcgccgatgacatcttatggacccagggctcgcggaaggacccagttggaactttatcacaccaagccggcccacctttgctgccatctaactccgccgacctgcccgcagttccccactctccgctggttgaccggggcagcggagagaggaggaaagcacaaaggcagtgactggttcatatcccatcgccgcgcgcctggggtggggagaggggccgtgaccccatcggccaccactgggcacgcgtgaacactactcggacaggaaccgcaggggcacaccctcggacaaccactcctgagtcattctcaccaggctcggtgaatccaatctcagcccctggaggagttcccagcggggtgcgaggaggaggtggaatcggagaggtggaaggaggagcaggggagccacctctacctcagcaacccctggcgcggcaccttggaaagcccgagggtggggacgtgagcctcccaatgcacagcgggcgccgatgagctctcgcgagagacacccactgcgtgatccggggctcaggggtgggtgggcatgagcgggccagggaagaggttctcgggaacaggagaaaggaaggaaggtatatgtcaagggctgaattacacaggacacaccacatcacacaccacatcaccaggtcctccgcacacgggtgcagagagccttgtgtggaggtctgactttcaatagatagcagcgagggagctgctctgctccatggaaaaccctgacccagaagcaggacgtctgcgaatagtttagcatcaggttccccacaaacacgttatgtgatgggtcagggggtgaccgcctttctggcagcagcccgtttcccaggatgggggtttctctgcaccggatcccggtttccggagcacggcaggacatgcgcccagcgcggggcggagcggcacaccggaggggactgcagaagactgcctacccgaggccaacaaaggttccgtggcgctgccttatcattcctcatgggcgggattcttagagtccttcagtcctaatcccgcttatagtagctttaccccattggctcctcagacaaggacatacaccaaatgtctgaacctgtgatttctctactaatgagcaggattaccatgggaacaacacatgggcaacaacacatggggaacacacgcagtaaaactaacctgtctcacatgggtctaaccataatgctttccagggcatgcgcaccgctctcaggtgaatccattccagtctgccttgtccttcgcaaagaaaagagagctctgcaggggcggtggctcatgcctgtaatcccagcaatttgggaggttgaggagggccgatcatctgagatcaggagttcaagatcagcttggccaacatagtgaaaccctgtctctataaaaatacaaaaattagccgggcatgatggcgggtgcctgtaatcccagctacccaggaggctgaagtgggagaatcgcttgaacccggggaggcggatgcctcccgcttgaacccggcaggcgcacatgccaccatgctgggctaatttttgtatttttagtagaaacagggtttcaccatgttggccaggctggttttgaactcctgacctcaagcaatctgcctgcgttagcctcccaaagtgttgggattacaggcgtgagccaccgcacccagcgtatgtgtatagagctcctcgagaggaaagcctctattattaccattgcaacagtagaaaaagtaaagctttttttttttcttttgagtaagagtttcactcttgttgcccagaatgcagtgcaatggcctgatctcagcttactgaaacctctgcctcccaggttcaagctattctccggcgttggcctctcaggaaggtgggattacaggcatgtgccaccacacctggctaattttgtatttttaggagagacagagtttcaccatgttggtcaggctattctcgaactcctgacctcaggtgatacacctgcctcggtctcccaaaatgctgggatcacaggcatgagccactgtgtctagcttttttttcttttctttttttttgaaatagtgtctccatctatttcctaggctggaacacagggacat

SEQ ID NO: 1889103 - DNA, 4001 bp, Homo sapiens
ggccattttgaatctgttgtcaccatgctcaattggtgccaaagaagggtaggcttctgtgccacccatctgtcatcaccacccttgtcaaatataattgcagggtcacgactgcacagagatctctcaacccactgaatgcatccgtatttttatgagccccgttgggagaataaacaggatatttagaaaagtactcatcgtgcgttatttggtctcccatgtctcttgtgaaaccaaacaaatttatgggccatttttttttctttccagcacttgaccatccatacagtacctaaataaaagaagaatgaatgcattttatgaaacaaggagaaaaacaacgaagcgaaagtctcagaggcttgtgatacacaggggtatacagaatgaggagacttccagaatccaaacaaagacagacggagggatgggaggaaacgaattgagaaaagagacacacaaaaagatgaagaaaaataaatgcaaagaaaaagagacagagatgtaaagggaagaaagataaagaaaatagaaagacagagaaacagaaaaagagaataagaaatgacagaaagaagggaggaagaaaaagagagagaagaaagagaaagaaaagaaagaaaatgaaagaaagaaagaggaagaaaaaagaaaaataaaggaaataaaaaagagagaagtgcatcaaggtttacacctgtaatcccaacactttgggagtttgacatggaagaattgtttgaacccaccattttgagaccagccctgacaatacagtgagaccatgcctctacttaaataaaataaaataaaataaaataaaataaaataaaataaaataaaataaaataaaataaaatataataatgttagccgggcatgatggcaggcgcctgtactttcagctcctttggagcctgaggtgggagcatcccttgggctcgggaggtggaggctgcgttgggccttggtcaggtaatgcactgcagcgtgttgtccaggctggtcttgaactcctgaactctagccaactgcctgcctcagcctccgaaattgcacctgccatattcaacggccctgggggtatcagtgacagactttagtaagcatggttgttatgccatattgcccaggttggtcttgaacttgaacccgggaatttgaggctacggtgagccaaggtcatgccactgtactgcagtctgggtgataaagcaagaccccatctctaaatatctaattaataaaaacaataacaataatataaacaataatacaaataaataacaaacaacagcaataataataaacaaactagtgagagtgaaaaatataaaaataaaaaaggtaatttagatcacaattaattgcagtaatttcaaggagttatttctttaacctgtctctcttactttctgaaacagggtctttctctgtcactcaggctggagggcaatggcgtgatcatggctcactgcagcttcgacatcccagaatcaagctattcctgcaatctcagccacttggaaggctgagatggcaagaacacctgcgggagcccaggaaggttgaggctgtgatgagccgagaatgcaatctcacactccaacttttcaaaaaaaagaaaagaagaattagaaggagaagaagtaaacataaaacaacagcaacttcagtgtgtagaaaggggagtaagaaaagtaaaaggaaaaagaaaaacaaaatgaagagcagctgaaaatactgtggaaacagttggagaggaagaaatgacgtggtgaaagagcagcctctagtggatgcaggtggtagtgctgctgaccagagttacccgttctaccttaacaatcccaagttgacggtcaagtccagcgctcgccgatgacatcttatggacccagggctcgcggaaggacccagttggaactttatcacaccaagccggcccacctttgctgccatctaactccgccgacctgcccgcagttccccactctccgctggttgaccggggcagcggagagaggaggaaagcacaaaggcagtgactggttcatatcccatcgccgcgcgcctggggtggggagaggggccgtgaccccatcggccaccactgggcacgcgtgaacactactcggacaggaaccgcagggcacaccctcggacaaccactcctgagtcattctcaccaggctcggtgaatccaatctcagcccctggaggagttcccagcggggtgcgaggaggaggtggaatcggagaggtggaaggaggagcaggggagccacctctacctcagcaacccctggcgcggcaccttggaaagcccgagggtggggacgtgagcctcccaatgcacagcgggcgccgatgagctctcgcgagagacacccactgcgtgatccggggctcaggggtgggtgggcatgagcgggccagggaagaggttctcgggaacaggagaaaggaaggaaggtatatgtcaagggctgaattacacaggacacaccacatcacacaccacatcaccaggtcctccgcacacgggtgcagagagccttgtgtggaggtctgactttcaatagatagcagcgagggagctgctctgctccatggaaaaccctgacccagaagcaggacgtctgcgaatagtttagcatcaggttccccacaaacacgttatgtgatgggtcagggggtgaccgcctttctggcagcagcccgtttcccaggatgggggtttctctgcaccggatcccggtttccggagcacggcaggacatgcgcccagcgcggggcggagcggcacaccggaggggactgcagaagactgcctacccgaggccaacaaaggttccgtggcgctgccttatcattcctcatgggcgggattcttagagtccttcagtcctaatcccgcttatagtagctttaccccattggctcctcagacaaggacatacaccaaatgtctgaacctgtgatttctctactaatgagcaggattaccatgggaacaacacatgggcaacaacacatggggaacacacgcagtaaaactaacctgtctcacatgggtctaaccataatgctttccagggcatgcgcaccgctctcaggtgaatccattccagtctgccttgtccttcgcaaagaaaagagagctctgcaggggcggtggctcatgcctgtaatcccagcaatttgggaggttgaggagggccgatcatctgagatcaggagttcaagatcagcttggccaacatagtgaaaccctgtctctataaaaatacaaaaattagccgggcatgatggcgggtgcctgtaatcccagctacccaggaggctgaagtgggagaatcgcttgaacccggggaggcggatgcctcccgcttgaacccggcaggcgcacatgccaccatgctgggctaatttttgtatttttagtagaaacagggtttcaccatgttggccaggctggttttgaactcctgacctcaagcaatctgcctgcgttagcctcccaaagtgttgggattacaggcgtgagccaccgcacccagcgtatgtgtatagagctcctcgagaggaaagcctctattattaccattgcaacagtagaaaaagtaaagctttttttttttcttttgagtaagagtttcactcttgttgcccagaatgcagtgcaatggcctgatctcagcttactgaaacctctgcctcccaggttcaagctattctccggcgttggcctctcaggaaggtgggattacaggcatgtgccaccacacctggctaattttgtatttttaggagagacagagtttcaccatgttggtcaggctattctcgaactcctgacctcaggtgatacacctgcctcggtctcccaaaatgctgggatcacaggcatgagccactgtgtctagcttttttttcttttctttttttttgaaatagtgtctccatctatttcctaggctggaacacagggacat

SEQ ID NO: 1889104 - DNA, 4001 bp, Homo sapiens
aacaggaccatcaagttcagacacaggccattttgaatctgttgtcaccatgctcaattggtgccaaagaagggtaggcttctgtgccacccatctgtcatcaccacccttgtcaaatataattgcagggtcacgactgcacagagatctctcaacccactgaatgcatccgtatttttatgagccccgttgggagaataaacaggatatttagaaaagtactcatcgtgcgttatttggtctcccatgtctcttgtgaaaccaaacaaatttatgggccatttttttttctttccagcacttgaccatccatacagtacctaaataaaagaagaatgaatgcattttatgaaacaaggagaaaaacaacgaagcgaaagtctcagaggcttgtgatacacaggggtatacagaatgaggagacttccagaatccaaacaaagacagacggagggatgggaggaaacgaattgagaaaagagacacacaaaaagatgaagaaaaataaatgcaaagaaaaagagacagagatgtaaagggaagaaagataaagaaaatagaaagacagagaaacagaaaaagagaataagaaatgacagaaagaagggaggaagaaaaagagagagaagaaagagaaagaaaagaaagaaaatgaaagaaagaaagaggaagaaaaaagaaaaataaaggaaataaaaaagagagaagtgcatcaaggtttacacctgtaatcccaacactttgggagtttgacatggaagaattgtttgaacccaccattttgagaccagccctgacaatacagtgagaccatgcctctacttaaataaaataaaataaaataaaataaaataaaataaaataaaataaaataaaataaaatataataatgttagccgggcatgatggcaggcgcctgtactttcagctcctttggagcctgaggtgggagcatcccttgggctcgggaggtggaggctgcgttgggccttggtcaggtaatgcactgcagcgtgttgtccaggctggtcttgaactcctgaactctagccaactgcctgcctcagcctccgaaattgcacctgccatattcaacggccctgggggtatcagtgacagactttagtaagcatggttgttatgccatattgcccaggttggtcttgaacttgaacccgggaatttgaggctacggtgagccaaggtcatgccactgtactgcagtctgggtgataaagcaagaccccatctctaaatatctaattaataaaaacaataacaataatataaacaataatacaaataaataacaaacaacagcaataataataaacaaactagtgagagtgaaaaatataaaaataaaaaaggtaatttagatcacaattaattgcagtaatttcaaggagttatttctttaacctgtctctcttactttctgaaacagggtctttctctgtcactcaggctggagggcaatggcgtgatcatggctcactgcagcttcgacatcccagaatcaagctattcctgcaatctcagccacttggaaggctgagatggcaagaacacctgcgggagcccaggaaggttgaggctgtgatgagccgagaatgcaatctcacactccaacttttcaaaaaaaagaaaagaagaattagaaggagaagaagtaaacataaaacaacagcaacttcagtgtgtagaaaggggagtaagaaaagtaaaaggaaaaagaaaaacaaaatgaagagcagctgaaaatactgtggaaacagttggagaggaagaaatgacgtggtgaaagagcagcctctagtggatgcaggtggtagtgctgctgaccagagttacccgttctaccttaacaatcccaagttgacggtcaagtccagcgctcgccgatgacatcttatggacccagggctcgcggaaggacccagttggaactttatcacaccaagccggcccacctttgctgccatctaactccgccgacctgcccgcagttccccactctccgctggttgaccggggcagcggagagaggaggaaagcacaaaggcagtgactggttcatatcccatcgccgcgcgcctggggtggggagaggggccgtgaccccatcggccaccactgggcacgcgtgaacactactcggacaggaaccgcaggggcacaccctcggacaaccactcctgagtcattctcaccaggctcggtgaatccaatctcagcccctggaggagttcccagcggggtgcgaggaggaggtggaatcggagaggtggaaggaggagcaggggagccacctctacctcagcaacccctggcgcggcaccttggaaagcccgagggtggggacgtgagcctcccaatgcacagcgggcgccgatgagctctcgcgagagacacccactgcgtgatccggggctcaggggtgggtgggcatgagcgggccagggaagaggttctcgggaacaggagaaaggaaggaaggtatatgtcaagggctgaattacacaggacacaccacatcacacaccacatcaccaggtcctccgcacacgggtgcagagagccttgtgtggaggtctgactttcaatagatagcagcgagggagctgctctgctccatggaaaaccctgacccagaagcaggacgtctgcgaatagtttagcatcaggttccccacaaacacgttatgtgatgggtcagggggtgaccgcctttctggcagcagcccgtttcccaggatgggggtttctctgcaccggatcccggtttccggagcacggcaggacatgcgcccagcgcggggcggagcggcacaccggaggggactgcagaagactgcctacccgaggccaacaaaggttccgtggcgctgccttatcattcctcatgggcgggattcttagagtccttcagtcctaatcccgcttatagtagctttaccccattggctcctcagacaaggacatacaccaaatgtctgaacctgtgatttctctactaatgagcaggattaccatgggaacaacacatgggcaacaacacatggggaacacacgcagtaaaactaacctgtctcacatgggtctaaccataatgctttccagggcatgcgcaccgctctcaggtgaatccattccagtctgccttgtccttcgcaaagaaaagagagctctgcaggggcggtggctcatgcctgtaatcccagcaatttgggaggttgaggagggccgatcatctgagatcaggagttcaagatcagcttggccaacatagtgaaaccctgtctctataaaaatacaaaaattagccgggcatgatggcgggtgcctgtaatcccagctacccaggaggctgaagtgggagaatcgcttgaacccggggaggcggatgcctcccgcttgaacccggcaggcgcacatgccaccatgctgggctaatttttgtatttttagtagaaacagggtttcaccatgttggccaggctggttttgaactcctgacctcaagcaatctgcctgcgttagcctcccaaagtgttgggattacaggcgtgagccaccgcacccagcgtatgtgtatagagctcctcgagaggaaagcctctattattaccattgcaacagtagaaaaagtaaagctttttttttttcttttgagtaagagtttcactcttgttgcccagaatgcagtgcaatggcctgatctcagcttactgaaacctctgcctcccaggttcaagctattctccggcgttggcctctcaggaaggtgggattacaggcatgtgccaccacacctggctaattttgtatttttaggagagacagagtttcaccatgttggtcaggctattctcgaactcctgacctcaggtgatacacctgcctcggtctcccaaaatgctgggatcacaggcatgagccactgtgtctagcttttttttcttttctttttttttgaaatagtgtctccatctatttcc

SEQ ID NO: 1889105 - DNA, 4001 bp, Homo sapiens
ggaccatcaagttcagacacaggccattttgaatctgttgtcaccatgctcaattggtgccaaagaagggtaggcttctgtgccacccatctgtcatcaccacccttgtcaaatataattgcagggtcacgactgcacagagatctctcaacccactgaatgcatccgtatttttatgagccccgttgggagaataaacaggatatttagaaaagtactcatcgtgcgttatttggtctcccatgtctcttgtgaaaccaaacaaatttatgggccatttttttttctttccagcacttgaccatccatacagtacctaaataaaagaagaatgaatgcattttatgaaacaaggagaaaaacaacgaagcgaaagtctcagaggcttgtgatacacaggggtatacagaatgaggagacttccagaatccaaacaaagacagacggagggatgggaggaaacgaattgagaaaagagacacacaaaaagatgaagaaaaataaatgcaaagaaaaagagacagagatgtaaagggaagaaagataaagaaaatagaaagacagagaaacagaaaaagagaataagaaatgacagaaagaagggaggaagaaaaagagagagaagaaagagaaagaaaagaaagaaaatgaaagaaagaaagaggaagaaaaaagaaaaataaaggaaataaaaaagagagaagtgcatcaaggtttacacctgtaatcccaacactttgggagtttgacatggaagaattgtttgaacccaccattttgagaccagccctgacaatacagtgagaccatgcctctacttaaataaaataaaataaaataaaataaaataaaataaaataaaataaaataaaataaaataaaatataataatgttagccgggcatgatggcaggcgcctgtactttcagctcctttggagcctgaggtgggagcatcccttgggctcgggaggtggaggctgcgttgggccttggtcaggtaatgcactgcagcgtgttgtccaggctggtcttgaactcctgaactctagccaactgcctgcctcagcctccgaaattgcacctgccatattcaacggccctgggggtatcagtgacagactttagtaagcatggttgttatgccatattgcccaggttggtcttgaacttgaacccgggaatttgaggctacggtgagccaaggtcatgccactgtactgcagtctgggtgataaagcaagaccccatctctaaatatctaattaataaaaacaataacaataatataaacaataatacaaataaataacaaacaacagcaataataataaacaaactagtgagagtgaaaaatataaaaataaaaaaggtaatttagatcacaattaattgcagtaatttcaaggagttatttctttaacctgtctctcttactttctgaaacagggtctttctctgtcactcaggctggagggcaatggcgtgatcatggctcactgcagcttcgacatcccagaatcaagctattcctgcaatctcagccacttggaaggctgagatggcaagaacacctgcgggagcccaggaaggttgaggctgtgatgagccgagaatgcaatctcacactccaacttttcaaaaaaaagaaaagaagaattagaaggagaagaagtaaacataaaacaacagcaacttcagtgtgtagaaaggggagtaagaaaagtaaaaggaaaaagaaaaacaaaatgaagagcagctgaaaatactgtggaaacagttggagaggaagaaatgacgtggtgaaagagcagcctctagtggatgcaggtggtagtgctgctgaccagagttacccgttctaccttaacaatcccaagttgacggtcaagtccagcgctcgccgatgacatcttatggacccagggctcgcggaaggacccagttggaactttatcacaccaagccggcccacctttgctgccatctaactccgccgacctgcccgcagttccccactctccgctggttgaccggggcagcggagagaggaggaaagcacaaaggcagtgactggttcatatcccatcgccgcgcgcctggggtggggagaggggccgtgaccccatcggccaccactgggcacgcgtgaacactactcggacaggaaccgcagggcacaccctcggacaaccactcctgagtcattctcaccaggctcggtgaatccaatctcagcccctggaggagttcccagcggggtgcgaggaggaggtggaatcggagaggtggaaggaggagcaggggagccacctctacctcagcaacccctggcgcggcaccttggaaagcccgagggtggggacgtgagcctcccaatgcacagcgggcgccgatgagctctcgcgagagacacccactgcgtgatccggggctcaggggtgggtgggcatgagcgggccagggaagaggttctcgggaacaggagaaaggaaggaaggtatatgtcaagggctgaattacacaggacacaccacatcacacaccacatcaccaggtcctccgcacacgggtgcagagagccttgtgtggaggtctgactttcaatagatagcagcgagggagctgctctgctccatggaaaaccctgacccagaagcaggacgtctgcgaatagtttagcatcaggttccccacaaacacgttatgtgatgggtcagggggtgaccgcctttctggcagcagcccgtttcccaggatgggggtttctctgcaccggatcccggtttccggagcacggcaggacatgcgcccagcgcggggcggagcggcacaccggaggggactgcagaagactgcctacccgaggccaacaaaggttccgtggcgctgccttatcattcctcatgggcgggattcttagagtccttcagtcctaatcccgcttatagtagctttaccccattggctcctcagacaaggacatacaccaaatgtctgaacctgtgatttctctactaatgagcaggattaccatgggaacaacacatgggcaacaacacatggggaacacacgcagtaaaactaacctgtctcacatgggtctaaccataatgctttccagggcatgcgcaccgctctcaggtgaatccattccagtctgccttgtccttcgcaaagaaaagagagctctgcaggggcggtggctcatgcctgtaatcccagcaatttgggaggttgaggagggccgatcatctgagatcaggagttcaagatcagcttggccaacatagtgaaaccctgtctctataaaaatacaaaaattagccgggcatgatggcgggtgcctgtaatcccagctacccaggaggctgaagtgggagaatcgcttgaacccggggaggcggatgcctcccgcttgaacccggcaggcgcacatgccaccatgctgggctaatttttgtatttttagtagaaacagggtttcaccatgttggccaggctggttttgaactcctgacctcaagcaatctgcctgcgttagcctcccaaagtgttgggattacaggcgtgagccaccgcacccagcgtatgtgtatagagctcctcgagaggaaagcctctattattaccattgcaacagtagaaaaagtaaagctttttttttttcttttgagtaagagtttcactcttgttgcccagaatgcagtgcaatggcctgatctcagcttactgaaacctctgcctcccaggttcaagctattctccggcgttggcctctcaggaaggtgggattacaggcatgtgccaccacacctggctaattttgtatttttaggagagacagagtttcaccatgttggtcaggctattctcgaactcctgacctcaggtgatacacctgcctcggtctcccaaaatgctgggatcacaggcatgagccactgtgtctagcttttttttcttttctttttttttgaaatagtgtctccatctatttcc

SEQ ID NO: 1889106 - DNA, 4001 bp, Homo sapiens
atactaattttgccatttatattttactatcaactataattattgtttttcttaaaagaaataaatataccattatgaggtgatcagaagcagacaaggaggttagacatttcctcatttattcactcagcgaccctgtcacagaactaaatctgtgctaagtgccatgatgggcccagcatgtggtgctgagaaatgattgagtggccctttccccaactcaagaagcctgcagtctgaggatatatggacaaaaaccctaaagcaagtacaagtaaatgaagagtaaatgctataattaaaataaagtaggatgttgaaaggcagggcggggagccatagcattctagggacccaaatgcctctctgtggcaacagatgaccagccctgcacaactctggggatacagtgtcagtgagatgccactcctggtgcagagaaatgcaggcagaagtgactttggcagaggatgagagaaagaggccggcagggctagagggagcctggggaagagaaaaggagagggaaggaggactctgggacctagaagaataagacagtgatctgcttctctctgacaacattctccccaaacttagcatctttaacaacaaattcttactatctcacaatttatgtggaccagaatctggacacagctttgctggttgcctgcacatggggctccatgaagctggggctgtgctctcagctgaagctgagctgtgagaggattagattccaagcacactcatatgggtattgtccagattcagtgtagactgagagcctgagtgtttcctggggcctgggcactccctcattctctgttgtgtaggccactgcataggcagctcataactctggatcttgttttctgaacttgagggatgcagtagaaagacagggaaataaatacacattgaaagagaaagagaaagacattggcagaaaatgggagagaaaacaatgggcagagtaagtagaagaatgagagaaatagattgagggacaaaacacagaagaaagagacgaggagaaaatgaggtgaaagcctcaggaacagtattactggctctataaacaaaacaaaacaaaacacaacaaaaaacccagagaactccatcctccactatctgtcaggcaaatatagaatgtaaagactacagtctgaaactcagaagagagagttctcactagagctcgaccatgctggcattctgatcttcaacttctgtcctccagaactgtgagaaagaacattgaagaacattgtactgttgataagcggctcattctatctttgctgtaacagccaatctaagacagaaatgttatcatatcacatttattgcattccatttgtcagaagtgagctgcagaccccttagtgttatgagccttcctatagtctgccaaccacataggccaaaatgagggacatgggtctgattctgaatataatgagaaggctctaaaaagaataatgtcagaggatgacaacatgtgaatttcatttcacctcaaattcttactagtgtagaatgaaaaatgaggctgagaggggaagcgactttccaatatcacagtgctggacacaggcctgcttgtgttgtattctatgttacctcccattccttcttataattattttatctctaaatgcgtgcattgtctacatgggatgccacaccatgagttttacaggtcttatctcatacacacccgatgagttccctagggagatgctggcatattacccactgtacaggttgaaaggccccaaaacctacaataacttttctagtgtcacagaactaataagaaatactaggttcttacccagatctatgacctcaaacctgagaccctggcttcattcaggtcttttcagggaagtgaggagggctgttcttgcataattgtgcacagctaaagagttgacacgcagggatagtgagcagtcagtagcccagaaggtcattttagatgggttttatggaggaaagcaaggagccagaggatgaaactttgaaaaagtgatcttacttcctttgtgacagaccccaacagaacttagaactctggtaaccaagcacctacatcctagagacaaccctgtgcccaggtcactcatggaaaatgtttaacagagcacaatatgctcctggtagatcccaatactcttaggctcttgattcaggaaggcctaaagtgaaaaccttttctgagatgctgacattggcttattccacacaccagatgtctctggaaattttgtaggggttgcccagagataacaaacactaagcttagggcaagcccctccaggctgggtctcaccagtgctttcatttaccttgcattagaatgtatggaaaaaacaggaatttaaaatagcaaagattgacccaaactacttttttattagattccctaaggttctgtattggtgttgttgttgttttgtttctttgtttgagacaagacctaactctcactcaggctggagttcagtggcacaatcacagctcactgtagcctagatctcctgagctcgagcaattctctcacctcagcctcccaagtagccgagagactactggtgcacaccaccacacctggctaatatatatatatatatattatttttagcagagatgaggtctcattgtgttgcccaggtctgtcttgaactcctgaactcaagcaatcctcaatttttgatacataaatatgctaggtgtaggattcttagtcgagagctttattttttttttctgtgagcagtgaccaaggaaagtttcaaaagaagaaatagagaaactttaaataaggcaattaaatgaacaaataaagagctaagaaaaaacaaagattgagtattgaggttgtatttatggcagctaatgatagactggatccagtcagagagttcaagcagaattgtatttgcagagagtagaagtcagagagtgagggtgtccaaaatgaagccaactggaatatttttttgttacagaatcaaaaacaatgcatggggacacaccatgccaaacccaaacaggctgagctgttgctctgcactaagaaatataggtttatgggaagaaaagctaccatcataacaacaagtgtatttgtatttaaaaaaatcataaatgtgcagttataatcaggattaaggttaaagttatatttcaggtttggttggtgggtgtcacaaagcaaaaaatgtgtctgttgccaagaagtgggcattctagtttgcaaaataaaatatccccatgactagagacagaagataacaaaaagggatgggatgggccgggcatggtggctcacgcctgtaatcccaacactctgggaggccgaggcgggtggatcacaaggtcaggagattgagaccatcctggctaacacagtgaaaccccatctctactaaaaaatacaaaaaaatagctgggcatggtggtgggtgcctgtagtcccagcaacttggaaggctgaggcaggagaattttgtgaacccaggaggcggagcttgcagtgagccgagatcacaccactgcactccagccagggtgacaaagcgagactgtctcaaaaaaaaaaaaaaaaaaaaaaaaaagaaaaaagaaaaagggatggcatggaaaacacaagttcctggaaatttatgtcaaaatcagatatataaagaaggacaatgtgcatctcagtcatcaattctgcctgtaattgaggtttttttctgcccttgataaatataccaggcctactacgtgacaggtgaaaagcagcctacattctgtttcccctgcaagatgccttgacttagggatctgttcccaggggaaaaagcacatcttttaagtacttttggagcatgagttatcttccaaattccaacaaagtagcttatatttctaggtgaccctaagaccactaaagaagaaataaatgaagaccatgaaactttcttgaacttgtggaaatc

SEQ ID NO: 1889107 - DNA, 4001 bp, Homo sapiens
tactaattttgccatttatattttactatcaactataattattgtttttcttaaaagaaataaatataccattatgaggtgatcagaagcagacaaggaggttagacatttcctcatttattcactcagcgaccctgtcacagaactaaatctgtgctaagtgccatgatgggcccagcatgtggtgctgagaaatgattgagtggccctttccccaactcaagaagcctgcagtctgaggatatatggacaaaaaccctaaagcaagtacaagtaaatgaagagtaaatgctataattaaaataaagtaggatgttgaaaggcagggcggggagccatagcattctagggacccaaatgcctctctgtggcaacagatgaccagccctgcacaactctggggatacagtgtcagtgagatgccactcctggtgcagagaaatgcaggcagaagtgactttggcagaggatgagagaaagaggccggcagggctagagggagcctggggaagagaaaaggagagggaaggaggactctgggacctagaagaataagacagtgatctgcttctctctgacaacattctccccaaacttagcatctttaacaacaaattcttactatctcacaatttatgtggaccagaatctggacacagctttgctggttgcctgcacatggggctccatgaagctggggctgtgctctcagctgaagctgagctgtgagaggattagattccaagcacactcatatgggtattgtccagattcagtgtagactgagagcctgagtgtttcctggggcctgggcactccctcattctctgttgtgtaggccactgcataggcagctcataactctggatcttgttttctgaacttgagggatgcagtagaaagacagggaaataaatacacattgaaagagaaagagaaagacattggcagaaaatgggagagaaaacaatgggcagagtaagtagaagaatgagagaaatagattgagggacaaaacacagaagaaagagacgaggagaaaatgaggtgaaagcctcaggaacagtattactggctctataaacaaaacaaaacaaaacacaacaaaaaacccagagaactccatcctccactatctgtcaggcaaatatagaatgtaaagactacagtctgaaactcagaagagagagttctcactagagctcgaccatgctggcattctgatcttcaacttctgtcctccagaactgtgagaaagaacattgaagaacattgtactgttgataagcggctcattctatctttgctgtaacagccaatctaagacagaaatgttatcatatcacatttattgcattccatttgtcagaagtgagctgcagaccccttagtgttatgagccttcctatagtctgccaaccacataggccaaaatgagggacatgggtctgattctgaatataatgagaaggctctaaaaagaataatgtcagaggatgacaacatgtgaatttcatttcacctcaaattcttactagtgtagaatgaaaaatgaggctgagaggggaagcgactttccaatatcacagtgctggacacaggcctgcttgtgttgtattctatgttacctcccattccttcttataattattttatctctaaatgcgtgcattgtctacatgggatgccacaccatgagttttacaggtcttatctcatacacacccgatgagttccctagggagatgctggcatattacccactgtacaggttgaaaggccccaaaacctacaataacttttctagtgtcacagaactaataagaaatactaggttcttacccagatctatgacctcaaacctgagaccctggcttcattcaggtcttttcagggaagtgaggagggctgttcttgcataattgtgcacagctaaagagttgacacgcagggatagtgagcagtcagtagcccagaaggtcattttagatgggttttatggaggaaagcaaggagccagaggatgaaactttgaaaaagtgatcttacttcctttgtgacagaccccaacagaacttagaactctggtaaccaagcacctacatcctagagacaaccctgtgcccaggtcactcatggaaaatgtttaacagagcacaatatgctcctggtagatcccaatactcttaggctcttgattcaggaaggcctaaagtgaaaaccttttctgagatgctgacattggcttattccacacaccagatgtctctggaaattttgtaggggttgcccagagataacaaacactaagcttagggcaagcccctccaggctgggtctcaccagtgctttcatttaccttgcattagaatgtatggaaaaaacaggaatttaaaatagcaaagattgacccaaactacttttttattagattccctaaggttctgtattggtgttgttgttgttttgtttctttgtttgagacaagacctaactctcactcaggctggagttcagtggcacaatcacagctcactgtagcctagatctcctgagctcgagcaattctctcacctcagcctcccaagtagccgagagactactggtgcacaccaccacacctggctaatatatatatatatatattatttttagcagagatgaggtctcattgtgttgcccaggtctgtcttgaactcctgaactcaagcaatcctcaatttttgatacataaatatgctaggtgtaggattcttagtcgagagctttattttttttttctgtgagcagtgaccaaggaaagtttcaaaagaagaaatagagaaactttaaataaggcaattaaatgaacaaataaagagctaagaaaaaacaaagattgagtattgaggttgtatttatggcagctaatgatagactggatccagtcagagagttcaagcagaattgtatttgcagagagtagaagtcagagagtgagggtgtccaaaatgaagccaactggaatatttttttgttacagaatcaaaaacaatgcatggggacacaccatgccaaacccaaacaggctgagctgttgctctgcactaagaaatataggtttatgggaagaaaagctaccatcataacaacaagtgtatttgtatttaaaaaaatcataaatgtgcagttataatcaggattaaggttaaagttatatttcaggtttggttggtgggtgtcacaaagcaaaaaatgtgtctgttgccaagaagtgggcattctagtttgcaaaataaaatatccccatgactagagacagaagataacaaaaagggatgggatgggccgggcatggtggctcacgcctgtaatcccaacactctgggaggccgaggcgggtggatcacaaggtcaggagattgagaccatcctggctaacacagtgaaaccccatctctactaaaaaatacaaaaaaatagctgggcatggtggtgggtgcctgtagtcccagcaacttggaaggctgaggcaggagaattttgtgaacccaggaggcggagcttgcagtgagccgagatcacaccactgcactccagccagggtgacaaagcgagactgtctcaaaaaaaaaaaaaaaaaaaaaaaaaaagaaaaaagaaaaagggatggcatggaaaacacaagttcctggaaatttatgtcaaaatcagatatataaagaaggacaatgtgcatctcagtcatcaattctgcctgtaattgaggtttttttctgcccttgataaatataccaggcctactacgtgacaggtgaaaagcagcctacattctgtttcccctgcaagatgccttgacttagggatctgttcccaggggaaaaagcacatcttttaagtacttttggagcatgagttatcttccaaattccaacaaagtagcttatatttctaggtgaccctaagaccactaaagaagaaataaatgaagaccatgaaactttcttgaacttgtggaaatc

SEQ ID NO: 1889108 - DNA, 4001 bp, Homo sapiens; identical to SEQ ID NO: 1889106

SEQ ID NO: 1889109 - DNA, 4001 bp, Homo sapiens; identical to SEQ ID NO: 1889107

SEQ ID NO: 1889110 - DNA, 4001 bp, Homo sapiens
accaggaagggtggaggcaggttagaaaaatcataccctctcccacagccatcagagcagggctctggctcacaggtgcctttagaagtaccatttcatatgaaggccacaatgccccattttacaggtggggaaacaaaggccttgagggctagggaagagggcagcctccccaccttgagggctagggaagagggcagcctccccaggtggggcaacacaccagctcctcaaagctgctgtggggctcggcctgctgcttgtagagggcttcccactccagctccagcatcctctccagctcccacagagtctcctgctgccacagcctctcatcctgctcctgaagcctctcctgttccagcagctcctaccccttgtccagcagcctctcctgttcctgcagcctctcctcctgtctcctgttcaggagactcaacatctgattgttttccacctcagcctggagctgtcttcccacactctccagctccttccttaggtggttggtctcatcttgtagctgctccacctcagagggccctgctgggggctctggggccaggggttcagctgagaaaggaagcagacaataagggcctctggactctcaaaaaaaaaaaaaaaaaaaaaacctccctttgttggacagctcctcctctcaggcttcccaaacttggcctcactgctaatgactcctcacacccggatggtagccaatcttcaaagtcactttcagatagagagcactgtgggtggctgacaatgggcactcctccctctttactgatagggacactgaggttcatggagatgacaagacttgccatctcctggcacagacctctttccctctgcctcaaagcccttccatccaccctcctccctggggcattctaagtcaccctcacagccctctgatgccagtcctgctcctaggtcatgccagtcccatcttaaccatctggtttttgagtttgaacaagttcctcccaagcttctgtacccaatgtatctcatgctgcttcccctctttcaatgcgtggacctgcccaaagcacagaggggaaagggccctggagaggggctgctgaacctctagagacagagtttgagaaagtcccaccccccttctgccaccttgtgattgagaaaggtgcattcattcaacaaacatttactgagcacgtacaattcttcatagcagagatataagacagcaaaggacagacaggagcccttggccctgaggtttccattctaggggcctttaaatctcagagctaacagtgacctttgatactctctacctcctccagaaacatgagcctaaggaggagagatggcttgtccagactcaaaaagcaaattaggggctgaggcagggcagaaatacgggcctctgacaaccagtcaggctagtgcttccctgagagatgacaaccccagggcatgtgtggcaacaactagagcaagggtgtctggagaagagagagtcagcaaagagggcagtgcagaagagccatgctgcatgttctgtgctctggggtccctccaggtgaggcctgggtgccccagctccccatttgcccttggcatcaggggctcctggcccctttcttcagggcaccaagggaaaactggagtccaggattgaccagctggaatcaggggaccccactggactcttaccagtgaattgatgttttcactgagttgactgattattgcggagcttgagtgcagggccactgctagttctcggtactggctgtgaggtgcatgcagagaggaggagttggaggaagattgtggggaggggtagagagaacaatcattagggctggtggagggtgtgggttgtctcagctggcagaggggcaacaagcccctgctgtgggaggaggttggagggctggcctgcagggtcactgcacctcagcccagggcctcttacctccagatcctccagggtagcagatgatgcatggccttccccgtagatacctgttgctgactgcaagagatgagagtgcacatggagatgttctgtcccccctcactgtctaagccctctgatttcctttcttccccatcaactggcaaaagcttcttttctgcctatcttggaccctttgtcccataactcctttgtgccaacttctctcatggttcttatctccccaccatcccaccctggggccctttcagtgactcctaaagggacagcctgatggcaagtgtctcttctcattaactggcttccccttgagactggggatgaggaaaatcaaacaacaaccatttcctgggtgtcctgggtgtttacagcaggccatgtactaaggattcacatataagcaataacaaatctgatttaaacttcacaaatggaagtcaaaaataccacctctattatgcagatgtgaaaacagagacccaaagacctcaagcaacttgccctaaatcatatgctaatcaatccctaatcaatcattagcagacggagaggcaggattcaaacccagaattcttaaccagtacccaatagtccatctacaatcttaaaaattaccccctactgccccttaggccccctgtccccaggaccctggccagccaagactcacatccccaggtgagtggtaaccaccagaagtggctgtgtcagggctactgccattgattttctttttcctgttagctcctgctggaatgccagggctcttcctctgccaatattcttttaactgtgggaaagaagagcagcaacactcatgagaacaatcagcccctatagccacatcctgctttacagttttgacaaaatactcttatacaccatctggtttaatgccaccaacaactgtacaagatgttgtcacaatcatttagtgactgagagtgattgatatcatggatagaaaaaaaaaaagaaggaaagaaaaaggcaatactggaacttaaactcagtcttctgactccaagctctggggttttgccatgaatcagcagcttccagggaccaaaaccagggacagtggtagaaaagtaaacattaagcaggcaggaactgtaggccgtgtagtttagagtcatacatcctcacatgtctgttagtgtaaagaagtgcacgagtacctctcacactttcatatcaatgtgtcctcatggcagaaggcagcttttctgttaaatctgggaatttatcagaaagaggacaacccaagcctcattttagagagaagtctgctatacgcttggaaacctatgtgtctatcatccctaagaacattaatgtttattaaactctcaataaacattaatgttcttagggatgatagacacataggtttccaagcgtataccagacttctctctgaaatgaggcaaaagcaatggcaacaaaagccaaaattgacaaatgggatctaattaaacgaaagagcttcagcacagcaaaagaaactaccatcagagtgaacaggcaacctacaaaatgggagaaaatttttgcaacctactcatctgacaaagggctaatatccagaatctacaatgaactcaaacaaatttacaagaaaaaaacaaccccatcaaaaaatgggtgaaggacatgaatagacacttctcaaaagaagacatttatgcagccaaaaaacgcatgaaaaaatgcttaccgtcactggccatcagagaaatgcaaatcaaaaccacaatgagataccatctcacaccagttagaatggcaatcattaaaaagtcaggaaacaacaggtgctggagaggttgtggagaaataggaacacttttacactgttggtgggactgtaaactagttcaaccattgtggaagtcagtgtggcaattcctcagggatctaggactagaaataccatttgacccagccatcccattactgggtatatatgcaaaggattataaatcatgctgctataaagacacatgcacacgtatgtttattgtggcactattcacaa

SEQ ID NO: 1889111 - DNA, 4001 bp, Homo sapiens
caccaggaagggtggaggcaggttagaaaaatcataccctctcccacagccatcagagcagggctctggctcacaggtgcctttagaagtaccatttcatatgaaggccacaatgccccattttacaggtggggaaacaaaggccttgagggctagggaagagggcagcctccccaccttgagggctagggaagagggcagcctccccaggtggggcaacacaccagctcctcaaagctgctgtggggctcggcctgctgcttgtagagggcttcccactccagctccagcatcctctccagctcccacagagtctcctgctgccacagcctctcatcctgctcctgaagcctctcctgttccagcagctcctaccccttgtccagcagcctctcctgttcctgcagcctctcctcctgtctcctgttcaggagactcaacatctgattgttttccacctcagcctggagctgtcttcccacactctccagctccttccttaggtggttggtctcatcttgtagctgctccacctcagagggccctgctgggggctctggggccaggggttcagctgagaaaggaagcagacaataagggcctctggactctcaaaaaaaaaaaaaaaaaaaaaacctccctttgttggacagctcctcctctcaggcttcccaaacttggcctcactgctaatgactcctcacacccggatggtagccaatcttcaaagtcactttcagatagagagcactgtgggtggctgacaatgggcactcctccctctttactgatagggacactgaggttcatggagatgacaagacttgccatctcctggcacagacctctttccctctgcctcaaagcccttccatccaccctcctccctggggcattctaagtcaccctcacagccctctgatgccagtcctgctcctaggtcatgccagtcccatcttaaccatctggtttttgagtttgaacaagttcctcccaagcttctgtacccaatgtatctcatgctgcttcccctctttcaatgcgtggacctgcccaaagcacagaggggaaagggccctggagaggggctgctgaacctctagagacagagtttgagaaagtcccaccccccttctgccaccttgtgattgagaaaggtgcattcattcaacaaacatttactgagcacgtacaattcttcatagcagagatataagacagcaaaggacagacaggagcccttggccctgaggtttccattctaggggcctttaaatctcagagctaacagtgacctttgatactctctacctcctccagaaacatgagcctaaggaggagagatggcttgtccagactcaaaaagcaaattaggggctgaggcagggcagaaatacgggcctctgacaaccagtcaggctagtgcttccctgagagatgacaaccccagggcatgtgtggcaacaactagagcaagggtgtctggagaagagagagtcagcaaagagggcagtgcagaagagccatgctgcatgttctgtgctctggggtccctccaggtgaggcctgggtgccccagctccccatttgcccttggcatcaggggctcctggcccctttcttcagggcaccaagggaaaactggagtccaggattgaccagctggaatcaggggaccccactggactcttaccagtgaattgatgttttcactgagttgactgattattgcggagcttgagtgcagggccactgctagttctcggtactggctgtgaggtgcatgcagagaggaggagttggaggaagattgtggggaggggtagagagaacaatcattagggctggtggagggtgtgggttgtctcagctggcagaggggcaacaagcccctgctgtgggaggaggttggagggctggcctgcagggtcactgcacctcagcccagggcctcttacctccagatcctccagggtagcagatgatgcatggccttccccgtagatacctgttgctgactgcaagagatgagagtgcacatggagatgttctgtcccccctcactgtctaagccctctgatttcctttcttccccatcaactggcaaaagcttcttttctgcctatcttggaccctttgtcccataactcctttgtgccaacttctctcatggttcttatctccccaccatcccaccctggggccctttcagtgactcctaaagggacagcctgatggcaagtgtctcttctcattaactggcttccccttgagactggggatgaggaaaatcaaacaacaaccatttcctgggtgtcctgggtgtttacagcaggccatgtactaaggattcacatataagcaataacaaatctgatttaaacttcacaaatggaagtcaaaaataccacctctattatgcagatgtgaaaacagagacccaaagacctcaagcaacttgccctaaatcatatgctaatcaatccctaatcaatcattagcagacggagaggcaggattcaaacccagaattcttaaccagtacccaatagtccatctacaatcttaaaaattaccccctactgccccttaggccccctgtccccaggaccctggccagccaagactcacatccccaggtgagtggtaaccaccagaagtggctgtgtcagggctactgccattgattttctttttcctgttagctcctgctggaatgccagggctcttcctctgccaatattcttttaactgtgggaaagaagagcagcaacactcatgagaacaatcagcccctatagccacatcctgctttacagttttgacaaaatactcttatacaccatctggtttaatgccaccaacaactgtacaagatgttgtcacaatcatttagtgactgagagtgattgatatcatggatagaaaaaaaaaaagaaggaaagaaaaaggcaatactggaacttaaactcagtcttctgactccaagctctggggttttgccatgaatcagcagcttccagggaccaaaaccagggacagtggtagaaaagtaaacattaagcaggcaggaactgtaggccgtgtagtttagagtcatacatcctcacatgtctgttagtgtaaagaagtgcacgagtacctctcacactttcatatcaatgtgtcctcatggcagaaggcagcttttctgttaaatctgggaatttatcagaaagaggacaacccaagcctcattttagagagaagtctgctatacgcttggaaacctatgtgtctatcatccctaagaacattaatgtttattaaactctcaataaacattaatgttcttagggatgatagacacataggtttccaagcgtataccagacttctctctgaaatgaggcaaaagcaatggcaacaaaagccaaaattgacaaatgggatctaattaaacgaaagagcttcagcacagcaaaagaaactaccatcagagtgaacaggcaacctacaaaatgggagaaaatttttgcaacctactcatctgacaaagggctaatatccagaatctacaatgaactcaaacaaatttacaagaaaaaaacaaccccatcaaaaaatgggtgaaggacatgaatagacacttctcaaaagaagacatttatgcagccaaaaaacgcatgaaaaaatgcttaccgtcactggccatcagagaaatgcaaatcaaaaccacaatgagataccatctcacaccagttagaatggcaatcattaaaaagtcaggaaacaacaggtgctggagaggttgtggagaaataggaacacttttacactgttggtgggactgtaaactagttcaaccattgtggaagtcagtgtggcaattcctcagggatctaggactagaaataccatttgacccagccatcccattactgggtatatatgcaaaggattataaatcatgctgctataaagacacatgcacacgtatgtttattgtggcactattcaca

SEQ ID NO: 1889112 - DNA, 4001 bp, Homo sapiens; identical to SEQ ID NO: 1889110

SEQ ID NO: 1889113 - DNA, 4001 bp, Homo sapiens; identical to SEQ ID NO: 1889111

SEQ ID NO: 1889114 - DNA, 4001 bp, Homo sapiens
actctgtcactcaggctggagtgcagtggtgcaatcatagctcactgccaccttgaactcctgggctcaggaccctcctacctcagcttccctagtagctgggactacaggcacgtgccgcaatgcccagctgatttttaaattattttcctacagatatggtctccctatgttgcccaggatggtctcaaagtcctggcctcaagcagtcctcccgtctcagcttcccaaagggctgggattacaggcctgagccaccaagcccggccatccctttatctgtactggaaacagaaattaaacccacgatctgaactttaagaactcaaggcagcgtcttcccagagctttagttagggccgtttcagaacagacttcttcccatgggccttccaggcagtgacaggctcagacactgctattgggaatagccaatgctattccgaagaaacaagcccattgagtttcaggactatattttacaaaaggaaactggtgagaacccaaggtccccttcacttgctgtaaatcaccccctcccagcagctgaggctggtatctccattccctccagccccagagagacctgggcgagggagtgagggggagacttggggtttggggcaatcctgcggtcaaagtggggttctccccagtgcagaccaatctctcacccatgccagtaggaacaggcaggctgaactgaaggagcttgagctactcacccgacatggtccgtggcgccgcacgcagtgggcgcggacccgcagacctgcgcccaggcgcagtgggtggaaataaatcctcgtcacgaacccgcagaacagaggcgccgtctttgggaagccgcgtggatttccaggcctgggggcgacagcgtggctgcctcgacaccctcggctgcaggcctcgccggtgtcacccccggcctcctactcactccatgtcacctgcgccccatggggccccggcctcccccgacgcccctgagacccccacgccccgcaattcctcctcggcgctctaggtcagcctcgtgccctctggccaggggccccttgaccccctgtcctccccacagtcacctgcgaccccgctgattcttaatacccatgcgcccagcaacgacaccgcacgcggaacaccgcccgacctcagcggtgtcagcagctgccccgtcgcccagcgcacttgcttggagtactggtacatcctcttcccccaacccagctgccccccgacccggtcacccctctccactccctggcccacccctgcgctcccggaccccagtatctgcacctcctccgagcttgagctgcctctgcccgtgtccccaggccaggcgccccctcccccgtcactccagtgccgccccaccccagcccactcctgcgcctctcgccgcccctcctccccgtcccggccttctgcccatcctctccaagcgcccccgaatcccctccacgccctgcacctctccctccccgcgcgctcccgcagcctctgccttgggcctgcgcctccctccccaagcctctcagctctacgtccccgcccccgtctgtcctccatactgaggcagcctccgtctccccgtgcccactgcgcctggaccacctgtactcctcagcactcggcgcctcggctcggcccacccacccgcaagcgccgctagcctatccctgcgccccgcacccctccccgcctttgcttttgggcaacctctctctgacctccagctcccagcgcctctcgccccacctctgcactccaaggccggcgcccctcccccagcccccagcctctgcctctgggttccgcccgcgccccgctgtacgccacccaccctcgagacctcctaggcgttcgggcagcctcagcgccccccggcccccagccgcgcccaggcctcctccactgcatacgatcccctgcaccccgctgcagcccccgcacctcttccggcgccctggctgcctctgcccaaagccggcgctgggggcccggagggcagcgattggcctctgtcctgaagcccggccccgcctccgcccagccctggtaggcgcgggtcagctcctcagccctgcagcccctgcccgcaagcccgcgcgcctcctggtgtccagccccagctaccaaggagagagacccaggaaccgccagtggctgcgctccacgccggcgcccagcccctcgcccaccgcggcccccttggcagttggcggtttctaggtttggacatttaacctttaattggccggccccaaagtaaatgtttgcgatgacttaaggccctgggcccaaggccagcgcgcagcccgagtggaggccgctctggaagcctcccagaggagaaagcagagctcatacactatcttgttgaatgcatgaaaaatacacgtgcgcaaacttgcacgcatgaatgaatgaatgaatgcacgaaagagagaaaaaatgagtgttcaggcctcagctgttgaatacatagcgagtgagtggctatacgcacgcggtgagtgcatgtatgagtgactgcatgtatgcgtgaatgcatgtgaggcgagaatgaacaaacaacaattcgtgaatgagatagcgaggaaatgaatgaaccagtgactcaacatttgcgccaaggagggaatgaatgcatgagttgaaggcatgaatgggccaatgcatgtatgaaggaatttagagatacatgcatgaatggaggagtgactgtgtggaaaaaataggtgaatgcatgcatgcatgaatgaaggcatgaatctatgaatgagggaatgaatgagttgaatgcatgaatgattgaatgaacaagtgaattcatacatgcatagtgcatgaattagtgaaaggtgaattcatgtatgcatgagtaaacaaataaattaatgcctgcatgaatgagtgcatgaatgagtgaacaactgaattcatgagtgattgagtgcatgaatgacttaagtgaattcatgcttgtgtaagtgcatgtatgagtaagtgaacaggtgaattcatgtatgcatgagtgcatgtatgagtgagtgagcaagtgaattcatgtatgcttgagtgcatgaatgagtgaacaagtgagttcatgccagcatgagtgagtgtatgaacgagtaactaagcgaattcgtatatgcatgagtgagcacgtgaatgactgagtgaacaagtgaattcatgcctgcatgagtgagtgagtgaattcatccatgcaggattgaacgagcaggtaaagtcatgcatttatacaggaatgaatgtgtgtgtgtgagtgaatgaacagaatacatgacaagtgaatatgtggatgaatgaatgagtgaataaatatgtatgagtacatgaataagctgaacaaactagcatgtgtgttaatgcacacacacgagtgaatgagtgaagactgcatacatttcatgaattcatgtattatgtataagtgaatgaatgaattgaatgcatgaacaagttaatggatgcatgaatgaattaagtgaaagtgtgaatgcatgcatgcgtgagtgaattgaatgaatcaatgaatgtgtgaatgcaagcatgtatgaatacatgagttgaatgagtgatgattgtgtgaatgcaagtgtgtacgagtgcatgagttaagtgaataagtgagaaaccctgctctgtagcaagagagcgccttctgggtggaagcaacttggaactgcaccaagcagagccactgccaggccctaaggaaagacatgggaatgctgccccttcctcaaccttcctatggcgtcttcaccttgtgtttccaggtattcccaaagtacagtgacagttgtcacaatgaacccaatgaacacaaccccatgctggcatcctcaggatagattctgtcagctgtcgagcagctcactggcagggtagacaggcaggggcctgcctcctgcctccttctaggcagctcttatctctctggcctggtgaacacatttttc

SEQ ID NO: 1889115 - DNA, 4001 bp, Homo sapiens; identical to SEQ ID NO: 1564419

SEQ ID NO: 1889116 - DNA, 4001 bp, Homo sapiens; identical to SEQ ID NO: 1564420

SEQ ID NO: 1889117 - DNA, 4001 bp, Homo sapiens; identical to SEQ ID NO: 1564423

SEQ ID NO: 1889118 - DNA, 4001 bp, Homo sapiens; identical to SEQ ID NO: 1564424

SEQ ID NO: 1889119 - DNA, 4001 bp, Homo sapiens; identical to SEQ ID NO: 1888782

SEQ ID NO: 1889120 - DNA, 4001 bp, Homo sapiens
tgtacaccttggtggccacttctaaaacctgagtgacattcatgccagtgaaacactctagcttttgcagctttcgcctgatgtctccctgggtttgccctacaaacactgcgtttaccatgcactggttctcagtagcctcagggtcaaatggactgcaaagctggaaggcctcatagagtctctcataaaactggctacagctttcatctgctctctgaagcacctctgaaatgtttcccatattgaatgcctttttctctccttttctcaaaacttgcaggagtgcctcttggtacctctgcagttgctgtagttgggcttccttgtttgggtcccagtgcgggtctgcttctgggaactggccctgtgcatatgccaggacattaagggtgccttccagtgcattgttttctagccactggtgggctacctaggtcacccttcagcattccttggtgttgaacagcatcaggaaaagctgtttgcagtctggccaagttggattgtgtgtctcaaaaatagactgcatcagattttgtgagagcttggggcttctccatgtaggagggagtatggtgtttccagtttaggagatcaatagttgaaaaagggtgataaatgaaagttggttgcccacccttggacctggccctgttcatcataatacatgggtccccaagtttctcagagaggcatctgcaaagctcttgcagccagattaaaggcggcctgcttgatcattttgaccttcctccttgacctcctggggcaagggctcagatttcacactttggggttagcctgaggtgtatcatcatctgagtctggctgctattgggccaggcttggtaaaggtggatagattggtgcataggggagaggggtttctatttccgctggtggttcctgcaaaactggtttttcttgtggtttttcctttctgtttgtagctgacagtaaagctgaattctctttcacttttggctcagctcgagctaccagtgttctgcaataagctgccaggcagggctctagccatacaggtcgagtttgaattatattcagccgtgagtcaatataaggaaattggcctggaagtccaggctgtcctccgacctcagtcaccaccttaaatacacagccaattatttccccatctatagttccttcggccggccatccaatactgaaagaggaccactctatttcacagacagttctcaacctctgggggtcaacttgatcccataatcccccacataatctttcttaaagttgtttaacatgcattctaatggggtgggtttcaacaacttccctcccatttcctcccatttacagcacaattcactcactgttttactttcacttcagaccgattagactgtctccctcacaggagtatttcagacactgctaagctttaaaggagggtttgagtcccaaacccagaccaccacaatcactaaactgtggggcacctccctagcatacagtctatgctaagagacctgtggctccacacacaccattccccacgttggttccttttggaatcgtctgtttcacacacattcacacacctccccactcccggtttcgtttcttaactgacttagcaagccacttttgtgtcctgggttggttggggtgtaggtttcttccaaatttgcgagccactcttgcatcctgggtcatattactaggtataccctgggaggtgatgaggctccccttctgtcatgggacaggtcttgcctcgggcccaaaccttaccgaggtcctgtagcacactgttccttgaatcatcctgtagccccttaggttctgttgtgctgtcagagagcggcaccaggttgcgggagagctgatctcccctcgggttgaagttgtcctgatagcatgcctggagtcacgggtctcccccaggctggggccccagacccacaggcaaaggagacagcaaacctgtcgtcttcactcctggctggctcaccaaaatgtggctggaatcaggagaccggagagaccaatgaggggaacaggacgattgtatttaggtggccaccagctcagcagattaatacccagaggctgagcaatgagcaaagaaagggcttgacttttattcatgtgaccaaagggtgttggcctgtggtgcaaaacttgtggggtggggaaagcaagcttacagaagcagaacaaacgcagttaaactgtgacaggtcttgtaactcaggcatgtcttgtgacctttgccatcctgcacagatgggaaaaacaggaccttacaaaatccttgcaaacttgcagaaatagttacaaaaatagttatacaagcagaacaaagaatgatggcatgggtagagaatttcaggaagacactgataagaacttgtttctcttgtccctgtttttggaacccatttcttcagggcccctacctggccttgcaggtaatgttatcacagctgtagctggactttggagtgagtcagcctggtcagggaaggacttgtttttctttttacttgtttttcttatatttcctgcttcatgagcaagaaacaacaagctttaccttcacagtagaagagtccagcagaacaaagttggaagcagagggagtgaatctaaacctatggacagattcatcttggaaaccctaagtgaggctaaaggtgagtgtctagctgataccagaaagtcattatgactaattctaactgttggagtgcaaaagtcagtctcaaagctaacagccagtactaggaaacagaaacaaagtaacaagaaactcttatagcagcagagtcctcctaaataattccattgcctggtatttttcatcattaatctacttagaaagaaaattgggcctttttaaattattattatgatgaactgctcataacataaaattttccacgataatcatttttaagtgtacaattcagtacttttaaatgccttcacattgttgatgtaacctgtttctagaactttatcttgtaaaacagaaatgctatacctattaaaacaacttctccctattttcccctccccacagtcctgtcaaccatcatctacatactgtctccctgaatttgactattccagggacttcatatagacagaatcatgctgtatttgttcttttatgtctggcttattttacttaacactgtttttactgtaagtccagttgtagcatatgtcagaattgtattctattttaaggctgaataacattccattttaagtatatttcatattttgtttatccgttcatctcttaatggaaatgtgaattgtttccaccttttgcagttgtgcatactcttgccataaatatttatgtccaaatatctgtgagccaggctttcaattatttggggtatatatgtaatcttggaattgctgaatcattttccacatcagctgcaccattttgtactttcactagcaattcataatatccattttctccacatttttcccaacacttatttgctcttaaaagtaagtattaatttgtatgaaatggtatctcgttgtagctttaatctgcatttccctaatggacaatgatgttgagaatcttttcatgtgcttattgatgatttgtatatcttctttggtgagaaatgtccattcaaacccttagcctatttttaattggtttttcttgttgagttgtaggagttatttatatattctggatattagtttcttatcagatatatgattgacagatattttccctatttgtggattgccttttcactctgttggtagtgtttttaggtattcagaagtttctaattttgtccagcttacatattttttattttgctgggtgtagtggcttaaacctgtaatcccagcacttcgggaggtcaaggtgggcagatgacctgaggtcgggagcttgagactggagtcaccaacatggagaaactctgtctttactaaaaaacaaaattagctggtcgtgg

SEQ ID NO: 1889121 - DNA, 4001 bp, Homo sapiens
tgctgagatcctcaggcatctccttttatttctatgagtctctccatgggatgtccattctgcatagtgttatcagggtgttagacttcatgatgtactggtctggggctcctgaggggtttgtccccatgacagcaggagacttaggcagagctgtgtcaccttttctagcctaggccagaggtggcccaatatccagaaaatgctttcactgttttctattaattagaagcaagtactgtgttctgtcacatcaggaatattttcaaattggtttgcaaagaatttcaaagtgtgttttagatcattacagtggccatgcctaataattacttatttttataagtgttggatgggttttacccaatgtaatatcagatacagacttttaagcttgaaacctgtgtcatagctctgaacatttggttgtatgttgaaataactctcaagcaaaaattgattttgaaattagcactataaataagttaaataaatgaggtaaagtcataaatatctgcatgaaatgcttataaacaggtcagccttaaaaatgtcatgaagactaatatgccacccttttattatttctatggatattacttggactggaggacaaggactcaggggtatgctggtcaatctctgcacctggaaacagtggctggggcaccaggagtaatactttgagccatgaccatgtagtgaggacaaggagtccatctgggttaaggagagtgtcactgtatatatatatatatatatataaacacacactatatataaaaacactatatatataacactatatatatatataaagcacaatatcagaaactcagtagtcatagtgaaatcaaaaaataatcacagtcaatttgatctcatacctagactgaaatatgaaacttcaaaagaaaagaatgttaagaactttcggcttgtcaaaattttcctacatagataaaattattggtgactttctctcactagagaacataaacaaaaatcgatgttttgtatatgtgtaaatgaaaatatttttatttctatcagttatgacatgcaagtaataaagtgaaagtacaataataaataataaattatataaggaaatttctgtgtcaaaaaatttcattgactattaattttataaaaccatagagaatgcttcatgaaactacattatacagtactttttagtatttcacttacattttaaataatcaacaaattaaaggaaattctgaatcattatttcttaccaatatcattattctactcaagaaattcttctgatattaaatattttaaataaaacattaaaaacaaattgtattcactgatatcagcttttgatgaaataatacttctgtatttgtaatcatgttaaatatatctttctcctcacagtggatcttttgtaacaccagtgttattattttctctgatacaaaccctgtgatatctcaaggctttactgtgtccatacattacatacctccagagagtaggattcaaagagatggaaaaattatatttgtgaccaaattctaggaaagggaatgataaaatgggagaataatttctaaatttctaactgttcatcaatggatttggatatatttaggtatagacaaatatttgcacactgcaagtttgcacatgtgtatttaaatttatatgagatacccataatgtatgggttgtgtaatctcttaattaattctcaattttacatgtggcaaattgataagagtttaccctcatcaaatacgcaatttgaagtactatactccatttgatgtaaagccaataaaatctctgtcaacattcatttcaattaatccaataatgttaactgctgataacttcattctccctgtcccctgttaacagctgaaagttgattctcaccttaattcagcactcagggtgtcttcgtcaagagactgtcaccttgctttggattgtgacctctgactccaccactttcttcctgtagcagtcctacctttgtgtatttaatgaactttgtacatcgttaaaaaataaaaacgcagtgaaatgtcaggccatgctgtgaaatgttccagtgtttctatatctcaaattgaactttcatgttatagaagataagaaaaacaattcatttattagtattcagtccaatgcaccctttcttattaatacgccaaacctgtcccttcaaagcactgacattcaagcacagctagacgtatcaaaatttattctcaacaataaccattatgttaataactgttgcccagatctggaccctgcctgtggaatctttggttggaaattgctattatgggtcaaactaagagaatgactattttttggcataattactgctgtcatcttcctgaaaaatatcacgttagatggcagcttttagttagatccattctattaatttttaatatccatcatttatgatattgcacaagtaaagacctttgataacttaaattgttagctgagaagtgactaaagtaactcacaacaattcagacattcatttacctactagaaatgccatacatcattaacttccgctgaaaacaaagttgaaaaattacaagtgctaaattgtttactaaagtatgtatttcagggcagctaaataattgtgatgagaggcagtcccatccaccaacagcccgatgaaagaacccttccacaatgagaaggttgtgcagatgaaatgaaacagaggctggattaccaggcaaaagccagacatggttgcctctttctcatcccacaggaatcatgcagccatccaataaaagtgggagaacaagagtttccttgttagcagctatagctggaatttatagttttaaaactatcaaagctgcccagtctttaaaacttgacagtattttgaaggaaacaatcacacaatggattcccacgtaggtcgttcttcatggagcagaaaacgtttagtatggaaaatggtgagccacacccagaaaaccctaggctgacaaggaacaccaaaatcatgaaaagaagagggaagtgtggaggccacatcccacccagcatcagtccatccaactcccatttgactatgggtatgaaatccctcaacttgggagtttgccaggatggcccaattttgcatctgaaatgttccctacatattggagaactcccacatgaacactgtgccatgttgtaaactgcttgagaaatgaaagaaatgctgtggtgctgttggaagcaacttttgtgtcaactatcttcacattttttgcaggtgaatgtgtgggtctctttccacccctcatcagattgtatcccaacccctatttaaccttgttgttgttcacattctctatcccaaaatgaaaccacaagatgatgaaagagtaacccctcatgacctgaagcacctgctaggctgggaaatgaattcgaagtaaattgaaggtggacatgactattagtgtctctctatgggttggccccaggacaatgaaacactggaagatgtctctttgtgtttgtggtgtgcttctcttctttctagaagagtggctgttttacagatgagagtaatttggattccggcaggtctgagccagcatcccaattcactgcagattcaaactccacaaaatgataaagaaaaggatggacagcagcccaagcagagccacagacaggccaacaaaatgttggaagactgaaaaaaaaaaaagtgctgcagtgcattagccacattgctttaagcagattctacttataggtgcacacacacacacacacacacacacacacacacacaaagccacacacatacacagacattcaacattcacattactttcatagaaacacacatcctggcagcttctgaggctgcgtggctctgcacgaagccccatctgggagatagcaactccgggcaacacaaatgggctgtacctagaaatcacagtggggcaaatttcaaaaagactcac

SEQ ID NO: 1889122 - DNA, 4001 bp, Homo sapiens; identical to SEQ ID NO: 1888790

SEQ ID NO: 1889123 - DNA, 4001 bp, Homo sapiens
ttctttgttccataaattactagccagtcatgacactgtgaatatttcttatggttttggataatcccatggctcccacaaggccagttcttctaatgaagctgaagccaaatgctcattcttaggtaaaagttcatttgtaatggttaatcactgcttagttatattttccttttcatatgaattactgatgattaccaatgacacagggaaaacatgtaaaaccatcaaactcttcactgaatataaagtttacatatgttgtcctttctcagctgaagaaggtaaattttcccatgtagttcaatccacctcacacaaacaaatactgctacctttgaatgactgcatgccaaatttttacataacagttctcctttaactctaagtagttggctctatcttaaatgttgacaaattaaaatgtgctagtgaaaactttctaatgatggccaagaattacttttagtgcaataagcaacactattaaaggggtcattacaacactgttgctatttcaaaatagaaaagtttctcctttaatatactcttcacagtgcttttccttagaggtcagtctttcacctgtgatatgttcactggcttatttttcaatggaaatgtgttggcttctgtatcctgaagtcactaaatacctgacttcacctatactctatcctgaagtcaataaatacctgacttcactgatactctacatatgaaatgtaaaattgaaaatgtcaggttttaatttcctccatattaggatggaggactaagtaagaattttaatttgttctgcttaacttctttgctaaaaacttttatttattgtcttgctttcttctgttcagtctgcaatcttacaattctccttctcaaaaatatttcttctattcaatcctactgctcacctcatgtgcttagatctaaattcgctcctcaaataatttccaacctcacactaaggatcttgtgttaatgtttaagcatcctggaacaatcttaattattgatttacatccccttgtatttcacaactctgcacttctgtaaaatccacttcagttaagaatattggactccttcatgtctacctttcaagccttaaatttatttttaaataatatttaagcccagtgactccttttctgctaaatgttcttgcagttcttttgaatctttgtataagcagtaacgatgtcttgcatataagcattactgaggtctcagaagctggatggccaggctcagttgctcacactgtgagccagtgtggaaggctgaggcagctggactgcttgagccacgggctttgacaatgtagtgacaggtttgacaatgcagcaacatcctctctctacaaaaatataaggaaaaaaatttagctagctgtggtggtgtatgcctgtagttgcagaaactcaggtggctgaagcaggagaattgcttgggcccagaaatttgagaccgttgtaagccatcatctcaccagtgcactctgacctggtaagagcaagactccaaaccaacaaagaaactgaacaagcaatttttagattgggacaccaggggaacactacctaggaaatggaagaattcattagatgaagaagcctaccatcaaagaatattgctaggaacttttagaaaattaaggggaattttctagcaaacacaggattaaaaggaatgttgtcctcactctaatcacttctttgatctgcaatgagaagctcaagtatttcttcacaacaaatctgaaatgtacccagtgagatagaaactataataaaagctatcgatcagtaattatgcccatgtatgtgtcacttctcctttgttcagtgaacttaaagttaagcatccaggtaaaatagctcatttttagtcatacaaaaactacagtctttctatcagatagcatttaccttggcctctcatccaattattgcttcttaccacagcagaaggagcagactttttaggaggaggacctccactttttgaagagggacctcttttaactagaatgggttgcctagaagaactcgtgttgagatcaagagagtatgcatcatcatctgtatttcaaacaaaatcttttcagttaactaacatcactgtttcttaaatggctaagttttagttgtttataaagattatctacatattatcatcttataaattcatatttgtctaagctaataaaattaacatttctatatgaaataagtacagttcaagcaataaaagtctgttgagaaaatctagaaagaaactcaagaatcataatatattggtgtgagagagagatgaagacaaattggggagtgaacagggagcagaaatctatcactaaaatatctaagtataatagacataaaatattaaaagaaaaatgataaatgactgtttatatcattgtgttttgaggaaaaattttcaaagcatgtcataaagataaactaaattccattcaaacaaattcaaatatttatgatatcaaaaagtgacacatcaggaaaatacattatctctaaaatttgttaacataatatagaattcttacaattcccttatgaaacactaattttcagattacactatgctaaattttaatagtcattaagaattgcatattaaataatatataaagatttttatatatctacaaaaaatgtagatatgcggcaatatatctacatacataacataggtggtgttacaggttagaatacacacattctcagacatggtggagtgttgttgaacttcaccctcaaaagcaatggagacaaaataaccatgtagctatgcatcttaaaatggagcaaacactgcaatttccacttaaaaaaatctccaattaattacacatctggttattaaaactccaagttaaatgttagattattgaaggttagttaatagataatacaagttaaccgataggtatttatttatttatttatttatttatttatttattgagatggactcttgccctattgcccaggctggagtgcaatggcctgatctcggctcactgcagcttccacttcccaggttccagcgattttcttgcctcagctgagtagttgggattacaggtgcatgccaccatgccaggctaattttctgtatttttaggagagacagggtttcaccatgttgaccaggctggtctggaagtcctgacctcatggtccacctgctccgtactcctgaagtgctgagatgtcaggcatgagttactaaacccagcccatccaatagttttttcttttttaaaaaatacgtggtttttcttttttatgtaaaaattgacccctcatttctattgtgtaaatcactataaatatcattttcagtgtcttatcctccagcaaacaaagatacatacatatatgtgaagcagtggtttttagaccttttcagagtcacagactctttgcagaagttaaagttctacatttcttaaattgaaaatgctttatggcaggccaatgtacaaactctctgtatcaaaattacaaagcaatacatttgcatagatgtttgcacacatatatacaagaaaacaaatattgcaaaatcaatcttaagtactgagttacttttccctgttggaaagttttaaatattgcttactttgataatacaactgatatgaagttctgggccccaaagtagaaaactctaaagtatgatgaatataaatgagttctgcagaaaacctgttgagtagcagcaattggcattcataaaatcaaatcagtttgaaatttgtgttatttcaatccaacgttattacaattttacaacaaattttagatattacttcaatcattcttgtaatacacctttagtacttagaaataagtttgcttattataagtcaattttctgttcataaaggaaataaatataattgagaaatttcgatatcttcaaacttattttctttcagtcctatggttccatctttacattttaaa

SEQ ID NO: 1889124 - DNA, 4001 bp, Homo sapiens
gaggtgggtgacagtgaaatatggccaggttcttaacctcactgcctccattcatcctgagtcttgcaggggctcttggtgaaatggaggaaccatgacaaaggcaagtccaaggtggagcagtattctcacagctctaagtggactcccacaggtgcaggtgaggatgagacagtgtctcagaggacatctgtgacaattgcaatcctgaaatgtttgtcaggtagtgctattgaagggcactgtggaccccccatgaaagcaaaggaaaatcaaggctcacatgagagaatgagctgccatgtgctgtagtccaagccacgtttagagatttctgtcacaggacccaaaagcctcttgaaaagtgcaaacaatctcagcccccacaagtaaaccatgaccccaaacctaaagtgcagtcagcctacccaaagtcccttttgctctctgaaatccctggaagccaataattctgtggtgagaggtagcctcatccaacaacagcccgatgaaagagccctccacaatgaaacaagacaagcagatgaaatgaaacagagcctaaattcccaggcaaaagccaggtacagctgcctgcttctcctacaggtatcaagcagccctctgataaaagctggataacaagagtttctttgttggctactgttacagaaatttagttttaaaactatcgaaactgcctagtcattaaaatctgacagtgtttaaaagaaaacactcatgaaatggattactttgagggtcatcttccgtgaagtggtaaatggttaacgtggaagatgtggagccaggcccaggagaacttaggccgatgaggtacatggaagtcaggaaaaaagagacaagtgtggtggccacatcaaacctcacgtgaaatgatctcacttccatttagctcctggtatgatagtcctcaaatagggagtttgccaggatggctccagtttgcactccaaacattccctgcacattgtggtgctctcaactgtacaccaggccatggtatggacttgcttgtgtaattaaggaaatgtggggatacagttggaagcacattctgtgacatctatcttcacattttttgcaggtgaatgtgtgggaccgcatccacccctcaccagcttgtatcctcacctttatctgatgttatggctgctcaaagtatctgtcccaaaatgaaattccaagacaatgaaggagtgacgtgaaggtcctgctcagctaggaactgaatatgaagtaaattcaaggggccctgaggactggactgctagtgtttctccatgggatgtacactggagaataaagcagtgaaatatttctgttcctgggtttgatgtgctcctcttctttctagaagagtggcttttttttttcctcagggggaggttatttggacctggcaggtctcagccagcctctcaatttacagcggattcatgatctgcagaaaaataaagaacatggaacccagcagcccaagaaaagccacaaagacagaccaccaaaaggctgggagactcaaaaacaagaaagcgctgcagtgtgttagccacatttttttaagcagattccacttacaggcatgcacacaaacagggaaacacacacacaaatgcagacatccaacactcacaacactcccacagaaacacactcctggcagcttctgaagctgtgtggttctgcaggaagccccatgtgggagagagcaatcccggggaacacaggcatgctgtatgtagaaatcacagtgggaccaatttcaaaatactcacccctacaacatctaggcaggcctgaagcatcctgcagatcctttaggattgttagggaattcacggattattcctgcggctctgcttgaggcttcttaatgctggcttacatctgccctctcaccctctcctaggatcatgggactctcccgaggattccacagagaagagaccacagtccaccatgatgcatcttcacggaggtctccttctctgccaagcctcagggacttttcactaggcaaagagttattgattgtgatgcaagccaaagatcacagctcaggggtggtgccctgaggctagcagatgcacattcgcaaggcaggcccaggggctcagctgtcagagcagccattctgcctaagcaaaggaaaatggtataggcagagccggcctcatatcaggagaaaggctgcctgtgataaccaactgggggaccctaaataagtcaaccttaggaccccttccatccatctccttggtcgggtcccactggaggaagaggtgttttgagactgttaggctgtcatgcaaaactgctcttttgacttcattcttgaaagaggctatttgtaagaatcaggtcccatagggattggaatagagtctggtgagttgttgaggggtctttgtgtcatggaatcataagtgagaccccagaggtggttgtcagtgaaatatggccaaacccctgtcctcactgcctctcttcattctgggtcccccaggggctctctgggaaaggcataaaccacaacaaatgcaagtctaagatggatcagagttctcacaccttgaacttccctctcagggatgcagatgaggttgacacattgtcttagaggctgtctgtggctattgcaagcctgaaaactgcgtccaatagtgccgttgtggggcaatggcgacaccccatgaaagcacaaaaaactcaaggctcacccgagagaatgagctgacttttgctggagtccaagcaacattcagatactcctgtcagagtacctaaaagcttcctcagaagtgcaaacaacctcagcctccacaatgagacaacgacccacaacctgaagtgcagccagcctacctgaaggccattttgctccctaaaatcgctggcagccaaaagatctgtggtgagtggcagtcgcatccagcaatggctgaatgaccctctccacaatgagaaaggacctacagtggaaatgaaacagaccacagattaccaggcaaaagccagacatgactgcatgcttctcatcctatgggaatcatgcacccatccgacagaagagggagaacaagagtttccctgttggtgtcagtaacaggaatttatggttttaaatgtattacagatgcccagtcattaaattgtgacagtgtaatctgtcttcaccatttttgcaggcgaatatgcatgactccaaccaccccttaccagactgtatcttcaaacctatgtgaccttattactgctcgtactctgtgtccaagaataaaatcccaagacaatggaggattgtcccattgtgatgaaaagcacgtgttcagctgggaatcaaatttgcggtagattcaaggggccctgagaacaggactgccagtgtctctccctgggtttgctgcagaacatgaaacactgggagatgtctgctcttgggtgtggtttgctattcttcttcctagaagagggttttgttttgttttgttttttgcagtgggacataatttaactttggcatgtctcagccaatctcccagttcactgtggattcatgatccacacaaaaaaatgaagaagttgtaatcccatagaccaagcaaggccacacagacaggccaccaaaagttaggagtctcaaaaataagaagtgctttagggcaatagccacattcctttaagagattccacttacaggcacacagatacacacacacacacacaccccaacactcacaacactcccacagaaacacacagcccagcagcttctgaggctgcatggttctgcaggaagccccacctggaagagacaatgcctaaggaacacaggctggctgaaactagaaatcacagtgtggcaagtttcaaaaagactaactgctacaatgtctaggaaggcctgaggcctttttcagatccttttggatccttagggatttcacagtttattcctggggctctgcttgatgttt

SEQ ID NO: 1889125 - DNA, 4001 bp, Homo sapiens
agaggtgggtgacagtgaaatatggccaggttcttaacctcactgcctccattcatcctgagtcttgcaggggctcttggtgaaatggaggaaccatgacaaaggcaagtccaaggtggagcagtattctcacagctctaagtggactcccacaggtgcaggtgaggatgagacagtgtctcagaggacatctgtgacaattgcaatcctgaaatgtttgtcaggtagtgctattgaagggcactgtggaccccccatgaaagcaaaggaaaatcaaggctcacatgagagaatgagctgccatgtgctgtagtccaagccacgtttagagatttctgtcacaggacccaaaagcctcttgaaaagtgcaaacaatctcagcccccacaagtaaaccatgaccccaaacctaaagtgcagtcagcctacccaaagtcccttttgctctctgaaatccctggaagccaataattctgtggtgagaggtagcctcatccaacaacagcccgatgaaagagccctccacaatgaaacaagacaagcagatgaaatgaaacagagcctaaattcccaggcaaaagccaggtacagctgcctgcttctcctacaggtatcaagcagccctctgataaaagctggataacaagagtttctttgttggctactgttacagaaatttagttttaaaactatcgaaactgcctagtcattaaaatctgacagtgtttaaaagaaaacactcatgaaatggattactttgagggtcatcttccgtgaagtggtaaatggttaacgtggaagatgtggagccaggcccaggagaacttaggccgatgaggtacatggaagtcaggaaaaaagagacaagtgtggtggccacatcaaacctcacgtgaaatgatctcacttccatttagctcctggtatgatagtcctcaaatagggagtttgccaggatggctccagtttgcactccaaacattccctgcacattgtggtgctctcaactgtacaccaggccatggtatggacttgcttgtgtaattaaggaaatgtggggatacagttggaagcacattctgtgacatctatcttcacattttttgcaggtgaatgtgtgggaccgcatccacccctcaccagcttgtatcctcacctttatctgatgttatggctgctcaaagtatctgtcccaaaatgaaattccaagacaatgaaggagtgacgtgaaggtcctgctcagctaggaactgaatatgaagtaaattcaaggggccctgaggactggactgctagtgtttctccatgggatgtacactggagaataaagcagtgaaatatttctgttcctgggtttgatgtgctcctcttctttctagaagagtggcttttttttttcctcagggggaggttatttggacctggcaggtctcagccagcctctcaatttacagcggattcatgatctgcagaaaaataaagaacatggaacccagcagcccaagaaaagccacaaagacagaccaccaaaaggctgggagactcaaaaacaagaaagcgctgcagtgtgttagccacatttttttaagcagattccacttacaggcatgcacacaaacagggaaacacacacacaaatgcagacatccaacactcacaacactcccacagaaacacactcctggcagcttctgaagctgtgtggttctgcaggaagccccatgtgggagagagcaatcccggggaacacaggcatgctgtatgtagaaatcacagtgggaccaatttcaaaatactcacccctacaacatctaggcaggcctgaagcatcctgcagatcctttaggattgttagggaattcacggattattcctgcggctctgcttgaggcttcttaatgctggcttacatctgccctctcaccctctcctaggatcatgggactctcccgaggattccacagagaagagaccacagtccaccatgatgcatcttcacggaggtctccttctctgccaagcctcagggacttttcactaggcaaagagttattgattgtgatgcaagccaaagatcacagctcaggggtggtgccctgaggctagcagatgcacattcgcaaggcaggcccaggggctcagctgtcagagcagccattctgcctaagcaaaggaaaatggtataggcagagccggcctcatatcaggagaaaggctgcctgtgataaccaactgggggaccctaaataagtcaaccttaggaccccttccatccatctccttggtcgggtcccactggaggaagaggtgttttgagactgttaggctgtcatgcaaaactgctcttttgacttcattcttgaaagaggctatttgtaagaatcaggtcccatagggattggaatagagtctggtgagttgttgaggggtctttgtgtcatggaatcataagtgagaccccagaggtggttgtcagtgaaatatggccaaacccctgtcctcactgcctctcttcattctgggtcccccaggggctctctgggaaaggcataaaccacaacaaatgcaagtctaagatggatcagagttctcacaccttgaacttccctctcagggatgcagatgaggttgacacattgtcttagaggctgtctgtggctattgcaagcctgaaaactgcgtccaatagtgccgttgtggggcaatggcgacaccccatgaaagcacaaaaaactcaaggctcacccgagagaatgagctgacttttgctggagtccaagcaacattcagatactcctgtcagagtacctaaaagcttcctcagaagtgcaaacaacctcagcctccacaatgagacaacgacccacaacctgaagtgcagccagcctacctgaaggccattttgctccctaaaatcgctggcagccaaaagatctgtggtgagtggcagtcgcatccagcaatggctgaatgaccctctccacaatgagaaaggacctacagtggaaatgaaacagaccacagattaccaggcaaaagccagacatgactgcatgcttctcatcctatgggaatcatgcacccatccgacagaagagggagaacaagagtttccctgttggtgtcagtaacaggaatttatggttttaaatgtattacagatgcccagtcattaaattgtgacagtgtaatctgtcttcaccatttttgcaggcgaatatgcatgactccaaccaccccttaccagactgtatcttcaaacctatgtgaccttattactgctcgtactctgtgtccaagaataaaatcccaagacaatggaggattgtcccattgtgatgaaaagcacgtgttcagctgggaatcaaatttgcggtagattcaaggggccctgagaacaggactgccagtgtctctccctgggtttgctgcagaacatgaaacactgggagatgtctgctcttgggtgtggtttgctattcttcttcctagaagagggttttgttttgttttgttttttgcagtgggacataatttaactttggcatgtctcagccaatctcccagttcactgtggattcatgatccacacaaaaaaatgaagaagttgtaatcccatagaccaagcaaggccacacagacaggccaccaaaagttaggagtctcaaaaataagaagtgctttagggcaatagccacattcctttaagagattccacttacaggcacacagatacacacacacacacacaccccaacactcacaacactcccacagaaacacacagcccagcagcttctgaggctgcatggttctgcaggaagccccacctggaagagacaatgcctaaggaacacaggctggctgaaactagaaatcacagtgtggcaagtttcaaaaagactaactgctacaatgtctaggaaggcctgaggcctttttcagatccttttggatccttagggatttcacagtttattcctggggctctgcttgatgtt

SEQ ID NO: 1889126 - DNA, 4001 bp, Homo sapiens; identical to SEQ ID NO: 1888884

SEQ ID NO: 1889127 - DNA, 4001 bp, Homo sapiens; identical to SEQ ID NO: 1888951

SEQ ID NO: 1889128 - DNA, 4001 bp, Homo sapiens
tccttgctccgggcagtctcgcccaagccctgggctgaattcgtgacttgggggcccagtgccccagctagctgcaagctcgggcacatcaccaggcccaaaatcccgccgccacctcctagtacccttccacgctgcctcctacaccgccttcccctgcatccccgagatagcagccgcacatacatgaaaagaggcccacacctgcggtaaggtgtggaagaagccagagaaaaggaaaccgggaaaaaaaaagaaaaaaagaaaaagccttctcaagaaggggaggggtatgatgcgtaggacatcctccgggttcacctcgttttccgagcgagacatttgttcccagggtggtcctaggcaggcctctggggtgcaagggttgccctgacgcccccgctcccgctcccgctcctccgggtacaaagggccctgtgtctggcggcgactaggctccagaactgtacgcctgggcccggatttgcgcgcggcacggggcctagataccgggggcgcaaagctcgcgactcggctcactagacccccgccgagggaccccaacctaccggttctccgaggggcgaaagagccaggtcaggctgggaggcaaggggaggaaagggcgtccaggagaccgcctgaaggatgagagtgtccctggggtagatcggcctcctggaaaaccgcaggcagagagcgccaccgcggagtggaaggcgcaggccggaacctgaacctcttgtcccacagcaagcccccaacccactcgtcatctgcagcccagtggcacctacctccctctccccacgccatcccggcccgcgcttccgcaggtcaagccaagccgcttcaggcgcgggttgggttgccccagccgtggcagtggggaggggacggggctgaagttcactctctccctgcttcgtctcacagcccctagctcacccgccaccgtctctgccgcctccgactgtgctcttggctgatcttcgctttcagttccgcctaggggagtgggagggaacggagccgagctgcgcgggaattgggaggtgggaagcgggggagaagagaccagatgaaatcggcccgggtcagcagagagccttgagatgggatggtgcgggaggaaggagcgggtggtggttgccttttctagggctgtggggatggtgtgcctattggaacggattcctcagacccctcccccatccctaccttagggactggcagacccgcaggcttaacactcctccgaacccccgatgggagaaggggtgttcttagtgggcaccgactagggctccggatcacctgatacctagaccagggctccgggcgcctgtcttttcggcttccaacttttccgctcctccggaaaagcgggcagttcagagatggtgccgagggtggcagcggcaaaccgccctgcacccccatctaaggtccaggccacactcaaaggcttccgaagaagcaaaaccaccagctctaccccacttttgcggcttgcctcaccactcccacccacgtcgtaacccacacacacgggaaaggggtgcatggataccgctcccgagtttggaggagcagcacggagctacagtcatttcatcttcacgcggggtttccagcgcgccccgatctttctccagcccaaccaagccatgccaggtctaatcaatcacttggattatttcgtgcatcccccaagccttatcttatccgaggccaggagatgaaggaagggaaaaaaaaatctcataatgcaaccccaaccaagctttatttccccttttctctctggttaatggcaccaacccccaaccccagcctcccaaaagaagcaccccaggcagtggtggttttcttaaagaagacgagggctttggagtggggagaaaagagaagaaaagccttccatgctcacagtttgcagaagtcctcctgctttcgccatctccagccctggccttttccctccttttcccctgtactgcatgtatgtgtgtgtgtgtacatatatatatgtgtgtgtgtatgtgtacactcacaaactcacacatacgcatatatatgtctgtgtgtatatatatatatatttttcccctcctttccccgccacagtcttcctttaatttgtatggaaggcagcgctactttttaaacacaccgcacatggccccagagctgttcaaacagctgattgcagcaaaatgcttccaaacaacattggtggtctgcatttttatttttaagtgaaaataaaaccaaatgttcctgtggagagattgcatgtaaaagccatacatcgatgtccacattcccatccacaccaaagaaatggagcgagacagatgggagagagtccagcccaaattgtccaataataataataataaaaggaaaaaataaataaatattagatgaaatgaagctcaaatatcgccagtgaggctttccctcctttgctggagagccactgcaagtcaaattgtttaaacggctttttaaaataaggataataatatgcgaaagacacgtcttaaaactgcacctaccttagctgtggaagacctgcatcgccgttaagagttctttttacacatccaaatttttctaaggaacctgaaacgcagtatgattcaggaggatgtattgaaagcccaggcgccttccccttcgggaaccccccaactagattcgctcatccagaggaatgcaagagccaccaacattgccgggtttggaggaaattcattgtttctgctgtcaatagtgtgtccccgggcagaacaagcattacaattgaagcaggaaaggccgagctagtggctgaataagagctctgtactaacagacagagatgggagaaagatgtctctgcaagaaaaagagagctaggggagagaggtccttctgcttccggcgctctccttctgccattggaccaaaatgaatgaaatttacaaacccagcagccaatagatctccagagtcgtcccaatcgctacaaaacccacgtccacagctacaacctcatgcaaagagcaactaatcccagtgcaaaccagctgtaacagagagatcctgggaaccctggagatagagcagggtacccagatgcgcacagcaaaccttcttcctctttgcttttttaggaatctctaggtactctccacaccaaacatgatgtcgtatatgcagacatctttaactgtttaaggtcacagtctccagcagtccctatgtctgcgttattgtgagtcaattgggaagcaatgatattaaaaaaaattttaagagcagcgaaaattggaatacagctctgtaaagtacaggagctttttatgccgaggttatggttgaaagaggatgaatgaaggctttttgtttacttctattgttataatttcatgatttggataaaatataggaggtgtgcttaccaagaggcagttgtttctaaatactcctcatttcccaggtccaggaggttatctttcccagggagtttcaagttgcagggggcgaggaggagggtgtgacccctgtatttaaaattgggttggagaaagttggcttgaaattgacaatgcttaaagttcccagtatttaaagttggcttcaagaaagttggatttaaattggcaatgcaaagatcagagtacatcatagaatgttgtggcaatgaacacagattctaaaatgagattgcttgggtttaagttgcatgtgaccttaggaatgaattttaatattcgcctccatttctgcatctgtaaaatggaacagataatctccatgtaatattgtcatattgattagctgagctagtgtgtggggcctgcttatcttcacaatatttcatggtgattacttttattctacctggctataaaagttagcttttcttaaaattatttcattgcccattaattcatttatggaaggaaaaaagataatgtccacaacacataggacattctcctaattgc

SEQ ID NO: 1889129 - DNA, 4001 bp, Homo sapiens
caagcctccgattttaatccactgatttaaaactgatgaagtaattttccacttcctacaatggccctgattatgtttttacatgtcaaagatactctttaaaaagactacatacacacacacacacacacacacacagacacacatacagaaatatggaatgcatgtgtgtgtagaatgcattcattgcattgtgtaataaaataccggatttctaatctgagaaaatacatccttgcagaggtctccatgaaattcctatatagccatcccccaaccccttaacattttgctcatttccacaggaaaatctatgctaaggatttgatggattactgctaacatcttcaccagggccaactaaaggtatgaaataattctccactctccaaatctgccctcacaaaactgtagatttctttgagatctgatttctcccagctctgccatcctctaggaaaaggctcagtgcgttcattgaaagcaatcaggtctcttgtagtttctgccactttgttttcatcaaagtcaggtgtttgcaccctggccatttaatttctagttggagaagaaagaagctatccaaggatttctgaaacacgcacttctatgttgcccgcagaacgaccacacaaactggcaattccggcttcgtggggataatgaagtctccctaaacttcttattttgtttatttttccttttctttgcttttgcctccctcacatcacaggagcgactgattctgaaatggaagcttatgcacaccaccccacttttaagaaaatataatgcaacgcggtcttatgtaaaccctacgggcaatggatgccttcaaaaagcataagattggagtacacagagaaaaaaacatcccccactccccacacacaaaaaaaatgaacaatagaaaaataaaataaaataataaaataaaaataatataagccatactaccaccttgtggattcagctcgcaaggacgtcacctgcttagtttcaaaacccctacccaacccccaccccaaatttcttaatttgggtccaaatggtaaatctggatcctccgtccttgctccgggcagtctcgcccaagccctgggctgaattcgtgacttgggggcccagtgccccagctagctgcaagctcgggcacatcaccaggcccaaaatcccgccgccacctcctagtacccttccacgctgcctcctacaccgccttcccctgcatccccgagatagcagccgcacatacatgaaaagaggcccacacctgcggtaaggtgtggaagaagccagagaaaaggaaaccgggaaaaaaaaagaaaaaaagaaaaagccttctcaagaaggggaggggtatgatgcgtaggacatcctccgggttcacctcgttttccgagcgagacatttgttcccagggtggtcctaggcaggcctctggggtgcaagggttgccctgacgcccccgctcccgctcccgctcctccgggtacaaagggccctgtgtctggcggcgactaggctccagaactgtacgcctgggcccggatttgcgcgcggcacggggcctagataccgggggcgcaaagctcgcgactcggctcactagacccccgccgagggaccccaacctaccggttctccgaggggcgaaagagccaggtcaggctgggaggcaaggggaggaaagggcgtccaggagaccgcctgaaggatgagagtgtccctggggtagatcggcctcctggaaaaccgcaggcagagagcgccaccgcggagtggaaggcgcaggccggaacctgaacctcttgtcccacagcaagcccccaacccactcgtcatctgcagcccagtggcacctacctccctctccccacgccatcccggcccgcgcttccgcaggtcaagccaagccgcttcaggcgcgggttgggttgccccagccgtggcagtggggaggggacggggctgaagttcactctctccctgcttcgtctcacagcccctagctcacccgccaccgtctctgccgcctccgactgtgctcttggctgatcttcgctttcagttccgcctaggggagtgggagggaacggagccgagctgcgcgggaattgggaggtgggaagcgggggagaagagaccagatgaaatcggcccgggtcagcagagagccttgagatgggatggtgcgggaggaaggagcgggtggtggttgccttttctagggctgtggggatggtgtgcctattggaacggattcctcagacccctcccccatccctaccttagggactggcagacccgcaggcttaacactcctccgaacccccgatgggagaaggggtgttcttagtgggcaccgactagggctccggatcacctgatacctagaccagggctccgggcgcctgtcttttcggcttccaacttttccgctcctccggaaaagcgggcagttcagagatggtgccgagggtggcagcggcaaaccgccctgcacccccatctaaggtccaggccacactcaaaggcttccgaagaagcaaaaccaccagctctaccccacttttgcggcttgcctcaccactcccacccacgtcgtaacccacacacacgggaaaggggtgcatggataccgctcccgagtttggaggagcagcacggagctacagtcatttcatcttcacgcggggtttccagcgcgccccgatctttctccagcccaaccaagccatgccaggtctaatcaatcacttggattatttcgtgcatcccccaagccttatcttatccgaggccaggagatgaaggaagggaaaaaaaaatctcataatgcaaccccaaccaagctttatttccccttttctctctggttaatggcaccaacccccaaccccagcctcccaaaagaagcaccccaggcagtggtggttttcttaaagaagacgagggctttggagtggggagaaaagagaagaaaagccttccatgctcacagtttgcagaagtcctcctgctttcgccatctccagccctggccttttccctccttttcccctgtactgcatgtatgtgtgtgtgtgtacatatatatatgtgtgtgtgtatgtgtacactcacaaactcacacatacgcatatatatgtctgtgtgtatatatatatatatttttcccctcctttccccgccacagtcttcctttaatttgtatggaaggcagcgctactttttaaacacaccgcacatggccccagagctgttcaaacagctgattgcagcaaaatgcttccaaacaacattggtggtctgcatttttatttttaagtgaaaataaaaccaaatgttcctgtggagagattgcatgtaaaagccatacatcgatgtccacattcccatccacaccaaagaaatggagcgagacagatgggagagagtccagcccaaattgtccaataataataataataaaaggaaaaaataaataaatattagatgaaatgaagctcaaatatcgccagtgaggctttccctcctttgctggagagccactgcaagtcaaattgtttaaacggctttttaaaataaggataataatatgcgaaagacacgtcttaaaactgcacctaccttagctgtggaagacctgcatcgccgttaagagttctttttacacatccaaatttttctaaggaacctgaaacgcagtatgattcaggaggatgtattgaaagcccaggcgccttccccttcgggaaccccccaactagattcgctcatccagaggaatgcaagagccaccaacattgccgggtttggaggaaattcattgtttctgctgtcaatagtgtgtccccgggcagaacaagcattacaattgaagcaggaaaggccgagctagtggctgaataagagctctgtactaacagacagagatgggagaaagatgtctctgcaagaaaaagagagctaggggagagaggtccttctgcttccgg

SEQ ID NO: 1889130 - DNA, 4001 bp, Homo sapiens
tttacagactacccaaggttatgtgaatatatcccgagatagcacagccttcccaggctgttggtgccataaggacttggagagatcaccctcgcttacccacaaacaacttgcaggactaagaagagtgcttaatgaatatgtgttcaaaaaataaaggaatgcacctgtgcttggagatacctggagagctctctctctctctctcttcatctcccctctgtatctctcactctttctctggctctcgttcactctttctctctctctctgattcatttgctatgccgctgagtcatacagtgagaagcagcttaaggtcattaaaaggttgaagcatcatgggaaaaagtgaacatgttttcatttgaatctctatttttaactctttctgaacttgagactgttgcagtgataatgaaataagcctatggtggttcttggaaatcattttagacacacaaatttctaacatatatagagataatatgtaagatcacattatatataaagtcacatagagtaagtataatatataatcatatataattataaaaaattacatataaaagtatattatatatcatacttatatattcatattatataaatatataatatatattaattatctataattttaaatatatttaaatttaaataaatttaaattaaaatataatttaaatataaattatatatgtaattatatattatacattatattatatataaaatatatttcatattatggaaatatattttatatattacatattatatataatatataaaattgtatattatataaaaatatatatcatatataaaatataatgtataattatatatacttcattatataatatgaaattattatatgtaatacacactatatatggtatataatatataacataatttaaatataaattttatataatatataattttatagaatacattatatactataagtatataattattttacatataatatattatatataaaatataatataatatgtattgtatatatttatataatattttatatatagaacataatataaatttgtatatgatgtatatcatatagtatatgtaattattatatctagtttatgctatattgtatgtaattatatataaaatataattttaaatataaactctatatgatataatttatatattataatatatgattagataatatataataagtatatatacttaatatatgtgatcttgttaagtataatacatatattatatataatatatattatatgtatataaaatatattaaacttaccatatatgatcttgtttgacatgtctttttgtatagaaaagcacttaaattacccctacttcagcaatgaggatgttgtgtttaggccaaaaggcaatataaacacaacttgctattaaagttttttcttaatcatcactaccactgaaccattaataagtattttcctgcacaagataataatagcatctcacatttccatggtactttataatgcctgaagctcttccacattcataattttgttcatgtcatagaaagaatgagctttagtaacctcttccatttaaggggatcacagaatgagtaaaagcctagggtgcagttagaaaagaactaggtttcagtcatctagacatggttctaggactcttgaatgcatgtgtaactcaggctgaaaatcccggaagatacatccccatcccaagagcacctacacaatttcaataacctggttacaactgatgcactttggatattgcactcttcacaaacatctatccaaatctaacatgaactcacatcagaacaactatcgaatccccactcctaccaaatattcacgtctggtattaccaccaaagcctgaagcaccctgacaacatgtgtccagatgttgttgaattttttccatcctgactgcctctcaccgaaagccagaaccaacttgctcctggatgactgcagtggacttcttccaaaggcagcctcctgcagtcacatccatcagtgcctcttatggacttcacaaaaccataaattctatcacatactgctatcttcccattcttatgtcttgtcattgttttataataaattccaacattttagtcacttttccaagtgtgaagtcatttatgcctaccactgtaataccattctttcacatttccttagtcatgatgagtcagttacactgggaatccttctgttctcctcaccctttaaagttccttttggaactttgaaacttataattcttttcaggaatgtttccctcttaacatcttgtggctgcttccctgtcatcatttccttccatttctaccttttcagagaggctttgtttagaagaaaatataggagcaaatctttgccagctaggcttatgaaaagttttcttacatagaacacaaaatacaagaactgtaagagaatgtattgattatgaggacttcaaggcaccacgaagaactcagacaaaaagcttcagattcagacaaaacatttgtaactaatagagcagagaattgacttgcatcttgaatatatataaatatctcccaactcaattgttaggcaagcgccctatagagcagcactcctgaacatttttgacatcagggactggtttcacataagtcaattttcccatgtcggtggatggtttctgggtgaaaatgttccacctcaaatcactaggaattacattctcatcaataagcacacaacctacatccctcgcatgtgccgtctcaataggatttccgctcctatgagaatataatgtcaccacttaactaacaggagatggagctcaggcagtcatttgggtgatgaggattggctgtaaatacagaggaagctttgctaggttgcctgcaactcccctcctgctgacccagttcctaaaaggccatggaccaggctttggtggtaatacaagatgtgaatgtgtggtaggagtggggattcaatggttgttctgacgtgtgttcatgttagacttggatacatgtttgtgaagagtgcaatatccaacgtgtgttggttgtatctggtccagtactggaccatagcctggggattggggatccctgctgtagaggacagaataacaaacccctatgtatgttcacatcctacgttttgtggcaagaaggtcttaagtgatgtgataaaagactttaagatggggacagcatcctcaagtatctaggtgagctcaatgtaatagaaatatccttataaaacagaaactgaaactttgaaacaatagaaaatctgaaggtgaaacagaggtcaaatagagattaaggtgctgtgctactggctattaacgtggaagaggggtccatgtgttggaagcctctaaaaggtgggagaaacaaggaaatagttccacaattgtacgctgcagaaggtaccagcactgaagaagcattttagacctctgatttccaaaactatcagatactaagtatgtgttgggttaagccaccaagtttgtgtatgttatggcaacaactaagaaacacatacatcacattatttaacctttgcttgtaaacaatttgtctctccatgctggagggtgaatctcctgatatcaaagatcctgtttgtattgttcattgtctgtgtcttcaacactaaggacaaaacatgactagcatattttgagcattcatgtagacctgttaaatgaacacatggaataatctcaaatgcctgctaagtattttatctcaatttcatcttgttatattaaaacctgtggtcagctgtggtggctcacgcctgtaatcccagctatctgggaggccaaggcgagaggatcaagaggttaggagattgagactatcctgactaacacggtgaaaccccgtctttactaaaaatacacacacaaaaaaatttagctgggcatggtggcaggcgcctgtagtgccagctactc

SEQ ID NO: 1889131 - DNA, 4001 bp, Homo sapiens; identical to SEQ ID NO: 1888997

SEQ ID NO: 1889132 - DNA, 4001 bp, Homo sapiens
aaactctggtgctgagtgccaaggaacggctggacctcatcaattttccactgccgagctgtatttccacctactgtggcggctgaaccagtcagggttcctgccccacccttcttccccgcaaaacacacccagctctaagattagaccaggacagctttccatgggggaccagaagaagagggaaagcagagagaaggcagggagacagagagaccaagacagtaagggaacagacagaaagactgagagagacagaggagaagaaatgcagatacacgaacagggtcacagaaagagaaacagagaaagagagaatgagataggaggagggagggagcgcagaaacaaagagggcctcgtcccacactgtccttccaaactcaggctttcctcgtgggcccttccctcaaggtctaagtggcaaagaggtcactgaaggaagctaagtcctctcttcctcagcggttctgaaggccctctggctatgcccgctggtcttcctaagccctaaggtgtgaccttaagcccttgggcttcccagcccagcttcctcctttccaaaatgagaggacaaacaggagttaagagggtttgagagcccccgccccaccaacacacccaagacacccccctccgctctcccatttattttcttgacaaccaacaccccacttagccatacagagtccctaagaagcacaggcgggccggtgacaactgtttaaatccagcgcccacatgccgctgggatattctgacccactctgggctgcccccataaaccagcgcgtgtccggatccaaacgcactgtgaactcgaaacctctgtcaagctgcccattcgaggttaagttcaaagacagacgacaaaggaaacggataaagcgtccaatacaagaattacccatttcagacgcacaagacgaagagcacaggcggtgtcaggacatgttaggatccgtccccaactccgccgtcttcatccccacaaagccacgaacaactgtcccccggagcccagctgctcctgcagcccatggagaaatctgtacattccccgccaaggaccctgccgctgggcacacggggaggctggcctgagggaccccgcgcccgtgtccctggggccgctgcctgggagagcgcacgaggtactctaggcgagatgtcctacaggaagttttgtgacgtcggacggcccaggccccagagtgctgtgtgttctggggatacagagtggtcttccagaggagccctcggcgttccagggaaggcccccagccagtccgggggactcgccggggctggagggtgcgctccagttctccgagaggcccccggggagacccagggcgcaagggcagccccgcgcggggatcccgctgcagggccctccccaggaagcgggcacccggggccctttgtcctactacggggtcccggccgcgccgcgagcccctgtgggccgagttcccgcgcgcactcactcacccatggtgaccagcgcgtcgcagtcctgcaggcggtaggcaggcgcctccggcgaccgcgcctcggggctggggcagagcgcgggcgcccagtcggcggcatcctccgtcacctctcgggagttgctctccgccgcggccgcctgggccggcccgggcgcctccatggggaggcactcaggtccggggcgccgggccaggccggagcgctcgggaagccggactccccgggacgcagcctcggagggcggcgcggcagccgcggcagcatcaacggaggctccccatgcgcgccctcgcctctgggtgcgcggctcggcacggctgacggagacacagagacaatggctgggcggtgctcacggcactagcagcaatagccccgggagggagcagccgctggcctcgcggggcgtgcaccgagtgctggatggctgcgaggaaggcgggggccccaagcattcccggtctcacgcccgccgcctcctccagctcggtggccgcgtgcgcgctgttggggcgggcggaagcagcctgggcgtgactacgcctctccccgcccccacccggccgcggggctttggggggcgtcgccttcgcgtgggctccgcccgggcggcgacccagccgaggagtcggagacccgggcgtgcaggcgactccagtcaccaagggcaggggcggcgctggggaggtgcccacgccccctccgcgcccggggcgcccccggggtgggacccaggatgacttctccccggagtcgcactggcgggccacccgcgttgctgcacccaaacccggaagatggggaggctgggtggcccggggacagggagggcgtggctcagcaaaagtgaagctcaaaaatagaaagtgaaattggcgtttggtgaggagaggggctggaattagcctggctactcaggacgcgcgctgcgcgcggatccccaagaggggctgccgggtctggggaacaaggtcagcgccctggtttcgtcgtaggactggtgattccacatttttacttggaaagggggagaaagggtgggcttgactctgtgcgtttgtttgcagcttcctgtggatctagaattctttccaaataaacatttatttaaagaactagggaaagacagatttgagaggtcgcccgaccaaatgtagcgtgtgaaacttgattggtcactgtttaaacaccccggcgacaacctgataaagaactgtgcagacacatttcaatttcagaaacgcaaagattttttttttcctagcgtaagtgtggcttaggcaatagttggacatacttatatttaaaactcttatccgtgtggatttgaaatgcaaatatagctagatatttggtcacccctttccccagggaaatgcagacagtgcttaacttgcgggcctggcacggcctagacgctgctcccctgacccgcaaccagggcgccccaggctgtcggttggccaaccacacattgagcagcaaggggtcaaactggaaacgcctttgttttgagggatctcagcgattctgcgactgaaagcggtctccagtccctcagtcctcaggtcaggggggctttctgagagccaaagcggcctctaagttagaacggacacatttttagggggaccaggccgagccatccttgcacagctaaccgggagtgggagtcaggaagtctgaacctggctcaggctttggatttctggcccctggctgctagcctcgcccagcctccacctgcattttgtgggtagcatatccccctagtggtgacgcccgctctctatgcgctgcaaaatcctgagctggaatgcaaaacatatgcgacaccagcaggcccccgccatcccctgagcctggttaggacaggtcacggccctgccaagcttcaccagcaagccgcgcaatcccttgatcctggttaggacaggaaacggccctgccaagccctgcctggccgaggggttcaggaccagcaaggaacgcgcactcaggaaaagttcgtgtctccccgcggaacgcgcgccctctccactagggcctgaccttggaaatgtaaggctgcggcctcataaagtccttttaatcaaggcccgggtttcacacccaattaagcatatgtctttgcctgcaaattgcacgcaggaagaagaacgtggcacagatttgcagcgttaacactctgcttgggctgctggttggtctgattccaccgaacccaccctgaacttgaccacatacctacctcttcttataaacagaccctgcacatttcacaacaccttgcttgacaaaagctgctttgaaaggatcacaaaaatccttcagaaaccacagcataaaaatccttgagaaaccacagcctattacttgagagacaaaaaaggaaagtgcctatgagttagacatggaagagtcattatcgccttaatgaagtggcattattttgcaggggggtcaggaaatgctgaactctgccattccaaagaaataag

SEQ ID NO: 1889133 - DNA, 4001 bp, Homo sapiens
aatatgaaatctaagtggtttttgaagcataaattttatttatgagacatacacagggaaggataattctcaacaagtctaaaacagcactttggggatagcatgaagactaacaggagctaaaaacagattgggataatgttgtttatttattttatttattttttatttttttgagacggattcttgctctgttgccaggctggagtgcatcagcgtgatctcggctcactgccacctctgcctccttgggtttaactgattcccctgcctcagcctactgagtagctggaactataggcacacacaaccagacgcagctaatttttttgtgtgtgtgttttagtagagacagggtttcaccatgttggccattatggtttctttctcctgacctcgtgatctgcctgccttggccacccaaagtgctgggattacatccgtgagccaccatgcccggcatgattgggataatgttacaaagcaaaaaagcactaaagagcacagaatggaatgctcttgactacaatgtaaaggaattcaataattaatataattacataaaagtttaaagctttagtaaacacacaatctctagatttaagactcaacaggacaagagaccattggttgaatcaaaacaagtcctcaaacacactggggaaatgagtaattagctattcatgttacataaatcactctggtgacaggaaagaaatgtccttaggagaaaaagcaagcatggagcaaaaatgccagttacttcttctgctatctgacttcaatgttctcatattattttctcttttcaactacttaccctttccgtaaatgtaaaggtcttatttaaatatacttttgcaagaatatattttcataaaatatattcttcaagaaggaaggagtctttccttcttgtgagtctgtctagatgtctatccacagtttgtctacgctctaaaagaatttccatgaattggaagtacttcaattaatagcatttaataaatattgacttattaatttcatttacatgagggttccttataagttttaaagctcatcaaaaccttttaaaatctatttgcactcatatcgaaatacaaacatagaaaaaggttaccaaatattaatttatataatgttaattccaatacccttccaactacacttgcacgtataaggcacaaaaaagaggatggcttcatatgtcattctactatcttcaaaagtttagtaatattaaaaagacctagaaatattgttaattgaagaacacagttagaatattattaataagggactcttacctttccattcatatctttggcagcattcttagcatctgcagggttctcaaaagtaataaaggcaaagcctctggatttgctggttcgatcctttatcaaaagaactaaaatatatgaaaacattttacattcatgtaatggactcatcaaggtactaaccatctaaaagttacatcaaactaaaaaataattgcatttcacatcattattatggttcttaatactcagtcacccctacagtcagtctagtttattccagtttctttctgaactccacagcacatttacttttcctcattttcctttctaagtagtaggttatcctttccatagagccttaacctagtactatgagaattttccaaatatcaaacagatactacaaaataagagtttaaaactcataaggcattttcatgtaggtatacaatgaactttgaaaaaatatattttttcaaaacatatatatatataacatacatattttaaacatacatactgaaatatacatgtgaaaatacacataaacacacacacacacacacacacacacacacacacggttttaagagttaccttctgatatgggaccatatttcccaaacactgctttaagcatcttctcattggtctctctattgaggccacaaatgaaaagcttgccaggatgatctgcctctaccattgtgctgtaaatggtaaaaaattatctatatttagatataaataagctaaaaagataaaattttattacaaactgtgctgaaaatccaagtaaaattcccttcctgaggctgacatctttttattacttcttactttaaatatgtaaaatttgtaacactcagagcaaaggggcactaacttcacacacaaatgctgcattttagtatgaactgacagaatctcatttctaaaaattagataagaaaagctatcataattttcctaagttgcaatatgaagaatgccttcatttaaataattttatttgaaaactgtctatttatgaggtacagtgtgatgttttgcatattttctttcttgagatgtgtgtctcctgttgccaaagtgcactgttcactgcagcctcctccacccagcccaactgatcttcccacatctcagcttccgaagttgctagtactacaggggctttctaccacagctgggcaattttttgtgtttttaaaaataaacaagggtttccccatattgcccaaggtagtctccaaatcctgggctcaagtgttctgccggcttgggcctaccaaagtgatgggatttcaagggtgaatcaccacactcagcatgatatttggataaaagattaaatcaagctacttaaaatgttctagggggagaatattttaaatattttacaatcttctagtgatttgaaatatacaataggtcacagattctaaaaccctagccttcaacccgtacctatctgtggcctgaatgtgatgccacaggatgacatgtaatacctgtttgtggagaatgtaacgcctgaggatgacctgaggtggtacagttctatccagaaaccatcctccctactccctcgctggccctccctgtccccgtggcagccccactgccccacctgtcctctgtcacattgctcctaccggaagacccgccctaccacgtgcccctcgggtacctgccgccagcccccactcccaaacctgtccacctcgccgccttctacccctgtgcaacccttgtctgaggaaaaattgtctttcactaaaccagtccctgatgcgaaaataccaataaaggagtccattatgtcacccaggctggtctcaaactcctcacctcaagccatcctctgacctccacttcccaaaatgctaggattacacgagtaagtcagtgtgccaggttaacagaataacttaagctcatctatgttgttcccgttttaggctatctaactccatttatctcgattacacccaccgattattcggtttaaattatttacggtgccaaagatacatgaaacatgtttcaaatactgtcatacaacgaaggagacaattacaggctttacagaggcaaactgaaactgagattatttatggcccccatatttctacatacactaaagtaacacaatttatgtcaaatttcatccaagcaaatcagacacgccacatgtgctaactaaaagtgtgactttttaatcgcagtggttaagtgtattgcctgtattctgaattatgaccacattcacagagaaaacccgctttaataaaaagtgcacacgaaaacagtggcgccttagcaccatctcccacaactagtcggacatattaggcagttaaatgtagaatcctcaggaaaaatcaatgagtttaacgaaagtgagtctcttaatagcactaaggagttctttccccactgactcctcccgtaattcaacacccacacatagaaaacccatccccttttatagacaaaatcccaaacctttgctttctattcttgccgagagacccagctgtccagagaaacagaaaatacctgcgctttttattaggacaaagagcctgaggttcgcctggccctcaggccgtatgtatccagcttcggaacaccacagggccagctgcgggaaggacacctggagctaccctgagagagaaggacgccagaagccgtgcccggaaa

SEQ ID NO: 1889134 - DNA, 4001 bp, Homo sapiens
aagcattttggggatagcataaagaggaacagaggctaaaaacagattgggataacgttatttatcatttttttaatttgctatatttgtttgctatagagtcttgctctgttgccagcctgaagggcagtggcatgatctcagctcactacaacctccgcctcacaggttcaactgattcccctgcctcggcctaccaagtagctggagctacaggcacttaccaccactcgcggtggattttttgtattttagtagagacagggtttcaccatgttggccatgatggtttcgttctcctgacatcatgatatgcctgccttggcctcccaaagtgctgggattacaggctttaataaaaagtgcacataaaaacaatggcgccttagcaccatctcccacaacttgcccaaatttcagacatgtccgacagttaaaggtagaatcctcaagaaaaatcaatgagtttaacaaaaatgaatttcttaaaaggactaatatcacactgctcccaccaagcccagcctgattaggatcatgttataaagcaaaaaagttctaaagggcccagaatggaatgaacttgacacaatgtaaaggaattcaagagttaacagaattacataaaagtttaaagctttagtaaatacacaatccctagatttaagactcaataggacaagagaccaatgtttggatcaaaacaaatcctcaaacacactggggaaatgagtaattaggtattcatgttacatacatcactctggtgacaggaaaaaaacgtccttaggagaaaagagcaaggatggggaaaaaatgccagttacttcttgtgttatccaacttcaatgttctcctatttttttctattttcaagtacttaacacttccttaaatgtaaaggtcttatttaaacccactttctcaaaaatatattttcagaaaacgggagagaatctttccttcttgtgagtctgtctagatgtctatccacagtttttctgtgctctagaagtatttccatgaattggaagtaattgcattaatggcatgtaataaatgttgacttattcctttcatttacatgagggtcccttataagttttaaagctcttcaaaacctttgaagatctatttacacttatattgaaatacaaacatagaaaaagtttaccatatattaatttatataaggttaattccaatacccttccaactacagttgaatgtatatggcacaaagaagaggatgtcttcatatggcactctactatcttcaaaagttacataattctaaaaagacctagaaatactgttaactgaagaagagagttagaatattattaataagggactctacctctccattcatatctttggcagcattcttaacatctgcagggttctcaaaagtaataaatgcaaagcctctggatttgctggttcgatcctttatcaaaagaactaaaatatatgaaaacattttacattgatataatggacgcgtcaaggtactaaccatctaaaagttacatcaaatcaaaaataattgcatttcacatcactagtattatacttgatactggtcacccctatagttagcctattttgttccagtttgttccctaactccacaacacgtttagttttccttattttcgtttctaagtagtaggtgatccttaccacagatccttaacctgctactatgagaattttccaaatatcaaatagataaccccaaaataagagtttaaaaacaataaggcattttaatgtaggtatacaatgaactttgaaaaacatgttttttcaaaacatatatataacagacatattttaaatatacatattgaaatatacatatgaaaatacacacacacacacacacgcacacacggttttaagggttaccttctgatatgggaccatgtttctcaaatactgctttaagcatcttttcattggtttccctattgaggccaccaatgaaaagcttgcccggatgatctgcttctaccattgtgctgcaaatggtcaaagaaaaatctatatttagataaaaataaataagctaaaaatataaaaatttattacataccatgttgaaaactcaagtgaaattccctttcagaggctgacatctttttagtacttcttactttaaatacaaacatcaattcaagatggattaaagacttaaacgttagacctaaaaccatgaaaaccctagaagaaaacctaggcaataccattcaggacataggcatgggcaaggacttcatgtctaaaacaccaaaagcaatggcaacacaagacaaaattgacaaatgggatctaattaaactaaagagcttctgtacagcaaaagaaactaccatcagaatgaacaagcaccctacaaaatgggagaaaatttttgcaacctagtcatccgacaaacggctaatatccagaatctacaatgaactcaaacacatttacaagaaaaaaacagacaaccccatcaaaaagtggtcaaaggacatgaacagacagttctcaaaagaagacatttatgcagccaaaaaacacatgagaaaatgctcatcatcactggccatcagagaaatgcaaatcaaaaccacaatgagataccatctcacaccattagaatggcaatcattaaaaagtcaggaaacaacaggtgctggacaggatgtggagaaatagcaacacttttacactgttggtgggactgtaaactagttcaaccattgtggaagtcagtgtggcgattcctcagggatctagaactagaaataccatttgacccagccatcccattactaggtatatacccaaaggactataaatcatgctgctataaagacacatgcacatgtatgtttattgtggcactattcacaatagcaaagacttggaaccaacacaaatgtccaacaatgatagcgtggataaagaaaatgtggcacatatacaccatggaatactatgcagccaaaaaaaatgatgagttcatgtcctttgtagggacatggatgaaattggaagtcatcattctcagtaaactatcgcaagaacaaaaaatcaaacaccgcatattctcactcataggtgggaactgaacaatgagatcacatggacacaggaaggggaacatcacattctggggactgttgtggggtagggggagggaggagggatagcattgggagatatacctaatgctagatgaccagttagtgggtgcagcgcgccagcgtggcacatgtatgcatatgtaactaacctgcacaatgtgcacatgtaccctaaaacttaaagtataataataaaaggaaaaaaaagaaaaaaaataaataaatatgtaaaatttctaacatacagagcaaaaggggcactgacttcacagataaatgctgcattttaatatggacctgacaaaatctcatttctaaaacttagataagaaaagctattgtaattttcctaagttgtaatgtgaaggagtgccccatttaaataattttatttgaaaactatatatttatgaggtacagtgtgaggttttgtgtattttctttcttgagatgtatatcccctgttgccaaaatgcactgctcattgccacctcctccacccagcctcaaatgatcttcccaaaactcagcttcccaagtagctggtactaccagggctttttaccagagctgggaaattttttgtgttttttttaaatagacatgcgtttccccatattgcccaagccagtctccaaatcctgggttcaagtgatttgctggcttgggactattagagtgatggcatttcaagggtgaaccaccacgcccagcgggatatgtggataaaagattaaatcaagcaaattaaaatgttctaggaggagaacattttaaatattttaccatctttaagtgatttgaaatatacaataggtcaaggatccctgaatcctggccttcaacccgtacctatct

SEQ ID NO: 1889135 - DNA, 4001 bp, Homo sapiens
ctgcaagtggtcaaagaaaaatctatatttagataaaaataaatatgctaaaaagataaaattttattacatactgtgttgaaaactcaagtaaaattcccttccagaggctgacatcgttttagtatttcttactttaaatatataaaatttgtaacatacagagcaaagggggcactgatttcatggacaaatgctgcattataatccgtacctgacaaaatctcatttctataaataagataagaaaagctattgtaattttactaagttgtaatgtgaaggttgcccccatttaaataattttatttgaaaactatacatttatgaggtacactgtgatgttttgtgtattttctttcttgagatgtgtatctcctgttgccgaagtccgctgctcactgcagcctcctccacccagcctccactgatcttcccacatctcagcttcccaagtagctggtactacaagggctttttaccacagctgtgtaattttgtgtgcgtgtgtgtgtgtgtgtgtgtgtgtgtgtgaatagacacgggtttccccatattgccgaagccggtctccaaatcctgggctcaagtgatctgccggcttaggactaccaaagtgatgggatttcaagggtgaacaaccacggccagcgagatacgcggataaaagattaaatcaagcaaattaaaatgttcttggggtgaacattttaaatattttaccatctttaagtgatttgaaatatacaataggtcaaagatccccaaaccctagccttcaacccttacctatctgtggcctgaatgtgatgccggaggatgacctgtaatacctgtctgtggagaatgtaacgcctgaggatgacctgaggtggtacagttttatccggaaaccatcctgcctactccctcgctggccctccctgtccccgtgacagcctcactgccccacctggcctctgtcacattgctcctaccggaagacccgccccaccacgtgcccctcggagacctgccgccagcccccactcccaaacctgtccacctcgtcgccttcttcccctgcgcaacccttgtctgaggaaaaactgacttccactaaaccagtccctgatgcgaaaatagcaatgaaagagtccattacgttacccaggctggtctcaaactcctgacttcaagccatcctccgacctccacttcccaaaatgctaggattacaggagtaaggcagtgtgcctggttaacagaataatttaagcgcatctattttgttcccattttaggctatccaactccatttatctggattacacccacttattcggtttaaattatttacggtgccaaacatacataaaacatgtttcaaatactgtcatacaaggaaggagacctttacagtctttacagagtcaaagttaaactgagattatttatggccccagacttctacattaactaaggtaacacaatttatgtcaaaagttgataattcccgtcaagcaaatcagagatgtgacatgcgttgactaaaagtatacgtttttaatcgccttggttaagtatattgcctgtattttgaatgatgaccacagtcacagagaaaacccgctttaataaaaagtgcatatgaaaacaatggcgccttagcacaatctcccacaactagtcggacatattaggcagttaaaggtagaaccctcaagaaaaatcaatgagtttaacaaaaatgagtttcttaatagcactaaggagttctctccccactgtcttctcccataattcaacacccacacatagaaaacccatccccttttatagacaaaatcccaaaccttcgctttctattcttgccgagagacccagctgtccagagaaacagaaaatacctgcgctttttagtaggacaaagagcctgaggttcgcctggccctcaggccgtacgtaaccggcttcggaacaccacagggccaactgcgggagggacagctggagctaccctgagagggaaggacgccggaagccgtgcccggaaatcccgcctacctccagcggccaatcattgcgaaggcggtgggcgtcagccagttactgcaaaggctgtgggcgagtcctgaggcccctccgcccctgcgggcctgcagctccattatgtcgcggtaactcttccgagaccacgcttgtgccatgtggcgggcagcggtagattgaggcacaggcgaactgtgagccctttgcaattgtgggcttggaagacctacaccctaactggcatcctgagtgtggcaagacattaattaacccacaaagaacacatgaaacatcttacttcgtaaggcaggctaggctgatggtactaaatactgcagatccagaggggagagagagggaccagcgctgcctgctggggtgagggcggcggcggtggtttgaggggagtggggcagggcggttgcctgtgaggaaagtcgactggtacgttgctggggtggaatttgtctgcaatagaagctgaaaccccacaaggactctctaaggtctagccaaatacagactctgagttccatgcttcctccctgaggatgctgtactcataggggcattccaaaggacttctcatcctgtgccgtgggcacatgggaggccagccaccatggtcgccaatccgatgacccgtgtgcactgccttcctggcgcagaggctcccgcaagggcagcagtggccgtcctgcctgctagcggggctctggaagcccagggcgtcggcctccaactccagggctactgtgtgcagctaaccctgctgggtgtctgggccgcattgcgagtggggcgagctgtgggccctgaggggctccccgggaaccctgcatccacgtaggtgtgggacatgggtctcagcagggcaaggcccgggggcccctccggcagattcccctagggtctaggggtgccagggacgtgagatgggcggtgcaggccttagtcagtggaagcctcaaggagggcatcgtgttaaggtggaggctctgcagaagagggcggcctgtgtggagagcagggagacaaccctgggggaagaggcatgccagtgggggatgacatcatggcagagatggaggtggtggccaaggaggaggccaatgtggagcggcagcaggaggcccagcaggcccagcctggccttggccctagtatgcccccgccggcaacggactcgctggacgtccttcacgtggagctgggctcggtaaatgccccaggccgcgggacatccccggcttctgggccagagccatatccttgcagctgtcaattcgggatggctggcagcagtgggtgggcgccgagctcccgggagcggggttgggggaaacaaggtggtaggcaccggagctcagccaggattcagggtatgggggacaatgagaggaaccaaggacagactcatgcagatagaagggcagcaaaattccgtgtcccctgcgggcacgaggtagggatatgaagccaagcacaatactcacaagggagaatagcagctcaaaggacccgtcataaacagcagaaagtcgaaggacacttttcactgggaaaatccctgaaggaaggggagtctgcgtgcccaggccagccagggaactacccctgctccccgtgcctatgtccagcaggcttacctcagaaacacaaggtcctcaagactcgggttcacagtgcatgggactgctgtcctctgcaaggcaggcaccagctccccagacaggatttcttccctctgccagcgctgcacacaaagatggttaggccctgagcatatataacctccgttgaaaccactcgagtctcacggggagagccaggcacagccctgcagcaacttctacccacagcggttccctcgggtggacaggcccacccctcagtgagaccaggagaagaggacaccgcacacccggacagcagcagaacctgtccagcacccagcacacgagggcctc

SEQ ID NO: 1889136 - DNA, 4001 bp, Homo sapiens
agattacaacattgttgctatttcaaaatagaaaaggttctcctgtaatatactcttcatgtgctatttcttagaggtcagtctttcacctatgatatgttcactggctaattttccaatggaaatatgttggcttatgtatcttgaagttgataaatacctaacttcaccaatactctacatatgaaatgtaaagttgaaaatggcagttttcaatttcctccatattgggatggaggactaaataagaattttaattagttctgcttaagcttctttactaggaaatttaatttattgtcttgctttcttctgtacagtctgcaatcttacaattttccttctcaaaatattacttctattcagtcctaccgctcacatcatattgcttagttctaaattctctcctcaaacaatttcacttcttgcactaaggatcttgtgttaatgtttaaacatccaggtacaatctcctttttttctttattattattattattattattattatactttaagttttagggtacatgtgcacaatatgcaggttagttacatatgtatacatgtgccatgctggtgtgctgcacccattaactcgtcatttagcattaggtatatctcctaatgctaacccacccacctccctccccccaccccacaacagtccccagagtgtgatgttccccttcctgtgtccatgtgttctccttgttcaattcccatctatgagtgagaacatgtggtgtttggtttttagtccttgtgatagtttactgagaatgatgatttccaatttcatccatgtccctacaaaggacatgaactcatcattttttatggctgcatagtattccatggtgtatatgtgccacatttttttaatccagtctatcattttttgacatttgggttgatttcaagtctttgctattgtgaatagtgccacaataaacatacgtgtgcatgtgtctttataacagcatgatttatagtccttcaggtacaatcttaattattgatttcacttccccttatatttcacaactctgcactactgtgatatccagttaatttacgaatattggactccttcatgtctacctttcaagccttaaatttatatttaaaaaatatttaaacccagggatgccttttctgcccaatgctcttgtatttcttttgagtctttatataagctgtaagaatgccttgtacataagcattattgaattctcagaagctggatggccatgctcagcggctcacactatgagctagtgtggaaggttgaggcagatggactgcttgatccctgggctttaaggtcagttttgacaatatagtgagatcctctctctacaaaaatacaggaaaaaaatttttgctaggtgtggtggtgcatgctggtggttgcagaaactctgaaggctgaaacgggaaaattagttgagtccaggaatttgaggctgtagtaagccatcatctcacctatgcactctgacctcgtaagagcaagactccaatccaacaaacaaatgtaacaagcaatttttagattgggacaccaggggaccattaccaggggacctagaaaatggaagaattcattagatgaagaaacctaccatcaaagaatacttctaggagcttttagaaaaattaagatgaatctgctagcaacacaggatgaaaaggaatgtcagcctcaatccaatcacttcgtcgatctgcaatgagaggctcaagtatattttcaccataaatctgaaatgtacttagtgagatagaaactataataaaagttatcgatctgtaattatgcccatgtatgtgtcacttctcttgtttgatgaacttaaaattaagcagacaggtaaaataactcatttttattcatacaaaaaatacagtctttttatcaggtagcatttaccttggcctcccatccgactattgcttcttgtcacaggagcagattttgtaggaggaggacctccatttcttgaagatggacttcttttaattggaatgggtcccctagaagaactcatgttgaaatcaagagtgtatccaccatcatgtgtatttcaaacaaaatctttttagttgactaacatcactgtttcttaaatggctaagttttggttgtttataaaggttttctacatattaaaatcttacaaattcatatttatctaaactaataaaattaacatttctatatgaaattagtgcaattcatgcaataaaagtccatttagaaaatctagaaagaaactcaagaatcataatatgttggtgagagacagagatgtgggaaaagtgggaagtgaacacagagcagaaatctatcagtaaaatatctaagtataatatacataaaaatactaaaagaaaaatgaaaaatgactgtttatatcattctgttatgaggaaaaattttcaaagcatatcataaactaaattccattcaaagaaatttaaatatttacaatatcaaaacgtgacacatcaggaaaatacattatcactaaaaattgttaatataatatagaattcttacgattctcttacaaaacactaatcttcagattagactatgctaaattttaataatctttaagaattgcacattgaataatatataaatatttttatatatctaccaaaaatgtagatatattccaatttccaggtggtgtttcaggttagactatgcacattctccttcatggcagagtattatttaacctcaccctcaagacgaatagagacaaagtaaccatgaagctatacatcttaaaatggagcaaacactgtaatttcaactttttaaaaaatctccaattaattatacatctggttattaaaactcaaacttaaatgttagatttttgaagcttggttaatacataatacaagttaaccaataggcttgtttgtttgtttatttatatatttatttattgagaaggactcttgccctgtcccccaggctggagtgcaatggtgtgatctcagctcactgtagtttctgcctcccaggttccggcaattttcctgcctcagccccctgagtagctgagattacaggtgtacaccaccgcaccaggataattttttgtatctttgggagagacagggtttcaccatgttagccaggctggtctggaactcctgacctcttggtccacccgccccatattccccaagtgctgagatgactggcgtgagccaccttgcccaccccatctaatagtttttttttctttttttaaatacgtggtttgtttttcttttttatgtaaaaattgacccctgatttctattgtgtaaatcacaaataaatatcattttcagtgattaaccctccagcaaagaaagaaacatacatatctgtgaagcagtggtgtttagacctttccagagtagcagactcttttcagaaattaaatttctgcatttcttaaattgaaaatgctttatggcaggccaatgtacaaactccctgtatcgaaattacaaagcaatagatttgcttagatatttgcacatgtatacataaataaaacaaatactgcaaaatcaatcttaaatactgagttacttttttcctgttggaaagttttaaatattccatcatattttgataatacaactgatatgaagttctgggcctcaaattagaaaactctaaagtataatgaatataaatgaattctgcagaaaacctgttgagtacaggcaatcagcattcataaactcagttcagtttaaaatttgtgttattttaatgcaaagttattacaatgttaaaacaaattttagatattagtttaatcgttcttataatacactttagtacttagaaataattttgcttatcatgttaattttctgttcataaaggaaataaaaaaaattgagaaattccagtatcttcaaacttattttctttcagtcctatggttccatctttatattttaaaacattaccc

SEQ ID NO: 1889137 - DNA, 4001 bp, Homo sapiens
taaagcctgccagtatgccctggggttgctctctgccagggtaagtttcttgcacaaccacgaagcctcaggagctgccagcctgtgtgtttctgttggagtgttgtgagtgttggaggcctgcatgtgtgtggcattttgtgtgtgtgtgtgtttgtgtgtgtgtgtctgtaagtggagagtgcttaaatgaatgtggctaacacaattcagggctagttttttgagtctccaacccttttggctctgcttgagccacatcataagtctcagtgaattgagaggcaggccataacccacccatgtccaaataatctccccctacaaagcacaaagccattcttctagaaacaagaggagcacaccacacaaaaacatagatatctttagtgtttcattgttatgtggccaacccagacagagacagtagcagtcttgttttcagggccccttcaatttacctgaaattcagtccccagcttagcaagtgcttcacgtcctgagggggcactcctccatcattttgggattttattttgggacacagagtataagcagccataacatcggataggggtgagaattcaatcaggtgaaggttgtcacctgaagacaggtgactcagaaggtacttccaacaccatccccacattcccttagttgaagaagcagtccacaccatggctcagtgttcaggtgagtgtacaagctggggccatcctggcaaacttccgatttgagggctttcatacccggaacaaaatggaagtggaataaattcatgctaggtggaatgtggcctccacacttgcctcatcttttcctgacttccatgttcctcactggcctacagtttcctgggtctggttcaatgacttccaacacagaacatttcccagttcacaaagaacaaccctcacggtgatccactgtgtgagtgtttccttctaaacaccatcacgttttaatgactgagctgctttgatacttttaaaacagtaaattcctgttacagccaccaaaaagcaaactcttcctctcccactcctatcaaagggctgcatgacttctgcagggtgagaagcaggcattcatgtctggcttttgtctggtagtctatcttctgtttcatttcatctgcctggtttccttattgtggaggggctctttcattcagctgtttttcagtaggactgcctctctacacagataatttagttaccaggatttcagagaggaaaagggacttcaggtaggctggctgcactccaggttctgggtcattgtctcatttggggggctgaagttccttccactttacaggaggcatttggatcctctgacaggaatcattgaacattgcttggactccagcacaaggcagctcattctagagagatgaggttttatttttctttgctttcatggggaatctacagtacccctaaacagcagtactgacacaactttttatccttgccatgccataaatggcctttgacacactgtctcaacctcatctgcacccatgagtggtcagtccaaggtgtgagaacagtgctccaccttggacttgcctttgtcttaggtccagactttcccagagagcccctgtgaggcccaaaatgaagggaggaagtgaggtcaagggcccaactatctttcactgaccccagcttctggggtctcaggtatgattctatcatccaaataaccctcaacaacacagcaaactatatttgcatccccatcatacccgattcttgcacatagcctcttttgagactggagtcagatgagcagtttccagcgatcagctcacattcttgaaacgcctccttctccagcatgacatggccatggagatgccatgaaggggccctgaggtccccacttatggtcccacagtgggatttcacaggcagccttttttctcgctaccaggctgcactgcctgtaccattttactctgcttaagcaggctgacagctctgacagacaggaaacataggctgccacaggaatgggcatgcactactctcagggcaccaggcctgattgtgagctctggctagcatcacaatgagtgtaaccattgcctagcaacaagttcctgtggcttggtggagaagaagacctccgtggagttgtgtcaaaggtggactctcacctgtcttcactgtgggatccatggtattgttccatgatcctaggagagggcagatgtgagccagcctgaagaaacctcaagtaaagttccagcaataaaccatgaaatccctaataataaaaaatgatcttcaggattcctcattcaacctagacattgtaggggtgagcctttttgaaacttaccccactgtgatttctaggtagagccaggctgttttccctggggttgctgtctcccaggtgggggcttcttgcagaaccagtcaaccccattgctgcattcctttgtagcaggacaagccatgaacaaaacccctcagacactggattaaagaagaaagtggctttattcagctgggagtgttggcagactcctgtctcaggaactgagctcctggaagaaacagttcctgtcccttttaagtgcttacaactttaaggggttacacgtgaaagggttgtaatagattgagatctagagatagcacgtgtggttagagtggtgggttaaacttttaacctcaggcctgttcattagtggcaccagctggtcttgtcaatgatttcattcctgatgtttttcagcttttacttcctccttctattcagagaacaggggacagtaagagaaatagccttcctcctcatccccctctttgagagctgcactcactagtgagagttctctttctcatcttcattacccaggtctttctgcaaaacagattgatagtgatttatgtaatgcacttgtgctgtggtcttttgatgaactaaggtggtaaaagtacaggtaccatacagggagtaaacactggcttgggagagtgcctgtggaccttcccttagactaaaatatttacttggggatccagtccatttccattgattcttagaattacatactctcctgttttccgacagggatcaagtagttataatgggttttcccacatcaggctggttacttcctgggctgcataccttgtgcagggtggcgttatacaaagtcatcccttttaaagttgcaatacattcataataactataaaacaaaaagactgctttaacttttttccctacctcagtaacttgaacagtcctcagtctgaggaaggtcagttgaagtccttactgtacacatccaaaatttaagaaaagtgagtcctacaatgagtttcctcatgttttggccatgcgtggaccagtcagctcctgggtatgactggagtagggcttgtcatcttcttcaaagtcaccttggaggtgttatctgggcttggtctctcctcccaggtctcaggtgctgcagttttaggtggctatgatggatccacgctagaattttctctacatttgtggctgtgggagtggtcaagacgaaggcctggtgtcctttccacctgtggccacaagggggctactttccgatccgggatccacacccgatcatctgggaagaaagtcatttaccctggctgaaattgtttctgtaattttccctagagcctgtaattgttgctgtaactcaattttacctagctctcaatgagtgcctaggagtccccgtagtatgggagggggcctatgatataatatttcataaggtgaatatcctgttcttttagaaggaatacatttaatcttaaacaataccttagggagagcttgtgccggctttaatcctctttcttgacacactttttctaaactatttttgatagtccagttcatctgcttcacctttccgcaactctacggtcaataagcagtatgtagtttccatgtcatttccaatacctttgctgccttttgtaccaagtcagcaa

SEQ ID NO: 1889138 - DNA, 4001 bp, Homo sapiens
aaagcctgccagtatgccctggggttgctctctgccagggtaagtttcttgcacaaccacgaagcctcaggagctgccagcctgtgtgtttctgttggagtgttgtgagtgttggaggcctgcatgtgtgtggcattttgtgtgtgtgtgtgtttgtgtgtgtgtgtctgtaagtggagagtgcttaaatgaatgtggctaacacaattcagggctagttttttgagtctccaacccttttggctctgcttgagccacatcataagtctcagtgaattgagaggcaggccataacccacccatgtccaaataatctccccctacaaagcacaaagccattcttctagaaacaagaggagcacaccacacaaaaacatagatatctttagtgtttcattgttatgtggccaacccagacagagacagtagcagtcttgttttcagggccccttcaatttacctgaaattcagtccccagcttagcaagtgcttcacgtcctgagggggcactcctccatcattttgggattttattttgggacacagagtataagcagccataacatcggataggggtgagaattcaatcaggtgaaggttgtcacctgaagacaggtgactcagaaggtacttccaacaccatccccacattcccttagttgaagaagcagtccacaccatggctcagtgttcaggtgagcgtacaagctggggccatcctggcaaacttccgatttgagggctttcatacccggaacaaaatggaagtggaataaattcatgctaggtggaatgtggcctccacacttgcctcatcttttcctgacttccatgttcctcactggcctacagtttcctgggtctggttcaatgacttccaacacagaacatttcccagttcacaaagaacaaccctcacggtgatccactgtgtgagtgtttccttctaaacaccatcacgttttaatgactgagctgctttgatacttttaaaacagtaaattcctgttacagccaccaaaaagcaaactcttcctctcccactcctatcaaagggctgcatgacttctgcagggtgagaagcaggcattcatgtctggcttttgtctggtagtctatcttctgtttcatttcatctgcctggtttccttattgtggaggggctctttcattcagctgtttttcagtaggactgcctctctacacagataatttagttaccaggatttcagagaggaaaagggacttcaggtaggctggctgcactccaggttctgggtcattgtctcatttggggggctgaagttccttccactttacaggaggcatttggatcctctgacaggaatcattgaacattgcttggactccagcacaaggcagctcattctagagagatgaggttttatttttctttgctttcatggggaatctacagtacccctaaacagcagtactgacacaactttttatccttgccatgccataaatggcctttgacacactgtctcaacctcatctgcacccatgagtggtcagtccaaggtgtgagaacagtgctccaccttggacttgcctttgtcttaggtccagactttcccagagagcccctgtgaggcccaaaatgaagggaggaagtgaggtcaagggcccaactatctttcactgaccccagcttctggggtctcaggtatgattctatcatccaaataaccctcaacaacacagcaaactatatttgcatccccatcatacccgattcttgcacatagcctcttttgagactggagtcagatgagcagtttccagcgatcagctcacattcttgaaacgcctccttctccagcatgacatggccatggagatgccatgaaggggccctgaggtccccacttatggtcccacagtgggatttcacaggcagccttttttctcgctaccaggctgcactgcctgtaccattttactctgcttaagcaggctgacagctctgacagacaggaaacataggctgccacaggaatgggcatgcactactctcagggcaccaggcctgattgtgagctctggctagcatcacaatgagtgtaaccattgcctagcaacaagttcctgtggcttggtggagaagaagacctccgtggagttgtgtcaaaggtggactctcacctgtcttcactgtgggatccatggtattgttccatgatcctaggagagggcagatgtgagccagcctgaagaaacctcaagtaaagttccagcaataaaccatgaaatccctaataataaaaaatgatcttcaggattcctcattcaacctagacattgtaggggtgagcctttttgaaacttaccccactgtgatttctaggtagagccaggctgttttccctggggttgctgtctcccaggtgggggcttcttgcagaaccagtcaaccccattgctgcattcctttgtagcaggacaagccatgaacaaaacccctcagacactggattaaagaagaaagtggctttattcagctgggagtgttggcagactcctgtctcaggaactgagctcctggaagaaacagttcctgtcccttttaagtgcttacaactttaaggggttacacgtgaaagggttgtaatagattgagatctagagatagcacgtgtggttagagtggtgggttaaacttttaacctcaggcctgttcattagtggcaccagctggtcttgtcaatgatttcattcctgatgtttttcagcttttacttcctccttctattcagagaacaggggacagtaagagaaatagccttcctcctcatccccctctttgagagctgcactcactagtgagagttctctttctcatcttcattacccaggtctttctgcaaaacagattgatagtgatttatgtaatgcacttgtgctgtggtcttttgatgaactaaggtggtaaaagtacaggtaccatacagggagtaaacactggcttgggagagtgcctgtggaccttcccttagactaaaatatttacttggggatccagtccatttccattgattcttagaattacatactctcctgttttccgacagggatcaagtagttataatgggttttcccacatcaggctggttacttcctgggctgcataccttgtgcagggtggcgttatacaaagtcatcccttttaaagttgcaatacattcataataactataaaacaaaaagactgctttaacttttttccctacctcagtaacttgaacagtcctcagtctgaggaaggtcagttgaagtccttactgtacacatccaaaatttaagaaaagtgagtcctacaatgagtttcctcatgttttggccatgcgtggaccagtcagctcctgggtatgactggagtagggcttgtcatcttcttcaaagtcaccttggaggtgttatctgggcttggtctctcctcccaggtctcaggtgctgcagttttaggtggctatgatggatccacgctagaattttctctacatttgtggctgtgggagtggtcaagacgaaggcctggtgtcctttccacctgtggccacaagggggctactttccgatccgggatccacacccgatcatctgggaagaaagtcatttaccctggctgaaattgtttctgtaattttccctagagcctgtaattgttgctgtaactcaattttacctagctctcaatgagtgcctaggagtccccgtagtatgggagggggcctatgatataatatttcataaggtgaatatcctgttcttttagaaggaatacatttaatcttaaacaataccttagggagagcttgtgccggctttaatcctctttcttgacacactttttctaaactatttttgatagtccagttcatctgcttcacctttccgcaactctacggtcaataagcagtatgtagtttccatgtcatttccaatacctttgctgccttttgtaccaagtcagcaac

SEQ ID NO: 1889139 - DNA, 4001 bp, Homo sapiens
gataaaatagaaacttttctgcgcaaccccaagaccagcagtgaacttggaactttgggatgtaaattccttttatatcccaatgtaatggtcttttcagcaacattacttagatataatttctctttgactctcttctttattcaaaatcaccttaacctatttagcacttgaatgataattcctgcacctcaactctcttcagtctcatactgtgagagtcttttcctctcatccaacaatctgaaataaaaattgtgtgtgttacttcctcccatggtcattttttttttgatgaccagcacccatccagcaatacttctatgcattgcttcatacaggtaaattgccaaaattaaatgttcacccatgttgttctttttttaaaagctcaaacagcatattttttatcatttagcctttttctgctttttataccccaaaagattcatcaccaggcatctattggccattgatgagaaaaagccttgctactattgaccttcaaggtgcaattgctgttttaattctctcactcactctcactgctgggttgccaagtggcatcacccagacaaatcagacccatctagaatatgactacctggaagtcttttgccctcctcccattcaggatgatggctccttttctgggagaggtaatagagaagagaaactagagacaaattacaaaaaggagaaccagttaaatgaagccttaacaccattcggtgagagctactcttttcatcagtctcttccacaaatgctctctaaattttgttactagaaggcagcaacctcaatgtcagggttcaaggtgttattattgggaatttccatcatggttaaagtgatgggttagcaggactatgggtgagctatctacttacagcgagtgtgtcaaattggggtcagacagaaagagcagcaaggaactaaactgggccatggtgatgacattagaaagtcagcatctcctggcacaactgtgtaagcatggcaactgtcttgggctctctgaaatcaatccaaaacccacctggtgagttactagatgacagatcgtggggaccctctacagccagagcactcttcaacctggaatacaaaatagggaactgcaaaatctggctttttgtactctttttctcaatgattagagagatgaaaagataacgaaaaggtgagggtagggataccaggaagcagttggacaaggcagaaggaacaacaatgcagctatatccacaagaaaatccagcactgtgaactgtgccttggctatttgctcctgctccttcacctctgcctggctcacaatcatctcctagaagcaaaaattccttaaagcacagtcacgaagcagtatttcgtctttatttccaggtccagctgaaatataaccacatttaaataatgcggttttcaataattttctttatcagaacctcccatcagagtccaagggcagaatttgttgaagtgagtgttttgacaggatctaagaaagagtatcaggacagctcagggaccctatagggcactggaggcaccaggtgagtaaaacaacatgatatgtaaaacaaagacataggttactgctgacatgggctatggccagggtggaaagaggcttcaaggactgtgaaaactaacctttgtacatttccaaaattgtgatattttggaagccaagcaggagctgttctgataggtttcaggataacggcctgccatcctggagttgctgatgaaatgcctgtcattccctatacaaagaaaggctgtttgcaggcttacttaccattcacttgcctgcccacgtatgcagaagtacagaatgggagtgagaaggaaggagtcaggtgacctttcaggttgttggtacgatgctctggtttgctttgttgtgctgacttggagagaaagcttagcacacgattctgggtatagaagccttaatgcctaagcagctcctggcttaggttcactgccctgagaactgcagaagcatagacaacatgttttttcatgcaagtgaaagctgtaaaaacctataaccttaatagcatgaatgtattgattcacttatatcatcttgctcaaaagcagagcaggattttaccaccttgatattatgagtacttaggatgttgccacttatttttcagctgtgaaaatgtccactgcagaatgcagcatcttctagaaaaccttcctgacaagtttctttcctccatcactgtctcagggtatgagatttttagtttgctgacaaatctcttttgtctgctgacaactacttctatgaatctttccgcataccagaccctgacaaaattcacccatatactaaaggtcccaataagaaactcctagccccagctttccccaatgtacctctgtctccacaaaacctgggctactactgtactgaattacatttcctccccaccaaataagatgccggtaaacaatctttcatttgcttctgtaatccattttacaaactgtatttataatcaaggccccaggatgctagatggacccaacattcagtcccatttctaatgcccatttctaatgcagtaagggcaagggactttgcaaatatgggattccttgacaaagacagagaaaaatagaaagaaaaacaaacaagaacacatcctataatacattcattactatggcatatatgaacatgaatggggtagtaaaagcccctacagatgtctgctttgtatctgggtctgctctgtgagtccatctgagttatttccagacccaggacagttacattatgtcctgagcaagcccaaagtacagccacctgctttgagatttacccttttattgtgcccctcccttaaagctcttatcattattttttgatcagccagggaatgtcctgtgtcaggtcttgagttggttgataagcagtggctctaagaaaggtcagctaagttgggctggtacactctcagccctttgacatctcctaatatattggcctagcaggaaaaacagtcagagacaaagcaggagtgtacctgagatgaagcggaatttaagaattggaagctcaaaccctgacacttcctggcacacacactgagctacgaagtattgtgtaatctctaaggtcaggcttctgggttcctgagagactcacagtggaagacaactgcaagtcaggtgcaggggtcctctgtcttctgcaatgggaagaaaggcacttctggaattttctactcaacttttcccctgtattacgtaaaataggattaagaagcaaaaaaaaaaatttttttagacggagtctcactaggttgcccaggctggagtgcagttgcacaatctcggctcgctgcaacttctttctcctgagttcaagtgattctcctggctcagcctccccagtagctaggattacaggcacatgtcaccacacctggctaatttttatattttcagtacagacaggttttcaccatgttggccagactggctggtctcgatctcctgacctcgtgatccgcccgcctcagcctcccaaagtgccaggattaaagacataagccaccacatacatccccataaaaagcaaattttgagcaaagttgtatcttatcaaccaggattcagattggagaccacctggtaatactgagtgctgtatgcttttgctttcaaccagcatcatcacaaatgtcttccaaagccaggatccctctaaacacttgcttccctccactgatatgcactgtgaccccaaaatggtggagcagagagttagtggcatctcagtccttcaaatgtgcaccactattattgtacagtagcaagggactaccaagtatgggcagattcttgacatcatacacttggactacttactttagacttcttttctcctgaatacaattcactgccagttgacagacatccacaaagtttgaaaatagggactgtgtgacccaacttatgacacagtc

SEQ ID NO: 1889140 - DNA, 4001 bp, Homo sapiens
tggataccaccacataagtgataatttttcaacatataaatttgtgagggggtggaataaaaagaatcagtttataacagttttagaaaaatatagaatctgtgtacaaatgtttatttattcattcattcaccccaagttgtaaatatttgatataatttttatgacataaatgtatatttttcagcataatattttacaatattctgttcatatgagccctctcccaactttatagtaaaataatcaacgtttaataaatgggggcagaggagacaattattttaaaagatggaaataacactgttgccattacaacaatccttctttttcctttgaaccacactctccctgttccatcagttttccttcttttgcctttctggttttatgatcttcagcatttcccataggcattgaaggctcatgagtcacaagacagcttggtgcttgggtctttttttcatatccagaatcagtatgtcagctggcacatactttgacttagagattcacttaataactacaggacagtagaaaaatcatcctaagacaatggagaggatagttatcattactttgccttgttcactagataaggaaatgcaatgtgaaaggcaggagagctctaacattgcttggtgcaccaaagtataaagttggaacgttacatttatctggagtagccataattttaaaccctttgtggtttaggtgggatatccagaaaactgattcaatgaaaattgtttgtctacctacctcccattatctcaagtcaaagaccagaagaaacacttccatggttgaaccacttgggtttatttttcgctgaagcatgaaaggggaatgcataccataagatgtcttagtaacgtataagaaaatagtttataggatttgggtttatgttaggagacttgagggaaggtttatgtaagcaaggcagtgtcagaaagcaagagctattttatgatggggtatttcaataagtcttatgcagaaggaggggaaaatagagcaagtttaaattggtagttgatgaagaagtgatcactcacatcagcctagataggtggatatttggtcatttttttccgacttgaacaacgtttctgttatatatggatttagatgtgattatggagtggtgttgcttttgtcttcatccatcatggtcacagagtggccttatttgatgttgctgctctgtgaaattgttcatgttcaacaaaagaacaccaagaccttgccataagtgatagaccagcacctagcaagacccaggcccagctgatatgaccacatcagctctttgatgtcagggctgctcttcttcttctcactggtgggcaattgtggtgcatcagtgaaaacattaggaaacaaagcggatggcaatatgtccattctcattgggagaaggggatacaaaaaaccaataaacttggtaagtaaattatatagtgtcttaaatgctatgggaaacgataaaagataatggaacactgcaaaaggataggaattggagaaggcataacagaggaaagttgcagttttaaataaggcagacctctctgagaaggtgacatatgagtaaatacttggaatggaggtgaggaagtgagccatgagaacagggaattctggtcgaatttcggaaaaattaccctaatactgagtatagatggttaataatcatctgcttactctacaggcaattgaacccatcctctgcttcatgtccagttcttggttttcccattgacctctctgaggcctttctgccctacactagatagaaaggggttgagtagaaggcacagacaagttgggagatgatttccttttcctcagaacttctgctttatgacataaaggtaatgagtaaacttcttacccatcttccttcccaaagctgctaacatcagtgatctgtcctccatggaaggcaactgcccacctgactattcctgttacaagatgattcttgctccatcttcactgtagccaggattctgcatattctcttctcatggaaggtaaagttgttcaagttctatccttacccattagaactggaatcagagacatgaatctgagctgtctcctaggagatttcttctgttgcttctgtttcttcagagcatatttatggctatgagacttgtttctcttctaggaaaatctccaatttctctttggtatgcattatcgtcaattgtcaaacttaaagatataaacacaggccgataatttatctatactttgatcaagatcgcagcttataagtgatatatctaagtgagctcagtcttcaaatttccttagcgatggtcttgtttctaggttccagtacattcctacctggtagctatgttgaaataaaaaattgttcaacagaaatgttaaaggtgaaaataattgacaccaagtgacataatgtagtacccttctgtgataaattgaataacaccaatttaaatttgtacacatcactacaatgaaagtaatggcatgggaatctcttgataaccagcacagcaatatgacaaaaagtgtactctataaatttctgttttagaaagatgtaattcttgatttgatatgtttaatcatcagaatgtgggacacatttttattactgaattataatgactgtagtaacttacatttttatggggaattatgccttacttttatatttagtttctcatttgagtcccttaatatctctggaaggtagataatgtgtggagttattgtcttcattttactgtgaagaaaatagggctcaaagaaaacagacttgcaaatttaataagagctgaatgcagggatggaatccagttctccttaatatgaatatatctttcaaacaaaggtcaacaagttattatttcaattttctatctgttgcttattacatatctgaacttggacaagtcctataatctctgagttttcattttcttgaggctagtggcaatgcctacctcaatatattattttataatgaatatctaaacatgtatatcaatcctagtataatacctggcaaactcaatgtgctcaacaactgatagccctattattatgagcaagagcaacatttataaaattatttattaatctgtaaaacaggaagactagaacttgactcatagggttgtcattggtattaaatgaaatatcaaaagcaaagtattcaacatagtatgtgtcacatatgcagacaatcaatggtagcttatattgtaattattttcaattgcatcttaggattcactttttctaacagtgactgaaatctggtctcaaatttaagtaaagatgaggacttactggtgcaagtaatttaacaatgaaggaatatatcttgcttctggtgtacctaaataaaggctattaaatgatatcttcagaatcactcccaccatgtactctgctcctctttgttgactccattatcaagtagttccaaagtagctttcatcagttcccacgtctacatactccaacatgtttttctggtgggaaagaacaaaaatatttatccaaccattaccatcttaatgtcacaagattcatgtgattttattgagttaggttaggtgctcacctctgtatcaatcagttgggccagagaaatatgatgcccatgttgacatgcatcctgagtaacatgcaaatatctagtatgttattagtaagctatatagactcattctcaaggaggtagttccttgatctatgtaatttggttattccattgtagttcccataccaatagttcaccttcatccatgcattatctcatttttctgttgatagcacagcaaagtacaatttagcacaaaggaattgaacaaaattgttacttaacatactaacaatatcaacctattcactgtaattagcatttctgtgatacatccttacattgtgtaatcatctgtcttgaacaccaaaagaagatgaaagaattattcttgccttca

SEQ ID NO: 1889141 - DNA, 4001 bp, Homo sapiens
ttcctcaatcctgttagagtggacatggtgccatattacttgtgtctgtatccaggttatgtgactcttctgacttggccctgcctgcagaggagattgtaatatatcctgagctcagaatccaggcaatgaaactcttctgccttggttctgccaacagttgaacttgtgacatatacttggtttcagctcacatgcagaaatataaccatcataactggactcagaaattagagctattttgactctcaaagccagtcatggcaataagtaaagtaatgggtctcctaattgtataaagttcacagaagattatgacactcaggcatattatgtaaagcctgagtggtacaaagagtgtcataacagggaaaagcaaccaggtgcgtttgtgactcttggatgcacaccaagctgatccaattttcattctctcacaagaacagggcctaaaattaagttactaaatctcacacataaaagcagtcaaaggttgcaaatgttcccctcatacatggatcttattcatgtgtcatttgctgatgcatgattctacacacctgtgacgatgtgactcctctagtggaacacaatcttcaagtgagattgggcatcttatacatggatgttacccattgttattgttgagattgtgacttctctgctttaacctaactcacaggaggtgttgactcacatgcaagaagccaggacttctgcaggactatgaatcttacttctgaatattgtctagtgtgtgattaggacaaaaaggtagcacagctcctgaataacttgactttcctttttaggttatgactagtgatgaaattgtgatatacatggatcatacacctaagtgaagatgtctgggcaggcctataaagggcacttttaagtatcactgggatcagctcccaggtgatgtgaattctttgcctgattcttgcctataaaaggcaatatatctagatatatgtggcttatatccaggtccattgtgtaagtgatgtgactcccttctactgctttggccctgcacttatcatgcattatgacacataactgggcaccgcaagcaggtgatgtgactctcttttttgggctctgccaacagaaacacttgtctcagaatctaaatattttttctctcatgtcttgccctgaccacagaggagattgtgacatattgctaaacccatggccaaggtgaggcaactttcataccttggtttagcacatagcagccattgagacacatatctaggccaattgcaaaagtaacatgagtcttctcaccttcctaatccctgttaacagggggaatcttgataaatcactaaaatcggcatcctggtgatttgactcttcttccattgtcctgcccacaagaaggattgtgacatcttactggaccagcacccacctaggtaaagtcaccttcctgcttgccctctgcccacaagtaatactgtgccatataactgagaccagatatgaggactaattatgactcttaaacctggagacatgtcatatgcaagacggtgactcccattcctgtaattttcaccctgtattattgtaacatatacctttgcccatctcctgagttatttaataatcctgcttaggtatagtccacaaatgagatttggacgtatatcatagctgatcaccacagtgatttgacactcctgtcttaacaataacctcaggaaggattgttgcatgtctctggacccatgatctagttacctgactgtcctctcctgccctgaccctccttccaatggggattgtcacattcctaagcactgcatctaaatgatgtgactctcttacctggtcctttcaacaggatacattgtgacatattctgggtttgtcatttaggtgatatgagtctcttcttctgtctggacactgcccacaatgggcattgtgccatattcctgtctttaacccccaagttatgcaacttttctgccaggaacatacctacaaggagaatattggcacatttctctctcagaatttaggttacttcactgtcatgtctatttcatcaacacagagtaaattcttacatatataggcacagttcacaggcatgataatgactcttacatgtgcatcccacaaataggtgtaattttgactcttataacttgttttagaaaaaggagtgattaaatatctttctggtaaaaaaagctcaaagaagattataacagcctcagatattttatgtagcacttggcttggacagagagtgtcatagcagaacccagcagaaaggtgaaattatctcatattcacaccagatgacagtaagcgctgtcactgtcttacatatatgaagccaactgttgctcatgataaaaggacatgtgtggtattgtaaatctcatccagggaattttttgccagtgtgattgtgatataaatctctgccaaacacctgtgtgatctgactctccagactggttccagcccacatatgttactgttatatctaccttggccaacctctaggtaatgtgactttcctgcctggatcctgctctcagtaagaagagtgatatatcactagatccagcacggaggtcatgttacatttttgcctaagccatgcccacagaagtcattgtgacatatcactgtatcaaccagttaggttgtacaaatctcctctttagaatgggctgtactcacactaggggatagtagcacatggctgggactggcacactgttgatggtactctttttctagggtaatgtccaaaaaaggggattgtgacaaataccttggcctatcaggttcgtatttctgctctcctgcttgggtctggcttacctggatagtgacatattgctaggcaaggcacacagatggtggtagagtttccccagaatcatgtctcaaggaggatattgtgacatatatctgggcctgttacctaggtgatatgactacctgcttgagccttgcccatatgaagcattacaacataaaggtggaacatgtacctatttgttgaaactctcttgcctgggtcttgtcctaagggaaggttgtgacatatgcctggacccagcctcaaggtaatgtgactcttctgcatggtaccacctcacatgagtgtttccctcaccttttagaagagtttgtgtttcttttttaagggcatgactcccttacctttatgaattagtctttctctgtcctacatcttgcttttcctgctcaagtcctccctgggaaaaaggggctccagggttgtcaacatgtgggcatgccctgctcacccttctgcataaggtaggttgaaaagaaaaagatgagctgtccccagcaggtttttttggtggatgtgattattttggtgatcttataattctgaaatttttaacatctgttattgacatgtgggcatggctaaatttcaccactcatcagattttacaaattattaaaaagaagcaaattaccatatacttctactaagcagaagatgggggaaaaggaagatgaaacaagtggcctttcttttcagttattgttgagtttggaactgtattggatttttaaaaattattttgtttaatcatgcatgttgtgtgtgtgtgtgtgtgtgtgtgtgtgtgtgtgtaagtgtgtgtgtgtccctcttagctgccatcatctgttgggaatatttttttcctctgcttagagaatggccttgatgaaagcactcagcaatcgaatggataagaattgaacacatacttcaggatatttttcattgttcttccttacatgttcattttctgaacaacaacaacaaaaaaaccctatgaaatattaaggctttttttaaaaccttgaagtggcatccttgaatagttgccttacattatttgttttagcagatttcaaaggtgactgccaaaattccccaagtgtttcaaaaaagagaaagacccttaattgtgttcactgagagacctccc

SEQ ID NO: 1889142 - DNA, 4001 bp, Homo sapiens
attgcacaagcagtccacaacatagccaggagttcaggtggcagaactcctacgtgcaaggaacatgtggagtgcaaattgacaccatcctggcaaactcctgatttaagggctttcatacctagagccaaatggcagtggaatggattgatgctgggtgggatgtggcctccatacttcccccttcttttcctgacttccatgttcctggtcagcctagggtttcctgggtctggctaaatgacttccacactaaacgtttgcctgttgctggtgaatgaccctcagtggaatccactgcatgagcgttttcttccaaacactgtcacgttttaatgactggacagttttgatactttaaaacaataaattcccatttcagccaccaacaaggaaactcttattctaccacttctatcagaggcctgcatgattcctgtaggaggagaagaaggcagctgtgtgtacattttaccgggcaatcgaggctctgtttcattaaatctgcatggctctctcactgtggaggggctcattcattgagctgttgctggatgggactgcctctcactacagattgtatagcttatcagggtttcagagagcaaaagggacttcgaataggcttactgtgctccacattttggtctatggtcacattttgggggctgaagttgcttgaactttacagtaggattttgggtcccctgacagaaatcactgaacattgcttggactccagcacaaggcagctcgtttcctcaggcaagccttgtttttttcttgctttcatggaaaacccacaatgccccttaacagcactgctggacacaattttcaggcttactatcaccacagatggcctctgagacactgtgtcaacatcatctgcaccaagaagagaccagtctgaggtgtgagacaactgctccaccttgggctttcctcggtcatggttcctgacttttccagagggcccctgtgaggcctagggtgaagggaggccatgaggtcaagctcgggcatctctcactgatgctcacctctgggctttcaggtataattctatcacccaaagaaccccaacaacacaacagattctattccaatctccatgggacctaattcttatgcacagcctctttcaggaatagagccagaagagtagtttccagcgaccacctcacagtcctgaagtgcctcctcctccagtgggacccaactatggagatgacccaaaggggccctgaggttgagacttttagagtctcacagtgggttttcataggcatcatttttcctgataccaaggcgtctctgcctgtatcattttcctctgcttagtcaggctgagagctctgacatctgggcaccagagcctgcctcacgaatgttcatgagctaagctcagggaaccattcctgattttggactccagaggagacctctgtggaggtgcgttggtggtgcactctttgcctgtcttctctgtgggatccacagaataatctcatgatcctatgagatggcagatgtgagcgagcctgaagaaatgtcaagcagagccctaggaataaactgcaaaatccctaaggatccaaaagcatctgcaggattcctcaggcctgtctagatgttttaggggtgagtctttttgaaacttgcccctctgatatttttaggtaaaacccacctgtgttccctgggattgctctctcccaggtagggcttcctgcagaaacatgcagcctcagaagctgtcaggttctgtgttcctttgggagtgttgtgagtgtaggatttctgtgtgtgtgtgtgtgtgtgtggcattgtgtgtttgtgtctgtgtgcctgcaaatggagtctgcttaaaagagtgtggctaacacacttcaatcctctttatttgagtccctcaccttttattttggttgcttgtctgtttggctctgcttgggctctggggctccatgtttttttatttttctgtggatcatgaatacgcagtgtctaaatcaccttcccctgcaaaaaaacaaaacaaaacactcttctagaaagaagaggaacacaccacaccaacacaccaaaaaacagacatctcccagtgtctcattgtcctacggtcaacccagcaagggacactagcagtcctgtcctcaggaccaattgaatttaccttgaattcggtttctagctgagcaggtacttcaggttaaaggggcactcctcaattgtcttgggatttcatcctgggacatagagtgtgagcagaaataaggtcagatagggatgagaatacaatctggtgaggagtggatgggtcctgcaatttcaactgcaaaaaaaatatgaagacagatgacacagaaggtgcttccaaccccatccccctattctgttaattgcacaagcagtccaaccatgacctggtgttcaggtggaagtaatccaacaggcagggaacattttgagtgcaaattgggcccatcctggcaaagtctggatgtatgtttttcatacccatagccaaatggaactggaatgggttaatactgggaggggtgtggcctccaaactggcctcttcttttcttgacttccatgttcctcattggcctagggtttcctggatctccacccaatgacttccacactaaattttcccaattctcgagaaccaccctcacgggaatccattgcatgagtgttttcttctaaaccctgtgaggttttaatgactgggcctcattgataatttaaacctgcaaattgcctttacagctgccaacaaggaaactcttgttctttcacttctttcggaaggctgcatgattcctgtaggatgagaagtaggcagccgtgtttggcttttgcctggtcatctagcttctgtttcttttcatctgcaggctcttctcattgctgagtggatctttcattgtggtcttgctgagtgggactgcctatcgccacacatcttttggctgccagtaatttcagggagcaaaacagactttaggtaggctggctacactccaggttgtgggtggtggtctcattttgggggccaagtttgtttgcactttgccaggggctttagggtcttctgacagaaatcttttaacattgctgtgtctccagcactagtcagctcattctctcaggcgagctttgatttttctttgctttctctggggagtccacatcgcccctcaacagcgctactggacaacattccaggcttgcaatctccacaaacggcctctgagacactgtctcaacctcatttgcacccgtgagaggtcagttcgaggtgtgagaacacttcttcaacttgaacctccttttgtcatggttccagcctttccccaagagcccctgtgagggcaggatgaacggaggcagtgagatcaagggcccggccatcttccacagacacccgcctctggggtctcaggtgtgattccatcacccgaagacccccagaaactcaccagactatattccaattcccatgggacttgattcttacacacagcctctttcagccatggagtgagaaaagcagtttcccgcgtcctcctcacagtctcaaaatgtgtcctccttcagcgagaccagaccacggagacgacccgacggagctctgaggtcgacgcttttagtgtcccacagtgggttactgcagtcagccttttttcccataacaggccggctctggctgtaccattttcctctggttaggcaggctgacagctctgacagccgggcgcccaaccttgcctcgtgaatgcgcatgcgctagtctcagggcaccagacctgaactgtgagctctggctgatgtctcaatgaatgccaccattgcctagagacaagtccctgtggcttagcggagaaggaaacatctgcggaggtgggtcggccacagactttcgcttgtactgtttgtgggaccctcagcataatctcatgatgctaggagaatgctgacctcagc

SEQ ID NO: 1889143 - DNA, 4001 bp, Homo sapiens
aatacacaataaaataatagaaacgtctatcaaaattaatgaagtgatcattaaagtggatcatgttctaaggctaaaatggcttctatgggggtcaggtgccatggctcacgcctgtaatcccagcactttgggaggccgaggcgggtggatcacgtgaggtcaggagttcaagaccagcctggccaacacggtgaaacaaaaattagccaggcattgtggcacatgtctgtaatcccagctactcaggaggctgaggcaggagaatcacttgaaccagggaggtggaggttggagtgagcggacattgcaccattgcattccagcctggacaaccagcgaaactccacctcaaaaaaaaaaaaaaatgctttctaaggcaattatttagttgcctgagttccaagagctgaagattgacaccttctttcatatggttttacgataaaagctagaaagttgaattgcacagacattccatttaaaatttaaattaaaaaaacacacactgaaaacatttcaacatttcaaaacagtaacttttagttatttgaattcattcaatttttctataaagtttaccaaacgggtcacaattcctacagaacactgactacacagcaatttaaataagttgatacaacatgctgttagataagcaatgtatcttcacctattcactagcaaataccttgctattaaataacactcatccactacacttaccatttgaccgatgaagagacttatacaaggtaatggacagacctaaacacttattttggcaaccaaatgtagattattttctgaaccagcatttactgatactctctctgttatttaatggatgatgggctcattgcccatatgcaaagtaaatttcctcttacatttgatgaaccattaattttactatgtaaaacaccaaagtaccagttgcaaagtaatattacaggacttgctcaatcactctcaaaagacactaacagaactctaagtattccacgcagccaacatttaataaaagaaatcaagagctcagagacgccaaataaaatctcagggtctctgattttgaactatcctagttatgccattaatggcatttgcacacaacaaaaatagtaactgtttcaatagtactttttccacaagcaatatcatcttacatgttggctgaataagtctcattgcctcaaaaaggatcaaaagattctaagttttgcagttcaacaattgtgaacaattttatttctcatttcaagtgtaaaggatattgctcaaatcaccgcatgaaactctctcctcatgtaagaaagcctgaaatctgatttctctaccaaaaaaaaaaaaaaaatccagttcttgcaaatggatacaaaactactcataacctgcaaaaaccatgaaacctaagcatgttacatcttaactgttataagaaaaatagttaaagcaaagggagctgtcagagaatcttcattttcccagtgtcttccaaaacttcttggaactcgtatacaagaatacctttcaaaaacacaacagaagcagaaaacgtcaatcgggcaccaggaaaagagcaggcctagagaaaaacctagactcccctgccaccgaccttcccaaatgacacagatacaagcgttaacagcacaatccctctgagaggggattgaaacaatgtggcaggtacggacacacacacatacacacacacaggactgaatcaatgtggcagggacacacacacacaagactgaatccatgtggcagggacacacacacgactgaatgtggcagggacacacacacacacagaatccaagtggcagggacacacatacacacactctcacatcactccccactcccttccccaacgccctggatgatgaaatgagaaacggaaattaacatttcaggcaacgtctcacattgttccttaagggcaagagctgctgttgaagccgccaccgccgccgctttcctcccaactccctcctccgacctgcctaccctcccccctaataacccccacactgttggcccgcattccagtccctactcgaacctacgcgcgcctccagcaaccctgcctttcgcccgcccccagcaaccctgcctttcgcccgccccttccggctgggatcccggcagctgcctgctctcattccagaagagcaataataataggaacgctggccaggcgcagtggctcactcctgtaataccagcactttgggaggccaaggtgagcggattacgaggtcaggagatcgagaccatcctggctaacacggtaaaaccccgtctttactaaaaataccaaaaaaatttagctaggcatggtgggggcgcccgtagtcctaactactcgggagactgaggcaggagaatggcgtgaacccgggaggcggaacttgcagtgagctgagatcgcgccattgcactgtagcctgagcgactgagcaagactccgtctcaaaaataaataaataaataaaataaaaagaatactactactaataataatagggacgctgagaataacaactacgaccagaaccgaacagcgaaggcgcccctgttgtgtgttagaagtcggcgccccccgagttccgcagcagtcaacacctgcccagggcccccctcggcagcccctcacagcagcccccgggctcccagaacccccaggcgctcccggaagcccccagtcggtcccccacagccccctggggaccttctgccccgccagccccgccccggagccccccgtccgccccgcacagcggcctcgggtccccctaaccgtcgctccgagcccctcgagctcccaagcccgcttggagccccctgttggcccttcacgacctccccgagcccccaaagtccaccgcccaccccgatcccggccctccaggcctgacccaaggcccacacagcagctctgtcggctgggaaggcctgcaggctgcaaggccgcgcgaatgccccgggccagccccaaccactgtccctaggccagcggcgtctcttactgggattcgaagactggacggctccccggcggctcagcggcggggcgcgagcgctgcccatgcagcccgtggcggcgtttccccggcggcgctaccgcagcgggaaggcggagcaggctcgaggcctggccgaattgcgggcaggcggtatgctagcccgccactcggctgcgcggcacctgttgcggaggactactgagggggcatctggccgcaagctcaccggaggcgcctccccaactgaagatctcggtccatctcagggtggcctctgactctccgacccggcgctggtgcaggctgcatgagaagctctggcccattgtccccgcaccccacaccccttatccgtcacagccattggcccgccccagttggccgcagggactgagcaagttatgcggtcgggaagacgtgcgttaaagggctgaaggggagggacggaactgacagtctctgtgacagctctgaggtgggagtaggaggacgtcgcattgacgattgggcagggtcctgcgtaagggagcacacgaccctggaagtagcgagcaaccggattggcggtttccttcgcaaacgtcttgccttctggggcctggcaattggtctttccaagtgtcggaagcgacggggatatggtctggaaacatctggttttgaacatctggtattgaagcgctgggaggcaaaacgtctgccccgcgcgcccatgcggcgagtgtcggtccgtgcccctgctcaaggacagctcgggccacgtgcgccccggtccccagaaggcctggctccggactgtgctgccctggggcgtcactgggcaaggagagcagtgggtcggcgtcgaggggaggggacctgggcttcggagcggttgctccgggtgggcactggccgcgcaacccctctcccgcgcagagacgctagctccaccgtgagcgggaacggcccttgggcgggttg

SEQ ID NO: 1889144 - DNA, 4001 bp, Homo sapiens
acagaagcagaaaacgtcaatcgggcaccaggaaaagagcaggcctagagaaaaacctagactcccctgccaccgaccttcccaaatgacacagatacaagcgttaacagcacaatccctctgagaggggattgaaacaatgtggcaggtacggacacacacacatacacacacacaggactgaatcaatgtggcagggacacacacacacaagactgaatccatgtggcagggacacacacacgactgaatgtggcagggacacacacacacacagaatccaagtggcagggacacacatacacacactctcacatcactccccactcccttccccaacgccctggatgatgaaatgagaaacggaaattaacatttcaggcaacgtctcacattgttccttaagggcaagagctgctgttgaagccgccaccgccgccgctttcctcccaactccctcctccgacctgcctaccctcccccctaataacccccacactgttggcccgcattccagtccctactcgaacctacgcgcgcctccagcaaccctgcctttcgcccgcccccagcaaccctgcctttcgcccgccccttccggctgggatcccggcagctgcctgctctcattccagaagagcaataataataggaacgctggccaggcgcagtggctcactcctgtaataccagcactttgggaggccaaggtgagcggattacgaggtcaggagatcgagaccatcctggctaacacggtaaaaccccgtctttactaaaaataccaaaaaaatttagctaggcatggtgggggcgcccgtagtcctaactactcgggagactgaggcaggagaatggcgtgaacccgggaggcggaacttgcagtgagctgagatcgcgccattgcactgtagcctgagcgactgagcaagactccgtctcaaaaataaataaataaataaaataaaaagaatactactactaataataatagggacgctgagaataacaactacgaccagaaccgaacagcgaaggcgcccctgttgtgtgttagaagtcggcgccccccgagttccgcagcagtcaacacctgcccagggcccccctcggcagcccctcacagcagcccccgggctcccagaacccccaggcgctcccggaagcccccagtcggtcccccacagccccctggggaccttctgccccgccagccccgccccggagccccccgtccgccccgcacagcggcctcgggtccccctaaccgtcgctccgagcccctcgagctcccaagcccgcttggagccccctgttggcccttcacgacctccccgagcccccaaagtccaccgcccaccccgatcccggccctccaggcctgacccaaggcccacacagcagctctgtcggctgggaaggcctgcaggctgcaaggccgcgcgaatgccccgggccagccccaaccactgtccctaggccagcggcgtctcttactgggattcgaagactggacggctccccggcggctcagcggcggggcgcgagcgctgcccatgcagcccgtggcggcgtttccccggcggcgctaccgcagcgggaaggcggagcaggctcgaggcctggccgaattgcgggcaggcggtatgctagcccgccactcggctgcgcggcacctgttgcggaggactactgagggggcatctggccgcaagctcaccggaggcgcctccccaactgaagatctcggtccatctcagggtggcctctgactctccgacccggcgctggtgcaggctgcatgagaagctctggcccattgtccccgcaccccacaccccttatccgtcacagccattggcccgccccagttggccgcagggactgagcaagttatgcggtcgggaagacgtgcgttaaagggctgaaggggagggacggaactgacagtctctgtgacagctctgaggtgggagtaggaggacgtcgcattgacgattgggcagggtcctgcgtaagggagcacacgaccctggaagtagcgagcaaccggattggcggtttccttcgcaaacgtcttgccttctggggcctggcaattggtctttccaagtgtcggaagcgacggggatatggtctggaaacatctggttttgaacatctggtattgaagcgctgggaggcaaaacgtctgccccgcgcgcccatgcggcgagtgtcggtccgtgcccctgctcaaggacagctcgggccacgtgcgccccggtccccagaaggcctggctccggactgtgctgccctggggcgtcactgggcaaggagagcagtgggtcggcgtcgaggggaggggacctgggcttcggagcggttgctccgggtgggcactggccgcgcaacccctctcccgcgcagagacgctagctccaccgtgagcgggaacggcccttgggcgggttgtagcgttggctccagattccctgggtctcgcgcactgagagcctgagccgcctgagggaggcaaagcgccctggagccgcgtcccctgccttgcaagttagttctccaacacgcgaaaagggtagagagaactgatgcggtgacagaagcattgggtgaagttcacttggcaccacccaatttctaattcagccatatttttcatagttctacaaacaaacgtccagctgggtctgggtgctgtaatccctgcactttgggaggcccaggcgagaggctgtattgaagccaagagtttgagaccagcctgggcaaaacagcaagactccatctctacaaaagtttaaaaaattatgtagatatgatggtgtgtgctgctagtcccaactacttgggaagctaagacgagaggatcgcttgaggccaggaatttgagaccagcctggactccatgtatagaaatatgtatgtgtgtgtgtgtgtgtatttaaaaatatatatgtgtatgtgtgtgtatatgtgtgtgtttatatgtgtgtgtatatatgtgtgtgtttgtgtgtgtatatatatatagatgggtgtgattgtgcacacttgtggtcccagctacttgggaggctgaggtaggagaatcactgagccttggaggttgagactctagtgagctatgactgcaccactgcacttcagcctggccaacagagcaagaccttgtcttgctctgttttcatatatatatatgctgggtatggtggcgcacacctgtggtcccagccactcaggaggctgagatgggaggattggttgagtccaggaggtcaaagctgcagtaagccatgattgcaccagtgcactctttcctgggccacggcaagactctgtctctaaaaaaataaaagggcacagacacccacagagggatgaccacgtgaggatgcattgcttgagcctgggaagttgtggctacactgagctgtgatcacgccactgcacttaccaggctcaagtgatcctcctgccctagcctcctaagcaggtgagaccacagttttgtgtcaccactcccggctaattaattatttgtagaaatgaagttctaggttgctcaggctggtctgaaaatcctgggctccagtgatccgccttggcctcccaaagtgctgggattataggcatgagcctctgtgcccagaccaactgaattcttaattggtgtcttggtagttcattagttaatctgcctcagtttcctttaaatgtttgaccctaggccgtgcacagtgtctctggcctgtaattccaacactttggagagaagtgtttgggatactgaggtgggcagatcaccagaggttaggagttccagaccagcctggccaacatggtgaaaccctgtctctattaaagatacaaaattacccaggcgtagttgtgggcacctgtaatcccagccactcgggaggctgaggcaggagaattccttgaactcgggagggagaggtgggtaagcttcagttgcaccactgcactccagcctgggc

SEQ ID NO: 1889145 - DNA, 4001 bp, Homo sapiens
gaaccccaagaaaagaagtcttgaaagtttcgtagtgaaagaacctgtatttccttcttaacagtgatcttgttttgtggatttagaggatgaacgagttgcccagtaagagaatgccccccttaaaaaaacaaaaacaaaaaccaggctgagcacggtggctcacgcctgtaatcccaggcctttgggagaccgaagcgggcagatcacctgaggtcggcagttcgagaccagcctgaccaacatggagaaaccacgtttctactaaaaatacaaaattagcccgacgtggtggcgcattcctgtaatcactggtactccggaggctaaggcataagaatcgcttgaacccgcgaggtggaggttgtggtgagccgagatcgcgccactgcactcctgccagggcaacaagagcgaaactccgtctcaaaaagaaaacaaaaaacaaaaaaccagcattaatagttaagggttacgtatacatctttcaaacttaaaaaccttctgaacaagtaagatacaccgggcagcgtacaaattaagtaaacttatgcgcaaattttataaataacattcttaatataaacgtttaaaattcctgtgtaaatttctagtttgcaaaaaatttcataaaaattagtaaaatatctgctccataagtctaagttaatattttgagataccgaaaaagtacattatgcgtaatgcgctatcacaaaaacaggttcaaccactaacagagacaagttgtttctgtagagaacagaaaggagatctgatacaaactaaatcggaaccgaattgttcattaaaatacgtcatactgcgtcttggcgtttagcaaagtagcggagaggaagaggaggtataaggctgtaagagggcaaaaacctggtgcagactctcaggtcagatggtgagggctgattgcgggaggtggacaagaagtctggcctaatgactaaggacagctaacgcctaactccgttcctcatcactccacctgggtaagagcatttggtgcaacgagccagtttcgagcctgtgaaggaccgtggggcaaggtgtgtaaccaggagcggttagtccctggctctgagtgaggccccgggcatagacaggaggttcttcctgtgaaaccagagatttaatcctcccacttcaccttaggcattacgagaaatagggaaggcgggggaggctaggcggccatttttccttacagtgcaaaatacacacacagcagttccgcccgcgtctgcccctagccctccgaaataagaagtctcaagcccggtagggcaaaagaagaaacgcacatactcagaatcccctgagcctccgacattatctcacatctgtctgtcggtgattcggaggcgcgggtggtttacggtacaggcgccaggtccacgtaatcagggcacccgacagtgggaaatagagactagactcagacctacacctgggaatggcggacaacaaaatatctgtaaaatattttgatattaggtactttctaggcacgcggtcgtgactgcggcctgcatgcctgaggaagacattgctcacaaataccgggatttggcctaagaagcgtccatctctttatacaggtgaccgatgccgctacctctttgtcattcagtagccctctttacctgttttggcctcgctgctagggctgtcgccgagcttacacggactccaggtgatgagtttttcttgagtcactgcaaaggcagtttcactaggcttcacttttctttctcgcggttttcggccaggtctctcctgagacactcctatctcccggtcccgacaccagcaccaagcgctcaggtaaacgtcccaagtaagacaaaggcaatctacatcagggcctgctagcggcgtgaaggagggagggactcagagcatcaaagtcagtccacaacgggcggggttcagttaaattgtgtctccagcgatctattagacccgtcctcttcaatatggcgcattgaacccggctgacaaaaaaaaaaaaaaaaaaaaaaaaaaaaggagagagagaaagagaccgcccagccagctgcgcaggctcccaccatccccagcgccgcgacctgcgaccctccaagaccccacccccgccaagccccgcccctagggcctcccctgctctgatttacgtcttcctctctttgctaacggttgctgtttctacttttcttccccttttctactctttctatacccagaagcagcggaactggcaacaccttggtgccctagacggaaacctcagtcccgactgaagcgtattcatcaccaacactgggatagctgcagctagggccacacaataaaaatagcccaggacggcactggctatccgctgccccttcagctatagaattcctgtccttaatcgcttttagttctgtaactgcttgtggaaacagctgattactggacaggtgggagtacgaaaggcgtttagtaagactgcaaatctgatgtgaactggtaggacgcagagtgtatggcatagtcaagaaagaagtcaacgccaggcgaggtgctatggctaagggattaatcttttgtgtcccaactatgttgctctgacggttccacttgcactactggtttttacttcatcgttaatctctgctctggccgataacagcctgcatgaaaacatcaccagttttcaagtttttctcaggatgaacagtacatagaaaagtgagcctgaatgctgagatcctgagaccgtgctgcggcgcctgggaattcatagagcagcttttaaggggccaccacttctcgcatcgtgtgccatgcaagtaaacctaccctatcctgagacccttgcctggggtgactggaagagctgcttctgtagaatcctgggccagaccatctatctggacgaataggagaaaagcctagttgttgtctcctgcaagatgtattcagttgtaatttcgcctttgttccttaatctgttagtatggtatattacatcgattaatatttcatattaaatcagtcatgaattcccattatgagccccacttgctcatgattgaagatatttcttatatgttgcagattgactcttggtattatttgtccatttttgtactcacctagcacacacatacaaaattgcagatttgttaggattagatatcatgcaaaacttactatcttatgaagttcttaatacatgtattgctatccttggttttccataaaaaaattttagaaaaaataagttaactgcccaagatcatcagccagcaaagataagaagtacaagtgttggccaggcacggtgtctcggtcctgtaatcccagcactttgggaagtcgacatgggcagatcgcttgaggtcaggagtttgataacagcctggctaacatggcgaaactccgtctgttctaaaaatacaaaaaattagccagctgtcagagcaggcacctgtaatcccagctactcaggaggctgaagcaggagaattgcctgaatcagggaggcagaggttgcagggatcccagacagtgccactgcactccagccaacgtgaaaagagcaagactccatctcaaaaaaaaaaaaaaaaaaaaatagaatgcaagtgttctaagcccctaacaaagcccactttgtgctctacatctgcgccccatgtaataatcataatcaaaagatactctagaacttaattcctgccttatacttactaactttacttctcctttgaagaagtcttgataggtatagatatgcagacataggctaatttttttctttattgctggtaaggttttattgtataacatacatcctataaacatcacagcccaattttcactaaatactaatacactgtgtaataatacactaatacacaggtctaccgatgttactaccaccattttaatatagaactctgttggatctgggattttattttacctttctcaaaagctataagattcacctg

SEQ ID NO: 1889146 - DNA, 4001 bp, Homo sapiens
tgaggcatttgtagaggtagagactgaaagggacatggaagcagaggcagtcacgggcccttggtggtgccaggatgcatggctaggccatgtcacttcctggagccagaaaaggaaagggtgcacttggctgaagacatagggctttgtgcaatgctcctcaaagtgactcaagattcccacttgcacccaagtgtctttttgctatagatggcacaacaaaggtgctcccaggtcactctgcaagaaacaagagacaagatataatcagtattttgaaggagggccagaagtaacttttggtgttcaagatattctttttctccctggcattcacattccatgaatttgttaccttacagccaggctcccacatagctttcttgacctccataaaaaaagtgagttcactcagcttggggccaaattgggcacaagagctgactagtagtatgctcagttgcctttttttttttttttttttttttttgcagaattccaggacttcctgatggaaaacagagaagaagccgggcgcggtatctcacgccttgtaatcccagcactttggaaggctgaggcgggcggatcacgaggtcaggagatcgagaccatcctgactaacacggtgaaaccccgtctctactaaaaatacaaaaaaaattagccgggcgtggtggcgggcgcctgtagtcccagctactggagaggctgaggcaggagaatggtgtgaacccggcaggtggagcttgtagtgagcggagggcggaggttgcgccaccccactcacacctgcacgacagagcgacaaaacaaaaacaaaaacaaaaacaacaaaaaaaaaacaaaaacaaaagaagtgtttgtgtttgttttcaaatcaaatttagcctagattagaggaagaagtatggtgaagagaaagacaatttttttattattcaagagaggatactattctctttccaaatatgcttctcttccatcccagtgtcttcttctttactcccccctcataagggaccaaataggtagccaacagtcatatagttgtataaatttctcctgttcgagactttcctaagggcatagaggaaggaccagggtttgaaaatgtagtggctgcttcaggaagatcaacccaggtcctagaggtgccttcggacctaggtagggtatgacatgttcaatgctgacagtctgagcttgggcagaatctagaagatgattatgccccagttggaccagggacagggctcctgaaatttttctggggaaccaaaatcagggaaaattctattatttccacatttcaatttgaataaaacctggaggtgaatcagatgaagaccaggtaagcactaaagtacaaatactactttagaaactattttcgaggatcatttgagaccaggtgggcaacatggtaagactttatttctgtggaaaataataaaaaagttagccagatgcagtgatgcatgcctgtggtcccatgtactcaggaggcagaggtggaagaatcccttatcttggtagtttgaggctactgtgaatcatgccactgcactccagcttgggcaaaagagcaagaccctgtctctatcactctctctctgtctctctctcacacacagacacacagacacacatacacacacacacaaagagaaagatattcattaaccatatcaatgttgtgattgctctataatgatatcttaatcttgaaatgaattatttagacttatgtaaaattggcacatctaactgtggtaatgatccactgttcatttagtatggagccagcacagaaatgggagaaagacagttgaaactggcacatctagctgtggtaaggatccactgttcatttagtatggagccaccatagaaatggagaaagacagctgcacagtaactatccaacagaattcaccaatttctgactcccagccgttgggaaacatgaggacatggccagggcataatccacactctgcagaaggaataaacctgtggaatagagtgagattagtattactactctcccatttctgaaatctaattttaggtttttagaaatatgcttggaaattcagtatcttcaattctgagaaaatacatggaaatatacatcatcctacaattttagatatactacagttgttatctacatacttacccttcaaataatatatatatgtatatatgcagttatgatatatatatatatcttattatttatatccaagataatatactattatccaatagtgtgtgtatatattcatatacgtcaagtggaataataaactatttctaagaagtaagactatctttaaaatactgttctctgaatagaattgtgtttataaaacatagctcataaatcctatttggcaaaaataagatattcttcaatatttagacatctctgctgattcatacaataacctaaatttcagtcttccgaacttctgagaacataacctctgatgttacaaattctggttttagggttcaacaagagtcttcgtagcaagtatattaactcaaacatatgactagagtaaaggtgcctgtggtttcatgagaaataacagctgtctcgaagagccagaaagcctggaaactttctttccagatcacagatagttgacactcaatcagggaaacgttgagttctgcatgcctaagaggttgttgtccaggcttgggtccagattgagatccaggcatcaggagaggttgttttgttaaaagtgtggctggagcagcatgcaaggatgaaaaagaaggagaaagaatggactcttcagtaaatgttgaggaagatattttctgaagagaattagcagaagaggctatggataggacaatagaagaggagaccagaggagaggagaaaaaaatggagcaaggtgggaaaatgcagaatgaagggaatgtacaaaaataaaagactgaacaagaagggcacagtgttcacggagattgaagtgaacaagaaagaaaaaggagaaagaaaaagagataagagaggtacatgggacatcagggttttcttttatctggataatttttaatttcctgccatagtgctggtaaacaactcttccaggaagccaaatgcttgtaagctggcttgggtggacagaattgatttttatcttggctttctgtggcagttatctcagttaacaaaactataatatactaatctgggaaaggcacagtttttactggcaaaaaagggtacatgtttggacaatgagccaaaatgactgattaatagtgtttctccattaggctcaatttcaggaggagaaaatgatgcaattatatcagccttatagtgggttctgggacttagtatttctgtttcaggctggatgcaggttctcactttgccagcttcaaaaacagcaaaggattcaataatatcagcttcagactggatccagtgtgtgtctgctttggttacaggcagtatccaagatatgagtgttcttcctgtaagcaaggtccatctttttactactggagatagaaccttgggccagaaacttagtaggaaggtttcagactgcataaaagggtgaattatgtcaacttctgtctgcatccagggactgactatttgagattttgaataagctcatgatctgcctttatttattgtaatgtaaaacaaagatctgactacatcagttttctgcttgatccaggatctcactgcttgggtttcaggtgggtccaggtttgaaatgtagcagctctttgctgagtccagggccaaaatataccaacttcagtctggggccagggagagagtggctgattttcaggatgaatccagggtctaactgtatcacattgagtctgtaagcaagatgtgactgtatcaatttcactcatgtttcagggttttattccttggcttacagtccaagtttggaatacttcagtttcaggttggttccaaactaacatcatca

SEQ ID NO: 1889147 - DNA, 4001 bp, Homo sapiens
ttagtgagcaagtgcccctagccaatccggggagacatgggcttggccagagcagaaagtaagggtggcatacagcagacatgctgagctgtcagatgggcacacaagggtaggtatgagtggtccctgagtgggagaaccccctcaaagccctcaactcacccaagagatcccccagccttttgaaccacaagctgtacctggaactccagggtgcgcactgggtagtggcctggtaaaacttgggtgagcagccagtcactgagtgacttccattgcccatgtctctaatgagaaaattgaatccccaaagtcacaagccaggagcagcaaaagcactaggctgaggcatcacattttttcttcactggcacccataatcctcagaacccctgggcttcccttgaggaaaaatattcctcttcattgtgagtgtaggcccaaatcagagaactggcttgactgttcaactgcactcaggcagtgtgtgtaccattccaagcaggtcccatttacttcgtgcctccagttatttcatctgcaacatatcacttgtaacagctctttctctaccctccaaattctatggtttttgaaattcctctgaagaccacatgagccaagcatcaaggatcattgttctttaggctactcaggctattccaggaagagagatctctcaaactacgttgacacttaagagtcatgtatagatagtaccagatctaggaggagggctgtcaaatatccagattcttttctggtctccattccaaaagatatgttaaaatgacaaggaaaataagacacaaacctgacatttctccctttaaaagggcagcctcagcctggccacactgaaccaaaatttcaggctctggttcaccttgactcacattggaaaatacttgaactgggaccccagaatgtccagtgaaaatcttgagaatgggcacctcagcagcctgaacacacctgtaacaggaacaaaccctaccaagtaagaagccatctcatttacttagaaaaccataccagcaatgtgcacacacatcaggctttttagataaactcctgttaatccaaggattcaagaaaaaggaaaaaaaaagtttgaatctagattctcaggaagaagaacctccactgcctggaccagcctgtatgatggatgcaactgacagtggtaacttgtcttgcacatacctgaagactgatcttatataaaaaatgtttctgagtgttcagagtttcaagctaaaaatctactagtggcctggccagctgcagtgggtcaggcctgtactcccagcagtttgggaggccaaatcagatggatcatctgaggtcaggagttcaagaaccaccttatcaacatgaagaatcctggtctctactaaaaatacaaaattagccaggtatcatggcaaatgcttgtcatcctagctactcagaaggctgaggcagaggaatcacttgaacctgtgaggcggaggtttcggtgagctgagattgtgcaaacaccctccagcctgggcaacaagagtgaaacttcatttcaaaaaaaaaaaaaaaaaaaatctagtagtggccaacctggagattactctttatctatgaggaaagtctgagcctttgctctctcccatgctgtggtatggagtaggccacacaggggactgaggcccttattttttgttaaatgaaggacaacagataaaagattgttcagaaaaaatgtgcttaataaatatgctatgcacactgcatgctttttccaagtggacgtggttatcctgctaagcccactgacactggactttctcccctctatgtaagtcgccagtaaaactccatatcctatttactgattctgagtttcttctttgacatcgtgaacctgctgccatttacatgggagtcaaatttgacacaacttaccccataatgaggaaggatttcagattcttctcaatgtgcttcaaagctcaacaaggcatcagctacagaaggatgcagttgttctctttaccactatcacacagggctcgtttccttagatgcaccttcagtggaataccaagaaagatgaacaagaaacacgtcatggtcagaagcaacattaatgaccaaataagcagtgaccacttgtaaagcaaaagggagcattttgctttctactctgggcagccctcaatgtctgccatcactttctggtttcagtaatggtttttaagctccatcgtggctctggagaaaccttaggcactaggtggtaaacaccttcacttagtcctggagcaacaaagctttctcttgtcaaatatgacctctgtgatcatgagctactaagccatctagacaatgcaccaccagaaaacctatgaaagggagatgagtagacatgagggaaacaatttcccacttttttcagtggcaagttcaaacaactgtgacagtagatcacagagcaaaagaaaacagcatagtagaactcctcatcatgtaagattacaaccaagacttttctatcctcagtgtgagagcaccaaatgaaaaccagaaattacttcactgtgtatctatcagtaattaattgcacaatattttctctatcatactgaaaagtattcactgaggattttctaattgaacatgtagagataaagacaggagaatgtaaaatagcaattccataaaatcattaaagaaattgaaggtatccttgttaactttctgtctcattgatctgcctaatgttgacagtggggtgttaaagtctcctgttattattgtaggaattgaattcagctctgcaccaggcggacctaatagatgtctacagaactctccaccccaaatcaacagaatatacgttcttctcagaaccacaccccaaccattccaaaatcaaccatatagttggaagtaaagcacacctcagcaaatgtaaaaaaacagaaattataacaaaatgtctctcagaccacagtgcaatcaaactagaactcaggattaagaaactcactcaaaacctctcaattacatggaaactgaacaacctgctcctgaatgactactgggtacctaacgaaatgaagtcagaaataaagttgtaccttgagactaatgagaacaaacacacaacataccagaatctctgggacacatttaaagcagtgtgtagatggatatttatagcactatatgcccacaagagaaagcaggaaagatctaaaattgacaccctaacatcacaattaaaagaactagagaagcaagagcaaacacattcaaaagctagcagaaggcaagaaataactaaggtcagagcagaattgaaggagatagagacataaaaagcctttcaaaaaaccaatgattccaggagctggttttctgaaaagatcaacaaaactgatagaccactagcaagactaataaagaagaaaagagagaagaatcaaatagatgcaataaaaaatgataaaggggatatcacaactgatcccacagaaatacaaactaccttcagagaatactacaaacacctctaggcaaataaactagaaaatctagaagaaattgataaattccttgacacatacaccctcccaagactaaaccgggaagaagttgaatctctgaatagaccaataataggctctgaatttgaggcaataattaacagcttaccaacaaaaaaaagtccaggaccagatggattcacagccgaattctaccagaggtgcaaggaggagctggtaccattccttctgaaactagtccaatcaatagaaaaagaggaaatcctccctaactcattttatgaggccaacatcaccctaacaccaaagcctggcagagacacaaccaaaaaagagaattttagaacaatatccctgatgaatatctatgcaaaaatcctcaataaaatactggcaaaccatatccaacagcacatcaaaaagcttatccacaatgatcaagtgggcttcatc

SEQ ID NO: 1889148 - DNA, 4001 bp, Homo sapiens
ttagtgagcaagtgcccctagccaatccggggagacatgggcttggccagagcagaaagtaagggtggcatacagcagacatgctgagctgtcagatgggcacacaagggtaggtatgagtggtccctgagtgggagaaccccctcaaagccctcaactcacccaagagatcccccagccttttgaaccacaagctgtacctggaactccagggtgcgcactgggtagtggcctggtaaaacttgggtgagcagccagtcactgagtgacttccattgcccatgtctctaatgagaaaattgaatccccaaagtcacaagccaggagcagcaaaagcactaggctgaggcatcacattttttcttcactggcacccataatcctcagaacccctgggcttcccttgaggaaaaatattcctcttcattgtgagtgtaggcccaaatcagagaactggcttgactgttcaactgcactcaggcagtgtgtgtaccattccaagcaggtcccatttacttcgtgcctccagttatttcatctgcaacatatcacttgtaacagctctttctctaccctccaaattctatggtttttgaaattcctctgaagaccacatgagccaagcatcaaggatcattgttctttaggctactcaggctattccaggaagagagatctctcaaactacgttgacacttaagagtcatgtatagatagtaccagatctaggaggagggctgtcaaatatccagattcttttctggtctccattccaaaagatatgttaaaatgacaaggaaaataagacacaaacctgacatttctccctttaaaagggcagcctcagcctggccacactgaaccaaaatttcaggctctggttcaccttgactcacattggaaaatacttgaactgggaccccagaatgtccagtgaaaatcttgagaatgggcacctcagcagcctgaacacacctgtaacaggaacaaaccctaccaagtaagaagccatctcatttacttagaaaaccataccagcaatgtgcacacacatcaggctttttagataaactcctgttaatccaaggattcaagaaaaaggaaaaaaaaagtttgaatctagattctcaggaagaagaacctccactgcctggaccagcctgtatgatggatgcaactgacagtggtaacttgtcttgcacatacctgaagactgatcttatataaaaaatgtttctgagtgttcagagtttcaagctaaaaatctactagtggcctggccagctgcagtgggtcaggcctgtactcccagcagtttgggaggccaaatcagatggatcatctgaggtcaggagttcaagaaccaccttatcaacatgaagaatcctggtctctactaaaaatacaaaattagccaggtatcatggcaaatgcttgtcatcctagctactcagaaggctgaggcagaggaatcacttgaacctgtgaggcggaggtttcggtgagctgagattgtgcaaacaccctccagcctgggcaacaagagtgaaacttcatttcaaaaaaaaaaaaaaaaaaaatctagtagtggccaacctggagattactctttatctatgaggaaagtctgagcctttgctctctcccatgctgtggtatggagtaggccacacaggggactgaggcccttattttttgttaaatgaaggacaacagataaaagattgttcagaaaaaatgtgcttaataaatatgctatgcacactgcatgctttttccaagtggacgtggttatcctgctaagcccactgacactggactttctctcctctatgtaagtcgccagtaaaactccatatcctatttactgattctgagtttcttctttgacatcgtgaacctgctgccatttacatgggagtcaaatttgacacaacttaccccataatgaggaaggatttcagattcttctcaatgtgcttcaaagctcaacaaggcatcagctacagaaggatgcagttgttctctttaccactatcacacagggctcgtttccttagatgcaccttcagtggaataccaagaaagatgaacaagaaacacgtcatggtcagaagcaacattaatgaccaaataagcagtgaccacttgtaaagcaaaagggagcattttgctttctactctgggcagccctcaatgtctgccatcactttctggtttcagtaatggtttttaagctccatcgtggctctggagaaaccttaggcactaggtggtaaacaccttcacttagtcctggagcaacaaagctttctcttgtcaaatatgacctctgtgatcatgagctactaagccatctagacaatgcaccaccagaaaacctatgaaagggagatgagtagacatgagggaaacaatttcccacttttttcagtggcaagttcaaacaactgtgacagtagatcacagagcaaaagaaaacagcatagtagaactcctcatcatgtaagattacaaccaagacttttctatcctcagtgtgagagcaccaaatgaaaaccagaaattacttcactgtgtatctatcagtaattaattgcacaatattttctctatcatactgaaaagtattcactgaggattttctaattgaacatgtagagataaagacaggagaatgtaaaatagcaattccataaaatcattaaagaaattgaaggtatccttgttaactttctgtctcattgatctgcctaatgttgacagtggggtgttaaagtctcctgttattattgtaggaattgaattcagctctgcaccaggcggacctaatagatgtctacagaactctccaccccaaatcaacagaatatacgttcttctcagaaccacaccccaaccattccaaaatcaaccatatagttggaagtaaagcacacctcagcaaatgtaaaaaaacagaaattataacaaaatgtctctcagaccacagtgcaatcaaactagaactcaggattaagaaactcactcaaaacctctcaattacatggaaactgaacaacctgctcctgaatgactactgggtacctaacgaaatgaagtcagaaataaagttgtaccttgagactaatgagaacaaacacacaacataccagaatctctgggacacatttaaagcagtgtgtagatggatatttatagcactatatgcccacaagagaaagcaggaaagatctaaaattgacaccctaacatcacaattaaaagaactagagaagcaagagcaaacacattcaaaaactagcagaaggcaagaaataactaaggtcagagcagaattgaaggagatagagacataaaaagcctttcaaaaaaccaatgattccaggagctggttttctgaaaagatcaacaaaactgatagaccactagcaagactaataaagaagaaaagagagaagaatcaaatagatgcaataaaaaatgataaaggggatatcacaactgatcccacagaaatacaaactaccttcagagaatactacaaacacctctaggcaaataaactagaaaatctagaagaaattgataaattccttgacacatacaccctcccaagactaaaccgggaagaagttgaatctctgaatagaccaataataggctctgaatttgaggcaataattaacagcttaccaacaaaaaaaagtccaggaccagatggattcacagccgaattctaccagaggtgcaaggaggagctggtaccattccttctgaaactagtccaatcaatagaaaaagaggaaatcctccctaactcattttatgaggccaacatcaccctaacaccaaagcctggcagagacacaaccaaaaaagagaattttagaacaatatccctgatgaatatctatgcaaaaatcctcaataaaatactggcaaaccatatccaacagcacatcaaaaagcttatccacaatgatcaagtgggcttcatc

SEQ ID NO: 1889149 - DNA, 4001 bp, Homo sapiens
ttagtgagcaagtgcccctagccaatccggggagacatgggcttggccagagcagaaagtaagggtggcatacagcagacatgctgagctgtcagatgggcacacaagggtaggtatgagtggtccctgagtgggagaaccccctcaaagccctcaactcacccaagagatcccccagccttttgaaccacaagctgtacctggaactccagggtgcgcactgggtagtggcctggtaaaacttgggtgagcagccagtcactgagtgacttccattgcccatgtctctaatgagaaaattgaatccccaaagtcacaagccaggagcagcaaaagcactaggctgaggcatcacattttttcttcactggcacccataatcctcagaacccctgggcttcccttgaggaaaaatattcctcttcattgtgagtgtaggcccaaatcagagaactggcttgactgttcaactgcactcaggcagtgtgtgtaccattccaagcaggtcccatttacttcgtgcctccagttatttcatctgcaacatatcacttgtaacagctctttctctaccctccaaattctatggtttttgaaattcctctgaagaccacatgagccaagcatcaaggatcattgttctttaggctactcaggctattccaggaagagagatctctcaaactacgttgacacttaagagtcatgtatagatagtaccagatctaggaggagggctgtcaaatatccagattcttttctggtctccattccaaaagatatgttaaaatgacaaggaaaataagacacaaacctgacatttctccctttaaaagggcagcctcagcctggccacactgaaccaaaatttcaggctctggttcaccttgactcacattggaaaatacttgaactgggaccccagaatgtccagtgaaaatcttgagaatgggcacctcagcagcctgaacacacctgtaacaggaacaaaccctaccaagtaagaagccatctcatttacttagaaaaccataccagcaatgtgcacacacatcaggctttttagataaactcctgttaatccaaggattcaagaaaaaggaaaaaaaaagtttgaatctagattctcaggaagaagaacctccactgcctggaccagcctgtatgatggatgcaactgacagtggtaacttgtcttgcacatacctgaagactgatcttatataaaaaatgtttctgagtgttcagagtttcaagctaaaaatctactagtggcctggccagctgcagtgggtcaggcctgtactcccagcagtttgggaggccaaatcagatggatcatctgaggtcaggagttcaagaaccaccttatcaacatgaagaatcctggtctctactaaaaatacaaaattagccaggtatcatggcaaatgcttgtcatcctagctactcagaaggctgaggcagaggaatcacttgaacctgtgaggcggaggtttcggtgagctgagattgtgcaaacaccctccagcctgggcaacaagagtgaaacttcatttcaaaaaaaaaaaaaaaaaaatctagtagtggccaacctggagattactctttatctatgaggaaagtctgagcctttgctctctcccatgctgtggtatggagtaggccacacaggggactgaggcccttattttttgttaaatgaaggacaacagataaaagattgttcagaaaaaatgtgcttaataaatatgctatgcacactgcatgctttttccaagtggacgtggttatcctgctaagcccactgacactggactttctcccctctatgtaagtcgccagtaaaactccatatcctatttactgattctgagtttcttctttgacatcgtgaacctgctgccatttacatgggagtcaaatttgacacaacttaccccataatgaggaaggatttcagattcttctcaatgtgcttcaaagctcaacaaggcatcagctacagaaggatgcagttgttctctttaccactatcacacagggctcgtttccttagatgcaccttcagtggaataccaagaaagatgaacaagaaacacgtcatggtcagaagcaacattaatgaccaaataagcagtgaccacttgtaaagcaaaagggagcattttgctttctactctgggcagccctcaatgtctgccatcactttctggtttcagtaatggtttttaagctccatcgtggctctggagaaaccttaggcactaggtggtaaacaccttcacttagtcctggagcaacaaagctttctcttgtcaaatatgacctctgtgatcatgagctactaagccatctagacaatacaccaccagaaaacctatgaaagggagatgagtagacatgagggaaacaatttcccacttttttcagtggcaagttcaaacaactgtgacagtagatcacagagcaaaagaaaacagcatagtagaactcctcatcatgtaagattacaaccaagacttttctatcctcagtgtgagagcaccaaatgaaaaccagaaattacttcactgtgtatctatcagtaattaattgcacaatattttctctatcatactgaaaagtattcactgaggattttctaattgaacatgtagagataaagacaggagaatgtaaaatagcaattccataaaatcattaaagaaattgaaggtatctttgttaactttctgtctcattgatctgcctaatgttgacagtggggtgttaaagtctcctgttattattgtaggaattgaattcagctctgcaccaggcggacctaatagatgtctacagaactctccaccccaaatcaacagaatatacgttcttctcagaaccacaccccaaccattccaaaatcaaccatatagttggaagtaaagcacacctcagcaaatgtaaaaaaacagaaattataacaaaatgtctctcagaccacagtgcaatcaaactagaactcaggattaagaaactcactcaaaacctctcaattacatggaaactgaacaacctgctcctgaatgactactgggtacctaacgaaatgaagtcagaaataaagttgtaccttgagactaataagaacaaacacacaacataccagaatctctgggacacatttaaagcagtgtgtagatggatatttatagcactatatgcccacaagagaaagcaggaaagatctaaaattgacaccctaacatcacaattaaaagaactagagaagcaagagcaaacacattcaaaagctagcagaaggcaagaaataactaaggtcagagcagaattgaaggagatagagacataaaaagcctttcaaaaaaccaatgattccaggagctggttttctgaaaagatcaacaaaactgatagaccactagcaagactaataaagaagaaaagagagaagaatcaaatagatgcaataaaaaatgataaaggggatatcacaactgatcccacagaaatacaaactaccttcagagaatactacaaacacctctaggcaaataaactagaaaatctagaagaaattgataaattccttgacacatacaccctcccaagactaaaccgggaagaagttgaatctctgaatagaccaataataggctctgaatttgaggcaataattaacagcttaccaacaaaaaaaagtccaggaccagatggattcacagccgaattctaccagaggtgcaaggaggagctggtaccattccttctgaaactagtccaatcaatagaaaaagaggaaatcctccctaactcattttatgaggccaacatcaccctaacaccaaagcctggcagagacacaaccaaaaaagagaattttagaacaatatccctgatgaatatctatgcaaaaatcctcaataaaatactggcaaaccatatccaacagcacatcaaaaagcttatccacaatgatcaagtgggcttcatcc

SEQ ID NO: 1889150 - DNA, 4001 bp, Homo sapiens; identical to SEQ ID NO: 1889147

SEQ ID NO: 1889151 - DNA, 4001 bp, Homo sapiens; identical to SEQ ID NO: 1889148

SEQ ID NO: 1889152 - DNA, 4001 bp, Homo sapiens; identical to SEQ ID NO: 1889149

SEQ ID NO: 1889153 - DNA, 4001 bp, Homo sapiens; identical to SEQ ID NO: 1889147

SEQ ID NO: 1889154 - DNA, 4001 bp, Homo sapiens; identical to SEQ ID NO: 1889148

SEQ ID NO: 1889155 - DNA, 4001 bp, Homo sapiens; identical to SEQ ID NO: 1889149

SEQ ID NO: 1889156 - DNA, 4001 bp, Homo sapiens
ctagagcttccttgttgttggctgtaacaggaatttacggttttaaaagtataaaagctgtccagtcattaatatgttacagtggatagaaggaaacactcacacaattgcttttcatgagggtcgttctctgtgaactggaaaatgtttagtgttgaaaacattgatccagacccaggaaatcctaggacgatgaggaacatggaagtccagaaaagaagaggcaagtttggaggccacatcccaagaagcatgaatccatttccctcccattggctccaggtataaaagccctcaaatagggtttttgccaggatgttcgcaattttcactccaaatgtttcttgcacattggagtatttccacttaaacactgggccatgctgtggaatacttgttcaattaaggtaactcagggaagaagctggatgcaccttctgtgtcatctgtctttatttttctttgcaggggaagtttcaggacaccatccacccctcatcagattgtatttacactcctacctcaccttgctgtagcttacactgtatgtcccagggtgaaaccccaagacaatggaggagggccaagtcatgatctgaagcaccaactcagctgggaaccaaatttgaggtaaatacatggggcctggcagacagaatggctaatgtctctccatttgttgtcctcagaacaatgaaacgctaatagatgtctattcttttgaagtagtgtgctccttatttatttatttatttattttaagaagagtagtttttttgcagggaaaggtgatttggacgctggctcatctctgcctacctcccaattcagtttgaattcatgatccacagaaaattaaagaatatggagtcctgcaacccaagcacagcaacatagactggccaccaaaaggttgggagactttaaaaaaaaaaaaaaaaagaagcactggaatgaggtagccacaaaatgttaagcagactccacttacaggcacacacacacacacaaagacacactgccacacacagaagcagacatccaacacttgcaacactgcccccaaaacacagagcccagtagcttctgaggctgtgttgttctgcaggaagtcccacaagggagagagccaccatgggaaacacaggtgggcaacacctcaaaatctcagtgaggcaagtttcaaaaagactctcccctacaaagtttaggcaggcctgaggaatccggcagactcttctggatccttagggatttcattgtttattccttggtctgtgctagaagtttttttcaggctggtcgaagtctgccctcttctaggttcatgggactataccgagaatcccacagagaagacaactgagagtccactgccgacacatcttcatgaatgtctccttctctgccaagccggaggaacagtcgctaggcaatgatgacattcactgtgacgctagccagagctcacaatcaggcctggtgctctgagacaggcatgtgcaagttcttgagacagactcgggctcctggctctcagagctgtcaccctgcctaagaagaggaaaacaataaaggttaagtcggcctggtatcgtgaaaaatgttgcctgccattacccactgcaggacgctaaaattcttgaccttagggccccgtcgggatgtttctgtctttgggtctgactggaggaggaggtgtttcaatactgtgaggtgttcgctaaccacatctcttctgactccattacttaaaggggctgtgtgccagagttgggtcccatatgaattggaatatagtctggtgagttgttgaagggtttttgtgtaatggaatcatacctaagatccccaaaagtgggtgtcagtgaatgatagccgggcccttgacttcattgcctctcttcattttgggcctccgaggggctctctgggaaaggcaggaaccacgacaaaggcatgtccaaagtggagcagtgttgccatacatcaaactgtggtctcacaggtacagatgatgatcataagttttctcagaggtcatctgtggtgattgcaagcctagaaaggtccagtgttgtttttgagggtgaatgtggacccagcatgaaagcaaagacaaatcaaggcccacctgagagaatgagcttacttgtcctggagtccaggaaacattcaaagattcctgtaaaaggacccaaaatcctcctgcaaagtgtaagcaatctcagcccccacaacaagacaatggttcaaaatctggagcacagccagcctaaccaaagtcaattttgcttcctgaaatcaatggcatcagaaagatatgtggtgagaggtagcccatccaacaacagtccaataaaagaccttctctaaaataagaaaggatatgcaaatgaaaggaaacagcctttccaagtgaaagccagacacgtctttctgcttctcatagtacgggaatcaagcatccctcccatagaagtgggagaacaatgtctccatgttgttggctgtaatggaaataaggttgtaaatttatcacataagctgttattaaaacttgacagtgtttagaaggaaactcacacaatgcattttcatgagaatcattttctgtgaaaggaaaatgtttagtgtggaaaatgttgagccagacacaggaaaccctatgccaatgagggacatggaagtgaggaaaagaagaggtaagtgtggaggccacatcccaccaagcatcagcccatcccactcccatttggcttctggtattaaagcccttaaacagggagtgtgccccagtttgcactacaaatatttcctgaaagttggagtattcccacctgaacactgggccatggtgtggactgcttgtgcaactaagagaatgtggggatgcagtttaaaacacctctgtttcactgtcttaaccttttttgctggtgaaggtacagggccccatcaacccctcaccaaattatattttcacctgtttgaccttattgcagctcacaatctctttcccagtttgaaatccaaagatgatggaggagtgcccgctcatgatgtgaagtacctgctcagctggaaaccgaatttgagataaattcaagggtctatgtggacaagactgctagtgtctctctctggattggtcatattgcaatgaaacaccagacgatgtctgttcctgggtgttgtattccactcttctttctagaagagtgcctttatttgcaggggaagataatggagaccctggctggtcacaactagcctacctgttcattgtggattcatgacccacagaaacataaagaacagggagcccacagagcccacagcccaagtacagccacacagacaggccacccaaaggttaagacgctaaaaaataaaaagccctgcagtgtgttagccacattcctttaaggagaaacaacttagaggcagaaacacacacacacacagccacacacacccacagatatccaacactcacaatactcccacagaaatacacagcctggtagcttctgaggctgtctcattctataggaagccccaactgaaagagagcaacaccaggaaaagcaggagggctgaacctagaaatcacagtggggcatgtttcaataagactcacccctacatcaactaggctagtatgaggaatcctgcagattcttttggacccttaggaatttcacaatttctggggctctgcttgatatctcttcaggctggctcacatctgccctctccttggatcctggtactatctggtggataacacagagaagacgagtccaccactgatgcacttccacagtggtctctttctccaccaaggtgcagggacttgtcactaggcaaaggtcaaattcattgtgatgctagccacaggtcacagcttgggcctggtgtcatgagactaccacatgcatattagtgagacagactgaactgtcagccttcttaggcagaggaaaatggtacagaca

SEQ ID NO: 1889157 - DNA, 4001 bp, Homo sapiens
tacaccagactgtatttcaatccacaggggacccgattattgcacacagcctcttttgggaatggagtcagaagagtactttctagcgaccacttcacagcctcaaaacagctcctcctccagtgagaccttaccatggagatggtcagaataggtcctgagatctagacttttagtgtctgacagtgggttttcacaggcggcctgttttctgacaccaggccggctttgcctgtaacatttttctctgcttaggcatgctgacggctctgtcagccaggggctctagcctacctcatgaatgtgcatgtgctagtcccagggcacctggcctgattgtcagctcttgttagtgtcacaatgaatgccactcttgcgtagtgaaaattccctgtggcttggcagagatagagacctccgtagaggtgtgtcagtggtgaattctcccctgtcttctctgtgggatccatgggattgtcccattgttctaagaagaagtatacatgagccagcctgaatgtcaagcagagccccaggaataaaccacaaaattgctaaggatctgagaagatctgcagggttattaagcctgcctagacattgtaggtgtgagtcattatgaaaattaccctactattatttctaggagcagcccgtctatgtttctcagggttattctctcccagatggggcttcctgcagaaccacgccacatcacaagatgccaggctgagtgtttctatgggaatgttccaaatgtctgacgtgtgtgtgtgtgtgtgtgtgagagaggcattatgtttttgtgtcttctgtgtgtgtgtgtctgtctgttactggaatctgcttaaaaaaatgtggctaacgcacttcagcacttctttttttataagtctccacaccttttggtggcctgtctgtgtgactctgcatggtcttcactgctctgtgttctttatttttatgtggatcatgaatctgcagtgaattaggatgtaagtctggaatcgctagcatccaaataaactccctctgaagaaaaaacaaaaacaacaaaacaaacaacaacaacaacaacaaaaactgttctagaaataagaggagcacaccatattaaaaaaaaacagacatgtctctgtgtttcatatccctaaggccaacacaggaagagacacagcagtcctgtcagcagggcaccttgaatttacctcaaatttggttcccaactgagcaggtgatgcatcttgtgaggcagcacccctccagagttttgggattttatcttgagacaaataatgtgagcagcaataaggtcagatagaggtgaagatacagtctgttgaggggtagaagatgtcttgcaacttcatctgcaaaataaataaataaataaagacagatgacacagaaggtgcttccacatccaccccccattctcttaattgcacaagcagtccacaacctggctcagtgttcaggtgggagtactccaatgtacaagtaacatttgaagtgcaaattggggctatcctggcaaactgaggatttggggcctttcatacttgaagccaaatgtgagtggaatggattgatgctttgtgggatgtggctttaagacttgcctcttctttttagaacttccatgattctcattgtcctagggtttcctgggtctggcctaacgacttcaatacttaatatttcccagttcatggataacaacactcatgttaatctattgcatgaatgtttccttctaaacactgtcatgctttaatgactggaaagtttgatacattcaaaactgtatattcccattacagccaccaaaaggaaacttgttctctcttacatattgaagagctgcatgatttcttttggatgagaagcaggcagttgtgtcagtcttttacctgggaatctagactatttcatttcatcttcatggccttctcaatttggaggggtgcattcattgaagtgttgctcaatgggactgtctcttgccacagattatgtagctgccagagatttcagagaggaaaagggacttttattaatcagtctgtgctccaggttgtggatcgttgtctcatagcaggggctgacgtttgcacttttctgaaggcttttgggtcttctgaaagaaatcactgaacattgcatggactccagcacaaggcagctgtttccttcaggtgagccttgatttttcttccctctcacaggaatcgaaaatgcccctcaacagaactaatggacattatttacatgcttgccgtctctacagacggcatctgaaacactgtctaaaccttatctgtaactgttagaggatgatatgagatgtgagaacatgattctgcattgaacttcccttcgtcgtggctcctacatttcccagaaagcctctgtgatgtcaaggatgaatggagatggtgaggtcaagagcccagccatctttcactgacatccacacatgtggtctcaggtatgattctatcacccaaagaaccttcaacaacacaacaattccaatacggtactatattccaatctctgtggaaccagattctcacacacagccttttttggaaatgaagtcagaagaagcttttccagtgaccacctcagagtctcaaaatattttctcctcctgtgagacccgaccatgtaaatggtctgaaggggccctgaggtcgagaagtttagtgtcccatagtgggttttcacaggccaccttttgccctatgccaggctggctctgcccataccatttcccactgcttaggcaggctgaaagctctgaagcctggcaccagatcctgcctcacgaatgcacatgcactagtctcagggcaccaggactgtttgtgagccctgggtagcatcacaattgatgttattgttgcctggtgccaagtctctgtggcttggaggagaaggtcacttccgttgagttgcattggctgcgaactcttgcctatcttctttgggatagatgggatagttccatgatcccaagagagggcagacaagagccagcctgaagaaacgtcaaatacaaccccaggaataaattgtggaatcattaaggacacaaaaaatctgcaggattccttggcctgcctaggggttgtagatatgagtctttttgaaacttgccacagtcagatttctagcctgcctctgtaccttaggttggctctcttgaggtggggtttcctgcagaaacacacagccaagggagttgctgggctgtgtttctgtcagagagttgctaatgttgaatgtccgcatgtctgtgtggcatcgtgtatgtgtgtgtgtgtgtgtaatcacttcttccttttttttttttttgagtcaccaaccctttagttgatgacctgtccatgcggcttggcttgagctgtggggctccttgtttattatttttatgtggatcataaatctactgtaaattgggaggcggcctgagacctgcaggtgtttacttacatcacctcccactgctaaaataaataaataaataaaaaataaaagccactcttctagaaaaagcagctgcacaccacaccaaaaaagagacatcttcaagtgtttcattgtcctgtggccaaaccagggacaaacactagcagtccagtccgttgggccccttgactttacatcgagttttgttcccactggagcaggtgtttcatgtcatgagggggcaattctccatcatcttgggatttcatcccaggaactagagtgtgaacagcaataaggtaagataggggtgaggataaagtctggtgaggggtgtatgtgaacccacaacttcacctgcaaaaataaaaataaaaaagatgacacagaaggtgcttccagcttcatcctcgcattcccttaattgtacaagcagtccacaccatggcctgatattcaggtgagagtattccaacactctaggaagatttggagtgcaaattcaggccatactggcaaacatc

SEQ ID NO: 1889158 - DNA, 4001 bp, Homo sapiens
ctctgccagggtaagtttcttgcacaaccacgaagcctcaggagctgccagcctgtgtgtttctgttggagtgttgtgagtgttggaggcctgcatgtgtgtggcattttgtgtgtgtgtgtgtttgtgtgtgtgtgtctgtaagtggagagtgcttaaatgaatgtggctaacacaattcagggctagttttttgagtctccaacccttttggctctgcttgagccacatcataagtctcagtgaattgagaggcaggccataacccacccatgtccaaataatctccccctacaaagcacaaagccattcttctagaaacaagaggagcacaccacacaaaaacatagatatctttagtgtttcattgttatgtggccaacccagacagagacagtagcagtcttgttttcagggccccttcaatttacctgaaattcagtccccagcttagcaagtgcttcacgtcctgagggggcactcctccatcattttgggattttattttgggacacagagtataagcagccataacatcggataggggtgagaattcaatcaggtgaaggttgtcacctgaagacaggtgactcagaaggtacttccaacaccatccccacattcccttagttgaagaagcagtccacaccatggctcagtgttcaggtgagtgtacaagctggggccatcctggcaaacttccgatttgagggctttcatacccggaacaaaatggaagtggaataaattcatgctaggtggaatgtggcctccacacttgcctcatcttttcctgacttccatgttcctcactggcctacagtttcctgggtctggttcaatgacttccaacacagaacatttcccagttcacaaagaacaaccctcacggtgatccactgtgtgagtgtttccttctaaacaccatcacgttttaatgactgagctgctttgatacttttaaaacagtaaattcctgttacagccaccaaaaagcaaactcttcctctcccactcctatcaaagggctgcatgacttctgcagggtgagaagcaggcattcatgtctggcttttgtctggtagtctatcttctgtttcatttcatctgcctggtttccttattgtggaggggctctttcattcagctgtttttcagtaggactgcctctctacacagataatttagttaccaggatttcagagaggaaaagggacttcaggtaggctggctgcactccaggttctgggtcattgtctcatttggggggctgaagttccttccactttacaggaggcatttggatcctctgacaggaatcattgaacattgcttggactccagcacaaggcagctcattctagagagatgaggttttatttttctttgctttcatggggaatctacagtacccctaaacagcagtactgacacaactttttatccttgccatgccataaatggcctttgacacactgtctcaacctcatctgcacccatgagtggtcagtccaaggtgtgagaacagtgctccaccttggacttgcctttgtcttaggtccagactttcccagagagcccctgtgaggcccaaaatgaagggaggaagtgaggtcaagggcccaactatctttcactgaccccagcttctggggtctcaggtatgattctatcatccaaataaccctcaacaacacagcaaactatatttgcatccccatcatacccgattcttgcacatagcctcttttgagactggagtcagatgagcagtttccagcgatcagctcacattcttgaaacgcctccttctccagcatgacatggccatggagatgccatgaaggggccctgaggtccccacttatggtcccacagtgggatttcacaggcagccttttttctcgctaccaggctgcactgcctgtaccattttactctgcttaagcaggctgacagctctgacagacaggaaacataggctgccacaggaatgggcatgcactactctcagggcaccaggcctgattgtgagctctggctagcatcacaatgagtgtaaccattgcctagcaacaagttcctgtggcttggtggagaagaagacctccgtggagttgtgtcaaaggtggactctcacctgtcttcactgtgggatccatggtattgttccatgatcctaggagagggcagatgtgagccagcctgaagaaacctcaagtaaagttccagcaataaaccatgaaatccctaataataaaaaatgatcttcaggattcctcattcaacctagacattgtaggggtgagcctttttgaaacttaccccactgtgatttctaggtagagccaggctgttttccctggggttgctgtctcccaggtgggggcttcttgcagaaccagtcaaccccattgctgcattcctttgtagcaggacaagccatgaacaaaacccctcagacactggattaaagaagaaagtggctttattcagctgggagtgttggcagactcctgtctcaggaactgagctcctggaagaaacagttcctgtcccttttaagtgcttacaactttaaggggttacacgtgaaagggttgtaatagattgagatctagagatagcacgtgtggttagagtggtgggttaaacttttaacctcaggcctgttcattagtggcaccagctggtcttgtcaatgatttcattcctgatgtttttcagcttttacttcctccttctattcagagaacaggggacagtaagagaaatagccttcctcctcatccccctctttgagagctgcactcactagtgagagttctctttctcatcttcattacccaggtctttctgcaaaacagattgatagtgatttatgtaatgcacttgtgctgtggtcttttgatgaactaaggtggtaaaagtacaggtaccatacagggagtaaacactggcttgggagagtgcctgtggaccttcccttagactaaaatatttacttggggatccagtccatttccattgattcttagaattacatactctcctgttttccgacagggatcaagtagttataatgggttttcccacatcaggctggttacttcctgggctgcataccttgtgcagggtggcgttatacaaagtcatcccttttaaagttgcaatacattcataataactataaaacaaaaagactgctttaacttttttccctacctcagtaacttgaacagtcctcagtctgaggaaggtcagttgaagtccttactgtacacatccaaaatttaagaaaagtgagtcctacaatgagtttcctcatgttttggccatgcgtggaccagtcagctcctgggtatgactggagtagggcttgtcatcttcttcaaagtcaccttggaggtgttatctgggcttggtctctcctcccaggtctcaggtgctgcagttttaggtggctatgatggatccacgctagaattttctctacatttgtggctgtgggagtggtcaagacgaaggcctggtgtcctttccacctgtggccacaagggggctactttccgatccgggatccacacccgatcatctgggaagaaagtcatttaccctggctgaaattgtttctgtaattttccctagagcctgtaattgttgctgtaactcaattttacctagctctcaatgagtgcctaggagtccccgtagtatgggagggggcctatgatataatatttcataaggtgaatatcctgttcttttagaaggaatacatttaatcttaaacaataccttagggagagcttgtgccggctttaatcctctttcttgacacactttttctaaactatttttgatagtccagttcatctgcttcacctttccgcaactctacggtcaataagcagtatgtagtttccatgtcatttccaatacctttgctgccttttgtaccaagtcagcaacaaatgatggcatgttgtctgagctcattc

SEQ ID NO: 1889159 - DNA, 4001 bp, Homo sapiens
tctgccagggtaagtttcttgcacaaccacgaagcctcaggagctgccagcctgtgtgtttctgttggagtgttgtgagtgttggaggcctgcatgtgtgtggcattttgtgtgtgtgtgtgtttgtgtgtgtgtgtctgtaagtggagagtgcttaaatgaatgtggctaacacaattcagggctagttttttgagtctccaacccttttggctctgcttgagccacatcataagtctcagtgaattgagaggcaggccataacccacccatgtccaaataatctccccctacaaagcacaaagccattcttctagaaacaagaggagcacaccacacaaaaacatagatatctttagtgtttcattgttatgtggccaacccagacagagacagtagcagtcttgttttcagggccccttcaatttacctgaaattcagtccccagcttagcaagtgcttcacgtcctgagggggcactcctccatcattttgggattttattttgggacacagagtataagcagccataacatcggataggggtgagaattcaatcaggtgaaggttgtcacctgaagacaggtgactcagaaggtacttccaacaccatccccacattcccttagttgaagaagcagtccacaccatggctcagtgttcaggtgagcgtacaagctggggccatcctggcaaacttccgatttgagggctttcatacccggaacaaaatggaagtggaataaattcatgctaggtggaatgtggcctccacacttgcctcatcttttcctgacttccatgttcctcactggcctacagtttcctgggtctggttcaatgacttccaacacagaacatttcccagttcacaaagaacaaccctcacggtgatccactgtgtgagtgtttccttctaaacaccatcacgttttaatgactgagctgctttgatacttttaaaacagtaaattcctgttacagccaccaaaaagcaaactcttcctctcccactcctatcaaagggctgcatgacttctgcagggtgagaagcaggcattcatgtctggcttttgtctggtagtctatcttctgtttcatttcatctgcctggtttccttattgtggaggggctctttcattcagctgtttttcagtaggactgcctctctacacagataatttagttaccaggatttcagagaggaaaagggacttcaggtaggctggctgcactccaggttctgggtcattgtctcatttggggggctgaagttccttccactttacaggaggcatttggatcctctgacaggaatcattgaacattgcttggactccagcacaaggcagctcattctagagagatgaggttttatttttctttgctttcatggggaatctacagtacccctaaacagcagtactgacacaactttttatccttgccatgccataaatggcctttgacacactgtctcaacctcatctgcacccatgagtggtcagtccaaggtgtgagaacagtgctccaccttggacttgcctttgtcttaggtccagactttcccagagagcccctgtgaggcccaaaatgaagggaggaagtgaggtcaagggcccaactatctttcactgaccccagcttctggggtctcaggtatgattctatcatccaaataaccctcaacaacacagcaaactatatttgcatccccatcatacccgattcttgcacatagcctcttttgagactggagtcagatgagcagtttccagcgatcagctcacattcttgaaacgcctccttctccagcatgacatggccatggagatgccatgaaggggccctgaggtccccacttatggtcccacagtgggatttcacaggcagccttttttctcgctaccaggctgcactgcctgtaccattttactctgcttaagcaggctgacagctctgacagacaggaaacataggctgccacaggaatgggcatgcactactctcagggcaccaggcctgattgtgagctctggctagcatcacaatgagtgtaaccattgcctagcaacaagttcctgtggcttggtggagaagaagacctccgtggagttgtgtcaaaggtggactctcacctgtcttcactgtgggatccatggtattgttccatgatcctaggagagggcagatgtgagccagcctgaagaaacctcaagtaaagttccagcaataaaccatgaaatccctaataataaaaaatgatcttcaggattcctcattcaacctagacattgtaggggtgagcctttttgaaacttaccccactgtgatttctaggtagagccaggctgttttccctggggttgctgtctcccaggtgggggcttcttgcagaaccagtcaaccccattgctgcattcctttgtagcaggacaagccatgaacaaaacccctcagacactggattaaagaagaaagtggctttattcagctgggagtgttggcagactcctgtctcaggaactgagctcctggaagaaacagttcctgtcccttttaagtgcttacaactttaaggggttacacgtgaaagggttgtaatagattgagatctagagatagcacgtgtggttagagtggtgggttaaacttttaacctcaggcctgttcattagtggcaccagctggtcttgtcaatgatttcattcctgatgtttttcagcttttacttcctccttctattcagagaacaggggacagtaagagaaatagccttcctcctcatccccctctttgagagctgcactcactagtgagagttctctttctcatcttcattacccaggtctttctgcaaaacagattgatagtgatttatgtaatgcacttgtgctgtggtcttttgatgaactaaggtggtaaaagtacaggtaccatacagggagtaaacactggcttgggagagtgcctgtggaccttcccttagactaaaatatttacttggggatccagtccatttccattgattcttagaattacatactctcctgttttccgacagggatcaagtagttataatgggttttcccacatcaggctggttacttcctgggctgcataccttgtgcagggtggcgttatacaaagtcatcccttttaaagttgcaatacattcataataactataaaacaaaaagactgctttaacttttttccctacctcagtaacttgaacagtcctcagtctgaggaaggtcagttgaagtccttactgtacacatccaaaatttaagaaaagtgagtcctacaatgagtttcctcatgttttggccatgcgtggaccagtcagctcctgggtatgactggagtagggcttgtcatcttcttcaaagtcaccttggaggtgttatctgggcttggtctctcctcccaggtctcaggtgctgcagttttaggtggctatgatggatccacgctagaattttctctacatttgtggctgtgggagtggtcaagacgaaggcctggtgtcctttccacctgtggccacaagggggctactttccgatccgggatccacacccgatcatctgggaagaaagtcatttaccctggctgaaattgtttctgtaattttccctagagcctgtaattgttgctgtaactcaattttacctagctctcaatgagtgcctaggagtccccgtagtatgggagggggcctatgatataatatttcataaggtgaatatcctgttcttttagaaggaatacatttaatcttaaacaataccttagggagagcttgtgccggctttaatcctctttcttgacacactttttctaaactatttttgatagtccagttcatctgcttcacctttccgcaactctacggtcaataagcagtatgtagtttccatgtcatttccaatacctttgctgccttttgtaccaagtcagcaacaaatgatggcatgttgtctgagctcattca

SEQ ID NO: 1889160 - DNA, 4001 bp, Homo sapiens
ccaggtgtgaatgtcaaagaaagacagcctggctcttgacctcattgcctccctttattttgggccttgcaggggccctctgggaaaagcaggaacaacaacaaaggcaagtccaaggtagagcagtgttctcatagctcatactggcctctcacaggtgctgatgagattcagtgtctcagaggacatctgcagtgatggcgagtctaaaaagggtgtccattagtgctgttgaggggcactgttgaatcccagtgaaagcaaaaaaaaaataaaaaataaaaatatgaaggcttgcctgagagaacaagctgctttgtgcaggagttcaagctttgttgaataattcctgtcagaggacccaaaatcctcctggaaaatgcaaacaacctcagctcccactatgagacaagcatcacaacctggagtgcagccagcctaaccaaagtcccttttgctctctgaaatccctggcagccaaacagaggctagattacaagaccaaggcagacacggctgtcagcttctcacttttcaggtatcatgcatctctctgatagtagtgggtgaacacgagtttccttatggcagctgtaacaggaatttatcgttttaacaaattcaaagccatgcagtcattaacacatgacagcgtttagaaagaaaaattaatgcaatggattttcataagtcccattctccatgaattctgaaatgtttaatgtggaagtcgttgagccagacccaggaaaccctaggcctataaggaacatggaagtcaggaaaagaagaggccattgtggaagccacatcccagacatcatcaatctattctactcacatttgactctgggtataaaaggcctcaaatccagagtttgccaagatggccccaatttgcagtccaaatgttttttgcacattagagtactcccacctgaacactgggccaaggtgcagacagattgtgcaattaagaaaatgaggggatggagtttgaagaactatctttgttacctgtcttcattattttttttttttgcagatgaagttgcagaaccccatccactcctcaccagattttatcctcacccctatctgaacttttccctgttcacattctaggtccaaggatgatatcccaagatgatagaggagttccccatcatgacatgaagcacatgctcagctgggagccaaattctatgtaaattcaaggggtcctgcatacaggactgctagtgtttctttctgggttggccacagaacactgaaacactgggagatgtctgttttttggtgtggtgtgcttctcttctttctagaagtgtgttgtttttttttgtgtgtgtgtttttttgtttgtttgtttttgcagggggaggtgatttggacattggcgggtcccagcccacatcctaatttactgcagattcatgatccacagaaaaaaaataacacaaagcctcgcagccgaagcagagccacagagacaggccaacaaaaggttgggagatccaaaaaaatgaagctctggagtgtgtttgccacattcctttaagtagactcaacttacaggcacacatagacacacacaaacacactcatacacaaatacacaataccaaacacacacagacatccaacacttgcaacactcctgaagaaacacagcacttggtagcttctgaggctgcatggttttgctggaatccccatttgggtgaaagcaacccgggggaacatgtgggctgtaactagaaatcatagtgaaacaagtttcaagaaaactcacccttacatcatctaggcaggcctgaggaatcttgcgatcttttggatccttaggggttttgccgtttattcctggggctctgtttgatgtttctttcagctggctcatgtctgccctcttgtaggatcatgagactgtcccaagtatcccacagagaagacaggcaagagtccacagctgacatgcctacagcgaggtctccttctccctcaagaggcaggaacttgtctctaggcaatgctgacattcattgtgatgctagccagagttcacaatgagaactggtaccctgagactagtgcatatgcattcccggggcaggtacaagtgcatggctgtcagagctgtcagcctgcctaagcagagaaaaaatggtacaggtaaaaccggtctggtgttgtgaaaatgttgcctgctagaagccatggtcagactctacagtctcgacctcagggccccttcaggccatctgcatggttgagaccggctggaggaggaggcattttgagactgtgaggtggtggctggaaactgctcttcctactccattcccaaaggatgctttttgcaagaatcgggtctcatgggaattggaatttggtctggtgtgttgctgagggttctttgggtgagagaattatacgtgagaccccagagatgggtgccaatgaaagatggctgggctatttacctcactgtctctcttcagcctgggccttgatggggccctctgcaaaaggcaaaaaccatgacaaagagaagtccaacatgggtcagtgttctcacttcggtctggtctctcacgggtgcagatgaggttgagacaatgtatcagatgccctctgtggtgatagcaagcctgaaactgaccagcagtgcatttgtagggtactgtggattctctatgaaagaaaagaaacatcaaagctcacctcagagaatgacctgttttgtgctggagtccaagcaatgttcaatgtttccaggcagagtacccaaaagcctcctgaaaagtgcaaacaacctcagtactcacaatgagaccaaaaaccacaacccggagggagtcagcctacctgaagttcttttcatccttgaaatccctggcagccaatagatctgtggtgagaggcagtcccatccagcaacagcccagtgaaagaccttgtatacaaagagaaaggacttgcatatgcaatgaaacagaggctagatttccaggcaaaagcccaacatagttgcctgctttttatgctacaggaatcatgcatccctccagtaaaagtgagagaataagaatttctttgttggtggctgtaatgaaaatttacagtgttaaaatcatcacatctgcccagcctttaaaacgtgacagtgtttagaagaaaacactcatgcattggattcccatgaaggtcgtcctccatgaactgtgaattgcttagtgtggaaagtgtgaagccagacccaggaaatcctaggccatgaggaacatggaagtcaggaaaagaagagacaagtgtgcagggcacatcccacctaccatcaatacatcccactctcatttggctcagggtatgagagctctcaaattgggagtttgttagaatgccctcaacttgcactccaaatgttccctgaacattgtattactcccacctgaacaccgggccataatgtgaactgcttctgcaattaaaggaatgtggggatgcaataggaagcagcttctgcgtcatcagtcttcacgttttttttgcgggagaaagtgcgggagtctatttacgcctcaccagattgtatcctcacccatattttaccttctttctgctcatactctctgtcctagaatgaaatcacaagttgatggaggagtgccacatgacgacatgaagcctctgcttgtctgggaaccaaattcaaagtaaattcaaagggcccttcagatagttctgctagtttctctccctgggtctgccgcaggacaatgaaacacagagatatttgctttggagtgtgatgcgctgtctcctaattcactgagaattcatactccacggaaaaataacggagatggagccctgcaacccaagcagagctacaccaacaggccaccaaaaggtttggagattcaaaaagaggaagtgttgccgtgcgttatccacattccattaagcagactccacttacagccacacacaaacac

SEQ ID NO: 1889161 - DNA, 4001 bp, Homo sapiens
cccaggtgtgaatgtcaaagaaagacagcctggctcttgacctcattgcctccctttattttgggccttgcaggggccctctgggaaaagcaggaacaacaacaaaggcaagtccaaggtagagcagtgttctcatagctcatactggcctctcacaggtgctgatgagattcagtgtctcagaggacatctgcagtgatggcgagtctaaaaagggtgtccattagtgctgttgaggggcactgttgaatcccagtgaaagcaaaaaaaaaataaaaaataaaaatatgaaggcttgcctgagagaacaagctgctttgtgcaggagttcaagctttgttgaataattcctgtcagaggacccaaaatcctcctggaaaatgcaaacaacctcagctcccactatgagacaagcatcacaacctggagtgcagccagcctaaccaaagtcccttttgctctctgaaatccctggcagccaaacagaggctagattacaagaccaaggcagacacggctgtcagcttctcacttttcaggtatcatgcatctctctgatagtagtgggtgaacacgagtttccttatggcagctgtaacaggaatttatcgttttaacaaattcaaagccatgcagtcattaacacatgacagcgtttagaaagaaaaattaatgcaatggattttcataagtcccattctccatgaattctgaaatgtttaatgtggaagtcgttgagccagacccaggaaaccctaggcctataaggaacatggaagtcaggaaaagaagaggccattgtggaagccacatcccagacatcatcaatctattctactcacatttgactctgggtataaaaggcctcaaatccagagtttgccaagatggccccaatttgcagtccaaatgttttttgcacattagagtactcccacctgaacactgggccaaggtgcagacagattgtgcaattaagaaaatgaggggatggagtttgaagaactatctttgttacctgtcttcattattttttttttttgcagatgaagttgcagaaccccatccactcctcaccagattttatcctcacccctatctgaacttttccctgttcacattctaggtccaaggatgatatcccaagatgatagaggagttccccatcatgacatgaagcacatgctcagctgggagccaaattctatgtaaattcaaggggtcctgcatacaggactgctagtgtttctttctgggttggccacagaacactgaaacactgggagatgtctgttttttggtgtggtgtgcttctcttctttctagaagtgtgttgtttttttgtgtgtgtgtgtttttttgtttgtttgtttttgcagggggaggtgatttggacattggcgggtcccagcccacatcctaatttactgcagattcatgatccacagaaaaaaaataacacaaagcctcgcagccgaagcagagccacagagacaggccaacaaaaggttgggagatccaaaaaaatgaagctctggagtgtgtttgccacattcctttaagtagactcaacttacaggcacacatagacacacacaaacacactcatacacaaatacacaataccaaacacacacagacatccaacacttgcaacactcctgaagaaacacagcacttggtagcttctgaggctgcatggttttgctggaatccccatttgggtgaaagcaacccgggggaacatgtgggctgtaactagaaatcatagtgaaacaagtttcaagaaaactcacccttacatcatctaggcaggcctgaggaatcttgcgatcttttggatccttaggggttttgccgtttattcctggggctctgtttgatgtttctttcagctggctcatgtctgccctcttgtaggatcatgagactgtcccaagtatcccacagagaagacaggcaagagtccacagctgacatgcctacagcgaggtctccttctccctcaagaggcaggaacttgtctctaggcaatgctgacattcattgtgatgctagccagagttcacaatgagaactggtaccctgagactagtgcatatgcattcccggggcaggtacaagtgcatggctgtcagagctgtcagcctgcctaagcagagaaaaaatggtacaggtaaaaccggtctggtgttgtgaaaatgttgcctgctagaagccatggtcagactctacagtctcgacctcagggccccttcaggccatctgcatggttgagaccggctggaggaggaggcattttgagactgtgaggtggtggctggaaactgctcttcctactccattcccaaaggatgctttttgcaagaatcgggtctcatgggaattggaatttggtctggtgtgttgctgagggttctttgggtgagagaattatacgtgagaccccagagatgggtgccaatgaaagatggctgggctatttacctcactgtctctcttcagcctgggccttgatggggccctctgcaaaaggcaaaaaccatgacaaagagaagtccaacatgggtcagtgttctcacttcggtctggtctctcacgggtgcagatgaggttgagacaatgtatcagatgccctctgtggtgatagcaagcctgaaactgaccagcagtgcatttgtagggtactgtggattctctatgaaagaaaagaaacatcaaagctcacctcagagaatgacctgttttgtgctggagtccaagcaatgttcaatgtttccaggcagagtacccaaaagcctcctgaaaagtgcaaacaacctcagtactcacaatgagaccaaaaaccacaacccggagggagtcagcctacctgaagttcttttcatccttgaaatccctggcagccaatagatctgtggtgagaggcagtcccatccagcaacagcccagtgaaagaccttgtatacaaagagaaaggacttgcatatgcaatgaaacagaggctagatttccaggcaaaagcccaacatagttgcctgctttttatgctacaggaatcatgcatccctccagtaaaagtgagagaataagaatttctttgttggtggctgtaatgaaaatttacagtgttaaaatcatcacatctgcccagcctttaaaacgtgacagtgtttagaagaaaacactcatgcattggattcccatgaaggtcgtcctccatgaactgtgaattgcttagtgtggaaagtgtgaagccagacccaggaaatcctaggccatgaggaacatggaagtcaggaaaagaagagacaagtgtgcagggcacatcccacctaccatcaatacatcccactctcatttggctcagggtatgagagctctcaaattgggagtttgttagaatgccctcaacttgcactccaaatgttccctgaacattgtattactcccacctgaacaccgggccataatgtgaactgcttctgcaattaaaggaatgtggggatgcaataggaagcagcttctgcgtcatcagtcttcacgttttttttgcgggagaaagtgcgggagtctatttacgcctcaccagattgtatcctcacccatattttaccttctttctgctcatactctctgtcctagaatgaaatcacaagttgatggaggagtgccacatgacgacatgaagcctctgcttgtctgggaaccaaattcaaagtaaattcaaagggcccttcagatagttctgctagtttctctccctgggtctgccgcaggacaatgaaacacagagatatttgctttggagtgtgatgcgctgtctcctaattcactgagaattcatactccacggaaaaataacggagatggagccctgcaacccaagcagagctacaccaacaggccaccaaaaggtttggagattcaaaaagaggaagtgttgccgtgcgttatccacattccattaagcagactccacttacagccacacacaaaca

SEQ ID NO: 1889162 - DNA, 4001 bp, Homo sapiens
caggatatcacttttagcctgtgatcccaacatggactacatgggatcacaggctaccccatgggtatcatgactaccccatgtgtttactggcactctttaaaccataatttgattgaacgggaaactgagtagttttcaattaagtacctacttgcatttttaggccattgctgatgaaacagatttttttaaatagtcattagcaaatagcccataaataggtagttataagaatataacagatgacaaaacgactgtggccagacaaatcaactactgtctgtcacctaagcttctatttccaacacataatttacatatatctagcctattatttccttccttttccccagacctaccatttccacaaggggcaaataagaaaaagaatttaacaccccccatataaagtacaaacagtaatctgaaaagaaccacaagggaaaaaaattcaaaatttacaactatctaccctaaaagaagctgaaagtccctcaaaaactttctagaggccatgtccttctattacaaaaatgatcataagaactgcaggagtagaagaataaaaatgcatcttaaaacttgctaaacacttcaagtctcccataagaattgtaatggaaaatggatcagtcagcagttttttccatacaattatgaacgaattatatttcctcatacacagatttgttttttcaatattctaaggaattaacttttatactaatagtaggtgatgtaagaaagcaggcctttatcaagataactgacactggatgtccataccattactcaggtgggccttaattcccagccgggttccctccctggacacacactgaaggtccccagccatttggcaatctcttcacattcccagccctggaggtagccctaaaatacatgtacctgaagaaaataaaacattgcctcacactggagcccagtgtggtcctccagattccgtgtgaggtggactaacttatatgggaaggcagggcagcgggagtgaggatggcagagaggattacacatgtcaaggcagccggggtcatggaaacaaaacatgactggcctgggagaaacactgtgaaaggacacagacctaggtgggcctcaggtggacatcctcgtggagaaaaagggggccctggttgatctcaaaatgagccccaggtggtagcaggtcttaccgcagggcagggagctggcgaatgataatgagacagctatccctttagccctgcttgtcacccactgactttagccacatatgcatcatagtggcttaaggggccccgatcgtgaaatgtgggtgttacatgtccctgatgggtctctctcccccaacccatggattgtctgggattgctcactgcagtctcctccaggatccttgggttctccatgtgtggcccagatccaggtcaaaaggcctctcagttcccagcgcttcccagccctgggctgctcgactggcctcctctctgttacgcctctaaggctgacccagtccccatgggatagaaatgcaatggattgagccataggccctggctcatgatctaggggactgcagaagtgggtccaggacagttcaggtgacagtttaaagccaattccccagagaccaaggaatgaccagctaggtcctttcccatgatgccccacggcaaacaccacctccgaactcgtgccaaaacccaggcagtcatgttcagccaaacagctgaataagctcaggtaggaggtgtactgcctgcagctggaggcttaaccttcgtgaacccagaaccgctggactgcagtggaatgagacaccctgtagcctgcagggagaggagtcaggaaggttcatgccagttccaccctcccacacaccagctctcctaccatgctgggaggcattccttaccgaggatgccaacacagtgctccttcatgatgatttcactgtggaaataaaggttgggatgaaaggaaatcatcctgccaccggtaaccgggatggctgtgttcctccacctgccggatcaaggagaaagaggatggattcaatgggaccatctcaactagctgggctgaggtggcctacttgctgtagtgagccatgagtttccctttcccagctctgccactgagacgaccctggtcccagggggacctcaaactgactcagacactggactcctcccacagacccaggctccccagcctgacctgcaaatccatcacgtagcaaagcaggacttccgcatgctttctgacccacgccgacatctcgtgtgccaaacaatctacctctgcgcaagaactctccagaggattgggtgggcaagcctcgtgacgccttgcaatttcgcaagaacacagacaatgtggaacagggccatctcccagacatttggccagtcacccttcattgttggccctctatctctgtctggggaggaggcaacgccacaactgtggtggtttttggagtgggtggaccccggccaagacggcctgggctgaccagagaccggaggcagaaaaagtgggcaggtggttgcagctgagggacgggaggggcggggggtggtgtgaggcggctgcttctctgggtttctgagatgcaggaggcctttgtgtgctgggtgctggacatgctccgctgatgtccgggtgtgtggtgtcctcttatcctagtctccctgaggggtgggcctgtccacctgagggaagccttgtagttagaagccacagcagggtcgtgcctggcgctctccaagggaattgcgtgggtccagaggaagttatacaggctcagggcctacacccctttgagtgcagcgcctgcagttggaagaatgcgcatctgcggagctggtgcccgccgtcaggtggtcggcagccccatgcgccgcgaacccgtcttaagcaccttgtgtttctggggtgagcctgctggaaacaggcaccgagagcaggggtggttcaatggctggtaatggcatacagattccccgtcctccagggacgttcccagggaaacgtgtccttcgaatttgggctgtgcgcaaagggaccttggcgccgcgattctcccttgtcagtgctggccctggctccccttccctaccacgtgctcccagggctgctacaagcgagctgccctcacagctgcgggaacgtggcctcggctcccacgctgtcccccatcccctgcctcctggctgaccccacgcgcctcccacctggctcctccccccaaacagcccccataccccccgaggcccgatgactatcccctgctgcccgccatcccaaatcggcagccgcaaggatatggctctggctcacaaggcggagatgctctgtggcctggggcattcacggagcccagctccaagtgaaggacctccagcgagtccattgacggccccggtgtgctcggtccagggccaggctgtgcccgctggccctccttctgccaccccacgtcgggctccacctcaaccaccacctccacctcagccatgatgtcttccaccttcagcaccgcctcctcttccaaggccgcctccttgctctgtaccccggccgtcctctccagcattgcctccagcctgaacacggttttctcctgggtgctcccacagaccctgggcctgcgcagcccagcccagcccagcccatgccccgcacccgtaggctctgggggcccgctccccagcagacccgctccctgcaagacccacgggcgtcgccctgctgtgaacctggtcccacacctacgtggacccaggtttcctgaggagctccgctggacccgcagatcccgcactggccaaagggctccggtccccagcaggctcaactgcgcacaggagctcgggagccagaggccccggccctgggcttgcagagccccaccaacaggcaccgcaaccgctgctgcgggtgcgggagcctctgggtcgtcaaggcagcgcacaacagcgtgcgcgcaggcc

SEQ ID NO: 1889163 - DNA, 4001 bp, Homo sapiens
tgaaacttgccccacagtgatttctaagtatatcccgattgtttttgggttgctctctccaaggtggggattcctgcagaaccatgcagcctcagtagctgccagtgtgtgtttatctgtgggagtgttgtgagtgttgtttgtgtgtgtgtgtggcattgtgtgtgtgtgtgtatgtgcctgtaagtggagtatgcttaaaataatgtggctaatgcacttcagcacttctttttcgaatctcccaacattctgttgtgtggtcattgtggctttgcttgggctgcagggcttcatggtctttatttttctgtggatcatgaatctgcagtgaattgggaggcaagtcgaaatatgctggcatctaagtcacctccccctgcaaaaaaagccactctcctagaaagaagaggagcacaccacaccaaaaataaggcatctcccagtgtttcattgtcctgtggtgaacccggggagaaacactagcagtcctgtcttcagagctgcttgaatttacctcatatttggttcacagccaagcatgtgcttcatgttgtgagtggccactccagcattgccttgaaatttcatcctcgaacataatgagaagcaataagttcaggtagtgttgaggatataatctggtgagcagtgcatggggtctcacaacatctcctgcaaaaaaaaaaagaagacagatgacccagaaggtgcttccaactccatagccaggtgttcagctggaagtactccaacatgcagggaacatttcaagtataaactggggccatccttttaaactcctgatgtgcaggctttcatacccagagccaaaggagagtgtaatggattgatgctgggtggtatgtggcctatacacttgctcttctttttctgccttccatattcctcttcagcctaaggttttctgggtctggatccacatcttccataccaaaagtttctcagttcacagaggaagaccctcatggaaatccattgcatgagtgtttctttctaaactctgtcatgttttaatgagttgtcagctgtgatattttaaaagcttaaatttccattacagctgccaacatggaaattcttgttctcccacttttaacatagggttgcatgattcctgtaggaggagaagcaggcagccattctgcatttgcctggtaaacttggctttgtttcacttcatctgcatgtccttcttcactgtggagtggatctttcattggctcttgctggatcggactgccactcgctatagatcttttggctgccggaaatttcaggaagcaaaaagaactttgtgtagactggctatgctccacgttgtgtgttgtggtctccttgttggggagccgatgttgtttatgctttgcaggaggctcttgggtactctgacaaaaatctttgaatatcgcttgaactcccacacaagtctacttgttctctcaggcaaaccttcatttttctttgctttcatggggggtccactttgcacctcatcagcactactggacaccattttctggcttgcaattgccacagacgacctctgatacaatgtctcaatctcatctacacccgtgagaggccagtttgaagtgtgagaacaatgctttatttttgacttgcctttgtcatggttcctgcctttccctgagggcccctgagataagcagaatgcagggaggcagtgaggtcaagggcctgtccatctcttgctgacacccacctcttaggtctcagtgatgatttcattacccaaagacacctcaaagactcaccagatggtattccaatccccaagagagcagactcttacacacagtctctttttggaatggagacagaggagcagattgcagcgaccacctcacagtctcaaaatgactcctctttcagttggacctgaccatggagactgcccaaaagggctctagagtctagaccttttgggtaaggcagtgggttatctcaggcagccttttatcccaccctagttcagttctgcctgtaccattttcctctgcttagtcaggatgacagccctgagagttggttacctgagcctgccttaaaatgtgcatgggctactctcaggataccaggcctgattgtgagctctagctagcatcacaataaatgtcaccattgcctagttacaatgcccgtggcttgccagagaagaagacctctatgtagttgtgtgggcagtggactgtcacctgtcttctctgtgagatttactggatagtctcattaccctaggatagggtagatgtgaaccagcatgaagaaaggtaaagctgatcccaggaataaacattgaaaaccctaagaatccaaaaatgtctgcaagatttcatgggcctgccaagaagttttaggggtgagtctttttgaaacttgtcccacaatgatttctaggtacagttgccctgtgttcgttggggttgctctctcctaggtcgggattcctgcagaaccacacagtctcaggtgctgccaggctgtatttttctgtgggagtgttgtgagtgttggatgtctgtgtgtgtttttggcatcgtgtttgtgtgtgtgtgtgtgtgtgtgtgtgtgtgtgtgcctgtaagtggctctgcttaaaataatgtggctgacacacttctgagcttcttctttttttttttcttccaacactttgttggcttggctgtgtggctctgcttgggttatgggtccctgtgttctttattttttggaagatcataaatccgcagtcaattgggaggcaggtcgagagatgtctgtgtccaagtcatctctccgtaccaaaaaaagccaatcttctaaaaagaagaggagcacgtcacaccaaaaatgagatattgcccagtgtttcattgtctgtcctttggccaaacgagggagagacattaagtgtcctgtctgcagggccacttgaatttacctcaaatttgtttcccacctgaggaggtgctttatgtcatgagggggcactccaccacagtcttgggattttatactgggacatagagagtgagcagcaataaggtcaaatagggatgaggatacaatctggtcagggtggatggggtcccacaactacacctgtaaaaatagtgaagacaggtgacacagaatgtgtttccaactccatccccgcattcccttaattgcacaagcagacaacaacatggctcggtgttcaagtgagagtactccaatgtgcaaaaaatatttggactgcaaattggggccaacctggcaaactcccgatttgagggctttcatactcaaagccaaatgggagtggaattgatggatgctgggtgggatgtggcctccagacttgcttcttctttcactgacttccatgtttcttgttggcctagggtttcctgggtatggctcaaccacttctacactaaacgtttctcagttcatggagaatgattatcatgggaatccattgcataagtgtttccttctaaacactgtcaagttttaatgactgggcagctttgatacttttaaaatcataaattcccattaccaccaccaccaccaaggaaactcccacttctattggagggctgcataattcctgtaggatgagcacttagccatgtcttgcttttgcctggtaatctatcctctgtttcatttcatctggacgggcttctcatcatggaagggctctttcattaggctattgctagatgagactgcctctggccacagattagctgccagtgatttcaaacagcaaatgggacttcaagtagtctgcctatgctcaaggaggtgggtccttgtctcattgttgaaactgatgtggtttccaaattgcaagaggattttgggtcctctgacaggaatcatgaacatcatctggaccgcggaacaaggcagctcattctcccaggtatgccttgatttgtctttgctttccaggggagttcacagtgcccctcaacagc

SEQ ID NO: 1889164 - DNA, 4001 bp, Homo sapiens
gaaacttgccccacagtgatttctaagtatatcccgattgtttttgggttgctctctccaaggtggggattcctgcagaaccatgcagcctcagtagctgccagtgtgtgtttatctgtgggagtgttgtgagtgttgtttgtgtgtgtgtgtggcattgtgtgtgtgtgtgtatgtgcctgtaagtggagtatgcttaaaataatgtggctaatgcacttcagcacttctttttcgaatctcccaacattctgttgtgtggtcattgtggctttgcttgggctgcagggcttcatggtctttatttttctgtggatcatgaatctgcagtgaattgggaggcaagtcgaaatatgctggcatctaagtcacctccccctgcaaaaaaagccactctcctagaaagaagaggagcacaccacaccaaaaataaggcatctcccagtgtttcattgtcctgtggtgaacccggggagaaacactagcagtcctgtcttcagagctgcttgaatttacctcatatttggttcacagccaagcatgtgcttcatgttgtgagtggccactccagcattgccttgaaatttcatcctcgaacataatgagaagcaataagttcaggtagtgttgaggatataatctggtgagcagtgcatggggtctcacaacatctcctgcaaaaaaaaaaagaagacagatgacccagaaggtgcttccaactccatagccaggtgttcagctggaagtactccaacatgcagggaacatttcaagtataaactggggccatccttttaaactcctgatgtgcaggctttcatacccagagccaaaggagagtgtaatggattgatgctgggtggtatgtggcctatacacttgctcttctttttctgccttccatattcctcttcagcctaaggttttctgggtctggatccacatcttccataccaaaagtttctcagttcacagaggaagaccctcatggaaatccattgcatgagtgtttctttctaaactctgtcatgttttaatgagttgtcagctgtgatattttaaaagcttaaatttccattacagctgccaacatggaaattcttgttctcccacttttaacatagggttgcatgattcctgtaggaggagaagcaggcagccattctgcatttgcctggtaaacttggctttgtttcacttcatctgcatgtccttcttcactgtggagtggatctttcattggctcttgctggatcggactgccactcgctatagatcttttggctgccagaaatttcaggaagcaaaaagaactttgtgtagactggctatgctccacgttgtgtgttgtggtctccttgttggggagccgatgttgtttatgctttgcaggaggctcttgggtactctgacaaaaatctttgaatatcgcttgaactcccacacaagtctacttgttctctcaggcaaaccttcatttttctttgctttcatggggggtccactttgcacctcatcagcactactggacaccattttctggcttgcaattgccacagacgacctctgatacaatgtctcaatctcatctacacccgtgagaggccagtttgaagtgtgagaacaatgctttatttttgacttgcctttgtcatggttcctgcctttccctgagggcccctgagataagcagaatgcagggaggcagtgaggtcaagggcctgtccatctcttgctgacacccacctcttaggtctcagtgatgatttcattacccaaagacacctcaaagactcaccagatggtattccaatccccaagagagcagactcttacacacagtctctttttggaatggagacagaggagcagattgcagcgaccacctcacagtctcaaaatgactcctctttcagttggacctgaccatggagactgcccaaaagggctctagagtctagaccttttgggtaaggcagtgggttatctcaggcagccttttatcccaccctagttcagttctgcctgtaccattttcctctgcttagtcaggatgacagccctgagagttggttacctgagcctgccttaaaatgtgcatgggctactctcaggataccaggcctgattgtgagctctagctagcatcacaataaatgtcaccattgcctagttacaatgcccgtggcttgccagagaagaagacctctatgtagttgtgtgggcagtggactgtcacctgtcttctctgtgagatttactggatagtctcattaccctaggatagggtagatgtgaaccagcatgaagaaaggtaaagctgatcccaggaataaacattgaaaaccctaagaatccaaaaatgtctgcaagatttcatgggcctgccaagaagttttaggggtgagtctttttgaaacttgtcccacaatgatttctaggtacagttgccctgtgttcgttggggttgctctctcctaggtcgggattcctgcagaaccacacagtctcaggtgctgccaggctgtatttttctgtgggagtgttgtgagtgttggatgtctgtgtgtgtttttggcatcgtgtttgtgtgtgtgtgtgtgtgtgtgtgtgtgtgtgtgcctgtaagtggctctgcttaaaataatgtggctgacacacttctgagcttcttctttttttttttcttccaacactttgttggcttggctgtgtggctctgcttgggttatgggtccctgtgttctttattttttggaagatcataaatccgcagtcaattgggaggcaggtcgagagatgtctgtgtccaagtcatctctccgtaccaaaaaaagccaatcttctaaaaagaagaggagcacgtcacaccaaaaatgagatattgcccagtgtttcattgtctgtcctttggccaaacgagggagagacattaagtgtcctgtctgcagggccacttgaatttacctcaaatttgtttcccacctgaggaggtgctttatgtcatgagggggcactccaccacagtcttgggattttatactgggacatagagagtgagcagcaataaggtcaaatagggatgaggatacaatctggtcagggtggatggggtcccacaactacacctgtaaaaatagtgaagacaggtgacacagaatgtgtttccaactccatccccgcattcccttaattgcacaagcagacaacaacatggctcggtgttcaagtgagagtactccaatgtgcaaaaaatatttggactgcaaattggggccaacctggcaaactcccgatttgagggctttcatactcaaagccaaatgggagtggaattgatggatgctgggtgggatgtggcctccagacttgcctcttctttcactgacttccatgtttcttgttggcctagggtttcctgggtatggctcaaccacttctacactaaacgtttctcagttcatggagaatgattatcatgggaatccattgcataagtgtttccttctaaacactgtcaagttttaatgactgggcagctttgatacttttaaaatcataaattcccattaccaccaccaccaccaaggaaactcccacttctattggagggctgcataattcctgtaggatgagcacttagccatgtcttgcttttgcctggtaatctatcctctgtttcatttcatctggacgggcttctcatcatggaagggctctttcattaggctattgctagatgagactgcctctggccacagattagctgccagtgatttcaaacagcaaatgggacttcaagtagtctgcctatgctcaaggaggtgggtccttgtctcattgttgaaactgatgtggtttccaaattgcaagaggattttgggtcctctgacaggaatcatgaacatcatctggaccgcggaacaaggcagctcattctcccaggtatgccttgatttgtctttgctttccaggggagttcacagtgcccctcaacagca

SEQ ID NO: 1889165 - DNA, 4001 bp, Homo sapiens; identical to SEQ ID NO: 1889163

SEQ ID NO: 1889166 - DNA, 4001 bp, Homo sapiens; identical to SEQ ID NO: 1889164

SEQ ID NO: 1889167 - DNA, 4001 bp, Homo sapiens
agcctggtgtgttgttcagagttctttgggtgatagaatctttcgtgagactgcagaggcaagtgtcagtgaaagatgcccgggctcttaacctcaatgcctcccttcatcctaggcctggaaggggctctctgggaaaggcaggaacagtgacaaaggcaagttcattgtggagcagtgttctcacacctcagtctggcttctcacagccatctgtggaaatggcaatcctgaaaagtatgtctagtagtgttgttgaggggcactgtggatttttcatgaaagtaaagaaaaatcaaaactcatgtgaaagaatctgcagcattttactgcggttaaagcaatgttcaatgatttctgtcaaaggaccaaaaagtgtcctccaatgtgcaaacaacctcagcttcaacaatgagacaacaacccacaatctggagcacagccagcctacctgaagtcatttttgctttctgaaattcctggcagctaaataattgtgatgagaggcagtcccatccaccaacagcccgatgaaagaacccttccacaatgagaaggttgtgcagatgaaatgaaacagaggctggattaccaggcaaaagccagacatggttgcctctttctcatcccacaggaatcatgcagccatccaataaaagtgggagaacaagagtttccttgttagcagctatagctggaatttatagttttaaaactatcaaagctgcccagtctttaaaacttgacagtattttgaaggaaacaatcacacaatggattcccacgtaggtcgttcttcatggagcagaaaacgtttagtatggaaaatggtgagccacacccagaaaaccctaggctgacaaggaacaccaaaatcatgaaaagaagagggaagtgtggaggccacatcccacccagcatcagtccatccaactcccatttgactatgggtatgaaatccctcaacttgggagtttgccaggatggcccaattttgcatctgaaatgttccctacatattggagaactcccacatgaacactgtgccatgttgtaaactgcttgagaaatgaaagaaatgctgtggtgctgttggaagcaacttttgtgtcaactatcttcacattttttgcaggtgaatgtgtgggtctctttccacccctcatcagattgtatcccaacccctatttaaccttgttgttgttcacattctctatcccaaaatgaaaccacaagatgatgaaagagtaacccctcatgacctgaagcacctgctaggctgggaaatgaattcgaagtaaattgaaggtggacatgactattagtgtctctctatgggttggccccaggacaatgaaacactggaagatgtctctttgtgtttgtggtgtgcttctcttctttctagaagagtggctgttttacagatgagagtaatttggattccggcaggtctgagccagcatcccaattcactgcagattcaaactccacaaaatgataaagaaaaggatggacagcagcccaagcagagccacagacaggccaacaaaatgttggaagactgaaaaaaaaaaaagtgctgcagtgcattagccacattgctttaagcagattctacttataggtgcacacacacacacacacacacacacacacacacacacaaagccacacacatacacagacattcaacattcacattactttcatagaaacacacatcctggcagcttctgaggctgcgtggctctgcacgaagccccatctgggagatagcaactccgggcaacacaaatgggctgtacctagaaatcacagtggggcaaatttcaaaaagactcacccttacaatgtctaggcaggtctgatgcatcctgcaaatctttttgaatcgttaggaattccacagtttattcctggggctctgcttgatgtttctttaggcaggctaatgtctgtcctctcctagaactatgggaatatcctgtggaccccacacagaagaaggcaagaatccatggtctgtgcacctccacgaagggctacttctctaccttatggcagggacttgtcgctaggcaatggtggcattcattgtgatgctagccagagctcacagctcaggcctggtgccctgagactagtgcattgcattggtgaggcaggctctggtgtcctgttgtcagagctgtcagccttcctaaacagaggaaaatattataggcagtagtggcctgatgtcaaaaaaaatgatgcctctgataaactctgcaaaactctaaaagtctcagcattaccgcaccttcaggcagtctttctggtcaggtcccactgaacaaggcagtgttttgagactgtgaggtggtccatggaaacgatattcagactccattcctgaaagaggctgtgtcaaagaatctttgcccatggggattggaatatagtctgatcagaggttgaggggtctttggatgatggaatcatacctgagattccagaggtgggtgttaggaaaagatggtcatgccttcgaccttgatgcttcccttcattttggcccttgcagtcctgtctcagaaaggtaggaaccacaacacagcaagtccaagatgaagcagtgttcttacacctcggactctcttctcacaggtgcagaagaggttcagacagtgtcttcaaggccaactgtggtgattacaagcctgaaaaggctgtccagtagtgctattgagaggcactgtggattctccatgagaataaagataaatcaaggctcaactgctagaatgagctgccttgtgttggagtcaaagcaacattcaaagattcctgtcagcacacaaaaagccttctccaatttgcaaaaaacccagcctccaaaaacagacctgacccacaacctggagtgctgccagcctactcaaaatcccttttgctccttgaaatctttggcagtgaaaagatctgcggtgagaggcagtctcatccagcaacaacccaatgaatgtcacacacagtgagaaaggatgtgcagatgcaataaaatatattctagactcccactcaaaagccagtggggctgcctgtttctcatcctataggaattatgcagccctccaatgtaactgggtgaacaagtttccttgttgactgaagtaatgggaatttatggttttaaaagtatcacagctgcccagtcattaaaacatgacagtgtttagaaggaatcactcttgcaatggattcccatgagggttgtttgcaattaactgaaaaattttaagtatggaagacgttgaggcagacccaggataccctaggatgatgagaaacatggaagtcagaaaaagaaaagggaagtatggagtccacctgccaccaagcatcaacccatcccactcctatttggctctgggtatgaaagccataaaatcaggggtttgccagcatggccccagtttgcattccaaatgttccctttgcatttgaatactcccacctgaatactgggccatgttgtggactagttgtacagttaaaggaatgtgggtatgctgttggaagcaaattctctgtcaactgtcttcatgtgttttgcagatgaaggtgtgggtcctcattcacccctcagaagattgcatcctcatcccaatctgatcttatttctgctcacactctgtctgagaatgaaatcccaagatgatggaggaatacccgctcaagacctgtagcacctgctcagctgggaatggaattcaaggtaaattcaattggcactgcagataggactgctagtgtctatccccggattggcctcattacaatgaaacactgggagatgtctgcttttaggtgtgatgtgctcctcttctttcgagaagagtggctgtttttatagagggaagttgatttggtttctggcaggtcttagccagcctctcaatttactatgtattcataatccacaaaaaaataaagaacacagagccccacagccc

SEQ ID NO: 1889168 - DNA, 4001 bp, Homo sapiens
gtggctcacacctggaagcccagcattttgggaggccagtgcaggcagatcacagcagtatgagaccagtctggcaaatacggtgaaaccagtctctactaaaaatagaaaaattagcaggacatgtgcctgtaatcccagctcctcagaaggctaaggcaggggaatcgtttgaagctgggaggcagatgttgcagtgagacgagattttgccacttaacttcagcctggatgacagatcgagacttcatctgaaaacaaacaaacacacacacccccccaaaaactaatgaatttaaaaaaaaaatctatgctagaaaaagtgctcagaggcaaactcacatatctaactgaaaaagaaaatccttgaaaacaaaagttccagaagaggcaaataagaaaacacaattaacaccttgcatataaagtacaaatagtaaagtgaaaagaaccacaggggaaaaaaattcaaaatttacgactaagtactctaaaagaagctgaaagtccctcaaaaactttccagagtccatgtccctgtattgcaaaaatgatcataacaattgccaggagtagaacaataaaaatatatcttaaaacttgataaacacttcaagtctctcataatatttataatggaaaatggatccttctgcagtttttccatacaattatgaagaaattatttttctttgcacttaaatttgttttttcaatattctaagaaattaacttttatattaatagtaggtgatgtaacaaagcaggtctttatcaagataactgacactggatgtccataccattactcaggtgggccttaattcccagccaggttccctccctggacacatactgaaggtccccagccattttgcaatctcttcacatttccagtcctggaggaagctctaaaatacatgtacatggagataatagaacatttcatcacactggaacccagtgcattcctccagattccctgtgaagtggactgtcttatatgggaaggcagggcagttggagtgaggatagcagagaggataacatatcagggcagcccggggtcatcaaaacagaacatgacagacctgggagaaacattctgaaggaatgtagacttagatgggcctcaggtggatatctgtgtagagagggagagggtcctggatgagctcaaactgagtctcaggtggtaggaggtctcagggcaagggagggagctggcaagtgatgatgagacagctatcccttaagctctgcttctcacccactgatcttagtcacatatgcattgtagtggcttaaggttccccaatcctgaaatgtgggtgttgcagttcaccgatgggcctttctcccccaaccaatggatggcctgggattgctcattgcagtttcctgcatgatccttgggttctccctgtggggcacagatccaggactgaaagacctctcagttcccagccctaggctgttccctggcctctgttccctctaaaatgctgtccctcccaccatggaatagaactgcaatggattgagccataggccctggctgatgatctaggggactgcagaagtgggtccaggacagttcatgtcacagtttaatgccaattccccagagaccaaggaatgcccagcgaggtcctttcccatgatgccccatggtgaacctcacctcagcaatcctaccaaaacccgggcagtcatgttcagccaaacaggtgaaaaagctcaggtaggaggtgtactgcctgcagctggaggcttgaccttcatgatcccagaacaactggactgcagtggaatgagataccctgtaccctggagggagaggagtcaggaaggttcatcctagacctaccctcccacataccggctcccctaccatgctaggaggcactccttaccgaggatgccaatgcagtactacttactgatcacttcattgtggaaataaaggctgtgacaaaaggaaatcttcatcttgctgccggtaacagggatgcctgagttcctccacctgcctaaccaagaaggagaaagagtatggattcaatgggaccatttcatctagctgggctgaggtggcctgctagctggagtgaagcatgaatttcccattcccagctttgcaactgagacaaccctggaccccagggggacctcaaactgactcagacactggacccctcccacagacccaggctccccagcctgacctgcaaatccatcacttcatcatggtttccaacccaggtcaacatctggtgtgccaaacaatctacatctggtcaaggagtctccagatgattcagtgggcaagcctcctgacgcctgcaattctgcaagagcacagagaatgtggagcagggatatctcccagacatttggcctgtcacgctccgatgttgatcctctgtttctgtctggtgaggaggcaatgccacaactgtggtggtttttggggtggctggaccccggccaagacggcctgggctgaccagagacgggaggcagaaaaagtgggcaggtggttgcagctgaggggcaggggcgggggcagggtggtgtgaggcggctgcttctctgggttcatgagctgcaggaggcctttgcttgctgggtgctggacatgctctgctgatgtccgggtgtgtggtgtcttcttatcctagtctccctgaggggtggacctgtctgcctgaggaagccctgtagttagaaggggctgcagggtagttcctggcgctccccatggggactgggtgggtgcaaaggaggttatatacgctcaggggctataaccctttgggtgcagcgccggcaggcagaagaaagcatatctggggagctagtacctgccttgtggaggtcggcagccccatgtaccgctaacccgagtcttaagcaccttgtgtttctggggcgagccttctggaaacgggcactgagagcgggggtgattcaatggctggcaatgtcatgcagactccccttcctccaggacattcccagggaaacatgccctttgacattgtgctgtgcgtgaagggactctggcgccgcgattctcccttgtgagtgctgtgctcggctccccttccctaccacgtgctcccagtgctcccagtgctgctacaagcaagctgccctcacagctgcaggaacgtgacctcggctcccatcctgtcccccatcccctgcctcctggctcaccccatgtgcctcctcctggctcctcccccaacagcccccatgcccccacgaagcccgatgcccatcccctgctgccagccatctggaatcggcagctgcaaggatatggctctgtcccagaagcccaggccacaggggcattcacggagtctacctccaagtgaaggacctccagcgagtccattgatggcctgggtgtgctgggtccagggccaagctgtgcccgctggccctccttctgccaccccacgtcagtctcctcctcaaccaccacctccacctcagccattatgtcttccaccttcagcaccgcctcctcttccaaggctgcctccttgctctgtaccccggccgtcctctccagcagagcctccagcctgaacacggtgccctcctgggtgctcccacagaccctggcctgcacagcccagcacatccccggtatccctatgctctgggggctgctccccaagaggcccgctccgtgaaagacccacgggcctctccctgctgaaaacctagtcccacacctacatggacccaggtttcctgaggagccccgctgggcccgcagatggccgcactcgccgtggggctcaggaccacagcagggtcaactgcgcataggagctcagaagccagaggccgaggccctgtgcttccagagccccaccagcaggcaccgcagcggctgctgcgggtgcgggagcctctgggtcgtcaaggcagtgcacaacagcgtgcgcgcaggccgacaatggccaaccctggcggct

SEQ ID NO: 1889169 - DNA, 4001 bp, Homo sapiens
ggtggctcacacctggaagcccagcattttgggaggccagtgcaggcagatcacagcagtatgagaccagtctggcaaatacggtgaaaccagtctctactaaaaatagaaaaattagcaggacatgtgcctgtaatcccagctcctcagaaggctaaggcaggggaatcgtttgaagctgggaggcagatgttgcagtgagacgagattttgccacttaacttcagcctggatgacagatcgagacttcatctgaaaacaaacaaacacacacacccccccaaaaactaatgaatttaaaaaaaaaatctatgctagaaaaagtgctcagaggcaaactcacatatctaactgaaaaagaaaatccttgaaaacaaaagttccagaagaggcaaataagaaaacacaattaacaccttgcatataaagtacaaatagtaaagtgaaaagaaccacaggggaaaaaaattcaaaatttacgactaagtactctaaaagaagctgaaagtccctcaaaaactttccagagtccatgtccctgtattgcaaaaatgatcataacaattgccaggagtagaacaataaaaatatatcttaaaacttgataaacacttcaagtctctcataatatttataatggaaaatggatccttctgcagtttttccatacaattatgaagaaattatttttctttgcacttaaatttgttttttcaatattctaagaaattaacttttatattaatagtaggtgatgtaacaaagcaggtctttatcaagataactgacactggatgtccataccattactcaggtgggccttaattcccagccaggttccctccctggacacatactgaaggtccccagccattttgcaatctcttcacatttccagtcctggaggaagctctaaaatacatgtacatggagataatagaacatttcatcacactggaacccagtgcattcctccagattccctgtgaagtggactgtcttatatgggaaggcagggcagttggagtgaggatagcagagaggataacatatcagggcagcccggggtcatcaaaacagaacatgacagacctgggagaaacattctgaaggaatgtagacttagatgggcctcaggtggatatctgtgtagagagggagagggtcctggatgagctcaaactgagtctcaggtggtaggaggtctcagggcaagggagggagctggcaagtgatgatgagacagctatcccttaagctctgcttctcacccactgatcttagtcacatatgcattgtagtggcttaaggttccccaatcctgaaatgtgggtgttgcagttcaccgatgggcctttctcccccaaccaatggatggcctgggattgctcattgcagtttcctgcatgatccttgggttctccctgtggggcacagatccaggactgaaagacctctcagttcccagccctaggctgttccctggcctctgttccctctaaaatgctgtccctcccaccatggaatagaactgcaatggattgagccataggccctggctgatgatctaggggactgcagaagtgggtccaggacagttcatgtcacagtttaatgccaattccccagagaccaaggaatgcccagcgaggtcctttcccatgatgccccatggtgaacctcacctcagcaatcctaccaaaacccgggcagtcatgttcagccaaacaggtgaaaaagctcaggtaggaggtgtactgcctgcagctggaggcttgaccttcatgatcccagaacaactggactgcagtggaatgagataccctgtaccctggagggagaggagtcaggaaggttcatcctagacctaccctcccacataccggctcccctaccatgctaggaggcactccttaccgaggatgccaatgcagtactacttactgatcacttcattgtggaaataaaggctgtgacaaaaggaaatcttcatcttgctgccggtaacagggatgcctgagttcctccacctgcctaaccaagaaggagaaagagtatggattcaatgggaccatttcatctagctgggctgaggtggcctgctagctggagtgaagcatgaatttcccattcccagctttgcaactgagacaaccctggaccccagggggacctcaaactgactcagacactggacccctcccacagacccaggctccccagcctgacctgcaaatccatcacttcatcatggtttccaacccaggtcaacatctggtgtgccaaacaatctacatctggtcaaggagtctccagatgattcagtgggcaagcctcctgacgcctgcaattctgcaagagcacagagaatgtggagcagggatatctcccagacatttggcctgtcacgctccgatgttgatcctctgtttctgtctggtgaggaggcaatgccacaactgtggtggtttttggggtggctggaccccggccaagacggcctgggctgaccagagacgggaggcagaaaaagtgggcaggtggttgcagctgaggggcaggggcgggggcagggtggtgtgaggcggctgcttctctgggttcatgagctgcaggaggcctttgcgtgctgggtgctggacatgctctgctgatgtccgggtgtgtggtgtcttcttatcctagtctccctgaggggtggacctgtctgcctgaggaagccctgtagttagaaggggctgcagggtagttcctggcgctccccatggggactgggtgggtgcaaaggaggttatatacgctcaggggctataaccctttgggtgcagcgccggcaggcagaagaaagcatatctggggagctagtacctgccttgtggaggtcggcagccccatgtaccgctaacccgagtcttaagcaccttgtgtttctggggcgagccttctggaaacgggcactgagagcgggggtgattcaatggctggcaatgtcatgcagactccccttcctccaggacattcccagggaaacatgccctttgacattgtgctgtgcgtgaagggactctggcgccgcgattctcccttgtgagtgctgtgctcggctccccttccctaccacgtgctcccagtgctcccagtgctgctacaagcaagctgccctcacagctgcaggaacgtgacctcggctcccatcctgtcccccatcccctgcctcctggctcaccccatgtgcctcctcctggctcctcccccaacagcccccatgcccccacgaagcccgatgcccatcccctgctgccagccatctggaatcggcagctgcaaggatatggctctgtcccagaagcccaggccacaggggcattcacggagtctacctccaagtgaaggacctccagcgagtccattgatggcctgggtgtgctgggtccagggccaagctgtgcccgctggccctccttctgccaccccacgtcagtctcctcctcaaccaccacctccacctcagccattatgtcttccaccttcagcaccgcctcctcttccaaggctgcctccttgctctgtaccccggccgtcctctccagcagagcctccagcctgaacacggtgccctcctgggtgctcccacagaccctggcctgcacagcccagcccatccccggtatccctatgctctgggggctgctccccaagaggcccgctccgtgaaagacccacgggcctctccctgctgaaaacctagtcccacacctacatggacccaggtttcctgaggagccccgctgggcccgcagatggccgcactcgccgtggggctcaggaccacagcagggtcaactgcgcataggagctcagaagccagaggccgaggccctgtgcttgcagagccccaccagcaggcaccgcagcggctgctgcgggtgcgggagcctctgggtcgtcaaggcagtgcacaacagcgtgcgcgcaggccgacaatggccaaccctggcggc

SEQ ID NO: 1889170 - DNA, 4001 bp, Homo sapiens; identical to SEQ ID NO: 1889168

SEQ ID NO: 1889171 - DNA, 4001 bp, Homo sapiens; identical to SEQ ID NO: 1889169

SEQ ID NO: 1889172 - DNA, 4001 bp, Homo sapiens; identical to SEQ ID NO: 1889160

SEQ ID NO: 1889173 - DNA, 4001 bp, Homo sapiens; identical to SEQ ID NO: 1889161

SEQ ID NO: 1889174 - DNA, 4001 bp, Homo sapiens
actcatttgtcttactcctgcctgcttgaacaaattttactatattatattatctccagtgtaggttattattttatgaatcttttatgataacttttctgtaaacccagttataatagtctatgtttgaactgagcaataagagtaaaaaataaaaagtaatttaagtgttttgaaaattaggaatgtacaaaatgtatataattttattcagcaagttttttatttgtttcaacttctttccttatatttataaagttaaatgagtgcattactgattttttggtcattaatgttgatccccaaggtaatttatcagaatatttttattaattggaagacaatccagagttaataaagacagaagatagaaaagagaacaatatttgtgtcataagacatcttcaagacatctttgttcattgagctgttttcaaagtacaatcatatgtacccaaagaattttggtaacagttatggtaaattttaggtgagtgattatttcagttgtataaaagcctcaataagttaactaaatattactgaggcaaaatacttcatttaagagacattatattaagtgaaatttgccaggaaatataaagcgcaaggattggttgattttattcatatgtgagaaataacaaagttgatctcatataggtagagaatagaatgacagattattataggctatgaaagacattaagcaaataaatgagttagttaatgtgtaaaaaatagttagaaagaataggttctaaagtttgattgtataggagggaggttataggtatgaataatttattatagatttcataataactagaagtttagatttggaaagttcttgaaacaaatatgtcatatatgtcggaaatgactaatataccaattaccagtatgccatttaaaaatttggtcattgctgattttgtgcatgtatcaagataacggttctacattgtaaatatggaaaattataatgcatcagtttaaaaatgataaatagtggtctgtttaaataagaaatttcactaaatgtggccatttctgaattgtaaaaacctctttctctctacacattgggactttgtgatccaaattctgattttagaagtacttgcgacatgttcttgggcagactgaggacatggcagaaaagccacacatgcccctcttcagcattagctggaaattgtggtccagggctctcctggatgccatgaaacaatatgtgccattggaaagataattactaggttttcttgccttagtgttgagacagcttctttgactgaagaccataaaataattataaaacttgcaacacgtataaagtgttgggcaaattaaagaaacagtctaatgaggaagtgctcagaagactttcaaataacataaaaagatggttttatagaggaaaatattaccagggaagtgcaatgagatgatgatcctattcaagagcaggcagtctggtattttctagcatgtagtttgcaataacctcaggaattactggatcccactgtcacatgggcaatgccctttgaagagctccctattgacaacaacaacctgcttagttgatgaatggcagtttcaaagtgggtgtataatgtcctgttgcaaggctctcatagagaccagaaatgaagaccagttgaagattgaatgagtaaattagctcaatgattgaactctatgctgttaaatgattgttttataaaggcaattgtttgaattcatgagtcgtaaacagtaatcagtatcctggccatgtgaacaatagaaaactggactttcaaacagatgccagtatgtgatacacggactttcaatgggctgaatcatatcctggcatccacttaatagtagaaatttaaggggtaccttaaataaggacatgttgatccccatttgaagaatcttctgcaggatgattgggaggtcattagaaacaggacatcatgatgtagtcccttgaagtggcaaccttaaagaggtgcagcagtaatgcagaaatgggattaatctaaatatgcttctcttgtactttctaaggaacagaaattccaaaatctaagtctaggccagaagagaaacatagactgcaaataacaatagtccatataggaagacacatgacatagttggattacaatataccaatatcagtagccctgatagtgtatttataggtcttgactaatgtagactgcattttgcattcatggtgttcaatgctaatgcttatatactataaaaagataaaaacatagtatattgtaaccggttcaaacaaatgaattgctgatcctcacactatgcaacacacttcatatcctactgtttccaacaggggcatagagatattacatcaaataaaaaattatattaattatttaaaatcagaaggcacttttatcttcagtaaaccctacatctaatgacaaaagctttaaaataatatagaaataaactaggagacttactgctttcaaggaaaattgtgactggctagcaaaacagtcagaaatcttggcacaatggtgcttcaaagtactgtggattctgataatatgcactttactggaattaggtgaagcaaattttagaagcatcccttagtaaattctaccacaaaagtgcccccagcacaaaaaaatacaacttcccatgctccaaacattgtgacatatgaaaagtatgtatattggttgtaatatttaagaattcctattaaaaatatggcaatatctttatctcagcaagaaattaagctatcaaacattaaaggtgaagaatgtgtagaattaaaatctgcttgttttttacatttttaccctgtctttgattgtttctggcataaaaaaataaggtttctgagcaatagagctgttactctggacaactgctgtaatttaggtaattccaatttttggctacatgaacttggtgagaagtcatgctaaatgttatagcacactaaaatcttttaaatgattaacctggctgggtgccatgactcaaaataatcccagcactttgagaggctgaggagggtggatcgtgaggtcaggagatccagaccaccctggctaacaaggtgaaaccttgtctctaccaaaaatacagaattaaccaggtgtggtggcacatgactgtaatcccagctacttgggaggctgaggcaggagaatcgattgaactcctggggtggaagttgcagtgagccaaaatcacaaccattgcactccagccgaggcaacaagagtgaaacaccatcaaaaaaaaaaaaaaaaaaaaggaaagaaagaaaggaaagaagagaggaagaaaagaaagagaaaaaacaaaggaagaaagaaaggaagaaagaaaacaaagaaagaaagaaagaaaaagagagaaagaaagaaagaaaaagagaaagaaagagaaagaaaaaaggtaagaaaagaaaagagaagactgcattactcttgttgtggctaatcttcccagaaaattttaacaaaaatattcgttttaacttagaagtgttcataaatggtatttatttatattttgatcagtatttgttttttagtaaactttgtattaaagcccgtaaaatggttaatttttactgtctctgcattttgagaaagaataaataaattactttatgctcttcttgaaatatcacaaatttttatgaactaggacaaggtagtacctattgacaaagaaaatgtcacaagggtaaaataaaacatgaccacacttaaagtattcttcttctgggccgggcgcggtggctcacgcctgtaatcccagcactttgggaggccgaggcgggcggatcacgaggtcaggagatcgagaccatcccggctaaaacggtgaaaccccgtctctactaaaaatacaaaaaattagccgggcgtagtggcgggcgcctgtagtcccagctacttgggaggctgaggcaggagaatggcgtgaacccggga

SEQ ID NO: 1889175 - DNA, 4001 bp, Homo sapiens
gactcatttgtcttactcctgcctgcttgaacaaattttactatattatattatctccagtgtaggttattattttatgaatcttttatgataacttttctgtaaacccagttataatagtctatgtttgaactgagcaataagagtaaaaaataaaaagtaatttaagtgttttgaaaattaggaatgtacaaaatgtatataattttattcagcaagttttttatttgtttcaacttctttccttatatttataaagttaaatgagtgcattactgattttttggtcattaatgttgatccccaaggtaatttatcagaatatttttattaattggaagacaatccagagttaataaagacagaagatagaaaagagaacaatatttgtgtcataagacatcttcaagacatctttgttcattgagctgttttcaaagtacaatcatatgtacccaaagaattttggtaacagttatggtaaattttaggtgagtgattatttcagttgtataaaagcctcaataagttaactaaatattactgaggcaaaatacttcatttaagagacattatattaagtgaaatttgccaggaaatataaagcgcaaggattggttgattttattcatatgtgagaaataacaaagttgatctcatataggtagagaatagaatgacagattattataggctatgaaagacattaagcaaataaatgagttagttaatgtgtaaaaaatagttagaaagaataggttctaaagtttgattgtataggagggaggttataggtatgaataatttattatagatttcataataactagaagtttagatttggaaagttcttgaaacaaatatgtcatatatgtcggaaatgactaatataccaattaccagtatgccatttaaaaatttggtcattgctgattttgtgcatgtatcaagataacggttctacattgtaaatatggaaaattataatgcatcagtttaaaaatgataaatagtggtctgtttaaataagaaatttcactaaatgtggccatttctgaattgtaaaaacctctttctctctacacattgggactttgtgatccaaattctgattttagaagtacttgcgacatgttcttgggcagactgaggacatggcagaaaagccacacatgcccctcttcagcattagctggaaattgtggtccagggctctcctggatgccatgaaacaatatgtgccattggaaagataattactaggttttcttgccttagtgttgagacagcttctttgactgaagaccataaaataattataaaacttgcaacacgtataaagtgttgggcaaattaaagaaacagtctaatgaggaagtgctcagaagactttcaaataacataaaaagatggttttatagaggaaaatattaccagggaagtgcaatgagatgatgatcctattcaagagcaggcagtctggtattttctagcatgtagtttgcaataacctcaggaattactggatcccactgtcacatgggcaatgccctttgaagagctccctattgacaacaacaacctgcttagttgatgaatggcagtttcaaagtgggtgtataatgtcctgttgcaaggctctcatagagaccagaaatgaagaccagttgaagattgaatgagtaaattagctcaatgattgaactctatgctgttaaatgattgttttataaaggcaattgtttgaattcatgagtcgtaaacagtaatcagtatcctggccatgtgaacaatagaaaactggactttcaaacagatgccagtatgtgatacacggactttcaatgggctgaatcatatcctggcatccacttaatagtagaaatttaaggggtaccttaaataaggacatgttgatccccatttgaagaatcttctgcaggatgattgggaggtcattagaaacaggacatcatgatgtagtcccttgaagtggcaaccttaaagaggtgcagcagtaatgcagaaatgggattaatctaaatatgcttctcttgtactttctaaggaacagaaattccaaaatctaagtctaggccagaagagaaacatagactgcaaataacaatagtccatataggaagacacatgacatagttggattacaatataccaatatcagtagccctgatagtgtatttataggtcttgactaatgtagactgcattttgcattcatggtgttcaatgctaatgcttatatactataaaaagataaaaacatagtatattgtaaccggttcaaacaaatgaattgctgatcctcacactatgcaacacacttcatatcctactgtttccaacaggggcatagagatattacatcaaataaaaaattatattaattatttaaaatcagaaggcacttttatcttcagtaaaccctacatctaatgacaaaagctttaaaataatatagaaataaactaggagacttactgctttcaaggaaaattgtgactggctagcaaaacagtcagaaatcttggcacaatggtgcttcaaagtactgtggattctgataatatgcactttactggaattaggtgaagcaaattttagaagcatcccttagtaaattctaccacaaaagtgcccccagcacaaaaaaatacaacttcccatgctccaaacattgtgacatatgaaaagtatgtatattggttgtaatatttaagaattcctattaaaaatatggcaatatctttatctcagcaagaaattaagctatcaaacattaaaggtgaagaatgtgtagaattaaaatctgcttgttttttacatttttaccctgtctttgattgtttctggcataaaaaaataaggtttctgagaaatagagctgttactctggacaactgctgtaatttaggtaattccaatttttggctacatgaacttggtgagaagtcatgctaaatgttatagcacactaaaatcttttaaatgattaacctggctgggtgccatgactcaaaataatcccagcactttgagaggctgaggagggtggatcgtgaggtcaggagatccagaccaccctggctaacaaggtgaaaccttgtctctaccaaaaatacagaattaaccaggtgtggtggcacatgactgtaatcccagctacttgggaggctgaggcaggagaatcgattgaactcctggggtggaagttgcagtgagccaaaatcacaaccattgcactccagccgaggcaacaagagtgaaacaccatcaaaaaaaaaaaaaaaaaaaaggaaagaaagaaaggaaagaagagaggaagaaaagaaagagaaaaaacaaaggaagaaagaaaggaagaaagaaaacaaagaaagaaagaaagaaaaagagagaaagaaagaaagaaaaagagaaagaaagagaaagaaaaaaggtaagaaaagaaaagagaagactgcattactcttgttgtggctaatcttcccagaaaattttaacaaaaatattcgttttaacttagaagtgttcataaatggtatttatttatattttgatcagtatttgttttttagtaaactttgtattaaagcccgtaaaatggttaatttttactgtctctgcattttgagaaagaataaataaattactttatgctcttcttgaaatctcacaaatttttatgaactaggacaaggtagtacctattgacaaagaaaatgtcacaagggtaaaataaaacatgaccacacttaaagtattcttcttctgggccgggcgcggtggctcacgcctgtaatcccagcactttgggaggccgaggcgggcggatcacgaggtcaggagatcgagaccatcccggctaaaacggtgaaaccccgtctctactaaaaatacaaaaaattagccgggcgtagtggcgggcgcctgtagtcccagctacttgggaggctgaggcaggagaatggcgtgaacccggg

SEQ ID NO: 1889176 - DNA, 4001 bp, Homo sapiens; identical to SEQ ID NO: 1889174

SEQ ID NO: 1889177 - DNA, 4001 bp, Homo sapiens; identical to SEQ ID NO: 1889175

SEQ ID NO: 1889178 - DNA, 4001 bp, Homo sapiens
gtcctataaagatgttatgccccaaaaatgaagtggagggccataccctgagggagggaagagatcaccagagtcagaagagtgatgccttttgtcctcacttatatgaataagaaagatacaatttctgaggcgtcccatatcctagcttcaggaataggttttgttaagcctgtttgtctgaggagggatcctaaaattccagatagtcccccttaaaatggggctttgggcaaaaattctctctttctgattgctgagcctgagtgccaggagaagggaatagagtcctggagtttataccagaaatagttcttacaggagaaactagaaaagcaccagagacagggagtggtttttagaagcaggactagcctcagagaacagaagcaagaggaagattgtctgacaggctttaggacccaggaggcaaggctcaggatagataggatagatgggagagtctcgcttgggcgacatgactaagagttccgccatggctgcagggtcaaccaatttgttgttgggaccatggagctgaatggttttcctatcaaccctcatctcagcccagaagtacagggaaagtggaagctagttccatgcaaaccaacactcccaactccgaagagttggggttgctagagagccctttcccagaaagcctggcacccatgtctttagttcagtgaccaagctagttgcttttaactggctgacaggtgcctgctatttagccctagaattctaaggaaaaataggacagaatagcaagcacaaggggtcgatggtactcactgcttggcaataggcaatagtccctttgtggtcaccaaagtgtgtctggaattgattccttcccatgggttcttggtctcactgacatcaagaatgaagccatggactctcacggtgactgttacagttcttaaagacagtgtgtccagagtttgttccttcaggtgttcatggtctcgctgacttcaggagtgaagttgcagaccctcacagtgagtgttacagctcttaaagttggtgtttctggagttgtttgttcctctcagtgggttcatggtctcgctgacttcgggagtgaagctgcagagcttcacagtgagtgttacagctcttaaaggtggtgcatccagtgttgtttgttcctcccggtgggtttgtggtcttgctggtttcaggagtgaagctgcaggccttcatggtgagtgttacagctcataaaggtagtgtggacccaaagactgagtagcagcaagatttattgcaaagagcaaaagaacaggtcttccacagtgtggaaggggacctgagtgggttgccactgctggctgaggtggcctgcttttattcccttatttgtccccaccctcatcctgccgattgttccattttacagagtgctgatcggtctgtttttagcaagtgcagattggtgcatttataaacatttagctagacacagagcaccaattggtgcatttacaatcctttagctagacagaaaagctctccaagtcccttacctgattagctctacacagagcactgagtggtgcatttacaatcatttagctagatagaaaagttctccaagtccccaccccacccaaagcccagccagttttacctctcaggattacaacagtttgcattatgtcccctaattgagcctgcaaaactgatgctccactagccttaagcaactgtttcaacacttttatatactgtttctgttgagctgataaatgttgtcccatgagaatacctcagcttgacccaacttctcccagaacttggtaacctcgagtgggcaccaatgacttactgattagtcactgacttcaccacgtgaattctttttccacctttgctttcagggagtctgtcgcattcctcactcttcctctacagctttcctcatgagggtggttctcacacttccttcacagactgcctcacacaatgggctccaactgcagacctggcgatgggtgaataaactacctgacacacagatatcctgctttgccagcagcagagggtccgaggccactcccagactccacggagagtcctgtaaagaatggaggcccaccctgagcaactcaccctccaggcatttatttagtatagaattaatcacagaagctttgagtaaacacacttgtggataattaacattgttaagagaatagttctgtgaatgattaaacctcagttaccacagtctaaagtaaataccattgggggcaatttctctggtcgaactccctggagagagccatcttagttagtggaggtagagtaaacagacttaactggagaagcctcagttgtccctagtatttaccctatgacctaatgctttaaggtaagaagaggttgccttcagcctgttcaattattacaagctatataataattttagccttttagcctgccaaaaaggtttgttactattccttataacttttcctaatacttccctgtaatatttctgccagcggcctgagtgaatccaaacaattaacatctaaagaaacttgcctattctaactcttgaaaaatagtatgctcaagaatttgtctaggtttcatgtatatgcagatatactagttttcttttggtttttacttccagttatattttattgtagtcagaaataatattttttgtgattaccgtcagtttaaatatgctaaaacttgcattctagcttaaaagtttgcctatctaagaaaacatgccaaatgtatatagaaatatgtactatgcaattgttgggtgaaacattttgtagattatccccaggtcttattttgctctttaacttttatttttctatatatttttctttttcttttttattttttatttactttcattttttctatgcatttaaatttgtttctatcttttattttttatattattgtctcttcatttcaaatgttctccaatttgtgtcttgtttgaaacattttatttaatttcttttttatcttatttactcccattcttatccctttatattattttattttatttctccatatttatctttatttttacttttattttttctcctgattcataaagttttattttattctattgcaaattgtttcatttctgtttatttctcttaattttattgtatttattttcttcatcttcattttatttactttccctgatcttaattacatttctctttatttttctctattttgtttcagtttatttgtctttactatttttaattactttaaacttattttttaatttttttctcttgattttacttttttcactttatttttctatattttgtattgtaaatcagaagagataagctattttagattgacccagccatagtggtcaaaactggtgtttgctcaggctctctggcagccactctacctcaggtatctccaatccagggtatagtcagggccttctagcaggattgctaagatccctgggcagatgtttcattgttacagagccatctagcattaagtccacgggctatttatcctgctttccgaagccacctgtaagcttcagtgttgctaggccaagggcctggctgcccctttatttgtgtgccaattcatccttcacacataatcctgggtactggcccttcttccttctttacaaagacaggctccacacccactccactccaccagggcatatctagaacacatgtgtgtctttttgttgtaagaaagaaaaaatatttttctgtttgtctgtttttgagacagaatcttgcggtgtcactccacctgcagtgtggtgacacaatctgggatcactgcagcctccacatctcagattcaagaacttgtctggcttcagcctcccaagtagcattacaggcatgtaccaccatccccagaaaaatttttttttttttggatttttagtggagacatagtttcaccaggctggtttgaaacccctgacctca

SEQ ID NO: 1889179 - DNA, 4001 bp, Homo sapiens
gtcctataaagatgttatgccccaaaaatgaagtggagggccataccctgagggagggaagagatcaccagagtcagaagagtgatgccttttgtcctcacttatatgaataagaaagatacaatttctgaggcgtcccatatcctagcttcaggaataggttttgttaagcctgtttgtctgaggagggatcctaaaattccagatagtcccccttaaaatggggctttgggcaaaaattctctctttctgattgctgagcctgagtgccaggagaagggaatagagtcctggagtttataccagaaatagttcttacaggagaaactagaaaagcaccagagacagggagtggtttttagaagcaggactagcctcagagaacagaagcaagaggaagattgtctgacaggctttaggacccaggaggcaaggctcaggatagataggatagatgggagagtctcgcttgggcgacatgactaagagttccgccatggctgcagggtcaaccaatttgttgttgggaccatggagctgaatggttttcctatcaaccctcatctcagcccagaagtacagggaaagtggaagctagttccatgcaaaccaacactcccaactccgaagagttggggttgctagagagccctttcccagaaagcctggcacccatgtctttagttcagtgaccaagctagttgcttttaactggctgacaggtgcctgctatttagccctagaattctaaggaaaaataggacagaatagcaagcacaaggggtcgatggtactcactgcttggcaataggcaatagtccctttgtggtcaccaaagtgtgtctggaattgattccttcccatgggttcttggtctcactgacatcaagaatgaagccatggactctcacggtgactgttacagttcttaaagacagtgtgtccagagtttgttccttcaggtgttcatggtctcgctgacttcaggagtgaagttgcagaccctcacagtgagtgttacagctcttaaagttggtgtttctggagttgtttgttcctctcagtgggttcatggtctcgctgacttcgggagtgaagctgcagagcttcacagtgagtgttacagctcttaaaggtggtgcatccagtgttgtttgttcctcccggtgggtttgtggtcttgctggtttcaggagtgaagctgcaggccttcatggtgagtgttacagctcataaaggtagtgtggacccaaagactgagtagcagcaagatttattgcaaagagcaaaagaacaggtcttccacagtgtggaaggggacctgagtgggttgccactgctggctgaggtggcctgcttttattcccttatttgtccccaccctcatcctgccgattgttccattttacagagtgctgatcggtctgtttttagcaagtgcagattggtgcatttataaacatttagctagacacagagcaccaattggtgcatttacaatcctttagctagacagaaaagctctccaagtcccttacctgattagctctacacagagcactgagtggtgcatttacattcatttagctagatagaaaagttctccaagtccccaccccacccaaagcccagccagttttacctctcaggattacaacagtttgcattatgtcccctaattgagcctgcaaaactgatgctccactagccttaagcaactgtttcaacacttttatatactgtttctgttgagctgataaatgttgtcccatgagaatacctcagcttgacccaacttctcccagaacttggtaacctcgagtgggcaccaatgacttactgattagtcactgacttcaccacgtgaattctttttccacctttgctttcagggagtctgtcgcattcctcactcttcctctacagctttcctcatgagggtggttctcacacttccttcacagactgcctcacacaatgggctccaactgcagacctggcgatgggtgaataaactacctgacacacagatatcctgctttgccagcagcagagggtccgaggccactcccagactccacggagagtcctgtaaagaatggaagcccaccctgagcaactcaccctccaggcatttatttagtatagaattaatcacagaagctttgagtaaacacacttgtggataattaacattgttaagagaatagttctgtgaatgattaaacctcagttaccacagtctaaagtaaataccattgggggcaatttctctggtcgaactccctggagagagccatgttagttagtggaggtagagtaaacagacttaactggagaagcctcagttgtccctagtatttaccctatgacctaatgctttaaggtaagaagaggttgccttcagcctgttcaattattacaagctatataataattttagccttttagcctgccaaaaaggtttgttactattccttataacttttcctaatacttccctgtaatatttctgccagcggcctgagtgaatccaaacaattaacatctaaagaaacttgcctattctaactcttgaaaaatagtatgctcaagaatttgtctaggtttcatgtatatgcagatatactagttttcttttggtttttacttccagttatattttattgtagtcagaaataatattttttgtgattaccgtcagtttaaatatgctaaaacttgcattctagcttaaaagtttgcctatctaagaaaacatgccaaatgtatatagaaatatgtactatgcaattgttgggtgaaacattttgtagattatccccaggtcttattttgctctttaacttttatttttctatatatttttctttttcttttttattttgtatttactttcattttttctatgcatttaaatttgtttctatcttttattttttatattattgtctcttcatttcaaatgttctccaatttgtgtcttgtttgaaacattttatttaatttcttttttatcttatttactcccattcttatccctttatattattttattttatttctccatatttatctttatttttacttttattttttctcctgattcataaagttttattttattctattgcaaattgtttcatttctgtttatttctcttaattttattgtatttattttcttcatcttcattttatttactttccctgatcttaattacatttctctttatttttctctattttgtttcagtttatttgtctttactatttttaattactttaaacttattttttaatttttttctcttgattttacttttttcactttatttttctatattttgtattgtaaatcagaagagataagctattttagattgacccagccatagtggtcaaaactggtgtttgctcaggctctctggcagccactctacctcaggtatctccaatccagggtatagtcagggccttctagcaggattgctaagatccctgggcagatgtttcattgttacagagccatctagcattaagtccacgggctatttatcctgctttccgaagccacctgtaagcttcagtgttgctaggccaagggcctggctgcccctttatttgtgtgccaattcatccttcacacataatcctgggtactggcccttcttccttctttacaaagacaggctccacacccactccactccaccagggcatatctagaacacatgtgtgtctttttgttgtaagaaagaaaaaatatttttctgtttgtctgtttttgagacagaatcttgcggtgtcactccacctgcagtgtggtgacacaatctgggatcactgcagcctccacatctcagattcaagaacttgtctggcttcagcctcccaagtagcattacaggcatgtaccaccatccccagaaaatttttttttttttttggatttttagtggagacatagtttcaccaggctggtttgaaacccctgacctc

SEQ ID NO: 1889180 - DNA, 4001 bp, Homo sapiens
tcctataaagatgttatgccccaaaaatgaagtggagggccataccctgagggagggaagagatcaccagagtcagaagagtgatgccttttgtcctcacttatatgaataagaaagatacaatttctgaggcgtcccatatcctagcttcaggaataggttttgttaagcctgtttgtctgaggagggatcctaaaattccagatagtcccccttaaaatggggctttgggcaaaaattctctctttctgattgctgagcctgagtgccaggagaagggaatagagtcctggagtttataccagaaatagttcttacaggagaaactagaaaagcaccagagacagggagtggtttttagaagcaggactagcctcagagaacagaagcaagaggaagattgtctgacaggctttaggacccaggaggcaaggctcaggatagataggatagatgggagagtctcgcttgggcgacatgactaagagttccgccatggctgcagggtcaaccaatttgttgttgggaccatggagctgaatggttttcctatcaaccctcatctcagcccagaagtacagggaaagtggaagctagttccatgcaaaccaacactcccaactccgaagagttggggttgctagagagccctttcccagaaagcctggcacccatgtctttagttcagtgaccaagctagttgcttttaactggctgacaggtgcctgctatttagccctagaattctaaggaaaaataggacagaatagcaagcacaaggggtcgatggtactcactgcttggcaataggcaatagtccctttgtggtcaccaaagtgtgtctggaattgattccttcccatgggttcttggtctcactgacatcaagaatgaagccatggactctcacggtgactgttacagttcttaaagacagtgtgtccagagtttgttccttcaggtgttcatggtctcgctgacttcaggagtgaagttgcagaccctcacagtgagtgttacagctcttaaagttggtgtttctggagttgtttgttcctctcagtgggttcatggtctcgctgacttcgggagtgaagctgcagagcttcacagtgagtgttacagctcttaaaggtggtgcatccagtgttgtttgttcctcccggtgggtttgtggtcttgctggtttcaggagtgaagctgcaggccttcatggtgagtgttacagctcataaaggtagtgtggacccaaagactgagtagcagcaagatttattgcaaagagcaaaagaacaggtcttccacagtgtggaaggggacctgagtgggttgccactgctggctgaggtggcctgcttttattcccttatttgtccccaccctcatcctgccgattgttccattttacagagtgctgatcggtctgtttttagcaagtgcagattggtgcatttataaacatttagctagacacagagcaccaattggtgcatttacaatcctttagctagacagaaaagctctccaagtcccttacctgattagctctacacagagcactgagtggtgcatttacaatcatttagctagatagaaaagttctccaagtccccaccccacccaaagcccagccagttttacctctcaggattacaacagtttgcattatgtcccctaattgagcctgcaaaactgatgctccactagccttaagcaactgtttcaacacttttatatactgtttctgttgagctgataaatgttgtcccatgagaatacctcagcttgacccaacttctcccagaacttggtaacctcgagtgggcaccaatgacttactgattagtcactgacttcaccacgtgaattctttttccacctttgctttcagggagtctgtcgcattcctcactcttcctctacagctttcctcatgagggtggttctcacacttccttcacagactgcctcacacaatgggctccaactgcagacctggcgatgggtgaataaactacctgacacacagatatcctgctttgccagcagcagagggtccgaggccactcccagactccacggagagtcctgtaaagaatggaggcccaccctgagcaactcaccctccaggcatttatttagtatagaattaatcacagaagctttgagtaaacacacttgtggataattaacattgttaagagaatagttctgtgaatgattaaacctcagttaccacagtctaaagtaaataccattgggggcaatttctctggtcgaactccctggagagagccatcttagttagtggaggtagagtaaacagacttaactggagaagcctcagttgtccctagtatttaccctatgacctaatgctttaaggtaagaagaggttgccttcagcctgttcaattattacaagctatataataattttagccttttagcctgccaaaaaggtttgttactattccttataacttttcctaatacttccctgtaatatttctgccagcggcctgagtgaatccaaacaattaacatctaaagaaacttgcctattctaactcttgaaaaatagtatgctcaagaatttgtctaggtttcatgtatatgcagatatactagttttcttttggtttttacttccagttatattttattgtagtcagaaataatattttttgtgattaccgtcagtttaaatatgctaaaacttgcattctagcttaaaagtttgcctatctaagaaaacatgccaaatgtatatagaaatatgtactatgcaattgttgggtgaaacattttgtagattatccccaggtcttattttgctctttaacttttatttttctatatatttttctttttcttttttattttttatttactttcattttttctatgcatttaaatttgtttctatcttttattttttatattattgtctcttcatttcaaatgttctccaatttgtgtcttgtttgaaacattttatttaatttcttttttatcttatttactcccattcttatccctttatattattttattttatttctccatatttatctttatttttacttttattttttctcctgattcataaagttttattttattctattgcaaattgtttcatttctgtttatttctcttaattttattgtatttattttcttcatcttcattttatttactttccctgatcttaattacatttctctttatttttctctattttgtttcagtttatttgtctttactatttttaattactttaaacttattttttaatttttttctcttgattttacttttttcactttatttttctatattttgtattgtaaatcagaagagataagctattttagattgacccagccatagtggtcaaaactggtgtttgctcaggctctctggcagccactctacctcaggtatctccaatccagggtatagtcagggccttctagcaggattgctaagatccctgggcagatgtttcattgttacagagccatctagcattaagtccacgggctatttatcctgctttccgaagccacctgtaagcttcagtgttgctaggccaagggcctggctgcccctttatttgtgtgccaattcatccttcacacataatcctgggtactggcccttcttccttctttacaaagacaggctccacacccactccactccaccagggcatatctagaacacatgtgtgtctttttgttgtaagaaagaaaaaatatttttctgtttgtctgtttttgagacagaatcttgcggtgtcactccacctgcagtgtggtgacacaatctgggatcactgcagcctccacatctcagattcaagaacttgtctggcttcagcctcccaagtagcattacaggcatgtaccaccatccccagaaaatttttttttttttttggatttttagtggagacatagtttcaccaggctggtttgaaacccctgacctca

SEQ ID NO: 1889181 - DNA, 4001 bp, Homo sapiens; identical to SEQ ID NO: 1889178

SEQ ID NO: 1889182 - DNA, 4001 bp, Homo sapiens; identical to SEQ ID NO: 1889179

SEQ ID NO: 1889183 - DNA, 4001 bp, Homo sapiens; identical to SEQ ID NO: 1889180

SEQ ID NO: 1889184 - DNA, 4001 bp, Homo sapiens; identical to SEQ ID NO: 1889178

SEQ ID NO: 1889185 - DNA, 4001 bp, Homo sapiens; identical to SEQ ID NO: 1889179

SEQ ID NO: 1889186 - DNA, 4001 bp, Homo sapiens; identical to SEQ ID NO: 1889180

SEQ ID NO: 1889187 - DNA, 4001 bp, Homo sapiens
gggaaagaatgcaacatactttggtaagttaaaaaagtataaaagtaaaaataaatcccactgtagacgatcaattaaatggcaggggaccttctgtgtgtgtccagcaagggaatgtggctgagcattaaggttcatctgagtattggtgtagacacccagacacccacccagtttccctggtaccaatgtgagcgtgtgcacgttccagcctgcatgtttgagctggtgcacgcctgtacacacctgcacctgtttccccttgtgtacctttgtttggccagaggtggggcccacactcccacccacaggtgtgcctcaaacgcagctcttgagctggcaagcaggggaccactgggtttgacaatccaacttcaggacccgtgaagcctgcccgctggggagacacgaagagtcctcacagttctcatgaatggcagaggtaggaggaaaagagtggctgggcgaactacctaaaggagatgtcatggacctgaaatgacatccggagggaaataaaacctagtagctacctgtgtcttcctgtgtgttcggtcggggaaggcaggcattcagggaagaagcaacagaacctgcagggctttgggattcactgtctgggaatccctgtgcaccagagagtgtctagcccatgagagacgacagcatgtgggtcctgcagggcctgagtctccagggaggctggcattctccccaagagggcacgggtctgtaagtggaggagaaacccgggctgcggggtcgggtagatgggacacttaccactaagccacgtaggagctcaggagaggtcctggtgagcaacggcctaacaggccagtgacaccccattccagtgctgcaggtgctcatatgaccttcgccccgcacatcctctccaggatgcctcacctgggaggataggaagcaaggcacataagagcttaagcttgagtggacccagaggaggtctccagtgtcactggtcccaggggagccagtcttgctgggtctcttcaggacatggggaaaatgcacaagcccagctctccacccagtgggtgtcttgccatgacagatacagcaattccacctagattgcagatccacaggcttacgacttccccccggccttctccgggacgggctcctggactccggaacagccagtgccacacgggtgttccttcccagcctccaagctcaaggtaggctcagtgaccctcctcctagtacatggccacccacaggcactgtcaacaacccagggcccttgtagattccgagatcctgccgccttacccagcagtgggataatgggaagggaaagagctggaacatacagagatgaggccacaagccttaccctcccacatggcaagggaatgaagagatccttcccagcccagggaacggttcccggacacacctggaagcccagcaccagctgagggattcacttcaccacacctgggcatgggggatttcaatgtgtgccggagaccttgatcctgggcgcctatgaggtatacctcttcttcaggtcacattatgctgacacactccttaacccggagggactcctcacactaaccacatggttttggctggaagcattactcctggtgccctagccactgtttcaaggtgcagagatggaccagcagacccttgagtccttgtcctgtccaagtactatccatagaaatagaagagcggcacattagacctcatgacatttttaaggctgacctctttataagcatttcttccagatatttatgagtttatgtcatttattttatttatttacagctctcgtttcaaaatcaatttttgcttgagagttatttcaacatacaaccaaatgtttggagctatgacatttaggttttaagcttaaaagtctgtatctgctattatgttgggtaaaacgcatccagcacttataaaaataagtaattattaggcatggccattgtagtggtctcagtcacattctccacaaacccatttgaaaatattcctggtggtactgaatacagtacttgctgctaatgaatagaaaacagtgcaagccttctctggatactgggacacctctggcctaggttagaaaaggtgacacagctctaactaaatctcctgctctcatgggacaaacccctcaggagcccccaaccagtacatcacaaagtctaacaccctgataacactatgctgaaaggacatcccatggagagactcacagaaatagaaggaaggccagcacggtggcttacacctgtaatcccagcactttgagaggccgaggtggatggatcacaaggtcaggagatcaagaccatcctggctaacacagtgaaaccccatctctactaaaagtacaaaaaattagctgggctttgtggcaggcgcctgtagttccagctacttgggaggctgaggcaggaaaatggcctgaaccctgaacccaggaggcagaatttgcagtgagccaagatggcactactgcactccagcctgagcaacagtgcaagactccatctcaaaaaaagaaaaaaagaaaaaagaaaaagaaataggagatgcctgaagatctcagcaggccagcccccactattttgagtcaacctagccatggcaccagggagacgagaagacaccggacaatgtccccatcctgagccatcactagattgcatcctcctgagtgaccctgaaccacaatcatttggctgagagactgtggaagattgcagagactgatagtaaattataattattgttttaagccactaagttttacataattttaaaaagcacttcagactcctaggataactataattattgttttaagccactaagttttacataattttaaaaagcacttcagactccttggataattgagttgtctactgatttgagtaattgagtaattgtggagagctttaaaggccaatgtcacgaatgctaccctggaaaagtcaaactatcaagactcttctaaacacaacagatctttaatgtccctttgctatggctggagaataatctaacatgcaactgatagagttttttgaaagcttctgttcacatctcttatctgggtaagggtcagctctggtctggtttaattctagtcaactgcagcaacacatctttcattttacatcctggcctaccctcatattttgatcactgcctgtgtctgtgtctgtgtgtatatgttttctatgttaccatattttacctgaaggggctaaataatagtactgtagttgttttgtaaacataaagcattccaggaagacaatattgcttatcaactgaggtttagaacagatatgaggtagggcatggaggctgcactcccagcagtttggcaggccgtggtgggcagatctcttcatgtcaggagttcgagacaagcctggccaacatagcaagatcccatgtctaatatcataccaaagctagctgggcttggtggcccatggatgttatcccagctacttaggaggctgatgcaggagaatccattgaatcccagtgatggagtttgccatgtactgagattacaccactgtgctccagcctgggcaccagagcaagactctgtctcaaaaataaaagtaaaataaaataataaaataggagagatcactgaggagagaaatgcataaaactgggtgggcactgtggctcatgcctgacatcccagcattttgccaggctgaggtgggtggatcacttgaggacaagcatttgagaccagcctaagcaaacattgtgatacctgctctctactaaaaaaaaaaaaatatatatatatatatatatatatatatatgcgccaggatttatgtcacaggcctacagtcacaactacttgggagggtgtgactgaagaattgcttgaacccaggatggggaagtttcagtgagccaagatcatgccactgcactccaccttaggtgacagagcaggagtc

SEQ ID NO: 1889188 - DNA, 4001 bp, Homo sapiens
ctttatttttctgcagatcatgaatccgctgtaaattgagaggctggctgagacctgccaggtccaaataacctccccctgaggaaaaaaaaaagccactcttctagaaagaagaggagcacatcaaacccaggaacagaaatatttcactgctttattctccagtgtacatcccatggagaaacactagcagtccagtcctcagggccccttgaatttacttcatattcagttcctagctgagcaggaccttcacgtcactccttcattgtcttggaatttcattttgggacagatactttgagcagccataacatcagataaaggtgaggatacaagctggtgaggggtggatgcggtcccacacattcacctgcaaaaaatgtgaagatagatgtcacagaatgtgcttccaactgtatccccacatttccttaattacacaagcaagtccataccatggcctggtgtacagttgagagcaccacaatgtgcagggaatgtttggagtgcaaactggagccatcctggcaaactccctatttgaggactatcataccaggagctaaatggaagtgagatcatttcacgtgaggtttgatgtggccaccacacttgtctcttttttcctgacttccatgtacctcatcggcctaagttctcctgggcctggctccacatcttccacgttaaccatttaccacttcacggaagatgaccctcaaagtaatccatttcatgagtgttttcttttaaacactgtcagattttaatgactaggcagtttcgatagttttaaaactaaatttctgtaacagtagccaacaaagaaactcttgttatccagcttttatcagagggctgcttgatacctgtaggagaagcaggcagctgtacctggcttttgcctgggaatttaggctctgtttcatttcatctgcttgtcttgtttcattgtggagggctctttcatcgggctgttgttggatgaggctacctctcaccacagaattattggcttccagggatttcagagagcaaaagggactttgggtaggctgactgcactttaggtttggggtcatggtttacttgtgggggctgagattgtttgcacttttcaagaggcttttgggtcctgtgacagaaatctctaaacgtggcttggactacagcacatggcagctcattctctcatgtgagccttgattttcctttgctttcatggggggtccacagtgcccttcaatagcactacctgacaaacatttcaggattgcaattgtcacagatgtcctctgagacactgtctcatcctcacctgcacctgtgggagtccacttagagctgtgagaatactgctccaccttggacttgcctttgtcatggttcctccatttcaccaagagcccctgcaagactcaggatgaatggaggcagtgaggttaagaacctggccatatttcactgtcacccacctctggagtcacaggtatgattctatcacccaaagaaccctccacaactcaccagacaacattccagtccccctgggactcaattcttgcacacagcctctttcaggaataaagtcagaagagcagttctcagagaccccatcacagtctagacatctcctcctccagtgggaacagatcacgggtacagctgaaaggggccccaagtatgagacttttagggttccacagtgggttattgcatacagcatttttttttcccagtaccaggcccactcttgcctgtaccattttcctcggcttaggctggctgacagctctgactgccgagtgccaagcccactggtgaatgcacatgtgctagtctcagggcaccaggcctgagctgtgagctctggctagcctcaccatgaatgccacaattccctgaggcttggctgagaaggagacctctgtggaggtgcatcagccaaggaatcttgcctgtcttctttgtgggatacacaggatagtctcatgatcctaggagagaacagacgtgagctagccagaagatatgtcaagccaagccccaggaataaaccgcaaaatctgtaaggttccaaaaggatctgcaggatgcctcaggcctgcctacacatgtagaggtgaatctttatgaaactgacactgctatgatttctaggtgcaccccgcttgtgttccccagagttgctgtctcccacgtaagtcttcctgcagaaccatacagcctcagaaactgctgggtggtgtgtttctgtaaaattattgtgagtctttgatgtctgtgtatgggtgtggctttttttagcactgtgtgtttatgtgtgtgtgtgtgtgtgtgtgtgtgtgtgtgtgtgtgtgcgcacctgtaagtgaagtctgcttaaaggaatgtggctaatgcgctgcagcactatttttttttttaagtctcccaacctttgggtcacatgcctgtgtggctctgcttaagctgcagggctctgtgttttttaattttctctggatcatgaatccaaagtgtactgggaggctggctgtgagacaccaaggtccacatcacctctgcctgccaaaaaaagctgctcttctagaaagaaaaggagcacaacacacgcaataacagacatccttcagtattccattgtccagtggtcatcccaggaagaaacactagcattcatgtcctcagggcccttgaatttaccttgaattcagttcataactgagcagtttcttcagatcctgagaaggcactcctagatcatcttgggatttcatttagggaaagagaacatgaacagcaataaggtcagaaggggtaaggatgcaatctggtgagaagtgggtggggtcccacacttccaattgcaaaaaatgtgaagacagatgacagagaaagtgattccaactgcattctcaaatttccttaattacgcaagtagtccacactatggcctgatgttcaggtgggagtactccaatgtgcagagaacatttgaaatgcaaaccgggccatcctggcaaactcccaatttgagggctttcatactctgctccaaatgaaagtgagacctatagatacaacgtgggatgtgacctccacacttgcctcttcttttcatgtcttccatattccttgtcagcctggggtttcctggatctggctcaacatcttcccagatggctcaacggtaaaggttttccagtgtttccttctaaacactgtcacgttttaatgactgggcagctgtgataattttaaaaccataaactccttttacagctgccaacaaggaaactcttgctctccaaattttattggagtgctgcatgattcctgtaggaagagaagcaggcagcgatgtttggcttttttctggtaatctacactgtgtttcattgcatctgcacatcctttctcattgtggaggtggtctttcattgggctgttgctggatggggctgcctcttacaacagatctatgggctgccagggatttcagtgagcaaaatggactctgggtaggtttagtgcctctccaggttgtgggtcgctgtctcgttatgggttgtttgcactttgaaggaggcttttgagttctctgacaggaatttttgaatattgcttagattccagcacaagccatctttttctcacacacacaccttgatttttctttgctttcctgggaagtccacagtgcccctcaacagcactactggacacccttttctggcttgccatggccacagatggcctctgagatactgtctcaaccttatctgtacccatgagaggccagtttgaggtttgagaacactgctccattttggacttgcctttgtcttggttcctgtgcttcacagagagaccctgcgaggtccagaatgatgggagacagtgaggttaagggcccaaccatcattcatagacacccaattctagggtctcaggtataattccatcacccaaacacccctcctcaactcaccaga

SEQ ID NO: 1889189 - DNA, 4001 bp, Homo sapiens
tttatttttctgcagatcatgaatccgctgtaaattgagaggctggctgagacctgccaggtccaaataacctccccctgaggaaaaaaaaaagccactcttctagaaagaagaggagcacatcaaacccaggaacagaaatatttcactgctttattctccagtgtacatcccatggagaaacactagcagtccagtcctcagggccccttgaatttacttcatattcagttcctagctgagcaggaccttcacgtcactccttcattgtcttggaatttcattttgggacagatactttgagcagccataacatcagataaaggtgaggatacaagctggtgaggggtggatgcggtcccacacattcacctgcaaaaaatgtgaagatagatgtcacagaatgtgcttccaactgtatccccacatttccttaattacacaagcaagtccataccatggcctggtgtacagttgagagcaccacaatgtgcagggaatgtttggagtgcaaactggagccatcctggcaaactccctatttgaggactatcataccaggagctaaatggaagtgagatcatttcacgtgaggtttgatgtggccaccacacttgtctcttttttcctgacttccatgtacctcatcggcctaagttctcctgggcctggctccacatcttccacgttaaccatttaccacttcacggaagatgaccctcaaagtaatccatttcatgagtgttttcttttaaacactgtcagattttaatgactaggcagtttcgatagttttaaaactaaatttctgtaacagtagccaacaaagaaactcttgttatccagcttttatcagagggctgcttgatacctgtaggagaagcaggcagctgtacctggcttttgcctgggaatttaggctctgtttcatttcatctgcttgtcttgtttcattgtggagggctctttcatcgggctgttgttggatgaggctacctctcaccacagaattattggcttccagggatttcagagagcaaaagggactttgggtaggctgactgcactttaggtttggggtcatggtttacttgtgggggctgagattgtttgcacttttcaagaggcttttgggtcctgtgacagaaatctctaaacgtggcttggactacagcacatggcagctcattctctcatgtgagccttgattttcctttgctttcatggggggtccacagtgcccttcaatagcactacctgacaaacatttcaggattgcaattgtcacagatgtcctctgagacactgtctcatcctcacctgcacctgtgggagtccacttagagctgtgagaatactgctccaccttggacttgcctttgtcatggttcctccatttcaccaagagcccctgcaagactcaggatgaatggaggcagtgaggttaagaacctggccatatttcactgtcacccacctctggagtcacaggtatgattctatcacccaaagaaccctccacaactcaccagacaacattccagtccccctgggactcaattcttgcacacagcctctttcaggaataaagtcagaagagcagttctcagagaccccatcacagtctagacatctcctcctccagtgggaacagatcacgggtacagctgaaaggggccccaagtatgagacttttagggttccacagtgggttattgcatacagcatttttttttcccagtaccaggcccactcttgcctgtaccattttcctcggcttaggctggctgacagctctgactgccgagtgccaagcccactggtgaatgcacatgtgctagtctcagggcaccaggcctgagctgtgagctctggctagcctcaccatgaatgccacaattccctgaggcttggctgagaaggagacctctgtggaggtgcatcagccaaggaatcttgcctgtcttctttgtgggatacacaggatagtctcatgatcctaggagagaacagacgtgagctagccagaagatatgtcaagccaagccccaggaataaaccgcaaaatctgtaaggttccaaaaggatctgcaggatgcctcaggcctgcctacacatgtagaggtgaatctttatgaaactgacactgctatgatttctaggtgcaccccgcttgtgttccccagagttgctgtctcccacgtaagtcttcctgcagaaccatacagcctcagaaactgctgggtggtgtgtttctgtaaaattattgtgagtctttgatgtctgtgtatgggtgtggctttttttagcactgtgtgtttatgtgtgtgtgtgtgtgtgtgtgtgtgtgtgtgtgtgtgcgcacctgtaagtgaagtctgcttaaaggaatgtggctaatgcgctgcagcactatttttttttttaagtctcccaacctttgggtcacatgcctgtgtggctctgcttaagctgcagggctctgtgttttttaattttctctggatcatgaatccaaagtgtactgggaggctggctgtgagacaccaaggtccacatcacctctgcctgccaaaaaaagctgctcttctagaaagaaaaggagcacaacacacgcaataacagacatccttcagtattccattgtccagtggtcatcccaggaagaaacactagcattcatgtcctcagggcccttgaatttaccttgaattcagttcataactgagcagtttcttcagatcctgagaaggcactcctagatcatcttgggatttcatttagggaaagagaacatgaacagcaataaggtcagaaggggtaaggatgcaatctggtgagaagtgggtggggtcccacacttccaattgcaaaaaatgtgaagacagatgacagagaaagtgattccaactgcattctcaaatttccttaattacgcaagtagtccacactatggcctgatgttcaggtgggagtactccaatgtgcagagaacatttgaaatgcaaaccgggccatcctggcaaactcccaatttgagggctttcatactctgctccaaatgaaagtgagacctatagatacaacgtgggatgtgacctccacacttgcctcttcttttcatgtcttccatattccttgtcagcctggggtttcctggatctggctcaacatcttcccagatggctcaacggtaaaggttttccagtgtttccttctaaacactgtcacgttttaatgactgggcagctgtgataattttaaaaccataaactccttttacagctgccaacaaggaaactcttgctctccaaattttattggagtgctgcatgattcctgtaggaagagaagcaggcagcgatgtttggcttttttctggtaatctacactgtgtttcattgcatctgcacatcctttctcattgtggaggtggtctttcattgggctgttgctggatggggctgcctcttacaacagatctatgggctgccagggatttcagtgagcaaaatggactctgggtaggtttagtgcctctccaggttgtgggtcgctgtctcgttatgggttgtttgcactttgaaggaggcttttgagttctctgacaggaatttttgaatattgcttagattccagcacaagccatctttttctcacacacacaccttgatttttctttgctttcctgggaagtccacagtgcccctcaacagcactactggacacccttttctggcttgccatggccacagatggcctctgagatactgtctcaaccttatctgtacccatgagaggccagtttgaggtttgagaacactgctccattttggacttgcctttgtcttggttcctgtgcttcacagagagaccctgcgaggtccagaatgatgggagacagtgaggttaagggcccaaccatcattcatagacacccaattctagggtctcaggtataattccatcacccaaacacccctcctcaactcaccagacta

SEQ ID NO: 1889190 - DNA, 4001 bp, Homo sapiens
ttgggctgctgggttccatgttctttatttttctgcagatcatgaatccgctgtaaattgagaggctggctgagacctgccaggtccaaataacctccccctgaggaaaaaaaaaagccactcttctagaaagaagaggagcacatcaaacccaggaacagaaatatttcactgctttattctccagtgtacatcccatggagaaacactagcagtccagtcctcagggccccttgaatttacttcatattcagttcctagctgagcaggaccttcacgtcactccttcattgtcttggaatttcattttgggacagatactttgagcagccataacatcagataaaggtgaggatacaagctggtgaggggtggatgcggtcccacacattcacctgcaaaaaatgtgaagatagatgtcacagaatgtgcttccaactgtatccccacatttccttaattacacaagcaagtccataccatggcctggtgtacagttgagagcaccacaatgtgcagggaatgtttggagtgcaaactggagccatcctggcaaactccctatttgaggactatcataccaggagctaaatggaagtgagatcatttcacgtgaggtttgatgtggccaccacacttgtctcttttttcctgacttccatgtacctcatcggcctaagttctcctgggcctggctccacatcttccacgttaaccatttaccacttcacggaagatgaccctcaaagtaatccatttcatgagtgttttcttttaaacactgtcagattttaatgactaggcagtttcgatagttttaaaactaaatttctgtaacagtagccaacaaagaaactcttgttatccagcttttatcagagggctgcttgatacctgtaggagaagcaggcagctgtacctggcttttgcctgggaatttaggctctgtttcatttcatctgcttgtcttgtttcattgtggagggctctttcatcgggctgttgttggatgaggctacctctcaccacagaattattggcttccagggatttcagagagcaaaagggactttgggtaggctgactgcactttaggtttggggtcatggtttacttgtgggggctgagattgtttgcacttttcaagaggcttttgggtcctgtgacagaaatctctaaacgtggcttggactacagcacatggcagctcattctctcatgtgagccttgattttcctttgctttcatggggggtccacagtgcccttcaatagcactacctgacaaacatttcaggattgcaattgtcacagatgtcctctgagacactgtctcatcctcacctgcacctgtgggagtccacttagagctgtgagaatactgctccaccttggacttgcctttgtcatggttcctccatttcaccaagagcccctgcaagactcaggatgaatggaggcagtgaggttaagaacctggccatatttcactgtcacccacctctggagtcacaggtatgattctatcacccaaagaaccctccacaactcaccagacaacattccagtccccctgggactcaattcttgcacacagcctctttcaggaataaagtcagaagagcagttctcagagaccccatcacagtctagacatctcctcctccagtgggaacagatcacgggtacagctgaaaggggccccaagtatgagacttttagggttccacagtgggttattgcatacagcatttttttttcccagtaccaggcccactcttgcctgtaccattttcctcggcttaggctggctgacagctctgactgccgagtgccaagcccactggtgaatgcacatgtgctagtctcagggcaccaggcctgagctgtgagctctggctagcctcaccatgaatgccacaattccctgaggcttggctgagaaggagacctctgtggaggtgcatcagccaaggaatcttgcctgtcttctttgtgggatacacaggatagtctcatgatcctaggagagaacagacgtgagctagccagaagatatgtcaagccaagccccaggaataaaccgcaaaatctgtaaggttccaaaaggatctgcaggatgcctcaggcctgcctacacatgtagaggtgaatctttatgaaactgacactgctatgatttctaggtgcaccccgcttgtgttccccagagttgctgtctcccacgtaagtcttcctgcagaaccatacagcctcagaaactgctgggtggtgtgtttctgtaaaattattgtgagtctttgatgtctgtgtatgggtgtggctttttttagcactgtgtgtttatgtgtgtgtgtgtgtgtgtgtgtgtgtgtgtgtgtgtgtgcgcacctgtaagtgaagtctgcttaaaggaatgtggctaatgcgctgcagcactatttttttttttaagtctcccaacctttgggtcacatgcctgtgtggctctgcttaagctgcagggctctgtgttttttaattttctctggatcatgaatccaaagtgtactgggaggctggctgtgagacaccaaggtccacatcacctctgcctgccaaaaaaagctgctcttctagaaagaaaaggagcacaacacacgcaataacagacatccttcagtattccattgtccagtggtcatcccaggaagaaacactagcattcatgtcctcagggcccttgaatttaccttgaattcagttcataactgagcagtttcttcagatcctgagaaggcactcctagatcatcttgggatttcatttagggaaagagaacatgaacagcaataaggtcagaaggggtaaggatgcaatctggtgagaagtgggtggggtcccacacttccaattgcaaaaaatgtgaagacagatgacagagaaagtgattccaactgcattctcaaatttccttaattacgcaagtagtccacactatggcctgatgttcaggtgggagtactccaatgtgcagagaacatttgaaatgcaaaccgggccatcctggcaaactcccaatttgagggctttcatactctgctccaaatgaaagtgagacctatagatacaacgtgggatgtgacctccacacttgcctcttcttttcatgtcttccatattccttgtcagcctggggtttcctggatctggctcaacatcttcccagatggctcaacggtaaaggttttccagtgtttccttctaaacactgtcacgttttaatgactgggcagctgtgataattttaaaaccataaactccttttacagctgccaacaaggaaactcttgctctccaaattttattggagtgctgcatgattcctgtaggaagagaagcaggcagcgatgtttggcttttttctggtaatctacactgtgtttcattgcatctgcacatcctttctcattgtggaggtggtctttcattgggctgttgctggatggggctgcctcttacaacagatctatgggctgccagggatttcagtgagcaaaatggactctgggtaggtttagtgcctctccaggttgtgggtcgctgtctcgttatgggttgtttgcactttgaaggaggcttttgagttctctgacaggaatttttgaatattgcttagattccagcacaagccatctttttctcacacacacaccttgatttttctttgctttcctgggaagtccacagtgcccctcaacagcactactggacacccttttctggcttgccatggccacagatggcctctgagatactgtctcaaccttatctgtacccatgagaggccagtttgaggtttgagaacactgctccattttggacttgcctttgtcttggttcctgtgcttcacagagagaccctgcgaggtccagaatgatgggagacagtgaggttaagggcccaaccatcattcatagacacccaattctagggtctcaggtataattccatcacccaaa

SEQ ID NO: 1889191 - DNA, 4001 bp, Homo sapiens
tgggctgctgggttccatgttctttatttttctgcagatcatgaatccgctgtaaattgagaggctggctgagacctgccaggtccaaataacctccccctgaggaaaaaaaaaagccactcttctagaaagaagaggagcacatcaaacccaggaacagaaatatttcactgctttattctccagtgtacatcccatggagaaacactagcagtccagtcctcagggccccttgaatttacttcatattcagttcctagctgagcaggaccttcacgtcactccttcattgtcttggaatttcattttgggacagatactttgagcagccataacatcagataaaggtgaggatacaagctggtgaggggtggatgcggtcccacacattcacctgcaaaaaatgtgaagatagatgtcacagaatgtgcttccaactgtatccccacatttccttaattacacaagcaagtccataccatggcctggtgtacagttgagagcaccacaatgtgcagggaatgtttggagtgcaaactggagccatcctggcaaactccctatttgaggactatcataccaggagctaaatggaagtgagatcatttcacgtgaggtttgatgtggccaccacacttgtctcttttttcctgacttccatgtacctcatcggcctaagttctcctgggcctggctccacatcttccacgttaaccatttaccacttcacggaagatgaccctcaaagtaatccatttcatgagtgttttcttttaaacactgtcagattttaatgactaggcagtttcgatagttttaaaactaaatttctgtaacagtagccaacaaagaaactcttgttatccagcttttatcagagggctgcttgatacctgtaggagaagcaggcagctgtacctggcttttgcctgggaatttaggctctgtttcatttcatctgcttgtcttgtttcattgtggagggctctttcatcgggctgttgttggatgaggctacctctcaccacagaattattggcttccagggatttcagagagcaaaagggactttgggtaggctgactgcactttaggtttggggtcatggtttacttgtgggggctgagattgtttgcacttttcaagaggcttttgggtcctgtgacagaaatctctaaacgtggcttggactacagcacatggcagctcattctctcatgtgagccttgattttcctttgctttcatggggggtccacagtgcccttcaatagcactacctgacaaacatttcaggattgcaattgtcacagatgtcctctgagacactgtctcatcctcacctgcacctgtgggagtccacttagagctgtgagaatactgctccaccttggacttgcctttgtcatggttcctccatttcaccaagagcccctgcaagactcaggatgaatggaggcagtgaggttaagaacctggccatatttcactgtcacccacctctggagtcacaggtatgattctatcacccaaagaaccctccacaactcaccagacaacattccagtccccctgggactcaattcttgcacacagcctctttcaggaataaagtcagaagagcagttctcagagaccccatcacagtctagacatctcctcctccagtgggaacagatcacgggtacagctgaaaggggccccaagtatgagacttttagggttccacagtgggttattgcatacagcatttttttttcccagtaccaggcccactcttgcctgtaccattttcctcggcttaggctggctgacagctctgactgccgagtgccaagcccactggtgaatgcacatgtgctagtctcagggcaccaggcctgagctgtgagctctggctagcctcaccatgaatgccacaattccctgaggcttggctgagaaggagacctctgtggaggtgcatcagccaaggaatcttgcctgtcttctttgtgggatacacaggatagtctcatgatcctaggagagaacagacgtgagctagccagaagatatgtcaagccaagccccaggaataaaccgcaaaatctgtaaggttccaaaaggatctgcaggatgcctcaggcctgcctacacatgtagaggtgaatctttatgaaactgacactgctatgatttctaggtgcaccccgcttgtgttccccagagttgctgtctcccacgtaagtcttcctgcagaaccatacagcctcagaaactgctgggtggtgtgtttctgtaaaattattgtgagtctttgatgtctgtgtatgggtgtggctttttttagcactgtgtgtttatgtgtgtgtgtgtgtgtgtgtgtgtgtgtgtgtgtgtgcgcacctgtaagtgaagtctgcttaaaggaatgtggctaatgcgctgcagcactatttttttttttaagtctcccaacctttgggtcacatgcctgtgtggctctgcttaagctgcagggctctgtgttttttaattttctctggatcatgaatccaaagtgtactgggaggctggctgtgagacaccaaggtccacatcacctctgcctgccaaaaaaagctgctcttctagaaagaaaaggagcacaacacacgcaataacagacatccttcagtattccattgtccagtggtcatcccaggaagaaacactagcattcatgtcctcagggcccttgaatttaccttgaattcagttcataactgagcagtttcttcagatcctgagaaggcactcctagatcatcttgggatttcatttagggaaagagaacatgaacagcaataaggtcagaaggggtaaggatgcaatctggtgagaagtgggtggggtcccacacttccaattgcaaaaaatgtgaagacagatgacagagaaagtgattccaactgcattctcaaatttccttaattacgcaagtagtccacactatggcctgatgttcaggtgggagtactccaatgtgcagagaacatttgaaatgcaaaccgggccatcctggcaaactcccaatttgagggctttcatactctgctccaaatgaaagtgagacctatagatacaacgtgggatgtgacctccacacttgcctcttcttttcatgtcttccatattccttgtcagcctggggtttcctggatctggctcaacatcttcccagatggctcaacggtaaaggttttccagtgtttccttctaaacactgtcacgttttaatgactgggcagctgtgataattttaaaaccataaactccttttacagctgccaacaaggaaactcttgctctccaaattttattggagtgctgcatgattcctgtaggaagagaagcaggcagcgatgtttggcttttttctggtaatctacactgtgtttcattgcatctgcacatcctttctcattgtggaggtggtctttcattgggctgttgctggatggggctgcctcttacaacagatctatgggctgccagggatttcagtgagcaaaatggactctgggtaggtttagtgcctctccaggttgtgggtcgctgtctcgttatgggttgtttgcactttgaaggaggcttttgagttctctgacaggaatttttgaatattgcttagattccagcacaagccatctttttctcacacacacaccttgatttttctttgctttcctgggaagtccacagtgcccctcaacagcactactggacacccttttctggcttgccatggccacagatggcctctgagatactgtctcaaccttatctgtacccatgagaggccagtttgaggtttgagaacactgctccattttggacttgcctttgtcttggttcctgtgcttcacagagagaccctgcgaggtccagaatgatgggagacagtgaggttaagggcccaaccatcattcatagacacccaattctagggtctcaggtataattccatcacccaaacac

SEQ ID NO: 1889192 - DNA, 4001 bp, Homo sapiens
tgcactactcttgggacaccaagcctgattgtgagctctaactagcaccacaatgaatttcaccattgcctagtgaaaattcctgcatcttggcaaagaaggagacttctgtggaggtgcatcagtcatgaactctcacctgtcttctctgtgttatccacaggattgtcccatgagagtaggagagggcatacataagccagcctgtagtaacgtcaagaagggtcccaggactaaaccacaatatctctaatgatccaaaaacatctgcaacatttctcagatatgcctagatattgtagaggtgagtctttttgagacttgccccattgtgatttctaggtacagcctgcctgtgttcctcaaggttgctctggcccaggtggagatacctgcagaaccacgcagcctcaggagctgctggcctgtgtgtttctgtggcagtgttgcaaatgttggatgtctctgtgtgtgtgtggcattgtgtatttctgtgtgtgtttgtaagtgtgtgtgtgagagcctgtaaatgtagtctgcttaaagcaatgtggctaaaaaacttcagtgtttttttttttgagcctcccatcattttggtggcctgtctgtgtctctgcttagcctgcaaagctttgtgtgctttgtttttctgtgaattatgaatctcacatgaattgggaggtgggccaaatcccgctggcatccaaatcacctccccctgcagaaaaatctacatttctagaaagaagatgagcacaccacaacaaaaaaaccagacatttttcactgttttattttcctgcagcaaatacagggggagacactagcagtcctctccacagggccacttgaacttacactgaatttggttccaagcccagcaggtgcttcacataatgagggggcactcctccatcatgttgggattttatcctgggacctagagtgtgagtagcaataaggtcagatacaggtgagtatacaatctggtgaaaggtggttggggccctgtaactacacctgcaataaaaataaagacagtgtttaaagcacgtgtttccaacttcatcccctcattcccttaattgcacaagcagtatacacaatggcatggtgttcaggtgggaatactacaacgggcaacggacatttggggtgcaaattggggccatcctggcaaactcccgatttgagggctttcatattcggagaccaatgcaatggaatgaattgattctgggtgggatgtggcctccacagtttcttctttttctgacttctatgttcctcatccacctagagtttcctgtgactggttcaacaacttccacacttaagctttcccagttcacagagaatgatcttcatgggactccattgcctgagtgtttccttctaaacagtgtcatgttttaataactgggaagcttgatattttaaaactgaaaattcccattaccactgccaacaaagaaactctttttctcccacttctatcgaatggctgcataatacctataggatgagaatccatgtctggcctttgcctggtaatctagcttctgtttcatttcatctgcacagccttttcattgtggaggagctcattcactgggctgtttctcgatgtgacttcctcttgccacagattatttagctgccacggatttcagagggcaaaagggactttgggcaggctcctgccatccaggttgtgggtggttgccttattgaggggctaagattgcactttgcaggagagttttcagttatctgacaggaatcactgaacattgcctggactccagcacaaggcagctcattctgttaagaaatgtcttgatttttctttgctttcatgggtatttcacagtgaatattgacagcactaatattcacctttttcaggcttgccataaccacagatggcctcggagacattgtcttagcctcatctgcacccattggaggccagtccaatgcgtgaggacactgctcctccttgtacttgccttgtcatggtaactgcctttcccagagatcccctgttagtcccaagatgaagggaggcagtgaggtcaagaactcggccatcttttgctgatacacacctctggggttggtctcaggtaagattctatcactcaaataatcctcaaccacacaccagactatattgcaatccccatgtgacctgattcttgtacacatattctcttttgggaatgcagtcagaaaagctgtttccagtgaccacttcacagtctcaaaatgccttcttctctaacaaaaactgaccatggagacatcccgaaggggccctgatatcaagacttttagggtcctgcagtgggtttttgcagtcacgactttttctgataccaagctcgctctgcctgtactatttttctctgcttaggcagactgatagctctgacaaatgggcaccggagcctgtttcacaaatgtgcatgcgctagactcagggcaccaggactgattgtgagaccttgctagcatcacaatgactgtgactgttgcatactgagaagtccctgaggcttggcagagacggagactttcgtggaggtgcgttagcattgaactcttgcctgtgttctgggtctggctcaacaacttccacaacaaatattttcctgttcatggagaacgaccctcacgagaatccattgcttgagtgttttcttctaaccactgtcacgttttaatgactatgaagctctgagattgttaaaactgtaaattcccattacagccaccaataagaaaactcttgttctcccatttctatcgaggtgctgcataattcctgcaggatgaaaagcaggcagccgtgtttgtctttttccttgtaatctagcctctgtttcatttcatctgcatggcattcttcttgtggagggtctctttcattgggttgttgctagatgagactgcttctggctagggattatttagctgccagggatttcagagagcaaaagggacattgggtactctgactacactccctatcattgtcttgttgtgggggctgagaatatttgcacgtggcaagaggcttttgtgttctctgacaggaatcactgaacactacttggactccagcacaaggcagctcgttctcttaggtgagacttgatttttctttgttttcatgaggaatctacattatcccttaacagcactactggacacccatttcaggcttgctatcccaacaaatggcctctgagacactgttttaacctcgtcttcacccaagagagggcagtatgaggtgtgagaacagtgatccaactttgacttgcctttgttgtagtttctgtctttccttgagagcccctgcaaggtcatagatgaagggaggcagtgaggttaagagtccgaccatcttttcatgacacccacttctggggtctcaggtatgatcctatcacacaaaacaccctcaagaacacatcagactatattttaatccccatggtacccaatacttgcacacagccttttttgggaatggaatctgaagagtagtttctagcgaccacctcacagtcacaaaatgcctcctcctccagcagaacctaaccaccacgatggcctgaagggtccctgaggtcgggagttttagtgtgcttcagtgggtttttgcagacagcctttttcctgataccaggacaactctgtctgtaccattattgtctacttaggcaggctgatagctctgacagccatgctccccagcttgcctcacgaatgtgcatgcactatcctcagggcaccaggcctcattgtgaactctggcttgcatcagcataaatgtcaccattacctagcaacaagtctcttcagcttggtgaatgagacttctgtagaggtgcgtcagcagtgaactatcgcctgtcttctctgtgagatccacaggatagtcccatgatcctaggagagggcagacatgaggcagcctgaagaaa

SEQ ID NO: 1889193 - DNA, 4001 bp, Homo sapiens
gcactactcttgggacaccaagcctgattgtgagctctaactagcaccacaatgaatttcaccattgcctagtgaaaattcctgcatcttggcaaagaaggagacttctgtggaggtgcatcagtcatgaactctcacctgtcttctctgtgttatccacaggattgtcccatgagagtaggagagggcatacataagccagcctgtagtaacgtcaagaagggtcccaggactaaaccacaatatctctaatgatccaaaaacatctgcaacatttctcagatatgcctagatattgtagaggtgagtctttttgagacttgccccattgtgatttctaggtacagcctgcctgtgttcctcaaggttgctctggcccaggtggagatacctgcagaaccacgcagcctcaggagctgctggcctgtgtgtttctgtggcagtgttgcaaatgttggatgtctctgtgtgtgtgtggcattgtgtatttctgtgtgtgtttgtaagtgtgtgtgtgagagcctgtaaatgtagtctgcttaaagcaatgtggctaaaaaacttcagtgtttttttttttgagcctcccatcattttggtggcctgtctgtgtctctgcttagcctgcaaagctttgtgtgctttgtttttctgtgaattatgaatctcacatgaattgggaggtgggccaaatcccgctggcatccaaatcacctccccctgcagaaaaatctacatttctagaaagaagatgagcacaccacaacaaaaaaaccagacatttttcactgttttattttcctgcagcaaatacagggggagacactagcagtcctctccacagggccacttgaacttacactgaatttggttccaagcccagcaggtgcttcacataatgagggggcactcctccatcatgttgggattttatcctgggacctagagtgtgagtagcaataaggtcagatacaggtgagtatacaatctggtgaaaggtggttggggccctgtaactacacctgcaataaaaataaagacagtgtttaaagcacgtgtttccaacttcatcccctcattcccttaattgcacaagcagtatacacaatggcatggtgttcaggtgggaatactacaacgggcaacggacatttggggtgcaaattggggccatcctggcaaactcccgatttgagggctttcatattcggagaccaatgcaatggaatgaattgattctgggtgggatgtggcctccacagtttcttctttttctgacttctatgttcctcatccacctagagtttcctgtgactggttcaacaacttccacacttaagctttcccagttcacagagaatgatcttcatgggactccattgcctgagtgtttccttctaaacagtgtcatgttttaataactgggaagcttgatattttaaaactgaaaattcccattaccactgccaacaaagaaactctttttctcccacttctatcgaatggctgcataatacctataggatgagaatccatgtctggcctttgcctggtaatctagcttctgtttcatttcatctgcacagccttttcattgtggaggagctcattcactgggctgtttctcgatgtgacttcctcttgccacagattatttagctgccacggatttcagagggcaaaagggactttgggcaggctcctgccatccaggttgtgggtggttgccttattgaggggctaagattgcactttgcaggagagttttcagttatctgacaggaatcactgaacattgcctggactccagcacaaggcagctcattctgttaagaaatgtcttgatttttctttgctttcatgggtatttcacagtgaatattgacagcactaatattcacctttttcaggcttgccataaccacagatggcctcggagacattgtcttagcctcatctgcacccattggaggccagtccaatgcgtgaggacactgctcctccttgtacttgccttgtcatggtaactgcctttcccagagatcccctgttagtcccaagatgaagggaggcagtgaggtcaagaactcggccatcttttgctgatacacacctctggggttggtctcaggtaagattctatcactcaaataatcctcaaccacacaccagactatattgcaatccccatgtgacctgattcttgtacacatattctcttttgggaatgcagtcagaaaagctgtttccagtgaccacttcacagtctcaaaatgccttcttctctaacaaaaactgaccatggagacatcccgaaggggccctgatatcaagacttttagggtcctgcagtgggtttttgcagtcacgactttttctgataccaagctcgctctgcctgtactatttttctctgcttaggcagactgatagctctgacaaatgggcaccggagcctgtttcacaaatgtgcatgcgctagactcagggcaccaggactgattgtgagaccttgctagcatcacaatgactgtgactgttgcatactgagaagtccctgaggcttggcagagacggagactttcgtggaggtgcgttagcattgaactcttgcctgtgttctgggtctggctcaacaacttccacaacaaatattttcctgttcatggagaacgaccctcacgagaatccattgcttgagtgttttcttctaaccactgtcacgttttaatgactatgaagctctgagattgttaaaactgtaaattcccattacagccaccaataagaaaactcttgttctcccatttctatcgaggtgctgcataattcctgcaggatgaaaagcaggcagccgtgtttgtctttttccttgtaatctagcctctgtttcatttcatctgcatggcattcttcttgtggagggtctctttcattgggttgttgctagatgagactgcttctggctagggattatttagctgccagggatttcagagagcaaaagggacattgggtactctgactacactccctatcattgtcttgttgtgggggctgagaatatttgcacgtggcaagaggcttttgtgttctctgacaggaatcactgaacactacttggactccagcacaaggcagctcgttctcttaggtgagacttgatttttctttgttttcatgaggaatctacattatcccttaacagcactactggacacccatttcaggcttgctatcccaacaaatggcctctgagacactgttttaacctcgtcttcacccaagagagggcagtatgaggtgtgagaacagtgatccaactttgacttgcctttgttgtagtttctgtctttccttgagagcccctgcaaggtcatagatgaagggaggcagtgaggttaagagtccgaccatcttttcatgacacccacttctggggtctcaggtatgatcctatcacacaaaacaccctcaagaacacatcagactatattttaatccccatggtacccaatacttgcacacagccttttttgggaatggaatctgaagagtagtttctagcgaccacctcacagtcacaaaatgcctcctcctccagcagaacctaaccaccacgatggcctgaagggtccctgaggtcgggagttttagtgtgcttcagtgggtttttgcagacagcctttttcctgataccaggacaactctgtctgtaccattattgtctacttaggcaggctgatagctctgacagccatgctccccagcttgcctcacgaatgtgcatgcactatcctcagggcaccaggcctcattgtgaactctggcttgcatcagcataaatgtcaccattacctagcaacaagtctcttcagcttggtgaatgagacttctgtagaggtgcgtcagcagtgaactatcgcctgtcttctctgtgagatccacaggatagtcccatgatcctaggagagggcagacatgaggcagcctgaagaaac

SEQ ID NO: 1889194 - DNA, 4001 bp, Homo sapiens; identical to SEQ ID NO: 1889192

SEQ ID NO: 1889195 - DNA, 4001 bp, Homo sapiens; identical to SEQ ID NO: 1889193

SEQ ID NO: 1889196 - DNA, 4001 bp, Homo sapiens
gatttatacctgaaacctgagaccacagagccaggtgtcagtgaaagatagccaagctcttgacctcactgcttccctttatcttgacctcactggggctttctgggaaaggcagaatccaagacaaagttaagactaaggtattacagtattcccacacctcagactggcctctcacgggtgcagataaggttgagacagtgtcttagaggccctctgtggtgatggcaagcctgaaaagggtgtccagtagtgctgatgaggggcactgtggattccccaagaaagcaaagaacaatcaaggctcacctgagaaaatgagtgccttttgctggagtataagcaatgttcaatgattcttgtcagaggactcaaatcttgcaaagtgcaaacaacctcagcccgcacaatgatgcaatcacccacaacctggagtgcaaccagcctacccaaagtcccttttgcactttgaaatccctgacagctaaataatttgtggagagaggtagtcacatctggcaatagcccaatgaaattgtctctccacaatgagaaaggatatgcagatacaatgaaacacatcctagattaccaagcaaaagccagacacaccggcctccttctcatgctccaggaatacactgtcctctgataaaagttggagagcaacagtttcttttcccacaactgtaatgggaatttatggttttacatatatcaaagcagcccagtcattaaaatgtgacagtgtttgtaaggaaacattcgtgcaacggattcccatgagtgtcatcctctgtgaactaggaaacatttagtgtgcaagacatttagccagacccaggaaaccctaggcagatggggaacatggaagtcaggaaaagaagaggcaagtgtggaggccacatcccacccagcatcaatccatcccactcccattcggctatcataatgaatctggggtttgcccagatggccccagtttgcactccaaatgttcctttcatgttggagtactcccagatgaacatggggccatggtgtgcgctgctgatgcaattaagggaatgcagcgatggagtttgaagcaacttctgtttcatctgtcttcaccttttttgcagttgaaggtgctggaccccatacacccctcaccagacagtgtcctaacccctctcttaccttattgctgctcacaccctctttgccagaatgaaattccaagaaaatggagtgtcccctgttgactttaagcacctgctcggctggggatggaattcaatgtaaattcaaggggtcctgcagagaagactgctagtgtctctccttgggttagcgtgaaacactgagagatgttggtcttgggtatgacgtgctgctcttctttctggaaaagtaaatttttttcagggggaggtgatttggactctggctcatcttggtcagactcctaattcactacagattcatgatccacagaaaaataaagaacacggagccttgcatcccaagcagaaccacacacacaggcaaacaaatgttaggttactcaaaaaaaaaaaaaaaggaagaagaagtgctgcaatgcattgcccacattattttaagcagactccactaacaggcacacactcccacacacacacccacaaatacacaaagccacacacacaagcagacatccactactagcagcactcccacagaaacagcaagccagcttctgaggctgcatggttctgcaggcagacacatctgggaaacagctaccctagggaacacaggtgggctatatgtagtaatcattttgagacaagttttaaaaagagtaacccctgaaacatgtaaccaggctggaggcaacctgcatatccttttggatccttagggatttcacggttcattcctggaactctccttgatgttccttcgggctggctcacatctaccatctactagaatcatggcactgtcctgtgtatcccacagaaaagacaggcaagagtccaccactgacacacctccacagaggtctcattctccacaaaggtgcagggacttgtcgctaggcaatggttccatttattgtgacactagccagagctcactgctcaggcctggtgctttaagactagctcatgcacattcatgagacaggatcaggtgcctgcctgtcagagccatcagctgcctaagcagaggaaaatggtacaggcagagccgtcctggtattgagaaaaaggttgcctgcatgaccctaaaagtctcaaacttattgccccatcgggtcgtcttggtggtggagttctggtggaagaggaggtatttagaagctatgaggtggtcactggaaactgttgttctgactccattcctgaaagagaccatgtgcaagaaccaggtcccatggggattgggacaggggccagtgagttgttgagggttctttatgtgatggaatcacacctgagaccccagaggcaggtgtctgcaaaagatggctgggctcttgacctcactgcctcccttcatcctgggccttgcaggggctctctgggaaaggcaagaaccactacaaaggcaatttcaaggtggagcagtgttctctcacctcgaactggccttgcctataggcagatgaagttgtgacagtgtctcagaggccatctgtggcaattgcaaacctgaaaatggtgtccagtagttcagttgatgggcaatgtggaatccctaggaaagccaagaaaaatcaatgcttacctgagagaacaagctgcaaaatgctggagtcaaagcaatgttcaatgattcttgtcagaggactcaaaatcctcctgcaaactgcaaaaatcttcacccccaacaatgcaaccatgacccacaacctggagctcagccagtctctctgaagtcttctttgctgtctgaaattccttgcagtcaaaagacctgcagtgagagggagtcccatccagcaacagcccattgaaagagacccgtgacaatatgaaaagacgtgcagatgaaacgaaacagagccaagattaccaggcaaatattagacacagttgcctgcttctcattccatatgaatcaagccaccctccgatagaagtgggaaaacaagagtttccctgttggcagctctaaaggaatttacagttttaaaaatattaaagctgccaagtcattaaaatgtgacagtgtttagaagaaaacaatcacacaatggattcctatgagggtcatcctttgtgaactgggagatgtttagtatggaagacaatgagccagaccaaggaaaccctaattcaatgaggaagatcgaagtcagaaaaaaaaagagcaactgtggaggccacatcccacccagcatcaatccatcccactcccatttggcccggtgtttgaaagccctctaagtgcacagccccagtttgtactctacatgttcatggcatgttggagaactcccacttgaacaccgggccctggtgtgcatggcttgtgcaattaagaggatgtggtaatgcagttgcaaggaacttctgtgtcatctgtcttcaccttttttgcaggtgcacttgcgggacacaatccacacctcaccagattgtgtcctcttctctatctgaccttatagctgctcacactctctgtcccagaatgaaagcccaagatgatggagtagtgctccctcatgacataaagcacctgcttggctggtctcatgtattgattaatcatacctataattgttaacattcattgtgaaacataatgtttcatttttcttccttattctccaccatttgttttcttctcagattagttatagtttgtaaattattttgtcaaacatatgcaataaggtaacaccgcagtattgcagaatacactgcattggaaacagattcatattggaatgggaaaacatcccttattacctgcagctgggagatcaataaggatgggatctggggttctgaccccaggtacca

SEQ ID NO: 1889197 - DNA, 4001 bp, Homo sapiens
agatttatacctgaaacctgagaccacagagccaggtgtcagtgaaagatagccaagctcttgacctcactgcttccctttatcttgacctcactggggctttctgggaaaggcagaatccaagacaaagttaagactaaggtattacagtattcccacacctcagactggcctctcacgggtgcagataaggttgagacagtgtcttagaggccctctgtggtgatggcaagcctgaaaagggtgtccagtagtgctgatgaggggcactgtggattccccaagaaagcaaagaacaatcaaggctcacctgagaaaatgagtgccttttgctggagtataagcaatgttcaatgattcttgtcagaggactcaaatcttgcaaagtgcaaacaacctcagcccgcacaatgatgcaatcacccacaacctggagtgcaaccagcctacccaaagtcccttttgcactttgaaatccctgacagctaaataatttgtggagagaggtagtcacatctggcaatagcccaatgaaattgtctctccacaatgagaaaggatatgcagatacaatgaaacacatcctagattaccaagcaaaagccagacacaccggcctccttctcatgctccaggaatacactgtcctctgataaaagttggagagcaacagtttcttttcccacaactgtaatgggaatttatggttttacatatatcaaagcagcccagtcattaaaatgtgacagtgtttgtaaggaaacattcgtgcaacggattcccatgagtgtcatcctctgtgaactaggaaacatttagtgtgcaagacatttagccagacccaggaaaccctaggcagatggggaacatggaagtcaggaaaagaagaggcaagtgtggaggccacatcccacccagcatcaatccatcccactcccattcggctatcataatgaatctggggtttgcccagatggccccagtttgcactccaaatgttcctttcatgttggagtactcccagatgaacatggggccatggtgtgcgctgctgatgcaattaagggaatgcagcgatggagtttgaagcaacttctgtttcatctgtcttcaccttttttgcagttgaaggtgctggaccccatacacccctcaccagacagtgtcctaacccctctcttaccttattgctgctcacaccctctttgccagaatgaaattccaagaaaatggagtgtcccctgttgactttaagcacctgctcggctggggatggaattcaatgtaaattcaaggggtcctgcagagaagactgctagtgtctctccttgggttagcgtgaaacactgagagatgttggtcttgggtatgacgtgctgctcttctttctggaaaagtaaatttttttcagggggaggtgatttggactctggctcatcttggtcagactcctaattcactacagattcatgatccacagaaaaataaagaacacggagccttgcatcccaagcagaaccacacacacaggcaaacaaatgttaggttactcaaaaaaaaaaaaaaaggaagaagaagtgctgcaatgcattgcccacattattttaagcagactccactaacaggcacacactcccacacacacacccacaaatacacaaagccacacacacaagcagacatccactactagcagcactcccacagaaacagcaagccagcttctgaggctgcatggttctgcaggcagacacatctgggaaacagctaccctagggaacacaggtgggctatatgtagtaatcattttgagacaagttttaaaaagagtaacccctgaaacatgtaaccaggctggaggcaacctgcatatccttttggatccttagggatttcacggttcattcctggaactctccttgatgttccttcgggctggctcacatctaccatctactagaatcatggcactgtcctgtgtatcccacagaaaagacaggcaagagtccaccactgacacacctccacagaggtctcattctccacaaaggtgcagggacttgtcgctaggcaatggttccatttattgtgacactagccagagctcactgctcagacctggtgctttaagactagctcatgcacattcatgagacaggatcaggtgcctgcctgtcagagccatcagctgcctaagcagaggaaaatggtacaggcagagccgtcctggtattgagaaaaaggttgcctgcatgaccctaaaagtctcaaacttattgccccatcgtgtcgtcttggtggtggagttctggtggaagaggaggtatttagaagctatgaggtggtcactggaaactgttgttctgactccattcctgaaagagaccatgtgcaagaaccaggtcccatggggattgggacaggggccagtgagttgttgagggttctttatgtgatggaatcacacctgagaccccagaggcaggtgtctgcaaaagatggctgggctcttgacctcactgcctcccttcatcctgggccttgcaggggctctctgggaaaggcaagaaccactacaaaggcaatttcaaggtggagcagtgttctctcacctcgaactggccttgcctataggcagatgaagttgtgacagtgtctcagaggccatctgtggcaattgcaaacctgaaaatggtgtccagtagttcagttgatgggcaatgtggaatccctaggaaagccaagaaaaatcaatgcttacctgagagaacaagctgcaaaatgctggagtcaaagcaatgttcaatgattcttgtcagaggactcaaaatcctcctgcaaactgcaaaaatcttcacccccaacaatgcaaccatgacccacaacctggagctcagccagtctctctgaagtcttctttgctgtctgaaattccttgcagtcaaaagacctgcagtgagagggagtcccatccagcaacagcccattgaaagagacccgtgacaatatgaaaagacgtgcagatgaaacgaaacagagccaagattaccaggcaaatattagacacagttgcctgcttctcattccatatgaatcaagccaccctccgatagaagtgggaaaacaagagtttccctgttggcagctctaaaggaatttacagttttaaaaatattaaagctgccaagtcattaaaatgtgacagtgtttagaagaaaacaatcacacaatggattcctatgagggtcatcctttgtgaactgggagatgtttagtatggaagacaatgagccagaccaaggaaaccctaattcaatgaggaagatcgaagtcagaaaaaaaaagagcaactgtggaggccacatcccacccagcatcaatccatcccactcccatttggcccggtgtttgaaagccctctaagtgcacagccccagtttgtactctacatgttcatggcatgttggagaactcccacttgaacaccgggccctggtgtgcatggcttgtgcaattaagaggatgtggtaatgcagttgcaaggaacttctgtgtcatctgtcttcaccttttttgcaggtgcacttgcgggacacaatccacacctcaccagattgtgtcctcttctctatctgaccttatagctgctcacactctctgtcccagaatgaaagcccaagatgatggagtagtgctccctcatgacataaagcacctgcttggctggtctcatgtattgattaatcatacctataattgttaacattcattgtgaaacataatgtttcatttttcttccttattctccaccatttgttttcttctcagattagttatagtttgtaaattattttgtcaaacatatgcaataaggtaacaccgcagtattgcagaatacactgcattggaaacagattcatattggaatgggaaaacatcccttattacctgcagctgggagatcaataaggatgggatctggggttctgaccccaggtacc

SEQ ID NO: 1889198 - DNA, 4001 bp, Homo sapiens; identical to SEQ ID NO: 1889196

SEQ ID NO: 1889199 - DNA, 4001 bp, Homo sapiens; identical to SEQ ID NO: 1889197

SEQ ID NO: 1889200 - DNA, 4001 bp, Homo sapiens
ttttatatcaatagatacgcttcaccaaaatgaaactttccagatcttcaacttatgaaaacaggtatttatgttgcaacttacatttaaaagatgagtcgaattactcataatccttagaagttagcttgtccgcatctgaaaattcacttttaccttgaagttcaatctgtctctgggaaagactagattggaagaataaaattcaagaatgtgatgttttagtaatggaaaagccaagagcgtcaggtggcaaaagtccttctgttactcaagaaaatgctctgaaaaattccttttctcttttttttttgtaaagattaactccacctcaccaccacaatgaggtatttttctcagcaattgacacctgtttactcagttactccctgtaactatgttatgctgtgaagtaggcaatacagttgttaaagaagaataatgttggactctgaatgttattccgaggagtttcatttttcaatagtaataaaacatttctaaaaaaattctgcatattaccagcatgaaccagctgaggtggcaatagcaaaaacttgagtgattagagtgccctactcagcatatgtgtatgttttatccttccttttggcttatcacaagtacaaaaaaagaaaaaaaaaaaaacacctggccatgtgtggtggatcatgtctgtaatcctagcactttgggaagctgaggctggaagatcacaaggtgaggagcctgagaccatcccggccaatatggtgaaaacccatctctactaaaaatacaaaaattagcagagcatggtggtgcgtgtctgtagtcccagttactcatagggtgaggcaggagaattgcttgaacccaagaggcagaggctgcagtaaggtgagactacactcaagccagggtgacagggcaagactctgtctcaaaaaaagaaaaagctttggaaacatgactggtgttgctggaaacagcagactagagaggttgatgtggggaaactgggggatttatttatgtgcaccagctcagcgaacttataaccaaaaaggctgagtattgaataaagactgagcagggctctttataagcaaactttcagaagcagaagtaaagcagttgattatacaatgaaaggttatgtaatttatagcataacttttgactttgcataacatcttgccttgcatagctgggttttgcagctgtgttgaaagaaaaatgaacctacaaattttactaaatacaagcattggtaaacatagtcataattaatgcttcagaagaaggagagacagtaaagtaatttgcttttaatttcaactttgctccagtaaggggtatttgcaacccattcacttggcctcaactttttagacactgttattttatgactgtccttgaagtgagctagatagatggagaaaatacttgtttttttttttctttgtcatacgtgtcttgtcacatttttctatttttttttgataccatttataggagaaatttaatagaaggcattcgtattattttattctttatgggaaagcatgttttcttctttggtcaaaggttgatatttagttagggctattaactcagtagcagtatgcctggtcatattgtttttggactatgtagtatgtgtagaagttgggaatccttttatgggtactttttttttttatcaaggttaagtggggaaataacagcaaagcaatgagtagcatatttatgtttagtgtggttagaagagattcatacccaggggaggaggttgagtatagtgacagaataacagtaaaataattagtattacagtgaaaattagatttaagatttttaattatatttaacttgcctgatgagtttttaagttttggctgtgcgtagactagttatcttctggagtgtgattagagctgggcttgttgtcctcttcttcatctttagtcttgtgtggattcgtcggcttttggagggaccagagcagggctgttgttctcagtgacaactctgtcttgttgcatgattagctgcctgtttcagcaaaccatgatggatcgattaaggcatgattcctgcaattttaacagcagtgggagtggataagattacaaaatgggacccatcccttatgggttctagagaagttgggtttcattttttaacccaaagagagtagttaggtttaaagaagcatgctgggcctgtcgggctaatacgcatttcttaatgtacctgacgctgaatacttcacatggctatttttaaaacctgcatttgctttttgaagattaatttccttagtttgcagagattacttttaatttgacctaagatttggtgtggctgattgaaaaaaattttatagggtgaatacctagtttgtttagtgggggtgcacctgactcggatgaacaccatgggcaggatttgattttattatagttgatttttgtgataatttcttttggtaagtgcttcagtgatttgtttatgcatttggttttctttttttttaactttgttgttggtaggctgtgtgtaactttcattttattttatgcaactttgctagattttaaattatttcaactataattgctaaactcttgtttgacttcaaagttagaggcagtttaaacctggggataatgtttttaaacagtattttaactacttttttgccttttcagtcctcattggaaaaccttaacctatgttgaaaaggtgtaaataagtgctagtataaaacaatagcacctgacatgggacagttttgtgaagtttacaagtaagtttttacaaggcatagcttttattttttagatccctgggggctgggtaggcccttgccctgggttgttttgagcataagtttgtttcgggaattcagggaccctgaatggagggactggctggagctgcgacagaagaacataaattgtgaagatttcatcgacatttatcagttccctaatagtactcttataattccttacagctgtcttactttagtctcttaatcctgttttcttcgtaagctgagaatgcatgtcacctcaggaccactactgtataaattgattgtaacatatgtgtttgaaaacgatgaaatcagtgcaccttgaaaacgaaccaaataacagcagttttagagaacaagggaagacaaccataaagactgactgcctgtgggcttgggcaaaaagagccatatttttcttcttgcagagagcctataaatggactataaatgtgcaggtatgacagatatcactaaattcttttactagcaaggaatattgataattgatcctctgggaaaataattgcattcctggggggaggtctataaatggccactctgggagtgtctgtctcatgcggttgagatgaggactgaaatacgccctggtctcctgcagcaacctcaggctcactagggtggggaaaaaccccaccctggtgaatttgaggtcagaccatttctctgctcttaaaccctgttttctgttgtttaagatgtttatcaagacaataagtgcacagctgaacatagaccctcatcagtaattctaatttttccttttgccttgtaatcttgctttgccctttgccttgtggtctttattggcctcagaagaatgtgatctttgttctcctattgctttttgaagagtgtgatctttgggacctactctctgtttgtacacccgcctccccttgtgaagtccttagaaaaacctgctggttttgtggctcaggtgggcatcagggtcctacctgtatgtgatgttatccccagtgggccagctgtaaaattcctctctttgtactctttctctttatttctcaggctggccaacacttagaaatataaaaagaacctatgttgaaatattgggggcagggtccccagatataagttaagtttgttcacaaacaccttgaatgatggcagtgagttctggcatgcagaagtggcatttcagtaagtt

SEQ ID NO: 1889201 - DNA, 4001 bp, Homo sapiens
tttttatatcaatagatacgcttcaccaaaatgaaactttccagatcttcaacttatgaaaacaggtatttatgttgcaacttacatttaaaagatgagtcgaattactcataatccttagaagttagcttgtccgcatctgaaaattcacttttaccttgaagttcaatctgtctctgggaaagactagattggaagaataaaattcaagaatgtgatgttttagtaatggaaaagccaagagcgtcaggtggcaaaagtccttctgttactcaagaaaatgctctgaaaaattccttttctcttttttttttgtaaagattaactccacctcaccaccacaatgaggtatttttctcagcaattgacacctgtttactcagttactccctgtaactatgttatgctgtgaagtaggcaatacagttgttaaagaagaataatgttggactctgaatgttattccgaggagtttcatttttcaatagtaataaaacatttctaaaaaaattctgcatattaccagcatgaaccagctgaggtggcaatagcaaaaacttgagtgattagagtgccctactcagcatatgtgtatgttttatccttccttttggcttatcacaagtacaaaaaaagaaaaaaaaaaaaacacctggccatgtgtggtggatcatgtctgtaatcctagcactttgggaagctgaggctggaagatcacaaggtgaggagcctgagaccatcccggccaatatggtgaaaacccatctctactaaaaatacaaaaattagcagagcatggtggtgcgtgtctgtagtcccagttactcatagggtgaggcaggagaattgcttgaacccaagaggcagaggctgcagtaaggtgagactacactcaagccagggtgacagggcaagactctgtctcaaaaaaagaaaaagctttggaaacatgactggtgttgctggaaacagcagactagagaggttgatgtggggaaactgggggatttatttatgtgcaccagctcagcgaacttataaccaaaaaggctgagtattgaataaagactgagcagggctctttataagcaaactttcagaagcagaagtaaagcagttgattatacaatgaaaggttatgtaatttatagcataacttttgactttgcataacatcttgccttgcatagctgggttttgcagctgtgttgaaagaaaaatgaacctacaaattttactaaatacaagcattggtaaacatagtcataattaatgcttcagaagaaggagagacagtaaagtaatttgcttttaatttcaactttgctccagtaaggggtatttgcaacccattcacttggcctcaactttttagacactgttattttatgactgtccttgaagtgagctagatagatggagaaaatacttgtttttttttttctttgtcatacgtgtcttgtcacatttttctatttttttttgataccatttataggagaaatttaatagaaggcattcgtattattttattctttatgggaaagcatgttttcttctttggtcaaaggttgatatttagttagggctattaactcagtagcagtatgcctggtcatattgtttttggactatgtagtatgtgtagaagttgggaatccttttatgggtactttttttttttatcaaggttaagtggggaaataacagcaaagcaatgagtagcatatttatgtttagtgtggttagaagagattcatactcaggggaggaggttgagtatagtgacagaataacagtaaaataattagtattacagtgaaaattagatttaagatttttaattatatttaacttgcctgatgagtttttaagttttggctgtgcgtagactagttatcttctggagtgtgattagagctgggcttgttgtcctcttcttcatctttagtcttgtgtggattcgtcggcttttggagggaccagagcagggctgttgttctcagtgacaactctgtcttgttgcatgattagctgcctgtttcagcaaaccatgatggatcgattaaggcatgattcctgcaattttaacagcagtgggagtggataagattacaaaatgggacccatcccttatgggttctagagaagttgggtttcattttttaacccaaagagagtagttaggtttaaagaagcatgctgggcctgtcgggctaatacgcatttcttaatgtacctgacgctgaatacttcacatggctatttttaaaacctgcatttgctttttgaagattaatttccttagtttgcagagattacttttaatttgacctaagatttggtgtggctgattgaaaaaaattttatagggtgaatacctagtttgtttagtgggggtgcacctgactcggatgaacaccatgggcaggatttgattttattatagttgatttttgtgataatttcttttggtaagtgcttcagtgatttgtttatgcatttggttttctttttttttaactttgttgttggtaggctgtgtgtaactttcattttattttatgcaactttgctagattttaaattatttcaactataattgctaaactcttgtttgacttcaaagttagaggcagtttaaacctggggataatgtttttaaacagtattttaactacttttttgccttttcagtcctcattggaaaaccttaacctatgttgaaaaggtgtaaataagtgctagtataaaacaatagcacctgacatgggacagttttgtgaagtttacaagtaagtttttacaaggcatagcttttattttttagatccctgggggctgggtaggcccttgccctgggttgttttgagcataagtttgtttcgggaattcagggaccctgaatggagggactggctggagctgcgacagaagaacataaattgtgaagatttcatcgacatttatcagttccctaatagtactcttataattccttacagctgtcttactttagtctcttaatcctgttttcttcgtaagctgagaatgcatgtcacctcaggaccactactgtataaattgattgtaacatatgtgtttgaaaacgatgaaatcagtgcaccttgaaaacgaaccaaataacagcagttttagagaacaagggaagacaaccataaagactgactgcctgtgggcttgggcaaaaagagccatatttttcttcttgcagagagcctataaatggactataaatgtgcaggtatgacagatatcactaaattcttttactagcaaggaatattgataattgatcctctgggaaaataattgcattcctggggggaggtctataaatggccactctgggagtgtctgtctcatgcggttgagatgaggactgaaatacgccctggtctcctgcagcaacctcaggctcactagggtggggaaaaaccccaccctggtgaatttgaggtcagaccatttctctgctcttaaaccctgttttctgttgtttaagatgtttatcaagacaataagtgcacagctgaacatagaccctcatcagtaattctaatttttccttttgccttgtaatcttgctttgccctttgccttgtggtctttattggcctcagaagaatgtgatctttgttctcctattgctttttgaagagtgtgatctttgggacctactctctgtttgtacacccgcctccccttgtgaagtccttagaaaaacctgctggttttgtggctcaggtgggcatcagggtcctacctgtatgtgatgttatccccagtgggccagctgtaaaattcctctctttgtactctttctctttatttctcaggctggccaacacttagaaatataaaaagaacctatgttgaaatattgggggcagggtccccagatataagttaagtttgttcacaaacaccttgaatgatggcagtgagttctggcatgcagaagtggcatttcagtaagt

SEQ ID NO: 1889202 - DNA, 4001 bp, Homo sapiens; identical to SEQ ID NO: 1889200

SEQ ID NO: 1889203 - DNA, 4001 bp, Homo sapiens; identical to SEQ ID NO: 1889201

SEQ ID NO: 1889204 - DNA, 4001 bp, Homo sapiens
taaaattaagtaatttttatttcccagtcagtgacatacaggaaataaaaaaataaaggtgataaggaagtaacctaaaagtgaatttggaaatacaaaatattcagcaatttttaaaaataaaaattttaaaaaaatttagatacgtatttcaatccgatctcagttagttgaataacgaaagaaagaaacccaaagtaaaaagatggccagaaacatgagcaaagaagaaaggaatatgaggttaagtatagaaaagtaagacagaaacagaagtaaattctcattattcacaactagctattaactagagctctgctcttcaaagggtcattaactttagttgtaacatggtcattaaaaatgctatttgattaaacctttgtttctaattgaaggactttttgtttcatcacaaggagcataaacaagaacttactgagcttatgtattaaattgcaatgcttttttattacagctctctcctgggggaagcaaatactgaggataagtgacatgtccaaaatgacaatgctgaatcccccagtaagttcaggcaacagcttctttcccaattatgcaagttctaaacctttctgttagaatacaaggagagagggagggagagacagacagagagataactcagcagtaacatattcatgcacagaccaaaaaaaaaaaaaaaaaaaaaaatctgaccctaagcaaatccaaaacctaactttgctcaagcgtaaatgtactgtaaatgttaagtaaacataaatccgattaaaaagaggcattttgctgaaatgtaaactgaatcttttttcctcatttttgaagctcgtgaaacagattagaaaaatatttcaacatttcacaaaggaattttttttgagtattgaaatgcataatgaagtaagcgctaccttacttacataactaagtatgtaagacattgaacgtttgaacatgtctaaattaaagaaaaataaagagcattcaaccatcttaggccgtttctttgcagttctgtatttcagggtcctgaaagttttatatgctgcagcgaattccttgcgcaaacttttctaatctttaggcaccaaaccccagaagaaaagggatttcgattgttttaaacgccgtcttaattttgcggtattcaaaggaacgagttgagtaaagtaaggaaaatgttcctgtgtctccaggattgagagatcaaagacgccgcacttcagcttccgctttggcgtgcacaggacagagaaagagcaatgaaagaaagaagagagaaacgaagagagagagagaaagagagagacagagaaaagaagagaaaagagaagatgttttgcaagagaagttgtcatacgataatggtgcccaatttagatcgaggtcctctggcatcacctctcatccttggctggagatgtagccatgtaggtagcgtcaagaactgaagccccagagctcagtcggtctcaccgactggctgcggccacttgccatccggtcctgtgactgagaaggaaaggagactgcgtagctgggggtgcaatgcgcagctgcagctacaaagcccggctttcatactgtgtaacagcttcacctcaactggcgtagcgcacctcaacacatactgctcaatagcttcaggagagaactagcctgtgtcccaagtaagccctagacggtggtgaccagcaccgggaataaggcgacggcagggactggaaagggtacacctggtgcgtgggtccccgcggtgccagccacacgtggctttcatacctagcgcgccctcggggtcgcactcttcccgctgagatcagggcgcgccctcagccactcttctctacccctctggacaggaacccaccccagagctgagttgcgttctgccctgtttggcaccaatcgtcttggcgccaccgccgctgcctcttctcggtgttacctctcccctacgccacgaggtgacttccgcagcaaaaccggcagagtaccctcacggaagctcatggacttaacgcggggccctataactctggcgaccaatcgctgcatgccaagtaccacacgtgaccggaggaggttgactccgccatccactcttcctaacactaccaacctatcttggggagtgcgggagggtggggaacattaaatcctgggctcggcctcaggccgacagagccgaaagtggcctcgggaacctatgcctgttaaaaaaagaactacaagtcccagcaggctgagcggctacggctctctggacctgctcgggattggagcgtaatgcaacgttctaggaaagagagtatttcttctgggtgtggccaacccggatttgtagttcccaggccggtgttcccgtatggtaaggtactcattactgttctggaaaggtttagatttttattccaaccgtattcttttgttagagaatgtacgaaattaacgacaagtgagagtacacataaagtctattttcttattgcttaatcttatgaggatgttacctgctgttcctagccatcaatgatgtagggataaaaaatacatgacgttaaagggtaggtgcattggctttcagcttatcagtttttaagctctgacaccgacccagactccagcctgtccagtgcaatggggtccacgtactgttccccgctgacccacgcgggcttgaaacaactatcagcagctattttgcaccaagtacaggttaaatggactccactttctccgctatccgtttcttacttacagttatacgtttgttaatccatttattttccttgatatgatggaggcgaaggggaattccctgaaaaacatcacctatttgttttagatgcaattacggttccagtcatcaaaacttgggagatcaggataattcatacaccatgcattgccttgtttttaaatgcacaatttactaacttttcatatatatgtatatatgtgtgtatatatgtgtgtatataagtgtgtatatatgtgcgtatatgtgtgtatatatgtgtatatatgtgtgtgtatatatgtatgtgtgtatatatgtgtgtgtgtacgtatgtatgtgtgtgtgtatatatatatgtaatcctgacgtaagtggactttgcgtctagcttcttttgcttataataacggttttgcttccaaggtcgtagtataatatcagtacagttagccctttgtactagtggattctgaatccctagacatctgtagattcaaccaaccacagatcaaaaatattcaggaaaaataaatgaatggttgcatctgcgccaaacgtgtacagacttttgtcttgtccatattccctaagcaatatagcaactatttacatagcagttactttgtattagatattataagtaatatataaatgatttaaaatatacagaaggaggtgcatcggttatgtgcaaatactacatctttttgtcaggggattggaaggacagagtctgaccctgtcacctatcctgagtgtgacatacagtcttggctcattgccacctctgtttctgacgctcaaccaatccttctgcctcaccgtgtagcttggactacaagctcaccatcatggcaggctaatttttgtacctttttttggtagacacaggttttcaccatgttacccaggctacacatttatatcagggacatgagcaactatgtattttggtatcttgtggacgggtgctcctggaaaccagtctccctggaaaccacaagacaactggacttcatttattttacagctctaatatttcattgattggatatacattttgtttacttttccatcagtaaacagttgagttgtttccacttgttgactattttgtatagtggtgctttgaacattcatgtgcaagtatttgtttgagtatatgttttgaattgtttggaattgctggatcgtgtagtaatttgatgtttaatttgtttgaagaactgacaaatgttttccacagcagctg

SEQ ID NO: 1889205 - DNA, 4001 bp, Homo sapiens; identical to SEQ ID NO: 1564483

SEQ ID NO: 1889206 - DNA, 4001 bp, Homo sapiens; identical to SEQ ID NO: 1564288

SEQ ID NO: 1889207 - DNA, 4001 bp, Homo sapiens; identical to SEQ ID NO: 1889073

SEQ ID NO: 1889208 - RNA, 19 nt, Artificial Sequence
  Description of Artificial Sequence: Synthetic oligonucleotide
  Sense strand starting at position 24 of SEQ ID NO: 1879189
gccugauacuacccuaguu

SEQ ID NO: 1889209 - RNA, 19 nt, Artificial Sequence
  Description of Artificial Sequence: Synthetic oligonucleotide
  Antisense strand to SEQ ID NO: 1889208
aacuaggguaguaucaggc

SEQ ID NO: 1889210 - RNA, 19 nt, Artificial Sequence
  Description of Artificial Sequence: Synthetic oligonucleotide
  Sense strand starting at position 80 of SEQ ID NO: 1879189
ucuaauaggcaaugcaaau

SEQ ID NO: 1889211 - RNA, 19 nt, Artificial Sequence
  Description of Artificial Sequence: Synthetic oligonucleotide
  Antisense strand to SEQ ID NO: 1889210
auuugcauugccuauuaga

SEQ ID NO: 1889212 - RNA, 19 nt, Artificial Sequence
  Description of Artificial Sequence: Synthetic oligonucleotide
  Sense strand starting at position 184 of SEQ ID NO: 1879189
auuggaaguuaguugugaa

SEQ ID NO: 1889213 - RNA, 19 nt, Artificial Sequence
  Description of Artificial Sequence: Synthetic oligonucleotide
  Antisense strand to SEQ ID NO: 1889212
uucacaacuaacuuccaau

SEQ ID NO: 1889214 - RNA, 19 nt, Artificial Sequence
  Description of Artificial Sequence: Synthetic oligonucleotide
  Sense strand starting at position 185 of SEQ ID NO: 1879189
uuggaaguuaguugugaac

SEQ ID NO: 1889215 - RNA, 19 nt, Artificial Sequence
  Description of Artificial Sequence: Synthetic oligonucleotide
  Antisense strand to SEQ ID NO: 1889214
guucacaacuaacuuccaa

SEQ ID NO: 1889216 - RNA, 19 nt, Artificial Sequence
  Description of Artificial Sequence: Synthetic oligonucleotide
  Sense strand starting at position 243 of SEQ ID NO: 1879189
uguguucugugacccaaau

SEQ ID NO: 1889217 - RNA, 19 nt, Artificial Sequence
  Description of Artificial Sequence: Synthetic oligonucleotide
  Antisense strand to SEQ ID NO: 1889216
auuugggucacagaacaca

SEQ ID NO: 1889218 - RNA, 19 nt, Artificial Sequence
  Description of Artificial Sequence: Synthetic oligonucleotide
  Sense strand starting at position 271 of SEQ ID NO: 1879189
ccuuauguucugugaucca

SEQ ID NO: 1889219 - RNA, 19 nt, Artificial Sequence
  Description of Artificial Sequence: Synthetic oligonucleotide
  Antisense strand to SEQ ID NO: 1889218
uggaucacagaacauaagg

SEQ ID NO: 1889220 - RNA, 19 nt, Artificial Sequence
  Description of Artificial Sequence: Synthetic oligonucleotide
  Sense strand starting at position 434 of SEQ ID NO: 1879189
uggguuagcuucuuuauag

SEQ ID NO: 1889221 - RNA, 19 nt, Artificial Sequence
  Description of Artificial Sequence: Synthetic oligonucleotide
  Antisense strand to SEQ ID NO: 1889220
cuauaaagaagcuaaccca

SEQ ID NO: 1889222 - RNA, 19 nt, Artificial Sequence
  Description of Artificial Sequence: Synthetic oligonucleotide
  Sense strand starting at position 435 of SEQ ID NO: 1879189
ggguuagcuucuuuauaga

SEQ ID NO: 1889223 - RNA, 19 nt, Artificial Sequence
  Description of Artificial Sequence: Synthetic oligonucleotide
  Antisense strand to SEQ ID NO: 1889222
ucuauaaagaagcuaaccc

SEQ ID NO: 1889224 - RNA, 19 nt, Artificial Sequence
  Description of Artificial Sequence: Synthetic oligonucleotide
  Sense strand starting at position 527 of SEQ ID NO: 1879189
accugucauuggcccuaga

SEQ ID NO: 1889225 - RNA, 19 nt, Artificial Sequence
  Description of Artificial Sequence: Synthetic oligonucleotide
  Antisense strand to SEQ ID NO: 1889224
ucuagggccaaugacaggu

SEQ ID NO: 1889226 - RNA, 19 nt, Artificial Sequence
  Description of Artificial Sequence: Synthetic oligonucleotide
  Sense strand starting at position 618 of SEQ ID NO: 1879189
gaguaacaauggcuacuau

SEQ ID NO: 1889227 - RNA, 19 nt, Artificial Sequence
  Description of Artificial Sequence: Synthetic oligonucleotide
  Antisense strand to SEQ ID NO: 1889226
auaguagccauuguuacuc

SEQ ID NO: 1889228 - RNA, 19 nt, Artificial Sequence
  Description of Artificial Sequence: Synthetic oligonucleotide
  Sense strand starting at position 654 of SEQ ID NO: 1879189
ugugucaggcauuauaaua

SEQ ID NO: 1889229 - RNA, 19 nt, Artificial Sequence
  Description of Artificial Sequence: Synthetic oligonucleotide
  Antisense strand to SEQ ID NO: 1889228
uauuauaaugccugacaca

SEQ ID NO: 1889230 - RNA, 19 nt, Artificial Sequence
  Description of Artificial Sequence: Synthetic oligonucleotide
  Sense strand starting at position 674 of SEQ ID NO: 1879189
gccuucuggagaggguuau

SEQ ID NO: 1889231 - RNA, 19 nt, Artificial Sequence
  Description of Artificial Sequence: Synthetic oligonucleotide
  Antisense strand to SEQ ID NO: 1889230
auaacccucuccagaaggc

SEQ ID NO: 1889232 - RNA, 19 nt, Artificial Sequence
  Description of Artificial Sequence: Synthetic oligonucleotide
  Sense strand starting at position 685 of SEQ ID NO: 1879189
aggguuauucauggagucu

SEQ ID NO: 1889233 - RNA, 19 nt, Artificial Sequence
  Description of Artificial Sequence: Synthetic oligonucleotide
  Antisense strand to SEQ ID NO: 1889232
agacuccaugaauaacccu

SEQ ID NO: 1889234 - RNA, 19 nt, Artificial Sequence
  Description of Artificial Sequence: Synthetic oligonucleotide
  Sense strand starting at position 751 of SEQ ID NO: 1879189
aggaaaucgagucacugua

SEQ ID NO: 1889235 - RNA, 19 nt, Artificial Sequence
  Description of Artificial Sequence: Synthetic oligonucleotide
  Antisense strand to SEQ ID NO: 1889234
uacagugacucgauuuccu

SEQ ID NO: 1889236 - RNA, 19 nt, Artificial Sequence
  Description of Artificial Sequence: Synthetic oligonucleotide
  Sense strand starting at position 753 of SEQ ID NO: 1879189
gaaaucgagucacuguauu

SEQ ID NO: 1889237 - RNA, 19 nt, Artificial Sequence
  Description of Artificial Sequence: Synthetic oligonucleotide
  Antisense strand to SEQ ID NO: 1889236
aauacagugacucgauuuc

SEQ ID NO: 1889238 - RNA, 19 nt, Artificial Sequence
  Description of Artificial Sequence: Synthetic oligonucleotide
  Sense strand starting at position 864 of SEQ ID NO: 1879189
ccuagaguucccgggaucu

SEQ ID NO: 1889239 - RNA, 19 nt, Artificial Sequence
  Description of Artificial Sequence: Synthetic oligonucleotide
  Antisense strand to SEQ ID NO: 1889238
agaucccgggaacucuagg

SEQ ID NO: 1889240 - RNA, 19 nt, Artificial Sequence
  Description of Artificial Sequence: Synthetic oligonucleotide
  Sense strand starting at position 891 of SEQ ID NO: 1879189
agguaauagcuacauucuu

SEQ ID NO: 1889241 - RNA, 19 nt, Artificial Sequence
  Description of Artificial Sequence: Synthetic oligonucleotide
  Antisense strand to SEQ ID NO: 1889240
aagaauguagcuauuaccu

SEQ ID NO: 1889242 - RNA, 19 nt, Artificial Sequence
  Description of Artificial Sequence: Synthetic oligonucleotide
  Sense strand starting at position 956 of SEQ ID NO: 1879189
gggugucucuugagaagag

SEQ ID NO: 1889243 - RNA, 19 nt, Artificial Sequence
  Description of Artificial Sequence: Synthetic oligonucleotide
  Antisense strand to SEQ ID NO: 1889242
cucuucucaagagacaccc

SEQ ID NO: 1889244 - RNA, 19 nt, Artificial Sequence
  Description of Artificial Sequence: Synthetic oligonucleotide
  Sense strand starting at position 1057 of SEQ ID NO: 1879189
guacaagaaauccguauug

SEQ ID NO: 1889245 - RNA, 19 nt, Artificial Sequence
  Description of Artificial Sequence: Synthetic oligonucleotide
  Antisense strand to SEQ ID NO: 1889244
caauacggauuucuuguac

SEQ ID NO: 1889246 - RNA, 19 nt, Artificial Sequence
  Description of Artificial Sequence: Synthetic oligonucleotide
  Sense strand starting at position 1340 of SEQ ID NO: 1879189
uggugagugcugugaauaa

SEQ ID NO: 1889247 - RNA, 19 nt, Artificial Sequence
  Description of Artificial Sequence: Synthetic oligonucleotide
  Antisense strand to SEQ ID NO: 1889246
uuauucacagcacucacca

SEQ ID NO: 1889248 - RNA, 19 nt, Artificial Sequence
  Description of Artificial Sequence: Synthetic oligonucleotide
  Sense strand starting at position 1344 of SEQ ID NO: 1879189
gagugcugugaauaauaug

SEQ ID NO: 1889249 - RNA, 19 nt, Artificial Sequence
  Description of Artificial Sequence: Synthetic oligonucleotide
  Antisense strand to SEQ ID NO: 1889248
cauauuauucacagcacuc

SEQ ID NO: 1889250 - RNA, 19 nt, Artificial Sequence
  Description of Artificial Sequence: Synthetic oligonucleotide
  Sense strand starting at position 1378 of SEQ ID NO: 1879189
acgugaaagguacacuuaa

SEQ ID NO: 1889251 - RNA, 19 nt, Artificial Sequence
  Description of Artificial Sequence: Synthetic oligonucleotide
  Antisense strand to SEQ ID NO: 1889250
uuaaguguaccuuucacgu

SEQ ID NO: 1889252 - RNA, 19 nt, Artificial Sequence
  Description of Artificial Sequence: Synthetic oligonucleotide
  Sense strand starting at position 1400 of SEQ ID NO: 1879189
ugcgaaagaugguaaauuu

SEQ ID NO: 1889253 - RNA, 19 nt, Artificial Sequence
  Description of Artificial Sequence: Synthetic oligonucleotide
  Antisense strand to SEQ ID NO: 1889252
aaauuuaccaucuuucgca

SEQ ID NO: 1889254 - RNA, 19 nt, Artificial Sequence
  Description of Artificial Sequence: Synthetic oligonucleotide
  Sense strand starting at position 1521 of SEQ ID NO: 1879189
ucuuucuguuaacugagaa

SEQ ID NO: 1889255 - RNA, 19 nt, Artificial Sequence
  Description of Artificial Sequence: Synthetic oligonucleotide
  Antisense strand to SEQ ID NO: 1889254
uucucaguuaacagaaaga

SEQ ID NO: 1889256 - RNA, 19 nt, Artificial Sequence
  Description of Artificial Sequence: Synthetic oligonucleotide
  Sense strand starting at position 1540 of SEQ ID NO: 1879189
agcagaucauucuuugaau

SEQ ID NO: 1889257 - RNA, 19 nt, Artificial Sequence
  Description of Artificial Sequence: Synthetic oligonucleotide
  Antisense strand to SEQ ID NO: 1889256
auucaaagaaugaucugcu

SEQ ID NO: 1889258 - RNA, 19 nt, Artificial Sequence
  Description of Artificial Sequence: Synthetic oligonucleotide
  Sense strand starting at position 1541 of SEQ ID NO: 1879189
gcagaucauucuuugaauu

SEQ ID NO: 1889259 - RNA, 19 nt, Artificial Sequence
  Description of Artificial Sequence: Synthetic oligonucleotide
  Antisense strand to SEQ ID NO: 1889258
aauucaaagaaugaucugc

SEQ ID NO: 1889260 - RNA, 19 nt, Artificial Sequence
  Description of Artificial Sequence: Synthetic oligonucleotide
  Sense strand starting at position 2208 of SEQ ID NO: 1879189
uggcacugcuaacuagaaa

SEQ ID NO: 1889261 - RNA, 19 nt, Artificial Sequence
  Description of Artificial Sequence: Synthetic oligonucleotide
  Antisense strand to SEQ ID NO: 1889260
uuucuaguuagcagugcca

SEQ ID NO: 1889262 - RNA, 19 nt, Artificial Sequence
  Description of Artificial Sequence: Synthetic oligonucleotide
  Sense strand starting at position 2225 of SEQ ID NO: 1879189
aauagucuuggauaagcca

SEQ ID NO: 1889263 - RNA, 19 nt, Artificial Sequence
  Description of Artificial Sequence: Synthetic oligonucleotide
  Antisense strand to SEQ ID NO: 1889262
uggcuuauccaagacuauu

SEQ ID NO: 1889264 - RNA, 19 nt, Artificial Sequence
  Description of Artificial Sequence: Synthetic oligonucleotide
  Sense strand starting at position 2672 of SEQ ID NO: 1879189
cccugugaccuuuaucauc

SEQ ID NO: 1889265 - RNA, 19 nt, Artificial Sequence
  Description of Artificial Sequence: Synthetic oligonucleotide
  Antisense strand to SEQ ID NO: 1889264
gaugauaaaggucacaggg

SEQ ID NO: 1889266 - RNA, 19 nt, Artificial Sequence
  Description of Artificial Sequence: Synthetic oligonucleotide
  Sense strand starting at position 2708 of SEQ ID NO: 1879189
guuuauugucugggaggac

SEQ ID NO: 1889267 - RNA, 19 nt, Artificial Sequence
  Description of Artificial Sequence: Synthetic oligonucleotide
  Antisense strand to SEQ ID NO: 1889266
guccucccagacaauaaac

SEQ ID NO: 1889268 - RNA, 19 nt, Artificial Sequence
  Description of Artificial Sequence: Synthetic oligonucleotide
  Sense strand starting at position 2782 of SEQ ID NO: 1879189
uuuguaggugcucagcaaa

SEQ ID NO: 1889269 - RNA, 19 nt, Artificial Sequence
  Description of Artificial Sequence: Synthetic oligonucleotide
  Antisense strand to SEQ ID NO: 1889268
uuugcugagcaccuacaaa

SEQ ID NO: 1889270 - RNA, 19 nt, Artificial Sequence
  Description of Artificial Sequence: Synthetic oligonucleotide
  Sense strand starting at position 2800 of SEQ ID NO: 1879189
augccuauggagugagaga

SEQ ID NO: 1889271 - RNA, 19 nt, Artificial Sequence
  Description of Artificial Sequence: Synthetic oligonucleotide
  Antisense strand to SEQ ID NO: 1889270
ucucucacuccauaggcau

SEQ ID NO: 1889272 - RNA, 19 nt, Artificial Sequence
  Description of Artificial Sequence: Synthetic oligonucleotide
  Sense strand starting at position 2932 of SEQ ID NO: 1879189
gguugaugucaccauugga

SEQ ID NO: 1889273 - RNA, 19 nt, Artificial Sequence
  Description of Artificial Sequence: Synthetic oligonucleotide
  Antisense strand to SEQ ID NO: 1889272
uccaauggugacaucaacc

SEQ ID NO: 1889274 - RNA, 19 nt, Artificial Sequence
  Description of Artificial Sequence: Synthetic oligonucleotide
  Sense strand starting at position 3078 of SEQ ID NO: 1879189
augggaauaucagaaacau

SEQ ID NO: 1889275 - RNA, 19 nt, Artificial Sequence
  Description of Artificial Sequence: Synthetic oligonucleotide
  Antisense strand to SEQ ID NO: 1889274
auguuucugauauucccau

SEQ ID NO: 1889276 - RNA, 19 nt, Artificial Sequence
  Description of Artificial Sequence: Synthetic oligonucleotide
  Sense strand starting at position 3130 of SEQ ID NO: 1879189
cugguucuagagugucaua

SEQ ID NO: 1889277 - RNA, 19 nt, Artificial Sequence
  Description of Artificial Sequence: Synthetic oligonucleotide
  Antisense strand to SEQ ID NO: 1889276
uaugacacucuagaaccag

SEQ ID NO: 1889278 - RNA, 19 nt, Artificial Sequence
  Description of Artificial Sequence: Synthetic oligonucleotide
  Sense strand starting at position 3216 of SEQ ID NO: 1879189
auaguauggugguugagaa

SEQ ID NO: 1889279 - RNA, 19 nt, Artificial Sequence
  Description of Artificial Sequence: Synthetic oligonucleotide
  Antisense strand to SEQ ID NO: 1889278
uucucaaccaccauacuau

SEQ ID NO: 1889280 - RNA, 19 nt, Artificial Sequence
  Description of Artificial Sequence: Synthetic oligonucleotide
  Sense strand starting at position 3217 of SEQ ID NO: 1879189
uaguauggugguugagaaa

SEQ ID NO: 1889281 - RNA, 19 nt, Artificial Sequence
  Description of Artificial Sequence: Synthetic oligonucleotide
  Antisense strand to SEQ ID NO: 1889280
uuucucaaccaccauacua

SEQ ID NO: 1889282 - RNA, 19 nt, Artificial Sequence
  Description of Artificial Sequence: Synthetic oligonucleotide
  Sense strand starting at position 3323 of SEQ ID NO: 1879189
aguuuccaaguuugucaaa

SEQ ID NO: 1889283 - RNA, 19 nt, Artificial Sequence
  Description of Artificial Sequence: Synthetic oligonucleotide
  Antisense strand to SEQ ID NO: 1889282
uuugacaaacuuggaaacu

SEQ ID NO: 1889284 - RNA, 19 nt, Artificial Sequence
  Description of Artificial Sequence: Synthetic oligonucleotide
  Sense strand starting at position 3324 of SEQ ID NO: 1879189
guuuccaaguuugucaaau

SEQ ID NO: 1889285 - RNA, 19 nt, Artificial Sequence
  Description of Artificial Sequence: Synthetic oligonucleotide
  Antisense strand to SEQ ID NO: 1889284
auuugacaaacuuggaaac

SEQ ID NO: 1889286 - RNA, 19 nt, Artificial Sequence
  Description of Artificial Sequence: Synthetic oligonucleotide
  Sense strand starting at position 3325 of SEQ ID NO: 1879189
uuuccaaguuugucaaaug

SEQ ID NO: 1889287 - RNA, 19 nt, Artificial Sequence
  Description of Artificial Sequence: Synthetic oligonucleotide
  Antisense strand to SEQ ID NO: 1889286
cauuugacaaacuuggaaa

SEQ ID NO: 1889288 - RNA, 19 nt, Artificial Sequence
  Description of Artificial Sequence: Synthetic oligonucleotide
  Sense strand starting at position 2252 of SEQ ID NO: 1879190
guaggagguaacugaaauu

SEQ ID NO: 1889289 - RNA, 19 nt, Artificial Sequence
  Description of Artificial Sequence: Synthetic oligonucleotide
  Antisense strand to SEQ ID NO: 1889288
aauuucaguuaccuccuac

SEQ ID NO: 1889290 - RNA, 19 nt, Artificial Sequence
  Description of Artificial Sequence: Synthetic oligonucleotide
  Sense strand starting at position 2282 of SEQ ID NO: 1879190
gcgguaaucccauacagau

SEQ ID NO: 1889291 - RNA, 19 nt, Artificial Sequence
  Description of Artificial Sequence: Synthetic oligonucleotide
  Antisense strand to SEQ ID NO: 1889290
aucuguaugggauuaccgc

SEQ ID NO: 1889292 - RNA, 19 nt, Artificial Sequence
  Description of Artificial Sequence: Synthetic oligonucleotide
  Sense strand starting at position 2329 of SEQ ID NO: 1879190
aagaccucaugguugcaua

SEQ ID NO: 1889293 - RNA, 19 nt, Artificial Sequence
  Description of Artificial Sequence: Synthetic oligonucleotide
  Antisense strand to SEQ ID NO: 1889292
uaugcaaccaugaggucuu

SEQ ID NO: 1889294 - RNA, 19 nt, Artificial Sequence
  Description of Artificial Sequence: Synthetic oligonucleotide
  Sense strand starting at position 2330 of SEQ ID NO: 1879190
agaccucaugguugcauaa

SEQ ID NO: 1889295 - RNA, 19 nt, Artificial Sequence
  Description of Artificial Sequence: Synthetic oligonucleotide
  Antisense strand to SEQ ID NO: 1889294
uuaugcaaccaugaggucu

SEQ ID NO: 1889296 - RNA, 19 nt, Artificial Sequence
  Description of Artificial Sequence: Synthetic oligonucleotide
  Sense strand starting at position 2464 of SEQ ID NO: 1879190
ggaacugugaguggauuga

SEQ ID NO: 1889297 - RNA, 19 nt, Artificial Sequence
  Description of Artificial Sequence: Synthetic oligonucleotide
  Antisense strand to SEQ ID NO: 1889296
ucaauccacucacaguucc

SEQ ID NO: 1889298 - RNA, 19 nt, Artificial Sequence
  Description of Artificial Sequence: Synthetic oligonucleotide
  Sense strand starting at position 2468 of SEQ ID NO: 1879190
cugugaguggauugaaucu

SEQ ID NO: 1889299 - RNA, 19 nt, Artificial Sequence
  Description of Artificial Sequence: Synthetic oligonucleotide
  Antisense strand to SEQ ID NO: 1889298
agauucaauccacucacag

SEQ ID NO: 1889300 - RNA, 19 nt, Artificial Sequence
  Description of Artificial Sequence: Synthetic oligonucleotide
  Sense strand starting at position 2645 of SEQ ID NO: 1879190
agucuuuauauaugugugu

SEQ ID NO: 1889301 - RNA, 19 nt, Artificial Sequence
  Description of Artificial Sequence: Synthetic oligonucleotide
  Antisense strand to SEQ ID NO: 1889300
acacacauauauaaagacu

SEQ ID NO: 1889302 - RNA, 19 nt, Artificial Sequence
  Description of Artificial Sequence: Synthetic oligonucleotide
  Sense strand starting at position 2646 of SEQ ID NO: 1879190
gucuuuauauaugugugua

SEQ ID NO: 1889303 - RNA, 19 nt, Artificial Sequence
  Description of Artificial Sequence: Synthetic oligonucleotide
  Antisense strand to SEQ ID NO: 1889302
uacacacauauauaaagac

SEQ ID NO: 1889304 - RNA, 19 nt, Artificial Sequence
  Description of Artificial Sequence: Synthetic oligonucleotide
  Sense strand starting at position 2703 of SEQ ID NO: 1879190
guuugugauauccgucacu

SEQ ID NO: 1889305 - RNA, 19 nt, Artificial Sequence
  Description of Artificial Sequence: Synthetic oligonucleotide
  Antisense strand to SEQ ID NO: 1889304
agugacggauaucacaaac

SEQ ID NO: 1889306 - RNA, 19 nt, Artificial Sequence
  Description of Artificial Sequence: Synthetic oligonucleotide
  Sense strand starting at position 2706 of SEQ ID NO: 1879190
ugugauauccgucacuaau

SEQ ID NO: 1889307 - RNA, 19 nt, Artificial Sequence
  Description of Artificial Sequence: Synthetic oligonucleotide
  Antisense strand to SEQ ID NO: 1889306
auuagugacggauaucaca

SEQ ID NO: 1889308 - RNA, 19 nt, Artificial Sequence
  Description of Artificial Sequence: Synthetic oligonucleotide
  Sense strand starting at position 2708 of SEQ ID NO: 1879190
ugauauccgucacuaauag

SEQ ID NO: 1889309 - RNA, 19 nt, Artificial Sequence
  Description of Artificial Sequence: Synthetic oligonucleotide
  Antisense strand to SEQ ID NO: 1889308
cuauuagugacggauauca

SEQ ID NO: 1889310 - RNA, 19 nt, Artificial Sequence
  Description of Artificial Sequence: Synthetic oligonucleotide
  Sense strand starting at position 2709 of SEQ ID NO: 1879190
gauauccgucacuaauaga

SEQ ID NO: 1889311 - RNA, 19 nt, Artificial Sequence
  Description of Artificial Sequence: Synthetic oligonucleotide
  Antisense strand to SEQ ID NO: 1889310
ucuauuagugacggauauc

SEQ ID NO: 1889312 - RNA, 19 nt, Artificial Sequence
  Description of Artificial Sequence: Synthetic oligonucleotide
  Sense strand starting at position 2802 of SEQ ID NO: 1879190
acagacauauuaugugaua

SEQ ID NO: 1889313 - RNA, 19 nt, Artificial Sequence
  Description of Artificial Sequence: Synthetic oligonucleotide
  Antisense strand to SEQ ID NO: 1889312
uaucacauaauaugucugu

SEQ ID NO: 1889314 - RNA, 19 nt, Artificial Sequence
  Description of Artificial Sequence: Synthetic oligonucleotide
  Sense strand starting at position 2915 of SEQ ID NO: 1879190
ucucaaagcccaugaauug

SEQ ID NO: 1889315 - RNA, 19 nt, Artificial Sequence
  Description of Artificial Sequence: Synthetic oligonucleotide
  Antisense strand to SEQ ID NO: 1889314
caauucaugggcuuugaga

SEQ ID NO: 1889316 - RNA, 19 nt, Artificial Sequence
  Description of Artificial Sequence: Synthetic oligonucleotide
  Sense strand starting at position 2922 of SEQ ID NO: 1879190
gcccaugaauuggagaaac

SEQ ID NO: 1889317 - RNA, 19 nt, Artificial Sequence
  Description of Artificial Sequence: Synthetic oligonucleotide
  Antisense strand to SEQ ID NO: 1889316
guuucuccaauucaugggc

SEQ ID NO: 1889318 - RNA, 19 nt, Artificial Sequence
  Description of Artificial Sequence: Synthetic oligonucleotide
  Sense strand starting at position 3091 of SEQ ID NO: 1879190
auguaauguaagugaaaug

SEQ ID NO: 1889319 - RNA, 19 nt, Artificial Sequence
  Description of Artificial Sequence: Synthetic oligonucleotide
  Antisense strand to SEQ ID NO: 1889318
cauuucacuuacauuacau

SEQ ID NO: 1889320 - RNA, 19 nt, Artificial Sequence
  Description of Artificial Sequence: Synthetic oligonucleotide
  Sense strand starting at position 3107 of SEQ ID NO: 1879190
augcuaugaaagggaguaa

SEQ ID NO: 1889321 - RNA, 19 nt, Artificial Sequence
  Description of Artificial Sequence: Synthetic oligonucleotide
  Antisense strand to SEQ ID NO: 1889320
uuacucccuuucauagcau

SEQ ID NO: 1889322 - RNA, 19 nt, Artificial Sequence
  Description of Artificial Sequence: Synthetic oligonucleotide
  Sense strand starting at position 3121 of SEQ ID NO: 1879190
aguaauaguacagguagga

SEQ ID NO: 1889323 - RNA, 19 nt, Artificial Sequence
  Description of Artificial Sequence: Synthetic oligonucleotide
  Antisense strand to SEQ ID NO: 1889322
uccuaccuguacuauuacu

SEQ ID NO: 1889324 - RNA, 19 nt, Artificial Sequence
  Description of Artificial Sequence: Synthetic oligonucleotide
  Sense strand starting at position 3199 of SEQ ID NO: 1879190
guaggugauguucaggaga

SEQ ID NO: 1889325 - RNA, 19 nt, Artificial Sequence
  Description of Artificial Sequence: Synthetic oligonucleotide
  Antisense strand to SEQ ID NO: 1889324
ucuccugaacaucaccuac

SEQ ID NO: 1889326 - RNA, 19 nt, Artificial Sequence
  Description of Artificial Sequence: Synthetic oligonucleotide
  Sense strand starting at position 3201 of SEQ ID NO: 1879190
aggugauguucaggagaca

SEQ ID NO: 1889327 - RNA, 19 nt, Artificial Sequence
  Description of Artificial Sequence: Synthetic oligonucleotide
  Antisense strand to SEQ ID NO: 1889326
ugucuccugaacaucaccu

SEQ ID NO: 1889328 - RNA, 19 nt, Artificial Sequence
  Description of Artificial Sequence: Synthetic oligonucleotide
  Sense strand starting at position 3232 of SEQ ID NO: 1879190
acagguuucuguucucaga

SEQ ID NO: 1889329 - RNA, 19 nt, Artificial Sequence
  Description of Artificial Sequence: Synthetic oligonucleotide
  Antisense strand to SEQ ID NO: 1889328
ucugagaacagaaaccugu

SEQ ID NO: 1889330 - RNA, 19 nt, Artificial Sequence
  Description of Artificial Sequence: Synthetic oligonucleotide
  Sense strand starting at position 3309 of SEQ ID NO: 1879190
caguacuaacagugaugau

SEQ ID NO: 1889331 - RNA, 19 nt, Artificial Sequence
  Description of Artificial Sequence: Synthetic oligonucleotide
  Antisense strand to SEQ ID NO: 1889330
aucaucacuguuaguacug

SEQ ID NO: 1889332 - RNA, 19 nt, Artificial Sequence
  Description of Artificial Sequence: Synthetic oligonucleotide
  Sense strand starting at position 3386 of SEQ ID NO: 1879190
uuuccaucaggguauuaua

SEQ ID NO: 1889333 - RNA, 19 nt, Artificial Sequence
  Description of Artificial Sequence: Synthetic oligonucleotide
  Antisense strand to SEQ ID NO: 1889332
uauaauacccugauggaaa

SEQ ID NO: 1889334 - RNA, 19 nt, Artificial Sequence
  Description of Artificial Sequence: Synthetic oligonucleotide
  Sense strand starting at position 3397 of SEQ ID NO: 1879190
guauuauagacuggauggu

SEQ ID NO: 1889335 - RNA, 19 nt, Artificial Sequence
  Description of Artificial Sequence: Synthetic oligonucleotide
  Antisense strand to SEQ ID NO: 1889334
accauccagucuauaauac

SEQ ID NO: 1889336 - RNA, 19 nt, Artificial Sequence
  Description of Artificial Sequence: Synthetic oligonucleotide
  Sense strand starting at position 3437 of SEQ ID NO: 1879190
gagugacuuuaugauguga

SEQ ID NO: 1889337 - RNA, 19 nt, Artificial Sequence
  Description of Artificial Sequence: Synthetic oligonucleotide
  Antisense strand to SEQ ID NO: 1889336
ucacaucauaaagucacuc

SEQ ID NO: 1889338 - RNA, 19 nt, Artificial Sequence
  Description of Artificial Sequence: Synthetic oligonucleotide
  Sense strand starting at position 3442 of SEQ ID NO: 1879190
acuuuaugaugugauuuga

SEQ ID NO: 1889339 - RNA, 19 nt, Artificial Sequence
  Description of Artificial Sequence: Synthetic oligonucleotide
  Antisense strand to SEQ ID NO: 1889338
ucaaaucacaucauaaagu

SEQ ID NO: 1889340 - RNA, 19 nt, Artificial Sequence
  Description of Artificial Sequence: Synthetic oligonucleotide
  Sense strand starting at position 3464 of SEQ ID NO: 1879190
auuagaaguguccagucau

SEQ ID NO: 1889341 - RNA, 19 nt, Artificial Sequence
  Description of Artificial Sequence: Synthetic oligonucleotide
  Antisense strand to SEQ ID NO: 1889340
augacuggacacuucuaau

SEQ ID NO: 1889342 - RNA, 19 nt, Artificial Sequence
  Description of Artificial Sequence: Synthetic oligonucleotide
  Sense strand starting at position 3474 of SEQ ID NO: 1879190
uccagucauuuagagauca

SEQ ID NO: 1889343 - RNA, 19 nt, Artificial Sequence
  Description of Artificial Sequence: Synthetic oligonucleotide
  Antisense strand to SEQ ID NO: 1889342
ugaucucuaaaugacugga

SEQ ID NO: 1889344 - RNA, 19 nt, Artificial Sequence
  Description of Artificial Sequence: Synthetic oligonucleotide
  Sense strand starting at position 3523 of SEQ ID NO: 1879190
agaguaaugucccaagaaa

SEQ ID NO: 1889345 - RNA, 19 nt, Artificial Sequence
  Description of Artificial Sequence: Synthetic oligonucleotide
  Antisense strand to SEQ ID NO: 1889344
uuucuugggacauuacucu

SEQ ID NO: 1889346 - RNA, 19 nt, Artificial Sequence
  Description of Artificial Sequence: Synthetic oligonucleotide
  Sense strand starting at position 3597 of SEQ ID NO: 1879190
ugugauaaagggugggaua

SEQ ID NO: 1889347 - RNA, 19 nt, Artificial Sequence
  Description of Artificial Sequence: Synthetic oligonucleotide
  Antisense strand to SEQ ID NO: 1889346
uaucccacccuuuaucaca

SEQ ID NO: 1889348 - RNA, 19 nt, Artificial Sequence
  Description of Artificial Sequence: Synthetic oligonucleotide
  Sense strand starting at position 3648 of SEQ ID NO: 1879190
cauguagaaccuuguagaa

SEQ ID NO: 1889349 - RNA, 19 nt, Artificial Sequence
  Description of Artificial Sequence: Synthetic oligonucleotide
  Antisense strand to SEQ ID NO: 1889348
uucuacaagguucuacaug

SEQ ID NO: 1889350 - RNA, 19 nt, Artificial Sequence
  Description of Artificial Sequence: Synthetic oligonucleotide
  Sense strand starting at position 3650 of SEQ ID NO: 1879190
uguagaaccuuguagaaca

SEQ ID NO: 1889351 - RNA, 19 nt, Artificial Sequence
  Description of Artificial Sequence: Synthetic oligonucleotide
  Antisense strand to SEQ ID NO: 1889350
uguucuacaagguucuaca

SEQ ID NO: 1889352 - RNA, 19 nt, Artificial Sequence
  Description of Artificial Sequence: Synthetic oligonucleotide
  Sense strand starting at position 3682 of SEQ ID NO: 1879190
agcuguuaaggcugugaca

SEQ ID NO: 1889353 - RNA, 19 nt, Artificial Sequence
  Description of Artificial Sequence: Synthetic oligonucleotide
  Antisense strand to SEQ ID NO: 1889352
ugucacagccuuaacagcu

SEQ ID NO: 1889354 - RNA, 19 nt, Artificial Sequence
  Description of Artificial Sequence: Synthetic oligonucleotide
  Sense strand starting at position 3684 of SEQ ID NO: 1879190
cuguuaaggcugugacaug

SEQ ID NO: 1889355 - RNA, 19 nt, Artificial Sequence
  Description of Artificial Sequence: Synthetic oligonucleotide
  Antisense strand to SEQ ID NO: 1889354
caugucacagccuuaacag

SEQ ID NO: 1889356 - RNA, 19 nt, Artificial Sequence
  Description of Artificial Sequence: Synthetic oligonucleotide
  Sense strand starting at position 3740 of SEQ ID NO: 1879190
cccugcuucugggaagaaa

SEQ ID NO: 1889357 - RNA, 19 nt, Artificial Sequence
  Description of Artificial Sequence: Synthetic oligonucleotide
  Antisense strand to SEQ ID NO: 1889356
uuucuucccagaagcaggg

SEQ ID NO: 1889358 - RNA, 19 nt, Artificial Sequence
  Description of Artificial Sequence: Synthetic oligonucleotide
  Sense strand starting at position 3758 of SEQ ID NO: 1879190
accagauuauaggaggaua

SEQ ID NO: 1889359 - RNA, 19 nt, Artificial Sequence
  Description of Artificial Sequence: Synthetic oligonucleotide
  Antisense strand to SEQ ID NO: 1889358
uauccuccuauaaucuggu

SEQ ID NO: 1889360 - RNA, 19 nt, Artificial Sequence
  Description of Artificial Sequence: Synthetic oligonucleotide
  Sense strand starting at position 3809 of SEQ ID NO: 1879190
uacagugguccaggaaaga

SEQ ID NO: 1889361 - RNA, 19 nt, Artificial Sequence
  Description of Artificial Sequence: Synthetic oligonucleotide
  Antisense strand to SEQ ID NO: 1889360
ucuuuccuggaccacugua

SEQ ID NO: 1889362 - RNA, 19 nt, Artificial Sequence
  Description of Artificial Sequence: Synthetic oligonucleotide
  Sense strand starting at position 3827 of SEQ ID NO: 1879190
aggugaguggcuuggacua

SEQ ID NO: 1889363 - RNA, 19 nt, Artificial Sequence
  Description of Artificial Sequence: Synthetic oligonucleotide
  Antisense strand to SEQ ID NO: 1889362
uaguccaagccacucaccu

SEQ ID NO: 1889364 - RNA, 19 nt, Artificial Sequence
  Description of Artificial Sequence: Synthetic oligonucleotide
  Sense strand starting at position 3846 of SEQ ID NO: 1879190
gggcauagacaagguauau

SEQ ID NO: 1889365 - RNA, 19 nt, Artificial Sequence
  Description of Artificial Sequence: Synthetic oligonucleotide
  Antisense strand to SEQ ID NO: 1889364
auauaccuugucuaugccc

SEQ ID NO: 1889366 - RNA, 19 nt, Artificial Sequence
  Description of Artificial Sequence: Synthetic oligonucleotide
  Sense strand starting at position 3880 of SEQ ID NO: 1879190
gcaguagauuuaugaauag

SEQ ID NO: 1889367 - RNA, 19 nt, Artificial Sequence
  Description of Artificial Sequence: Synthetic oligonucleotide
  Antisense strand to SEQ ID NO: 1889366
cuauucauaaaucuacugc

SEQ ID NO: 1889368 - RNA, 19 nt, Artificial Sequence
  Description of Artificial Sequence: Synthetic oligonucleotide
  Sense strand starting at position 26 of SEQ ID NO: 1879191
gguugugugcggaggucaa

SEQ ID NO: 1889369 - RNA, 19 nt, Artificial Sequence
  Description of Artificial Sequence: Synthetic oligonucleotide
  Antisense strand to SEQ ID NO: 1889368
uugaccuccgcacacaacc

SEQ ID NO: 1889370 - RNA, 19 nt, Artificial Sequence
  Description of Artificial Sequence: Synthetic oligonucleotide
  Sense strand starting at position 69 of SEQ ID NO: 1879191
ucggcuuccugcccagaga

SEQ ID NO: 1889371 - RNA, 19 nt, Artificial Sequence
  Description of Artificial Sequence: Synthetic oligonucleotide
  Antisense strand to SEQ ID NO: 1889370
ucucugggcaggaagccga

SEQ ID NO: 1889372 - RNA, 19 nt, Artificial Sequence
  Description of Artificial Sequence: Synthetic oligonucleotide
  Sense strand starting at position 168 of SEQ ID NO: 1879191
ugguaagguccugacucuu

SEQ ID NO: 1889373 - RNA, 19 nt, Artificial Sequence
  Description of Artificial Sequence: Synthetic oligonucleotide
  Antisense strand to SEQ ID NO: 1889372
aagagucaggaccuuacca

SEQ ID NO: 1889374 - RNA, 19 nt, Artificial Sequence
  Description of Artificial Sequence: Synthetic oligonucleotide
  Sense strand starting at position 174 of SEQ ID NO: 1879191
gguccugacucuuuccaaa

SEQ ID NO: 1889375 - RNA, 19 nt, Artificial Sequence
  Description of Artificial Sequence: Synthetic oligonucleotide
  Antisense strand to SEQ ID NO: 1889374
uuuggaaagagucaggacc

SEQ ID NO: 1889376 - RNA, 19 nt, Artificial Sequence
  Description of Artificial Sequence: Synthetic oligonucleotide
  Sense strand starting at position 417 of SEQ ID NO: 1879191
aagcuuuggcuuugagaca

SEQ ID NO: 1889377 - RNA, 19 nt, Artificial Sequence
  Description of Artificial Sequence: Synthetic oligonucleotide
  Antisense strand to SEQ ID NO: 1889376
ugucucaaagccaaagcuu

SEQ ID NO: 1889378 - RNA, 19 nt, Artificial Sequence
  Description of Artificial Sequence: Synthetic oligonucleotide
  Sense strand starting at position 449 of SEQ ID NO: 1879191
gggcguguguggauucguu

SEQ ID NO: 1889379 - RNA, 19 nt, Artificial Sequence
  Description of Artificial Sequence: Synthetic oligonucleotide
  Antisense strand to SEQ ID NO: 1889378
aacgaauccacacacgccc

SEQ ID NO: 1889380 - RNA, 19 nt, Artificial Sequence
  Description of Artificial Sequence: Synthetic oligonucleotide
  Sense strand starting at position 451 of SEQ ID NO: 1879191
gcguguguggauucguuua

SEQ ID NO: 1889381 - RNA, 19 nt, Artificial Sequence
  Description of Artificial Sequence: Synthetic oligonucleotide
  Antisense strand to SEQ ID NO: 1889380
uaaacgaauccacacacgc

SEQ ID NO: 1889382 - RNA, 19 nt, Artificial Sequence
  Description of Artificial Sequence: Synthetic oligonucleotide
  Sense strand starting at position 453 of SEQ ID NO: 1879191
guguguggauucguuuauu

SEQ ID NO: 1889383 - RNA, 19 nt, Artificial Sequence
  Description of Artificial Sequence: Synthetic oligonucleotide
  Antisense strand to SEQ ID NO: 1889382
aauaaacgaauccacacac

SEQ ID NO: 1889384 - RNA, 19 nt, Artificial Sequence
  Description of Artificial Sequence: Synthetic oligonucleotide
  Sense strand starting at position 1027 of SEQ ID NO: 1879191
gcccauuucugggugagca

SEQ ID NO: 1889385 - RNA, 19 nt, Artificial Sequence
  Description of Artificial Sequence: Synthetic oligonucleotide
  Antisense strand to SEQ ID NO: 1889384
ugcucacccagaaaugggc

SEQ ID NO: 1889386 - RNA, 19 nt, Artificial Sequence
  Description of Artificial Sequence: Synthetic oligonucleotide
  Sense strand starting at position 1544 of SEQ ID NO: 1879191
gguaccugagccugaaagu

SEQ ID NO: 1889387 - RNA, 19 nt, Artificial Sequence
  Description of Artificial Sequence: Synthetic oligonucleotide
  Antisense strand to SEQ ID NO: 1889386
acuuucaggcucagguacc

SEQ ID NO: 1889388 - RNA, 19 nt, Artificial Sequence
  Description of Artificial Sequence: Synthetic oligonucleotide
  Sense strand starting at position 2719 of SEQ ID NO: 1879191
agcguuuccugucugaagu

SEQ ID NO: 1889389 - RNA, 19 nt, Artificial Sequence
  Description of Artificial Sequence: Synthetic oligonucleotide
  Antisense strand to SEQ ID NO: 1889388
acuucagacaggaaacgcu

SEQ ID NO: 1889390 - RNA, 19 nt, Artificial Sequence
  Description of Artificial Sequence: Synthetic oligonucleotide
  Sense strand starting at position 2720 of SEQ ID NO: 1879191
gcguuuccugucugaaguc

SEQ ID NO: 1889391 - RNA, 19 nt, Artificial Sequence
  Description of Artificial Sequence: Synthetic oligonucleotide
  Antisense strand to SEQ ID NO: 1889390
gacuucagacaggaaacgc

SEQ ID NO: 1889392 - RNA, 19 nt, Artificial Sequence
  Description of Artificial Sequence: Synthetic oligonucleotide
  Sense strand starting at position 2746 of SEQ ID NO: 1879191
cugacaauucccgcguguu

SEQ ID NO: 1889393 - RNA, 19 nt, Artificial Sequence
  Description of Artificial Sequence: Synthetic oligonucleotide
  Antisense strand to SEQ ID NO: 1889392
aacacgcgggaauugucag

SEQ ID NO: 1889394 - RNA, 19 nt, Artificial Sequence
  Description of Artificial Sequence: Synthetic oligonucleotide
  Sense strand starting at position 2747 of SEQ ID NO: 1879191
ugacaauucccgcguguug

SEQ ID NO: 1889395 - RNA, 19 nt, Artificial Sequence
  Description of Artificial Sequence: Synthetic oligonucleotide
  Antisense strand to SEQ ID NO: 1889394
caacacgcgggaauuguca

SEQ ID NO: 1889396 - RNA, 19 nt, Artificial Sequence
  Description of Artificial Sequence: Synthetic oligonucleotide
  Sense strand starting at position 2749 of SEQ ID NO: 1879191
acaauucccgcguguugga

SEQ ID NO: 1889397 - RNA, 19 nt, Artificial Sequence
  Description of Artificial Sequence: Synthetic oligonucleotide
  Antisense strand to SEQ ID NO: 1889396
uccaacacgcgggaauugu

SEQ ID NO: 1889398 - RNA, 19 nt, Artificial Sequence
  Description of Artificial Sequence: Synthetic oligonucleotide
  Sense strand starting at position 2820 of SEQ ID NO: 1879191
ccaacucugugauggagaa

SEQ ID NO: 1889399 - RNA, 19 nt, Artificial Sequence
  Description of Artificial Sequence: Synthetic oligonucleotide
  Antisense strand to SEQ ID NO: 1889398
uucuccaucacagaguugg

SEQ ID NO: 1889400 - RNA, 19 nt, Artificial Sequence
  Description of Artificial Sequence: Synthetic oligonucleotide
  Sense strand starting at position 2821 of SEQ ID NO: 1879191
caacucugugauggagaau

SEQ ID NO: 1889401 - RNA, 19 nt, Artificial Sequence
  Description of Artificial Sequence: Synthetic oligonucleotide
  Antisense strand to SEQ ID NO: 1889400
auucuccaucacagaguug

SEQ ID NO: 1889402 - RNA, 19 nt, Artificial Sequence
  Description of Artificial Sequence: Synthetic oligonucleotide
  Sense strand starting at position 2870 of SEQ ID NO: 1879191
gcggauaucagccacaacu

SEQ ID NO: 1889403 - RNA, 19 nt, Artificial Sequence
  Description of Artificial Sequence: Synthetic oligonucleotide
  Antisense strand to SEQ ID NO: 1889402
aguuguggcugauauccgc

SEQ ID NO: 1889404 - RNA, 19 nt, Artificial Sequence
  Description of Artificial Sequence: Synthetic oligonucleotide
  Sense strand starting at position 2872 of SEQ ID NO: 1879191
ggauaucagccacaacucu

SEQ ID NO: 1889405 - RNA, 19 nt, Artificial Sequence
  Description of Artificial Sequence: Synthetic oligonucleotide
  Antisense strand to SEQ ID NO: 1889404
agaguuguggcugauaucc

SEQ ID NO: 1889406 - RNA, 19 nt, Artificial Sequence
  Description of Artificial Sequence: Synthetic oligonucleotide
  Sense strand starting at position 2915 of SEQ ID NO: 1879191
cuuauuugguucucacagu

SEQ ID NO: 1889407 - RNA, 19 nt, Artificial Sequence
  Description of Artificial Sequence: Synthetic oligonucleotide
  Antisense strand to SEQ ID NO: 1889406
acugugagaaccaaauaag

SEQ ID NO: 1889408 - RNA, 19 nt, Artificial Sequence
  Description of Artificial Sequence: Synthetic oligonucleotide
  Sense strand starting at position 3002 of SEQ ID NO: 1879191
ugaagugacucucaaaguc

SEQ ID NO: 1889409 - RNA, 19 nt, Artificial Sequence
  Description of Artificial Sequence: Synthetic oligonucleotide
  Antisense strand to SEQ ID NO: 1889408
gacuuugagagucacuuca

SEQ ID NO: 1889410 - RNA, 19 nt, Artificial Sequence
  Description of Artificial Sequence: Synthetic oligonucleotide
  Sense strand starting at position 3123 of SEQ ID NO: 1879191
cuacacaguugucagggau

SEQ ID NO: 1889411 - RNA, 19 nt, Artificial Sequence
  Description of Artificial Sequence: Synthetic oligonucleotide
  Antisense strand to SEQ ID NO: 1889410
aucccugacaacuguguag

SEQ ID NO: 1889412 - RNA, 19 nt, Artificial Sequence
  Description of Artificial Sequence: Synthetic oligonucleotide
  Sense strand starting at position 3171 of SEQ ID NO: 1879191
gccacucuuugcccaagaa

SEQ ID NO: 1889413 - RNA, 19 nt, Artificial Sequence
  Description of Artificial Sequence: Synthetic oligonucleotide
  Antisense strand to SEQ ID NO: 1889412
uucuugggcaaagaguggc

SEQ ID NO: 1889414 - RNA, 19 nt, Artificial Sequence
  Description of Artificial Sequence: Synthetic oligonucleotide
  Sense strand starting at position 3315 of SEQ ID NO: 1879191
gagccaguuucuccugaga

SEQ ID NO: 1889415 - RNA, 19 nt, Artificial Sequence
  Description of Artificial Sequence: Synthetic oligonucleotide
  Antisense strand to SEQ ID NO: 1889414
ucucaggagaaacuggcuc

SEQ ID NO: 1889416 - RNA, 19 nt, Artificial Sequence
  Description of Artificial Sequence: Synthetic oligonucleotide
  Sense strand starting at position 3318 of SEQ ID NO: 1879191
ccaguuucuccugagacua

SEQ ID NO: 1889417 - RNA, 19 nt, Artificial Sequence
  Description of Artificial Sequence: Synthetic oligonucleotide
  Antisense strand to SEQ ID NO: 1889416
uagucucaggagaaacugg

SEQ ID NO: 1889418 - RNA, 19 nt, Artificial Sequence
  Description of Artificial Sequence: Synthetic oligonucleotide
  Sense strand starting at position 3360 of SEQ ID NO: 1879191
uggacugagucuuugcaca

SEQ ID NO: 1889419 - RNA, 19 nt, Artificial Sequence
  Description of Artificial Sequence: Synthetic oligonucleotide
  Antisense strand to SEQ ID NO: 1889418
ugugcaaagacucagucca

SEQ ID NO: 1889420 - RNA, 19 nt, Artificial Sequence
  Description of Artificial Sequence: Synthetic oligonucleotide
  Sense strand starting at position 3362 of SEQ ID NO: 1879191
gacugagucuuugcacauu

SEQ ID NO: 1889421 - RNA, 19 nt, Artificial Sequence
  Description of Artificial Sequence: Synthetic oligonucleotide
  Antisense strand to SEQ ID NO: 1889420
aaugugcaaagacucaguc

SEQ ID NO: 1889422 - RNA, 19 nt, Artificial Sequence
  Description of Artificial Sequence: Synthetic oligonucleotide
  Sense strand starting at position 3373 of SEQ ID NO: 1879191
ugcacauucugcuuggaau

SEQ ID NO: 1889423 - RNA, 19 nt, Artificial Sequence
  Description of Artificial Sequence: Synthetic oligonucleotide
  Antisense strand to SEQ ID NO: 1889422
auuccaagcagaaugugca

SEQ ID NO: 1889424 - RNA, 19 nt, Artificial Sequence
  Description of Artificial Sequence: Synthetic oligonucleotide
  Sense strand starting at position 3374 of SEQ ID NO: 1879191
gcacauucugcuuggaaug

SEQ ID NO: 1889425 - RNA, 19 nt, Artificial Sequence
  Description of Artificial Sequence: Synthetic oligonucleotide
  Antisense strand to SEQ ID NO: 1889424
cauuccaagcagaaugugc

SEQ ID NO: 1889426 - RNA, 19 nt, Artificial Sequence
  Description of Artificial Sequence: Synthetic oligonucleotide
  Sense strand starting at position 3390 of SEQ ID NO: 1879191
augacugucuggcacauuu

SEQ ID NO: 1889427 - RNA, 19 nt, Artificial Sequence
  Description of Artificial Sequence: Synthetic oligonucleotide
  Antisense strand to SEQ ID NO: 1889426
aaaugugccagacagucau

SEQ ID NO: 1889428 - RNA, 19 nt, Artificial Sequence
  Description of Artificial Sequence: Synthetic oligonucleotide
  Sense strand starting at position 3588 of SEQ ID NO: 1879191
uaugaacuuuguuaggacu

SEQ ID NO: 1889429 - RNA, 19 nt, Artificial Sequence
  Description of Artificial Sequence: Synthetic oligonucleotide
  Antisense strand to SEQ ID NO: 1889428
aguccuaacaaaguucaua

SEQ ID NO: 1889430 - RNA, 19 nt, Artificial Sequence
  Description of Artificial Sequence: Synthetic oligonucleotide
  Sense strand starting at position 3590 of SEQ ID NO: 1879191
ugaacuuuguuaggacuga

SEQ ID NO: 1889431 - RNA, 19 nt, Artificial Sequence
  Description of Artificial Sequence: Synthetic oligonucleotide
  Antisense strand to SEQ ID NO: 1889430
ucaguccuaacaaaguuca

SEQ ID NO: 1889432 - RNA, 19 nt, Artificial Sequence
  Description of Artificial Sequence: Synthetic oligonucleotide
  Sense strand starting at position 3591 of SEQ ID NO: 1879191
gaacuuuguuaggacugau

SEQ ID NO: 1889433 - RNA, 19 nt, Artificial Sequence
  Description of Artificial Sequence: Synthetic oligonucleotide
  Antisense strand to SEQ ID NO: 1889432
aucaguccuaacaaaguuc

SEQ ID NO: 1889434 - RNA, 19 nt, Artificial Sequence
  Description of Artificial Sequence: Synthetic oligonucleotide
  Sense strand starting at position 3594 of SEQ ID NO: 1879191
cuuuguuaggacugauuaa

SEQ ID NO: 1889435 - RNA, 19 nt, Artificial Sequence
  Description of Artificial Sequence: Synthetic oligonucleotide
  Antisense strand to SEQ ID NO: 1889434
uuaaucaguccuaacaaag

SEQ ID NO: 1889436 - RNA, 19 nt, Artificial Sequence
  Description of Artificial Sequence: Synthetic oligonucleotide
  Sense strand starting at position 3621 of SEQ ID NO: 1879191
ggcugccacucauuguuua

SEQ ID NO: 1889437 - RNA, 19 nt, Artificial Sequence
  Description of Artificial Sequence: Synthetic oligonucleotide
  Antisense strand to SEQ ID NO: 1889436
uaaacaaugaguggcagcc

SEQ ID NO: 1889438 - RNA, 19 nt, Artificial Sequence
  Description of Artificial Sequence: Synthetic oligonucleotide
  Sense strand starting at position 3622 of SEQ ID NO: 1879191
gcugccacucauuguuuau

SEQ ID NO: 1889439 - RNA, 19 nt, Artificial Sequence
  Description of Artificial Sequence: Synthetic oligonucleotide
  Antisense strand to SEQ ID NO: 1889438
auaaacaaugaguggcagc

SEQ ID NO: 1889440 - RNA, 19 nt, Artificial Sequence
  Description of Artificial Sequence: Synthetic oligonucleotide
  Sense strand starting at position 3646 of SEQ ID NO: 1879191
cagguccuguacuaagaua

SEQ ID NO: 1889441 - RNA, 19 nt, Artificial Sequence
  Description of Artificial Sequence: Synthetic oligonucleotide
  Antisense strand to SEQ ID NO: 1889440
uaucuuaguacaggaccug

SEQ ID NO: 1889442 - RNA, 19 nt, Artificial Sequence
  Description of Artificial Sequence: Synthetic oligonucleotide
  Sense strand starting at position 3919 of SEQ ID NO: 1879191
aacugaugcuuggagaugu

SEQ ID NO: 1889443 - RNA, 19 nt, Artificial Sequence
  Description of Artificial Sequence: Synthetic oligonucleotide
  Antisense strand to SEQ ID NO: 1889442
acaucuccaagcaucaguu

SEQ ID NO: 1889444 - RNA, 19 nt, Artificial Sequence
  Description of Artificial Sequence: Synthetic oligonucleotide
  Sense strand starting at position 3923 of SEQ ID NO: 1879191
gaugcuuggagaugugauc

SEQ ID NO: 1889445 - RNA, 19 nt, Artificial Sequence
  Description of Artificial Sequence: Synthetic oligonucleotide
  Antisense strand to SEQ ID NO: 1889444
gaucacaucuccaagcauc

SEQ ID NO: 1889446 - RNA, 19 nt, Artificial Sequence
  Description of Artificial Sequence: Synthetic oligonucleotide
  Sense strand starting at position 3961 of SEQ ID NO: 1879191
ugauaacaugcaugcauau

SEQ ID NO: 1889447 - RNA, 19 nt, Artificial Sequence
  Description of Artificial Sequence: Synthetic oligonucleotide
  Antisense strand to SEQ ID NO: 1889446
auaugcaugcauguuauca

SEQ ID NO: 1889448 - RNA, 19 nt, Artificial Sequence
  Description of Artificial Sequence: Synthetic oligonucleotide
  Sense strand starting at position 60 of SEQ ID NO: 1879192
gagagcuguuucuuaaucu

SEQ ID NO: 1889449 - RNA, 19 nt, Artificial Sequence
  Description of Artificial Sequence: Synthetic oligonucleotide
  Antisense strand to SEQ ID NO: 1889448
agauuaagaaacagcucuc

SEQ ID NO: 1889450 - RNA, 19 nt, Artificial Sequence
  Description of Artificial Sequence: Synthetic oligonucleotide
  Sense strand starting at position 70 of SEQ ID NO: 1879192
ucuuaaucugccuggagga

SEQ ID NO: 1889451 - RNA, 19 nt, Artificial Sequence
  Description of Artificial Sequence: Synthetic oligonucleotide
  Antisense strand to SEQ ID NO: 1889450
uccuccaggcagauuaaga

SEQ ID NO: 1889452 - RNA, 19 nt, Artificial Sequence
  Description of Artificial Sequence: Synthetic oligonucleotide
  Sense strand starting at position 71 of SEQ ID NO: 1879192
cuuaaucugccuggaggaa

SEQ ID NO: 1889453 - RNA, 19 nt, Artificial Sequence
  Description of Artificial Sequence: Synthetic oligonucleotide
  Antisense strand to SEQ ID NO: 1889452
uuccuccaggcagauuaag

SEQ ID NO: 1889454 - RNA, 19 nt, Artificial Sequence
  Description of Artificial Sequence: Synthetic oligonucleotide
  Sense strand starting at position 177 of SEQ ID NO: 1879192
auuugaaauugagaagccu

SEQ ID NO: 1889455 - RNA, 19 nt, Artificial Sequence
  Description of Artificial Sequence: Synthetic oligonucleotide
  Antisense strand to SEQ ID NO: 1889454
aggcuucucaauuucaaau

SEQ ID NO: 1889456 - RNA, 19 nt, Artificial Sequence
  Description of Artificial Sequence: Synthetic oligonucleotide
  Sense strand starting at position 215 of SEQ ID NO: 1879192
uagaaaguuccaugauuga

SEQ ID NO: 1889457 - RNA, 19 nt, Artificial Sequence
  Description of Artificial Sequence: Synthetic oligonucleotide
  Antisense strand to SEQ ID NO: 1889456
ucaaucauggaacuuucua

SEQ ID NO: 1889458 - RNA, 19 nt, Artificial Sequence
  Description of Artificial Sequence: Synthetic oligonucleotide
  Sense strand starting at position 330 of SEQ ID NO: 1879192
gcaccaguuguacaaguua

SEQ ID NO: 1889459 - RNA, 19 nt, Artificial Sequence
  Description of Artificial Sequence: Synthetic oligonucleotide
  Antisense strand to SEQ ID NO: 1889458
uaacuuguacaacuggugc

SEQ ID NO: 1889460 - RNA, 19 nt, Artificial Sequence
  Description of Artificial Sequence: Synthetic oligonucleotide
  Sense strand starting at position 440 of SEQ ID NO: 1879192
cguugcucuagauacagaa

SEQ ID NO: 1889461 - RNA, 19 nt, Artificial Sequence
  Description of Artificial Sequence: Synthetic oligonucleotide
  Antisense strand to SEQ ID NO: 1889460
uucuguaucuagagcaacg

SEQ ID NO: 1889462 - RNA, 19 nt, Artificial Sequence
  Description of Artificial Sequence: Synthetic oligonucleotide
  Sense strand starting at position 491 of SEQ ID NO: 1879192
aagcaaaguguugauaauu

SEQ ID NO: 1889463 - RNA, 19 nt, Artificial Sequence
  Description of Artificial Sequence: Synthetic oligonucleotide
  Antisense strand to SEQ ID NO: 1889462
aauuaucaacacuuugcuu

SEQ ID NO: 1889464 - RNA, 19 nt, Artificial Sequence
  Description of Artificial Sequence: Synthetic oligonucleotide
  Sense strand starting at position 518 of SEQ ID NO: 1879192
ugauuaagguuacccaguu

SEQ ID NO: 1889465 - RNA, 19 nt, Artificial Sequence
  Description of Artificial Sequence: Synthetic oligonucleotide
  Antisense strand to SEQ ID NO: 1889464
aacuggguaaccuuaauca

SEQ ID NO: 1889466 - RNA, 19 nt, Artificial Sequence
  Description of Artificial Sequence: Synthetic oligonucleotide
  Sense strand starting at position 519 of SEQ ID NO: 1879192
gauuaagguuacccaguua

SEQ ID NO: 1889467 - RNA, 19 nt, Artificial Sequence
  Description of Artificial Sequence: Synthetic oligonucleotide
  Antisense strand to SEQ ID NO: 1889466
uaacuggguaaccuuaauc

SEQ ID NO: 1889468 - RNA, 19 nt, Artificial Sequence
  Description of Artificial Sequence: Synthetic oligonucleotide
  Sense strand starting at position 713 of SEQ ID NO: 1879192
acagcuuucuuuguaauga

SEQ ID NO: 1889469 - RNA, 19 nt, Artificial Sequence
  Description of Artificial Sequence: Synthetic oligonucleotide
  Antisense strand to SEQ ID NO: 1889468
ucauuacaaagaaagcugu

SEQ ID NO: 1889470 - RNA, 19 nt, Artificial Sequence
  Description of Artificial Sequence: Synthetic oligonucleotide
  Sense strand starting at position 754 of SEQ ID NO: 1879192
guaguuaggcuccagaaag

SEQ ID NO: 1889471 - RNA, 19 nt, Artificial Sequence
  Description of Artificial Sequence: Synthetic oligonucleotide
  Antisense strand to SEQ ID NO: 1889470
cuuucuggagccuaacuac

SEQ ID NO: 1889472 - RNA, 19 nt, Artificial Sequence
  Description of Artificial Sequence: Synthetic oligonucleotide
  Sense strand starting at position 1057 of SEQ ID NO: 1879192
guauuauuuagguguuaug

SEQ ID NO: 1889473 - RNA, 19 nt, Artificial Sequence
  Description of Artificial Sequence: Synthetic oligonucleotide
  Antisense strand to SEQ ID NO: 1889472
cauaacaccuaaauaauac

SEQ ID NO: 1889474 - RNA, 19 nt, Artificial Sequence
  Description of Artificial Sequence: Synthetic oligonucleotide
  Sense strand starting at position 1067 of SEQ ID NO: 1879192
gguguuaugauagaguaac

SEQ ID NO: 1889475 - RNA, 19 nt, Artificial Sequence
  Description of Artificial Sequence: Synthetic oligonucleotide
  Antisense strand to SEQ ID NO: 1889474
guuacucuaucauaacacc

SEQ ID NO: 1889476 - RNA, 19 nt, Artificial Sequence
  Description of Artificial Sequence: Synthetic oligonucleotide
  Sense strand starting at position 1079 of SEQ ID NO: 1879192
gaguaacugcuguacagua

SEQ ID NO: 1889477 - RNA, 19 nt, Artificial Sequence
  Description of Artificial Sequence: Synthetic oligonucleotide
  Antisense strand to SEQ ID NO: 1889476
uacuguacagcaguuacuc

SEQ ID NO: 1889478 - RNA, 19 nt, Artificial Sequence
  Description of Artificial Sequence: Synthetic oligonucleotide
  Sense strand starting at position 1383 of SEQ ID NO: 1879192
auaccaacaccuggugauu

SEQ ID NO: 1889479 - RNA, 19 nt, Artificial Sequence
  Description of Artificial Sequence: Synthetic oligonucleotide
  Antisense strand to SEQ ID NO: 1889478
aaucaccagguguugguau

SEQ ID NO: 1889480 - RNA, 19 nt, Artificial Sequence
  Description of Artificial Sequence: Synthetic oligonucleotide
  Sense strand starting at position 1787 of SEQ ID NO: 1879192
cucuaaguacagcaguaau

SEQ ID NO: 1889481 - RNA, 19 nt, Artificial Sequence
  Description of Artificial Sequence: Synthetic oligonucleotide
  Antisense strand to SEQ ID NO: 1889480
auuacugcuguacuuagag

SEQ ID NO: 1889482 - RNA, 19 nt, Artificial Sequence
  Description of Artificial Sequence: Synthetic oligonucleotide
  Sense strand starting at position 2433 of SEQ ID NO: 1879192
cuaagauccuugucuguau

SEQ ID NO: 1889483 - RNA, 19 nt, Artificial Sequence
  Description of Artificial Sequence: Synthetic oligonucleotide
  Antisense strand to SEQ ID NO: 1889482
auacagacaaggaucuuag

SEQ ID NO: 1889484 - RNA, 19 nt, Artificial Sequence
  Description of Artificial Sequence: Synthetic oligonucleotide
  Sense strand starting at position 2625 of SEQ ID NO: 1879192
aaauaagcggcuuaugauc

SEQ ID NO: 1889485 - RNA, 19 nt, Artificial Sequence
  Description of Artificial Sequence: Synthetic oligonucleotide
  Antisense strand to SEQ ID NO: 1889484
gaucauaagccgcuuauuu

SEQ ID NO: 1889486 - RNA, 19 nt, Artificial Sequence
  Description of Artificial Sequence: Synthetic oligonucleotide
  Sense strand starting at position 2630 of SEQ ID NO: 1879192
agcggcuuaugaucaagaa

SEQ ID NO: 1889487 - RNA, 19 nt, Artificial Sequence
  Description of Artificial Sequence: Synthetic oligonucleotide
  Antisense strand to SEQ ID NO: 1889486
uucuugaucauaagccgcu

SEQ ID NO: 1889488 - RNA, 19 nt, Artificial Sequence
  Description of Artificial Sequence: Synthetic oligonucleotide
  Sense strand starting at position 2631 of SEQ ID NO: 1879192
gcggcuuaugaucaagaac

SEQ ID NO: 1889489 - RNA, 19 nt, Artificial Sequence
  Description of Artificial Sequence: Synthetic oligonucleotide
  Antisense strand to SEQ ID NO: 1889488
guucuugaucauaagccgc

SEQ ID NO: 1889490 - RNA, 19 nt, Artificial Sequence
  Description of Artificial Sequence: Synthetic oligonucleotide
  Sense strand starting at position 2634 of SEQ ID NO: 1879192
gcuuaugaucaagaacgau

SEQ ID NO: 1889491 - RNA, 19 nt, Artificial Sequence
  Description of Artificial Sequence: Synthetic oligonucleotide
  Antisense strand to SEQ ID NO: 1889490
aucguucuugaucauaagc

SEQ ID NO: 1889492 - RNA, 19 nt, Artificial Sequence
  Description of Artificial Sequence: Synthetic oligonucleotide
  Sense strand starting at position 2687 of SEQ ID NO: 1879192
accuuauggcucugagaug

SEQ ID NO: 1889493 - RNA, 19 nt, Artificial Sequence
  Description of Artificial Sequence: Synthetic oligonucleotide
  Antisense strand to SEQ ID NO: 1889492
caucucagagccauaaggu

SEQ ID NO: 1889494 - RNA, 19 nt, Artificial Sequence
  Description of Artificial Sequence: Synthetic oligonucleotide
  Sense strand starting at position 2844 of SEQ ID NO: 1879192
ucaguuuaucaguagcuuu

SEQ ID NO: 1889495 - RNA, 19 nt, Artificial Sequence
  Description of Artificial Sequence: Synthetic oligonucleotide
  Antisense strand to SEQ ID NO: 1889494
aaagcuacugauaaacuga

SEQ ID NO: 1889496 - RNA, 19 nt, Artificial Sequence
  Description of Artificial Sequence: Synthetic oligonucleotide
  Sense strand starting at position 3066 of SEQ ID NO: 1879192
ccucucaaugacuguuagu

SEQ ID NO: 1889497 - RNA, 19 nt, Artificial Sequence
  Description of Artificial Sequence: Synthetic oligonucleotide
  Antisense strand to SEQ ID NO: 1889496
acuaacagucauugagagg

SEQ ID NO: 1889498 - RNA, 19 nt, Artificial Sequence
  Description of Artificial Sequence: Synthetic oligonucleotide
  Sense strand starting at position 3117 of SEQ ID NO: 1879192
caggaucaaguucgugaaa

SEQ ID NO: 1889499 - RNA, 19 nt, Artificial Sequence
  Description of Artificial Sequence: Synthetic oligonucleotide
  Antisense strand to SEQ ID NO: 1889498
uuucacgaacuugauccug

SEQ ID NO: 1889500 - RNA, 19 nt, Artificial Sequence
  Description of Artificial Sequence: Synthetic oligonucleotide
  Sense strand starting at position 3120 of SEQ ID NO: 1879192
gaucaaguucgugaaagau

SEQ ID NO: 1889501 - RNA, 19 nt, Artificial Sequence
  Description of Artificial Sequence: Synthetic oligonucleotide
  Antisense strand to SEQ ID NO: 1889500
aucuuucacgaacuugauc

SEQ ID NO: 1889502 - RNA, 19 nt, Artificial Sequence
  Description of Artificial Sequence: Synthetic oligonucleotide
  Sense strand starting at position 3135 of SEQ ID NO: 1879192
agaugaaaggucuguggac

SEQ ID NO: 1889503 - RNA, 19 nt, Artificial Sequence
  Description of Artificial Sequence: Synthetic oligonucleotide
  Antisense strand to SEQ ID NO: 1889502
guccacagaccuuucaucu

SEQ ID NO: 1889504 - RNA, 19 nt, Artificial Sequence
  Description of Artificial Sequence: Synthetic oligonucleotide
  Sense strand starting at position 3136 of SEQ ID NO: 1879192
gaugaaaggucuguggacu

SEQ ID NO: 1889505 - RNA, 19 nt, Artificial Sequence
  Description of Artificial Sequence: Synthetic oligonucleotide
  Antisense strand to SEQ ID NO: 1889504
aguccacagaccuuucauc

SEQ ID NO: 1889506 - RNA, 19 nt, Artificial Sequence
  Description of Artificial Sequence: Synthetic oligonucleotide
  Sense strand starting at position 3250 of SEQ ID NO: 1879192
agcuguaggaauugauaua

SEQ ID NO: 1889507 - RNA, 19 nt, Artificial Sequence
  Description of Artificial Sequence: Synthetic oligonucleotide
  Antisense strand to SEQ ID NO: 1889506
uauaucaauuccuacagcu

SEQ ID NO: 1889508 - RNA, 19 nt, Artificial Sequence
  Description of Artificial Sequence: Synthetic oligonucleotide
  Sense strand starting at position 3323 of SEQ ID NO: 1879192
aaagguuaagucugauaga

SEQ ID NO: 1889509 - RNA, 19 nt, Artificial Sequence
  Description of Artificial Sequence: Synthetic oligonucleotide
  Antisense strand to SEQ ID NO: 1889508
ucuaucagacuuaaccuuu

SEQ ID NO: 1889510 - RNA, 19 nt, Artificial Sequence
  Description of Artificial Sequence: Synthetic oligonucleotide
  Sense strand starting at position 3398 of SEQ ID NO: 1879192
gggaaucauuaauagaaac

SEQ ID NO: 1889511 - RNA, 19 nt, Artificial Sequence
  Description of Artificial Sequence: Synthetic oligonucleotide
  Antisense strand to SEQ ID NO: 1889510
guuucuauuaaugauuccc

SEQ ID NO: 1889512 - RNA, 19 nt, Artificial Sequence
  Description of Artificial Sequence: Synthetic oligonucleotide
  Sense strand starting at position 3423 of SEQ ID NO: 1879192
guaaguauuugcuuuauug

SEQ ID NO: 1889513 - RNA, 19 nt, Artificial Sequence
  Description of Artificial Sequence: Synthetic oligonucleotide
  Antisense strand to SEQ ID NO: 1889512
caauaaagcaaauacuuac

SEQ ID NO: 1889514 - RNA, 19 nt, Artificial Sequence
  Description of Artificial Sequence: Synthetic oligonucleotide
  Sense strand starting at position 3427 of SEQ ID NO: 1879192
guauuugcuuuauugacau

SEQ ID NO: 1889515 - RNA, 19 nt, Artificial Sequence
  Description of Artificial Sequence: Synthetic oligonucleotide
  Antisense strand to SEQ ID NO: 1889514
augucaauaaagcaaauac

SEQ ID NO: 1889516 - RNA, 19 nt, Artificial Sequence
  Description of Artificial Sequence: Synthetic oligonucleotide
  Sense strand starting at position 3439 of SEQ ID NO: 1879192
uugacauacuaggcuuaga

SEQ ID NO: 1889517 - RNA, 19 nt, Artificial Sequence
  Description of Artificial Sequence: Synthetic oligonucleotide
  Antisense strand to SEQ ID NO: 1889516
ucuaagccuaguaugucaa

SEQ ID NO: 1889518 - RNA, 19 nt, Artificial Sequence
  Description of Artificial Sequence: Synthetic oligonucleotide
  Sense strand starting at position 3712 of SEQ ID NO: 1879192
augaguauugcccaaucag

SEQ ID NO: 1889519 - RNA, 19 nt, Artificial Sequence
  Description of Artificial Sequence: Synthetic oligonucleotide
  Antisense strand to SEQ ID NO: 1889518
cugauugggcaauacucau

SEQ ID NO: 1889520 - RNA, 19 nt, Artificial Sequence
  Description of Artificial Sequence: Synthetic oligonucleotide
  Sense strand starting at position 3740 of SEQ ID NO: 1879192
uuuguaagucaucaguaac

SEQ ID NO: 1889521 - RNA, 19 nt, Artificial Sequence
  Description of Artificial Sequence: Synthetic oligonucleotide
  Antisense strand to SEQ ID NO: 1889520
guuacugaugacuuacaaa

SEQ ID NO: 1889522 - RNA, 19 nt, Artificial Sequence
  Description of Artificial Sequence: Synthetic oligonucleotide
  Sense strand starting at position 3746 of SEQ ID NO: 1879192
agucaucaguaaccuuaaa

SEQ ID NO: 1889523 - RNA, 19 nt, Artificial Sequence
  Description of Artificial Sequence: Synthetic oligonucleotide
  Antisense strand to SEQ ID NO: 1889522
uuuaagguuacugaugacu

SEQ ID NO: 1889524 - RNA, 19 nt, Artificial Sequence
  Description of Artificial Sequence: Synthetic oligonucleotide
  Sense strand starting at position 3899 of SEQ ID NO: 1879192
ccugcauaguuaucagauu

SEQ ID NO: 1889525 - RNA, 19 nt, Artificial Sequence
  Description of Artificial Sequence: Synthetic oligonucleotide
  Antisense strand to SEQ ID NO: 1889524
aaucugauaacuaugcagg

SEQ ID NO: 1889526 - RNA, 19 nt, Artificial Sequence
  Description of Artificial Sequence: Synthetic oligonucleotide
  Sense strand starting at position 3911 of SEQ ID NO: 1879192
ucagauuuguuccacuaca

SEQ ID NO: 1889527 - RNA, 19 nt, Artificial Sequence
  Description of Artificial Sequence: Synthetic oligonucleotide
  Antisense strand to SEQ ID NO: 1889526
uguaguggaacaaaucuga

SEQ ID NO: 1889528 - RNA, 19 nt, Artificial Sequence
  Description of Artificial Sequence: Synthetic oligonucleotide
  Sense strand starting at position 194 of SEQ ID NO: 1879193
agauuauacucgcuccaua

SEQ ID NO: 1889529 - RNA, 19 nt, Artificial Sequence
  Description of Artificial Sequence: Synthetic oligonucleotide
  Antisense strand to SEQ ID NO: 1889528
uauggagcgaguauaaucu

SEQ ID NO: 1889530 - RNA, 19 nt, Artificial Sequence
  Description of Artificial Sequence: Synthetic oligonucleotide
  Sense strand starting at position 229 of SEQ ID NO: 1879193
uuagaaguuccaggcaaug

SEQ ID NO: 1889531 - RNA, 19 nt, Artificial Sequence
  Description of Artificial Sequence: Synthetic oligonucleotide
  Antisense strand to SEQ ID NO: 1889530
cauugccuggaacuucuaa

SEQ ID NO: 1889532 - RNA, 19 nt, Artificial Sequence
  Description of Artificial Sequence: Synthetic oligonucleotide
  Sense strand starting at position 402 of SEQ ID NO: 1879193
uuagaagugucauuaccaa

SEQ ID NO: 1889533 - RNA, 19 nt, Artificial Sequence
  Description of Artificial Sequence: Synthetic oligonucleotide
  Antisense strand to SEQ ID NO: 1889532
uugguaaugacacuucuaa

SEQ ID NO: 1889534 - RNA, 19 nt, Artificial Sequence
  Description of Artificial Sequence: Synthetic oligonucleotide
  Sense strand starting at position 423 of SEQ ID NO: 1879193
agguuauguguuagcaggu

SEQ ID NO: 1889535 - RNA, 19 nt, Artificial Sequence
  Description of Artificial Sequence: Synthetic oligonucleotide
  Antisense strand to SEQ ID NO: 1889534
accugcuaacacauaaccu

SEQ ID NO: 1889536 - RNA, 19 nt, Artificial Sequence
  Description of Artificial Sequence: Synthetic oligonucleotide
  Sense strand starting at position 512 of SEQ ID NO: 1879193
ggaaguagcuuuccauaag

SEQ ID NO: 1889537 - RNA, 19 nt, Artificial Sequence
  Description of Artificial Sequence: Synthetic oligonucleotide
  Antisense strand to SEQ ID NO: 1889536
cuuauggaaagcuacuucc

SEQ ID NO: 1889538 - RNA, 19 nt, Artificial Sequence
  Description of Artificial Sequence: Synthetic oligonucleotide
  Sense strand starting at position 678 of SEQ ID NO: 1879193
acaauugaaguggguauaa

SEQ ID NO: 1889539 - RNA, 19 nt, Artificial Sequence
  Description of Artificial Sequence: Synthetic oligonucleotide
  Antisense strand to SEQ ID NO: 1889538
uuauacccacuucaauugu

SEQ ID NO: 1889540 - RNA, 19 nt, Artificial Sequence
  Description of Artificial Sequence: Synthetic oligonucleotide
  Sense strand starting at position 932 of SEQ ID NO: 1879193
auagaugcucuguguaaga

SEQ ID NO: 1889541 - RNA, 19 nt, Artificial Sequence
  Description of Artificial Sequence: Synthetic oligonucleotide
  Antisense strand to SEQ ID NO: 1889540
ucuuacacagagcaucuau

SEQ ID NO: 1889542 - RNA, 19 nt, Artificial Sequence
  Description of Artificial Sequence: Synthetic oligonucleotide
  Sense strand starting at position 934 of SEQ ID NO: 1879193
agaugcucuguguaagaaa

SEQ ID NO: 1889543 - RNA, 19 nt, Artificial Sequence
  Description of Artificial Sequence: Synthetic oligonucleotide
  Antisense strand to SEQ ID NO: 1889542
uuucuuacacagagcaucu

SEQ ID NO: 1889544 - RNA, 19 nt, Artificial Sequence
  Description of Artificial Sequence: Synthetic oligonucleotide
  Sense strand starting at position 945 of SEQ ID NO: 1879193
guaagaaaugcucaccuau

SEQ ID NO: 1889545 - RNA, 19 nt, Artificial Sequence
  Description of Artificial Sequence: Synthetic oligonucleotide
  Antisense strand to SEQ ID NO: 1889544
auaggugagcauuucuuac

SEQ ID NO: 1889546 - RNA, 19 nt, Artificial Sequence
  Description of Artificial Sequence: Synthetic oligonucleotide
  Sense strand starting at position 1154 of SEQ ID NO: 1879193
uuugguaucaaggaagcuu

SEQ ID NO: 1889547 - RNA, 19 nt, Artificial Sequence
  Description of Artificial Sequence: Synthetic oligonucleotide
  Antisense strand to SEQ ID NO: 1889546
aagcuuccuugauaccaaa

SEQ ID NO: 1889548 - RNA, 19 nt, Artificial Sequence
  Description of Artificial Sequence: Synthetic oligonucleotide
  Sense strand starting at position 1338 of SEQ ID NO: 1879193
acauguauguuucccuaau

SEQ ID NO: 1889549 - RNA, 19 nt, Artificial Sequence
  Description of Artificial Sequence: Synthetic oligonucleotide
  Antisense strand to SEQ ID NO: 1889548
auuagggaaacauacaugu

SEQ ID NO: 1889550 - RNA, 19 nt, Artificial Sequence
  Description of Artificial Sequence: Synthetic oligonucleotide
  Sense strand starting at position 1354 of SEQ ID NO: 1879193
aauucucuugcaggguaaa

SEQ ID NO: 1889551 - RNA, 19 nt, Artificial Sequence
  Description of Artificial Sequence: Synthetic oligonucleotide
  Antisense strand to SEQ ID NO: 1889550
uuuacccugcaagagaauu

SEQ ID NO: 1889552 - RNA, 19 nt, Artificial Sequence
  Description of Artificial Sequence: Synthetic oligonucleotide
  Sense strand starting at position 1469 of SEQ ID NO: 1879193
gaaugacaugguggucagu

SEQ ID NO: 1889553 - RNA, 19 nt, Artificial Sequence
  Description of Artificial Sequence: Synthetic oligonucleotide
  Antisense strand to SEQ ID NO: 1889552
acugaccaccaugucauuc

SEQ ID NO: 1889554 - RNA, 19 nt, Artificial Sequence
  Description of Artificial Sequence: Synthetic oligonucleotide
  Sense strand starting at position 1479 of SEQ ID NO: 1879193
guggucaguuccauggguu

SEQ ID NO: 1889555 - RNA, 19 nt, Artificial Sequence
  Description of Artificial Sequence: Synthetic oligonucleotide
  Antisense strand to SEQ ID NO: 1889554
aacccauggaacugaccac

SEQ ID NO: 1889556 - RNA, 19 nt, Artificial Sequence
  Description of Artificial Sequence: Synthetic oligonucleotide
  Sense strand starting at position 1601 of SEQ ID NO: 1879193
gacaaaggaucaggaaaga

SEQ ID NO: 1889557 - RNA, 19 nt, Artificial Sequence
  Description of Artificial Sequence: Synthetic oligonucleotide
  Antisense strand to SEQ ID NO: 1889556
ucuuuccugauccuuuguc

SEQ ID NO: 1889558 - RNA, 19 nt, Artificial Sequence
  Description of Artificial Sequence: Synthetic oligonucleotide
  Sense strand starting at position 1723 of SEQ ID NO: 1879193
uagugaguugucuagacuu

SEQ ID NO: 1889559 - RNA, 19 nt, Artificial Sequence
  Description of Artificial Sequence: Synthetic oligonucleotide
  Antisense strand to SEQ ID NO: 1889558
aagucuagacaacucacua

SEQ ID NO: 1889560 - RNA, 19 nt, Artificial Sequence
  Description of Artificial Sequence: Synthetic oligonucleotide
  Sense strand starting at position 1725 of SEQ ID NO: 1879193
gugaguugucuagacuuuc

SEQ ID NO: 1889561 - RNA, 19 nt, Artificial Sequence
  Description of Artificial Sequence: Synthetic oligonucleotide
  Antisense strand to SEQ ID NO: 1889560
gaaagucuagacaacucac

SEQ ID NO: 1889562 - RNA, 19 nt, Artificial Sequence
  Description of Artificial Sequence: Synthetic oligonucleotide
  Sense strand starting at position 1789 of SEQ ID NO: 1879193
uggugucagagauggccaa

SEQ ID NO: 1889563 - RNA, 19 nt, Artificial Sequence
  Description of Artificial Sequence: Synthetic oligonucleotide
  Antisense strand to SEQ ID NO: 1889562
uuggccaucucugacacca

SEQ ID NO: 1889564 - RNA, 19 nt, Artificial Sequence
  Description of Artificial Sequence: Synthetic oligonucleotide
  Sense strand starting at position 1793 of SEQ ID NO: 1879193
gucagagauggccaaguaa

SEQ ID NO: 1889565 - RNA, 19 nt, Artificial Sequence
  Description of Artificial Sequence: Synthetic oligonucleotide
  Antisense strand to SEQ ID NO: 1889564
uuacuuggccaucucugac

SEQ ID NO: 1889566 - RNA, 19 nt, Artificial Sequence
  Description of Artificial Sequence: Synthetic oligonucleotide
  Sense strand starting at position 2101 of SEQ ID NO: 1879193
gaguauuuauugucugcag

SEQ ID NO: 1889567 - RNA, 19 nt, Artificial Sequence
  Description of Artificial Sequence: Synthetic oligonucleotide
  Antisense strand to SEQ ID NO: 1889566
cugcagacaauaaauacuc

SEQ ID NO: 1889568 - RNA, 19 nt, Artificial Sequence
  Description of Artificial Sequence: Synthetic oligonucleotide
  Sense strand starting at position 2102 of SEQ ID NO: 1879193
aguauuuauugucugcaga

SEQ ID NO: 1889569 - RNA, 19 nt, Artificial Sequence
  Description of Artificial Sequence: Synthetic oligonucleotide
  Antisense strand to SEQ ID NO: 1889568
ucugcagacaauaaauacu

SEQ ID NO: 1889570 - RNA, 19 nt, Artificial Sequence
  Description of Artificial Sequence: Synthetic oligonucleotide
  Sense strand starting at position 2103 of SEQ ID NO: 1879193
guauuuauugucugcagaa

SEQ ID NO: 1889571 - RNA, 19 nt, Artificial Sequence
  Description of Artificial Sequence: Synthetic oligonucleotide
  Antisense strand to SEQ ID NO: 1889570
uucugcagacaauaaauac

SEQ ID NO: 1889572 - RNA, 19 nt, Artificial Sequence
  Description of Artificial Sequence: Synthetic oligonucleotide
  Sense strand starting at position 2154 of SEQ ID NO: 1879193
ggagucucauaaucuaaua

SEQ ID NO: 1889573 - RNA, 19 nt, Artificial Sequence
  Description of Artificial Sequence: Synthetic oligonucleotide
  Antisense strand to SEQ ID NO: 1889572
uauuagauuaugagacucc

SEQ ID NO: 1889574 - RNA, 19 nt, Artificial Sequence
  Description of Artificial Sequence: Synthetic oligonucleotide
  Sense strand starting at position 2246 of SEQ ID NO: 1879193
auguaauuaguagauacga

SEQ ID NO: 1889575 - RNA, 19 nt, Artificial Sequence
  Description of Artificial Sequence: Synthetic oligonucleotide
  Antisense strand to SEQ ID NO: 1889574
ucguaucuacuaauuacau

SEQ ID NO: 1889576 - RNA, 19 nt, Artificial Sequence
  Description of Artificial Sequence: Synthetic oligonucleotide
  Sense strand starting at position 2248 of SEQ ID NO: 1879193
guaauuaguagauacgaac

SEQ ID NO: 1889577 - RNA, 19 nt, Artificial Sequence
  Description of Artificial Sequence: Synthetic oligonucleotide
  Antisense strand to SEQ ID NO: 1889576
guucguaucuacuaauuac

SEQ ID NO: 1889578 - RNA, 19 nt, Artificial Sequence
  Description of Artificial Sequence: Synthetic oligonucleotide
  Sense strand starting at position 2275 of SEQ ID NO: 1879193
ggcagauauuuagaauuau

SEQ ID NO: 1889579 - RNA, 19 nt, Artificial Sequence
  Description of Artificial Sequence: Synthetic oligonucleotide
  Antisense strand to SEQ ID NO: 1889578
auaauucuaaauaucugcc

SEQ ID NO: 1889580 - RNA, 19 nt, Artificial Sequence
  Description of Artificial Sequence: Synthetic oligonucleotide
  Sense strand starting at position 2327 of SEQ ID NO: 1879193
ugcuuuaucgagcaaauau

SEQ ID NO: 1889581 - RNA, 19 nt, Artificial Sequence
  Description of Artificial Sequence: Synthetic oligonucleotide
  Antisense strand to SEQ ID NO: 1889580
auauuugcucgauaaagca

SEQ ID NO: 1889582 - RNA, 19 nt, Artificial Sequence
  Description of Artificial Sequence: Synthetic oligonucleotide
  Sense strand starting at position 2652 of SEQ ID NO: 1879193
aguauuggguuucuaacaa

SEQ ID NO: 1889583 - RNA, 19 nt, Artificial Sequence
  Description of Artificial Sequence: Synthetic oligonucleotide
  Antisense strand to SEQ ID NO: 1889582
uuguuagaaacccaauacu

SEQ ID NO: 1889584 - RNA, 19 nt, Artificial Sequence
  Description of Artificial Sequence: Synthetic oligonucleotide
  Sense strand starting at position 2667 of SEQ ID NO: 1879193
acaauucugucacccaagu

SEQ ID NO: 1889585 - RNA, 19 nt, Artificial Sequence
  Description of Artificial Sequence: Synthetic oligonucleotide
  Antisense strand to SEQ ID NO: 1889584
acuugggugacagaauugu

SEQ ID NO: 1889586 - RNA, 19 nt, Artificial Sequence
  Description of Artificial Sequence: Synthetic oligonucleotide
  Sense strand starting at position 2997 of SEQ ID NO: 1879193
cauugcuauggugaauagu

SEQ ID NO: 1889587 - RNA, 19 nt, Artificial Sequence
  Description of Artificial Sequence: Synthetic oligonucleotide
  Antisense strand to SEQ ID NO: 1889586
acuauucaccauagcaaug

SEQ ID NO: 1889588 - RNA, 19 nt, Artificial Sequence
  Description of Artificial Sequence: Synthetic oligonucleotide
  Sense strand starting at position 3089 of SEQ ID NO: 1879193
ugagauuccuaagucgaau

SEQ ID NO: 1889589 - RNA, 19 nt, Artificial Sequence
  Description of Artificial Sequence: Synthetic oligonucleotide
  Antisense strand to SEQ ID NO: 1889588
auucgacuuaggaaucuca

SEQ ID NO: 1889590 - RNA, 19 nt, Artificial Sequence
  Description of Artificial Sequence: Synthetic oligonucleotide
  Sense strand starting at position 3091 of SEQ ID NO: 1879193
agauuccuaagucgaauga

SEQ ID NO: 1889591 - RNA, 19 nt, Artificial Sequence
  Description of Artificial Sequence: Synthetic oligonucleotide
  Antisense strand to SEQ ID NO: 1889590
ucauucgacuuaggaaucu

SEQ ID NO: 1889592 - RNA, 19 nt, Artificial Sequence
  Description of Artificial Sequence: Synthetic oligonucleotide
  Sense strand starting at position 3297 of SEQ ID NO: 1879193
guuugaugauuagugaggu

SEQ ID NO: 1889593 - RNA, 19 nt, Artificial Sequence
  Description of Artificial Sequence: Synthetic oligonucleotide
  Antisense strand to SEQ ID NO: 1889592
accucacuaaucaucaaac

SEQ ID NO: 1889594 - RNA, 19 nt, Artificial Sequence
  Description of Artificial Sequence: Synthetic oligonucleotide
  Sense strand starting at position 3447 of SEQ ID NO: 1879193
auacuagaccucugucagu

SEQ ID NO: 1889595 - RNA, 19 nt, Artificial Sequence
  Description of Artificial Sequence: Synthetic oligonucleotide
  Antisense strand to SEQ ID NO: 1889594
acugacagaggucuaguau

SEQ ID NO: 1889596 - RNA, 19 nt, Artificial Sequence
  Description of Artificial Sequence: Synthetic oligonucleotide
  Sense strand starting at position 3531 of SEQ ID NO: 1879193
ugaagacacuguuuaguuu

SEQ ID NO: 1889597 - RNA, 19 nt, Artificial Sequence
  Description of Artificial Sequence: Synthetic oligonucleotide
  Antisense strand to SEQ ID NO: 1889596
aaacuaaacagugucuuca

SEQ ID NO: 1889598 - RNA, 19 nt, Artificial Sequence
  Description of Artificial Sequence: Synthetic oligonucleotide
  Sense strand starting at position 3532 of SEQ ID NO: 1879193
gaagacacuguuuaguuua

SEQ ID NO: 1889599 - RNA, 19 nt, Artificial Sequence
  Description of Artificial Sequence: Synthetic oligonucleotide
  Antisense strand to SEQ ID NO: 1889598
uaaacuaaacagugucuuc

SEQ ID NO: 1889600 - RNA, 19 nt, Artificial Sequence
  Description of Artificial Sequence: Synthetic oligonucleotide
  Sense strand starting at position 3597 of SEQ ID NO: 1879193
aggauuuagucauauucuu

SEQ ID NO: 1889601 - RNA, 19 nt, Artificial Sequence
  Description of Artificial Sequence: Synthetic oligonucleotide
  Antisense strand to SEQ ID NO: 1889600
aagaauaugacuaaauccu

SEQ ID NO: 1889602 - RNA, 19 nt, Artificial Sequence
  Description of Artificial Sequence: Synthetic oligonucleotide
  Sense strand starting at position 3605 of SEQ ID NO: 1879193
gucauauucuuugcauaga

SEQ ID NO: 1889603 - RNA, 19 nt, Artificial Sequence
  Description of Artificial Sequence: Synthetic oligonucleotide
  Antisense strand to SEQ ID NO: 1889602
ucuaugcaaagaauaugac

SEQ ID NO: 1889604 - RNA, 19 nt, Artificial Sequence
  Description of Artificial Sequence: Synthetic oligonucleotide
  Sense strand starting at position 3635 of SEQ ID NO: 1879193
aagaguauuuccuggauuu

SEQ ID NO: 1889605 - RNA, 19 nt, Artificial Sequence
  Description of Artificial Sequence: Synthetic oligonucleotide
  Antisense strand to SEQ ID NO: 1889604
aaauccaggaaauacucuu

SEQ ID NO: 1889606 - RNA, 19 nt, Artificial Sequence
  Description of Artificial Sequence: Synthetic oligonucleotide
  Sense strand starting at position 3827 of SEQ ID NO: 1879193
guaaacuuuguugaauauc

SEQ ID NO: 1889607 - RNA, 19 nt, Artificial Sequence
  Description of Artificial Sequence: Synthetic oligonucleotide
  Antisense strand to SEQ ID NO: 1889606
gauauucaacaaaguuuac

SEQ ID NO: 1889608 - RNA, 19 nt, Artificial Sequence
  Description of Artificial Sequence: Synthetic oligonucleotide
  Sense strand starting at position 149 of SEQ ID NO: 1879194
ugagcuacuguuuauacuu

SEQ ID NO: 1889609 - RNA, 19 nt, Artificial Sequence
  Description of Artificial Sequence: Synthetic oligonucleotide
  Antisense strand to SEQ ID NO: 1889608
aaguauaaacaguagcuca

SEQ ID NO: 1889610 - RNA, 19 nt, Artificial Sequence
  Description of Artificial Sequence: Synthetic oligonucleotide
  Sense strand starting at position 156 of SEQ ID NO: 1879194
cuguuuauacuugaucacu

SEQ ID NO: 1889611 - RNA, 19 nt, Artificial Sequence
  Description of Artificial Sequence: Synthetic oligonucleotide
  Antisense strand to SEQ ID NO: 1889610
agugaucaaguauaaacag

SEQ ID NO: 1889612 - RNA, 19 nt, Artificial Sequence
  Description of Artificial Sequence: Synthetic oligonucleotide
  Sense strand starting at position 158 of SEQ ID NO: 1879194
guuuauacuugaucacuca

SEQ ID NO: 1889613 - RNA, 19 nt, Artificial Sequence
  Description of Artificial Sequence: Synthetic oligonucleotide
  Antisense strand to SEQ ID NO: 1889612
ugagugaucaaguauaaac

SEQ ID NO: 1889614 - RNA, 19 nt, Artificial Sequence
  Description of Artificial Sequence: Synthetic oligonucleotide
  Sense strand starting at position 185 of SEQ ID NO: 1879194
gucugcagagucuaagauu

SEQ ID NO: 1889615 - RNA, 19 nt, Artificial Sequence
  Description of Artificial Sequence: Synthetic oligonucleotide
  Antisense strand to SEQ ID NO: 1889614
aaucuuagacucugcagac

SEQ ID NO: 1889616 - RNA, 19 nt, Artificial Sequence
  Description of Artificial Sequence: Synthetic oligonucleotide
  Sense strand starting at position 208 of SEQ ID NO: 1879194
uucccuaagcugcagauua

SEQ ID NO: 1889617 - RNA, 19 nt, Artificial Sequence
  Description of Artificial Sequence: Synthetic oligonucleotide
  Antisense strand to SEQ ID NO: 1889616
uaaucugcagcuuagggaa

SEQ ID NO: 1889618 - RNA, 19 nt, Artificial Sequence
  Description of Artificial Sequence: Synthetic oligonucleotide
  Sense strand starting at position 216 of SEQ ID NO: 1879194
gcugcagauuacccaauaa

SEQ ID NO: 1889619 - RNA, 19 nt, Artificial Sequence
  Description of Artificial Sequence: Synthetic oligonucleotide
  Antisense strand to SEQ ID NO: 1889618
uuauuggguaaucugcagc

SEQ ID NO: 1889620 - RNA, 19 nt, Artificial Sequence
  Description of Artificial Sequence: Synthetic oligonucleotide
  Sense strand starting at position 228 of SEQ ID NO: 1879194
ccaauaaaugaguguggca

SEQ ID NO: 1889621 - RNA, 19 nt, Artificial Sequence
  Description of Artificial Sequence: Synthetic oligonucleotide
  Antisense strand to SEQ ID NO: 1889620
ugccacacucauuuauugg

SEQ ID NO: 1889622 - RNA, 19 nt, Artificial Sequence
  Description of Artificial Sequence: Synthetic oligonucleotide
  Sense strand starting at position 256 of SEQ ID NO: 1879194
aagagaugucaacaacgcu

SEQ ID NO: 1889623 - RNA, 19 nt, Artificial Sequence
  Description of Artificial Sequence: Synthetic oligonucleotide
  Antisense strand to SEQ ID NO: 1889622
agcguuguugacaucucuu

SEQ ID NO: 1889624 - RNA, 19 nt, Artificial Sequence
  Description of Artificial Sequence: Synthetic oligonucleotide
  Sense strand starting at position 362 of SEQ ID NO: 1879194
ugacuuagugcccagguca

SEQ ID NO: 1889625 - RNA, 19 nt, Artificial Sequence
  Description of Artificial Sequence: Synthetic oligonucleotide
  Antisense strand to SEQ ID NO: 1889624
ugaccugggcacuaaguca

SEQ ID NO: 1889626 - RNA, 19 nt, Artificial Sequence
  Description of Artificial Sequence: Synthetic oligonucleotide
  Sense strand starting at position 384 of SEQ ID NO: 1879194
gaaugaauggaguguucca

SEQ ID NO: 1889627 - RNA, 19 nt, Artificial Sequence
  Description of Artificial Sequence: Synthetic oligonucleotide
  Antisense strand to SEQ ID NO: 1889626
uggaacacuccauucauuc

SEQ ID NO: 1889628 - RNA, 19 nt, Artificial Sequence
  Description of Artificial Sequence: Synthetic oligonucleotide
  Sense strand starting at position 391 of SEQ ID NO: 1879194
uggaguguuccagaacuuc

SEQ ID NO: 1889629 - RNA, 19 nt, Artificial Sequence
  Description of Artificial Sequence: Synthetic oligonucleotide
  Antisense strand to SEQ ID NO: 1889628
gaaguucuggaacacucca

SEQ ID NO: 1889630 - RNA, 19 nt, Artificial Sequence
  Description of Artificial Sequence: Synthetic oligonucleotide
  Sense strand starting at position 830 of SEQ ID NO: 1879194
ggcagaugguaacuucaga

SEQ ID NO: 1889631 - RNA, 19 nt, Artificial Sequence
  Description of Artificial Sequence: Synthetic oligonucleotide
  Antisense strand to SEQ ID NO: 1889630
ucugaaguuaccaucugcc

SEQ ID NO: 1889632 - RNA, 19 nt, Artificial Sequence
  Description of Artificial Sequence: Synthetic oligonucleotide
  Sense strand starting at position 869 of SEQ ID NO: 1879194
aggucucaggcucaugaaa

SEQ ID NO: 1889633 - RNA, 19 nt, Artificial Sequence
  Description of Artificial Sequence: Synthetic oligonucleotide
  Antisense strand to SEQ ID NO: 1889632
uuucaugagccugagaccu

SEQ ID NO: 1889634 - RNA, 19 nt, Artificial Sequence
  Description of Artificial Sequence: Synthetic oligonucleotide
  Sense strand starting at position 937 of SEQ ID NO: 1879194
uuaaccuguugauugauaa

SEQ ID NO: 1889635 - RNA, 19 nt, Artificial Sequence
  Description of Artificial Sequence: Synthetic oligonucleotide
  Antisense strand to SEQ ID NO: 1889634
uuaucaaucaacagguuaa

SEQ ID NO: 1889636 - RNA, 19 nt, Artificial Sequence
  Description of Artificial Sequence: Synthetic oligonucleotide
  Sense strand starting at position 1177 of SEQ ID NO: 1879194
acccuuauuguggacacua

SEQ ID NO: 1889637 - RNA, 19 nt, Artificial Sequence
  Description of Artificial Sequence: Synthetic oligonucleotide
  Antisense strand to SEQ ID NO: 1889636
uaguguccacaauaagggu

SEQ ID NO: 1889638 - RNA, 19 nt, Artificial Sequence
  Description of Artificial Sequence: Synthetic oligonucleotide
  Sense strand starting at position 1265 of SEQ ID NO: 1879194
cagggagagccuuagguuu

SEQ ID NO: 1889639 - RNA, 19 nt, Artificial Sequence
  Description of Artificial Sequence: Synthetic oligonucleotide
  Antisense strand to SEQ ID NO: 1889638
aaaccuaaggcucucccug

SEQ ID NO: 1889640 - RNA, 19 nt, Artificial Sequence
  Description of Artificial Sequence: Synthetic oligonucleotide
  Sense strand starting at position 1551 of SEQ ID NO: 1879194
ucuagacccuuaguggaau

SEQ ID NO: 1889641 - RNA, 19 nt, Artificial Sequence
  Description of Artificial Sequence: Synthetic oligonucleotide
  Antisense strand to SEQ ID NO: 1889640
auuccacuaagggucuaga

SEQ ID NO: 1889642 - RNA, 19 nt, Artificial Sequence
  Description of Artificial Sequence: Synthetic oligonucleotide
  Sense strand starting at position 1564 of SEQ ID NO: 1879194
uggaauuaaucagcccuca

SEQ ID NO: 1889643 - RNA, 19 nt, Artificial Sequence
  Description of Artificial Sequence: Synthetic oligonucleotide
  Antisense strand to SEQ ID NO: 1889642
ugagggcugauuaauucca

SEQ ID NO: 1889644 - RNA, 19 nt, Artificial Sequence
  Description of Artificial Sequence: Synthetic oligonucleotide
  Sense strand starting at position 1658 of SEQ ID NO: 1879194
uuuggacccucuccgaaau

SEQ ID NO: 1889645 - RNA, 19 nt, Artificial Sequence
  Description of Artificial Sequence: Synthetic oligonucleotide
  Antisense strand to SEQ ID NO: 1889644
auuucggagaggguccaaa

SEQ ID NO: 1889646 - RNA, 19 nt, Artificial Sequence
  Description of Artificial Sequence: Synthetic oligonucleotide
  Sense strand starting at position 1866 of SEQ ID NO: 1879194
cccggaugccuuuaggaua

SEQ ID NO: 1889647 - RNA, 19 nt, Artificial Sequence
  Description of Artificial Sequence: Synthetic oligonucleotide
  Antisense strand to SEQ ID NO: 1889646
uauccuaaaggcauccggg

SEQ ID NO: 1889648 - RNA, 19 nt, Artificial Sequence
  Description of Artificial Sequence: Synthetic oligonucleotide
  Sense strand starting at position 2096 of SEQ ID NO: 1879194
ggcgauacugaggaacuuu

SEQ ID NO: 1889649 - RNA, 19 nt, Artificial Sequence
  Description of Artificial Sequence: Synthetic oligonucleotide
  Antisense strand to SEQ ID NO: 1889648
aaaguuccucaguaucgcc

SEQ ID NO: 1889650 - RNA, 19 nt, Artificial Sequence
  Description of Artificial Sequence: Synthetic oligonucleotide
  Sense strand starting at position 2127 of SEQ ID NO: 1879194
acagaauuggugcgggaua

SEQ ID NO: 1889651 - RNA, 19 nt, Artificial Sequence
  Description of Artificial Sequence: Synthetic oligonucleotide
  Antisense strand to SEQ ID NO: 1889650
uaucccgcaccaauucugu

SEQ ID NO: 1889652 - RNA, 19 nt, Artificial Sequence
  Description of Artificial Sequence: Synthetic oligonucleotide
  Sense strand starting at position 2129 of SEQ ID NO: 1879194
agaauuggugcgggauaag

SEQ ID NO: 1889653 - RNA, 19 nt, Artificial Sequence
  Description of Artificial Sequence: Synthetic oligonucleotide
  Antisense strand to SEQ ID NO: 1889652
cuuaucccgcaccaauucu

SEQ ID NO: 1889654 - RNA, 19 nt, Artificial Sequence
  Description of Artificial Sequence: Synthetic oligonucleotide
  Sense strand starting at position 2294 of SEQ ID NO: 1879194
ugcgcgugggaguuuaaau

SEQ ID NO: 1889655 - RNA, 19 nt, Artificial Sequence
  Description of Artificial Sequence: Synthetic oligonucleotide
  Antisense strand to SEQ ID NO: 1889654
auuuaaacucccacgcgca

SEQ ID NO: 1889656 - RNA, 19 nt, Artificial Sequence
  Description of Artificial Sequence: Synthetic oligonucleotide
  Sense strand starting at position 2295 of SEQ ID NO: 1879194
gcgcgugggaguuuaaaug

SEQ ID NO: 1889657 - RNA, 19 nt, Artificial Sequence
  Description of Artificial Sequence: Synthetic oligonucleotide
  Antisense strand to SEQ ID NO: 1889656
cauuuaaacucccacgcgc

SEQ ID NO: 1889658 - RNA, 19 nt, Artificial Sequence
  Description of Artificial Sequence: Synthetic oligonucleotide
  Sense strand starting at position 2301 of SEQ ID NO: 1879194
gggaguuuaaauggguaaa

SEQ ID NO: 1889659 - RNA, 19 nt, Artificial Sequence
  Description of Artificial Sequence: Synthetic oligonucleotide
  Antisense strand to SEQ ID NO: 1889658
uuuacccauuuaaacuccc

SEQ ID NO: 1889660 - RNA, 19 nt, Artificial Sequence
  Description of Artificial Sequence: Synthetic oligonucleotide
  Sense strand starting at position 2417 of SEQ ID NO: 1879194
uaaagauucguguaacaaa

SEQ ID NO: 1889661 - RNA, 19 nt, Artificial Sequence
  Description of Artificial Sequence: Synthetic oligonucleotide
  Antisense strand to SEQ ID NO: 1889660
uuuguuacacgaaucuuua

SEQ ID NO: 1889662 - RNA, 19 nt, Artificial Sequence
  Description of Artificial Sequence: Synthetic oligonucleotide
  Sense strand starting at position 2428 of SEQ ID NO: 1879194
guaacaaaguuguuaauug

SEQ ID NO: 1889663 - RNA, 19 nt, Artificial Sequence
  Description of Artificial Sequence: Synthetic oligonucleotide
  Antisense strand to SEQ ID NO: 1889662
caauuaacaacuuuguuac

SEQ ID NO: 1889664 - RNA, 19 nt, Artificial Sequence
  Description of Artificial Sequence: Synthetic oligonucleotide
  Sense strand starting at position 3167 of SEQ ID NO: 1879194
ggaaauaauuucuacagcu

SEQ ID NO: 1889665 - RNA, 19 nt, Artificial Sequence
  Description of Artificial Sequence: Synthetic oligonucleotide
  Antisense strand to SEQ ID NO: 1889664
agcuguagaaauuauuucc

SEQ ID NO: 1889666 - RNA, 19 nt, Artificial Sequence
  Description of Artificial Sequence: Synthetic oligonucleotide
  Sense strand starting at position 3225 of SEQ ID NO: 1879194
uuuggaccuuuaguuaaga

SEQ ID NO: 1889667 - RNA, 19 nt, Artificial Sequence
  Description of Artificial Sequence: Synthetic oligonucleotide
  Antisense strand to SEQ ID NO: 1889666
ucuuaacuaaagguccaaa

SEQ ID NO: 1889668 - RNA, 19 nt, Artificial Sequence
  Description of Artificial Sequence: Synthetic oligonucleotide
  Sense strand starting at position 3227 of SEQ ID NO: 1879194
uggaccuuuaguuaagagu

SEQ ID NO: 1889669 - RNA, 19 nt, Artificial Sequence
  Description of Artificial Sequence: Synthetic oligonucleotide
  Antisense strand to SEQ ID NO: 1889668
acucuuaacuaaaggucca

SEQ ID NO: 1889670 - RNA, 19 nt, Artificial Sequence
  Description of Artificial Sequence: Synthetic oligonucleotide
  Sense strand starting at position 3236 of SEQ ID NO: 1879194
aguuaagaguguguaauga

SEQ ID NO: 1889671 - RNA, 19 nt, Artificial Sequence
  Description of Artificial Sequence: Synthetic oligonucleotide
  Antisense strand to SEQ ID NO: 1889670
ucauuacacacucuuaacu

SEQ ID NO: 1889672 - RNA, 19 nt, Artificial Sequence
  Description of Artificial Sequence: Synthetic oligonucleotide
  Sense strand starting at position 3245 of SEQ ID NO: 1879194
uguguaaugaaacgauuau

SEQ ID NO: 1889673 - RNA, 19 nt, Artificial Sequence
  Description of Artificial Sequence: Synthetic oligonucleotide
  Antisense strand to SEQ ID NO: 1889672
auaaucguuucauuacaca

SEQ ID NO: 1889674 - RNA, 19 nt, Artificial Sequence
  Description of Artificial Sequence: Synthetic oligonucleotide
  Sense strand starting at position 3246 of SEQ ID NO: 1879194
guguaaugaaacgauuaug

SEQ ID NO: 1889675 - RNA, 19 nt, Artificial Sequence
  Description of Artificial Sequence: Synthetic oligonucleotide
  Antisense strand to SEQ ID NO: 1889674
cauaaucguuucauuacac

SEQ ID NO: 1889676 - RNA, 19 nt, Artificial Sequence
  Description of Artificial Sequence: Synthetic oligonucleotide
  Sense strand starting at position 3297 of SEQ ID NO: 1879194
acaucuugaugaugaauuu

SEQ ID NO: 1889677 - RNA, 19 nt, Artificial Sequence
  Description of Artificial Sequence: Synthetic oligonucleotide
  Antisense strand to SEQ ID NO: 1889676
aaauucaucaucaagaugu

SEQ ID NO: 1889678 - RNA, 19 nt, Artificial Sequence
  Description of Artificial Sequence: Synthetic oligonucleotide
  Sense strand starting at position 3648 of SEQ ID NO: 1879194
uggucucuuccuuaccaca

SEQ ID NO: 1889679 - RNA, 19 nt, Artificial Sequence
  Description of Artificial Sequence: Synthetic oligonucleotide
  Antisense strand to SEQ ID NO: 1889678
ugugguaaggaagagacca

SEQ ID NO: 1889680 - RNA, 19 nt, Artificial Sequence
  Description of Artificial Sequence: Synthetic oligonucleotide
  Sense strand starting at position 3720 of SEQ ID NO: 1879194
cuuaaucuuguuggauacu

SEQ ID NO: 1889681 - RNA, 19 nt, Artificial Sequence
  Description of Artificial Sequence: Synthetic oligonucleotide
  Antisense strand to SEQ ID NO: 1889680
aguauccaacaagauuaag

SEQ ID NO: 1889682 - RNA, 19 nt, Artificial Sequence
  Description of Artificial Sequence: Synthetic oligonucleotide
  Sense strand starting at position 3732 of SEQ ID NO: 1879194
ggauacucccaaugacauu

SEQ ID NO: 1889683 - RNA, 19 nt, Artificial Sequence
  Description of Artificial Sequence: Synthetic oligonucleotide
  Antisense strand to SEQ ID NO: 1889682
aaugucauugggaguaucc

SEQ ID NO: 1889684 - RNA, 19 nt, Artificial Sequence
  Description of Artificial Sequence: Synthetic oligonucleotide
  Sense strand starting at position 3760 of SEQ ID NO: 1879194
aaggauuguuaugucuauu

SEQ ID NO: 1889685 - RNA, 19 nt, Artificial Sequence
  Description of Artificial Sequence: Synthetic oligonucleotide
  Antisense strand to SEQ ID NO: 1889684
aauagacauaacaauccuu

SEQ ID NO: 1889686 - RNA, 19 nt, Artificial Sequence
  Description of Artificial Sequence: Synthetic oligonucleotide
  Sense strand starting at position 3789 of SEQ ID NO: 1879194
gaagcugaggccugaagau

SEQ ID NO: 1889687 - RNA, 19 nt, Artificial Sequence
  Description of Artificial Sequence: Synthetic oligonucleotide
  Antisense strand to SEQ ID NO: 1889686
aucuucaggccucagcuuc

SEQ ID NO: 1889688 - RNA, 19 nt, Artificial Sequence
  Description of Artificial Sequence: Synthetic oligonucleotide
  Sense strand starting at position 33 of SEQ ID NO: 1879195
ucaggagcucauugccaaa

SEQ ID NO: 1889689 - RNA, 19 nt, Artificial Sequence
  Description of Artificial Sequence: Synthetic oligonucleotide
  Antisense strand to SEQ ID NO: 1889688
uuuggcaaugagcuccuga

SEQ ID NO: 1889690 - RNA, 19 nt, Artificial Sequence
  Description of Artificial Sequence: Synthetic oligonucleotide
  Sense strand starting at position 53 of SEQ ID NO: 1879195
gccauacccuucuuguaua

SEQ ID NO: 1889691 - RNA, 19 nt, Artificial Sequence
  Description of Artificial Sequence: Synthetic oligonucleotide
  Antisense strand to SEQ ID NO: 1889690
uauacaagaaggguauggc

SEQ ID NO: 1889692 - RNA, 19 nt, Artificial Sequence
  Description of Artificial Sequence: Synthetic oligonucleotide
  Sense strand starting at position 80 of SEQ ID NO: 1879195
agauacuuuguuggccaaa

SEQ ID NO: 1889693 - RNA, 19 nt, Artificial Sequence
  Description of Artificial Sequence: Synthetic oligonucleotide
  Antisense strand to SEQ ID NO: 1889692
uuuggccaacaaaguaucu

SEQ ID NO: 1889694 - RNA, 19 nt, Artificial Sequence
  Description of Artificial Sequence: Synthetic oligonucleotide
  Sense strand starting at position 81 of SEQ ID NO: 1879195
gauacuuuguuggccaaau

SEQ ID NO: 1889695 - RNA, 19 nt, Artificial Sequence
  Description of Artificial Sequence: Synthetic oligonucleotide
  Antisense strand to SEQ ID NO: 1889694
auuuggccaacaaaguauc

SEQ ID NO: 1889696 - RNA, 19 nt, Artificial Sequence
  Description of Artificial Sequence: Synthetic oligonucleotide
  Sense strand starting at position 82 of SEQ ID NO: 1879195
auacuuuguuggccaaauu

SEQ ID NO: 1889697 - RNA, 19 nt, Artificial Sequence
  Description of Artificial Sequence: Synthetic oligonucleotide
  Antisense strand to SEQ ID NO: 1889696
aauuuggccaacaaaguau

SEQ ID NO: 1889698 - RNA, 19 nt, Artificial Sequence
  Description of Artificial Sequence: Synthetic oligonucleotide
  Sense strand starting at position 744 of SEQ ID NO: 1879195
ugucaacacuuggcucaau

SEQ ID NO: 1889699 - RNA, 19 nt, Artificial Sequence
  Description of Artificial Sequence: Synthetic oligonucleotide
  Antisense strand to SEQ ID NO: 1889698
auugagccaaguguugaca

SEQ ID NO: 1889700 - RNA, 19 nt, Artificial Sequence
  Description of Artificial Sequence: Synthetic oligonucleotide
  Sense strand starting at position 843 of SEQ ID NO: 1879195
gaagucaggugacuacauu

SEQ ID NO: 1889701 - RNA, 19 nt, Artificial Sequence
  Description of Artificial Sequence: Synthetic oligonucleotide
  Antisense strand to SEQ ID NO: 1889700
aauguagucaccugacuuc

SEQ ID NO: 1889702 - RNA, 19 nt, Artificial Sequence
  Description of Artificial Sequence: Synthetic oligonucleotide
  Sense strand starting at position 880 of SEQ ID NO: 1879195
ugcagcuaucuugaccauu

SEQ ID NO: 1889703 - RNA, 19 nt, Artificial Sequence
  Description of Artificial Sequence: Synthetic oligonucleotide
  Antisense strand to SEQ ID NO: 1889702
aauggucaagauagcugca

SEQ ID NO: 1889704 - RNA, 19 nt, Artificial Sequence
  Description of Artificial Sequence: Synthetic oligonucleotide
  Sense strand starting at position 893 of SEQ ID NO: 1879195
accauuaugugcucagcaa

SEQ ID NO: 1889705 - RNA, 19 nt, Artificial Sequence
  Description of Artificial Sequence: Synthetic oligonucleotide
  Antisense strand to SEQ ID NO: 1889704
uugcugagcacauaauggu

SEQ ID NO: 1889706 - RNA, 19 nt, Artificial Sequence
  Description of Artificial Sequence: Synthetic oligonucleotide
  Sense strand starting at position 894 of SEQ ID NO: 1879195
ccauuaugugcucagcaau

SEQ ID NO: 1889707 - RNA, 19 nt, Artificial Sequence
  Description of Artificial Sequence: Synthetic oligonucleotide
  Antisense strand to SEQ ID NO: 1889706
auugcugagcacauaaugg

SEQ ID NO: 1889708 - RNA, 19 nt, Artificial Sequence
  Description of Artificial Sequence: Synthetic oligonucleotide
  Sense strand starting at position 931 of SEQ ID NO: 1879195
agaugaacacuuugagcaa

SEQ ID NO: 1889709 - RNA, 19 nt, Artificial Sequence
  Description of Artificial Sequence: Synthetic oligonucleotide
  Antisense strand to SEQ ID NO: 1889708
uugcucaaaguguucaucu

SEQ ID NO: 1889710 - RNA, 19 nt, Artificial Sequence
  Description of Artificial Sequence: Synthetic oligonucleotide
  Sense strand starting at position 1367 of SEQ ID NO: 1879195
gugacaaucucuuugucuc

SEQ ID NO: 1889711 - RNA, 19 nt, Artificial Sequence
  Description of Artificial Sequence: Synthetic oligonucleotide
  Antisense strand to SEQ ID NO: 1889710
gagacaaagagauugucac

SEQ ID NO: 1889712 - RNA, 19 nt, Artificial Sequence
  Description of Artificial Sequence: Synthetic oligonucleotide
  Sense strand starting at position 1466 of SEQ ID NO: 1879195
ggagaaagcaggcauuguu

SEQ ID NO: 1889713 - RNA, 19 nt, Artificial Sequence
  Description of Artificial Sequence: Synthetic oligonucleotide
  Antisense strand to SEQ ID NO: 1889712
aacaaugccugcuuucucc

SEQ ID NO: 1889714 - RNA, 19 nt, Artificial Sequence
  Description of Artificial Sequence: Synthetic oligonucleotide
  Sense strand starting at position 1575 of SEQ ID NO: 1879195
ugacuuugucacgguaaga

SEQ ID NO: 1889715 - RNA, 19 nt, Artificial Sequence
  Description of Artificial Sequence: Synthetic oligonucleotide
  Antisense strand to SEQ ID NO: 1889714
ucuuaccgugacaaaguca

SEQ ID NO: 1889716 - RNA, 19 nt, Artificial Sequence
  Description of Artificial Sequence: Synthetic oligonucleotide
  Sense strand starting at position 1588 of SEQ ID NO: 1879195
guaagaguuggcuguugga

SEQ ID NO: 1889717 - RNA, 19 nt, Artificial Sequence
  Description of Artificial Sequence: Synthetic oligonucleotide
  Antisense strand to SEQ ID NO: 1889716
uccaacagccaacucuuac

SEQ ID NO: 1889718 - RNA, 19 nt, Artificial Sequence
  Description of Artificial Sequence: Synthetic oligonucleotide
  Sense strand starting at position 1597 of SEQ ID NO: 1879195
ggcuguuggaggcaaugau

SEQ ID NO: 1889719 - RNA, 19 nt, Artificial Sequence
  Description of Artificial Sequence: Synthetic oligonucleotide
  Antisense strand to SEQ ID NO: 1889718
aucauugccuccaacagcc

SEQ ID NO: 1889720 - RNA, 19 nt, Artificial Sequence
  Description of Artificial Sequence: Synthetic oligonucleotide
  Sense strand starting at position 1658 of SEQ ID NO: 1879195
uuagaaugugaauagugua

SEQ ID NO: 1889721 - RNA, 19 nt, Artificial Sequence
  Description of Artificial Sequence: Synthetic oligonucleotide
  Antisense strand to SEQ ID NO: 1889720
uacacuauucacauucuaa

SEQ ID NO: 1889722 - RNA, 19 nt, Artificial Sequence
  Description of Artificial Sequence: Synthetic oligonucleotide
  Sense strand starting at position 1663 of SEQ ID NO: 1879195
augugaauaguguacaucu

SEQ ID NO: 1889723 - RNA, 19 nt, Artificial Sequence
  Description of Artificial Sequence: Synthetic oligonucleotide
  Antisense strand to SEQ ID NO: 1889722
agauguacacuauucacau

SEQ ID NO: 1889724 - RNA, 19 nt, Artificial Sequence
  Description of Artificial Sequence: Synthetic oligonucleotide
  Sense strand starting at position 1665 of SEQ ID NO: 1879195
gugaauaguguacaucuaa

SEQ ID NO: 1889725 - RNA, 19 nt, Artificial Sequence
  Description of Artificial Sequence: Synthetic oligonucleotide
  Antisense strand to SEQ ID NO: 1889724
uuagauguacacuauucac

SEQ ID NO: 1889726 - RNA, 19 nt, Artificial Sequence
  Description of Artificial Sequence: Synthetic oligonucleotide
  Sense strand starting at position 1793 of SEQ ID NO: 1879195
uggcaauugcaauagaaac

SEQ ID NO: 1889727 - RNA, 19 nt, Artificial Sequence
  Description of Artificial Sequence: Synthetic oligonucleotide
  Antisense strand to SEQ ID NO: 1889726
guuucuauugcaauugcca

SEQ ID NO: 1889728 - RNA, 19 nt, Artificial Sequence
  Description of Artificial Sequence: Synthetic oligonucleotide
  Sense strand starting at position 1832 of SEQ ID NO: 1879195
cuggauaucacaggugaac

SEQ ID NO: 1889729 - RNA, 19 nt, Artificial Sequence
  Description of Artificial Sequence: Synthetic oligonucleotide
  Antisense strand to SEQ ID NO: 1889728
guucaccugugauauccag

SEQ ID NO: 1889730 - RNA, 19 nt, Artificial Sequence
  Description of Artificial Sequence: Synthetic oligonucleotide
  Sense strand starting at position 2286 of SEQ ID NO: 1879195
gauauaggcucccucugua

SEQ ID NO: 1889731 - RNA, 19 nt, Artificial Sequence
  Description of Artificial Sequence: Synthetic oligonucleotide
  Antisense strand to SEQ ID NO: 1889730
uacagagggagccuauauc

SEQ ID NO: 1889732 - RNA, 19 nt, Artificial Sequence
  Description of Artificial Sequence: Synthetic oligonucleotide
  Sense strand starting at position 2290 of SEQ ID NO: 1879195
uaggcucccucuguaauga

SEQ ID NO: 1889733 - RNA, 19 nt, Artificial Sequence
  Description of Artificial Sequence: Synthetic oligonucleotide
  Antisense strand to SEQ ID NO: 1889732
ucauuacagagggagccua

SEQ ID NO: 1889734 - RNA, 19 nt, Artificial Sequence
  Description of Artificial Sequence: Synthetic oligonucleotide
  Sense strand starting at position 2298 of SEQ ID NO: 1879195
cucuguaaugacugcauuu

SEQ ID NO: 1889735 - RNA, 19 nt, Artificial Sequence
  Description of Artificial Sequence: Synthetic oligonucleotide
  Antisense strand to SEQ ID NO: 1889734
aaaugcagucauuacagag

SEQ ID NO: 1889736 - RNA, 19 nt, Artificial Sequence
  Description of Artificial Sequence: Synthetic oligonucleotide
  Sense strand starting at position 2315 of SEQ ID NO: 1879195
uugauuaugcucugguaau

SEQ ID NO: 1889737 - RNA, 19 nt, Artificial Sequence
  Description of Artificial Sequence: Synthetic oligonucleotide
  Antisense strand to SEQ ID NO: 1889736
auuaccagagcauaaucaa

SEQ ID NO: 1889738 - RNA, 19 nt, Artificial Sequence
  Description of Artificial Sequence: Synthetic oligonucleotide
  Sense strand starting at position 2380 of SEQ ID NO: 1879195
gugccucaacuguaaccau

SEQ ID NO: 1889739 - RNA, 19 nt, Artificial Sequence
  Description of Artificial Sequence: Synthetic oligonucleotide
  Antisense strand to SEQ ID NO: 1889738
augguuacaguugaggcac

SEQ ID NO: 1889740 - RNA, 19 nt, Artificial Sequence
  Description of Artificial Sequence: Synthetic oligonucleotide
  Sense strand starting at position 2497 of SEQ ID NO: 1879195
gagccagauggauguauua

SEQ ID NO: 1889741 - RNA, 19 nt, Artificial Sequence
  Description of Artificial Sequence: Synthetic oligonucleotide
  Antisense strand to SEQ ID NO: 1889740
uaauacauccaucuggcuc

SEQ ID NO: 1889742 - RNA, 19 nt, Artificial Sequence
  Description of Artificial Sequence: Synthetic oligonucleotide
  Sense strand starting at position 2499 of SEQ ID NO: 1879195
gccagauggauguauuauu

SEQ ID NO: 1889743 - RNA, 19 nt, Artificial Sequence
  Description of Artificial Sequence: Synthetic oligonucleotide
  Antisense strand to SEQ ID NO: 1889742
aauaauacauccaucuggc

SEQ ID NO: 1889744 - RNA, 19 nt, Artificial Sequence
  Description of Artificial Sequence: Synthetic oligonucleotide
  Sense strand starting at position 2556 of SEQ ID NO: 1879195
gcaugaauuugaugaccag

SEQ ID NO: 1889745 - RNA, 19 nt, Artificial Sequence
  Description of Artificial Sequence: Synthetic oligonucleotide
  Antisense strand to SEQ ID NO: 1889744
cuggucaucaaauucaugc

SEQ ID NO: 1889746 - RNA, 19 nt, Artificial Sequence
  Description of Artificial Sequence: Synthetic oligonucleotide
  Sense strand starting at position 2642 of SEQ ID NO: 1879195
gugcgaguaaagcaguauu

SEQ ID NO: 1889747 - RNA, 19 nt, Artificial Sequence
  Description of Artificial Sequence: Synthetic oligonucleotide
  Antisense strand to SEQ ID NO: 1889746
aauacugcuuuacucgcac

SEQ ID NO: 1889748 - RNA, 19 nt, Artificial Sequence
  Description of Artificial Sequence: Synthetic oligonucleotide
  Sense strand starting at position 2650 of SEQ ID NO: 1879195
aaagcaguauuuggagaaa

SEQ ID NO: 1889749 - RNA, 19 nt, Artificial Sequence
  Description of Artificial Sequence: Synthetic oligonucleotide
  Antisense strand to SEQ ID NO: 1889748
uuucuccaaauacugcuuu

SEQ ID NO: 1889750 - RNA, 19 nt, Artificial Sequence
  Description of Artificial Sequence: Synthetic oligonucleotide
  Sense strand starting at position 2665 of SEQ ID NO: 1879195
gaaacuuccugccuguguu

SEQ ID NO: 1889751 - RNA, 19 nt, Artificial Sequence
  Description of Artificial Sequence: Synthetic oligonucleotide
  Antisense strand to SEQ ID NO: 1889750
aacacaggcaggaaguuuc

SEQ ID NO: 1889752 - RNA, 19 nt, Artificial Sequence
  Description of Artificial Sequence: Synthetic oligonucleotide
  Sense strand starting at position 2710 of SEQ ID NO: 1879195
uugcucuuuggugagguua

SEQ ID NO: 1889753 - RNA, 19 nt, Artificial Sequence
  Description of Artificial Sequence: Synthetic oligonucleotide
  Antisense strand to SEQ ID NO: 1889752
uaaccucaccaaagagcaa

SEQ ID NO: 1889754 - RNA, 19 nt, Artificial Sequence
  Description of Artificial Sequence: Synthetic oligonucleotide
  Sense strand starting at position 2767 of SEQ ID NO: 1879195
uagugugugcuguaaacca

SEQ ID NO: 1889755 - RNA, 19 nt, Artificial Sequence
  Description of Artificial Sequence: Synthetic oligonucleotide
  Antisense strand to SEQ ID NO: 1889754
ugguuuacagcacacacua

SEQ ID NO: 1889756 - RNA, 19 nt, Artificial Sequence
  Description of Artificial Sequence: Synthetic oligonucleotide
  Sense strand starting at position 2837 of SEQ ID NO: 1879195
uucugaaaguaauuccagu

SEQ ID NO: 1889757 - RNA, 19 nt, Artificial Sequence
  Description of Artificial Sequence: Synthetic oligonucleotide
  Antisense strand to SEQ ID NO: 1889756
acuggaauuacuuucagaa

SEQ ID NO: 1889758 - RNA, 19 nt, Artificial Sequence
  Description of Artificial Sequence: Synthetic oligonucleotide
  Sense strand starting at position 3283 of SEQ ID NO: 1879195
gcaugauuauggcucacca

SEQ ID NO: 1889759 - RNA, 19 nt, Artificial Sequence
  Description of Artificial Sequence: Synthetic oligonucleotide
  Antisense strand to SEQ ID NO: 1889758
uggugagccauaaucaugc

SEQ ID NO: 1889760 - RNA, 19 nt, Artificial Sequence
  Description of Artificial Sequence: Synthetic oligonucleotide
  Sense strand starting at position 3285 of SEQ ID NO: 1879195
augauuauggcucaccaca

SEQ ID NO: 1889761 - RNA, 19 nt, Artificial Sequence
  Description of Artificial Sequence: Synthetic oligonucleotide
  Antisense strand to SEQ ID NO: 1889760
uguggugagccauaaucau

SEQ ID NO: 1889762 - RNA, 19 nt, Artificial Sequence
  Description of Artificial Sequence: Synthetic oligonucleotide
  Sense strand starting at position 3540 of SEQ ID NO: 1879195
agccucgaauaaguauaau

SEQ ID NO: 1889763 - RNA, 19 nt, Artificial Sequence
  Description of Artificial Sequence: Synthetic oligonucleotide
  Antisense strand to SEQ ID NO: 1889762
auuauacuuauucgaggcu

SEQ ID NO: 1889764 - RNA, 19 nt, Artificial Sequence
  Description of Artificial Sequence: Synthetic oligonucleotide
  Sense strand starting at position 3566 of SEQ ID NO: 1879195
uaaucuugucccugaaacg

SEQ ID NO: 1889765 - RNA, 19 nt, Artificial Sequence
  Description of Artificial Sequence: Synthetic oligonucleotide
  Antisense strand to SEQ ID NO: 1889764
cguuucagggacaagauua

SEQ ID NO: 1889766 - RNA, 19 nt, Artificial Sequence
  Description of Artificial Sequence: Synthetic oligonucleotide
  Sense strand starting at position 3567 of SEQ ID NO: 1879195
aaucuugucccugaaacgu

SEQ ID NO: 1889767 - RNA, 19 nt, Artificial Sequence
  Description of Artificial Sequence: Synthetic oligonucleotide
  Antisense strand to SEQ ID NO: 1889766
acguuucagggacaagauu

SEQ ID NO: 1889768 - RNA, 19 nt, Artificial Sequence
  Description of Artificial Sequence: Synthetic oligonucleotide
  Sense strand starting at position 8 of SEQ ID NO: 1879196
ugauacauaggucagucau

SEQ ID NO: 1889769 - RNA, 19 nt, Artificial Sequence
  Description of Artificial Sequence: Synthetic oligonucleotide
  Antisense strand to SEQ ID NO: 1889768
augacugaccuauguauca

SEQ ID NO: 1889770 - RNA, 19 nt, Artificial Sequence
  Description of Artificial Sequence: Synthetic oligonucleotide
  Sense strand starting at position 141 of SEQ ID NO: 1879196
gagggagacuggucgcaaa

SEQ ID NO: 1889771 - RNA, 19 nt, Artificial Sequence
  Description of Artificial Sequence: Synthetic oligonucleotide
  Antisense strand to SEQ ID NO: 1889770
uuugcgaccagucucccuc

SEQ ID NO: 1889772 - RNA, 19 nt, Artificial Sequence
  Description of Artificial Sequence: Synthetic oligonucleotide
  Sense strand starting at position 257 of SEQ ID NO: 1879196
gcauauaguuagcugagga

SEQ ID NO: 1889773 - RNA, 19 nt, Artificial Sequence
  Description of Artificial Sequence: Synthetic oligonucleotide
  Antisense strand to SEQ ID NO: 1889772
uccucagcuaacuauaugc

SEQ ID NO: 1889774 - RNA, 19 nt, Artificial Sequence
  Description of Artificial Sequence: Synthetic oligonucleotide
  Sense strand starting at position 262 of SEQ ID NO: 1879196
uaguuagcugaggaaaugu

SEQ ID NO: 1889775 - RNA, 19 nt, Artificial Sequence
  Description of Artificial Sequence: Synthetic oligonucleotide
  Antisense strand to SEQ ID NO: 1889774
acauuuccucagcuaacua

SEQ ID NO: 1889776 - RNA, 19 nt, Artificial Sequence
  Description of Artificial Sequence: Synthetic oligonucleotide
  Sense strand starting at position 305 of SEQ ID NO: 1879196
uccuauucucuugaguugu

SEQ ID NO: 1889777 - RNA, 19 nt, Artificial Sequence
  Description of Artificial Sequence: Synthetic oligonucleotide
  Antisense strand to SEQ ID NO: 1889776
acaacucaagagaauagga

SEQ ID NO: 1889778 - RNA, 19 nt, Artificial Sequence
  Description of Artificial Sequence: Synthetic oligonucleotide
  Sense strand starting at position 307 of SEQ ID NO: 1879196
cuauucucuugaguuguua

SEQ ID NO: 1889779 - RNA, 19 nt, Artificial Sequence
  Description of Artificial Sequence: Synthetic oligonucleotide
  Antisense strand to SEQ ID NO: 1889778
uaacaacucaagagaauag

SEQ ID NO: 1889780 - RNA, 19 nt, Artificial Sequence
  Description of Artificial Sequence: Synthetic oligonucleotide
  Sense strand starting at position 337 of SEQ ID NO: 1879196
uguugacuguuaucugauu

SEQ ID NO: 1889781 - RNA, 19 nt, Artificial Sequence
  Description of Artificial Sequence: Synthetic oligonucleotide
  Antisense strand to SEQ ID NO: 1889780
aaucagauaacagucaaca

SEQ ID NO: 1889782 - RNA, 19 nt, Artificial Sequence
  Description of Artificial Sequence: Synthetic oligonucleotide
  Sense strand starting at position 629 of SEQ ID NO: 1879196
uugguuuaguaccugaauu

SEQ ID NO: 1889783 - RNA, 19 nt, Artificial Sequence
  Description of Artificial Sequence: Synthetic oligonucleotide
  Antisense strand to SEQ ID NO: 1889782
aauucagguacuaaaccaa

SEQ ID NO: 1889784 - RNA, 19 nt, Artificial Sequence
  Description of Artificial Sequence: Synthetic oligonucleotide
  Sense strand starting at position 2874 of SEQ ID NO: 1879196
uguuaaucguauccuagau

SEQ ID NO: 1889785 - RNA, 19 nt, Artificial Sequence
  Description of Artificial Sequence: Synthetic oligonucleotide
  Antisense strand to SEQ ID NO: 1889784
aucuaggauacgauuaaca

SEQ ID NO: 1889786 - RNA, 19 nt, Artificial Sequence
  Description of Artificial Sequence: Synthetic oligonucleotide
  Sense strand starting at position 2913 of SEQ ID NO: 1879196
auccauuaccaagguguuu

SEQ ID NO: 1889787 - RNA, 19 nt, Artificial Sequence
  Description of Artificial Sequence: Synthetic oligonucleotide
  Antisense strand to SEQ ID NO: 1889786
aaacaccuugguaauggau

SEQ ID NO: 1889788 - RNA, 19 nt, Artificial Sequence
  Description of Artificial Sequence: Synthetic oligonucleotide
  Sense strand starting at position 2953 of SEQ ID NO: 1879196
gagaaagauuaaggauaac

SEQ ID NO: 1889789 - RNA, 19 nt, Artificial Sequence
  Description of Artificial Sequence: Synthetic oligonucleotide
  Antisense strand to SEQ ID NO: 1889788
guuauccuuaaucuuucuc

SEQ ID NO: 1889790 - RNA, 19 nt, Artificial Sequence
  Description of Artificial Sequence: Synthetic oligonucleotide
  Sense strand starting at position 3064 of SEQ ID NO: 1879196
guacacaugugacucagaa

SEQ ID NO: 1889791 - RNA, 19 nt, Artificial Sequence
  Description of Artificial Sequence: Synthetic oligonucleotide
  Antisense strand to SEQ ID NO: 1889790
uucugagucacauguguac

SEQ ID NO: 1889792 - RNA, 19 nt, Artificial Sequence
  Description of Artificial Sequence: Synthetic oligonucleotide
  Sense strand starting at position 3154 of SEQ ID NO: 1879196
cauacuuguguagauguga

SEQ ID NO: 1889793 - RNA, 19 nt, Artificial Sequence
  Description of Artificial Sequence: Synthetic oligonucleotide
  Antisense strand to SEQ ID NO: 1889792
ucacaucuacacaaguaug

SEQ ID NO: 1889794 - RNA, 19 nt, Artificial Sequence
  Description of Artificial Sequence: Synthetic oligonucleotide
  Sense strand starting at position 3173 of SEQ ID NO: 1879196
gggagcaguuuccuuuaua

SEQ ID NO: 1889795 - RNA, 19 nt, Artificial Sequence
  Description of Artificial Sequence: Synthetic oligonucleotide
  Antisense strand to SEQ ID NO: 1889794
uauaaaggaaacugcuccc

SEQ ID NO: 1889796 - RNA, 19 nt, Artificial Sequence
  Description of Artificial Sequence: Synthetic oligonucleotide
  Sense strand starting at position 3174 of SEQ ID NO: 1879196
ggagcaguuuccuuuauau

SEQ ID NO: 1889797 - RNA, 19 nt, Artificial Sequence
  Description of Artificial Sequence: Synthetic oligonucleotide
  Antisense strand to SEQ ID NO: 1889796
auauaaaggaaacugcucc

SEQ ID NO: 1889798 - RNA, 19 nt, Artificial Sequence
  Description of Artificial Sequence: Synthetic oligonucleotide
  Sense strand starting at position 3176 of SEQ ID NO: 1879196
agcaguuuccuuuauauua

SEQ ID NO: 1889799 - RNA, 19 nt, Artificial Sequence
  Description of Artificial Sequence: Synthetic oligonucleotide
  Antisense strand to SEQ ID NO: 1889798
uaauauaaaggaaacugcu

SEQ ID NO: 1889800 - RNA, 19 nt, Artificial Sequence
  Description of Artificial Sequence: Synthetic oligonucleotide
  Sense strand starting at position 3248 of SEQ ID NO: 1879196
auggaagucguauagucau

SEQ ID NO: 1889801 - RNA, 19 nt, Artificial Sequence
  Description of Artificial Sequence: Synthetic oligonucleotide
  Antisense strand to SEQ ID NO: 1889800
augacuauacgacuuccau

SEQ ID NO: 1889802 - RNA, 19 nt, Artificial Sequence
  Description of Artificial Sequence: Synthetic oligonucleotide
  Sense strand starting at position 3251 of SEQ ID NO: 1879196
gaagucguauagucaugau

SEQ ID NO: 1889803 - RNA, 19 nt, Artificial Sequence
  Description of Artificial Sequence: Synthetic oligonucleotide
  Antisense strand to SEQ ID NO: 1889802
aucaugacuauacgacuuc

SEQ ID NO: 1889804 - RNA, 19 nt, Artificial Sequence
  Description of Artificial Sequence: Synthetic oligonucleotide
  Sense strand starting at position 3255 of SEQ ID NO: 1879196
ucguauagucaugauuguu

SEQ ID NO: 1889805 - RNA, 19 nt, Artificial Sequence
  Description of Artificial Sequence: Synthetic oligonucleotide
  Antisense strand to SEQ ID NO: 1889804
aacaaucaugacuauacga

SEQ ID NO: 1889806 - RNA, 19 nt, Artificial Sequence
  Description of Artificial Sequence: Synthetic oligonucleotide
  Sense strand starting at position 3331 of SEQ ID NO: 1879196
caacuauacgucuguauug

SEQ ID NO: 1889807 - RNA, 19 nt, Artificial Sequence
  Description of Artificial Sequence: Synthetic oligonucleotide
  Antisense strand to SEQ ID NO: 1889806
caauacagacguauaguug

SEQ ID NO: 1889808 - RNA, 19 nt, Artificial Sequence
  Description of Artificial Sequence: Synthetic oligonucleotide
  Sense strand starting at position 3333 of SEQ ID NO: 1879196
acuauacgucuguauugga

SEQ ID NO: 1889809 - RNA, 19 nt, Artificial Sequence
  Description of Artificial Sequence: Synthetic oligonucleotide
  Antisense strand to SEQ ID NO: 1889808
uccaauacagacguauagu

SEQ ID NO: 1889810 - RNA, 19 nt, Artificial Sequence
  Description of Artificial Sequence: Synthetic oligonucleotide
  Sense strand starting at position 3342 of SEQ ID NO: 1879196
cuguauuggagucauugga

SEQ ID NO: 1889811 - RNA, 19 nt, Artificial Sequence
  Description of Artificial Sequence: Synthetic oligonucleotide
  Antisense strand to SEQ ID NO: 1889810
uccaaugacuccaauacag

SEQ ID NO: 1889812 - RNA, 19 nt, Artificial Sequence
  Description of Artificial Sequence: Synthetic oligonucleotide
  Sense strand starting at position 3349 of SEQ ID NO: 1879196
ggagucauuggaggugagu

SEQ ID NO: 1889813 - RNA, 19 nt, Artificial Sequence
  Description of Artificial Sequence: Synthetic oligonucleotide
  Antisense strand to SEQ ID NO: 1889812
acucaccuccaaugacucc

SEQ ID NO: 1889814 - RNA, 19 nt, Artificial Sequence
  Description of Artificial Sequence: Synthetic oligonucleotide
  Sense strand starting at position 3351 of SEQ ID NO: 1879196
agucauuggaggugaguua

SEQ ID NO: 1889815 - RNA, 19 nt, Artificial Sequence
  Description of Artificial Sequence: Synthetic oligonucleotide
  Antisense strand to SEQ ID NO: 1889814
uaacucaccuccaaugacu

SEQ ID NO: 1889816 - RNA, 19 nt, Artificial Sequence
  Description of Artificial Sequence: Synthetic oligonucleotide
  Sense strand starting at position 3358 of SEQ ID NO: 1879196
ggaggugaguuacuacuga

SEQ ID NO: 1889817 - RNA, 19 nt, Artificial Sequence
  Description of Artificial Sequence: Synthetic oligonucleotide
  Antisense strand to SEQ ID NO: 1889816
ucaguaguaacucaccucc

SEQ ID NO: 1889818 - RNA, 19 nt, Artificial Sequence
  Description of Artificial Sequence: Synthetic oligonucleotide
  Sense strand starting at position 3436 of SEQ ID NO: 1879196
agaucucuggagugaaauu

SEQ ID NO: 1889819 - RNA, 19 nt, Artificial Sequence
  Description of Artificial Sequence: Synthetic oligonucleotide
  Antisense strand to SEQ ID NO: 1889818
aauuucacuccagagaucu

SEQ ID NO: 1889820 - RNA, 19 nt, Artificial Sequence
  Description of Artificial Sequence: Synthetic oligonucleotide
  Sense strand starting at position 3550 of SEQ ID NO: 1879196
gauauuuauuguuugucga

SEQ ID NO: 1889821 - RNA, 19 nt, Artificial Sequence
  Description of Artificial Sequence: Synthetic oligonucleotide
  Antisense strand to SEQ ID NO: 1889820
ucgacaaacaauaaauauc

SEQ ID NO: 1889822 - RNA, 19 nt, Artificial Sequence
  Description of Artificial Sequence: Synthetic oligonucleotide
  Sense strand starting at position 3553 of SEQ ID NO: 1879196
auuuauuguuugucgaaug

SEQ ID NO: 1889823 - RNA, 19 nt, Artificial Sequence
  Description of Artificial Sequence: Synthetic oligonucleotide
  Antisense strand to SEQ ID NO: 1889822
cauucgacaaacaauaaau

SEQ ID NO: 1889824 - RNA, 19 nt, Artificial Sequence
  Description of Artificial Sequence: Synthetic oligonucleotide
  Sense strand starting at position 3582 of SEQ ID NO: 1879196
uugaaagaaugauugcauu

SEQ ID NO: 1889825 - RNA, 19 nt, Artificial Sequence
  Description of Artificial Sequence: Synthetic oligonucleotide
  Antisense strand to SEQ ID NO: 1889824
aaugcaaucauucuuucaa

SEQ ID NO: 1889826 - RNA, 19 nt, Artificial Sequence
  Description of Artificial Sequence: Synthetic oligonucleotide
  Sense strand starting at position 3594 of SEQ ID NO: 1879196
uugcauuccuuguccuaag

SEQ ID NO: 1889827 - RNA, 19 nt, Artificial Sequence
  Description of Artificial Sequence: Synthetic oligonucleotide
  Antisense strand to SEQ ID NO: 1889826
cuuaggacaaggaaugcaa

SEQ ID NO: 1889828 - RNA, 19 nt, Artificial Sequence
  Description of Artificial Sequence: Synthetic oligonucleotide
  Sense strand starting at position 3595 of SEQ ID NO: 1879196
ugcauuccuuguccuaaga

SEQ ID NO: 1889829 - RNA, 19 nt, Artificial Sequence
  Description of Artificial Sequence: Synthetic oligonucleotide
  Antisense strand to SEQ ID NO: 1889828
ucuuaggacaaggaaugca

SEQ ID NO: 1889830 - RNA, 19 nt, Artificial Sequence
  Description of Artificial Sequence: Synthetic oligonucleotide
  Sense strand starting at position 3618 of SEQ ID NO: 1879196
ccaguagugguagauacaa

SEQ ID NO: 1889831 - RNA, 19 nt, Artificial Sequence
  Description of Artificial Sequence: Synthetic oligonucleotide
  Antisense strand to SEQ ID NO: 1889830
uuguaucuaccacuacugg

SEQ ID NO: 1889832 - RNA, 19 nt, Artificial Sequence
  Description of Artificial Sequence: Synthetic oligonucleotide
  Sense strand starting at position 3661 of SEQ ID NO: 1879196
guggcaauuugauagaaug

SEQ ID NO: 1889833 - RNA, 19 nt, Artificial Sequence
  Description of Artificial Sequence: Synthetic oligonucleotide
  Antisense strand to SEQ ID NO: 1889832
cauucuaucaaauugccac

SEQ ID NO: 1889834 - RNA, 19 nt, Artificial Sequence
  Description of Artificial Sequence: Synthetic oligonucleotide
  Sense strand starting at position 3669 of SEQ ID NO: 1879196
uugauagaauguccacaua

SEQ ID NO: 1889835 - RNA, 19 nt, Artificial Sequence
  Description of Artificial Sequence: Synthetic oligonucleotide
  Antisense strand to SEQ ID NO: 1889834
uauguggacauucuaucaa

SEQ ID NO: 1889836 - RNA, 19 nt, Artificial Sequence
  Description of Artificial Sequence: Synthetic oligonucleotide
  Sense strand starting at position 3759 of SEQ ID NO: 1879196
ugaacuguugaugagcaua

SEQ ID NO: 1889837 - RNA, 19 nt, Artificial Sequence
  Description of Artificial Sequence: Synthetic oligonucleotide
  Antisense strand to SEQ ID NO: 1889836
uaugcucaucaacaguuca

SEQ ID NO: 1889838 - RNA, 19 nt, Artificial Sequence
  Description of Artificial Sequence: Synthetic oligonucleotide
  Sense strand starting at position 3761 of SEQ ID NO: 1879196
aacuguugaugagcauaau

SEQ ID NO: 1889839 - RNA, 19 nt, Artificial Sequence
  Description of Artificial Sequence: Synthetic oligonucleotide
  Antisense strand to SEQ ID NO: 1889838
auuaugcucaucaacaguu

SEQ ID NO: 1889840 - RNA, 19 nt, Artificial Sequence
  Description of Artificial Sequence: Synthetic oligonucleotide
  Sense strand starting at position 3830 of SEQ ID NO: 1879196
cuauguauauccuuccaug

SEQ ID NO: 1889841 - RNA, 19 nt, Artificial Sequence
  Description of Artificial Sequence: Synthetic oligonucleotide
  Antisense strand to SEQ ID NO: 1889840
cauggaaggauauacauag

SEQ ID NO: 1889842 - RNA, 19 nt, Artificial Sequence
  Description of Artificial Sequence: Synthetic oligonucleotide
  Sense strand starting at position 3890 of SEQ ID NO: 1879196
ggaucaaauuaugucuaau

SEQ ID NO: 1889843 - RNA, 19 nt, Artificial Sequence
  Description of Artificial Sequence: Synthetic oligonucleotide
  Antisense strand to SEQ ID NO: 1889842
auuagacauaauuugaucc

SEQ ID NO: 1889844 - RNA, 19 nt, Artificial Sequence
  Description of Artificial Sequence: Synthetic oligonucleotide
  Sense strand starting at position 3930 of SEQ ID NO: 1879196
caguauuaaguugaaaguu

SEQ ID NO: 1889845 - RNA, 19 nt, Artificial Sequence
  Description of Artificial Sequence: Synthetic oligonucleotide
  Antisense strand to SEQ ID NO: 1889844
aacuuucaacuuaauacug

SEQ ID NO: 1889846 - RNA, 19 nt, Artificial Sequence
  Description of Artificial Sequence: Synthetic oligonucleotide
  Sense strand starting at position 3971 of SEQ ID NO: 1879196
cguauaaauuuguagaaag

SEQ ID NO: 1889847 - RNA, 19 nt, Artificial Sequence
  Description of Artificial Sequence: Synthetic oligonucleotide
  Antisense strand to SEQ ID NO: 1889846
cuuucuacaaauuuauacg

SEQ ID NO: 1889848 - RNA, 19 nt, Artificial Sequence
  Description of Artificial Sequence: Synthetic oligonucleotide
  Sense strand starting at position 38 of SEQ ID NO: 1879197
auccuagugggcuggaaua

SEQ ID NO: 1889849 - RNA, 19 nt, Artificial Sequence
  Description of Artificial Sequence: Synthetic oligonucleotide
  Antisense strand to SEQ ID NO: 1889848
uauuccagcccacuaggau

SEQ ID NO: 1889850 - RNA, 19 nt, Artificial Sequence
  Description of Artificial Sequence: Synthetic oligonucleotide
  Sense strand starting at position 48 of SEQ ID NO: 1879197
gcuggaauaacaggugagu

SEQ ID NO: 1889851 - RNA, 19 nt, Artificial Sequence
  Description of Artificial Sequence: Synthetic oligonucleotide
  Antisense strand to SEQ ID NO: 1889850
acucaccuguuauuccagc

SEQ ID NO: 1889852 - RNA, 19 nt, Artificial Sequence
  Description of Artificial Sequence: Synthetic oligonucleotide
  Sense strand starting at position 101 of SEQ ID NO: 1879197
gucacuuaggcuggcaaga

SEQ ID NO: 1889853 - RNA, 19 nt, Artificial Sequence
  Description of Artificial Sequence: Synthetic oligonucleotide
  Antisense strand to SEQ ID NO: 1889852
ucuugccagccuaagugac

SEQ ID NO: 1889854 - RNA, 19 nt, Artificial Sequence
  Description of Artificial Sequence: Synthetic oligonucleotide
  Sense strand starting at position 206 of SEQ ID NO: 1879197
ucugcuucucaaugugaac

SEQ ID NO: 1889855 - RNA, 19 nt, Artificial Sequence
  Description of Artificial Sequence: Synthetic oligonucleotide
  Antisense strand to SEQ ID NO: 1889854
guucacauugagaagcaga

SEQ ID NO: 1889856 - RNA, 19 nt, Artificial Sequence
  Description of Artificial Sequence: Synthetic oligonucleotide
  Sense strand starting at position 209 of SEQ ID NO: 1879197
gcuucucaaugugaacuua

SEQ ID NO: 1889857 - RNA, 19 nt, Artificial Sequence
  Description of Artificial Sequence: Synthetic oligonucleotide
  Antisense strand to SEQ ID NO: 1889856
uaaguucacauugagaagc

SEQ ID NO: 1889858 - RNA, 19 nt, Artificial Sequence
  Description of Artificial Sequence: Synthetic oligonucleotide
  Sense strand starting at position 444 of SEQ ID NO: 1879197
gugagacucugguuucgau

SEQ ID NO: 1889859 - RNA, 19 nt, Artificial Sequence
  Description of Artificial Sequence: Synthetic oligonucleotide
  Antisense strand to SEQ ID NO: 1889858
aucgaaaccagagucucac

SEQ ID NO: 1889860 - RNA, 19 nt, Artificial Sequence
  Description of Artificial Sequence: Synthetic oligonucleotide
  Sense strand starting at position 448 of SEQ ID NO: 1879197
gacucugguuucgaugaau

SEQ ID NO: 1889861 - RNA, 19 nt, Artificial Sequence
  Description of Artificial Sequence: Synthetic oligonucleotide
  Antisense strand to SEQ ID NO: 1889860
auucaucgaaaccagaguc

SEQ ID NO: 1889862 - RNA, 19 nt, Artificial Sequence
  Description of Artificial Sequence: Synthetic oligonucleotide
  Sense strand starting at position 451 of SEQ ID NO: 1879197
ucugguuucgaugaauaau

SEQ ID NO: 1889863 - RNA, 19 nt, Artificial Sequence
  Description of Artificial Sequence: Synthetic oligonucleotide
  Antisense strand to SEQ ID NO: 1889862
auuauucaucgaaaccaga

SEQ ID NO: 1889864 - RNA, 19 nt, Artificial Sequence
  Description of Artificial Sequence: Synthetic oligonucleotide
  Sense strand starting at position 672 of SEQ ID NO: 1879197
guggcagccaggugaucua

SEQ ID NO: 1889865 - RNA, 19 nt, Artificial Sequence
  Description of Artificial Sequence: Synthetic oligonucleotide
  Antisense strand to SEQ ID NO: 1889864
uagaucaccuggcugccac

SEQ ID NO: 1889866 - RNA, 19 nt, Artificial Sequence
  Description of Artificial Sequence: Synthetic oligonucleotide
  Sense strand starting at position 675 of SEQ ID NO: 1879197
gcagccaggugaucuagaa

SEQ ID NO: 1889867 - RNA, 19 nt, Artificial Sequence
  Description of Artificial Sequence: Synthetic oligonucleotide
  Antisense strand to SEQ ID NO: 1889866
uucuagaucaccuggcugc

SEQ ID NO: 1889868 - RNA, 19 nt, Artificial Sequence
  Description of Artificial Sequence: Synthetic oligonucleotide
  Sense strand starting at position 691 of SEQ ID NO: 1879197
gaaagaguguggcacugaa

SEQ ID NO: 1889869 - RNA, 19 nt, Artificial Sequence
  Description of Artificial Sequence: Synthetic oligonucleotide
  Antisense strand to SEQ ID NO: 1889868
uucagugccacacucuuuc

SEQ ID NO: 1889870 - RNA, 19 nt, Artificial Sequence
  Description of Artificial Sequence: Synthetic oligonucleotide
  Sense strand starting at position 736 of SEQ ID NO: 1879197
ggauguaccauguggugaa

SEQ ID NO: 1889871 - RNA, 19 nt, Artificial Sequence
  Description of Artificial Sequence: Synthetic oligonucleotide
  Antisense strand to SEQ ID NO: 1889870
uucaccacaugguacaucc

SEQ ID NO: 1889872 - RNA, 19 nt, Artificial Sequence
  Description of Artificial Sequence: Synthetic oligonucleotide
  Sense strand starting at position 804 of SEQ ID NO: 1879197
ggcaaauggugcuaauauu

SEQ ID NO: 1889873 - RNA, 19 nt, Artificial Sequence
  Description of Artificial Sequence: Synthetic oligonucleotide
  Antisense strand to SEQ ID NO: 1889872
aauauuagcaccauuugcc

SEQ ID NO: 1889874 - RNA, 19 nt, Artificial Sequence
  Description of Artificial Sequence: Synthetic oligonucleotide
  Sense strand starting at position 1113 of SEQ ID NO: 1879197
cccagccaucgcuagaauu

SEQ ID NO: 1889875 - RNA, 19 nt, Artificial Sequence
  Description of Artificial Sequence: Synthetic oligonucleotide
  Antisense strand to SEQ ID NO: 1889874
aauucuagcgauggcuggg

SEQ ID NO: 1889876 - RNA, 19 nt, Artificial Sequence
  Description of Artificial Sequence: Synthetic oligonucleotide
  Sense strand starting at position 1120 of SEQ ID NO: 1879197
aucgcuagaauuggagauu

SEQ ID NO: 1889877 - RNA, 19 nt, Artificial Sequence
  Description of Artificial Sequence: Synthetic oligonucleotide
  Antisense strand to SEQ ID NO: 1889876
aaucuccaauucuagcgau

SEQ ID NO: 1889878 - RNA, 19 nt, Artificial Sequence
  Description of Artificial Sequence: Synthetic oligonucleotide
  Sense strand starting at position 1129 of SEQ ID NO: 1879197
auuggagauuccuggagug

SEQ ID NO: 1889879 - RNA, 19 nt, Artificial Sequence
  Description of Artificial Sequence: Synthetic oligonucleotide
  Antisense strand to SEQ ID NO: 1889878
cacuccaggaaucuccaau

SEQ ID NO: 1889880 - RNA, 19 nt, Artificial Sequence
  Description of Artificial Sequence: Synthetic oligonucleotide
  Sense strand starting at position 1132 of SEQ ID NO: 1879197
ggagauuccuggagugggu

SEQ ID NO: 1889881 - RNA, 19 nt, Artificial Sequence
  Description of Artificial Sequence: Synthetic oligonucleotide
  Antisense strand to SEQ ID NO: 1889880
acccacuccaggaaucucc

SEQ ID NO: 1889882 - RNA, 19 nt, Artificial Sequence
  Description of Artificial Sequence: Synthetic oligonucleotide
  Sense strand starting at position 1134 of SEQ ID NO: 1879197
agauuccuggaguggguua

SEQ ID NO: 1889883 - RNA, 19 nt, Artificial Sequence
  Description of Artificial Sequence: Synthetic oligonucleotide
  Antisense strand to SEQ ID NO: 1889882
uaacccacuccaggaaucu

SEQ ID NO: 1889884 - RNA, 19 nt, Artificial Sequence
  Description of Artificial Sequence: Synthetic oligonucleotide
  Sense strand starting at position 1265 of SEQ ID NO: 1879197
cauugucacccuggugagu

SEQ ID NO: 1889885 - RNA, 19 nt, Artificial Sequence
  Description of Artificial Sequence: Synthetic oligonucleotide
  Antisense strand to SEQ ID NO: 1889884
acucaccagggugacaaug

SEQ ID NO: 1889886 - RNA, 19 nt, Artificial Sequence
  Description of Artificial Sequence: Synthetic oligonucleotide
  Sense strand starting at position 1368 of SEQ ID NO: 1879197
uggacugugccaggcgaua

SEQ ID NO: 1889887 - RNA, 19 nt, Artificial Sequence
  Description of Artificial Sequence: Synthetic oligonucleotide
  Antisense strand to SEQ ID NO: 1889886
uaucgccuggcacagucca

SEQ ID NO: 1889888 - RNA, 19 nt, Artificial Sequence
  Description of Artificial Sequence: Synthetic oligonucleotide
  Sense strand starting at position 1452 of SEQ ID NO: 1879197
ugcacaaugcuagauucca

SEQ ID NO: 1889889 - RNA, 19 nt, Artificial Sequence
  Description of Artificial Sequence: Synthetic oligonucleotide
  Antisense strand to SEQ ID NO: 1889888
uggaaucuagcauugugca

SEQ ID NO: 1889890 - RNA, 19 nt, Artificial Sequence
  Description of Artificial Sequence: Synthetic oligonucleotide
  Sense strand starting at position 1603 of SEQ ID NO: 1879197
uccaguuguccagagcuag

SEQ ID NO: 1889891 - RNA, 19 nt, Artificial Sequence
  Description of Artificial Sequence: Synthetic oligonucleotide
  Antisense strand to SEQ ID NO: 1889890
cuagcucuggacaacugga

SEQ ID NO: 1889892 - RNA, 19 nt, Artificial Sequence
  Description of Artificial Sequence: Synthetic oligonucleotide
  Sense strand starting at position 1617 of SEQ ID NO: 1879197
gcuagaugugccugaggaa

SEQ ID NO: 1889893 - RNA, 19 nt, Artificial Sequence
  Description of Artificial Sequence: Synthetic oligonucleotide
  Antisense strand to SEQ ID NO: 1889892
uuccucaggcacaucuagc

SEQ ID NO: 1889894 - RNA, 19 nt, Artificial Sequence
  Description of Artificial Sequence: Synthetic oligonucleotide
  Sense strand starting at position 1618 of SEQ ID NO: 1879197
cuagaugugccugaggaac

SEQ ID NO: 1889895 - RNA, 19 nt, Artificial Sequence
  Description of Artificial Sequence: Synthetic oligonucleotide
  Antisense strand to SEQ ID NO: 1889894
guuccucaggcacaucuag

SEQ ID NO: 1889896 - RNA, 19 nt, Artificial Sequence
  Description of Artificial Sequence: Synthetic oligonucleotide
  Sense strand starting at position 1856 of SEQ ID NO: 1879197
acaggaaggccgugucuau

SEQ ID NO: 1889897 - RNA, 19 nt, Artificial Sequence
  Description of Artificial Sequence: Synthetic oligonucleotide
  Antisense strand to SEQ ID NO: 1889896
auagacacggccuuccugu

SEQ ID NO: 1889898 - RNA, 19 nt, Artificial Sequence
  Description of Artificial Sequence: Synthetic oligonucleotide
  Sense strand starting at position 2457 of SEQ ID NO: 1879197
ccgugugguccuggaggau

SEQ ID NO: 1889899 - RNA, 19 nt, Artificial Sequence
  Description of Artificial Sequence: Synthetic oligonucleotide
  Antisense strand to SEQ ID NO: 1889898
auccuccaggaccacacgg

SEQ ID NO: 1889900 - RNA, 19 nt, Artificial Sequence
  Description of Artificial Sequence: Synthetic oligonucleotide
  Sense strand starting at position 2507 of SEQ ID NO: 1879197
cguggagugacaugguuaa

SEQ ID NO: 1889901 - RNA, 19 nt, Artificial Sequence
  Description of Artificial Sequence: Synthetic oligonucleotide
  Antisense strand to SEQ ID NO: 1889900
uuaaccaugucacuccacg

SEQ ID NO: 1889902 - RNA, 19 nt, Artificial Sequence
  Description of Artificial Sequence: Synthetic oligonucleotide
  Sense strand starting at position 2511 of SEQ ID NO: 1879197
gagugacaugguuaaaguc

SEQ ID NO: 1889903 - RNA, 19 nt, Artificial Sequence
  Description of Artificial Sequence: Synthetic oligonucleotide
  Antisense strand to SEQ ID NO: 1889902
gacuuuaaccaugucacuc

SEQ ID NO: 1889904 - RNA, 19 nt, Artificial Sequence
  Description of Artificial Sequence: Synthetic oligonucleotide
  Sense strand starting at position 2519 of SEQ ID NO: 1879197
ugguuaaagucuugaaaga

SEQ ID NO: 1889905 - RNA, 19 nt, Artificial Sequence
  Description of Artificial Sequence: Synthetic oligonucleotide
  Antisense strand to SEQ ID NO: 1889904
ucuuucaagacuuuaacca

SEQ ID NO: 1889906 - RNA, 19 nt, Artificial Sequence
  Description of Artificial Sequence: Synthetic oligonucleotide
  Sense strand starting at position 2802 of SEQ ID NO: 1879197
gagggcaaaucugucucua

SEQ ID NO: 1889907 - RNA, 19 nt, Artificial Sequence
  Description of Artificial Sequence: Synthetic oligonucleotide
  Antisense strand to SEQ ID NO: 1889906
uagagacagauuugcccuc

SEQ ID NO: 1889908 - RNA, 19 nt, Artificial Sequence
  Description of Artificial Sequence: Synthetic oligonucleotide
  Sense strand starting at position 2804 of SEQ ID NO: 1879197
gggcaaaucugucucuaaa

SEQ ID NO: 1889909 - RNA, 19 nt, Artificial Sequence
  Description of Artificial Sequence: Synthetic oligonucleotide
  Antisense strand to SEQ ID NO: 1889908
uuuagagacagauuugccc

SEQ ID NO: 1889910 - RNA, 19 nt, Artificial Sequence
  Description of Artificial Sequence: Synthetic oligonucleotide
  Sense strand starting at position 2950 of SEQ ID NO: 1879197
ggcagagauuguuagaaug

SEQ ID NO: 1889911 - RNA, 19 nt, Artificial Sequence
  Description of Artificial Sequence: Synthetic oligonucleotide
  Antisense strand to SEQ ID NO: 1889910
cauucuaacaaucucugcc

SEQ ID NO: 1889912 - RNA, 19 nt, Artificial Sequence
  Description of Artificial Sequence: Synthetic oligonucleotide
  Sense strand starting at position 2952 of SEQ ID NO: 1879197
cagagauuguuagaaugga

SEQ ID NO: 1889913 - RNA, 19 nt, Artificial Sequence
  Description of Artificial Sequence: Synthetic oligonucleotide
  Antisense strand to SEQ ID NO: 1889912
uccauucuaacaaucucug

SEQ ID NO: 1889914 - RNA, 19 nt, Artificial Sequence
  Description of Artificial Sequence: Synthetic oligonucleotide
  Sense strand starting at position 3547 of SEQ ID NO: 1879197
gagagauguuaucucuaca

SEQ ID NO: 1889915 - RNA, 19 nt, Artificial Sequence
  Description of Artificial Sequence: Synthetic oligonucleotide
  Antisense strand to SEQ ID NO: 1889914
uguagagauaacaucucuc

SEQ ID NO: 1889916 - RNA, 19 nt, Artificial Sequence
  Description of Artificial Sequence: Synthetic oligonucleotide
  Sense strand starting at position 3825 of SEQ ID NO: 1879197
gucaauguauaugcaaaua

SEQ ID NO: 1889917 - RNA, 19 nt, Artificial Sequence
  Description of Artificial Sequence: Synthetic oligonucleotide
  Antisense strand to SEQ ID NO: 1889916
uauuugcauauacauugac

SEQ ID NO: 1889918 - RNA, 19 nt, Artificial Sequence
  Description of Artificial Sequence: Synthetic oligonucleotide
  Sense strand starting at position 3936 of SEQ ID NO: 1879197
ucucaacaguuguagaaca

SEQ ID NO: 1889919 - RNA, 19 nt, Artificial Sequence
  Description of Artificial Sequence: Synthetic oligonucleotide
  Antisense strand to SEQ ID NO: 1889918
uguucuacaacuguugaga

SEQ ID NO: 1889920 - RNA, 19 nt, Artificial Sequence
  Description of Artificial Sequence: Synthetic oligonucleotide
  Sense strand starting at position 3938 of SEQ ID NO: 1879197
ucaacaguuguagaacagu

SEQ ID NO: 1889921 - RNA, 19 nt, Artificial Sequence
  Description of Artificial Sequence: Synthetic oligonucleotide
  Antisense strand to SEQ ID NO: 1889920
acuguucuacaacuguuga

SEQ ID NO: 1889922 - RNA, 19 nt, Artificial Sequence
  Description of Artificial Sequence: Synthetic oligonucleotide
  Sense strand starting at position 3947 of SEQ ID NO: 1879197
guagaacaguugucaguca

SEQ ID NO: 1889923 - RNA, 19 nt, Artificial Sequence
  Description of Artificial Sequence: Synthetic oligonucleotide
  Antisense strand to SEQ ID NO: 1889922
ugacugacaacuguucuac

SEQ ID NO: 1889924 - RNA, 19 nt, Artificial Sequence
  Description of Artificial Sequence: Synthetic oligonucleotide
  Sense strand starting at position 3948 of SEQ ID NO: 1879197
uagaacaguugucagucau

SEQ ID NO: 1889925 - RNA, 19 nt, Artificial Sequence
  Description of Artificial Sequence: Synthetic oligonucleotide
  Antisense strand to SEQ ID NO: 1889924
augacugacaacuguucua

SEQ ID NO: 1889926 - RNA, 19 nt, Artificial Sequence
  Description of Artificial Sequence: Synthetic oligonucleotide
  Sense strand starting at position 3954 of SEQ ID NO: 1879197
aguugucagucauaauuua

SEQ ID NO: 1889927 - RNA, 19 nt, Artificial Sequence
  Description of Artificial Sequence: Synthetic oligonucleotide
  Antisense strand to SEQ ID NO: 1889926
uaaauuaugacugacaacu

SEQ ID NO: 1889928 - RNA, 19 nt, Artificial Sequence
  Description of Artificial Sequence: Synthetic oligonucleotide
  Sense strand starting at position 33 of SEQ ID NO: 1879198
acacuuguauaguuaggaa

SEQ ID NO: 1889929 - RNA, 19 nt, Artificial Sequence
  Description of Artificial Sequence: Synthetic oligonucleotide
  Antisense strand to SEQ ID NO: 1889928
uuccuaacuauacaagugu

SEQ ID NO: 1889930 - RNA, 19 nt, Artificial Sequence
  Description of Artificial Sequence: Synthetic oligonucleotide
  Sense strand starting at position 101 of SEQ ID NO: 1879198
cuaaucaacggguggauaa

SEQ ID NO: 1889931 - RNA, 19 nt, Artificial Sequence
  Description of Artificial Sequence: Synthetic oligonucleotide
  Antisense strand to SEQ ID NO: 1889930
uuauccacccguugauuag

SEQ ID NO: 1889932 - RNA, 19 nt, Artificial Sequence
  Description of Artificial Sequence: Synthetic oligonucleotide
  Sense strand starting at position 102 of SEQ ID NO: 1879198
uaaucaacggguggauaau

SEQ ID NO: 1889933 - RNA, 19 nt, Artificial Sequence
  Description of Artificial Sequence: Synthetic oligonucleotide
  Antisense strand to SEQ ID NO: 1889932
auuauccacccguugauua

SEQ ID NO: 1889934 - RNA, 19 nt, Artificial Sequence
  Description of Artificial Sequence: Synthetic oligonucleotide
  Sense strand starting at position 471 of SEQ ID NO: 1879198
cguuuacuguuauuuaacu

SEQ ID NO: 1889935 - RNA, 19 nt, Artificial Sequence
  Description of Artificial Sequence: Synthetic oligonucleotide
  Antisense strand to SEQ ID NO: 1889934
aguuaaauaacaguaaacg

SEQ ID NO: 1889936 - RNA, 19 nt, Artificial Sequence
  Description of Artificial Sequence: Synthetic oligonucleotide
  Sense strand starting at position 601 of SEQ ID NO: 1879198
gcauaacaugggcauucua

SEQ ID NO: 1889937 - RNA, 19 nt, Artificial Sequence
  Description of Artificial Sequence: Synthetic oligonucleotide
  Antisense strand to SEQ ID NO: 1889936
uagaaugcccauguuaugc

SEQ ID NO: 1889938 - RNA, 19 nt, Artificial Sequence
  Description of Artificial Sequence: Synthetic oligonucleotide
  Sense strand starting at position 616 of SEQ ID NO: 1879198
ucuacacugcuuugugaua

SEQ ID NO: 1889939 - RNA, 19 nt, Artificial Sequence
  Description of Artificial Sequence: Synthetic oligonucleotide
  Antisense strand to SEQ ID NO: 1889938
uaucacaaagcaguguaga

SEQ ID NO: 1889940 - RNA, 19 nt, Artificial Sequence
  Description of Artificial Sequence: Synthetic oligonucleotide
  Sense strand starting at position 617 of SEQ ID NO: 1879198
cuacacugcuuugugauaa

SEQ ID NO: 1889941 - RNA, 19 nt, Artificial Sequence
  Description of Artificial Sequence: Synthetic oligonucleotide
  Antisense strand to SEQ ID NO: 1889940
uuaucacaaagcaguguag

SEQ ID NO: 1889942 - RNA, 19 nt, Artificial Sequence
  Description of Artificial Sequence: Synthetic oligonucleotide
  Sense strand starting at position 659 of SEQ ID NO: 1879198
gcacuugguccaugcauuu

SEQ ID NO: 1889943 - RNA, 19 nt, Artificial Sequence
  Description of Artificial Sequence: Synthetic oligonucleotide
  Antisense strand to SEQ ID NO: 1889942
aaaugcauggaccaagugc

SEQ ID NO: 1889944 - RNA, 19 nt, Artificial Sequence
  Description of Artificial Sequence: Synthetic oligonucleotide
  Sense strand starting at position 877 of SEQ ID NO: 1879198
caggaaacauuguugaacu

SEQ ID NO: 1889945 - RNA, 19 nt, Artificial Sequence
  Description of Artificial Sequence: Synthetic oligonucleotide
  Antisense strand to SEQ ID NO: 1889944
aguucaacaauguuuccug

SEQ ID NO: 1889946 - RNA, 19 nt, Artificial Sequence
  Description of Artificial Sequence: Synthetic oligonucleotide
  Sense strand starting at position 940 of SEQ ID NO: 1879198
cccaucgcuuauguaauaa

SEQ ID NO: 1889947 - RNA, 19 nt, Artificial Sequence
  Description of Artificial Sequence: Synthetic oligonucleotide
  Antisense strand to SEQ ID NO: 1889946
uuauuacauaagcgauggg

SEQ ID NO: 1889948 - RNA, 19 nt, Artificial Sequence
  Description of Artificial Sequence: Synthetic oligonucleotide
  Sense strand starting at position 1213 of SEQ ID NO: 1879198
agaacuuggccauaacagu

SEQ ID NO: 1889949 - RNA, 19 nt, Artificial Sequence
  Description of Artificial Sequence: Synthetic oligonucleotide
  Antisense strand to SEQ ID NO: 1889948
acuguuauggccaaguucu

SEQ ID NO: 1889950 - RNA, 19 nt, Artificial Sequence
  Description of Artificial Sequence: Synthetic oligonucleotide
  Sense strand starting at position 1248 of SEQ ID NO: 1879198
gugacuaaaguuugaaaga

SEQ ID NO: 1889951 - RNA, 19 nt, Artificial Sequence
  Description of Artificial Sequence: Synthetic oligonucleotide
  Antisense strand to SEQ ID NO: 1889950
ucuuucaaacuuuagucac

SEQ ID NO: 1889952 - RNA, 19 nt, Artificial Sequence
  Description of Artificial Sequence: Synthetic oligonucleotide
  Sense strand starting at position 1865 of SEQ ID NO: 1879198
ggccuaaaguaucuaggga

SEQ ID NO: 1889953 - RNA, 19 nt, Artificial Sequence
  Description of Artificial Sequence: Synthetic oligonucleotide
  Antisense strand to SEQ ID NO: 1889952
ucccuagauacuuuaggcc

SEQ ID NO: 1889954 - RNA, 19 nt, Artificial Sequence
  Description of Artificial Sequence: Synthetic oligonucleotide
  Sense strand starting at position 1966 of SEQ ID NO: 1879198
caucuugcgcagucagagu

SEQ ID NO: 1889955 - RNA, 19 nt, Artificial Sequence
  Description of Artificial Sequence: Synthetic oligonucleotide
  Antisense strand to SEQ ID NO: 1889954
acucugacugcgcaagaug

SEQ ID NO: 1889956 - RNA, 19 nt, Artificial Sequence
  Description of Artificial Sequence: Synthetic oligonucleotide
  Sense strand starting at position 1975 of SEQ ID NO: 1879198
cagucagagucccugaaug

SEQ ID NO: 1889957 - RNA, 19 nt, Artificial Sequence
  Description of Artificial Sequence: Synthetic oligonucleotide
  Antisense strand to SEQ ID NO: 1889956
cauucagggacucugacug

SEQ ID NO: 1889958 - RNA, 19 nt, Artificial Sequence
  Description of Artificial Sequence: Synthetic oligonucleotide
  Sense strand starting at position 1992 of SEQ ID NO: 1879198
ugccuuaacccggaauucu

SEQ ID NO: 1889959 - RNA, 19 nt, Artificial Sequence
  Description of Artificial Sequence: Synthetic oligonucleotide
  Antisense strand to SEQ ID NO: 1889958
agaauuccggguuaaggca

SEQ ID NO: 1889960 - RNA, 19 nt, Artificial Sequence
  Description of Artificial Sequence: Synthetic oligonucleotide
  Sense strand starting at position 2001 of SEQ ID NO: 1879198
ccggaauucugcucaagga

SEQ ID NO: 1889961 - RNA, 19 nt, Artificial Sequence
  Description of Artificial Sequence: Synthetic oligonucleotide
  Antisense strand to SEQ ID NO: 1889960
uccuugagcagaauuccgg

SEQ ID NO: 1889962 - RNA, 19 nt, Artificial Sequence
  Description of Artificial Sequence: Synthetic oligonucleotide
  Sense strand starting at position 2002 of SEQ ID NO: 1879198
cggaauucugcucaaggag

SEQ ID NO: 1889963 - RNA, 19 nt, Artificial Sequence
  Description of Artificial Sequence: Synthetic oligonucleotide
  Antisense strand to SEQ ID NO: 1889962
cuccuugagcagaauuccg

SEQ ID NO: 1889964 - RNA, 19 nt, Artificial Sequence
  Description of Artificial Sequence: Synthetic oligonucleotide
  Sense strand starting at position 2072 of SEQ ID NO: 1879198
acccgaacuucgucuuaaa

SEQ ID NO: 1889965 - RNA, 19 nt, Artificial Sequence
  Description of Artificial Sequence: Synthetic oligonucleotide
  Antisense strand to SEQ ID NO: 1889964
uuuaagacgaaguucgggu

SEQ ID NO: 1889966 - RNA, 19 nt, Artificial Sequence
  Description of Artificial Sequence: Synthetic oligonucleotide
  Sense strand starting at position 2921 of SEQ ID NO: 1879198
uguguccaccuuuauuaaa

SEQ ID NO: 1889967 - RNA, 19 nt, Artificial Sequence
  Description of Artificial Sequence: Synthetic oligonucleotide
  Antisense strand to SEQ ID NO: 1889966
uuuaauaaagguggacaca

SEQ ID NO: 1889968 - RNA, 19 nt, Artificial Sequence
  Description of Artificial Sequence: Synthetic oligonucleotide
  Sense strand starting at position 2941 of SEQ ID NO: 1879198
guauuauaggacuguagau

SEQ ID NO: 1889969 - RNA, 19 nt, Artificial Sequence
  Description of Artificial Sequence: Synthetic oligonucleotide
  Antisense strand to SEQ ID NO: 1889968
aucuacaguccuauaauac

SEQ ID NO: 1889970 - RNA, 19 nt, Artificial Sequence
  Description of Artificial Sequence: Synthetic oligonucleotide
  Sense strand starting at position 2948 of SEQ ID NO: 1879198
aggacuguagauuguugaa

SEQ ID NO: 1889971 - RNA, 19 nt, Artificial Sequence
  Description of Artificial Sequence: Synthetic oligonucleotide
  Antisense strand to SEQ ID NO: 1889970
uucaacaaucuacaguccu

SEQ ID NO: 1889972 - RNA, 19 nt, Artificial Sequence
  Description of Artificial Sequence: Synthetic oligonucleotide
  Sense strand starting at position 2950 of SEQ ID NO: 1879198
gacuguagauuguugaaag

SEQ ID NO: 1889973 - RNA, 19 nt, Artificial Sequence
  Description of Artificial Sequence: Synthetic oligonucleotide
  Antisense strand to SEQ ID NO: 1889972
cuuucaacaaucuacaguc

SEQ ID NO: 1889974 - RNA, 19 nt, Artificial Sequence
  Description of Artificial Sequence: Synthetic oligonucleotide
  Sense strand starting at position 3076 of SEQ ID NO: 1879198
uuuauaggcucuuugaaac

SEQ ID NO: 1889975 - RNA, 19 nt, Artificial Sequence
  Description of Artificial Sequence: Synthetic oligonucleotide
  Antisense strand to SEQ ID NO: 1889974
guuucaaagagccuauaaa

SEQ ID NO: 1889976 - RNA, 19 nt, Artificial Sequence
  Description of Artificial Sequence: Synthetic oligonucleotide
  Sense strand starting at position 3099 of SEQ ID NO: 1879198
guaauuucuugggaaggcu

SEQ ID NO: 1889977 - RNA, 19 nt, Artificial Sequence
  Description of Artificial Sequence: Synthetic oligonucleotide
  Antisense strand to SEQ ID NO: 1889976
agccuucccaagaaauuac

SEQ ID NO: 1889978 - RNA, 19 nt, Artificial Sequence
  Description of Artificial Sequence: Synthetic oligonucleotide
  Sense strand starting at position 3165 of SEQ ID NO: 1879198
accuuucccucaguaugua

SEQ ID NO: 1889979 - RNA, 19 nt, Artificial Sequence
  Description of Artificial Sequence: Synthetic oligonucleotide
  Antisense strand to SEQ ID NO: 1889978
uacauacugagggaaaggu

SEQ ID NO: 1889980 - RNA, 19 nt, Artificial Sequence
  Description of Artificial Sequence: Synthetic oligonucleotide
  Sense strand starting at position 3166 of SEQ ID NO: 1879198
ccuuucccucaguauguaa

SEQ ID NO: 1889981 - RNA, 19 nt, Artificial Sequence
  Description of Artificial Sequence: Synthetic oligonucleotide
  Antisense strand to SEQ ID NO: 1889980
uuacauacugagggaaagg

SEQ ID NO: 1889982 - RNA, 19 nt, Artificial Sequence
  Description of Artificial Sequence: Synthetic oligonucleotide
  Sense strand starting at position 3168 of SEQ ID NO: 1879198
uuucccucaguauguaauu

SEQ ID NO: 1889983 - RNA, 19 nt, Artificial Sequence
  Description of Artificial Sequence: Synthetic oligonucleotide
  Antisense strand to SEQ ID NO: 1889982
aauuacauacugagggaaa

SEQ ID NO: 1889984 - RNA, 19 nt, Artificial Sequence
  Description of Artificial Sequence: Synthetic oligonucleotide
  Sense strand starting at position 3193 of SEQ ID NO: 1879198
uguuauuugcaguaguuag

SEQ ID NO: 1889985 - RNA, 19 nt, Artificial Sequence
  Description of Artificial Sequence: Synthetic oligonucleotide
  Antisense strand to SEQ ID NO: 1889984
cuaacuacugcaaauaaca

SEQ ID NO: 1889986 - RNA, 19 nt, Artificial Sequence
  Description of Artificial Sequence: Synthetic oligonucleotide
  Sense strand starting at position 3214 of SEQ ID NO: 1879198
ucuguaaaguugcuggaaa

SEQ ID NO: 1889987 - RNA, 19 nt, Artificial Sequence
  Description of Artificial Sequence: Synthetic oligonucleotide
  Antisense strand to SEQ ID NO: 1889986
uuuccagcaacuuuacaga

SEQ ID NO: 1889988 - RNA, 19 nt, Artificial Sequence
  Description of Artificial Sequence: Synthetic oligonucleotide
  Sense strand starting at position 3216 of SEQ ID NO: 1879198
uguaaaguugcuggaaaca

SEQ ID NO: 1889989 - RNA, 19 nt, Artificial Sequence
  Description of Artificial Sequence: Synthetic oligonucleotide
  Antisense strand to SEQ ID NO: 1889988
uguuuccagcaacuuuaca

SEQ ID NO: 1889990 - RNA, 19 nt, Artificial Sequence
  Description of Artificial Sequence: Synthetic oligonucleotide
  Sense strand starting at position 3488 of SEQ ID NO: 1879198
ugugcuuaggagcacuaua

SEQ ID NO: 1889991 - RNA, 19 nt, Artificial Sequence
  Description of Artificial Sequence: Synthetic oligonucleotide
  Antisense strand to SEQ ID NO: 1889990
uauagugcuccuaagcaca

SEQ ID NO: 1889992 - RNA, 19 nt, Artificial Sequence
  Description of Artificial Sequence: Synthetic oligonucleotide
  Sense strand starting at position 3773 of SEQ ID NO: 1879198
uccagaauuugaggugaaa

SEQ ID NO: 1889993 - RNA, 19 nt, Artificial Sequence
  Description of Artificial Sequence: Synthetic oligonucleotide
  Antisense strand to SEQ ID NO: 1889992
uuucaccucaaauucugga

SEQ ID NO: 1889994 - RNA, 19 nt, Artificial Sequence
  Description of Artificial Sequence: Synthetic oligonucleotide
  Sense strand starting at position 3792 of SEQ ID NO: 1879198
ggauuacuuuagcccgaga

SEQ ID NO: 1889995 - RNA, 19 nt, Artificial Sequence
  Description of Artificial Sequence: Synthetic oligonucleotide
  Antisense strand to SEQ ID NO: 1889994
ucucgggcuaaaguaaucc

SEQ ID NO: 1889996 - RNA, 19 nt, Artificial Sequence
  Description of Artificial Sequence: Synthetic oligonucleotide
  Sense strand starting at position 3831 of SEQ ID NO: 1879198
aagauagugucacuguacu

SEQ ID NO: 1889997 - RNA, 19 nt, Artificial Sequence
  Description of Artificial Sequence: Synthetic oligonucleotide
  Antisense strand to SEQ ID NO: 1889996
aguacagugacacuaucuu

SEQ ID NO: 1889998 - RNA, 19 nt, Artificial Sequence
  Description of Artificial Sequence: Synthetic oligonucleotide
  Sense strand starting at position 3904 of SEQ ID NO: 1879198
ggcagagaaugccuuguuu

SEQ ID NO: 1889999 - RNA, 19 nt, Artificial Sequence
  Description of Artificial Sequence: Synthetic oligonucleotide
  Antisense strand to SEQ ID NO: 1889998
aaacaaggcauucucugcc

SEQ ID NO: 1890000 - RNA, 19 nt, Artificial Sequence
  Description of Artificial Sequence: Synthetic oligonucleotide
  Sense strand starting at position 3906 of SEQ ID NO: 1879198
cagagaaugccuuguuuag

SEQ ID NO: 1890001 - RNA, 19 nt, Artificial Sequence
  Description of Artificial Sequence: Synthetic oligonucleotide
  Antisense strand to SEQ ID NO: 1890000
cuaaacaaggcauucucug

SEQ ID NO: 1890002 - RNA, 19 nt, Artificial Sequence
  Description of Artificial Sequence: Synthetic oligonucleotide
  Sense strand starting at position 3939 of SEQ ID NO: 1879198
gugcacuuugggcaauuaa

SEQ ID NO: 1890003 - RNA, 19 nt, Artificial Sequence
  Description of Artificial Sequence: Synthetic oligonucleotide
  Antisense strand to SEQ ID NO: 1890002
uuaauugcccaaagugcac

SEQ ID NO: 1890004 - RNA, 19 nt, Artificial Sequence
  Description of Artificial Sequence: Synthetic oligonucleotide
  Sense strand starting at position 3970 of SEQ ID NO: 1879198
cucuguacauguccaagaa

SEQ ID NO: 1890005 - RNA, 19 nt, Artificial Sequence
  Description of Artificial Sequence: Synthetic oligonucleotide
  Antisense strand to SEQ ID NO: 1890004
uucuuggacauguacagag

SEQ ID NO: 1890006 - RNA, 19 nt, Artificial Sequence
  Description of Artificial Sequence: Synthetic oligonucleotide
  Sense strand starting at position 3971 of SEQ ID NO: 1879198
ucuguacauguccaagaau

SEQ ID NO: 1890007 - RNA, 19 nt, Artificial Sequence
  Description of Artificial Sequence: Synthetic oligonucleotide
  Antisense strand to SEQ ID NO: 1890006
auucuuggacauguacaga

SEQ ID NO: 1890008 - RNA, 19 nt, Artificial Sequence
  Description of Artificial Sequence: Synthetic oligonucleotide
  Sense strand starting at position 30 of SEQ ID NO: 1879199
guaaauaucuuguugauag

SEQ ID NO: 1890009 - RNA, 19 nt, Artificial Sequence
  Description of Artificial Sequence: Synthetic oligonucleotide
  Antisense strand to SEQ ID NO: 1890008
cuaucaacaagauauuuac

SEQ ID NO: 1890010 - RNA, 19 nt, Artificial Sequence
  Description of Artificial Sequence: Synthetic oligonucleotide
  Sense strand starting at position 32 of SEQ ID NO: 1879199
aaauaucuuguugauaggu

SEQ ID NO: 1890011 - RNA, 19 nt, Artificial Sequence
  Description of Artificial Sequence: Synthetic oligonucleotide
  Antisense strand to SEQ ID NO: 1890010
accuaucaacaagauauuu

SEQ ID NO: 1890012 - RNA, 19 nt, Artificial Sequence
  Description of Artificial Sequence: Synthetic oligonucleotide
  Sense strand starting at position 37 of SEQ ID NO: 1879199
ucuuguugauagguugaga

SEQ ID NO: 1890013 - RNA, 19 nt, Artificial Sequence
  Description of Artificial Sequence: Synthetic oligonucleotide
  Antisense strand to SEQ ID NO: 1890012
ucucaaccuaucaacaaga

SEQ ID NO: 1890014 - RNA, 19 nt, Artificial Sequence
  Description of Artificial Sequence: Synthetic oligonucleotide
  Sense strand starting at position 54 of SEQ ID NO: 1879199
gagacucaacauuguugau

SEQ ID NO: 1890015 - RNA, 19 nt, Artificial Sequence
  Description of Artificial Sequence: Synthetic oligonucleotide
  Antisense strand to SEQ ID NO: 1890014
aucaacaauguugagucuc

SEQ ID NO: 1890016 - RNA, 19 nt, Artificial Sequence
  Description of Artificial Sequence: Synthetic oligonucleotide
  Sense strand starting at position 56 of SEQ ID NO: 1879199
gacucaacauuguugaugu

SEQ ID NO: 1890017 - RNA, 19 nt, Artificial Sequence
  Description of Artificial Sequence: Synthetic oligonucleotide
  Antisense strand to SEQ ID NO: 1890016
acaucaacaauguugaguc

SEQ ID NO: 1890018 - RNA, 19 nt, Artificial Sequence
  Description of Artificial Sequence: Synthetic oligonucleotide
  Sense strand starting at position 58 of SEQ ID NO: 1879199
cucaacauuguugauguua

SEQ ID NO: 1890019 - RNA, 19 nt, Artificial Sequence
  Description of Artificial Sequence: Synthetic oligonucleotide
  Antisense strand to SEQ ID NO: 1890018
uaacaucaacaauguugag

SEQ ID NO: 1890020 - RNA, 19 nt, Artificial Sequence
  Description of Artificial Sequence: Synthetic oligonucleotide
  Sense strand starting at position 184 of SEQ ID NO: 1879199
auggcaugcagaugaucua

SEQ ID NO: 1890021 - RNA, 19 nt, Artificial Sequence
  Description of Artificial Sequence: Synthetic oligonucleotide
  Antisense strand to SEQ ID NO: 1890020
uagaucaucugcaugccau

SEQ ID NO: 1890022 - RNA, 19 nt, Artificial Sequence
  Description of Artificial Sequence: Synthetic oligonucleotide
  Sense strand starting at position 187 of SEQ ID NO: 1879199
gcaugcagaugaucuagaa

SEQ ID NO: 1890023 - RNA, 19 nt, Artificial Sequence
  Description of Artificial Sequence: Synthetic oligonucleotide
  Antisense strand to SEQ ID NO: 1890022
uucuagaucaucugcaugc

SEQ ID NO: 1890024 - RNA, 19 nt, Artificial Sequence
  Description of Artificial Sequence: Synthetic oligonucleotide
  Sense strand starting at position 246 of SEQ ID NO: 1879199
aggucauggaccuguccau

SEQ ID NO: 1890025 - RNA, 19 nt, Artificial Sequence
  Description of Artificial Sequence: Synthetic oligonucleotide
  Antisense strand to SEQ ID NO: 1890024
auggacagguccaugaccu

SEQ ID NO: 1890026 - RNA, 19 nt, Artificial Sequence
  Description of Artificial Sequence: Synthetic oligonucleotide
  Sense strand starting at position 323 of SEQ ID NO: 1879199
ucaucuauuucuguaguuu

SEQ ID NO: 1890027 - RNA, 19 nt, Artificial Sequence
  Description of Artificial Sequence: Synthetic oligonucleotide
  Antisense strand to SEQ ID NO: 1890026
aaacuacagaaauagauga

SEQ ID NO: 1890028 - RNA, 19 nt, Artificial Sequence
  Description of Artificial Sequence: Synthetic oligonucleotide
  Sense strand starting at position 495 of SEQ ID NO: 1879199
uuuauagucgcuguaaguu

SEQ ID NO: 1890029 - RNA, 19 nt, Artificial Sequence
  Description of Artificial Sequence: Synthetic oligonucleotide
  Antisense strand to SEQ ID NO: 1890028
aacuuacagcgacuauaaa

SEQ ID NO: 1890030 - RNA, 19 nt, Artificial Sequence
  Description of Artificial Sequence: Synthetic oligonucleotide
  Sense strand starting at position 626 of SEQ ID NO: 1879199
uguuguugauuguuuagga

SEQ ID NO: 1890031 - RNA, 19 nt, Artificial Sequence
  Description of Artificial Sequence: Synthetic oligonucleotide
  Antisense strand to SEQ ID NO: 1890030
uccuaaacaaucaacaaca

SEQ ID NO: 1890032 - RNA, 19 nt, Artificial Sequence
  Description of Artificial Sequence: Synthetic oligonucleotide
  Sense strand starting at position 783 of SEQ ID NO: 1879199
augcacucagcuugaagau

SEQ ID NO: 1890033 - RNA, 19 nt, Artificial Sequence
  Description of Artificial Sequence: Synthetic oligonucleotide
  Antisense strand to SEQ ID NO: 1890032
aucuucaagcugagugcau

SEQ ID NO: 1890034 - RNA, 19 nt, Artificial Sequence
  Description of Artificial Sequence: Synthetic oligonucleotide
  Sense strand starting at position 784 of SEQ ID NO: 1879199
ugcacucagcuugaagauu

SEQ ID NO: 1890035 - RNA, 19 nt, Artificial Sequence
  Description of Artificial Sequence: Synthetic oligonucleotide
  Antisense strand to SEQ ID NO: 1890034
aaucuucaagcugagugca

SEQ ID NO: 1890036 - RNA, 19 nt, Artificial Sequence
  Description of Artificial Sequence: Synthetic oligonucleotide
  Sense strand starting at position 907 of SEQ ID NO: 1879199
gucuucguaguugacauaa

SEQ ID NO: 1890037 - RNA, 19 nt, Artificial Sequence
  Description of Artificial Sequence: Synthetic oligonucleotide
  Antisense strand to SEQ ID NO: 1890036
uuaugucaacuacgaagac

SEQ ID NO: 1890038 - RNA, 19 nt, Artificial Sequence
  Description of Artificial Sequence: Synthetic oligonucleotide
  Sense strand starting at position 1065 of SEQ ID NO: 1879199
ucuuguguuauggagcuca

SEQ ID NO: 1890039 - RNA, 19 nt, Artificial Sequence
  Description of Artificial Sequence: Synthetic oligonucleotide
  Antisense strand to SEQ ID NO: 1890038
ugagcuccauaacacaaga

SEQ ID NO: 1890040 - RNA, 19 nt, Artificial Sequence
  Description of Artificial Sequence: Synthetic oligonucleotide
  Sense strand starting at position 1169 of SEQ ID NO: 1879199
gacgcaauuuaucuacugu

SEQ ID NO: 1890041 - RNA, 19 nt, Artificial Sequence
  Description of Artificial Sequence: Synthetic oligonucleotide
  Antisense strand to SEQ ID NO: 1890040
acaguagauaaauugcguc

SEQ ID NO: 1890042 - RNA, 19 nt, Artificial Sequence
  Description of Artificial Sequence: Synthetic oligonucleotide
  Sense strand starting at position 1180 of SEQ ID NO: 1879199
ucuacugugcccuggaaau

SEQ ID NO: 1890043 - RNA, 19 nt, Artificial Sequence
  Description of Artificial Sequence: Synthetic oligonucleotide
  Antisense strand to SEQ ID NO: 1890042
auuuccagggcacaguaga

SEQ ID NO: 1890044 - RNA, 19 nt, Artificial Sequence
  Description of Artificial Sequence: Synthetic oligonucleotide
  Sense strand starting at position 1182 of SEQ ID NO: 1879199
uacugugcccuggaaauca

SEQ ID NO: 1890045 - RNA, 19 nt, Artificial Sequence
  Description of Artificial Sequence: Synthetic oligonucleotide
  Antisense strand to SEQ ID NO: 1890044
ugauuuccagggcacagua

SEQ ID NO: 1890046 - RNA, 19 nt, Artificial Sequence
  Description of Artificial Sequence: Synthetic oligonucleotide
  Sense strand starting at position 1213 of SEQ ID NO: 1879199
cuuucuguugagugacuuu

SEQ ID NO: 1890047 - RNA, 19 nt, Artificial Sequence
  Description of Artificial Sequence: Synthetic oligonucleotide
  Antisense strand to SEQ ID NO: 1890046
aaagucacucaacagaaag

SEQ ID NO: 1890048 - RNA, 19 nt, Artificial Sequence
  Description of Artificial Sequence: Synthetic oligonucleotide
  Sense strand starting at position 1216 of SEQ ID NO: 1879199
ucuguugagugacuuugau

SEQ ID NO: 1890049 - RNA, 19 nt, Artificial Sequence
  Description of Artificial Sequence: Synthetic oligonucleotide
  Antisense strand to SEQ ID NO: 1890048
aucaaagucacucaacaga

SEQ ID NO: 1890050 - RNA, 19 nt, Artificial Sequence
  Description of Artificial Sequence: Synthetic oligonucleotide
  Sense strand starting at position 1228 of SEQ ID NO: 1879199
cuuugaucaugaucaugua

SEQ ID NO: 1890051 - RNA, 19 nt, Artificial Sequence
  Description of Artificial Sequence: Synthetic oligonucleotide
  Antisense strand to SEQ ID NO: 1890050
uacaugaucaugaucaaag

SEQ ID NO: 1890052 - RNA, 19 nt, Artificial Sequence
  Description of Artificial Sequence: Synthetic oligonucleotide
  Sense strand starting at position 1238 of SEQ ID NO: 1879199
gaucauguagagcaacauu

SEQ ID NO: 1890053 - RNA, 19 nt, Artificial Sequence
  Description of Artificial Sequence: Synthetic oligonucleotide
  Antisense strand to SEQ ID NO: 1890052
aauguugcucuacaugauc

SEQ ID NO: 1890054 - RNA, 19 nt, Artificial Sequence
  Description of Artificial Sequence: Synthetic oligonucleotide
  Sense strand starting at position 1273 of SEQ ID NO: 1879199
gauuccauuucgucagucu

SEQ ID NO: 1890055 - RNA, 19 nt, Artificial Sequence
  Description of Artificial Sequence: Synthetic oligonucleotide
  Antisense strand to SEQ ID NO: 1890054
agacugacgaaauggaauc

SEQ ID NO: 1890056 - RNA, 19 nt, Artificial Sequence
  Description of Artificial Sequence: Synthetic oligonucleotide
  Sense strand starting at position 1274 of SEQ ID NO: 1879199
auuccauuucgucagucuu

SEQ ID NO: 1890057 - RNA, 19 nt, Artificial Sequence
  Description of Artificial Sequence: Synthetic oligonucleotide
  Antisense strand to SEQ ID NO: 1890056
aagacugacgaaauggaau

SEQ ID NO: 1890058 - RNA, 19 nt, Artificial Sequence
  Description of Artificial Sequence: Synthetic oligonucleotide
  Sense strand starting at position 1367 of SEQ ID NO: 1879199
acuauaaugggcuaucguu

SEQ ID NO: 1890059 - RNA, 19 nt, Artificial Sequence
  Description of Artificial Sequence: Synthetic oligonucleotide
  Antisense strand to SEQ ID NO: 1890058
aacgauagcccauuauagu

SEQ ID NO: 1890060 - RNA, 19 nt, Artificial Sequence
  Description of Artificial Sequence: Synthetic oligonucleotide
  Sense strand starting at position 1702 of SEQ ID NO: 1879199
cuguaagucacucagugau

SEQ ID NO: 1890061 - RNA, 19 nt, Artificial Sequence
  Description of Artificial Sequence: Synthetic oligonucleotide
  Antisense strand to SEQ ID NO: 1890060
aucacugagugacuuacag

SEQ ID NO: 1890062 - RNA, 19 nt, Artificial Sequence
  Description of Artificial Sequence: Synthetic oligonucleotide
  Sense strand starting at position 1704 of SEQ ID NO: 1879199
guaagucacucagugauua

SEQ ID NO: 1890063 - RNA, 19 nt, Artificial Sequence
  Description of Artificial Sequence: Synthetic oligonucleotide
  Antisense strand to SEQ ID NO: 1890062
uaaucacugagugacuuac

SEQ ID NO: 1890064 - RNA, 19 nt, Artificial Sequence
  Description of Artificial Sequence: Synthetic oligonucleotide
  Sense strand starting at position 1708 of SEQ ID NO: 1879199
gucacucagugauuaucuu

SEQ ID NO: 1890065 - RNA, 19 nt, Artificial Sequence
  Description of Artificial Sequence: Synthetic oligonucleotide
  Antisense strand to SEQ ID NO: 1890064
aagauaaucacugagugac

SEQ ID NO: 1890066 - RNA, 19 nt, Artificial Sequence
  Description of Artificial Sequence: Synthetic oligonucleotide
  Sense strand starting at position 1709 of SEQ ID NO: 1879199
ucacucagugauuaucuuu

SEQ ID NO: 1890067 - RNA, 19 nt, Artificial Sequence
  Description of Artificial Sequence: Synthetic oligonucleotide
  Antisense strand to SEQ ID NO: 1890066
aaagauaaucacugaguga

SEQ ID NO: 1890068 - RNA, 19 nt, Artificial Sequence
  Description of Artificial Sequence: Synthetic oligonucleotide
  Sense strand starting at position 1712 of SEQ ID NO: 1879199
cucagugauuaucuuuaag

SEQ ID NO: 1890069 - RNA, 19 nt, Artificial Sequence
  Description of Artificial Sequence: Synthetic oligonucleotide
  Antisense strand to SEQ ID NO: 1890068
cuuaaagauaaucacugag

SEQ ID NO: 1890070 - RNA, 19 nt, Artificial Sequence
  Description of Artificial Sequence: Synthetic oligonucleotide
  Sense strand starting at position 2092 of SEQ ID NO: 1879199
aauacuauuccaugggugu

SEQ ID NO: 1890071 - RNA, 19 nt, Artificial Sequence
  Description of Artificial Sequence: Synthetic oligonucleotide
  Antisense strand to SEQ ID NO: 1890070
acacccauggaauaguauu

SEQ ID NO: 1890072 - RNA, 19 nt, Artificial Sequence
  Description of Artificial Sequence: Synthetic oligonucleotide
  Sense strand starting at position 2093 of SEQ ID NO: 1879199
auacuauuccaugggugua

SEQ ID NO: 1890073 - RNA, 19 nt, Artificial Sequence
  Description of Artificial Sequence: Synthetic oligonucleotide
  Antisense strand to SEQ ID NO: 1890072
uacacccauggaauaguau

SEQ ID NO: 1890074 - RNA, 19 nt, Artificial Sequence
  Description of Artificial Sequence: Synthetic oligonucleotide
  Sense strand starting at position 2095 of SEQ ID NO: 1879199
acuauuccauggguguaua

SEQ ID NO: 1890075 - RNA, 19 nt, Artificial Sequence
  Description of Artificial Sequence: Synthetic oligonucleotide
  Antisense strand to SEQ ID NO: 1890074
uauacacccauggaauagu

SEQ ID NO: 1890076 - RNA, 19 nt, Artificial Sequence
  Description of Artificial Sequence: Synthetic oligonucleotide
  Sense strand starting at position 2096 of SEQ ID NO: 1879199
cuauuccauggguguauau

SEQ ID NO: 1890077 - RNA, 19 nt, Artificial Sequence
  Description of Artificial Sequence: Synthetic oligonucleotide
  Antisense strand to SEQ ID NO: 1890076
auauacacccauggaauag

SEQ ID NO: 1890078 - RNA, 19 nt, Artificial Sequence
  Description of Artificial Sequence: Synthetic oligonucleotide
  Sense strand starting at position 2098 of SEQ ID NO: 1879199
auuccauggguguauauau

SEQ ID NO: 1890079 - RNA, 19 nt, Artificial Sequence
  Description of Artificial Sequence: Synthetic oligonucleotide
  Antisense strand to SEQ ID NO: 1890078
auauauacacccauggaau

SEQ ID NO: 1890080 - RNA, 19 nt, Artificial Sequence
  Description of Artificial Sequence: Synthetic oligonucleotide
  Sense strand starting at position 2105 of SEQ ID NO: 1879199
ggguguauauaugccacau

SEQ ID NO: 1890081 - RNA, 19 nt, Artificial Sequence
  Description of Artificial Sequence: Synthetic oligonucleotide
  Antisense strand to SEQ ID NO: 1890080
auguggcauauauacaccc

SEQ ID NO: 1890082 - RNA, 19 nt, Artificial Sequence
  Description of Artificial Sequence: Synthetic oligonucleotide
  Sense strand starting at position 2871 of SEQ ID NO: 1879199
gggucuuacguuuaagacu

SEQ ID NO: 1890083 - RNA, 19 nt, Artificial Sequence
  Description of Artificial Sequence: Synthetic oligonucleotide
  Antisense strand to SEQ ID NO: 1890082
agucuuaaacguaagaccc

SEQ ID NO: 1890084 - RNA, 19 nt, Artificial Sequence
  Description of Artificial Sequence: Synthetic oligonucleotide
  Sense strand starting at position 3432 of SEQ ID NO: 1879199
uacuuuauuugcguagagu

SEQ ID NO: 1890085 - RNA, 19 nt, Artificial Sequence
  Description of Artificial Sequence: Synthetic oligonucleotide
  Antisense strand to SEQ ID NO: 1890084
acucuacgcaaauaaagua

SEQ ID NO: 1890086 - RNA, 19 nt, Artificial Sequence
  Description of Artificial Sequence: Synthetic oligonucleotide
  Sense strand starting at position 3433 of SEQ ID NO: 1879199
acuuuauuugcguagaguu

SEQ ID NO: 1890087 - RNA, 19 nt, Artificial Sequence
  Description of Artificial Sequence: Synthetic oligonucleotide
  Antisense strand to SEQ ID NO: 1890086
aacucuacgcaaauaaagu

SEQ ID NO: 1890088 - RNA, 19 nt, Artificial Sequence
  Description of Artificial Sequence: Synthetic oligonucleotide
  Sense strand starting at position 7 of SEQ ID NO: 1879201
aggugagaacaggguauua

SEQ ID NO: 1890089 - RNA, 19 nt, Artificial Sequence
  Description of Artificial Sequence: Synthetic oligonucleotide
  Antisense strand to SEQ ID NO: 1890088
uaauacccuguucucaccu

SEQ ID NO: 1890090 - RNA, 19 nt, Artificial Sequence
  Description of Artificial Sequence: Synthetic oligonucleotide
  Sense strand starting at position 130 of SEQ ID NO: 1879201
ggaggaugauuugggaaua

SEQ ID NO: 1890091 - RNA, 19 nt, Artificial Sequence
  Description of Artificial Sequence: Synthetic oligonucleotide
  Antisense strand to SEQ ID NO: 1890090
uauucccaaaucauccucc

SEQ ID NO: 1890092 - RNA, 19 nt, Artificial Sequence
  Description of Artificial Sequence: Synthetic oligonucleotide
  Sense strand starting at position 131 of SEQ ID NO: 1879201
gaggaugauuugggaauau

SEQ ID NO: 1890093 - RNA, 19 nt, Artificial Sequence
  Description of Artificial Sequence: Synthetic oligonucleotide
  Antisense strand to SEQ ID NO: 1890092
auauucccaaaucauccuc

SEQ ID NO: 1890094 - RNA, 19 nt, Artificial Sequence
  Description of Artificial Sequence: Synthetic oligonucleotide
  Sense strand starting at position 143 of SEQ ID NO: 1879201
ggaauauaguguccuugua

SEQ ID NO: 1890095 - RNA, 19 nt, Artificial Sequence
  Description of Artificial Sequence: Synthetic oligonucleotide
  Antisense strand to SEQ ID NO: 1890094
uacaaggacacuauauucc

SEQ ID NO: 1890096 - RNA, 19 nt, Artificial Sequence
  Description of Artificial Sequence: Synthetic oligonucleotide
  Sense strand starting at position 145 of SEQ ID NO: 1879201
aauauaguguccuuguaag

SEQ ID NO: 1890097 - RNA, 19 nt, Artificial Sequence
  Description of Artificial Sequence: Synthetic oligonucleotide
  Antisense strand to SEQ ID NO: 1890096
cuuacaaggacacuauauu

SEQ ID NO: 1890098 - RNA, 19 nt, Artificial Sequence
  Description of Artificial Sequence: Synthetic oligonucleotide
  Sense strand starting at position 273 of SEQ ID NO: 1879201
gccauucuuguccaaggaa

SEQ ID NO: 1890099 - RNA, 19 nt, Artificial Sequence
  Description of Artificial Sequence: Synthetic oligonucleotide
  Antisense strand to SEQ ID NO: 1890098
uuccuuggacaagaauggc

SEQ ID NO: 1890100 - RNA, 19 nt, Artificial Sequence
  Description of Artificial Sequence: Synthetic oligonucleotide
  Sense strand starting at position 276 of SEQ ID NO: 1879201
auucuuguccaaggaaaug

SEQ ID NO: 1890101 - RNA, 19 nt, Artificial Sequence
  Description of Artificial Sequence: Synthetic oligonucleotide
  Antisense strand to SEQ ID NO: 1890100
cauuuccuuggacaagaau

SEQ ID NO: 1890102 - RNA, 19 nt, Artificial Sequence
  Description of Artificial Sequence: Synthetic oligonucleotide
  Sense strand starting at position 604 of SEQ ID NO: 1879201
augagaaaguucuuaccuu

SEQ ID NO: 1890103 - RNA, 19 nt, Artificial Sequence
  Description of Artificial Sequence: Synthetic oligonucleotide
  Antisense strand to SEQ ID NO: 1890102
aagguaagaacuuucucau

SEQ ID NO: 1890104 - RNA, 19 nt, Artificial Sequence
  Description of Artificial Sequence: Synthetic oligonucleotide
  Sense strand starting at position 641 of SEQ ID NO: 1879201
caagauuacuggucugaac

SEQ ID NO: 1890105 - RNA, 19 nt, Artificial Sequence
  Description of Artificial Sequence: Synthetic oligonucleotide
  Antisense strand to SEQ ID NO: 1890104
guucagaccaguaaucuug

SEQ ID NO: 1890106 - RNA, 19 nt, Artificial Sequence
  Description of Artificial Sequence: Synthetic oligonucleotide
  Sense strand starting at position 643 of SEQ ID NO: 1879201
agauuacuggucugaacag

SEQ ID NO: 1890107 - RNA, 19 nt, Artificial Sequence
  Description of Artificial Sequence: Synthetic oligonucleotide
  Antisense strand to SEQ ID NO: 1890106
cuguucagaccaguaaucu

SEQ ID NO: 1890108 - RNA, 19 nt, Artificial Sequence
  Description of Artificial Sequence: Synthetic oligonucleotide
  Sense strand starting at position 766 of SEQ ID NO: 1879201
aacgguuaauacuuucuga

SEQ ID NO: 1890109 - RNA, 19 nt, Artificial Sequence
  Description of Artificial Sequence: Synthetic oligonucleotide
  Antisense strand to SEQ ID NO: 1890108
ucagaaaguauuaaccguu

SEQ ID NO: 1890110 - RNA, 19 nt, Artificial Sequence
  Description of Artificial Sequence: Synthetic oligonucleotide
  Sense strand starting at position 769 of SEQ ID NO: 1879201
gguuaauacuuucugaguc

SEQ ID NO: 1890111 - RNA, 19 nt, Artificial Sequence
  Description of Artificial Sequence: Synthetic oligonucleotide
  Antisense strand to SEQ ID NO: 1890110
gacucagaaaguauuaacc

SEQ ID NO: 1890112 - RNA, 19 nt, Artificial Sequence
  Description of Artificial Sequence: Synthetic oligonucleotide
  Sense strand starting at position 783 of SEQ ID NO: 1879201
gagucugggauccauguau

SEQ ID NO: 1890113 - RNA, 19 nt, Artificial Sequence
  Description of Artificial Sequence: Synthetic oligonucleotide
  Antisense strand to SEQ ID NO: 1890112
auacauggaucccagacuc

SEQ ID NO: 1890114 - RNA, 19 nt, Artificial Sequence
  Description of Artificial Sequence: Synthetic oligonucleotide
  Sense strand starting at position 872 of SEQ ID NO: 1879201
gcaugcauggaguaugaaa

SEQ ID NO: 1890115 - RNA, 19 nt, Artificial Sequence
  Description of Artificial Sequence: Synthetic oligonucleotide
  Antisense strand to SEQ ID NO: 1890114
uuucauacuccaugcaugc

SEQ ID NO: 1890116 - RNA, 19 nt, Artificial Sequence
  Description of Artificial Sequence: Synthetic oligonucleotide
  Sense strand starting at position 969 of SEQ ID NO: 1879201
cagaacuuaccugagugua

SEQ ID NO: 1890117 - RNA, 19 nt, Artificial Sequence
  Description of Artificial Sequence: Synthetic oligonucleotide
  Antisense strand to SEQ ID NO: 1890116
uacacucagguaaguucug

SEQ ID NO: 1890118 - RNA, 19 nt, Artificial Sequence
  Description of Artificial Sequence: Synthetic oligonucleotide
  Sense strand starting at position 977 of SEQ ID NO: 1879201
accugaguguaccuagaua

SEQ ID NO: 1890119 - RNA, 19 nt, Artificial Sequence
  Description of Artificial Sequence: Synthetic oligonucleotide
  Antisense strand to SEQ ID NO: 1890118
uaucuagguacacucaggu

SEQ ID NO: 1890120 - RNA, 19 nt, Artificial Sequence
  Description of Artificial Sequence: Synthetic oligonucleotide
  Sense strand starting at position 1090 of SEQ ID NO: 1879201
cucaguagacccuauguuu

SEQ ID NO: 1890121 - RNA, 19 nt, Artificial Sequence
  Description of Artificial Sequence: Synthetic oligonucleotide
  Antisense strand to SEQ ID NO: 1890120
aaacauagggucuacugag

SEQ ID NO: 1890122 - RNA, 19 nt, Artificial Sequence
  Description of Artificial Sequence: Synthetic oligonucleotide
  Sense strand starting at position 1332 of SEQ ID NO: 1879201
ucagaaagcuguuugagua

SEQ ID NO: 1890123 - RNA, 19 nt, Artificial Sequence
  Description of Artificial Sequence: Synthetic oligonucleotide
  Antisense strand to SEQ ID NO: 1890122
uacucaaacagcuuucuga

SEQ ID NO: 1890124 - RNA, 19 nt, Artificial Sequence
  Description of Artificial Sequence: Synthetic oligonucleotide
  Sense strand starting at position 1413 of SEQ ID NO: 1879201
uuggcauccuaauugagau

SEQ ID NO: 1890125 - RNA, 19 nt, Artificial Sequence
  Description of Artificial Sequence: Synthetic oligonucleotide
  Antisense strand to SEQ ID NO: 1890124
aucucaauuaggaugccaa

SEQ ID NO: 1890126 - RNA, 19 nt, Artificial Sequence
  Description of Artificial Sequence: Synthetic oligonucleotide
  Sense strand starting at position 1420 of SEQ ID NO: 1879201
ccuaauugagauuagcuau

SEQ ID NO: 1890127 - RNA, 19 nt, Artificial Sequence
  Description of Artificial Sequence: Synthetic oligonucleotide
  Antisense strand to SEQ ID NO: 1890126
auagcuaaucucaauuagg

SEQ ID NO: 1890128 - RNA, 19 nt, Artificial Sequence
  Description of Artificial Sequence: Synthetic oligonucleotide
  Sense strand starting at position 1529 of SEQ ID NO: 1879201
uugauauauugggcuaaga

SEQ ID NO: 1890129 - RNA, 19 nt, Artificial Sequence
  Description of Artificial Sequence: Synthetic oligonucleotide
  Antisense strand to SEQ ID NO: 1890128
ucuuagcccaauauaucaa

SEQ ID NO: 1890130 - RNA, 19 nt, Artificial Sequence
  Description of Artificial Sequence: Synthetic oligonucleotide
  Sense strand starting at position 1994 of SEQ ID NO: 1879201
cuguauucugcuuugugca

SEQ ID NO: 1890131 - RNA, 19 nt, Artificial Sequence
  Description of Artificial Sequence: Synthetic oligonucleotide
  Antisense strand to SEQ ID NO: 1890130
ugcacaaagcagaauacag

SEQ ID NO: 1890132 - RNA, 19 nt, Artificial Sequence
  Description of Artificial Sequence: Synthetic oligonucleotide
  Sense strand starting at position 2048 of SEQ ID NO: 1879201
gagagaugcagcuggaauu

SEQ ID NO: 1890133 - RNA, 19 nt, Artificial Sequence
  Description of Artificial Sequence: Synthetic oligonucleotide
  Antisense strand to SEQ ID NO: 1890132
aauuccagcugcaucucuc

SEQ ID NO: 1890134 - RNA, 19 nt, Artificial Sequence
  Description of Artificial Sequence: Synthetic oligonucleotide
  Sense strand starting at position 2287 of SEQ ID NO: 1879201
gccuauagagaucaggcaa

SEQ ID NO: 1890135 - RNA, 19 nt, Artificial Sequence
  Description of Artificial Sequence: Synthetic oligonucleotide
  Antisense strand to SEQ ID NO: 1890134
uugccugaucucuauaggc

SEQ ID NO: 1890136 - RNA, 19 nt, Artificial Sequence
  Description of Artificial Sequence: Synthetic oligonucleotide
  Sense strand starting at position 2366 of SEQ ID NO: 1879201
ugaugucaugaaugagucu

SEQ ID NO: 1890137 - RNA, 19 nt, Artificial Sequence
  Description of Artificial Sequence: Synthetic oligonucleotide
  Antisense strand to SEQ ID NO: 1890136
agacucauucaugacauca

SEQ ID NO: 1890138 - RNA, 19 nt, Artificial Sequence
  Description of Artificial Sequence: Synthetic oligonucleotide
  Sense strand starting at position 2391 of SEQ ID NO: 1879201
ucaagagaacuuugagccu

SEQ ID NO: 1890139 - RNA, 19 nt, Artificial Sequence
  Description of Artificial Sequence: Synthetic oligonucleotide
  Antisense strand to SEQ ID NO: 1890138
aggcucaaaguucucuuga

SEQ ID NO: 1890140 - RNA, 19 nt, Artificial Sequence
  Description of Artificial Sequence: Synthetic oligonucleotide
  Sense strand starting at position 2823 of SEQ ID NO: 1879201
aggcauaccaguugggaaa

SEQ ID NO: 1890141 - RNA, 19 nt, Artificial Sequence
  Description of Artificial Sequence: Synthetic oligonucleotide
  Antisense strand to SEQ ID NO: 1890140
uuucccaacugguaugccu

SEQ ID NO: 1890142 - RNA, 19 nt, Artificial Sequence
  Description of Artificial Sequence: Synthetic oligonucleotide
  Sense strand starting at position 2838 of SEQ ID NO: 1879201
gaaacacugguuugaacua

SEQ ID NO: 1890143 - RNA, 19 nt, Artificial Sequence
  Description of Artificial Sequence: Synthetic oligonucleotide
  Antisense strand to SEQ ID NO: 1890142
uaguucaaaccaguguuuc

SEQ ID NO: 1890144 - RNA, 19 nt, Artificial Sequence
  Description of Artificial Sequence: Synthetic oligonucleotide
  Sense strand starting at position 3041 of SEQ ID NO: 1879201
guauaaugagguggaguuc

SEQ ID NO: 1890145 - RNA, 19 nt, Artificial Sequence
  Description of Artificial Sequence: Synthetic oligonucleotide
  Antisense strand to SEQ ID NO: 1890144
gaacuccaccucauuauac

SEQ ID NO: 1890146 - RNA, 19 nt, Artificial Sequence
  Description of Artificial Sequence: Synthetic oligonucleotide
  Sense strand starting at position 3062 of SEQ ID NO: 1879201
accacaaguugucuuauua

SEQ ID NO: 1890147 - RNA, 19 nt, Artificial Sequence
  Description of Artificial Sequence: Synthetic oligonucleotide
  Antisense strand to SEQ ID NO: 1890146
uaauaagacaacuuguggu

SEQ ID NO: 1890148 - RNA, 19 nt, Artificial Sequence
  Description of Artificial Sequence: Synthetic oligonucleotide
  Sense strand starting at position 3664 of SEQ ID NO: 1879201
ugagcucaucugggaugua

SEQ ID NO: 1890149 - RNA, 19 nt, Artificial Sequence
  Description of Artificial Sequence: Synthetic oligonucleotide
  Antisense strand to SEQ ID NO: 1890148
uacaucccagaugagcuca

SEQ ID NO: 1890150 - RNA, 19 nt, Artificial Sequence
  Description of Artificial Sequence: Synthetic oligonucleotide
  Sense strand starting at position 3683 of SEQ ID NO: 1879201
cguuguuaccaagaggaug

SEQ ID NO: 1890151 - RNA, 19 nt, Artificial Sequence
  Description of Artificial Sequence: Synthetic oligonucleotide
  Antisense strand to SEQ ID NO: 1890150
cauccucuugguaacaacg

SEQ ID NO: 1890152 - RNA, 19 nt, Artificial Sequence
  Description of Artificial Sequence: Synthetic oligonucleotide
  Sense strand starting at position 3697 of SEQ ID NO: 1879201
ggaugacaguguucccaua

SEQ ID NO: 1890153 - RNA, 19 nt, Artificial Sequence
  Description of Artificial Sequence: Synthetic oligonucleotide
  Antisense strand to SEQ ID NO: 1890152
uaugggaacacugucaucc

SEQ ID NO: 1890154 - RNA, 19 nt, Artificial Sequence
  Description of Artificial Sequence: Synthetic oligonucleotide
  Sense strand starting at position 3699 of SEQ ID NO: 1879201
augacaguguucccauaug

SEQ ID NO: 1890155 - RNA, 19 nt, Artificial Sequence
  Description of Artificial Sequence: Synthetic oligonucleotide
  Antisense strand to SEQ ID NO: 1890154
cauaugggaacacugucau

SEQ ID NO: 1890156 - RNA, 19 nt, Artificial Sequence
  Description of Artificial Sequence: Synthetic oligonucleotide
  Sense strand starting at position 3787 of SEQ ID NO: 1879201
aggacuguguaauugaaag

SEQ ID NO: 1890157 - RNA, 19 nt, Artificial Sequence
  Description of Artificial Sequence: Synthetic oligonucleotide
  Antisense strand to SEQ ID NO: 1890156
cuuucaauuacacaguccu

SEQ ID NO: 1890158 - RNA, 19 nt, Artificial Sequence
  Description of Artificial Sequence: Synthetic oligonucleotide
  Sense strand starting at position 3870 of SEQ ID NO: 1879201
ucugauaaguuacuuguga

SEQ ID NO: 1890159 - RNA, 19 nt, Artificial Sequence
  Description of Artificial Sequence: Synthetic oligonucleotide
  Antisense strand to SEQ ID NO: 1890158
ucacaaguaacuuaucaga

SEQ ID NO: 1890160 - RNA, 19 nt, Artificial Sequence
  Description of Artificial Sequence: Synthetic oligonucleotide
  Sense strand starting at position 3878 of SEQ ID NO: 1879201
guuacuugugaguaguaca

SEQ ID NO: 1890161 - RNA, 19 nt, Artificial Sequence
  Description of Artificial Sequence: Synthetic oligonucleotide
  Antisense strand to SEQ ID NO: 1890160
uguacuacucacaaguaac

SEQ ID NO: 1890162 - RNA, 19 nt, Artificial Sequence
  Description of Artificial Sequence: Synthetic oligonucleotide
  Sense strand starting at position 3904 of SEQ ID NO: 1879201
agacucuugcucugagaug

SEQ ID NO: 1890163 - RNA, 19 nt, Artificial Sequence
  Description of Artificial Sequence: Synthetic oligonucleotide
  Antisense strand to SEQ ID NO: 1890162
caucucagagcaagagucu

SEQ ID NO: 1890164 - RNA, 19 nt, Artificial Sequence
  Description of Artificial Sequence: Synthetic oligonucleotide
  Sense strand starting at position 3915 of SEQ ID NO: 1879201
cugagauguugccuaggac

SEQ ID NO: 1890165 - RNA, 19 nt, Artificial Sequence
  Description of Artificial Sequence: Synthetic oligonucleotide
  Antisense strand to SEQ ID NO: 1890164
guccuaggcaacaucucag

SEQ ID NO: 1890166 - RNA, 19 nt, Artificial Sequence
  Description of Artificial Sequence: Synthetic oligonucleotide
  Sense strand starting at position 3930 of SEQ ID NO: 1879201
ggaccucuugcaugacaaa

SEQ ID NO: 1890167 - RNA, 19 nt, Artificial Sequence
  Description of Artificial Sequence: Synthetic oligonucleotide
  Antisense strand to SEQ ID NO: 1890166
uuugucaugcaagaggucc

SEQ ID NO: 1890168 - RNA, 19 nt, Artificial Sequence
  Description of Artificial Sequence: Synthetic oligonucleotide
  Sense strand starting at position 50 of SEQ ID NO: 1879200
uuguaagauuuggaucuca

SEQ ID NO: 1890169 - RNA, 19 nt, Artificial Sequence
  Description of Artificial Sequence: Synthetic oligonucleotide
  Antisense strand to SEQ ID NO: 1890168
ugagauccaaaucuuacaa

SEQ ID NO: 1890170 - RNA, 19 nt, Artificial Sequence
  Description of Artificial Sequence: Synthetic oligonucleotide
  Sense strand starting at position 55 of SEQ ID NO: 1879200
agauuuggaucucaacuaa

SEQ ID NO: 1890171 - RNA, 19 nt, Artificial Sequence
  Description of Artificial Sequence: Synthetic oligonucleotide
  Antisense strand to SEQ ID NO: 1890170
uuaguugagauccaaaucu

SEQ ID NO: 1890172 - RNA, 19 nt, Artificial Sequence
  Description of Artificial Sequence: Synthetic oligonucleotide
  Sense strand starting at position 143 of SEQ ID NO: 1879200
ugcucuugacaaugacuau

SEQ ID NO: 1890173 - RNA, 19 nt, Artificial Sequence
  Description of Artificial Sequence: Synthetic oligonucleotide
  Antisense strand to SEQ ID NO: 1890172
auagucauugucaagagca

SEQ ID NO: 1890174 - RNA, 19 nt, Artificial Sequence
  Description of Artificial Sequence: Synthetic oligonucleotide
  Sense strand starting at position 154 of SEQ ID NO: 1879200
augacuauucccugacagu

SEQ ID NO: 1890175 - RNA, 19 nt, Artificial Sequence
  Description of Artificial Sequence: Synthetic oligonucleotide
  Antisense strand to SEQ ID NO: 1890174
acugucagggaauagucau

SEQ ID NO: 1890176 - RNA, 19 nt, Artificial Sequence
  Description of Artificial Sequence: Synthetic oligonucleotide
  Sense strand starting at position 155 of SEQ ID NO: 1879200
ugacuauucccugacaguu

SEQ ID NO: 1890177 - RNA, 19 nt, Artificial Sequence
  Description of Artificial Sequence: Synthetic oligonucleotide
  Antisense strand to SEQ ID NO: 1890176
aacugucagggaauaguca

SEQ ID NO: 1890178 - RNA, 19 nt, Artificial Sequence
  Description of Artificial Sequence: Synthetic oligonucleotide
  Sense strand starting at position 180 of SEQ ID NO: 1879200
gccuaaauggaguauaccu

SEQ ID NO: 1890179 - RNA, 19 nt, Artificial Sequence
  Description of Artificial Sequence: Synthetic oligonucleotide
  Antisense strand to SEQ ID NO: 1890178
agguauacuccauuuaggc

SEQ ID NO: 1890180 - RNA, 19 nt, Artificial Sequence
  Description of Artificial Sequence: Synthetic oligonucleotide
  Sense strand starting at position 185 of SEQ ID NO: 1879200
aauggaguauaccuuguaa

SEQ ID NO: 1890181 - RNA, 19 nt, Artificial Sequence
  Description of Artificial Sequence: Synthetic oligonucleotide
  Antisense strand to SEQ ID NO: 1890180
uuacaagguauacuccauu

SEQ ID NO: 1890182 - RNA, 19 nt, Artificial Sequence
  Description of Artificial Sequence: Synthetic oligonucleotide
  Sense strand starting at position 187 of SEQ ID NO: 1879200
uggaguauaccuuguaaau

SEQ ID NO: 1890183 - RNA, 19 nt, Artificial Sequence
  Description of Artificial Sequence: Synthetic oligonucleotide
  Antisense strand to SEQ ID NO: 1890182
auuuacaagguauacucca

SEQ ID NO: 1890184 - RNA, 19 nt, Artificial Sequence
  Description of Artificial Sequence: Synthetic oligonucleotide
  Sense strand starting at position 290 of SEQ ID NO: 1879200
auuugaauguaacaaggaa

SEQ ID NO: 1890185 - RNA, 19 nt, Artificial Sequence
  Description of Artificial Sequence: Synthetic oligonucleotide
  Antisense strand to SEQ ID NO: 1890184
uuccuuguuacauucaaau

SEQ ID NO: 1890186 - RNA, 19 nt, Artificial Sequence
  Description of Artificial Sequence: Synthetic oligonucleotide
  Sense strand starting at position 551 of SEQ ID NO: 1879200
guaaauaaauuggcaggua

SEQ ID NO: 1890187 - RNA, 19 nt, Artificial Sequence
  Description of Artificial Sequence: Synthetic oligonucleotide
  Antisense strand to SEQ ID NO: 1890186
uaccugccaauuuauuuac

SEQ ID NO: 1890188 - RNA, 19 nt, Artificial Sequence
  Description of Artificial Sequence: Synthetic oligonucleotide
  Sense strand starting at position 715 of SEQ ID NO: 1879200
gggcaaauugaaugaagua

SEQ ID NO: 1890189 - RNA, 19 nt, Artificial Sequence
  Description of Artificial Sequence: Synthetic oligonucleotide
  Antisense strand to SEQ ID NO: 1890188
uacuucauucaauuugccc

SEQ ID NO: 1890190 - RNA, 19 nt, Artificial Sequence
  Description of Artificial Sequence: Synthetic oligonucleotide
  Sense strand starting at position 822 of SEQ ID NO: 1879200
agguaauacuucuccagaa

SEQ ID NO: 1890191 - RNA, 19 nt, Artificial Sequence
  Description of Artificial Sequence: Synthetic oligonucleotide
  Antisense strand to SEQ ID NO: 1890190
uucuggagaaguauuaccu

SEQ ID NO: 1890192 - RNA, 19 nt, Artificial Sequence
  Description of Artificial Sequence: Synthetic oligonucleotide
  Sense strand starting at position 823 of SEQ ID NO: 1879200
gguaauacuucuccagaaa

SEQ ID NO: 1890193 - RNA, 19 nt, Artificial Sequence
  Description of Artificial Sequence: Synthetic oligonucleotide
  Antisense strand to SEQ ID NO: 1890192
uuucuggagaaguauuacc

SEQ ID NO: 1890194 - RNA, 19 nt, Artificial Sequence
  Description of Artificial Sequence: Synthetic oligonucleotide
  Sense strand starting at position 867 of SEQ ID NO: 1879200
uuaucugcugaguauauau

SEQ ID NO: 1890195 - RNA, 19 nt, Artificial Sequence
  Description of Artificial Sequence: Synthetic oligonucleotide
  Antisense strand to SEQ ID NO: 1890194
auauauacucagcagauaa

SEQ ID NO: 1890196 - RNA, 19 nt, Artificial Sequence
  Description of Artificial Sequence: Synthetic oligonucleotide
  Sense strand starting at position 944 of SEQ ID NO: 1879200
cuagguaaccaugaguuac

SEQ ID NO: 1890197 - RNA, 19 nt, Artificial Sequence
  Description of Artificial Sequence: Synthetic oligonucleotide
  Antisense strand to SEQ ID NO: 1890196
guaacucaugguuaccuag

SEQ ID NO: 1890198 - RNA, 19 nt, Artificial Sequence
  Description of Artificial Sequence: Synthetic oligonucleotide
  Sense strand starting at position 946 of SEQ ID NO: 1879200
agguaaccaugaguuacuu

SEQ ID NO: 1890199 - RNA, 19 nt, Artificial Sequence
  Description of Artificial Sequence: Synthetic oligonucleotide
  Antisense strand to SEQ ID NO: 1890198
aaguaacucaugguuaccu

SEQ ID NO: 1890200 - RNA, 19 nt, Artificial Sequence
  Description of Artificial Sequence: Synthetic oligonucleotide
  Sense strand starting at position 952 of SEQ ID NO: 1879200
ccaugaguuacuuagggca

SEQ ID NO: 1890201 - RNA, 19 nt, Artificial Sequence
  Description of Artificial Sequence: Synthetic oligonucleotide
  Antisense strand to SEQ ID NO: 1890200
ugcccuaaguaacucaugg

SEQ ID NO: 1890202 - RNA, 19 nt, Artificial Sequence
  Description of Artificial Sequence: Synthetic oligonucleotide
  Sense strand starting at position 1396 of SEQ ID NO: 1879200
caacaacuauccguaguga

SEQ ID NO: 1890203 - RNA, 19 nt, Artificial Sequence
  Description of Artificial Sequence: Synthetic oligonucleotide
  Antisense strand to SEQ ID NO: 1890202
ucacuacggauaguuguug

SEQ ID NO: 1890204 - RNA, 19 nt, Artificial Sequence
  Description of Artificial Sequence: Synthetic oligonucleotide
  Sense strand starting at position 1431 of SEQ ID NO: 1879200
guguguucuccgguaggca

SEQ ID NO: 1890205 - RNA, 19 nt, Artificial Sequence
  Description of Artificial Sequence: Synthetic oligonucleotide
  Antisense strand to SEQ ID NO: 1890204
ugccuaccggagaacacac

SEQ ID NO: 1890206 - RNA, 19 nt, Artificial Sequence
  Description of Artificial Sequence: Synthetic oligonucleotide
  Sense strand starting at position 1541 of SEQ ID NO: 1879200
cgcaacuguagggauauau

SEQ ID NO: 1890207 - RNA, 19 nt, Artificial Sequence
  Description of Artificial Sequence: Synthetic oligonucleotide
  Antisense strand to SEQ ID NO: 1890206
auauaucccuacaguugcg

SEQ ID NO: 1890208 - RNA, 19 nt, Artificial Sequence
  Description of Artificial Sequence: Synthetic oligonucleotide
  Sense strand starting at position 1643 of SEQ ID NO: 1879200
gcaguucucgcaccugacu

SEQ ID NO: 1890209 - RNA, 19 nt, Artificial Sequence
  Description of Artificial Sequence: Synthetic oligonucleotide
  Antisense strand to SEQ ID NO: 1890208
agucaggugcgagaacugc

SEQ ID NO: 1890210 - RNA, 19 nt, Artificial Sequence
  Description of Artificial Sequence: Synthetic oligonucleotide
  Sense strand starting at position 2202 of SEQ ID NO: 1879200
uguucaucucuggacgaag

SEQ ID NO: 1890211 - RNA, 19 nt, Artificial Sequence
  Description of Artificial Sequence: Synthetic oligonucleotide
  Antisense strand to SEQ ID NO: 1890210
cuucguccagagaugaaca

SEQ ID NO: 1890212 - RNA, 19 nt, Artificial Sequence
  Description of Artificial Sequence: Synthetic oligonucleotide
  Sense strand starting at position 2315 of SEQ ID NO: 1879200
gggccauuuaaaugugugu

SEQ ID NO: 1890213 - RNA, 19 nt, Artificial Sequence
  Description of Artificial Sequence: Synthetic oligonucleotide
  Antisense strand to SEQ ID NO: 1890212
acacacauuuaaauggccc

SEQ ID NO: 1890214 - RNA, 19 nt, Artificial Sequence
  Description of Artificial Sequence: Synthetic oligonucleotide
  Sense strand starting at position 2317 of SEQ ID NO: 1879200
gccauuuaaauguguguuu

SEQ ID NO: 1890215 - RNA, 19 nt, Artificial Sequence
  Description of Artificial Sequence: Synthetic oligonucleotide
  Antisense strand to SEQ ID NO: 1890214
aaacacacauuuaaauggc

SEQ ID NO: 1890216 - RNA, 19 nt, Artificial Sequence
  Description of Artificial Sequence: Synthetic oligonucleotide
  Sense strand starting at position 3099 of SEQ ID NO: 1879200
ccgagcugucaguugcuaa

SEQ ID NO: 1890217 - RNA, 19 nt, Artificial Sequence
  Description of Artificial Sequence: Synthetic oligonucleotide
  Antisense strand to SEQ ID NO: 1890216
uuagcaacugacagcucgg

SEQ ID NO: 1890218 - RNA, 19 nt, Artificial Sequence
  Description of Artificial Sequence: Synthetic oligonucleotide
  Sense strand starting at position 3291 of SEQ ID NO: 1879200
ucccuugcuccagaauagu

SEQ ID NO: 1890219 - RNA, 19 nt, Artificial Sequence
  Description of Artificial Sequence: Synthetic oligonucleotide
  Antisense strand to SEQ ID NO: 1890218
acuauucuggagcaaggga

SEQ ID NO: 1890220 - RNA, 19 nt, Artificial Sequence
  Description of Artificial Sequence: Synthetic oligonucleotide
  Sense strand starting at position 3325 of SEQ ID NO: 1879200
agucuuucaggagggaauu

SEQ ID NO: 1890221 - RNA, 19 nt, Artificial Sequence
  Description of Artificial Sequence: Synthetic oligonucleotide
  Antisense strand to SEQ ID NO: 1890220
aauucccuccugaaagacu

SEQ ID NO: 1890222 - RNA, 19 nt, Artificial Sequence
  Description of Artificial Sequence: Synthetic oligonucleotide
  Sense strand starting at position 3476 of SEQ ID NO: 1879200
uuagaauaggcauguggaa

SEQ ID NO: 1890223 - RNA, 19 nt, Artificial Sequence
  Description of Artificial Sequence: Synthetic oligonucleotide
  Antisense strand to SEQ ID NO: 1890222
uuccacaugccuauucuaa

SEQ ID NO: 1890224 - RNA, 19 nt, Artificial Sequence
  Description of Artificial Sequence: Synthetic oligonucleotide
  Sense strand starting at position 3548 of SEQ ID NO: 1879200
gugggaauuugugcaguag

SEQ ID NO: 1890225 - RNA, 19 nt, Artificial Sequence
  Description of Artificial Sequence: Synthetic oligonucleotide
  Antisense strand to SEQ ID NO: 1890224
cuacugcacaaauucccac

SEQ ID NO: 1890226 - RNA, 19 nt, Artificial Sequence
  Description of Artificial Sequence: Synthetic oligonucleotide
  Sense strand starting at position 3566 of SEQ ID NO: 1879200
gauaguagaggccggaauu

SEQ ID NO: 1890227 - RNA, 19 nt, Artificial Sequence
  Description of Artificial Sequence: Synthetic oligonucleotide
  Antisense strand to SEQ ID NO: 1890226
aauuccggccucuacuauc

SEQ ID NO: 1890228 - RNA, 19 nt, Artificial Sequence
  Description of Artificial Sequence: Synthetic oligonucleotide
  Sense strand starting at position 3576 of SEQ ID NO: 1879200
gccggaauuucaguugcau

SEQ ID NO: 1890229 - RNA, 19 nt, Artificial Sequence
  Description of Artificial Sequence: Synthetic oligonucleotide
  Antisense strand to SEQ ID NO: 1890228
augcaacugaaauuccggc

SEQ ID NO: 1890230 - RNA, 19 nt, Artificial Sequence
  Description of Artificial Sequence: Synthetic oligonucleotide
  Sense strand starting at position 3593 of SEQ ID NO: 1879200
auuugauucugucuagcac

SEQ ID NO: 1890231 - RNA, 19 nt, Artificial Sequence
  Description of Artificial Sequence: Synthetic oligonucleotide
  Antisense strand to SEQ ID NO: 1890230
gugcuagacagaaucaaau

SEQ ID NO: 1890232 - RNA, 19 nt, Artificial Sequence
  Description of Artificial Sequence: Synthetic oligonucleotide
  Sense strand starting at position 3594 of SEQ ID NO: 1879200
uuugauucugucuagcaca

SEQ ID NO: 1890233 - RNA, 19 nt, Artificial Sequence
  Description of Artificial Sequence: Synthetic oligonucleotide
  Antisense strand to SEQ ID NO: 1890232
ugugcuagacagaaucaaa

SEQ ID NO: 1890234 - RNA, 19 nt, Artificial Sequence
  Description of Artificial Sequence: Synthetic oligonucleotide
  Sense strand starting at position 3618 of SEQ ID NO: 1879200
uggaucuguuaauuccaau

SEQ ID NO: 1890235 - RNA, 19 nt, Artificial Sequence
  Description of Artificial Sequence: Synthetic oligonucleotide
  Antisense strand to SEQ ID NO: 1890234
auuggaauuaacagaucca

SEQ ID NO: 1890236 - RNA, 19 nt, Artificial Sequence
  Description of Artificial Sequence: Synthetic oligonucleotide
  Sense strand starting at position 3663 of SEQ ID NO: 1879200
augucagaguauccaauua

SEQ ID NO: 1890237 - RNA, 19 nt, Artificial Sequence
  Description of Artificial Sequence: Synthetic oligonucleotide
  Antisense strand to SEQ ID NO: 1890236
uaauuggauacucugacau

SEQ ID NO: 1890238 - RNA, 19 nt, Artificial Sequence
  Description of Artificial Sequence: Synthetic oligonucleotide
  Sense strand starting at position 3753 of SEQ ID NO: 1879200
uuuauauucuuuguggaag

SEQ ID NO: 1890239 - RNA, 19 nt, Artificial Sequence
  Description of Artificial Sequence: Synthetic oligonucleotide
  Antisense strand to SEQ ID NO: 1890238
cuuccacaaagaauauaaa

SEQ ID NO: 1890240 - RNA, 19 nt, Artificial Sequence
  Description of Artificial Sequence: Synthetic oligonucleotide
  Sense strand starting at position 3847 of SEQ ID NO: 1879200
ucaggaauauuugaaauac

SEQ ID NO: 1890241 - RNA, 19 nt, Artificial Sequence
  Description of Artificial Sequence: Synthetic oligonucleotide
  Antisense strand to SEQ ID NO: 1890240
guauuucaaauauuccuga

SEQ ID NO: 1890242 - RNA, 19 nt, Artificial Sequence
  Description of Artificial Sequence: Synthetic oligonucleotide
  Sense strand starting at position 3858 of SEQ ID NO: 1879200
ugaaauacuuguuucuuag

SEQ ID NO: 1890243 - RNA, 19 nt, Artificial Sequence
  Description of Artificial Sequence: Synthetic oligonucleotide
  Antisense strand to SEQ ID NO: 1890242
cuaagaaacaaguauuuca

SEQ ID NO: 1890244 - RNA, 19 nt, Artificial Sequence
  Description of Artificial Sequence: Synthetic oligonucleotide
  Sense strand starting at position 3880 of SEQ ID NO: 1879200
uggaccaguuagguuauua

SEQ ID NO: 1890245 - RNA, 19 nt, Artificial Sequence
  Description of Artificial Sequence: Synthetic oligonucleotide
  Antisense strand to SEQ ID NO: 1890244
uaauaaccuaacuggucca

SEQ ID NO: 1890246 - RNA, 19 nt, Artificial Sequence
  Description of Artificial Sequence: Synthetic oligonucleotide
  Sense strand starting at position 3961 of SEQ ID NO: 1879200
gagucuuaaggcuaaucau

SEQ ID NO: 1890247 - RNA, 19 nt, Artificial Sequence
  Description of Artificial Sequence: Synthetic oligonucleotide
  Antisense strand to SEQ ID NO: 1890246
augauuagccuuaagacuc

SEQ ID NO: 1890248 - RNA, 19 nt, Artificial Sequence
  Description of Artificial Sequence: Synthetic oligonucleotide
  Sense strand starting at position 15 of SEQ ID NO: 1879202
ggagauacaucccugaucu

SEQ ID NO: 1890249 - RNA, 19 nt, Artificial Sequence
  Description of Artificial Sequence: Synthetic oligonucleotide
  Antisense strand to SEQ ID NO: 1890248
agaucagggauguaucucc

SEQ ID NO: 1890250 - RNA, 19 nt, Artificial Sequence
  Description of Artificial Sequence: Synthetic oligonucleotide
  Sense strand starting at position 46 of SEQ ID NO: 1879202
cugagauguugagccaaag

SEQ ID NO: 1890251 - RNA, 19 nt, Artificial Sequence
  Description of Artificial Sequence: Synthetic oligonucleotide
  Antisense strand to SEQ ID NO: 1890250
cuuuggcucaacaucucag

SEQ ID NO: 1890252 - RNA, 19 nt, Artificial Sequence
  Description of Artificial Sequence: Synthetic oligonucleotide
  Sense strand starting at position 135 of SEQ ID NO: 1879202
gguggaucuuaccugaagu

SEQ ID NO: 1890253 - RNA, 19 nt, Artificial Sequence
  Description of Artificial Sequence: Synthetic oligonucleotide
  Antisense strand to SEQ ID NO: 1890252
acuucagguaagauccacc

SEQ ID NO: 1890254 - RNA, 19 nt, Artificial Sequence
  Description of Artificial Sequence: Synthetic oligonucleotide
  Sense strand starting at position 136 of SEQ ID NO: 1879202
guggaucuuaccugaaguc

SEQ ID NO: 1890255 - RNA, 19 nt, Artificial Sequence
  Description of Artificial Sequence: Synthetic oligonucleotide
  Antisense strand to SEQ ID NO: 1890254
gacuucagguaagauccac

SEQ ID NO: 1890256 - RNA, 19 nt, Artificial Sequence
  Description of Artificial Sequence: Synthetic oligonucleotide
  Sense strand starting at position 157 of SEQ ID NO: 1879202
gaaguaauagggugagucu

SEQ ID NO: 1890257 - RNA, 19 nt, Artificial Sequence
  Description of Artificial Sequence: Synthetic oligonucleotide
  Antisense strand to SEQ ID NO: 1890256
agacucacccuauuacuuc

SEQ ID NO: 1890258 - RNA, 19 nt, Artificial Sequence
  Description of Artificial Sequence: Synthetic oligonucleotide
  Sense strand starting at position 277 of SEQ ID NO: 1879202
aagggaggaucucaucaau

SEQ ID NO: 1890259 - RNA, 19 nt, Artificial Sequence
  Description of Artificial Sequence: Synthetic oligonucleotide
  Antisense strand to SEQ ID NO: 1890258
auugaugagauccucccuu

SEQ ID NO: 1890260 - RNA, 19 nt, Artificial Sequence
  Description of Artificial Sequence: Synthetic oligonucleotide
  Sense strand starting at position 283 of SEQ ID NO: 1879202
ggaucucaucaaugucaga

SEQ ID NO: 1890261 - RNA, 19 nt, Artificial Sequence
  Description of Artificial Sequence: Synthetic oligonucleotide
  Antisense strand to SEQ ID NO: 1890260
ucugacauugaugagaucc

SEQ ID NO: 1890262 - RNA, 19 nt, Artificial Sequence
  Description of Artificial Sequence: Synthetic oligonucleotide
  Sense strand starting at position 336 of SEQ ID NO: 1879202
cccauucccgguuacaauu

SEQ ID NO: 1890263 - RNA, 19 nt, Artificial Sequence
  Description of Artificial Sequence: Synthetic oligonucleotide
  Antisense strand to SEQ ID NO: 1890262
aauuguaaccgggaauggg

SEQ ID NO: 1890264 - RNA, 19 nt, Artificial Sequence
  Description of Artificial Sequence: Synthetic oligonucleotide
  Sense strand starting at position 379 of SEQ ID NO: 1879202
accaacuuucuuuggaagu

SEQ ID NO: 1890265 - RNA, 19 nt, Artificial Sequence
  Description of Artificial Sequence: Synthetic oligonucleotide
  Antisense strand to SEQ ID NO: 1890264
acuuccaaagaaaguuggu

SEQ ID NO: 1890266 - RNA, 19 nt, Artificial Sequence
  Description of Artificial Sequence: Synthetic oligonucleotide
  Sense strand starting at position 433 of SEQ ID NO: 1879202
uguggauauuuagagacuu

SEQ ID NO: 1890267 - RNA, 19 nt, Artificial Sequence
  Description of Artificial Sequence: Synthetic oligonucleotide
  Antisense strand to SEQ ID NO: 1890266
aagucucuaaauauccaca

SEQ ID NO: 1890268 - RNA, 19 nt, Artificial Sequence
  Description of Artificial Sequence: Synthetic oligonucleotide
  Sense strand starting at position 523 of SEQ ID NO: 1879202
gauggagaugggugaucuu

SEQ ID NO: 1890269 - RNA, 19 nt, Artificial Sequence
  Description of Artificial Sequence: Synthetic oligonucleotide
  Antisense strand to SEQ ID NO: 1890268
aagaucacccaucuccauc

SEQ ID NO: 1890270 - RNA, 19 nt, Artificial Sequence
  Description of Artificial Sequence: Synthetic oligonucleotide
  Sense strand starting at position 1051 of SEQ ID NO: 1879202
ggguaacugucuccaccaa

SEQ ID NO: 1890271 - RNA, 19 nt, Artificial Sequence
  Description of Artificial Sequence: Synthetic oligonucleotide
  Antisense strand to SEQ ID NO: 1890270
uugguggagacaguuaccc

SEQ ID NO: 1890272 - RNA, 19 nt, Artificial Sequence
  Description of Artificial Sequence: Synthetic oligonucleotide
  Sense strand starting at position 1066 of SEQ ID NO: 1879202
ccaagagacucaucuguag

SEQ ID NO: 1890273 - RNA, 19 nt, Artificial Sequence
  Description of Artificial Sequence: Synthetic oligonucleotide
  Antisense strand to SEQ ID NO: 1890272
cuacagaugagucucuugg

SEQ ID NO: 1890274 - RNA, 19 nt, Artificial Sequence
  Description of Artificial Sequence: Synthetic oligonucleotide
  Sense strand starting at position 1267 of SEQ ID NO: 1879202
cgucgcugggaggaauaua

SEQ ID NO: 1890275 - RNA, 19 nt, Artificial Sequence
  Description of Artificial Sequence: Synthetic oligonucleotide
  Antisense strand to SEQ ID NO: 1890274
uauauuccucccagcgacg

SEQ ID NO: 1890276 - RNA, 19 nt, Artificial Sequence
  Description of Artificial Sequence: Synthetic oligonucleotide
  Sense strand starting at position 1275 of SEQ ID NO: 1879202
ggaggaauauaggaggaau

SEQ ID NO: 1890277 - RNA, 19 nt, Artificial Sequence
  Description of Artificial Sequence: Synthetic oligonucleotide
  Antisense strand to SEQ ID NO: 1890276
auuccuccuauauuccucc

SEQ ID NO: 1890278 - RNA, 19 nt, Artificial Sequence
  Description of Artificial Sequence: Synthetic oligonucleotide
  Sense strand starting at position 1294 of SEQ ID NO: 1879202
cugugagauccuuggaagg

SEQ ID NO: 1890279 - RNA, 19 nt, Artificial Sequence
  Description of Artificial Sequence: Synthetic oligonucleotide
  Antisense strand to SEQ ID NO: 1890278
ccuuccaaggaucucacag

SEQ ID NO: 1890280 - RNA, 19 nt, Artificial Sequence
  Description of Artificial Sequence: Synthetic oligonucleotide
  Sense strand starting at position 1523 of SEQ ID NO: 1879202
cagccacagugaucaagaa

SEQ ID NO: 1890281 - RNA, 19 nt, Artificial Sequence
  Description of Artificial Sequence: Synthetic oligonucleotide
  Antisense strand to SEQ ID NO: 1890280
uucuugaucacuguggcug

SEQ ID NO: 1890282 - RNA, 19 nt, Artificial Sequence
  Description of Artificial Sequence: Synthetic oligonucleotide
  Sense strand starting at position 1899 of SEQ ID NO: 1879202
cgaccugcugggaguugua

SEQ ID NO: 1890283 - RNA, 19 nt, Artificial Sequence
  Description of Artificial Sequence: Synthetic oligonucleotide
  Antisense strand to SEQ ID NO: 1890282
uacaacucccagcaggucg

SEQ ID NO: 1890284 - RNA, 19 nt, Artificial Sequence
  Description of Artificial Sequence: Synthetic oligonucleotide
  Sense strand starting at position 2103 of SEQ ID NO: 1879202
gguagauccuguuugaauc

SEQ ID NO: 1890285 - RNA, 19 nt, Artificial Sequence
  Description of Artificial Sequence: Synthetic oligonucleotide
  Antisense strand to SEQ ID NO: 1890284
gauucaaacaggaucuacc

SEQ ID NO: 1890286 - RNA, 19 nt, Artificial Sequence
  Description of Artificial Sequence: Synthetic oligonucleotide
  Sense strand starting at position 2104 of SEQ ID NO: 1879202
guagauccuguuugaaucu

SEQ ID NO: 1890287 - RNA, 19 nt, Artificial Sequence
  Description of Artificial Sequence: Synthetic oligonucleotide
  Antisense strand to SEQ ID NO: 1890286
agauucaaacaggaucuac

SEQ ID NO: 1890288 - RNA, 19 nt, Artificial Sequence
  Description of Artificial Sequence: Synthetic oligonucleotide
  Sense strand starting at position 2184 of SEQ ID NO: 1879202
uuacuugaaugagaggaaa

SEQ ID NO: 1890289 - RNA, 19 nt, Artificial Sequence
  Description of Artificial Sequence: Synthetic oligonucleotide
  Antisense strand to SEQ ID NO: 1890288
uuuccucucauucaaguaa

SEQ ID NO: 1890290 - RNA, 19 nt, Artificial Sequence
  Description of Artificial Sequence: Synthetic oligonucleotide
  Sense strand starting at position 2209 of SEQ ID NO: 1879202
agagcugcugccuaagaga

SEQ ID NO: 1890291 - RNA, 19 nt, Artificial Sequence
  Description of Artificial Sequence: Synthetic oligonucleotide
  Antisense strand to SEQ ID NO: 1890290
ucucuuaggcagcagcucu

SEQ ID NO: 1890292 - RNA, 19 nt, Artificial Sequence
  Description of Artificial Sequence: Synthetic oligonucleotide
  Sense strand starting at position 2250 of SEQ ID NO: 1879202
gagcucuucggacagacua

SEQ ID NO: 1890293 - RNA, 19 nt, Artificial Sequence
  Description of Artificial Sequence: Synthetic oligonucleotide
  Antisense strand to SEQ ID NO: 1890292
uagucuguccgaagagcuc

SEQ ID NO: 1890294 - RNA, 19 nt, Artificial Sequence
  Description of Artificial Sequence: Synthetic oligonucleotide
  Sense strand starting at position 2286 of SEQ ID NO: 1879202
uacaguauaucgcuaauga

SEQ ID NO: 1890295 - RNA, 19 nt, Artificial Sequence
  Description of Artificial Sequence: Synthetic oligonucleotide
  Antisense strand to SEQ ID NO: 1890294
ucauuagcgauauacugua

SEQ ID NO: 1890296 - RNA, 19 nt, Artificial Sequence
  Description of Artificial Sequence: Synthetic oligonucleotide
  Sense strand starting at position 2287 of SEQ ID NO: 1879202
acaguauaucgcuaaugaa

SEQ ID NO: 1890297 - RNA, 19 nt, Artificial Sequence
  Description of Artificial Sequence: Synthetic oligonucleotide
  Antisense strand to SEQ ID NO: 1890296
uucauuagcgauauacugu

SEQ ID NO: 1890298 - RNA, 19 nt, Artificial Sequence
  Description of Artificial Sequence: Synthetic oligonucleotide
  Sense strand starting at position 2322 of SEQ ID NO: 1879202
acaagagaaucggagagaa

SEQ ID NO: 1890299 - RNA, 19 nt, Artificial Sequence
  Description of Artificial Sequence: Synthetic oligonucleotide
  Antisense strand to SEQ ID NO: 1890298
uucucuccgauucucuugu

SEQ ID NO: 1890300 - RNA, 19 nt, Artificial Sequence
  Description of Artificial Sequence: Synthetic oligonucleotide
  Sense strand starting at position 2380 of SEQ ID NO: 1879202
gaaagaguccgggaguuua

SEQ ID NO: 1890301 - RNA, 19 nt, Artificial Sequence
  Description of Artificial Sequence: Synthetic oligonucleotide
  Antisense strand to SEQ ID NO: 1890300
uaaacucccggacucuuuc

SEQ ID NO: 1890302 - RNA, 19 nt, Artificial Sequence
  Description of Artificial Sequence: Synthetic oligonucleotide
  Sense strand starting at position 2540 of SEQ ID NO: 1879202
uguauauuagagugaauga

SEQ ID NO: 1890303 - RNA, 19 nt, Artificial Sequence
  Description of Artificial Sequence: Synthetic oligonucleotide
  Antisense strand to SEQ ID NO: 1890302
ucauucacucuaauauaca

SEQ ID NO: 1890304 - RNA, 19 nt, Artificial Sequence
  Description of Artificial Sequence: Synthetic oligonucleotide
  Sense strand starting at position 2732 of SEQ ID NO: 1879202
gggcaaauauagcuugaac

SEQ ID NO: 1890305 - RNA, 19 nt, Artificial Sequence
  Description of Artificial Sequence: Synthetic oligonucleotide
  Antisense strand to SEQ ID NO: 1890304
guucaagcuauauuugccc

SEQ ID NO: 1890306 - RNA, 19 nt, Artificial Sequence
  Description of Artificial Sequence: Synthetic oligonucleotide
  Sense strand starting at position 2859 of SEQ ID NO: 1879202
aggguauuguaaucucauu

SEQ ID NO: 1890307 - RNA, 19 nt, Artificial Sequence
  Description of Artificial Sequence: Synthetic oligonucleotide
  Antisense strand to SEQ ID NO: 1890306
aaugagauuacaauacccu

SEQ ID NO: 1890308 - RNA, 19 nt, Artificial Sequence
  Description of Artificial Sequence: Synthetic oligonucleotide
  Sense strand starting at position 2887 of SEQ ID NO: 1879202
agagguuaguccuuaggga

SEQ ID NO: 1890309 - RNA, 19 nt, Artificial Sequence
  Description of Artificial Sequence: Synthetic oligonucleotide
  Antisense strand to SEQ ID NO: 1890308
ucccuaaggacuaaccucu

SEQ ID NO: 1890310 - RNA, 19 nt, Artificial Sequence
  Description of Artificial Sequence: Synthetic oligonucleotide
  Sense strand starting at position 2895 of SEQ ID NO: 1879202
guccuuagggaagauguua

SEQ ID NO: 1890311 - RNA, 19 nt, Artificial Sequence
  Description of Artificial Sequence: Synthetic oligonucleotide
  Antisense strand to SEQ ID NO: 1890310
uaacaucuucccuaaggac

SEQ ID NO: 1890312 - RNA, 19 nt, Artificial Sequence
  Description of Artificial Sequence: Synthetic oligonucleotide
  Sense strand starting at position 2917 of SEQ ID NO: 1879202
aaaggaaucugaggaugga

SEQ ID NO: 1890313 - RNA, 19 nt, Artificial Sequence
  Description of Artificial Sequence: Synthetic oligonucleotide
  Antisense strand to SEQ ID NO: 1890312
uccauccucagauuccuuu

SEQ ID NO: 1890314 - RNA, 19 nt, Artificial Sequence
  Description of Artificial Sequence: Synthetic oligonucleotide
  Sense strand starting at position 2965 of SEQ ID NO: 1879202
uugaaagcauaaucaaagu

SEQ ID NO: 1890315 - RNA, 19 nt, Artificial Sequence
  Description of Artificial Sequence: Synthetic oligonucleotide
  Antisense strand to SEQ ID NO: 1890314
acuuugauuaugcuuucaa

SEQ ID NO: 1890316 - RNA, 19 nt, Artificial Sequence
  Description of Artificial Sequence: Synthetic oligonucleotide
  Sense strand starting at position 3029 of SEQ ID NO: 1879202
cuuuccuuccuggaaguga

SEQ ID NO: 1890317 - RNA, 19 nt, Artificial Sequence
  Description of Artificial Sequence: Synthetic oligonucleotide
  Antisense strand to SEQ ID NO: 1890316
ucacuuccaggaaggaaag

SEQ ID NO: 1890318 - RNA, 19 nt, Artificial Sequence
  Description of Artificial Sequence: Synthetic oligonucleotide
  Sense strand starting at position 3090 of SEQ ID NO: 1879202
acaugucuuccaggauauu

SEQ ID NO: 1890319 - RNA, 19 nt, Artificial Sequence
  Description of Artificial Sequence: Synthetic oligonucleotide
  Antisense strand to SEQ ID NO: 1890318
aauauccuggaagacaugu

SEQ ID NO: 1890320 - RNA, 19 nt, Artificial Sequence
  Description of Artificial Sequence: Synthetic oligonucleotide
  Sense strand starting at position 3123 of SEQ ID NO: 1879202
aggaauagauuguauagau

SEQ ID NO: 1890321 - RNA, 19 nt, Artificial Sequence
  Description of Artificial Sequence: Synthetic oligonucleotide
  Antisense strand to SEQ ID NO: 1890320
aucuauacaaucuauuccu

SEQ ID NO: 1890322 - RNA, 19 nt, Artificial Sequence
  Description of Artificial Sequence: Synthetic oligonucleotide
  Sense strand starting at position 3338 of SEQ ID NO: 1879202
ccacgagaauagcuugaau

SEQ ID NO: 1890323 - RNA, 19 nt, Artificial Sequence
  Description of Artificial Sequence: Synthetic oligonucleotide
  Antisense strand to SEQ ID NO: 1890322
auucaagcuauucucgugg

SEQ ID NO: 1890324 - RNA, 19 nt, Artificial Sequence
  Description of Artificial Sequence: Synthetic oligonucleotide
  Sense strand starting at position 3474 of SEQ ID NO: 1879202
ggcaaauuauucccuaaug

SEQ ID NO: 1890325 - RNA, 19 nt, Artificial Sequence
  Description of Artificial Sequence: Synthetic oligonucleotide
  Antisense strand to SEQ ID NO: 1890324
cauuagggaauaauuugcc

SEQ ID NO: 1890326 - RNA, 19 nt, Artificial Sequence
  Description of Artificial Sequence: Synthetic oligonucleotide
  Sense strand starting at position 3815 of SEQ ID NO: 1879202
uagcguuaucaugaccugu

SEQ ID NO: 1890327 - RNA, 19 nt, Artificial Sequence
  Description of Artificial Sequence: Synthetic oligonucleotide
  Antisense strand to SEQ ID NO: 1890326
acaggucaugauaacgcua

SEQ ID NO: 1890328 - RNA, 19 nt, Artificial Sequence
  Description of Artificial Sequence: Synthetic oligonucleotide
  Sense strand starting at position 46 of SEQ ID NO: 1879203
augaauucuucugaaugcu

SEQ ID NO: 1890329 - RNA, 19 nt, Artificial Sequence
  Description of Artificial Sequence: Synthetic oligonucleotide
  Antisense strand to SEQ ID NO: 1890328
agcauucagaagaauucau

SEQ ID NO: 1890330 - RNA, 19 nt, Artificial Sequence
  Description of Artificial Sequence: Synthetic oligonucleotide
  Sense strand starting at position 61 of SEQ ID NO: 1879203
ugcucuuggcuccaggaau

SEQ ID NO: 1890331 - RNA, 19 nt, Artificial Sequence
  Description of Artificial Sequence: Synthetic oligonucleotide
  Antisense strand to SEQ ID NO: 1890330
auuccuggagccaagagca

SEQ ID NO: 1890332 - RNA, 19 nt, Artificial Sequence
  Description of Artificial Sequence: Synthetic oligonucleotide
  Sense strand starting at position 140 of SEQ ID NO: 1879203
gcacuuagaggcuaaauca

SEQ ID NO: 1890333 - RNA, 19 nt, Artificial Sequence
  Description of Artificial Sequence: Synthetic oligonucleotide
  Antisense strand to SEQ ID NO: 1890332
ugauuuagccucuaagugc

SEQ ID NO: 1890334 - RNA, 19 nt, Artificial Sequence
  Description of Artificial Sequence: Synthetic oligonucleotide
  Sense strand starting at position 171 of SEQ ID NO: 1879203
agggcaggacccugucaau

SEQ ID NO: 1890335 - RNA, 19 nt, Artificial Sequence
  Description of Artificial Sequence: Synthetic oligonucleotide
  Antisense strand to SEQ ID NO: 1890334
auugacaggguccugcccu

SEQ ID NO: 1890336 - RNA, 19 nt, Artificial Sequence
  Description of Artificial Sequence: Synthetic oligonucleotide
  Sense strand starting at position 215 of SEQ ID NO: 1879203
ccuagaacaguugguuaca

SEQ ID NO: 1890337 - RNA, 19 nt, Artificial Sequence
  Description of Artificial Sequence: Synthetic oligonucleotide
  Antisense strand to SEQ ID NO: 1890336
uguaaccaacuguucuagg

SEQ ID NO: 1890338 - RNA, 19 nt, Artificial Sequence
  Description of Artificial Sequence: Synthetic oligonucleotide
  Sense strand starting at position 216 of SEQ ID NO: 1879203
cuagaacaguugguuacau

SEQ ID NO: 1890339 - RNA, 19 nt, Artificial Sequence
  Description of Artificial Sequence: Synthetic oligonucleotide
  Antisense strand to SEQ ID NO: 1890338
auguaaccaacuguucuag

SEQ ID NO: 1890340 - RNA, 19 nt, Artificial Sequence
  Description of Artificial Sequence: Synthetic oligonucleotide
  Sense strand starting at position 220 of SEQ ID NO: 1879203
aacaguugguuacaugaau

SEQ ID NO: 1890341 - RNA, 19 nt, Artificial Sequence
  Description of Artificial Sequence: Synthetic oligonucleotide
  Antisense strand to SEQ ID NO: 1890340
auucauguaaccaacuguu

SEQ ID NO: 1890342 - RNA, 19 nt, Artificial Sequence
  Description of Artificial Sequence: Synthetic oligonucleotide
  Sense strand starting at position 243 of SEQ ID NO: 1879203
ggaaaucgucuacaagcua

SEQ ID NO: 1890343 - RNA, 19 nt, Artificial Sequence
  Description of Artificial Sequence: Synthetic oligonucleotide
  Antisense strand to SEQ ID NO: 1890342
uagcuuguagacgauuucc

SEQ ID NO: 1890344 - RNA, 19 nt, Artificial Sequence
  Description of Artificial Sequence: Synthetic oligonucleotide
  Sense strand starting at position 307 of SEQ ID NO: 1879203
ucaguaagcauuuguuggu

SEQ ID NO: 1890345 - RNA, 19 nt, Artificial Sequence
  Description of Artificial Sequence: Synthetic oligonucleotide
  Antisense strand to SEQ ID NO: 1890344
accaacaaaugcuuacuga

SEQ ID NO: 1890346 - RNA, 19 nt, Artificial Sequence
  Description of Artificial Sequence: Synthetic oligonucleotide
  Sense strand starting at position 312 of SEQ ID NO: 1879203
aagcauuuguuggucuauu

SEQ ID NO: 1890347 - RNA, 19 nt, Artificial Sequence
  Description of Artificial Sequence: Synthetic oligonucleotide
  Antisense strand to SEQ ID NO: 1890346
aauagaccaacaaaugcuu

SEQ ID NO: 1890348 - RNA, 19 nt, Artificial Sequence
  Description of Artificial Sequence: Synthetic oligonucleotide
  Sense strand starting at position 339 of SEQ ID NO: 1879203
ggcucuguucuagggacua

SEQ ID NO: 1890349 - RNA, 19 nt, Artificial Sequence
  Description of Artificial Sequence: Synthetic oligonucleotide
  Antisense strand to SEQ ID NO: 1890348
uagucccuagaacagagcc

SEQ ID NO: 1890350 - RNA, 19 nt, Artificial Sequence
  Description of Artificial Sequence: Synthetic oligonucleotide
  Sense strand starting at position 717 of SEQ ID NO: 1879203
uuaacugaauccuggauga

SEQ ID NO: 1890351 - RNA, 19 nt, Artificial Sequence
  Description of Artificial Sequence: Synthetic oligonucleotide
  Antisense strand to SEQ ID NO: 1890350
ucauccaggauucaguuaa

SEQ ID NO: 1890352 - RNA, 19 nt, Artificial Sequence
  Description of Artificial Sequence: Synthetic oligonucleotide
  Sense strand starting at position 830 of SEQ ID NO: 1879203
cuuccugagugggacaauu

SEQ ID NO: 1890353 - RNA, 19 nt, Artificial Sequence
  Description of Artificial Sequence: Synthetic oligonucleotide
  Antisense strand to SEQ ID NO: 1890352
aauugucccacucaggaag

SEQ ID NO: 1890354 - RNA, 19 nt, Artificial Sequence
  Description of Artificial Sequence: Synthetic oligonucleotide
  Sense strand starting at position 840 of SEQ ID NO: 1879203
gggacaauuuauugaaaug

SEQ ID NO: 1890355 - RNA, 19 nt, Artificial Sequence
  Description of Artificial Sequence: Synthetic oligonucleotide
  Antisense strand to SEQ ID NO: 1890354
cauuucaauaaauuguccc

SEQ ID NO: 1890356 - RNA, 19 nt, Artificial Sequence
  Description of Artificial Sequence: Synthetic oligonucleotide
  Sense strand starting at position 1190 of SEQ ID NO: 1879203
ggagauguguacuaaagaa

SEQ ID NO: 1890357 - RNA, 19 nt, Artificial Sequence
  Description of Artificial Sequence: Synthetic oligonucleotide
  Antisense strand to SEQ ID NO: 1890356
uucuuuaguacacaucucc

SEQ ID NO: 1890358 - RNA, 19 nt, Artificial Sequence
  Description of Artificial Sequence: Synthetic oligonucleotide
  Sense strand starting at position 1298 of SEQ ID NO: 1879203
augcuaacuaguggugaau

SEQ ID NO: 1890359 - RNA, 19 nt, Artificial Sequence
  Description of Artificial Sequence: Synthetic oligonucleotide
  Antisense strand to SEQ ID NO: 1890358
auucaccacuaguuagcau

SEQ ID NO: 1890360 - RNA, 19 nt, Artificial Sequence
  Description of Artificial Sequence: Synthetic oligonucleotide
  Sense strand starting at position 2173 of SEQ ID NO: 1879203
ccuguaccuguugguaaga

SEQ ID NO: 1890361 - RNA, 19 nt, Artificial Sequence
  Description of Artificial Sequence: Synthetic oligonucleotide
  Antisense strand to SEQ ID NO: 1890360
ucuuaccaacagguacagg

SEQ ID NO: 1890362 - RNA, 19 nt, Artificial Sequence
  Description of Artificial Sequence: Synthetic oligonucleotide
  Sense strand starting at position 2175 of SEQ ID NO: 1879203
uguaccuguugguaagaga

SEQ ID NO: 1890363 - RNA, 19 nt, Artificial Sequence
  Description of Artificial Sequence: Synthetic oligonucleotide
  Antisense strand to SEQ ID NO: 1890362
ucucuuaccaacagguaca

SEQ ID NO: 1890364 - RNA, 19 nt, Artificial Sequence
  Description of Artificial Sequence: Synthetic oligonucleotide
  Sense strand starting at position 2753 of SEQ ID NO: 1879203
ucauucagcgaguggaaca

SEQ ID NO: 1890365 - RNA, 19 nt, Artificial Sequence
  Description of Artificial Sequence: Synthetic oligonucleotide
  Antisense strand to SEQ ID NO: 1890364
uguuccacucgcugaauga

SEQ ID NO: 1890366 - RNA, 19 nt, Artificial Sequence
  Description of Artificial Sequence: Synthetic oligonucleotide
  Sense strand starting at position 2784 of SEQ ID NO: 1879203
uugccauuggcaggaguau

SEQ ID NO: 1890367 - RNA, 19 nt, Artificial Sequence
  Description of Artificial Sequence: Synthetic oligonucleotide
  Antisense strand to SEQ ID NO: 1890366
auacuccugccaauggcaa

SEQ ID NO: 1890368 - RNA, 19 nt, Artificial Sequence
  Description of Artificial Sequence: Synthetic oligonucleotide
  Sense strand starting at position 2785 of SEQ ID NO: 1879203
ugccauuggcaggaguaua

SEQ ID NO: 1890369 - RNA, 19 nt, Artificial Sequence
  Description of Artificial Sequence: Synthetic oligonucleotide
  Antisense strand to SEQ ID NO: 1890368
uauacuccugccaauggca

SEQ ID NO: 1890370 - RNA, 19 nt, Artificial Sequence
  Description of Artificial Sequence: Synthetic oligonucleotide
  Sense strand starting at position 2797 of SEQ ID NO: 1879203
gaguauaguucugacacaa

SEQ ID NO: 1890371 - RNA, 19 nt, Artificial Sequence
  Description of Artificial Sequence: Synthetic oligonucleotide
  Antisense strand to SEQ ID NO: 1890370
uugugucagaacuauacuc

SEQ ID NO: 1890372 - RNA, 19 nt, Artificial Sequence
  Description of Artificial Sequence: Synthetic oligonucleotide
  Sense strand starting at position 2801 of SEQ ID NO: 1879203
auaguucugacacaagugu

SEQ ID NO: 1890373 - RNA, 19 nt, Artificial Sequence
  Description of Artificial Sequence: Synthetic oligonucleotide
  Antisense strand to SEQ ID NO: 1890372
acacuugugucagaacuau

SEQ ID NO: 1890374 - RNA, 19 nt, Artificial Sequence
  Description of Artificial Sequence: Synthetic oligonucleotide
  Sense strand starting at position 2831 of SEQ ID NO: 1879203
cuuuauguuaacgaugaag

SEQ ID NO: 1890375 - RNA, 19 nt, Artificial Sequence
  Description of Artificial Sequence: Synthetic oligonucleotide
  Antisense strand to SEQ ID NO: 1890374
cuucaucguuaacauaaag

SEQ ID NO: 1890376 - RNA, 19 nt, Artificial Sequence
  Description of Artificial Sequence: Synthetic oligonucleotide
  Sense strand starting at position 2833 of SEQ ID NO: 1879203
uuauguuaacgaugaagug

SEQ ID NO: 1890377 - RNA, 19 nt, Artificial Sequence
  Description of Artificial Sequence: Synthetic oligonucleotide
  Antisense strand to SEQ ID NO: 1890376
cacuucaucguuaacauaa

SEQ ID NO: 1890378 - RNA, 19 nt, Artificial Sequence
  Description of Artificial Sequence: Synthetic oligonucleotide
  Sense strand starting at position 2834 of SEQ ID NO: 1879203
uauguuaacgaugaaguga

SEQ ID NO: 1890379 - RNA, 19 nt, Artificial Sequence
  Description of Artificial Sequence: Synthetic oligonucleotide
  Antisense strand to SEQ ID NO: 1890378
ucacuucaucguuaacaua

SEQ ID NO: 1890380 - RNA, 19 nt, Artificial Sequence
  Description of Artificial Sequence: Synthetic oligonucleotide
  Sense strand starting at position 3211 of SEQ ID NO: 1879203
uugccuauauuucuguauu

SEQ ID NO: 1890381 - RNA, 19 nt, Artificial Sequence
  Description of Artificial Sequence: Synthetic oligonucleotide
  Antisense strand to SEQ ID NO: 1890380
aauacagaaauauaggcaa

SEQ ID NO: 1890382 - RNA, 19 nt, Artificial Sequence
  Description of Artificial Sequence: Synthetic oligonucleotide
  Sense strand starting at position 3213 of SEQ ID NO: 1879203
gccuauauuucuguauucu

SEQ ID NO: 1890383 - RNA, 19 nt, Artificial Sequence
  Description of Artificial Sequence: Synthetic oligonucleotide
  Antisense strand to SEQ ID NO: 1890382
agaauacagaaauauaggc

SEQ ID NO: 1890384 - RNA, 19 nt, Artificial Sequence
  Description of Artificial Sequence: Synthetic oligonucleotide
  Sense strand starting at position 3381 of SEQ ID NO: 1879203
ugaggacuuuccucugcau

SEQ ID NO: 1890385 - RNA, 19 nt, Artificial Sequence
  Description of Artificial Sequence: Synthetic oligonucleotide
  Antisense strand to SEQ ID NO: 1890384
augcagaggaaaguccuca

SEQ ID NO: 1890386 - RNA, 19 nt, Artificial Sequence
  Description of Artificial Sequence: Synthetic oligonucleotide
  Sense strand starting at position 3407 of SEQ ID NO: 1879203
guggguggcaucuggaaau

SEQ ID NO: 1890387 - RNA, 19 nt, Artificial Sequence
  Description of Artificial Sequence: Synthetic oligonucleotide
  Antisense strand to SEQ ID NO: 1890386
auuuccagaugccacccac

SEQ ID NO: 1890388 - RNA, 19 nt, Artificial Sequence
  Description of Artificial Sequence: Synthetic oligonucleotide
  Sense strand starting at position 3807 of SEQ ID NO: 1879203
caauucgucccaggaaguu

SEQ ID NO: 1890389 - RNA, 19 nt, Artificial Sequence
  Description of Artificial Sequence: Synthetic oligonucleotide
  Antisense strand to SEQ ID NO: 1890388
aacuuccugggacgaauug

SEQ ID NO: 1890390 - RNA, 19 nt, Artificial Sequence
  Description of Artificial Sequence: Synthetic oligonucleotide
  Sense strand starting at position 3819 of SEQ ID NO: 1879203
ggaaguuccugugcuuugu

SEQ ID NO: 1890391 - RNA, 19 nt, Artificial Sequence
  Description of Artificial Sequence: Synthetic oligonucleotide
  Antisense strand to SEQ ID NO: 1890390
acaaagcacaggaacuucc

SEQ ID NO: 1890392 - RNA, 19 nt, Artificial Sequence
  Description of Artificial Sequence: Synthetic oligonucleotide
  Sense strand starting at position 3838 of SEQ ID NO: 1879203
accuguguguucccucauu

SEQ ID NO: 1890393 - RNA, 19 nt, Artificial Sequence
  Description of Artificial Sequence: Synthetic oligonucleotide
  Antisense strand to SEQ ID NO: 1890392
aaugagggaacacacaggu

SEQ ID NO: 1890394 - RNA, 19 nt, Artificial Sequence
  Description of Artificial Sequence: Synthetic oligonucleotide
  Sense strand starting at position 3861 of SEQ ID NO: 1879203
agcaguugcuucccaggau

SEQ ID NO: 1890395 - RNA, 19 nt, Artificial Sequence
  Description of Artificial Sequence: Synthetic oligonucleotide
  Antisense strand to SEQ ID NO: 1890394
auccugggaagcaacugcu

SEQ ID NO: 1890396 - RNA, 19 nt, Artificial Sequence
  Description of Artificial Sequence: Synthetic oligonucleotide
  Sense strand starting at position 3864 of SEQ ID NO: 1879203
aguugcuucccaggauuaa

SEQ ID NO: 1890397 - RNA, 19 nt, Artificial Sequence
  Description of Artificial Sequence: Synthetic oligonucleotide
  Antisense strand to SEQ ID NO: 1890396
uuaauccugggaagcaacu

SEQ ID NO: 1890398 - RNA, 19 nt, Artificial Sequence
  Description of Artificial Sequence: Synthetic oligonucleotide
  Sense strand starting at position 3865 of SEQ ID NO: 1879203
guugcuucccaggauuaaa

SEQ ID NO: 1890399 - RNA, 19 nt, Artificial Sequence
  Description of Artificial Sequence: Synthetic oligonucleotide
  Antisense strand to SEQ ID NO: 1890398
uuuaauccugggaagcaac

SEQ ID NO: 1890400 - RNA, 19 nt, Artificial Sequence
  Description of Artificial Sequence: Synthetic oligonucleotide
  Sense strand starting at position 3886 of SEQ ID NO: 1879203
acaguauuccagugacaug

SEQ ID NO: 1890401 - RNA, 19 nt, Artificial Sequence
  Description of Artificial Sequence: Synthetic oligonucleotide
  Antisense strand to SEQ ID NO: 1890400
caugucacuggaauacugu

SEQ ID NO: 1890402 - RNA, 19 nt, Artificial Sequence
  Description of Artificial Sequence: Synthetic oligonucleotide
  Sense strand starting at position 3893 of SEQ ID NO: 1879203
uccagugacaugugugcaa

SEQ ID NO: 1890403 - RNA, 19 nt, Artificial Sequence
  Description of Artificial Sequence: Synthetic oligonucleotide
  Antisense strand to SEQ ID NO: 1890402
uugcacacaugucacugga

SEQ ID NO: 1890404 - RNA, 19 nt, Artificial Sequence
  Description of Artificial Sequence: Synthetic oligonucleotide
  Sense strand starting at position 3895 of SEQ ID NO: 1879203
cagugacaugugugcaaua

SEQ ID NO: 1890405 - RNA, 19 nt, Artificial Sequence
  Description of Artificial Sequence: Synthetic oligonucleotide
  Antisense strand to SEQ ID NO: 1890404
uauugcacacaugucacug

SEQ ID NO: 1890406 - RNA, 19 nt, Artificial Sequence
  Description of Artificial Sequence: Synthetic oligonucleotide
  Sense strand starting at position 3897 of SEQ ID NO: 1879203
gugacaugugugcaauaca

SEQ ID NO: 1890407 - RNA, 19 nt, Artificial Sequence
  Description of Artificial Sequence: Synthetic oligonucleotide
  Antisense strand to SEQ ID NO: 1890406
uguauugcacacaugucac

SEQ ID NO: 1890408 - RNA, 19 nt, Artificial Sequence
  Description of Artificial Sequence: Synthetic oligonucleotide
  Sense strand starting at position 46 of SEQ ID NO: 1879204
augaauucuucugaaugcu

SEQ ID NO: 1890409 - RNA, 19 nt, Artificial Sequence
  Description of Artificial Sequence: Synthetic oligonucleotide
  Antisense strand to SEQ ID NO: 1890408
agcauucagaagaauucau

SEQ ID NO: 1890410 - RNA, 19 nt, Artificial Sequence
  Description of Artificial Sequence: Synthetic oligonucleotide
  Sense strand starting at position 61 of SEQ ID NO: 1879204
ugcucuuggcuccaggaau

SEQ ID NO: 1890411 - RNA, 19 nt, Artificial Sequence
  Description of Artificial Sequence: Synthetic oligonucleotide
  Antisense strand to SEQ ID NO: 1890410
auuccuggagccaagagca

SEQ ID NO: 1890412 - RNA, 19 nt, Artificial Sequence
  Description of Artificial Sequence: Synthetic oligonucleotide
  Sense strand starting at position 140 of SEQ ID NO: 1879204
gcacuuagaggcuaaauca

SEQ ID NO: 1890413 - RNA, 19 nt, Artificial Sequence
  Description of Artificial Sequence: Synthetic oligonucleotide
  Antisense strand to SEQ ID NO: 1890412
ugauuuagccucuaagugc

SEQ ID NO: 1890414 - RNA, 19 nt, Artificial Sequence
  Description of Artificial Sequence: Synthetic oligonucleotide
  Sense strand starting at position 171 of SEQ ID NO: 1879204
agggcaggacccugucaau

SEQ ID NO: 1890415 - RNA, 19 nt, Artificial Sequence
  Description of Artificial Sequence: Synthetic oligonucleotide
  Antisense strand to SEQ ID NO: 1890414
auugacaggguccugcccu

SEQ ID NO: 1890416 - RNA, 19 nt, Artificial Sequence
  Description of Artificial Sequence: Synthetic oligonucleotide
  Sense strand starting at position 215 of SEQ ID NO: 1879204
ccuagaacaguugguuaca

SEQ ID NO: 1890417 - RNA, 19 nt, Artificial Sequence
  Description of Artificial Sequence: Synthetic oligonucleotide
  Antisense strand to SEQ ID NO: 1890416
uguaaccaacuguucuagg

SEQ ID NO: 1890418 - RNA, 19 nt, Artificial Sequence
  Description of Artificial Sequence: Synthetic oligonucleotide
  Sense strand starting at position 216 of SEQ ID NO: 1879204
cuagaacaguugguuacau

SEQ ID NO: 1890419 - RNA, 19 nt, Artificial Sequence
  Description of Artificial Sequence: Synthetic oligonucleotide
  Antisense strand to SEQ ID NO: 1890418
auguaaccaacuguucuag

SEQ ID NO: 1890420 - RNA, 19 nt, Artificial Sequence
  Description of Artificial Sequence: Synthetic oligonucleotide
  Sense strand starting at position 220 of SEQ ID NO: 1879204
aacaguugguuacaugaau

SEQ ID NO: 1890421 - RNA, 19 nt, Artificial Sequence
  Description of Artificial Sequence: Synthetic oligonucleotide
  Antisense strand to SEQ ID NO: 1890420
auucauguaaccaacuguu

SEQ ID NO: 1890422 - RNA, 19 nt, Artificial Sequence
  Description of Artificial Sequence: Synthetic oligonucleotide
  Sense strand starting at position 243 of SEQ ID NO: 1879204
ggaaaucgucuacaagcua

SEQ ID NO: 1890423 - RNA, 19 nt, Artificial Sequence
  Description of Artificial Sequence: Synthetic oligonucleotide
  Antisense strand to SEQ ID NO: 1890422
uagcuuguagacgauuucc

SEQ ID NO: 1890424 - RNA, 19 nt, Artificial Sequence
  Description of Artificial Sequence: Synthetic oligonucleotide
  Sense strand starting at position 307 of SEQ ID NO: 1879204
ucaguaagcauuuguuggu

SEQ ID NO: 1890425 - RNA, 19 nt, Artificial Sequence
  Description of Artificial Sequence: Synthetic oligonucleotide
  Antisense strand to SEQ ID NO: 1890424
accaacaaaugcuuacuga

SEQ ID NO: 1890426 - RNA, 19 nt, Artificial Sequence
  Description of Artificial Sequence: Synthetic oligonucleotide
  Sense strand starting at position 312 of SEQ ID NO: 1879204
aagcauuuguuggucuauu

SEQ ID NO: 1890427 - RNA, 19 nt, Artificial Sequence
  Description of Artificial Sequence: Synthetic oligonucleotide
  Antisense strand to SEQ ID NO: 1890426
aauagaccaacaaaugcuu

SEQ ID NO: 1890428 - RNA, 19 nt, Artificial Sequence
  Description of Artificial Sequence: Synthetic oligonucleotide
  Sense strand starting at position 339 of SEQ ID NO: 1879204
ggcucuguucuagggacua

SEQ ID NO: 1890429 - RNA, 19 nt, Artificial Sequence
  Description of Artificial Sequence: Synthetic oligonucleotide
  Antisense strand to SEQ ID NO: 1890428
uagucccuagaacagagcc

SEQ ID NO: 1890430 - RNA, 19 nt, Artificial Sequence
  Description of Artificial Sequence: Synthetic oligonucleotide
  Sense strand starting at position 717 of SEQ ID NO: 1879204
uuaacugaauccuggauga

SEQ ID NO: 1890431 - RNA, 19 nt, Artificial Sequence
  Description of Artificial Sequence: Synthetic oligonucleotide
  Antisense strand to SEQ ID NO: 1890430
ucauccaggauucaguuaa

SEQ ID NO: 1890432 - RNA, 19 nt, Artificial Sequence
  Description of Artificial Sequence: Synthetic oligonucleotide
  Sense strand starting at position 830 of SEQ ID NO: 1879204
cuuccugagugggacaauu

SEQ ID NO: 1890433 - RNA, 19 nt, Artificial Sequence
  Description of Artificial Sequence: Synthetic oligonucleotide
  Antisense strand to SEQ ID NO: 1890432
aauugucccacucaggaag

SEQ ID NO: 1890434 - RNA, 19 nt, Artificial Sequence
  Description of Artificial Sequence: Synthetic oligonucleotide
  Sense strand starting at position 840 of SEQ ID NO: 1879204
gggacaauuuauugaaaug

SEQ ID NO: 1890435 - RNA, 19 nt, Artificial Sequence
  Description of Artificial Sequence: Synthetic oligonucleotide
  Antisense strand to SEQ ID NO: 1890434
cauuucaauaaauuguccc

SEQ ID NO: 1890436 - RNA, 19 nt, Artificial Sequence
  Description of Artificial Sequence: Synthetic oligonucleotide
  Sense strand starting at position 1190 of SEQ ID NO: 1879204
ggagauguguacuaaagaa

SEQ ID NO: 1890437 - RNA, 19 nt, Artificial Sequence
  Description of Artificial Sequence: Synthetic oligonucleotide
  Antisense strand to SEQ ID NO: 1890436
uucuuuaguacacaucucc

SEQ ID NO: 1890438 - RNA, 19 nt, Artificial Sequence
  Description of Artificial Sequence: Synthetic oligonucleotide
  Sense strand starting at position 1298 of SEQ ID NO: 1879204
augcuaacuaguggugaau

SEQ ID NO: 1890439 - RNA, 19 nt, Artificial Sequence
  Description of Artificial Sequence: Synthetic oligonucleotide
  Antisense strand to SEQ ID NO: 1890438
auucaccacuaguuagcau

SEQ ID NO: 1890440 - RNA, 19 nt, Artificial Sequence
  Description of Artificial Sequence: Synthetic oligonucleotide
  Sense strand starting at position 2173 of SEQ ID NO: 1879204
ccuguaccuguugguaaga

SEQ ID NO: 1890441 - RNA, 19 nt, Artificial Sequence
  Description of Artificial Sequence: Synthetic oligonucleotide
  Antisense strand to SEQ ID NO: 1890440
ucuuaccaacagguacagg

SEQ ID NO: 1890442 - RNA, 19 nt, Artificial Sequence
  Description of Artificial Sequence: Synthetic oligonucleotide
  Sense strand starting at position 2175 of SEQ ID NO: 1879204
uguaccuguugguaagaga

SEQ ID NO: 1890443 - RNA, 19 nt, Artificial Sequence
  Description of Artificial Sequence: Synthetic oligonucleotide
  Antisense strand to SEQ ID NO: 1890442
ucucuuaccaacagguaca

SEQ ID NO: 1890444 - RNA, 19 nt, Artificial Sequence
  Description of Artificial Sequence: Synthetic oligonucleotide
  Sense strand starting at position 2753 of SEQ ID NO: 1879204
ucauucagcgaguggaaca

SEQ ID NO: 1890445 - RNA, 19 nt, Artificial Sequence
  Description of Artificial Sequence: Synthetic oligonucleotide
  Antisense strand to SEQ ID NO: 1890444
uguuccacucgcugaauga

SEQ ID NO: 1890446 - RNA, 19 nt, Artificial Sequence
  Description of Artificial Sequence: Synthetic oligonucleotide
  Sense strand starting at position 2784 of SEQ ID NO: 1879204
uugccauuggcaggaguau

SEQ ID NO: 1890447 - RNA, 19 nt, Artificial Sequence
  Description of Artificial Sequence: Synthetic oligonucleotide
  Antisense strand to SEQ ID NO: 1890446
auacuccugccaauggcaa

SEQ ID NO: 1890448 - RNA, 19 nt, Artificial Sequence
  Description of Artificial Sequence: Synthetic oligonucleotide
  Sense strand starting at position 2785 of SEQ ID NO: 1879204
ugccauuggcaggaguaua

SEQ ID NO: 1890449 - RNA, 19 nt, Artificial Sequence
  Description of Artificial Sequence: Synthetic oligonucleotide
  Antisense strand to SEQ ID NO: 1890448
uauacuccugccaauggca

SEQ ID NO: 1890450 - RNA, 19 nt, Artificial Sequence
  Description of Artificial Sequence: Synthetic oligonucleotide
  Sense strand starting at position 2797 of SEQ ID NO: 1879204
gaguauaguucugacacaa

SEQ ID NO: 1890451 - RNA, 19 nt, Artificial Sequence
  Description of Artificial Sequence: Synthetic oligonucleotide
  Antisense strand to SEQ ID NO: 1890450
uugugucagaacuauacuc

SEQ ID NO: 1890452 - RNA, 19 nt, Artificial Sequence
  Description of Artificial Sequence: Synthetic oligonucleotide
  Sense strand starting at position 2801 of SEQ ID NO: 1879204
auaguucugacacaagugu

SEQ ID NO: 1890453 - RNA, 19 nt, Artificial Sequence
  Description of Artificial Sequence: Synthetic oligonucleotide
  Antisense strand to SEQ ID NO: 1890452
acacuugugucagaacuau

SEQ ID NO: 1890454 - RNA, 19 nt, Artificial Sequence
  Description of Artificial Sequence: Synthetic oligonucleotide
  Sense strand starting at position 2831 of SEQ ID NO: 1879204
cuuuauguuaacgaugaag

SEQ ID NO: 1890455 - RNA, 19 nt, Artificial Sequence
  Description of Artificial Sequence: Synthetic oligonucleotide
  Antisense strand to SEQ ID NO: 1890454
cuucaucguuaacauaaag

SEQ ID NO: 1890456 - RNA, 19 nt, Artificial Sequence
  Description of Artificial Sequence: Synthetic oligonucleotide
  Sense strand starting at position 2833 of SEQ ID NO: 1879204
uuauguuaacgaugaagug

SEQ ID NO: 1890457 - RNA, 19 nt, Artificial Sequence
  Description of Artificial Sequence: Synthetic oligonucleotide
  Antisense strand to SEQ ID NO: 1890456
cacuucaucguuaacauaa

SEQ ID NO: 1890458 - RNA, 19 nt, Artificial Sequence
  Description of Artificial Sequence: Synthetic oligonucleotide
  Sense strand starting at position 2834 of SEQ ID NO: 1879204
uauguuaacgaugaaguga

SEQ ID NO: 1890459 - RNA, 19 nt, Artificial Sequence
  Description of Artificial Sequence: Synthetic oligonucleotide
  Antisense strand to SEQ ID NO: 1890458
ucacuucaucguuaacaua

SEQ ID NO: 1890460 - RNA, 19 nt, Artificial Sequence
  Description of Artificial Sequence: Synthetic oligonucleotide
  Sense strand starting at position 3211 of SEQ ID NO: 1879204
uugccuauauuucuguauu

SEQ ID NO: 1890461 - RNA, 19 nt, Artificial Sequence
  Description of Artificial Sequence: Synthetic oligonucleotide
  Antisense strand to SEQ ID NO: 1890460
aauacagaaauauaggcaa

SEQ ID NO: 1890462 - RNA, 19 nt, Artificial Sequence
  Description of Artificial Sequence: Synthetic oligonucleotide
  Sense strand starting at position 3213 of SEQ ID NO: 1879204
gccuauauuucuguauucu

SEQ ID NO: 1890463 - RNA, 19 nt, Artificial Sequence
  Description of Artificial Sequence: Synthetic oligonucleotide
  Antisense strand to SEQ ID NO: 1890462
agaauacagaaauauaggc

SEQ ID NO: 1890464 - RNA, 19 nt, Artificial Sequence
  Description of Artificial Sequence: Synthetic oligonucleotide
  Sense strand starting at position 3381 of SEQ ID NO: 1879204
ugaggacuuuccucugcau

SEQ ID NO: 1890465 - RNA, 19 nt, Artificial Sequence
  Description of Artificial Sequence: Synthetic oligonucleotide
  Antisense strand to SEQ ID NO: 1890464
augcagaggaaaguccuca

SEQ ID NO: 1890466 - RNA, 19 nt, Artificial Sequence
  Description of Artificial Sequence: Synthetic oligonucleotide
  Sense strand starting at position 3407 of SEQ ID NO: 1879204
guggguggcaucuggaaau

SEQ ID NO: 1890467 - RNA, 19 nt, Artificial Sequence
  Description of Artificial Sequence: Synthetic oligonucleotide
  Antisense strand to SEQ ID NO: 1890466
auuuccagaugccacccac

SEQ ID NO: 1890468 - RNA, 19 nt, Artificial Sequence
  Description of Artificial Sequence: Synthetic oligonucleotide
  Sense strand starting at position 3807 of SEQ ID NO: 1879204
caauucgucccaggaaguu

SEQ ID NO: 1890469 - RNA, 19 nt, Artificial Sequence
  Description of Artificial Sequence: Synthetic oligonucleotide
  Antisense strand to SEQ ID NO: 1890468
aacuuccugggacgaauug

SEQ ID NO: 1890470 - RNA, 19 nt, Artificial Sequence
  Description of Artificial Sequence: Synthetic oligonucleotide
  Sense strand starting at position 3819 of SEQ ID NO: 1879204
ggaaguuccugugcuuugu

SEQ ID NO: 1890471 - RNA, 19 nt, Artificial Sequence
  Description of Artificial Sequence: Synthetic oligonucleotide
  Antisense strand to SEQ ID NO: 1890470
acaaagcacaggaacuucc

SEQ ID NO: 1890472 - RNA, 19 nt, Artificial Sequence
  Description of Artificial Sequence: Synthetic oligonucleotide
  Sense strand starting at position 3838 of SEQ ID NO: 1879204
accuguguguucccucauu

SEQ ID NO: 1890473 - RNA, 19 nt, Artificial Sequence
  Description of Artificial Sequence: Synthetic oligonucleotide
  Antisense strand to SEQ ID NO: 1890472
aaugagggaacacacaggu

SEQ ID NO: 1890474 - RNA, 19 nt, Artificial Sequence
  Description of Artificial Sequence: Synthetic oligonucleotide
  Sense strand starting at position 3861 of SEQ ID NO: 1879204
agcaguugcuucccaggau

SEQ ID NO: 1890475 - RNA, 19 nt, Artificial Sequence
  Description of Artificial Sequence: Synthetic oligonucleotide
  Antisense strand to SEQ ID NO: 1890474
auccugggaagcaacugcu

SEQ ID NO: 1890476 - RNA, 19 nt, Artificial Sequence
  Description of Artificial Sequence: Synthetic oligonucleotide
  Sense strand starting at position 3864 of SEQ ID NO: 1879204
aguugcuucccaggauuaa

SEQ ID NO: 1890477 - RNA, 19 nt, Artificial Sequence
  Description of Artificial Sequence: Synthetic oligonucleotide
  Antisense strand to SEQ ID NO: 1890476
uuaauccugggaagcaacu

SEQ ID NO: 1890478 - RNA, 19 nt, Artificial Sequence
  Description of Artificial Sequence: Synthetic oligonucleotide
  Sense strand starting at position 3865 of SEQ ID NO: 1879204
guugcuucccaggauuaaa

SEQ ID NO: 1890479 - RNA, 19 nt, Artificial Sequence
  Description of Artificial Sequence: Synthetic oligonucleotide
  Antisense strand to SEQ ID NO: 1890478
uuuaauccugggaagcaac

SEQ ID NO: 1890480 - RNA, 19 nt, Artificial Sequence
  Description of Artificial Sequence: Synthetic oligonucleotide
  Sense strand starting at position 3886 of SEQ ID NO: 1879204
acaguauuccagugacaug

SEQ ID NO: 1890481 - RNA, 19 nt, Artificial Sequence
  Description of Artificial Sequence: Synthetic oligonucleotide
  Antisense strand to SEQ ID NO: 1890480
caugucacuggaauacugu

SEQ ID NO: 1890482 - RNA, 19 nt, Artificial Sequence
  Description of Artificial Sequence: Synthetic oligonucleotide
  Sense strand starting at position 3893 of SEQ ID NO: 1879204
uccagugacaugugugcaa

SEQ ID NO: 1890483 - RNA, 19 nt, Artificial Sequence
  Description of Artificial Sequence: Synthetic oligonucleotide
  Antisense strand to SEQ ID NO: 1890482
uugcacacaugucacugga

SEQ ID NO: 1890484 - RNA, 19 nt, Artificial Sequence
  Description of Artificial Sequence: Synthetic oligonucleotide
  Sense strand starting at position 3895 of SEQ ID NO: 1879204
cagugacaugugugcaaua

SEQ ID NO: 1890485 - RNA, 19 nt, Artificial Sequence
  Description of Artificial Sequence: Synthetic oligonucleotide
  Antisense strand to SEQ ID NO: 1890484
uauugcacacaugucacug

SEQ ID NO: 1890486 - RNA, 19 nt, Artificial Sequence
  Description of Artificial Sequence: Synthetic oligonucleotide
  Sense strand starting at position 3897 of SEQ ID NO: 1879204
gugacaugugugcaauaca

SEQ ID NO: 1890487 - RNA, 19 nt, Artificial Sequence
  Description of Artificial Sequence: Synthetic oligonucleotide
  Antisense strand to SEQ ID NO: 1890486
uguauugcacacaugucac

SEQ ID NO: 1890488 - RNA, 19 nt, Artificial Sequence
  Description of Artificial Sequence: Synthetic oligonucleotide
  Sense strand starting at position 14 of SEQ ID NO: 1879205
cuucuagaauuguuuaaga

SEQ ID NO: 1890489 - RNA, 19 nt, Artificial Sequence
  Description of Artificial Sequence: Synthetic oligonucleotide
  Antisense strand to SEQ ID NO: 1890488
ucuuaaacaauucuagaag

SEQ ID NO: 1890490 - RNA, 19 nt, Artificial Sequence
  Description of Artificial Sequence: Synthetic oligonucleotide
  Sense strand starting at position 117 of SEQ ID NO: 1879205
augauucugagaggucuaa

SEQ ID NO: 1890491 - RNA, 19 nt, Artificial Sequence
  Description of Artificial Sequence: Synthetic oligonucleotide
  Antisense strand to SEQ ID NO: 1890490
uuagaccucucagaaucau

SEQ ID NO: 1890492 - RNA, 19 nt, Artificial Sequence
  Description of Artificial Sequence: Synthetic oligonucleotide
  Sense strand starting at position 121 of SEQ ID NO: 1879205
uucugagaggucuaaguga

SEQ ID NO: 1890493 - RNA, 19 nt, Artificial Sequence
  Description of Artificial Sequence: Synthetic oligonucleotide
  Antisense strand to SEQ ID NO: 1890492
ucacuuagaccucucagaa

SEQ ID NO: 1890494 - RNA, 19 nt, Artificial Sequence
  Description of Artificial Sequence: Synthetic oligonucleotide
  Sense strand starting at position 183 of SEQ ID NO: 1879205
ggaugcaucuaaguugaaa

SEQ ID NO: 1890495 - RNA, 19 nt, Artificial Sequence
  Description of Artificial Sequence: Synthetic oligonucleotide
  Antisense strand to SEQ ID NO: 1890494
uuucaacuuagaugcaucc

SEQ ID NO: 1890496 - RNA, 19 nt, Artificial Sequence
  Description of Artificial Sequence: Synthetic oligonucleotide
  Sense strand starting at position 436 of SEQ ID NO: 1879205
ugcugaucucugcuguagu

SEQ ID NO: 1890497 - RNA, 19 nt, Artificial Sequence
  Description of Artificial Sequence: Synthetic oligonucleotide
  Antisense strand to SEQ ID NO: 1890496
acuacagcagagaucagca

SEQ ID NO: 1890498 - RNA, 19 nt, Artificial Sequence
  Description of Artificial Sequence: Synthetic oligonucleotide
  Sense strand starting at position 561 of SEQ ID NO: 1879205
aaugaaauccagugguucu

SEQ ID NO: 1890499 - RNA, 19 nt, Artificial Sequence
  Description of Artificial Sequence: Synthetic oligonucleotide
  Antisense strand to SEQ ID NO: 1890498
agaaccacuggauuucauu

SEQ ID NO: 1890500 - RNA, 19 nt, Artificial Sequence
  Description of Artificial Sequence: Synthetic oligonucleotide
  Sense strand starting at position 614 of SEQ ID NO: 1879205
cugcuuuaggcagaaucua

SEQ ID NO: 1890501 - RNA, 19 nt, Artificial Sequence
  Description of Artificial Sequence: Synthetic oligonucleotide
  Antisense strand to SEQ ID NO: 1890500
uagauucugccuaaagcag

SEQ ID NO: 1890502 - RNA, 19 nt, Artificial Sequence
  Description of Artificial Sequence: Synthetic oligonucleotide
  Sense strand starting at position 629 of SEQ ID NO: 1879205
ucuaaauugguuuagucuu

SEQ ID NO: 1890503 - RNA, 19 nt, Artificial Sequence
  Description of Artificial Sequence: Synthetic oligonucleotide
  Antisense strand to SEQ ID NO: 1890502
aagacuaaaccaauuuaga

SEQ ID NO: 1890504 - RNA, 19 nt, Artificial Sequence
  Description of Artificial Sequence: Synthetic oligonucleotide
  Sense strand starting at position 636 of SEQ ID NO: 1879205
ugguuuagucuuuaacuga

SEQ ID NO: 1890505 - RNA, 19 nt, Artificial Sequence
  Description of Artificial Sequence: Synthetic oligonucleotide
  Antisense strand to SEQ ID NO: 1890504
ucaguuaaagacuaaacca

SEQ ID NO: 1890506 - RNA, 19 nt, Artificial Sequence
  Description of Artificial Sequence: Synthetic oligonucleotide
  Sense strand starting at position 860 of SEQ ID NO: 1879205
gaggauacauuggagauuu

SEQ ID NO: 1890507 - RNA, 19 nt, Artificial Sequence
  Description of Artificial Sequence: Synthetic oligonucleotide
  Antisense strand to SEQ ID NO: 1890506
aaaucuccaauguauccuc

SEQ ID NO: 1890508 - RNA, 19 nt, Artificial Sequence
  Description of Artificial Sequence: Synthetic oligonucleotide
  Sense strand starting at position 884 of SEQ ID NO: 1879205
ucauaagauccucaguagu

SEQ ID NO: 1890509 - RNA, 19 nt, Artificial Sequence
  Description of Artificial Sequence: Synthetic oligonucleotide
  Antisense strand to SEQ ID NO: 1890508
acuacugaggaucuuauga

SEQ ID NO: 1890510 - RNA, 19 nt, Artificial Sequence
  Description of Artificial Sequence: Synthetic oligonucleotide
  Sense strand starting at position 886 of SEQ ID NO: 1879205
auaagauccucaguaguau

SEQ ID NO: 1890511 - RNA, 19 nt, Artificial Sequence
  Description of Artificial Sequence: Synthetic oligonucleotide
  Antisense strand to SEQ ID NO: 1890510
auacuacugaggaucuuau

SEQ ID NO: 1890512 - RNA, 19 nt, Artificial Sequence
  Description of Artificial Sequence: Synthetic oligonucleotide
  Sense strand starting at position 887 of SEQ ID NO: 1879205
uaagauccucaguaguaug

SEQ ID NO: 1890513 - RNA, 19 nt, Artificial Sequence
  Description of Artificial Sequence: Synthetic oligonucleotide
  Antisense strand to SEQ ID NO: 1890512
cauacuacugaggaucuua

SEQ ID NO: 1890514 - RNA, 19 nt, Artificial Sequence
  Description of Artificial Sequence: Synthetic oligonucleotide
  Sense strand starting at position 911 of SEQ ID NO: 1879205
gguagauugacaugugaac

SEQ ID NO: 1890515 - RNA, 19 nt, Artificial Sequence
  Description of Artificial Sequence: Synthetic oligonucleotide
  Antisense strand to SEQ ID NO: 1890514
guucacaugucaaucuacc

SEQ ID NO: 1890516 - RNA, 19 nt, Artificial Sequence
  Description of Artificial Sequence: Synthetic oligonucleotide
  Sense strand starting at position 945 of SEQ ID NO: 1879205
uucuauuaucgauagcauc

SEQ ID NO: 1890517 - RNA, 19 nt, Artificial Sequence
  Description of Artificial Sequence: Synthetic oligonucleotide
  Antisense strand to SEQ ID NO: 1890516
gaugcuaucgauaauagaa

SEQ ID NO: 1890518 - RNA, 19 nt, Artificial Sequence
  Description of Artificial Sequence: Synthetic oligonucleotide
  Sense strand starting at position 1037 of SEQ ID NO: 1879205
gggaacuauuguguuuaau

SEQ ID NO: 1890519 - RNA, 19 nt, Artificial Sequence
  Description of Artificial Sequence: Synthetic oligonucleotide
  Antisense strand to SEQ ID NO: 1890518
auuaaacacaauaguuccc

SEQ ID NO: 1890520 - RNA, 19 nt, Artificial Sequence
  Description of Artificial Sequence: Synthetic oligonucleotide
  Sense strand starting at position 1055 of SEQ ID NO: 1879205
uaaguauuacuaugugaag

SEQ ID NO: 1890521 - RNA, 19 nt, Artificial Sequence
  Description of Artificial Sequence: Synthetic oligonucleotide
  Antisense strand to SEQ ID NO: 1890520
cuucacauaguaauacuua

SEQ ID NO: 1890522 - RNA, 19 nt, Artificial Sequence
  Description of Artificial Sequence: Synthetic oligonucleotide
  Sense strand starting at position 1056 of SEQ ID NO: 1879205
aaguauuacuaugugaaga

SEQ ID NO: 1890523 - RNA, 19 nt, Artificial Sequence
  Description of Artificial Sequence: Synthetic oligonucleotide
  Antisense strand to SEQ ID NO: 1890522
ucuucacauaguaauacuu

SEQ ID NO: 1890524 - RNA, 19 nt, Artificial Sequence
  Description of Artificial Sequence: Synthetic oligonucleotide
  Sense strand starting at position 1061 of SEQ ID NO: 1879205
uuacuaugugaagaugugu

SEQ ID NO: 1890525 - RNA, 19 nt, Artificial Sequence
  Description of Artificial Sequence: Synthetic oligonucleotide
  Antisense strand to SEQ ID NO: 1890524
acacaucuucacauaguaa

SEQ ID NO: 1890526 - RNA, 19 nt, Artificial Sequence
  Description of Artificial Sequence: Synthetic oligonucleotide
  Sense strand starting at position 1134 of SEQ ID NO: 1879205
accauaggauucgcagaaa

SEQ ID NO: 1890527 - RNA, 19 nt, Artificial Sequence
  Description of Artificial Sequence: Synthetic oligonucleotide
  Antisense strand to SEQ ID NO: 1890526
uuucugcgaauccuauggu

SEQ ID NO: 1890528 - RNA, 19 nt, Artificial Sequence
  Description of Artificial Sequence: Synthetic oligonucleotide
  Sense strand starting at position 1329 of SEQ ID NO: 1879205
ucaagcaauuaggugagaa

SEQ ID NO: 1890529 - RNA, 19 nt, Artificial Sequence
  Description of Artificial Sequence: Synthetic oligonucleotide
  Antisense strand to SEQ ID NO: 1890528
uucucaccuaauugcuuga

SEQ ID NO: 1890530 - RNA, 19 nt, Artificial Sequence
  Description of Artificial Sequence: Synthetic oligonucleotide
  Sense strand starting at position 1339 of SEQ ID NO: 1879205
aggugagaauuccuuacuu

SEQ ID NO: 1890531 - RNA, 19 nt, Artificial Sequence
  Description of Artificial Sequence: Synthetic oligonucleotide
  Antisense strand to SEQ ID NO: 1890530
aaguaaggaauucucaccu

SEQ ID NO: 1890532 - RNA, 19 nt, Artificial Sequence
  Description of Artificial Sequence: Synthetic oligonucleotide
  Sense strand starting at position 1423 of SEQ ID NO: 1879205
uuucuuguucuauagugaa

SEQ ID NO: 1890533 - RNA, 19 nt, Artificial Sequence
  Description of Artificial Sequence: Synthetic oligonucleotide
  Antisense strand to SEQ ID NO: 1890532
uucacuauagaacaagaaa

SEQ ID NO: 1890534 - RNA, 19 nt, Artificial Sequence
  Description of Artificial Sequence: Synthetic oligonucleotide
  Sense strand starting at position 1806 of SEQ ID NO: 1879205
auauauugcuucuuggaca

SEQ ID NO: 1890535 - RNA, 19 nt, Artificial Sequence
  Description of Artificial Sequence: Synthetic oligonucleotide
  Antisense strand to SEQ ID NO: 1890534
uguccaagaagcaauauau

SEQ ID NO: 1890536 - RNA, 19 nt, Artificial Sequence
  Description of Artificial Sequence: Synthetic oligonucleotide
  Sense strand starting at position 1869 of SEQ ID NO: 1879205
auagcagcacuguagaaau

SEQ ID NO: 1890537 - RNA, 19 nt, Artificial Sequence
  Description of Artificial Sequence: Synthetic oligonucleotide
  Antisense strand to SEQ ID NO: 1890536
auuucuacagugcugcuau

SEQ ID NO: 1890538 - RNA, 19 nt, Artificial Sequence
  Description of Artificial Sequence: Synthetic oligonucleotide
  Sense strand starting at position 1871 of SEQ ID NO: 1879205
agcagcacuguagaaauaa

SEQ ID NO: 1890539 - RNA, 19 nt, Artificial Sequence
  Description of Artificial Sequence: Synthetic oligonucleotide
  Antisense strand to SEQ ID NO: 1890538
uuauuucuacagugcugcu

SEQ ID NO: 1890540 - RNA, 19 nt, Artificial Sequence
  Description of Artificial Sequence: Synthetic oligonucleotide
  Sense strand starting at position 1906 of SEQ ID NO: 1879205
acuguaauccuccaguuac

SEQ ID NO: 1890541 - RNA, 19 nt, Artificial Sequence
  Description of Artificial Sequence: Synthetic oligonucleotide
  Antisense strand to SEQ ID NO: 1890540
guaacuggaggauuacagu

SEQ ID NO: 1890542 - RNA, 19 nt, Artificial Sequence
  Description of Artificial Sequence: Synthetic oligonucleotide
  Sense strand starting at position 1944 of SEQ ID NO: 1879205
ggcuuuacuccacaaacag

SEQ ID NO: 1890543 - RNA, 19 nt, Artificial Sequence
  Description of Artificial Sequence: Synthetic oligonucleotide
  Antisense strand to SEQ ID NO: 1890542
cuguuuguggaguaaagcc

SEQ ID NO: 1890544 - RNA, 19 nt, Artificial Sequence
  Description of Artificial Sequence: Synthetic oligonucleotide
  Sense strand starting at position 2030 of SEQ ID NO: 1879205
gguggagauuccuccacaa

SEQ ID NO: 1890545 - RNA, 19 nt, Artificial Sequence
  Description of Artificial Sequence: Synthetic oligonucleotide
  Antisense strand to SEQ ID NO: 1890544
uuguggaggaaucuccacc

SEQ ID NO: 1890546 - RNA, 19 nt, Artificial Sequence
  Description of Artificial Sequence: Synthetic oligonucleotide
  Sense strand starting at position 2051 of SEQ ID NO: 1879205
gguagaggucaccagcaua

SEQ ID NO: 1890547 - RNA, 19 nt, Artificial Sequence
  Description of Artificial Sequence: Synthetic oligonucleotide
  Antisense strand to SEQ ID NO: 1890546
uaugcuggugaccucuacc

SEQ ID NO: 1890548 - RNA, 19 nt, Artificial Sequence
  Description of Artificial Sequence: Synthetic oligonucleotide
  Sense strand starting at position 2078 of SEQ ID NO: 1879205
gggauauuguauguaacug

SEQ ID NO: 1890549 - RNA, 19 nt, Artificial Sequence
  Description of Artificial Sequence: Synthetic oligonucleotide
  Antisense strand to SEQ ID NO: 1890548
caguuacauacaauauccc

SEQ ID NO: 1890550 - RNA, 19 nt, Artificial Sequence
  Description of Artificial Sequence: Synthetic oligonucleotide
  Sense strand starting at position 2133 of SEQ ID NO: 1879205
auacgugaaagcuaagaua

SEQ ID NO: 1890551 - RNA, 19 nt, Artificial Sequence
  Description of Artificial Sequence: Synthetic oligonucleotide
  Antisense strand to SEQ ID NO: 1890550
uaucuuagcuuucacguau

SEQ ID NO: 1890552 - RNA, 19 nt, Artificial Sequence
  Description of Artificial Sequence: Synthetic oligonucleotide
  Sense strand starting at position 2281 of SEQ ID NO: 1879205
gcagacaaugauugcuaga

SEQ ID NO: 1890553 - RNA, 19 nt, Artificial Sequence
  Description of Artificial Sequence: Synthetic oligonucleotide
  Antisense strand to SEQ ID NO: 1890552
ucuagcaaucauugucugc

SEQ ID NO: 1890554 - RNA, 19 nt, Artificial Sequence
  Description of Artificial Sequence: Synthetic oligonucleotide
  Sense strand starting at position 2283 of SEQ ID NO: 1879205
agacaaugauugcuagagu

SEQ ID NO: 1890555 - RNA, 19 nt, Artificial Sequence
  Description of Artificial Sequence: Synthetic oligonucleotide
  Antisense strand to SEQ ID NO: 1890554
acucuagcaaucauugucu

SEQ ID NO: 1890556 - RNA, 19 nt, Artificial Sequence
  Description of Artificial Sequence: Synthetic oligonucleotide
  Sense strand starting at position 2378 of SEQ ID NO: 1879205
cuaucuuguaguugaggaa

SEQ ID NO: 1890557 - RNA, 19 nt, Artificial Sequence
  Description of Artificial Sequence: Synthetic oligonucleotide
  Antisense strand to SEQ ID NO: 1890556
uuccucaacuacaagauag

SEQ ID NO: 1890558 - RNA, 19 nt, Artificial Sequence
  Description of Artificial Sequence: Synthetic oligonucleotide
  Sense strand starting at position 2715 of SEQ ID NO: 1879205
gcuuacauagguuaaguaa

SEQ ID NO: 1890559 - RNA, 19 nt, Artificial Sequence
  Description of Artificial Sequence: Synthetic oligonucleotide
  Antisense strand to SEQ ID NO: 1890558
uuacuuaaccuauguaagc

SEQ ID NO: 1890560 - RNA, 19 nt, Artificial Sequence
  Description of Artificial Sequence: Synthetic oligonucleotide
  Sense strand starting at position 3383 of SEQ ID NO: 1879205
aaaucaugugaaugauguc

SEQ ID NO: 1890561 - RNA, 19 nt, Artificial Sequence
  Description of Artificial Sequence: Synthetic oligonucleotide
  Antisense strand to SEQ ID NO: 1890560
gacaucauucacaugauuu

SEQ ID NO: 1890562 - RNA, 19 nt, Artificial Sequence
  Description of Artificial Sequence: Synthetic oligonucleotide
  Sense strand starting at position 3396 of SEQ ID NO: 1879205
gaugucucuuuaguaagaa

SEQ ID NO: 1890563 - RNA, 19 nt, Artificial Sequence
  Description of Artificial Sequence: Synthetic oligonucleotide
  Antisense strand to SEQ ID NO: 1890562
uucuuacuaaagagacauc

SEQ ID NO: 1890564 - RNA, 19 nt, Artificial Sequence
  Description of Artificial Sequence: Synthetic oligonucleotide
  Sense strand starting at position 3890 of SEQ ID NO: 1879205
accuuuguaugaccauaua

SEQ ID NO: 1890565 - RNA, 19 nt, Artificial Sequence
  Description of Artificial Sequence: Synthetic oligonucleotide
  Antisense strand to SEQ ID NO: 1890564
uauauggucauacaaaggu

SEQ ID NO: 1890566 - RNA, 19 nt, Artificial Sequence
  Description of Artificial Sequence: Synthetic oligonucleotide
  Sense strand starting at position 3941 of SEQ ID NO: 1879205
uuacauauccgguacuauu

SEQ ID NO: 1890567 - RNA, 19 nt, Artificial Sequence
  Description of Artificial Sequence: Synthetic oligonucleotide
  Antisense strand to SEQ ID NO: 1890566
aauaguaccggauauguaa

SEQ ID NO: 1890568 - RNA, 19 nt, Artificial Sequence
  Description of Artificial Sequence: Synthetic oligonucleotide
  Sense strand starting at position 34 of SEQ ID NO: 1879206
ggccuauguuugcuuuguu

SEQ ID NO: 1890569 - RNA, 19 nt, Artificial Sequence
  Description of Artificial Sequence: Synthetic oligonucleotide
  Antisense strand to SEQ ID NO: 1890568
aacaaagcaaacauaggcc

SEQ ID NO: 1890570 - RNA, 19 nt, Artificial Sequence
  Description of Artificial Sequence: Synthetic oligonucleotide
  Sense strand starting at position 35 of SEQ ID NO: 1879206
gccuauguuugcuuuguuu

SEQ ID NO: 1890571 - RNA, 19 nt, Artificial Sequence
  Description of Artificial Sequence: Synthetic oligonucleotide
  Antisense strand to SEQ ID NO: 1890570
aaacaaagcaaacauaggc

SEQ ID NO: 1890572 - RNA, 19 nt, Artificial Sequence
  Description of Artificial Sequence: Synthetic oligonucleotide
  Sense strand starting at position 2266 of SEQ ID NO: 1879206
ugaucucaguguuguaagu

SEQ ID NO: 1890573 - RNA, 19 nt, Artificial Sequence
  Description of Artificial Sequence: Synthetic oligonucleotide
  Antisense strand to SEQ ID NO: 1890572
acuuacaacacugagauca

SEQ ID NO: 1890574 - RNA, 19 nt, Artificial Sequence
  Description of Artificial Sequence: Synthetic oligonucleotide
  Sense strand starting at position 2268 of SEQ ID NO: 1879206
aucucaguguuguaaguuu

SEQ ID NO: 1890575 - RNA, 19 nt, Artificial Sequence
  Description of Artificial Sequence: Synthetic oligonucleotide
  Antisense strand to SEQ ID NO: 1890574
aaacuuacaacacugagau

SEQ ID NO: 1890576 - RNA, 19 nt, Artificial Sequence
  Description of Artificial Sequence: Synthetic oligonucleotide
  Sense strand starting at position 2708 of SEQ ID NO: 1879206
acuacaaaguuguaaagaa

SEQ ID NO: 1890577 - RNA, 19 nt, Artificial Sequence
  Description of Artificial Sequence: Synthetic oligonucleotide
  Antisense strand to SEQ ID NO: 1890576
uucuuuacaacuuuguagu

SEQ ID NO: 1890578 - RNA, 19 nt, Artificial Sequence
  Description of Artificial Sequence: Synthetic oligonucleotide
  Sense strand starting at position 3166 of SEQ ID NO: 1879206
gagcauuucugacacuuga

SEQ ID NO: 1890579 - RNA, 19 nt, Artificial Sequence
  Description of Artificial Sequence: Synthetic oligonucleotide
  Antisense strand to SEQ ID NO: 1890578
ucaagugucagaaaugcuc

SEQ ID NO: 1890580 - RNA, 19 nt, Artificial Sequence
  Description of Artificial Sequence: Synthetic oligonucleotide
  Sense strand starting at position 3184 of SEQ ID NO: 1879206
agguuguaugugugaggga

SEQ ID NO: 1890581 - RNA, 19 nt, Artificial Sequence
  Description of Artificial Sequence: Synthetic oligonucleotide
  Antisense strand to SEQ ID NO: 1890580
ucccucacacauacaaccu

SEQ ID NO: 1890582 - RNA, 19 nt, Artificial Sequence
  Description of Artificial Sequence: Synthetic oligonucleotide
  Sense strand starting at position 3339 of SEQ ID NO: 1879206
caugccuuggcgugaggau

SEQ ID NO: 1890583 - RNA, 19 nt, Artificial Sequence
  Description of Artificial Sequence: Synthetic oligonucleotide
  Antisense strand to SEQ ID NO: 1890582
auccucacgccaaggcaug

SEQ ID NO: 1890584 - RNA, 19 nt, Artificial Sequence
  Description of Artificial Sequence: Synthetic oligonucleotide
  Sense strand starting at position 3340 of SEQ ID NO: 1879206
augccuuggcgugaggaua

SEQ ID NO: 1890585 - RNA, 19 nt, Artificial Sequence
  Description of Artificial Sequence: Synthetic oligonucleotide
  Antisense strand to SEQ ID NO: 1890584
uauccucacgccaaggcau

SEQ ID NO: 1890586 - RNA, 19 nt, Artificial Sequence
  Description of Artificial Sequence: Synthetic oligonucleotide
  Sense strand starting at position 3341 of SEQ ID NO: 1879206
ugccuuggcgugaggauaa

SEQ ID NO: 1890587 - RNA, 19 nt, Artificial Sequence
  Description of Artificial Sequence: Synthetic oligonucleotide
  Antisense strand to SEQ ID NO: 1890586
uuauccucacgccaaggca

SEQ ID NO: 1890588 - RNA, 19 nt, Artificial Sequence
  Description of Artificial Sequence: Synthetic oligonucleotide
  Sense strand starting at position 3348 of SEQ ID NO: 1879206
gcgugaggauaaucaaggu

SEQ ID NO: 1890589 - RNA, 19 nt, Artificial Sequence
  Description of Artificial Sequence: Synthetic oligonucleotide
  Antisense strand to SEQ ID NO: 1890588
accuugauuauccucacgc

SEQ ID NO: 1890590 - RNA, 19 nt, Artificial Sequence
  Description of Artificial Sequence: Synthetic oligonucleotide
  Sense strand starting at position 3352 of SEQ ID NO: 1879206
gaggauaaucaaggugucu

SEQ ID NO: 1890591 - RNA, 19 nt, Artificial Sequence
  Description of Artificial Sequence: Synthetic oligonucleotide
  Antisense strand to SEQ ID NO: 1890590
agacaccuugauuauccuc

SEQ ID NO: 1890592 - RNA, 19 nt, Artificial Sequence
  Description of Artificial Sequence: Synthetic oligonucleotide
  Sense strand starting at position 3354 of SEQ ID NO: 1879206
ggauaaucaaggugucucu

SEQ ID NO: 1890593 - RNA, 19 nt, Artificial Sequence
  Description of Artificial Sequence: Synthetic oligonucleotide
  Antisense strand to SEQ ID NO: 1890592
agagacaccuugauuaucc

SEQ ID NO: 1890594 - RNA, 19 nt, Artificial Sequence
  Description of Artificial Sequence: Synthetic oligonucleotide
  Sense strand starting at position 3357 of SEQ ID NO: 1879206
uaaucaaggugucucugua

SEQ ID NO: 1890595 - RNA, 19 nt, Artificial Sequence
  Description of Artificial Sequence: Synthetic oligonucleotide
  Antisense strand to SEQ ID NO: 1890594
uacagagacaccuugauua

SEQ ID NO: 1890596 - RNA, 19 nt, Artificial Sequence
  Description of Artificial Sequence: Synthetic oligonucleotide
  Sense strand starting at position 3372 of SEQ ID NO: 1879206
uguaaauagccuggguaca

SEQ ID NO: 1890597 - RNA, 19 nt, Artificial Sequence
  Description of Artificial Sequence: Synthetic oligonucleotide
  Antisense strand to SEQ ID NO: 1890596
uguacccaggcuauuuaca

SEQ ID NO: 1890598 - RNA, 19 nt, Artificial Sequence
  Description of Artificial Sequence: Synthetic oligonucleotide
  Sense strand starting at position 3373 of SEQ ID NO: 1879206
guaaauagccuggguacaa

SEQ ID NO: 1890599 - RNA, 19 nt, Artificial Sequence
  Description of Artificial Sequence: Synthetic oligonucleotide
  Antisense strand to SEQ ID NO: 1890598
uuguacccaggcuauuuac

SEQ ID NO: 1890600 - RNA, 19 nt, Artificial Sequence
  Description of Artificial Sequence: Synthetic oligonucleotide
  Sense strand starting at position 3408 of SEQ ID NO: 1879206
uugacagugguggguauua

SEQ ID NO: 1890601 - RNA, 19 nt, Artificial Sequence
  Description of Artificial Sequence: Synthetic oligonucleotide
  Antisense strand to SEQ ID NO: 1890600
uaauacccaccacugucaa

SEQ ID NO: 1890602 - RNA, 19 nt, Artificial Sequence
  Description of Artificial Sequence: Synthetic oligonucleotide
  Sense strand starting at position 3410 of SEQ ID NO: 1879206
gacagugguggguauuaag

SEQ ID NO: 1890603 - RNA, 19 nt, Artificial Sequence
  Description of Artificial Sequence: Synthetic oligonucleotide
  Antisense strand to SEQ ID NO: 1890602
cuuaauacccaccacuguc

SEQ ID NO: 1890604 - RNA, 19 nt, Artificial Sequence
  Description of Artificial Sequence: Synthetic oligonucleotide
  Sense strand starting at position 3418 of SEQ ID NO: 1879206
uggguauuaaguugaggga

SEQ ID NO: 1890605 - RNA, 19 nt, Artificial Sequence
  Description of Artificial Sequence: Synthetic oligonucleotide
  Antisense strand to SEQ ID NO: 1890604
ucccucaacuuaauaccca

SEQ ID NO: 1890606 - RNA, 19 nt, Artificial Sequence
  Description of Artificial Sequence: Synthetic oligonucleotide
  Sense strand starting at position 3471 of SEQ ID NO: 1879206
ggguucugguaauuguuaa

SEQ ID NO: 1890607 - RNA, 19 nt, Artificial Sequence
  Description of Artificial Sequence: Synthetic oligonucleotide
  Antisense strand to SEQ ID NO: 1890606
uuaacaauuaccagaaccc

SEQ ID NO: 1890608 - RNA, 19 nt, Artificial Sequence
  Description of Artificial Sequence: Synthetic oligonucleotide
  Sense strand starting at position 3472 of SEQ ID NO: 1879206
gguucugguaauuguuaau

SEQ ID NO: 1890609 - RNA, 19 nt, Artificial Sequence
  Description of Artificial Sequence: Synthetic oligonucleotide
  Antisense strand to SEQ ID NO: 1890608
auuaacaauuaccagaacc

SEQ ID NO: 1890610 - RNA, 19 nt, Artificial Sequence
  Description of Artificial Sequence: Synthetic oligonucleotide
  Sense strand starting at position 3475 of SEQ ID NO: 1879206
ucugguaauuguuaauaca

SEQ ID NO: 1890611 - RNA, 19 nt, Artificial Sequence
  Description of Artificial Sequence: Synthetic oligonucleotide
  Antisense strand to SEQ ID NO: 1890610
uguauuaacaauuaccaga

SEQ ID NO: 1890612 - RNA, 19 nt, Artificial Sequence
  Description of Artificial Sequence: Synthetic oligonucleotide
  Sense strand starting at position 3478 of SEQ ID NO: 1879206
gguaauuguuaauacaugu

SEQ ID NO: 1890613 - RNA, 19 nt, Artificial Sequence
  Description of Artificial Sequence: Synthetic oligonucleotide
  Antisense strand to SEQ ID NO: 1890612
acauguauuaacaauuacc

SEQ ID NO: 1890614 - RNA, 19 nt, Artificial Sequence
  Description of Artificial Sequence: Synthetic oligonucleotide
  Sense strand starting at position 3572 of SEQ ID NO: 1879206
cucuaugaauaugaagaaa

SEQ ID NO: 1890615 - RNA, 19 nt, Artificial Sequence
  Description of Artificial Sequence: Synthetic oligonucleotide
  Antisense strand to SEQ ID NO: 1890614
uuucuucauauucauagag

SEQ ID NO: 1890616 - RNA, 19 nt, Artificial Sequence
  Description of Artificial Sequence: Synthetic oligonucleotide
  Sense strand starting at position 3606 of SEQ ID NO: 1879206
gccacuuaaccguauucuu

SEQ ID NO: 1890617 - RNA, 19 nt, Artificial Sequence
  Description of Artificial Sequence: Synthetic oligonucleotide
  Antisense strand to SEQ ID NO: 1890616
aagaauacgguuaaguggc

SEQ ID NO: 1890618 - RNA, 19 nt, Artificial Sequence
  Description of Artificial Sequence: Synthetic oligonucleotide
  Sense strand starting at position 3643 of SEQ ID NO: 1879206
cuugauaggcuagaugagu

SEQ ID NO: 1890619 - RNA, 19 nt, Artificial Sequence
  Description of Artificial Sequence: Synthetic oligonucleotide
  Antisense strand to SEQ ID NO: 1890618
acucaucuagccuaucaag

SEQ ID NO: 1890620 - RNA, 19 nt, Artificial Sequence
  Description of Artificial Sequence: Synthetic oligonucleotide
  Sense strand starting at position 3652 of SEQ ID NO: 1879206
cuagaugagugguucuuaa

SEQ ID NO: 1890621 - RNA, 19 nt, Artificial Sequence
  Description of Artificial Sequence: Synthetic oligonucleotide
  Antisense strand to SEQ ID NO: 1890620
uuaagaaccacucaucuag

SEQ ID NO: 1890622 - RNA, 19 nt, Artificial Sequence
  Description of Artificial Sequence: Synthetic oligonucleotide
  Sense strand starting at position 3901 of SEQ ID NO: 1879206
ugaacauguugacaggaga

SEQ ID NO: 1890623 - RNA, 19 nt, Artificial Sequence
  Description of Artificial Sequence: Synthetic oligonucleotide
  Antisense strand to SEQ ID NO: 1890622
ucuccugucaacauguuca

SEQ ID NO: 1890624 - RNA, 19 nt, Artificial Sequence
  Description of Artificial Sequence: Synthetic oligonucleotide
  Sense strand starting at position 3915 of SEQ ID NO: 1879206
ggagaacuuuaggguccau

SEQ ID NO: 1890625 - RNA, 19 nt, Artificial Sequence
  Description of Artificial Sequence: Synthetic oligonucleotide
  Antisense strand to SEQ ID NO: 1890624
auggacccuaaaguucucc

SEQ ID NO: 1890626 - RNA, 19 nt, Artificial Sequence
  Description of Artificial Sequence: Synthetic oligonucleotide
  Sense strand starting at position 3957 of SEQ ID NO: 1879206
gcaaacuuauuucugcagu

SEQ ID NO: 1890627 - RNA, 19 nt, Artificial Sequence
  Description of Artificial Sequence: Synthetic oligonucleotide
  Antisense strand to SEQ ID NO: 1890626
acugcagaaauaaguuugc

SEQ ID NO: 1890628 - RNA, 19 nt, Artificial Sequence
  Description of Artificial Sequence: Synthetic oligonucleotide
  Sense strand starting at position 2 of SEQ ID NO: 1879208
ggugaaagcauaggacauu

SEQ ID NO: 1890629 - RNA, 19 nt, Artificial Sequence
  Description of Artificial Sequence: Synthetic oligonucleotide
  Antisense strand to SEQ ID NO: 1890628
aauguccuaugcuuucacc

SEQ ID NO: 1890630 - RNA, 19 nt, Artificial Sequence
  Description of Artificial Sequence: Synthetic oligonucleotide
  Sense strand starting at position 3 of SEQ ID NO: 1879208
gugaaagcauaggacauuu

SEQ ID NO: 1890631 - RNA, 19 nt, Artificial Sequence
  Description of Artificial Sequence: Synthetic oligonucleotide
  Antisense strand to SEQ ID NO: 1890630
aaauguccuaugcuuucac

SEQ ID NO: 1890632 - RNA, 19 nt, Artificial Sequence
  Description of Artificial Sequence: Synthetic oligonucleotide
  Sense strand starting at position 211 of SEQ ID NO: 1879208
auguguuugcaaugacuaa

SEQ ID NO: 1890633 - RNA, 19 nt, Artificial Sequence
  Description of Artificial Sequence: Synthetic oligonucleotide
  Antisense strand to SEQ ID NO: 1890632
uuagucauugcaaacacau

SEQ ID NO: 1890634 - RNA, 19 nt, Artificial Sequence
  Description of Artificial Sequence: Synthetic oligonucleotide
  Sense strand starting at position 355 of SEQ ID NO: 1879208
ggguaaauauguucaaagg

SEQ ID NO: 1890635 - RNA, 19 nt, Artificial Sequence
  Description of Artificial Sequence: Synthetic oligonucleotide
  Antisense strand to SEQ ID NO: 1890634
ccuuugaacauauuuaccc

SEQ ID NO: 1890636 - RNA, 19 nt, Artificial Sequence
  Description of Artificial Sequence: Synthetic oligonucleotide
  Sense strand starting at position 387 of SEQ ID NO: 1879208
aaagcaaacuguuuagagu

SEQ ID NO: 1890637 - RNA, 19 nt, Artificial Sequence
  Description of Artificial Sequence: Synthetic oligonucleotide
  Antisense strand to SEQ ID NO: 1890636
acucuaaacaguuugcuuu

SEQ ID NO: 1890638 - RNA, 19 nt, Artificial Sequence
  Description of Artificial Sequence: Synthetic oligonucleotide
  Sense strand starting at position 471 of SEQ ID NO: 1879208
cucuuaaccugagucuuag

SEQ ID NO: 1890639 - RNA, 19 nt, Artificial Sequence
  Description of Artificial Sequence: Synthetic oligonucleotide
  Antisense strand to SEQ ID NO: 1890638
cuaagacucagguuaagag

SEQ ID NO: 1890640 - RNA, 19 nt, Artificial Sequence
  Description of Artificial Sequence: Synthetic oligonucleotide
  Sense strand starting at position 590 of SEQ ID NO: 1879208
acaaauguagcugguacua

SEQ ID NO: 1890641 - RNA, 19 nt, Artificial Sequence
  Description of Artificial Sequence: Synthetic oligonucleotide
  Antisense strand to SEQ ID NO: 1890640
uaguaccagcuacauuugu

SEQ ID NO: 1890642 - RNA, 19 nt, Artificial Sequence
  Description of Artificial Sequence: Synthetic oligonucleotide
  Sense strand starting at position 874 of SEQ ID NO: 1879208
uugggauuauaggcaaaug

SEQ ID NO: 1890643 - RNA, 19 nt, Artificial Sequence
  Description of Artificial Sequence: Synthetic oligonucleotide
  Antisense strand to SEQ ID NO: 1890642
cauuugccuauaaucccaa

SEQ ID NO: 1890644 - RNA, 19 nt, Artificial Sequence
  Description of Artificial Sequence: Synthetic oligonucleotide
  Sense strand starting at position 1032 of SEQ ID NO: 1879208
cuaaucaggcccugaguua

SEQ ID NO: 1890645 - RNA, 19 nt, Artificial Sequence
  Description of Artificial Sequence: Synthetic oligonucleotide
  Antisense strand to SEQ ID NO: 1890644
uaacucagggccugauuag

SEQ ID NO: 1890646 - RNA, 19 nt, Artificial Sequence
  Description of Artificial Sequence: Synthetic oligonucleotide
  Sense strand starting at position 1050 of SEQ ID NO: 1879208
agcuguuuccaagaagcuu

SEQ ID NO: 1890647 - RNA, 19 nt, Artificial Sequence
  Description of Artificial Sequence: Synthetic oligonucleotide
  Antisense strand to SEQ ID NO: 1890646
aagcuucuuggaaacagcu

SEQ ID NO: 1890648 - RNA, 19 nt, Artificial Sequence
  Description of Artificial Sequence: Synthetic oligonucleotide
  Sense strand starting at position 1172 of SEQ ID NO: 1879208
ggacaagcuuccuugagcu

SEQ ID NO: 1890649 - RNA, 19 nt, Artificial Sequence
  Description of Artificial Sequence: Synthetic oligonucleotide
  Antisense strand to SEQ ID NO: 1890648
agcucaaggaagcuugucc

SEQ ID NO: 1890650 - RNA, 19 nt, Artificial Sequence
  Description of Artificial Sequence: Synthetic oligonucleotide
  Sense strand starting at position 1182 of SEQ ID NO: 1879208
ccuugagcuccugacuuua

SEQ ID NO: 1890651 - RNA, 19 nt, Artificial Sequence
  Description of Artificial Sequence: Synthetic oligonucleotide
  Antisense strand to SEQ ID NO: 1890650
uaaagucaggagcucaagg

SEQ ID NO: 1890652 - RNA, 19 nt, Artificial Sequence
  Description of Artificial Sequence: Synthetic oligonucleotide
  Sense strand starting at position 1184 of SEQ ID NO: 1879208
uugagcuccugacuuuaga

SEQ ID NO: 1890653 - RNA, 19 nt, Artificial Sequence
  Description of Artificial Sequence: Synthetic oligonucleotide
  Antisense strand to SEQ ID NO: 1890652
ucuaaagucaggagcucaa

SEQ ID NO: 1890654 - RNA, 19 nt, Artificial Sequence
  Description of Artificial Sequence: Synthetic oligonucleotide
  Sense strand starting at position 1292 of SEQ ID NO: 1879208
uacaguacugucgagguuu

SEQ ID NO: 1890655 - RNA, 19 nt, Artificial Sequence
  Description of Artificial Sequence: Synthetic oligonucleotide
  Antisense strand to SEQ ID NO: 1890654
aaaccucgacaguacugua

SEQ ID NO: 1890656 - RNA, 19 nt, Artificial Sequence
  Description of Artificial Sequence: Synthetic oligonucleotide
  Sense strand starting at position 1378 of SEQ ID NO: 1879208
cuuauaagaaucggugcua

SEQ ID NO: 1890657 - RNA, 19 nt, Artificial Sequence
  Description of Artificial Sequence: Synthetic oligonucleotide
  Antisense strand to SEQ ID NO: 1890656
uagcaccgauucuuauaag

SEQ ID NO: 1890658 - RNA, 19 nt, Artificial Sequence
  Description of Artificial Sequence: Synthetic oligonucleotide
  Sense strand starting at position 1379 of SEQ ID NO: 1879208
uuauaagaaucggugcuaa

SEQ ID NO: 1890659 - RNA, 19 nt, Artificial Sequence
  Description of Artificial Sequence: Synthetic oligonucleotide
  Antisense strand to SEQ ID NO: 1890658
uuagcaccgauucuuauaa

SEQ ID NO: 1890660 - RNA, 19 nt, Artificial Sequence
  Description of Artificial Sequence: Synthetic oligonucleotide
  Sense strand starting at position 1397 of SEQ ID NO: 1879208
aggguaugugccuaccaca

SEQ ID NO: 1890661 - RNA, 19 nt, Artificial Sequence
  Description of Artificial Sequence: Synthetic oligonucleotide
  Antisense strand to SEQ ID NO: 1890660
ugugguaggcacauacccu

SEQ ID NO: 1890662 - RNA, 19 nt, Artificial Sequence
  Description of Artificial Sequence: Synthetic oligonucleotide
  Sense strand starting at position 1419 of SEQ ID NO: 1879208
cagcuuguagauuaaugaa

SEQ ID NO: 1890663 - RNA, 19 nt, Artificial Sequence
  Description of Artificial Sequence: Synthetic oligonucleotide
  Antisense strand to SEQ ID NO: 1890662
uucauuaaucuacaagcug

SEQ ID NO: 1890664 - RNA, 19 nt, Artificial Sequence
  Description of Artificial Sequence: Synthetic oligonucleotide
  Sense strand starting at position 1622 of SEQ ID NO: 1879208
cugugcuaaucccuuuaga

SEQ ID NO: 1890665 - RNA, 19 nt, Artificial Sequence
  Description of Artificial Sequence: Synthetic oligonucleotide
  Antisense strand to SEQ ID NO: 1890664
ucuaaagggauuagcacag

SEQ ID NO: 1890666 - RNA, 19 nt, Artificial Sequence
  Description of Artificial Sequence: Synthetic oligonucleotide
  Sense strand starting at position 1852 of SEQ ID NO: 1879208
aggacugggcaccgugaua

SEQ ID NO: 1890667 - RNA, 19 nt, Artificial Sequence
  Description of Artificial Sequence: Synthetic oligonucleotide
  Antisense strand to SEQ ID NO: 1890666
uaucacggugcccaguccu

SEQ ID NO: 1890668 - RNA, 19 nt, Artificial Sequence
  Description of Artificial Sequence: Synthetic oligonucleotide
  Sense strand starting at position 2309 of SEQ ID NO: 1879208
aaguauugcggccaucaca

SEQ ID NO: 1890669 - RNA, 19 nt, Artificial Sequence
  Description of Artificial Sequence: Synthetic oligonucleotide
  Antisense strand to SEQ ID NO: 1890668
ugugauggccgcaauacuu

SEQ ID NO: 1890670 - RNA, 19 nt, Artificial Sequence
  Description of Artificial Sequence: Synthetic oligonucleotide
  Sense strand starting at position 2427 of SEQ ID NO: 1879208
auucgauuuccauguguau

SEQ ID NO: 1890671 - RNA, 19 nt, Artificial Sequence
  Description of Artificial Sequence: Synthetic oligonucleotide
  Antisense strand to SEQ ID NO: 1890670
auacacauggaaaucgaau

SEQ ID NO: 1890672 - RNA, 19 nt, Artificial Sequence
  Description of Artificial Sequence: Synthetic oligonucleotide
  Sense strand starting at position 2445 of SEQ ID NO: 1879208
uggauuuguuucuacauag

SEQ ID NO: 1890673 - RNA, 19 nt, Artificial Sequence
  Description of Artificial Sequence: Synthetic oligonucleotide
  Antisense strand to SEQ ID NO: 1890672
cuauguagaaacaaaucca

SEQ ID NO: 1890674 - RNA, 19 nt, Artificial Sequence
  Description of Artificial Sequence: Synthetic oligonucleotide
  Sense strand starting at position 2455 of SEQ ID NO: 1879208
ucuacauagcugugguaaa

SEQ ID NO: 1890675 - RNA, 19 nt, Artificial Sequence
  Description of Artificial Sequence: Synthetic oligonucleotide
  Antisense strand to SEQ ID NO: 1890674
uuuaccacagcuauguaga

SEQ ID NO: 1890676 - RNA, 19 nt, Artificial Sequence
  Description of Artificial Sequence: Synthetic oligonucleotide
  Sense strand starting at position 2486 of SEQ ID NO: 1879208
aacugaauccaggguuguu

SEQ ID NO: 1890677 - RNA, 19 nt, Artificial Sequence
  Description of Artificial Sequence: Synthetic oligonucleotide
  Antisense strand to SEQ ID NO: 1890676
aacaacccuggauucaguu

SEQ ID NO: 1890678 - RNA, 19 nt, Artificial Sequence
  Description of Artificial Sequence: Synthetic oligonucleotide
  Sense strand starting at position 3010 of SEQ ID NO: 1879208
cccauucuuguguauaaag

SEQ ID NO: 1890679 - RNA, 19 nt, Artificial Sequence
  Description of Artificial Sequence: Synthetic oligonucleotide
  Antisense strand to SEQ ID NO: 1890678
cuuuauacacaagaauggg

SEQ ID NO: 1890680 - RNA, 19 nt, Artificial Sequence
  Description of Artificial Sequence: Synthetic oligonucleotide
  Sense strand starting at position 3042 of SEQ ID NO: 1879208
gagaucaguuuccuuaggu

SEQ ID NO: 1890681 - RNA, 19 nt, Artificial Sequence
  Description of Artificial Sequence: Synthetic oligonucleotide
  Antisense strand to SEQ ID NO: 1890680
accuaaggaaacugaucuc

SEQ ID NO: 1890682 - RNA, 19 nt, Artificial Sequence
  Description of Artificial Sequence: Synthetic oligonucleotide
  Sense strand starting at position 3043 of SEQ ID NO: 1879208
agaucaguuuccuuagguu

SEQ ID NO: 1890683 - RNA, 19 nt, Artificial Sequence
  Description of Artificial Sequence: Synthetic oligonucleotide
  Antisense strand to SEQ ID NO: 1890682
aaccuaaggaaacugaucu

SEQ ID NO: 1890684 - RNA, 19 nt, Artificial Sequence
  Description of Artificial Sequence: Synthetic oligonucleotide
  Sense strand starting at position 3075 of SEQ ID NO: 1879208
ugaaacugcuaagucagaa

SEQ ID NO: 1890685 - RNA, 19 nt, Artificial Sequence
  Description of Artificial Sequence: Synthetic oligonucleotide
  Antisense strand to SEQ ID NO: 1890684
uucugacuuagcaguuuca

SEQ ID NO: 1890686 - RNA, 19 nt, Artificial Sequence
  Description of Artificial Sequence: Synthetic oligonucleotide
  Sense strand starting at position 3113 of SEQ ID NO: 1879208
ucaguauuauugccaaaug

SEQ ID NO: 1890687 - RNA, 19 nt, Artificial Sequence
  Description of Artificial Sequence: Synthetic oligonucleotide
  Antisense strand to SEQ ID NO: 1890686
cauuuggcaauaauacuga

SEQ ID NO: 1890688 - RNA, 19 nt, Artificial Sequence
  Description of Artificial Sequence: Synthetic oligonucleotide
  Sense strand starting at position 3568 of SEQ ID NO: 1879208
uucugagagugucuacauu

SEQ ID NO: 1890689 - RNA, 19 nt, Artificial Sequence
  Description of Artificial Sequence: Synthetic oligonucleotide
  Antisense strand to SEQ ID NO: 1890688
aauguagacacucucagaa

SEQ ID NO: 1890690 - RNA, 19 nt, Artificial Sequence
  Description of Artificial Sequence: Synthetic oligonucleotide
  Sense strand starting at position 3592 of SEQ ID NO: 1879208
gggaucagagcuugaaguu

SEQ ID NO: 1890691 - RNA, 19 nt, Artificial Sequence
  Description of Artificial Sequence: Synthetic oligonucleotide
  Antisense strand to SEQ ID NO: 1890690
aacuucaagcucugauccc

SEQ ID NO: 1890692 - RNA, 19 nt, Artificial Sequence
  Description of Artificial Sequence: Synthetic oligonucleotide
  Sense strand starting at position 3593 of SEQ ID NO: 1879208
ggaucagagcuugaaguug

SEQ ID NO: 1890693 - RNA, 19 nt, Artificial Sequence
  Description of Artificial Sequence: Synthetic oligonucleotide
  Antisense strand to SEQ ID NO: 1890692
caacuucaagcucugaucc

SEQ ID NO: 1890694 - RNA, 19 nt, Artificial Sequence
  Description of Artificial Sequence: Synthetic oligonucleotide
  Sense strand starting at position 3656 of SEQ ID NO: 1879208
gaagauucucacggguuag

SEQ ID NO: 1890695 - RNA, 19 nt, Artificial Sequence
  Description of Artificial Sequence: Synthetic oligonucleotide
  Antisense strand to SEQ ID NO: 1890694
cuaacccgugagaaucuuc

SEQ ID NO: 1890696 - RNA, 19 nt, Artificial Sequence
  Description of Artificial Sequence: Synthetic oligonucleotide
  Sense strand starting at position 3781 of SEQ ID NO: 1879208
aggcuagugagacagaguu

SEQ ID NO: 1890697 - RNA, 19 nt, Artificial Sequence
  Description of Artificial Sequence: Synthetic oligonucleotide
  Antisense strand to SEQ ID NO: 1890696
aacucugucucacuagccu

SEQ ID NO: 1890698 - RNA, 19 nt, Artificial Sequence
  Description of Artificial Sequence: Synthetic oligonucleotide
  Sense strand starting at position 3867 of SEQ ID NO: 1879208
augacaagguaauaaagaa

SEQ ID NO: 1890699 - RNA, 19 nt, Artificial Sequence
  Description of Artificial Sequence: Synthetic oligonucleotide
  Antisense strand to SEQ ID NO: 1890698
uucuuuauuaccuugucau

SEQ ID NO: 1890700 - RNA, 19 nt, Artificial Sequence
  Description of Artificial Sequence: Synthetic oligonucleotide
  Sense strand starting at position 3880 of SEQ ID NO: 1879208
aaagaauaaugagauguga

SEQ ID NO: 1890701 - RNA, 19 nt, Artificial Sequence
  Description of Artificial Sequence: Synthetic oligonucleotide
  Antisense strand to SEQ ID NO: 1890700
ucacaucucauuauucuuu

SEQ ID NO: 1890702 - RNA, 19 nt, Artificial Sequence
  Description of Artificial Sequence: Synthetic oligonucleotide
  Sense strand starting at position 3951 of SEQ ID NO: 1879208
ggaauugacucugcuguca

SEQ ID NO: 1890703 - RNA, 19 nt, Artificial Sequence
  Description of Artificial Sequence: Synthetic oligonucleotide
  Antisense strand to SEQ ID NO: 1890702
ugacagcagagucaauucc

SEQ ID NO: 1890704 - RNA, 19 nt, Artificial Sequence
  Description of Artificial Sequence: Synthetic oligonucleotide
  Sense strand starting at position 3976 of SEQ ID NO: 1879208
ggguuucuggagugacaga

SEQ ID NO: 1890705 - RNA, 19 nt, Artificial Sequence
  Description of Artificial Sequence: Synthetic oligonucleotide
  Antisense strand to SEQ ID NO: 1890704
ucugucacuccagaaaccc

SEQ ID NO: 1890706 - RNA, 19 nt, Artificial Sequence
  Description of Artificial Sequence: Synthetic oligonucleotide
  Sense strand starting at position 3977 of SEQ ID NO: 1879208
gguuucuggagugacagau

SEQ ID NO: 1890707 - RNA, 19 nt, Artificial Sequence
  Description of Artificial Sequence: Synthetic oligonucleotide
  Antisense strand to SEQ ID NO: 1890706
aucugucacuccagaaacc

SEQ ID NO: 1890708 - RNA, 19 nt, Artificial Sequence
  Description of Artificial Sequence: Synthetic oligonucleotide
  Sense strand starting at position 199 of SEQ ID NO: 1879209
uacuauguguuugcaauga

SEQ ID NO: 1890709 - RNA, 19 nt, Artificial Sequence
  Description of Artificial Sequence: Synthetic oligonucleotide
  Antisense strand to SEQ ID NO: 1890708
ucauugcaaacacauagua

SEQ ID NO: 1890710 - RNA, 19 nt, Artificial Sequence
  Description of Artificial Sequence: Synthetic oligonucleotide
  Sense strand starting at position 203 of SEQ ID NO: 1879209
auguguuugcaaugacuaa

SEQ ID NO: 1890711 - RNA, 19 nt, Artificial Sequence
  Description of Artificial Sequence: Synthetic oligonucleotide
  Antisense strand to SEQ ID NO: 1890710
uuagucauugcaaacacau

SEQ ID NO: 1890712 - RNA, 19 nt, Artificial Sequence
  Description of Artificial Sequence: Synthetic oligonucleotide
  Sense strand starting at position 347 of SEQ ID NO: 1879209
ggguaaauauguucaaagg

SEQ ID NO: 1890713 - RNA, 19 nt, Artificial Sequence
  Description of Artificial Sequence: Synthetic oligonucleotide
  Antisense strand to SEQ ID NO: 1890712
ccuuugaacauauuuaccc

SEQ ID NO: 1890714 - RNA, 19 nt, Artificial Sequence
  Description of Artificial Sequence: Synthetic oligonucleotide
  Sense strand starting at position 379 of SEQ ID NO: 1879209
aaagcaaacuguuuagagu

SEQ ID NO: 1890715 - RNA, 19 nt, Artificial Sequence
  Description of Artificial Sequence: Synthetic oligonucleotide
  Antisense strand to SEQ ID NO: 1890714
acucuaaacaguuugcuuu

SEQ ID NO: 1890716 - RNA, 19 nt, Artificial Sequence
  Description of Artificial Sequence: Synthetic oligonucleotide
  Sense strand starting at position 463 of SEQ ID NO: 1879209
cucuuaaccugagucuuag

SEQ ID NO: 1890717 - RNA, 19 nt, Artificial Sequence
  Description of Artificial Sequence: Synthetic oligonucleotide
  Antisense strand to SEQ ID NO: 1890716
cuaagacucagguuaagag

SEQ ID NO: 1890718 - RNA, 19 nt, Artificial Sequence
  Description of Artificial Sequence: Synthetic oligonucleotide
  Sense strand starting at position 582 of SEQ ID NO: 1879209
acaaauguagcugguacua

SEQ ID NO: 1890719 - RNA, 19 nt, Artificial Sequence
  Description of Artificial Sequence: Synthetic oligonucleotide
  Antisense strand to SEQ ID NO: 1890718
uaguaccagcuacauuugu

SEQ ID NO: 1890720 - RNA, 19 nt, Artificial Sequence
  Description of Artificial Sequence: Synthetic oligonucleotide
  Sense strand starting at position 866 of SEQ ID NO: 1879209
uugggauuauaggcaaaug

SEQ ID NO: 1890721 - RNA, 19 nt, Artificial Sequence
  Description of Artificial Sequence: Synthetic oligonucleotide
  Antisense strand to SEQ ID NO: 1890720
cauuugccuauaaucccaa

SEQ ID NO: 1890722 - RNA, 19 nt, Artificial Sequence
  Description of Artificial Sequence: Synthetic oligonucleotide
  Sense strand starting at position 1024 of SEQ ID NO: 1879209
cuaaucaggcccugaguua

SEQ ID NO: 1890723 - RNA, 19 nt, Artificial Sequence
  Description of Artificial Sequence: Synthetic oligonucleotide
  Antisense strand to SEQ ID NO: 1890722
uaacucagggccugauuag

SEQ ID NO: 1890724 - RNA, 19 nt, Artificial Sequence
  Description of Artificial Sequence: Synthetic oligonucleotide
  Sense strand starting at position 1036 of SEQ ID NO: 1879209
ugaguuagcuguuuccaag

SEQ ID NO: 1890725 - RNA, 19 nt, Artificial Sequence
  Description of Artificial Sequence: Synthetic oligonucleotide
  Antisense strand to SEQ ID NO: 1890724
cuuggaaacagcuaacuca

SEQ ID NO: 1890726 - RNA, 19 nt, Artificial Sequence
  Description of Artificial Sequence: Synthetic oligonucleotide
  Sense strand starting at position 1042 of SEQ ID NO: 1879209
agcuguuuccaagaagcuu

SEQ ID NO: 1890727 - RNA, 19 nt, Artificial Sequence
  Description of Artificial Sequence: Synthetic oligonucleotide
  Antisense strand to SEQ ID NO: 1890726
aagcuucuuggaaacagcu

SEQ ID NO: 1890728 - RNA, 19 nt, Artificial Sequence
  Description of Artificial Sequence: Synthetic oligonucleotide
  Sense strand starting at position 1164 of SEQ ID NO: 1879209
ggacaagcuuccuugagcu

SEQ ID NO: 1890729 - RNA, 19 nt, Artificial Sequence
  Description of Artificial Sequence: Synthetic oligonucleotide
  Antisense strand to SEQ ID NO: 1890728
agcucaaggaagcuugucc

SEQ ID NO: 1890730 - RNA, 19 nt, Artificial Sequence
  Description of Artificial Sequence: Synthetic oligonucleotide
  Sense strand starting at position 1174 of SEQ ID NO: 1879209
ccuugagcuccugacuuua

SEQ ID NO: 1890731 - RNA, 19 nt, Artificial Sequence
  Description of Artificial Sequence: Synthetic oligonucleotide
  Antisense strand to SEQ ID NO: 1890730
uaaagucaggagcucaagg

SEQ ID NO: 1890732 - RNA, 19 nt, Artificial Sequence
  Description of Artificial Sequence: Synthetic oligonucleotide
  Sense strand starting at position 1176 of SEQ ID NO: 1879209
uugagcuccugacuuuaga

SEQ ID NO: 1890733 - RNA, 19 nt, Artificial Sequence
  Description of Artificial Sequence: Synthetic oligonucleotide
  Antisense strand to SEQ ID NO: 1890732
ucuaaagucaggagcucaa

SEQ ID NO: 1890734 - RNA, 19 nt, Artificial Sequence
  Description of Artificial Sequence: Synthetic oligonucleotide
  Sense strand starting at position 1284 of SEQ ID NO: 1879209
uacaguacugucgagguuu

SEQ ID NO: 1890735 - RNA, 19 nt, Artificial Sequence
  Description of Artificial Sequence: Synthetic oligonucleotide
  Antisense strand to SEQ ID NO: 1890734
aaaccucgacaguacugua

SEQ ID NO: 1890736 - RNA, 19 nt, Artificial Sequence
  Description of Artificial Sequence: Synthetic oligonucleotide
  Sense strand starting at position 1370 of SEQ ID NO: 1879209
cuuauaagaaucggugcua

SEQ ID NO: 1890737 - RNA, 19 nt, Artificial Sequence
  Description of Artificial Sequence: Synthetic oligonucleotide
  Antisense strand to SEQ ID NO: 1890736
uagcaccgauucuuauaag

SEQ ID NO: 1890738 - RNA, 19 nt, Artificial Sequence
  Description of Artificial Sequence: Synthetic oligonucleotide
  Sense strand starting at position 1371 of SEQ ID NO: 1879209
uuauaagaaucggugcuaa

SEQ ID NO: 1890739 - RNA, 19 nt, Artificial Sequence
  Description of Artificial Sequence: Synthetic oligonucleotide
  Antisense strand to SEQ ID NO: 1890738
uuagcaccgauucuuauaa

SEQ ID NO: 1890740 - RNA, 19 nt, Artificial Sequence
  Description of Artificial Sequence: Synthetic oligonucleotide
  Sense strand starting at position 1389 of SEQ ID NO: 1879209
aggguaugugccuaccaca

SEQ ID NO: 1890741 - RNA, 19 nt, Artificial Sequence
  Description of Artificial Sequence: Synthetic oligonucleotide
  Antisense strand to SEQ ID NO: 1890740
ugugguaggcacauacccu

SEQ ID NO: 1890742 - RNA, 19 nt, Artificial Sequence
  Description of Artificial Sequence: Synthetic oligonucleotide
  Sense strand starting at position 1411 of SEQ ID NO: 1879209
cagcuuguagauuaaugaa

SEQ ID NO: 1890743 - RNA, 19 nt, Artificial Sequence
  Description of Artificial Sequence: Synthetic oligonucleotide
  Antisense strand to SEQ ID NO: 1890742
uucauuaaucuacaagcug

SEQ ID NO: 1890744 - RNA, 19 nt, Artificial Sequence
  Description of Artificial Sequence: Synthetic oligonucleotide
  Sense strand starting at position 1614 of SEQ ID NO: 1879209
cugugcuaaucccuuuaga

SEQ ID NO: 1890745 - RNA, 19 nt, Artificial Sequence
  Description of Artificial Sequence: Synthetic oligonucleotide
  Antisense strand to SEQ ID NO: 1890744
ucuaaagggauuagcacag

SEQ ID NO: 1890746 - RNA, 19 nt, Artificial Sequence
  Description of Artificial Sequence: Synthetic oligonucleotide
  Sense strand starting at position 1844 of SEQ ID NO: 1879209
aggacugggcaccgugaua

SEQ ID NO: 1890747 - RNA, 19 nt, Artificial Sequence
  Description of Artificial Sequence: Synthetic oligonucleotide
  Antisense strand to SEQ ID NO: 1890746
uaucacggugcccaguccu

SEQ ID NO: 1890748 - RNA, 19 nt, Artificial Sequence
  Description of Artificial Sequence: Synthetic oligonucleotide
  Sense strand starting at position 2301 of SEQ ID NO: 1879209
aaguauugcggccaucaca

SEQ ID NO: 1890749 - RNA, 19 nt, Artificial Sequence
  Description of Artificial Sequence: Synthetic oligonucleotide
  Antisense strand to SEQ ID NO: 1890748
ugugauggccgcaauacuu

SEQ ID NO: 1890750 - RNA, 19 nt, Artificial Sequence
  Description of Artificial Sequence: Synthetic oligonucleotide
  Sense strand starting at position 2419 of SEQ ID NO: 1879209
auucgauuuccauguguau

SEQ ID NO: 1890751 - RNA, 19 nt, Artificial Sequence
  Description of Artificial Sequence: Synthetic oligonucleotide
  Antisense strand to SEQ ID NO: 1890750
auacacauggaaaucgaau

SEQ ID NO: 1890752 - RNA, 19 nt, Artificial Sequence
  Description of Artificial Sequence: Synthetic oligonucleotide
  Sense strand starting at position 2437 of SEQ ID NO: 1879209
uggauuuguuucuacauag

SEQ ID NO: 1890753 - RNA, 19 nt, Artificial Sequence
  Description of Artificial Sequence: Synthetic oligonucleotide
  Antisense strand to SEQ ID NO: 1890752
cuauguagaaacaaaucca

SEQ ID NO: 1890754 - RNA, 19 nt, Artificial Sequence
  Description of Artificial Sequence: Synthetic oligonucleotide
  Sense strand starting at position 2447 of SEQ ID NO: 1879209
ucuacauagcugugguaaa

SEQ ID NO: 1890755 - RNA, 19 nt, Artificial Sequence
  Description of Artificial Sequence: Synthetic oligonucleotide
  Antisense strand to SEQ ID NO: 1890754
uuuaccacagcuauguaga

SEQ ID NO: 1890756 - RNA, 19 nt, Artificial Sequence
  Description of Artificial Sequence: Synthetic oligonucleotide
  Sense strand starting at position 2478 of SEQ ID NO: 1879209
aacugaauccaggguuguu

SEQ ID NO: 1890757 - RNA, 19 nt, Artificial Sequence
  Description of Artificial Sequence: Synthetic oligonucleotide
  Antisense strand to SEQ ID NO: 1890756
aacaacccuggauucaguu

SEQ ID NO: 1890758 - RNA, 19 nt, Artificial Sequence
  Description of Artificial Sequence: Synthetic oligonucleotide
  Sense strand starting at position 3002 of SEQ ID NO: 1879209
cccauucuuguguauaaag

SEQ ID NO: 1890759 - RNA, 19 nt, Artificial Sequence
  Description of Artificial Sequence: Synthetic oligonucleotide
  Antisense strand to SEQ ID NO: 1890758
cuuuauacacaagaauggg

SEQ ID NO: 1890760 - RNA, 19 nt, Artificial Sequence
  Description of Artificial Sequence: Synthetic oligonucleotide
  Sense strand starting at position 3034 of SEQ ID NO: 1879209
gagaucaguuuccuuaggu

SEQ ID NO: 1890761 - RNA, 19 nt, Artificial Sequence
  Description of Artificial Sequence: Synthetic oligonucleotide
  Antisense strand to SEQ ID NO: 1890760
accuaaggaaacugaucuc

SEQ ID NO: 1890762 - RNA, 19 nt, Artificial Sequence
  Description of Artificial Sequence: Synthetic oligonucleotide
  Sense strand starting at position 3035 of SEQ ID NO: 1879209
agaucaguuuccuuagguu

SEQ ID NO: 1890763 - RNA, 19 nt, Artificial Sequence
  Description of Artificial Sequence: Synthetic oligonucleotide
  Antisense strand to SEQ ID NO: 1890762
aaccuaaggaaacugaucu

SEQ ID NO: 1890764 - RNA, 19 nt, Artificial Sequence
  Description of Artificial Sequence: Synthetic oligonucleotide
  Sense strand starting at position 3067 of SEQ ID NO: 1879209
ugaaacugcuaagucagaa

SEQ ID NO: 1890765 - RNA, 19 nt, Artificial Sequence
  Description of Artificial Sequence: Synthetic oligonucleotide
  Antisense strand to SEQ ID NO: 1890764
uucugacuuagcaguuuca

SEQ ID NO: 1890766 - RNA, 19 nt, Artificial Sequence
  Description of Artificial Sequence: Synthetic oligonucleotide
  Sense strand starting at position 3105 of SEQ ID NO: 1879209
ucaguauuauugccaaaug

SEQ ID NO: 1890767 - RNA, 19 nt, Artificial Sequence
  Description of Artificial Sequence: Synthetic oligonucleotide
  Antisense strand to SEQ ID NO: 1890766
cauuuggcaauaauacuga

SEQ ID NO: 1890768 - RNA, 19 nt, Artificial Sequence
  Description of Artificial Sequence: Synthetic oligonucleotide
  Sense strand starting at position 3560 of SEQ ID NO: 1879209
uucugagagugucuacauu

SEQ ID NO: 1890769 - RNA, 19 nt, Artificial Sequence
  Description of Artificial Sequence: Synthetic oligonucleotide
  Antisense strand to SEQ ID NO: 1890768
aauguagacacucucagaa

SEQ ID NO: 1890770 - RNA, 19 nt, Artificial Sequence
  Description of Artificial Sequence: Synthetic oligonucleotide
  Sense strand starting at position 3584 of SEQ ID NO: 1879209
gggaucagagcuugaaguu

SEQ ID NO: 1890771 - RNA, 19 nt, Artificial Sequence
  Description of Artificial Sequence: Synthetic oligonucleotide
  Antisense strand to SEQ ID NO: 1890770
aacuucaagcucugauccc

SEQ ID NO: 1890772 - RNA, 19 nt, Artificial Sequence
  Description of Artificial Sequence: Synthetic oligonucleotide
  Sense strand starting at position 3585 of SEQ ID NO: 1879209
ggaucagagcuugaaguug

SEQ ID NO: 1890773 - RNA, 19 nt, Artificial Sequence
  Description of Artificial Sequence: Synthetic oligonucleotide
  Antisense strand to SEQ ID NO: 1890772
caacuucaagcucugaucc

SEQ ID NO: 1890774 - RNA, 19 nt, Artificial Sequence
  Description of Artificial Sequence: Synthetic oligonucleotide
  Sense strand starting at position 3648 of SEQ ID NO: 1879209
gaagauucucacggguuag

SEQ ID NO: 1890775 - RNA, 19 nt, Artificial Sequence
  Description of Artificial Sequence: Synthetic oligonucleotide
  Antisense strand to SEQ ID NO: 1890774
cuaacccgugagaaucuuc

SEQ ID NO: 1890776 - RNA, 19 nt, Artificial Sequence
  Description of Artificial Sequence: Synthetic oligonucleotide
  Sense strand starting at position 3773 of SEQ ID NO: 1879209
aggcuagugagacagaguu

SEQ ID NO: 1890777 - RNA, 19 nt, Artificial Sequence
  Description of Artificial Sequence: Synthetic oligonucleotide
  Antisense strand to SEQ ID NO: 1890776
aacucugucucacuagccu

SEQ ID NO: 1890778 - RNA, 19 nt, Artificial Sequence
  Description of Artificial Sequence: Synthetic oligonucleotide
  Sense strand starting at position 3859 of SEQ ID NO: 1879209
augacaagguaauaaagaa

SEQ ID NO: 1890779 - RNA, 19 nt, Artificial Sequence
  Description of Artificial Sequence: Synthetic oligonucleotide
  Antisense strand to SEQ ID NO: 1890778
uucuuuauuaccuugucau

SEQ ID NO: 1890780 - RNA, 19 nt, Artificial Sequence
  Description of Artificial Sequence: Synthetic oligonucleotide
  Sense strand starting at position 3872 of SEQ ID NO: 1879209
aaagaauaaugagauguga

SEQ ID NO: 1890781 - RNA, 19 nt, Artificial Sequence
  Description of Artificial Sequence: Synthetic oligonucleotide
  Antisense strand to SEQ ID NO: 1890780
ucacaucucauuauucuuu

SEQ ID NO: 1890782 - RNA, 19 nt, Artificial Sequence
  Description of Artificial Sequence: Synthetic oligonucleotide
  Sense strand starting at position 3943 of SEQ ID NO: 1879209
ggaauugacucugcuguca

SEQ ID NO: 1890783 - RNA, 19 nt, Artificial Sequence
  Description of Artificial Sequence: Synthetic oligonucleotide
  Antisense strand to SEQ ID NO: 1890782
ugacagcagagucaauucc

SEQ ID NO: 1890784 - RNA, 19 nt, Artificial Sequence
  Description of Artificial Sequence: Synthetic oligonucleotide
  Sense strand starting at position 3968 of SEQ ID NO: 1879209
ggguuucuggagugacaga

SEQ ID NO: 1890785 - RNA, 19 nt, Artificial Sequence
  Description of Artificial Sequence: Synthetic oligonucleotide
  Antisense strand to SEQ ID NO: 1890784
ucugucacuccagaaaccc

SEQ ID NO: 1890786 - RNA, 19 nt, Artificial Sequence
  Description of Artificial Sequence: Synthetic oligonucleotide
  Sense strand starting at position 3969 of SEQ ID NO: 1879209
gguuucuggagugacagau

SEQ ID NO: 1890787 - RNA, 19 nt, Artificial Sequence
  Description of Artificial Sequence: Synthetic oligonucleotide
  Antisense strand to SEQ ID NO: 1890786
aucugucacuccagaaacc

SEQ ID NO: 1890788 - RNA, 19 nt, Artificial Sequence
  Description of Artificial Sequence: Synthetic oligonucleotide
  Sense strand starting at position 18 of SEQ ID NO: 1879207
ggugaaagcauaggacauu

SEQ ID NO: 1890789 - RNA, 19 nt, Artificial Sequence
  Description of Artificial Sequence: Synthetic oligonucleotide
  Antisense strand to SEQ ID NO: 1890788
aauguccuaugcuuucacc

SEQ ID NO: 1890790 - RNA, 19 nt, Artificial Sequence
  Description of Artificial Sequence: Synthetic oligonucleotide
  Sense strand starting at position 19 of SEQ ID NO: 1879207
gugaaagcauaggacauuu

SEQ ID NO: 1890791 - RNA, 19 nt, Artificial Sequence
  Description of Artificial Sequence: Synthetic oligonucleotide
  Antisense strand to SEQ ID NO: 1890790
aaauguccuaugcuuucac

SEQ ID NO: 1890792 - RNA, 19 nt, Artificial Sequence
  Description of Artificial Sequence: Synthetic oligonucleotide
  Sense strand starting at position 223 of SEQ ID NO: 1879207
uacuauguguuugcaauga

SEQ ID NO: 1890793 - RNA, 19 nt, Artificial Sequence
  Description of Artificial Sequence: Synthetic oligonucleotide
  Antisense strand to SEQ ID NO: 1890792
ucauugcaaacacauagua

SEQ ID NO: 1890794 - RNA, 19 nt, Artificial Sequence
  Description of Artificial Sequence: Synthetic oligonucleotide
  Sense strand starting at position 227 of SEQ ID NO: 1879207
auguguuugcaaugacuaa

SEQ ID NO: 1890795 - RNA, 19 nt, Artificial Sequence
  Description of Artificial Sequence: Synthetic oligonucleotide
  Antisense strand to SEQ ID NO: 1890794
uuagucauugcaaacacau

SEQ ID NO: 1890796 - RNA, 19 nt, Artificial Sequence
  Description of Artificial Sequence: Synthetic oligonucleotide
  Sense strand starting at position 371 of SEQ ID NO: 1879207
ggguaaauauguucaaagg

SEQ ID NO: 1890797 - RNA, 19 nt, Artificial Sequence
  Description of Artificial Sequence: Synthetic oligonucleotide
  Antisense strand to SEQ ID NO: 1890796
ccuuugaacauauuuaccc

SEQ ID NO: 1890798 - RNA, 19 nt, Artificial Sequence
  Description of Artificial Sequence: Synthetic oligonucleotide
  Sense strand starting at position 403 of SEQ ID NO: 1879207
aaagcaaacuguuuagagu

SEQ ID NO: 1890799 - RNA, 19 nt, Artificial Sequence
  Description of Artificial Sequence: Synthetic oligonucleotide
  Antisense strand to SEQ ID NO: 1890798
acucuaaacaguuugcuuu

SEQ ID NO: 1890800 - RNA, 19 nt, Artificial Sequence
  Description of Artificial Sequence: Synthetic oligonucleotide
  Sense strand starting at position 487 of SEQ ID NO: 1879207
cucuuaaccugagucuuag

SEQ ID NO: 1890801 - RNA, 19 nt, Artificial Sequence
  Description of Artificial Sequence: Synthetic oligonucleotide
  Antisense strand to SEQ ID NO: 1890800
cuaagacucagguuaagag

SEQ ID NO: 1890802 - RNA, 19 nt, Artificial Sequence
  Description of Artificial Sequence: Synthetic oligonucleotide
  Sense strand starting at position 606 of SEQ ID NO: 1879207
acaaauguagcugguacua

SEQ ID NO: 1890803 - RNA, 19 nt, Artificial Sequence
  Description of Artificial Sequence: Synthetic oligonucleotide
  Antisense strand to SEQ ID NO: 1890802
uaguaccagcuacauuugu

SEQ ID NO: 1890804 - RNA, 19 nt, Artificial Sequence
  Description of Artificial Sequence: Synthetic oligonucleotide
  Sense strand starting at position 890 of SEQ ID NO: 1879207
uugggauuauaggcaaaug

SEQ ID NO: 1890805 - RNA, 19 nt, Artificial Sequence
  Description of Artificial Sequence: Synthetic oligonucleotide
  Antisense strand to SEQ ID NO: 1890804
cauuugccuauaaucccaa

SEQ ID NO: 1890806 - RNA, 19 nt, Artificial Sequence
  Description of Artificial Sequence: Synthetic oligonucleotide
  Sense strand starting at position 1048 of SEQ ID NO: 1879207
cuaaucaggcccugaguua

SEQ ID NO: 1890807 - RNA, 19 nt, Artificial Sequence
  Description of Artificial Sequence: Synthetic oligonucleotide
  Antisense strand to SEQ ID NO: 1890806
uaacucagggccugauuag

SEQ ID NO: 1890808 - RNA, 19 nt, Artificial Sequence
  Description of Artificial Sequence: Synthetic oligonucleotide
  Sense strand starting at position 1060 of SEQ ID NO: 1879207
ugaguuagcuguuuccaag

SEQ ID NO: 1890809 - RNA, 19 nt, Artificial Sequence
  Description of Artificial Sequence: Synthetic oligonucleotide
  Antisense strand to SEQ ID NO: 1890808
cuuggaaacagcuaacuca

SEQ ID NO: 1890810 - RNA, 19 nt, Artificial Sequence
  Description of Artificial Sequence: Synthetic oligonucleotide
  Sense strand starting at position 1066 of SEQ ID NO: 1879207
agcuguuuccaagaagcuu

SEQ ID NO: 1890811 - RNA, 19 nt, Artificial Sequence
  Description of Artificial Sequence: Synthetic oligonucleotide
  Antisense strand to SEQ ID NO: 1890810
aagcuucuuggaaacagcu

SEQ ID NO: 1890812 - RNA, 19 nt, Artificial Sequence
  Description of Artificial Sequence: Synthetic oligonucleotide
  Sense strand starting at position 1188 of SEQ ID NO: 1879207
ggacaagcuuccuugagcu

SEQ ID NO: 1890813 - RNA, 19 nt, Artificial Sequence
  Description of Artificial Sequence: Synthetic oligonucleotide
  Antisense strand to SEQ ID NO: 1890812
agcucaaggaagcuugucc

SEQ ID NO: 1890814 - RNA, 19 nt, Artificial Sequence
  Description of Artificial Sequence: Synthetic oligonucleotide
  Sense strand starting at position 1198 of SEQ ID NO: 1879207
ccuugagcuccugacuuua

SEQ ID NO: 1890815 - RNA, 19 nt, Artificial Sequence
  Description of Artificial Sequence: Synthetic oligonucleotide
  Antisense strand to SEQ ID NO: 1890814
uaaagucaggagcucaagg

SEQ ID NO: 1890816 - RNA, 19 nt, Artificial Sequence
  Description of Artificial Sequence: Synthetic oligonucleotide
  Sense strand starting at position 1200 of SEQ ID NO: 1879207
uugagcuccugacuuuaga

SEQ ID NO: 1890817 - RNA, 19 nt, Artificial Sequence
  Description of Artificial Sequence: Synthetic oligonucleotide
  Antisense strand to SEQ ID NO: 1890816
ucuaaagucaggagcucaa

SEQ ID NO: 1890818 - RNA, 19 nt, Artificial Sequence
  Description of Artificial Sequence: Synthetic oligonucleotide
  Sense strand starting at position 1308 of SEQ ID NO: 1879207
uacaguacugucgagguuu

SEQ ID NO: 1890819 - RNA, 19 nt, Artificial Sequence
  Description of Artificial Sequence: Synthetic oligonucleotide
  Antisense strand to SEQ ID NO: 1890818
aaaccucgacaguacugua
